United States Patent Application Publication US 2020/0163878 A1 - sequence listing, part 43

SEQ ID NO: 161335 - RNA, 1707 nt, Artificial Sequence
  derived and/or modified CDS sequence (opt4) from hemagglutinin__InfluenzaA__ABI36450
auggagaagaucgugcugcugcuggccaucgugagccuggugaagagcgaccagaucugcaucggcuaccacgccaacaacagcaccgagcagguggacaccaucauggagaagaacgugaccgugacccacgcccaggacauccugggcaagacccacaacggcaagcugugcgaccuggacggcgugaagccccugauccugagagacugcagcguggccggcuggcugcugggcaaccccaugugcgacgaguucaucaacgugcccgaguggagcuacaucguggagaaggccaaccccaccaacgaccugugcuaccccggcagcuucaacgacuacgaggagcugaagcaccugcugagcagaaucaaccacuucgagaagauccagaucauccccaagagcagcuggagcgaccacgaggccagcagcggcgugagcagcgccugccccuaccugggcagccccagcuucuucagaaacgugguguggcugaucaagaagaacagcaccuaccccaccaucaagaccagcuacaacaacaccaaccaggaggaccugcuggugcuguggggcauccaccacagcaacgacgccgccgagcagaccagacuguaccagaaccccaccaccuacaucagcaucggcaccagcacccugaaccagagacuggugcccaagaucgccaccagaagcaaggugaacggccagagcggcagaauggaguucuucuggaccauccugaagcccaacgacgccaucaacuucgagagcaacggcaacuucaucgcccccgaguacgccuacaagaucgugaagaagggcgacagcgccaucaugaagagcgagcuggaguacggcaacugcaacaccaagugccagacccccaugggcgccaucaacagcagcaugcccuuccacaacauccacccccugaccaucggcgagugccccaaguacgugaagagcaacagacuggugcuggccaccggccugagaaacagcccccagagagagagcagaagaaagaagagaggccuguucggcgccaucgccggcuucaucgagggcggcuggcagggcaugguggacggcugguacggcuaccaccacagcaacgagcagggcagcggcuacgccgccgacaaggagagcacccagaaggccaucgacggcgugaccaacaaggugaacagcaucaucgacaagaugaacacccaguucgaggccgugggcagagaguucaacaaccuggagagaagaaucgagaaccugaacaagaagauggaggacggcuuccuggacguguggaccuacaacgccgagcugcuggugcugauggagaacgagagaacccuggacuuccacgacagcaacgugaagaaccuguacgacaaggugagacugcagcugagagacaacgccaaggagcugggcaacggcugcuucgaguucuaccacaagugcgacaacgagugcauggagagcaucagaaacggcaccuacaacuacccccaguacagcgaggaggccagacugaagagagaggagaucagcggcgugaagcuggagagcaucggcaccuaccagauccugagcaucuacagcaccguggccagcagccuggcccuggccaucaugaucgccggccugagccuguggaugugcagcaacggcagccugcagugcagaaucugcaucuga

SEQ ID NO: 161336 - RNA, 1707 nt, Artificial Sequence
  derived and/or modified CDS sequence (opt4) from hemagglutinin__InfluenzaA__ABI49396
auggagaagaucgugcugcugcuggccaucgugagccuggugaagagcgaccagaucugcaucggcuaccacgccaacaacagcaccgagcagguggacaccaucauggagaagaacgugaccgugacccacgcccaggacauccugggcaagacccacaacggcaagcugugcgaccuggacggcgugaagccccugauccugagagacugcagcguggccggcuggcugcugggcaaccccaugugcgacgaguucaucaacgugcccgaguggagcuacaucguggagaaggccaaccccaccaacgaccugugcuaccccggcagcuucaacgacuacgaggagcugaagcaccugcugagcagaaucaaccacuucgagaagauccagaucauccccaagagcagcuggagcgaccacgaggccagcagcggcgugagcagcgccugccccuaccugggcagccccagcuucuucagaaacgugguguggcugaucaagaagaacagcaccuaccccaccaucaagaagagcuacaacaacaccaaccaggaggaccugcuggugcuguggggcauccaccaccccaacgacgccgccgagcagaccagacuguaccagaaccccaccaccuacaucagcaucggcaccagcacccugaaccagagacuggugcccaagaucgccaccagaagcaaggugaacggccagagcggcagaauggaguucuucugggccauccugaagcccaacgacgccaucaacuucgagagcaacggcaacuucaucgcccccgaguacgccuacaagaucgugaagaagggcgacagcgccaucaugaagagcgagcuggaguacggcaacugcaacaccaagugccagacccccaugggcgccaucaacagcagcaugcccuuccacaacauccacccccugaccaucggcgagugccccaaguacgugaagagcaacagacuggugcuggccaccggccugagaaacagcccccagagagagagcagaagaaagaagagaggccuguucggcgccaucgccggcuucaucgagggcggcuggcagggcaugguggacggcugguacggcuaccaccacagcaacgagcagggcagcggcuacgccgccgacaaggagagcacccagaaggccaucgacggcgugaccaacaaggugaacagcaucaucgacaagaugaacacccaguucgaggccgugggcagagaguucaacaaccuggagagaagaaucgagaaccugaacaagaagauggaggacggcuuccuggacguguggaccuacaacgccgagcugcuggugcugauggagaacgagagaacccuggacuuccacgacagcaacgugaagaaccuguacgacaaggugagacugcagcugagagacaacgccaaggagcugggcaacggcugcuucgaguucuaccacaagugcgacaacgagugcauggagagcaucagaaacggcaccuacaacuacccccaguacagcgaggaggccagacugaagagagaggagaucagcggcgugaagcuggagagcaucggcaccuaccagauccugagcaucuacagcaccguggccagcagccuggcccuggccaucaugaucgccggccugagccuguggaugugcagcaacggcagccugcagugcagaaucugcaucuga

SEQ ID NO: 161337 - RNA, 1704 nt, Artificial Sequence
  derived and/or modified CDS sequence (opt4) from hemagglutinin__InfluenzaA__ABI85000
augaacacccagauccuggccuucaucgccugcaugcugaucggcaccaagggcgacaagaucugccugggccaccacgccguggccaacggcaccaaggugaacacccugaccgagagaggcaucgagguggugaacgccaccgagaccguggagaccgugaacaucaagaagaucugcacccagggcaagagacccaccgaccugggccagugcggccugcugggcacccugaucggccccccccagugcgaccaguuccuggaguucgacgccaaccugaucaucgagagaagagagggcaccgacgugugcuaccccggcaaguucaccaacgaggagagccugagacagauccugagaggcagcggcggcaucgacaaggagagcaugggcuucaccuacagcggcaucagaaccaacggcgccaccagcgccugcagaagaagcggcagcagcuucuacgccgagaugaaguggcugcugagcaacagcgacaacgccgccuucccccagaugaccaagagcuacagaaaccccagaaacaagcccgcccugaucaucuggggcgugcaccacagcggcagcgccaccgagcagaccaagcuguacggcagcggcaacaagcugaucaccgugggcagcagcaaguaccagcagagcuucacccccagccccggcgccagaccccaggugaacggccagagcggcagaaucgacuuccacuggcugcugcuggaccccaacgacaccgugaccuucaccuucaacggcgccuucaucgcccccgacagagccagcuucuucagaggcgagagccugggcgugcagagcgacgugccccuggacagcggcugcgagggcgacugcuuccacagcggcggcaccaucgugagcagccugcccuuccagaacaucaaccccagaaccgugggcaagugccccagauacgugaagcagaccagccugcugcuggccaccggcaugagaaacgugcccgagaaccccaagcaggccuaccagaagagaaugaccagaggccuguucggcgccaucgccggcuucaucgagaacggcugggagggccugaucgacggcugguacggcuucagacaccagaacgcccagggcgagggcaccgccgccgacuacaagagcacccagagcgccaucgaccagaucaccggcaagcugaacagacugaucgacaagaccaaccagcaguucgagcugaucgacaacgaguucagcgagaucgagcagcagaucggcaacgugaucaacuggaccagagacagcaugaccgagguguggagcuacaacgccgagcugcugguggccauggagaaccagcacaccaucgaccuggccgacagcgagaugaacaagcuguacgagagagugagaaagcagcugagagagaacgccgaggaggacggcaccggcugcuucgagaucuuccacaagugcgacgaccagugcauggagagcaucagaaacaacaccuacgaccacacccaguacagaaccgagagccugcagaacagaauccagaucgaccccgugaagcugagcagcggcuacaaggacaucauccugugguucagcuucggcgccagcugcuuccugcugcuggccaucgccaugggccugguguucaucugcaucaagaacggcaacaugagaugcaccaucugcaucuga

SEQ ID NO: 161338 - RNA, 1701 nt, Artificial Sequence; identical to SEQ ID NO: 160890
  derived and/or modified CDS sequence (opt4) from hemagglutinin__InfluenzaA__ABI92291

SEQ ID NO: 161339 - RNA, 1701 nt, Artificial Sequence
  derived and/or modified CDS sequence (opt4) from hemagglutinin__InfluenzaA__ABI92302
augaaggccaagcugcuggugcugcugugcgcccugagcgccaccgacgccgacaccaucugcaucggcuaccacgccaacaacagcaccgacaccguggacaccgugcuggagaagaacgugaccgugacccacagcgugaaccugcuggaggacagccacaacggcaagcugugcagacugaagggcaucgccccccugcagcugggcaagugcagcaucgccggcuggauccugggcaaccccgagugcgagagccuguucagcaagaagagcuggagcuacaucgccgagacccccaacagcgagaacggcaccugcuaccccggcuacuucgccgacuacgaggagcugagagagcagcugagcagcgugagcagcuucgagagauucgagaucuuccccaaggagagcagcuggcccaagcacaacgugaccagaggcgugaccgccagcugcagccacaagggcaagagcagcuucuacagaaaccugcuguggcugaccgagaagaacggcagcuaccccaaccugagcaagagcuacgugaacaacaaggagaaggaggugcuggugcuguggggcgugcaccaccccagcaacaucgaggaccagaagaccaucuacagaaaggagaacgccuacgugagcguggugagcagccacuacaacagaagauucacccccgagaucgccaagagacccaaggugagagaccaggagggcagaaucaacuacuacuggacccugcuggagcccggcgacaccaucaucuucgaggccaacggcaaccugaucgcccccugguacgccuucgcccugagcagaggcuucggcagcggcaucaucaccagcaacgccagcauggacgagugcgacgccaagugccagaccccccagggcgccaucaacagcagccugcccuuccagaacgugcaccccgugaccaucggcgagugccccaaguacgugagaagcaccaagcugagaauggugaccggccugagaaacauccccagcauccagagcagaggccuguucggcgccaucgccggcuucaucgagggcggcuggaccggcaugaucgacggcugguacggcuaccaccaccagaacgagcagggcagcggcuacgccgccgaccagaagagcacccagaacgccaucaacggcaucaccaacaaggugaacagcgugaucgagaagaugaacauccaguucaccgccgugggcaaggaguucaacaagcuggagaagagaauggagaaccugaacaagaagguggacgacggcuuccuggacaucuggaccuacaacgccgagcugcuggugcugcuggagaacgagagaacccuggacuuccacgacagcaacgugaagaaccuguacgagaaggugaagagccagcugaagaacaacgccaaggagaucggcaacggcugcuucgaguucuaccacaagugcaacaacgagugcauggagagcgugaagaacggcaccuacgacuaccccaaguacagcgaggagagcaagcugaacagagagaagaucgacggcgugaagcuggagagcaugggcguguaccagauccuggccaucuacagcaccguggccagcagccuggugcugcuggugagccugggcgccaucagcuucuggaugugcagcaacggcagccugcagugcagaaucugcaucuga

SEQ ID NO: 161340 - RNA, 1701 nt, Artificial Sequence
  derived and/or modified CDS sequence (opt4) from hemagglutinin__InfluenzaA__ABI92313
augaaggccaagcugcuggugcugcugugcgccuucaccgccaccuacgccgacaccaucugcaucggcuaccacgccaacaacagcaccgacaccguggacaccgugcuggagaagaacgugaccgugacccacagcgugaaccugcuggaggacagccacaacggcaagcugugcagacugaagggcaccgccccccugcagcugggcaacugcagcguggccggcuggauccugggcaaccccgagugcgagagccuguucagcaaggagagcuggagcuacaucgccgagacccccaaccccgagaacggcaccugcuaccccggcuacuucgccgacuacgaggagcugagagagcagcugagcagcaucagcagcuucgagagauucgagaucuuccccaaggagagcagcuggcccaaccacaccgugaccaagggcgugaccgccagcugcagccacaacggcaagagcagcuucuacaagaaccugcuguggcugaccgagaagaacggccuguaccccaaccugagcaagagcuacgugaacaacaaggagaaggaggugcuggugcuguggggcgugcaccaccccagcaacaucggcgaccagagagccaucuaccacaccgagaacgccuacgugagcguggugagcagccacuacagcagaagauucacccccgagaucaccaagagacccaaggugagagaccaggagggcagaaucaacuacuacuggacccugcuggagcccggcgacaccaucaucuucgaggccaacggcaaccugaucgcccccugguacgccuucgcccugagcagaggcuucggcagcggcaucaucaccagcaacgccagcaugggcgagugcgacgccaagugccagaccccccagggcgccaucaacagcagccugcccuuccagaacgugcaccccgugaccaucggcgagugccccaaguacgugagaagcaccaagcugagaauggugaccggccugagaaacauccccagcauccagagcagaggccuguucggcgccaucgccggcuucaucgagggcggcuggaccggcaugaucgacggcugguacggcuaccaccaccagaacgagcagggcagcggcuacgccgccgaccagaagagcacccagaacgccaucgacggcaucaccaacaaggugaacagcgugaucgagaagaugaacacccaguucaccgccgugggcaaggaguucaacaagcuggagagaagaauggagaaccugaacaagaagguggacgacggcuuccuggacaucuggaccuacaacgccgagcugcuggugcugcuggagaacgagagaacccuggacuuccacgacagcaacgugaagaaccuguacgagaaggugaagaaccagcugaagaacaacgccaaggagaucggcaacggcugcuucgaguucuaccacaagugcaacaacgagugcauggagagcgugaagaacggcaccuacgacuaccccaaguacagcgaggagagcaagcugaacagagagaagaucgacggcgugaagcuggagagcaugggcguguaccacauccuggccaucuacagcaccguggccagcagccuggugcugcuggugagccugggcgccaucagcuucuggaugugcagcaacggcagccugcagugcagaaucugcaucuga

SEQ ID NO: 161341 - RNA, 1701 nt, Artificial Sequence
  derived and/or modified CDS sequence (opt4) from hemagglutinin__InfluenzaA__ABI92324
augaagaccaucaucgcccugagcuacauccugugccugguguucgcccagaagcugcccggcaacgacaacagcaccgccacccugugccugggccaccacgccgugcccaacggcacccuggugaagaccaucaccaacgaccagaucgaggugaccaacgccaccgagcuggugcagagcagcagcaccggcagaaucugcgacagcccccacagaauccuggacggcaagaacugcacccugaucgacgcccugcugggcgacccccacugcgacggcuuccagaacaaggagugggaccuguucguggagagaagcaaggccuacagcaacugcuaccccuacgacgugcccgacuacgccagccugagaagccugguggccagcagcggcacccuggaguucaucaacgaggacuucaacuggaccggcguggcccaggacggcaagagcuacgccugcaagagaggcagcgugaacagcuucuucagcagacugaacuggcugcacaagcuggaguacaaguaccccgcccugaacgugaccaugcccaacaacggcaaguucgacaagcuguacaucuggggcgugcaccaccccagcaccgacagcgaccagaccagccuguacgugagagccagcggcaaggugaccgugagcaccaagagaagccagcagaccgugauccccaacaucggcuucagacccugggugagaggccugagcagcagaaucagcaucuacuggaccaucgugaagcccggcgacauccugcugaucaacagcaccggcaaccugaucgcccccagaggcuacuucaagaucagaaacggcaagagcagcaucaugagaagcgacgcccccaucggcaacugcagcagcgagugcaucacccccaacggcagcauccccaacgacaagcccuuccagaacgugaacagaaucaccuacggcgccugccccagauacgugaagcagaacacccugaagcuggccaccggcaugagaaacgugcccgagaagcagaccagaggcaucuucggcgccaucgccggcuucaucgagaacggcugggagggcaugguggacggcugguacggcuucagacaccagaacagcgagggcaccggccaggccgccgaccugaagagcacccaggccgccaucgaccagaucaacggcaagcugaacagacugaucgagaagaccaacgagaaguuccaccagaucgagaaggaguucagcgagguggagggcagaauccaggaccuggagaaguacguggaggacaccaagaucgaccuguggagcuacaacgccggccugcugguggcccuggagaaccagcacaccaucgaccugaccgacagcgagaugaacaagcuguucgagagaaccagaaagcagcugagagagaacgccgaggacaugggcaacggcugcuucaagaucuaccacaagugcgacaacgccugcaucggcagcaucagaaacggcaccuacgaccacgacguguacagagacgaggcccugaacaacagauuccagaucaagggcguggagcugaagagcggcuacaaggacuggauccuguggaucagcuucgccaucagcugcuuccugcugugcguggugcugcugggcuucaucaugugggccugccagaagggcaacaucagaugcaacaucugcaucuga

SEQ ID NO: 161342 - RNA, 1701 nt, Artificial Sequence
  derived and/or modified CDS sequence (opt4) from hemagglutinin__InfluenzaA__ABI92335
augaagaccaucaucgcccugagcuacauccugugccugguguucgcccagaagcugcccggcaacgacaacagcaccgccacccugugccugggccaccacgccgugcccaacggcacccuggugaagaccaucaccaacgaccagaucgaggugaccaacgccaccgagcuggugcagagcagcagcaccagcagaaucugcgacagcccccaccagauccuggacggcgagaacugcacccugaucgacgcccugcugggcgacccccacugcgacggcuuccagaacaaggagugggaccuguucguggagagaagcaaggccuacagcaacugcuaccccuacgacgugcccgacuacgugagccugagaagccugguggccagcagcggcacccuggaguucaacaacgagagcuucaacuggaccggcguggcccagaacggcaccagcagcgccugcaagagaagaagcgacaagagcuucuucagcagacugaacuggcugcaccagcugaaguacaaguaccccgcccugaacgugaccaugcccaacaacgagaaguucgacaagcuguacaucuggggcgugcaccaccccggcaccgacagcgaccagaucagccuguacgcccaggccagcggcagagugaccgugagcaccaagagaagccagcagaccgugauccccaacaucggcagcagacccugggugagaggcgugagcagcagaaucagcaucuacuggaccaucgugaagcccggcgacauccugcugaucaacagcaccggcaaccugaucgcccccagaggcuacuucaagaucagaagcggcaagagcagcaucaugagaagcgacgcccccaucggcaagugcaacagcgagugcaucacccccaacggcagcauccccaacgacaagcccuuccagaacgugaacagaaucaccuacggcgccugccccagauacgugaagcagaacacccugaagcuggccaccggcaugagaaacgugcccgagaagcagaccagaggcaucuucggcgccaucgccggcuucaucgagaacggcugggagggcaugauggacggcugguacggcuucagacaccagaacagcgagggcaccggccaggccgccgaccugaagagcacccaggccgccaucaaccagaucaacggcaagcugaacagacugaucgagaagaccaacgagaaguuccaccagaucgagaaggaguucagcgagguggagggcagaauccaggaccuggagaaguacguggaggacaccaagaucgaccuguggagcuacaacgccgagcugcugguggcccuggagaaccagcacaccaucgaccugaccgacagcgagaugaacaagcuguucgagagaaccaagaagcagcugagagagaacgccgaggacaugggcaacggcugcuucaagaucuaccacaagugcgacaacgccugcaugggcagcaucagaaacggcaccuacgaccacgacguguacagagacgaggcccugaacaacagauuccagaucaagggcguggagcugaagagcggcuacaaggacuggauccuguggaucagcuucgccaucagcugcuuccugcugugcaucgugcugaugggcuucaucaugugggccugccagaagggcaacaucagaugcaacaucugcaucuga

SEQ ID NO: 161343 - RNA, 1701 nt, Artificial Sequence
  derived and/or modified CDS sequence (opt4) from hemagglutinin__InfluenzaA__ABI92346
augaagaccaucaucgcccugagcuacauccugugccugguguucgcccagaagcugcccggcaacgacaacagcaccgccacccugugccugggccaccacgccgugcccaacggcacccuggugaagaccaucaccaacgaccagaucgaggugaccaacgccaccgagcuggugcagagcagcagcaccggcagaaucugcgacagcccccaccagauccuggacggcgagaacugcacccugaucgacgcccugcugggcgacccccacugcgacggcuuccagaacaaggagugggaccuguucguggagagaagcaaggccuacagcaacugcuaccccuacgacgugcccgacuacgugagccugagaagccugguggccagcagcggcacccuggaguucaacaacgagagcuucaacuggaccggcguggcccagaacggcaccagcagcgccugcaagagaagaagcgacaagagcuucuucagcagacugaacuggcugcaccagcugaaguacaaguaccccgcccugaacgugaccaugcccaacaacgagaaguucgacaagcuguacaucuggggcgugcaccaccccggcaccgacagcgaccagaucagccuguacgcccaggccagcggcagagugaccgugagcaccaagagaagccagcagaccgugauccccaacaucggcagcagacccugggugagaggcgugagcagcagaaucagcaucuacuggaccaucgugaagcccggcgacauccugcugaucaacagcaccggcaaccugaucgcccccagaggcuacuucaagaucagaagcggcaagagcagcaucaugagaagcgacgcccccaucggcaagugcaacagcgagugcaucacccccaacggcagcauccccaacgacaagcccuuccagaacgugaacagaaucaccuacggcgccugccccagauacgugaagcagaacacccugaagcuggccaccggcaugagaaacgugcccgagaagcagaccagaggcaucuucggcgccaucgccggcuucaucgagaacggcugggagggcaugauggacggcugguacggcuucagacaccagaacagcgagggcaccggccaggccgccgaccugaagagcacccaggccgccaucaaccagaucaacggcaagcugaacagacugaucgagaagaccaacgagaaguuccaccagaucgagaaggaguucagcgagguggagggcagaauccaggaccuggagaaguacguggaggacaccaagaucgaccuguggagcuacaacgccgagcugcugguggcccuggagaaccagcacaccaucgaccugaccgacagcgagaugaacaagcuguucgagagaaccaagaagcagcugagagagaacgccgaggacaugggcaacggcugcuucaagaucuaccacaagugcgacaacgccugcaucggcagcaucagaaacggcaccuacgaccacgacguguacagagacgaggcccugaacaacagauuccacaucaagggcguggagcugaagagcggcuacaaggacugggugcuguggaucagcuucgccaucagcugcuuccugcugugcaucgugcugcugggcuucaucaugugggccugccagaagggcaacaucagaugcaacaucugcaucuga

SEQ ID NO: 161344 - RNA, 1701 nt, Artificial Sequence; identical to SEQ ID NO: 160342
  derived and/or modified CDS sequence (opt4) from hemagglutinin__InfluenzaA__ABI92357

SEQ ID NO: 161345 - RNA, 1701 nt, Artificial Sequence; identical to SEQ ID NO: 160342
  derived and/or modified CDS sequence (opt4) from hemagglutinin__InfluenzaA__ABI92368

SEQ ID NO: 161346 - RNA, 1698 nt, Artificial Sequence; identical to SEQ ID NO: 161264
  derived and/or modified CDS sequence (opt4) from hemagglutinin__InfluenzaA__ABI92379

SEQ ID NO: 161347 - RNA, 1701 nt, Artificial Sequence
  derived and/or modified CDS sequence (opt4) from hemagglutinin__InfluenzaA__ABI92390
augaagaccaucaucgccuucagcuacauccugugccugguguucgcccagaagcugcccggcaacgacaacagcaccgccacccugugccugggccaccacgccgugcccaacggcaccaucgugaagaccaucaccaacgaccagaucgaggugaccaacgccaccgagcuggugcagagcagcagcaccggcggcaucugcgacagcccccaccagauccuggacggcgagaacugcacccugaucgacgcccugcugggcgacccccagugcgacggcuuccagaacaagaagugggaccuguucguggagagaagcaaggccuacagcaacugcuaccccuacgacgugcccgacuacgccagccugagaagccugguggccagcagcggcacccuggaguucaacaacgagagcuucaacuggaccggcgugacccagaacggcaccagcagcgccugcaagagaagaagcaacaacagcuucuucagcagacugaacuggcugacccaccugaaguucaaguaccccgcccugaacgugaccaugcccaacaacgagaaguucgacaagcuguacaucuggggcgugcaccaccccggcaccgacaacgaccagaccagccuguacgcccaggccagcggcagaaucaccgugagcaccaagagaagccagcagaccgugacccccaacaucggcagcagacccagagugagagacauccccagcagaaucagcaucuacuggaccaucgugaagcccggcgacauccugcugaucaacagcaccggcaaccugaucgcccccagaggcuacuucaagaucagaagcggcaagagcagcaucaugagaagcgacgcccccaucggcaagugcaacagcgagugcaucacccccaacggcagcauccccaacgacaagcccuuccagaacgugaacagaaucaccuacggcgccugccccagauacgugaagcagaacacccugaagcuggccaccggcaugagaaacgugcccgagaagcagaccagaggcaucuucggcgccaucgccggcuucaucgagaacggcugggagggcaugguggacggcugguacggcuucagacaccagaacagcgagggcaccggccaggccgccgaccugaagagcacccaggccgccaucaaccagaucaacggcaagcugaacagacugaucggcaagaccaacgagaaguuccaccagaucgagaaggaguucagcgagguggagggcagaauccaggaccuggagaaguacguggaggacaccaagaucgaccuguggagcuacaacgccgagcugcugguggcccuggagaaccagcacaccaucgaccugaccgacagcgagaugaacaagcuguucgagagaaccaagaagcagcugagagagaacgccgaggacaugggcaacggcugcuucaagaucuaccacaagugcgacaacgccugcaucggcagcaucagaaacggcaccuacgaccacgacguguacagagacgaggcccugaacaacagauuccagaucaagggcguggagcugaagagcggcuacaaggacuggauccuguggaucagcuucgccaucagcugcuuccugcugugcguggcccugcugggcuucaucaugugggccugccagaagggcaacaucagaugcaacaucugcaucuga

SEQ ID NO: 161348 - RNA, 1701 nt, Artificial Sequence; identical to SEQ ID NO: 160342
  derived and/or modified CDS sequence (opt4) from hemagglutinin__InfluenzaA__ABI92401

SEQ ID NO: 161349 - RNA, 1701 nt, Artificial Sequence
  derived and/or modified CDS sequence (opt4) from hemagglutinin__InfluenzaA__ABI92412
augaagaccaucaucgcccugagcuacauccugugccugguguucgcccagaagcugcccggcaacgacaacagcaccgccacccugugccugggccaccacgccgugcccaacggcacccuggugaagaccaucaccaacgaccagaucgaggugaccaacgccaccgagcuggugcagagcagcagcaccggcggcaucugcgacagcccccaccagauccuggacggcgagaacugcacccugaucgacgcccugcugggcgacccccagugcgacggcuuccagaacaagaagugggaccuguucguggagagaagcaaggccuacagcaacugcuaccccuacgacgugcccgacuacgccagccugagaagccugaucgccagcagcggcacccuggaguucaacaacgagagcuucaacuggaccggcgugacccagaacggcaccagcagcgccugcaagagaagaagcaacagcagcuucuucagcagacugaacuggcugacccaccugaaguucaaguaccccgcccugaacgugaccaugcccaacaacgaggaguucgacaagcuguacaucuggggcgugcaccaccccggcaccuacaacgaccagaucagccuguacgcccaggccagcggcagaaucaccgugagcaccaagagaagccagcagaccgugauccccaacaucggcagcagacccagagugagagacauccccagcagaaucagcaucuacuggaccaucgugaagcccggcgacauccugcugaucaacagcaccggcaaccugaucgcccccagaggcuacuucaagaucagaagcggcaagagcagcaucaugagaagcgacgcccccaucggcaagugcaacagcgagugcaucacccccaacggcagcauccccaacgacaagcccuuccagaacaucaacagaaucaccuacggcgccugccccagauacgugaagcagaacacccugaagcuggccaccggcaugagaaacgugcccgagaagcagaccagaggcaucuucggcgccaucgccggcuucaucgagaacggcugggagggcaugguggacggcugguacggcuucagacaccagaacagcgagggcaucggccaggccgccgaccugaagagcacccaggccgccaucgaccagaucaacggcaagcugaacagacugaucggcaagaccaacgagaaguuccaccagaucgagaaggaguucagcgagguggagggcagaauccaggaccuggagaaguacguggaggacaccaagaucgaccuguggagcuacaacgccgagcugcugguggcccuggagaaccagcacaccaucgaccugaccgacagcgagaugaacaagcuguucgagagaaccaagaagcagcugagagagaacgccgaggacaugggcaacggcugcuucaagaucuaccacaagugcgacaacgccugcaucggcagcaucagaaacggcaccuacgaccacgacguguacagagacgaggcccugaacaacagauuccagaucaagggcguggagcugaagagcggcuacaaggacuggauccuguggaucagcuucgccaucagcugcuuccugcugugcguggcccugcugggcuucaucaugugggccugccagaagggcaacaucagaugcaacaucugcaucuga

SEQ ID NO: 161350 - RNA, 1701 nt, Artificial Sequence
  derived and/or modified CDS sequence (opt4) from hemagglutinin__InfluenzaA__ABI92423
augaagaccaucaucgcccugagcuacauccugugccugguguucgcccagaagcugcccggcaacgacaacagcaccgccacccugugccugggccaccacgccgugcccaacggcaccaucgugaagaccaucaccaacgaccagaucgaggugaccaacgccaccgagcuggugcagagcagcagcaccggcggcaucugcgacagcccccaccagauccuggacggcgagaacugcacccugaucgacgcccugcugggcgacccccagugcgacggcuuccagaacaagaagugggaccuguucguggagagaagcaaggccuacagcaacugcuaccccuacgacgugcccgacuacgccagccugagaagccugaucgccagcagcggcacccuggaguucaacaacgagagcuucaacuggaccggcgugacccagaacggcaccagcagcgccugcaagagaagaagcaacagcagcuucuucagcagacugaacuggcugacccaccugaaguucaaguaccccgcccugaacgugaccaugcccaacaacgaggaguucgacaagcuguacaucuggggcgugcaccaccccggcaccuacaacgaccagaucagccuguacgcccaggccagcggcagaaucaccgugagcaccaagagaagccagcagaccgugauccccaacaucggcagcagacccagagugagagacauccccagcagaaucagcaucuacuggaccaucgugaagcccggcgacauccugcugaucaacagcaccggcaaccugaucgcccccagaggcuacuucaagaucagaagcggcaagagcagcaucaugagaagcgacgcccccaucggcaagugcaacagcgagugcaucacccccaacggcagcauccccaacgacaagcccuuccagaacgugaacagaaucaccuacggcgccugccccagauacgugaagcagaacacccugaagcuggccaccggcaugagaaacgugcccgacaagcagaccagaggcaucuucggcgccaucgccggcuucaucgagaacggcugggagggcaugguggacggcugguacggcuucagacaccagaacagcgagggcaucggccaggccgccgaccugaagagcacccaggccgccaucgaccagaucaacggcaagcugaacagacugaucggcaagaccaacgagaaguuccaccagaucgagaaggaguucagcgagguggagggcagaauccaggaccuggagaaguacguggaggacaccaagaucgaccuguggagcuacaacgccgagcugcugguggcccuggagaaccagcacaccaucgaccugaccgacagcgagaugaacaagcuguucgagagaaccaagaagcagcugagagagaacgccgaggacaugggcaacggcugcuucaagaucuaccacaagugcgacaacgccugcaucggcagcaucagaaacggcaccuacgaccacgacguguacagagacgaggcccugaacaacagauuccagaucaagggcguggagcugaagagcggcuacaaggacuggauccuguggaucagcuucgccaucagcugcuuccugcugugcguggcccugcugggcuucaucaugugggccugccagaagggcaacaucagaugcaacaucugcaucuga

SEQ ID NO: 161351 - RNA, 1701 nt, Artificial Sequence; identical to SEQ ID NO: 160693
  derived and/or modified CDS sequence (opt4) from hemagglutinin__InfluenzaA__ABI92434

SEQ ID NO: 161352 - RNA, 1701 nt, Artificial Sequence
  derived and/or modified CDS sequence (opt4) from hemagglutinin__InfluenzaA__ABI92445
augaagaccaucaucgcccugagcuacauccugugccugguguucacccagaagcugcccggcaacgacaacagcaccgccacccugugccugggccaccacgccgugcccaacggcaccaucgugaagaccaucaccaacgaccagaucgaggugaccaacgccaccgagcuggugcagagcagcagcaccggcggcaucugcgacagcccccaccagauccuggacggcgagaacugcacccugaucgacgcccugcugggcgacccccagugcgacggcuuccagaacaagaagugggaccuguucguggagagaagcaaggccuacagcaacugcuaccccuacgacgugcccgacuacgccagccugagaagccugaucgccagcagcggcacccuggaguucaacaacgagagcuucaacuggaccggcgugaaccagaacggcaccagcagcgccugcaagagaagaagcaacagcagcuucuucagcagacugaacuggcugacccaccugaaguucaaguaccccgcccugaacgugaccaugcccaacaacgaggaguucgacaagcuguacaucuggggcgugcaccaccccggcaccuacaacgaccagaucagccuguacgcccaggccagcggcagaaucaccgugagcaccaagagaagccagcagaccgugauccccaacaucggcagcagacccagagugagagacauccccagcagaaucagcaucuacuggaccaucgugaagcccggcgacauccugcugaucaacagcaccggcaaccugaucgcccccagaggcuacuucaagaucagaagcggcaagagcagcaucaugagaagcgacgcccccaucggcaagugcaacagcgagugcaucacccccaacggcagcauccccaacgacaagcccuuccagaacgugaacagaaucaccuacggcgccugccccagauacgugaagcagaacacccugaagcuggccaccggcaugagaaacgugcccgagaagcagaccagaggcaucuucggcgccaucgccggcuucaucgagaacggcugggagggcaugguggacggcugguacggcuucagacaccagaacagcgagggcaucggccaggccgccgaccugaagagcacccaggccgccaucgaccagaucaacggcaagcugaacagacugaucggcaagaccaacgagaaguuccaccagaucgagaaggaguucagcgagguggagggcagaauccaggaccuggagaaguacguggaggacaccaagaucgaccuguggagcuacaacgccgagcugcugguggcccuggagaaccagcacaccaucgaccugaccgacagcgagaugaacaagcuguucgagagaaccaagaagcagcugagagagaacgccgaggacaugggcaacggcugcuucaagaucuaccacaagugcgacaacaccugcaucggcagcaucagaaacggcaccuacgaccacgacguguacagagacgaggcccugaacaacagauuccagaucaagggcguggagcugaagagcggcuacaaggacuggauccuguggaucagcuucgccaucagcugcuuccugcugugcguggcccugcugggcuucaucaugugggccugccagaagggcaacaucagaugcaacaucugcaucuga

SEQ ID NO: 161353 - RNA, 1701 nt, Artificial Sequence; identical to SEQ ID NO: 160693
  derived and/or modified CDS sequence (opt4) from hemagglutinin__InfluenzaA__ABI92456

SEQ ID NO: 161354 - RNA, 1701 nt, Artificial Sequence; identical to SEQ ID NO: 161301
  derived and/or modified CDS sequence (opt4) from hemagglutinin__InfluenzaA__ABI92467

SEQ ID NO: 161355 - RNA, 1701 nt, Artificial Sequence; identical to SEQ ID NO: 160710
  derived and/or modified CDS sequence (opt4) from hemagglutinin__InfluenzaA__ABI92478

SEQ ID NO: 161356 - RNA, 1701 nt, Artificial Sequence; identical to SEQ ID NO: 161301
  derived and/or modified CDS sequence (opt4) from hemagglutinin__InfluenzaA__ABI92489

SEQ ID NO: 161357 - RNA, 1701 nt, Artificial Sequence
  derived and/or modified CDS sequence (opt4) from hemagglutinin__InfluenzaA__ABI92500
augaagaccaucaucgcccugagcuacauccugugccugguguucgcccagaagcugcccggcaacgacaacagcaccgccacccugugccugggccaccacgccgugcccaacggcacccuggugaagaccaucaccaacgaccagaucgaggugaccaacgccaccgagcuggugcagagcagcagcaccggcggcaucugcgacagcccccaccagauccuggacggcgagaacugcacccugaucgacgcccugcugggcgacccccacugcgacggcuuccagaacaaggagugggaccuguucguggagagaagcaaggccuacagcaacugcuaccccuacgacgugcccgacuacgccagccugagaagccugguggccagcagcggcacccuggaguucaacaacgagagcuucaacuggaccggcguggcccagaacggcaccagcagcgccugcaagagaagaagcaacaagagcuucuucagcagacugaacuggcugcaccagcugaaguacaaguaccccgcccugaacgugaccaugcccaacaacgagaaguucgacaagcuguacaucuggggcgugcaccaccccagcaccgacagcgaccagaucagccuguacgcccaggcccccggcagagugaccgugagcaccaagagaagccagcagaccgugauccccaacaucggcagcagacccugggugagaggcgugagcagcagaaucagcaucuacuggaccaucgugaagcccggcgacauccugcugaucaacugcaccggcaaccugaucgcccccagaggcuacuucaagaucagaagcggcaagagcagcaucaugagaagcgacgccagcaucggcaagugcaacagcgagugcaucacccccaacggcagcauccccaacgacaagcccuuccagaacgugaacagaaucaccuacggcgccugccccagauacgugaagcagaacacccugaagcuggccaccggcaugagaaacgugcccgagaagcagaccagaggcaucuucggcgccaucgccggcuucaucgagaacggcugggagggcaugguggacggcugguacggcuucagacaccagaacagcgagggcaccggccaggccgccgaccugaagagcacccaggccgugaucaaccagaucaacggcaagcugaacagacugaucgagaagaccaacgagaaguuccaccagaucgagaaggaguucagcgagguggagggcagaauccaggaccuggagaaguacguggaggacaccaagaucgaccuguggagcuacaacgccgagcugcugguggcccuggagaaccagcacaccaucgaccugaccgacagcgagaugaacaagcuguucgagagaaccaagaagcagcugagagagaacgccgaggacaugggcaacggcugcuucaagaucuaccacaagugcgacaacgccugcaucggcagcaucagaaacggcaccuacgaccacgacguguacagagacgaggcccugaacaacagauuccagaucaagggcguggagcugaagagcggcuacaaggacuggauccuguggaucagcuucgccaucagcugcuuccugcugugcguggugcugcugggcuucaucaugugggccugccagaagggcaacaucagaugcaacaucugcaucuga

SEQ ID NO: 161358 - RNA, 1701 nt, Artificial Sequence
  derived and/or modified CDS sequence (opt4) from hemagglutinin__InfluenzaA__ABI92511
augaagaccaucaucgcccugagcuacauccugugccugguguucgcccagaagcugcccggcaacgacaacagcaccgccacccugugccugggccaccacgccgugcccaacggcacccuggugaagaccaucaccaacgaccagaucgaggugaccaacgccaccgagcuggugcagaacagcagcaccggcaucaucugcgacagcccccaccagauccuggacggcgagaacugcacccugaucgacgcccugcugggcgacccccacugcgacggcuuccagaacaaggagugggaccuguucguggagagaagcaaggccuacagcaacugcuaccccuacgacgugcccgacuacgccagccugagaagccugguggccagcagcggcacccuggaguucaacaacgagagcuucaacuggaccggcguggcccagaacggcaccagcagcgccugcaagagaagaagcgacaagagcuucuucagcagacugaacuggcugcaccagcugaaguacaaguaccccgcccugaacgugaccaugcccaacaccgagaaguucgacaagcuguacaucuggggcgugcaccaccccagcaccgacagcgaccagaucagccuguacgcccaggccagcggcagagugaccgugagcaccaagagaagccagcagaccgugauccccaacaucggcagcagacccugggugagaggcgugagcagcagagugagcaucuacuggaccaucgugaagcccggcgacauccugcugaucaacagcaccggcaaccugaucgcccccagaggcuacuucaagaucagaagcggcaagagcagcaucaugagaagcgacgccagcaucggcaagugcaacagcaagugcaucacccccaacggcagcauccccaacgacaagcccuuccagaacgugaacagaaucaccuacggcgccugccccagauacgugaagcagaacacccugaagcuggccaccggcaugagaaacgugcccgagaagcagaccagaggcaucuucggcgccaucgccggcuucaucgagaacggcugggagggcaugguggacggcugguacggcuucagacaccagaacagcgagggcaccggccaggccgccgaccugaagagcacccaggccgccaucaaccagaucaacggcaagcugaacagacugaucgagaagaccaacgagaaguuccaccagaucgagaaggaguucagcgagguggagggcagaauccaggaccuggagaaguacguggaggacaccaagaucgaccuguggagcuacaacgccgagcugcugguggcccuggagaaccagcacaccaucgaccugaccgacagcgagaugaacaagcuguucgagagaaccaagaagcagcugagagagaacgccgaggacaugggcaacggcugcuucaagaucuaccacaagugcgacaacaccugcaucggcagcaucagaaacggcaccuacgaccacgacguguacagagacgaggcccugaacaacagauuccagaucaagggcguggagcugaagagcggcuacaaggacuggauccuguggaucagcuucgccaucagcugcuuccugcugugcguggugcugcugggcuucaucaugugggccugccagaagggcaacaucagaugcaacaucugcaucuga

SEQ ID NO: 161359 - RNA, 1701 nt, Artificial Sequence
  derived and/or modified CDS sequence (opt4) from hemagglutinin__InfluenzaA__ABI92522
augaagaccaucaucgcccugagcuacauccugugccugguguucgcccagaagcugcccggcaacgacaacagcaccgccacccugugccugggccaccacgccgugcccaacggcacccuggugaagaccaucaccaacgaccagaucgaggugaccaacgccaccgagcuggugcagagcagcagcaccggcagaaucugcgacagcccccaccagauccuggacggcgagaacugcacccugaucgacgcccugcugggcgacccccacugcgacggcuuccagaacaaggagugggaccuguucguggagagaagcaaggccuacagcaacugcuaccccuacgacgugcccgacuacgugagccugagaagccugguggccagcagcggcacccuggaguucaacaacgagagcuucaacuggaccggcguggcccagaacggcaccagcagcgccugcaagagaagaagcaacaagagcuucuucagcagacugaacuggcugcaccagcugaaguacaaguaccccgcccugaacgugaccaugcccaacaacgagaaguucgacaagcuguacaucuggggcgugcaccaccccggcaccgacagcgaccagaucagccuguacgcccaggccagcggcagagugaccgugagcaccaagagaagccagcagaccgugauccccaacaucggcagcagacccugggugagaggcgugagcagcagaaucagcaucuacuggaccaucgugaagcccggcgacauccugcugaucaacagcaccggcaaccugaucgcccccagaggcuacuucaagaucagaagcggcaagagcagcaucaugaagagcgacgcccccaucggcaagugcaacagcgagugcaucacccccaacggcagcauccccaacgacaagcccuuccagaacgugaacagaaucaccuacggcgccugccccagauacgugaagcagaacacccugaagcuggccaccggcaugagaaacgugcccgagaagcagaccagaggcaucuucggcgccaucgccggcuucaucgagaacggcugggagggcaugauggacggcugguacggcuucagacaccagaacagcgagggcaccggccaggccgccgaccugaagagcacccaggccgccaucaaccagaucaacggcaagcugaacagacugaucgagaagaccaacgagaaguuccaccagaucgagaaggaguucagcgagguggagggcagaauccaggaccuggagaaguacguggaggacaccaagaucgaccuguggagcuacaacgccgagcugcugguggcccuggagaaccagcacaccaucgaccugaccgacagcgagaugaacaagcuguucgagagaaccaagaagcagcugagagagaacgccgaggacaugggcaacggcugcuucaagaucuaccacaagugcgacaacgccugcaucggcagcaucagaaacggcaccuacgaccacgacguguacagagacgaggcccugaacaacagauuccagaucaagggcguggagcugaagagcggcuacaaggacuggauccuguggaucagcuucgccaucagcugcuuccugcugugcaucgugcugcugggcuucaucaugugggccugccagaagggcaacaucagaugcaacaucugcaucuga

SEQ ID NO: 161360 - RNA, 1701 nt, Artificial Sequence
  derived and/or modified CDS sequence (opt4) from hemagglutinin__InfluenzaA__ABI92533
augaagaccaucaucgcccugagcuacauccugugccugguguucgcccagaagcugcccggcaacgacaacagcagagccacccugugccugggccaccacgccgugcccaacggcacccuggugaagaccaucaccaacgaccagaucgaggugaccaacgccaccgagcuggugcagagcagcagcaccggcagaaucugcgacagcccccaccagauccuggacggcgagaacugcacccugaucgacgcccugcugggcgacccccacugcgacggcuuccagaacaaggagugggaccuguucguggagagaagcaaggccuacagcaacugcuaccccuacgacgugcccgacuacgugagccugagaagccugguggccagcagcggcacccuggaguucaacaacgagagcuucaacuggaccggcguggcccagaacggcaccagcagcgccugcaagagaagaagcgacaagagcuucuucagcagacugaacuggcugcaccagcugaaguacaaguaccccgcccugaacgugaccaugcccaacaacgagaaguucgacaagcuguacaucuggggcgugcaccaccccggcaccgacagcgaccagaucagccuguacgcccaggccagcggcagagugaccgugagcaccaagagaagccagcagaccgugauccccaacaucggcagcagacccugggugagaggcgugagcagcagaaucagcaucuacuggaccaucgugaagcccggcgacauccugcugaucaacagcaccggcaaccugaucgcccccagaggcuacuucaagaucagaagcggcaagagcagcaucaugagaagcgacgcccccaucggcaagugcaacagcgagugcaucacccccaacggcagcauccccaacgacaagcccuuccagaacgugaacagaaucaccuacggccccugccccagauacgugaagcagaacacccugaagcuggccaccggcaugagaaacgugcccgagaagcagaccagaggcaucuucggcgccaucgccggcuucaucgagaacggcugggagggcaugauggacggcugguacggcuucagacaccagaacagcgagggcaccggccaggccgccgaccugaagagcacccaggccgccaucaaccagaucaacggcaagcugaacagacugaucgagaagaccaacgagaaguuccaccagaucgagaaggaguucagcgagguggagggcagaauccaggaccuggagaaguacguggaggacaccaagaucgaccuguggagcuacaacgccgagcugcugguggcccuggagaaccagcacaccaucgaccugaccgacagcgagaugaacaagcuguucgagagaaccaagaagcagcugagagagaacgccgaggacaugggcaacggcugcuucaagaucuaccacaagugcgacaacgccugcaucggcagcaucagaaacggcaccuacgaccacgacguguacagagacgaggcccugaacaacagauuccagaucaagggcguggagcugaagagcggcuacaaggacuggauccuguggaucagcuucgccaucagcugcuuccugcugugcaucgugcugcugggcuucaucaugugggccugccagaagggcaacaucagaugcaacaucugcaucuga

SEQ ID NO: 161361 - RNA, 1701 nt, Artificial Sequence; identical to SEQ ID NO: 161360
  derived and/or modified CDS sequence (opt4) from hemagglutinin__InfluenzaA__ABI92544

SEQ ID NO: 161362 - RNA, 1701 nt, Artificial Sequence
  derived and/or modified CDS sequence (opt4) from hemagglutinin__InfluenzaA__ABI92577
augaagaccaucaucgcccugagcuacauccugugccugguguucgcccagaagcugcccggcaacgacaacagcaccgccacccugugccugggccaccacgccgugcccaacggcacccuggugaagaccaucaccaacgaccagaucgaggugaccaacgccaccgagcuggugcagagcagcagcaccggcagaaucugcgacagcccccaccagauccuggacggcgagaacugcacccugaucgacgcccugcugggcgacccccacugcgacggcuuccagaacaaggagugggaccuguucguggagagaagcagagccuacagcaacugcuaccccuacgacgugcccgacuacgugagccugagaagccugguggccagcagcggcacccuggaguucaacaacgagagcuucaacuggaccggcguggcccagaacggcaccagcagcgccugcaagagaagaagcgacaagagcuucuucagcagacugaacuggcugcaccagcugaaguacaaguaccccgcccugaacgugaccaugcccaacaacgagaaguucgacaagcuguacaucuggggcgugcaccaccccggcaccgacagcgaccagaucagccuguacgcccaggccagcggcagagugaccgugagcaccaagagaagccagcagaccgugauccccaacaucggcagcagacccugggugagaggcgugagcagcaagaucagcaucuacuggaccaucgugaagcccggcgacauccugcugaucaacagcaccggcaaccugaucgcccccagaggcuacuucaagaucagaagcggcaagagcagcaucaugagaagcgacgcccccaucggcaagugcaacagcgagugcaucacccccaacggcagcauccccaacgacaagcccuuccagaacgugaacagaaucaccuacggccccugccccagauacgugaagcagaacacccugaagcuggccaccggcaugagaaacgugcccgagaagcagaccagaggcaucuucggcgccaucgccggcuucaucgagaacggcugggagggcaugauggacggcugguacggcuucagacaccagaacagcgagggcaccggccaggccgccgaccugaagagcacccaggccgccaucaaccagaucaacggcaagcugaacagacugaucgagaagaccaacgagaaguuccaccagaucgagaaggaguucagcgagguggagggcagaauccaggaccuggagaaguacguggaggacaccaagaucgaccuguggagcuacaacgccgagcugcugguggcccuggagaaccagcacaccaucgaccugaccgacagcgagaugaacaagcuguucgagagaaccaagaagcagcugagagagaacgccgaggacaugggcaacggcugcuucaagaucuaccacaagugcgacaacgccugcaucggcagcaucagaaacggcaccuacgaccacgacguguacagagacgaggcccugaacaacagauuccagaucaagggcguggagcugaagagcggcuacaaggacuggauccuguggaucagcuucgccaucagcugcuuccugcugugcaucgugcugcugggcuucaucaugugggccugccagaagggcaacaucagaugcaacaucugcaucuga

SEQ ID NO: 161363 - RNA, 1701 nt, Artificial Sequence; identical to SEQ ID NO: 161099
  derived and/or modified CDS sequence (opt4) from hemagglutinin__InfluenzaA__ABI92588

SEQ ID NO: 161364 - RNA, 1701 nt, Artificial Sequence
  derived and/or modified CDS sequence (opt4) from hemagglutinin__InfluenzaA__ABI92599
augaagaccaucaucgcccugagcuacauccugugccugguguucgcccagaagcugcccggcaacgacaacagcaccgccacccugugccugggccaccacgccgugcccaacggcacccuggugaagaccaucaccaacgaccagaucgaggugaccaacgccaccgagcuggugcagagcagcagcaccggcagaaucugcaacagcccccaccagauccuggacggcgagaacugcacccugaucgacgcccugcugggcgacccccacugcgacggcuuccagaacaaggagugggaccuguucguggagagaagcaaggccuacagcaacugcuaccccuacgacgugcccgacuacgugagccugagaagccugguggccagcagcggcacccuggaguucaacaacgagagcuucaacuggaccggcguggcccagaacggcaccagcagcgccugcaagagaagaagcgacaagagcuucuucagcagacugaacuggcugcaccagcugaaguacaaguaccccgcccugaacgugaccaugcccaacaacgagaaguucgacaagcuguacaucuggggcgugcaccaccccggcaccgacagcgaccagaucagccuguacgcccaggccagcggcagagugaccgugagcaccaagagaagccagcagaccgugauccccaacaucggcagcagacccugggugagaggcgugagcagcagaaucagcaucuacuggaccaucgugaagcccggcgacauccugcugaucaacagcaccggcaaccugaucgcccccagaggcuacuucaagaucagaagcggcaagagcagcaucaugagaagcgacgcccccaucggcaagugcaacagcgagugcaucacccccaacggcagcauccccaacgacaagcccuuccagaacgugaacagaaucaccuacggcgccugccccagauacgugaagcagaagacccugaagcuggccaccggcaugagaaacgugcccgagaagcagaccagaggcaucuucggcgccaucgccggcuucaucgagaacggcugggagggcaugauggacggcugguacggcuucagacaccagaacagcgagggcaccggccaggccgccgaccugaagagcacccaggccgccaucaaccagaucaacggcaagcugaacagacugaucgagaagaccaacgagaaguuccaccagaucgagaaggaguucagcgagguggagggcagaauccaggaccuggagaaguacguggaggacaccaagaucgaccuguggagcuacaacgccgagcugcugguggcccuggagaaccagcacaccaucgaccugaccgacagcgagaugaacaagcuguucgagagaaccaagaagcagcugagagagaacgccgaggacaugggcaacggcugcuucaagaucuaccacaagugcgacaacgccugcaucggcagcaucagaaacggcaccuacgaccacgacguguacagagacgaggcccugaacaacagauuccagaucaagggcguggagcugaagagcggcuacaaggacuggauccuguggaucagcuucgccaucagcugcuuccugcugugcaucgugcugcugggcuucaucaugugggccugccagaagggcaacaucagaugcaacaucugcaucuga

SEQ ID NO: 161365 - RNA, 1701 nt, Artificial Sequence
  derived and/or modified CDS sequence (opt4) from hemagglutinin__InfluenzaA__ABI92610
augaagaccaucaucgcccugagcuacauccugugccugguguucgcccagaagcugcccggcaacgacaacagcaccgccacccugugccugggccaccacgccgugcccaacggcacccuggugaagaccaucaccaacgaccagaucgaggugaccaacgccaccgagcuggugcagagcagcagcaccggcagaaucugcgacagcccccaccagauccuggacggcgagaacugcacccugaucgacgcccugcugggcgacccccacugcgacggcuuccagaacaaggagugggaccuguucguggagagaagcaaggccuacagcaacugcuaccccuacgacgugcccgacuacgugagccugagaagccugguggccagcagcggcacccuggaguucaacaacgagagcuucaacuggaccggcguggcccagaacggcaccagcagcgccugcaagagaagaagcgacaagagcuucuucagcagacugaacuggcugcaccagcugaaguacaaguaccccgcccugaacgugaccaugcccaacaacgagaaguucgacaagcuguacaucuggggcgugcaccaccccggcaccgacagcgaccagaucagccuguacgcccaggccagcggcagagugaccgugagcaccaagagaagccagcagaccgugauccccaacaucggcagcagacccugggugagaggcgugagcagcagaaucagcaucuacuggaccaucgugaagcccggcgacauccugcugaucaacagcaccggcaaccugaucgcccccagaggcuacuucaagaucagaagcggcaagagcagcaucaugagaagcgacgcccccaucggcaagugcaacagcgagugcaucacccccaacggcagcauccccaacgacaagcccuuccagaacgugaacagaaucaccuacggcgccugccccagauacgugaagcagaacacccugaagcuggccaccggcaugagaaacgugcccgagaagcagaccagaggcaucuucggcgccaucgccggcuucaucgagaacggcugggagggcaugauggacggcugguacggcuucagacaccagaacagcgagggcaccggccaggccgccgaccugaagagcacccaggccgccaucaaccagaucaacggcaagcugaacagacugaucgagaagaccaacgagaaguuccaccagaucgagaaggaguucagcgagguggagggcagaauccaggaccuggagaaguacguggaggacaccaagaucgaccuguggagcuacaacgccgagcugcugguggcccuggagaaccagcacaccaucgaccugaccgacagcgagaugaacaagcuguucgagagaaccaagaagcagcugagagagaacgccgaggacaugggcaacggcugcuucaagaucuaccacaagugcgacaacgccugcaucggcagcaucagaaacggcaccuacgaccacgacguguacagagacgaggcccugaacaacagauuccagaucaagggcguggagcugaagagcggcuacaaggacuggauccuguggaucagcuucgccaucagcugcuuccugcugugcaucgugcugcugggcuucaucaugugggccugccagaagggcaacaucagaugcaacaucugcaucuga

SEQ ID NO: 161366 - RNA, 1701 nt, Artificial Sequence
  derived and/or modified CDS sequence (opt4) from hemagglutinin__InfluenzaA__ABI92621
augaagaccaucaucgcccugagcuacauccugugccugguguucgcccagaagcugcccggcaacgacaacagcauggccacccugugccugggccaccacgccgugcccaacggcacccuggugaagaccaucaccaacgaccagaucgaggugaccaacgccaccgagcuggugcagagcagcagcaccggcagaaucugcaacagcccccaccagauccuggacggcgagaacugcacccugaucgacgcccugcugggcgacccccacugcgagggcuuccagaacaaggagugggaccuguucguggagagaagcaaggccuacagcaacugcuaccccuacgacgugcccgacuacgugagccugagaagccugguggccagcagcggcacccuggaguucaacaacgagagcuucaacuggaccggcguggcccagaacggcaccagcagcgccugcaagagaagaagcgacaagagcuucuucagcagacugaacuggcugcaccagcugaaguacaaguaccccgcccugaacgugaccaugcccaacaacgagaaguucgacaagcuguacaucuggggcgugcaccaccccggcaccgacagcgaccagaucagccuguacgcccaggccagcggcagagugaccgugagcaccaagagaagccagcagaccgugauccccaacaucggcagcagacccugggugagaggcgugagcagcaagaucagcaucuacuggaccaucgugaagcccggcgacauccugcugaucaacagcaccggcaaccugaucgcccccagaggcuacuucaagaucagaagcggcaagagcagcaucaugagaagcgacgcccccaucgacaagugcaacagcgagugcaucacccccaacggcagcauccccaacgacaagcccuuccagaacgugaacagaaucaccuacggccugugccccagauacgugaagcagaacacccugaagcuggccaccggcaugagaaacgugcccgagaagcagaccagaggcaucuucggcgccaucgccggcuucaucgagaacggcugggagggcaugauggacggcugguacggcuucagacaccagaacagcgagggcaccggccaggccgccgaccugaagagcacccaggccgccaucaaccagaucaacggcaagcugaacagacugaucgagaagaccaacgagaaguuccaccagaucgagaaggaguucagcgagguggagggcagaauccaggaccuggagaaguacguggaggacaccaagaucgaccuguggagcuacaacgccgagcugcugguggcccuggagaaccagcacaccaucgaccugaccgacagcgagaugaacaagcuguucgagagaaccaagaagcagcugagagagaacgccgaggacaugggcaacggcugcuucaagaucuaccacaagugcgacaacgccugcaucggcagcaucagaaacggcaccuacgaccacgacguguacagagacgaggcccugaacaacagauuccagaucaagggcguggagcugaagagcggcuacaaggacuggauccuguggaucagcuucgccaucagcugcuuccugcugugcaucgugcugcugggcuucaucaugugggccugccagaagggcaacaucagaugcaacaucugcaucuga

SEQ ID NO: 161367 - RNA, 1701 nt, Artificial Sequence; identical to SEQ ID NO: 160622
  derived and/or modified CDS sequence (opt4) from hemagglutinin__InfluenzaA__ABI92632

SEQ ID NO: 161368 - RNA, 1701 nt, Artificial Sequence
  derived and/or modified CDS sequence (opt4) from hemagglutinin__InfluenzaA__ABI92643
augaagaccaucaucgcccugagcuacauccugugccugguguucgcccagaagcugcccggcaacgacaacagcaccgccacccugugccugggccaccacgccgugcccaacggcaccaucgugaagaccaucaccaacgaccagaucgaggugaccaacgccaccgagcuggugcagagcagcagcaccggcggcaucugcgacagcccccaccagauccuggacggcgagaacugcacccugaucgacgcccugcugggcgacccccagugcgacggcuuccagaacaagaagugggaccuguucguggagagaagcaaggccuacagcaacugcuaccccuacgacgugcccgacuacgccagccugagaagccugguggccagcagcggcacccuggaguucaacaacgagagcuucgacuggaccggcgugacccagaacggcaccagcagcgccugcaagagaagaagcaacaagagcuucuucagcagacugaacuggcugacccaccugaaguacaaguaccccgcccugaacgugaccauccccaacaacgagaaguucgacaagcuguacaucuggggcgugcaccaccccggcaccgacagcgaccagaucagccuguacgcccaggccagcggcagaaucaccgugagcaccaagagaagccagcagaccgugauccccaacaucggcagcagacccagagugagagacgugagcagcagaaucagcaucuacuggaccaucgugaagcccggcgacauccugcugaucaacagcaccggcaaccugaucgcccccagaggcuacuucaagaucagaagcggcaagagcagcaucaugagaagcgacgcccccaucggcaagugcaacagcgagugcaucacccccaacggcagcauccccaacgacaagcccuuccagaacgugaacagaaucaccuacggcgccugccccagauacgugaagcagaacacccugaagcuggccaccggcaugagaaacgugcccgagaagcagaccagaggcaucuucggcgccaucgccggcuucaucgagaacggcugggagggcaugguggacggcugguacggcuucagacaccagaacagcgagggcaccggccaggccgccgaccugaagagcacccaggccgccaucaaccagaucaacggcaagcugaacagacugaucggcaagaccaacgagaaguuccaccagaucgagaaggaguucagcgagguggagggcagaauccaggaccuggagaaguacguggaggacaccaagaucgaccuguggagcuacaacgccgagcugcugguggcccuggagaaccagcacaccaucgaccugaccgacagcgagaugaacaagcuguucgagagaaccaagagacagcugagagagaacgccgaggacaugggcaacggcugcuucaagaucuaccacaagugcgacaacgccugcaucggcagcaucagaaacggcaccuacgaccacgacguguacagagacgaggcccugaacaacagauuccagaucaagggcguggagcugaagagcggcuacaaggacuggauccuguggaucagcuucgccaucagcugcuuccugcugugcguggcccugcugggcuucaucaugugggccugccagaagggcaacaucagaugcaacaucugcaucuga

SEQ ID NO: 161369 - RNA, 1701 nt, Artificial Sequence
  derived and/or modified CDS sequence (opt4) from hemagglutinin__InfluenzaA__ABI92665
augaagaccaucaucgcccugagcuacauccugugccugguguucgcccagaagcugcccggcaacgacaacagcaccgccacccugugccugggccaccacgccgugcccaacggcaccaucgugaagaccaucaccaacgaccagaucgaggugaccaacgccaccgagcuggugcagagcagcagcaccggcggcaucugcgacagcccccaccagauccuggacggcgagaacugcacccugaucgacgcccugcugggcgacccccagugcgacggcuuccagaacaagaagugggaccuguucguggagagaagcaaggccuacagcaacugcuaccccuacgacgugcccgacuacgccagccugagaagccugguggccagcagcggcacccuggaguucaacaacgagagcuucgacuggaccggcgugacccagaacggcaccagcagcgccugcaagagaggcagcaacaagagcuucuucagcagacugaacuggcugacccaccugaaguacaaguaccccgcccugaacgugaccaugcccaacaacgagaaguucgacaagcuguacaucuggggcgugcaccaccccggcaccgacagcgaccagaucagccuguacgcccaggccagcggcagaaucaccgugagcaccaagagaagccagcagaccgugauccccaacaucggcagcagacccagagugagagacgugagcagcagaaucagcaucuacuggaccaucgugaagcccggcgacauccugcugaucaacagcaccggcaaccugaucgcccccagaggcuacuucaagaucagaagcggcaagagcagcaucaugagaagcgacgcccccaucggcaagugcaacagcgagugcaucacccccaacggcagcauccccaacgacaagcccuuccagaacgugaacagaaucaccuacggcgccugccccagauacgugaagcagaacacccugaagcuggccaccggcaugagaaacgugcccgagaagcagaccagaggcaucuucggcgccaucgccggcuucaucgagaacggcugggagggcaugguggacggcugguacggcuucagacaccagaacagcgagggcaccggccaggccgccgaccugaagagcacccaggccgccaucaaccagaucaacggcaagcugaacagacugaucggcaagaccaacgagaaguuccaccagaucgagaaggaguucagcgagguggagggcagaauccaggaccuggagaaguacguggaggacaccaagaucgaccuguggagcuacaacgccgagcugcugguggcccuggagaaccagcacaccaucgaccugaccgacagcgagaugaacaagcuguucgagagaaccaagagacagcugagagagaacgccgaggacaugggcaacggcugcuucaagaucuaccacaagugcgacaacgccugcaucggcagcaucagaaacggcaccuacgaccacgacguguacagaaacgaggcccugaacaacagauuccagaucaagggcguggagcugaagagcggcuacaaggacuggauccuguggaucagcuucgccaucagcugcuuccugcugugcguggcccugcugggcuucaucaugugggccugccagaagggcaacaucagaugcaacaucugcaucuga

SEQ ID NO: 161370 - RNA, 1701 nt, Artificial Sequence
  derived and/or modified CDS sequence (opt4) from hemagglutinin__InfluenzaA__ABI92676
augaagaccaucaucgcccugagcuacauccugugccugguguucgcccagaagcugcccggcaacgacaacagcaccgccacccugugccugggccaccacgccgugcccaacggcaccaucgugaagaccaucaccaacgaccagaucgaggugaccaacgccaccgagcuggugcagagcagcagcaccggcggcaucugcgacagcccccaccagauccuggacggcgagaacugcacccugaucgacgcccugcugggcgacccccagugcgacggcuuccagaacaagaagugggaccuguucguggagagaagcaaggccuacagcaacugcuaccccuacgacgugcccgaccacgccagccugagaagccugguggccagcagcggcacccuggaguucaacaacgagagcuucgacuggaccggcgugacccagaacggcaccagcagcgccugcaagagaagaagcaacaagagcuucuucagcagacugaacuggcugacccaccugaaguacaaguaccccgcccugaacgugaccaugcccaacaacgagaaguucgacaagcuguacaucuggggcgugcaccaccccggcaccgacagcgaccagaucagccuguacgcccaggccagcggcagaaucaccgugagcaccaagagaagccagcagaccgugauccccaacaucggcagcagacccagagugagagacgugagcagcagaaucagcaucuacuggaccaucgugaagcccggcgacauccugcugaucaacagcaccggcaaccugaucgcccccagaggcuacuucaagaucagaaacggcaagagcagcaucaugagaagcgacgcccccaucggcaagugcaacagcgagugcaucacccccaacggcagcauccccaacgacaagcccuuccagaacgugaacagaaucaccuacggcgccugccccagauacgugaagcagaacacccugaagcuggccaccggcaugagaaacgugcccgagaagcagaccagaggcaucuucggcgccaucgccggcuucaucgagaacggcugggagggcaugguggacggcugguacggcuucagacaccagaacagcgagggcaccggccaggccgccgaccugaagagcacccaggccgccaucaaccagaucaacggcaagcugaacagacugaucggcaagaccaacgagaaguuccaccagaucgagaaggaguucagcgagguggagggcagaauccaggaccuggagaaguacguggaggacaccaagaucgaccuguggagcuacaacgccgagcugcugguggcccuggagaaccagcacaccaucgaccugaccgacagcgagaugaacaagcuguucgagagaaccaagaagcagcugagagagaacgccgaggacaugggcaacggcugcuucaagaucuaccacaagugcgacaacgccugcaucggcagcaucagaaacggcaccuacgaccacgacguguacagagacgaggcccugaacaacagauuccagaucaagggcguggagcugaagagcggcuacaaggacuggauccuguggaucagcuucgccaucagcugcuuccugcugugcguggcccugcugggcuucaucaugugggccugccagaagggcaacaucagaugcaacaucugcaucuga

SEQ ID NO: 161371 - RNA, 1701 nt, Artificial Sequence
  derived and/or modified CDS sequence (opt4) from hemagglutinin__InfluenzaA__ABI92687
augaagaccaucaucgcccugagcuacauccugugccugguguucgcccagaagcugcccggcaacgacaacagcaccgccacccugugccugggccaccacgccgugcccaacggcaccaucgugaagaccaucaccaacgaccagaucgaggugaccaacgccaccgagcuggugcagagcagcagcaccggcggcaucugcgacagcccccaccagauccuggacggcgagaacugcacccugaucgacgcccugcugggcgacccccagugcgacggcuuccagaacaagaagugggaccuguucguggagagaagcaaggccuacagcaacugcuaccccuacgacgugcccgacuacgccagccugagaagccugguggccagcagcggcacccuggaguucaacaacgagagcuucgacuggaccggcgugacccagaacggcaccagcagcgccugcaagagaggcagcaacaagagcuucuucagcagacugaacuggcugacccaccugaaguacaaguaccccgcccugaacgugaccaugcccaacaacgagaaguucgacaagcuguacaucuggggcgugcaccaccccggcaccgacagcgaccagaucagccuguacgcccaggccagcggcagaaucaccgugagcaccaagagaagccagcagaccgugauccccaacaucggcagcagacccagagugagagacgugagcagcagaaucagcaucuacuggaccaucgugaagcccggcgacauccugcugaucaacagcaccggcaaccugaucgcccccagaggcuacuucaagaucagaagcggcaagagcagcaucaugagaagcgacgcccccaucggcaagugcaacagcgagugcaucacccccaacggcagcauccccaacgacaagcccuuccagaacgugaacagaaucaccuacggcgccugccccagauacgugaagcagaacacccugaagcuggccaccggcaugagaaacgugcccgagaagcagaccagaggcaucuucggcgccaucgccggcuucaucgagaacggcugggagggcaugguggacggcugguacggcuucagacaccagaacagcgagggcaccggccaggccgccgaccugaagagcacccaggccgccaucaaccagaucaacggcaagcugaacagacugaucggcaagaccaacgagaaguuccaccagaucgagaaggaguucagcgagguggagggcagaauccaggaccuggagaaguacguggaggacaccaagaucgaccuguggagcuacaacgccgagcugcugguggcccuggagaaccagcacaccaucgaccugaccgacagcgagaugaacaagcuguucgagagaaccaagagacagcugagagagaacgccgaggacaugggcaacggcugcuucaagaucuaccacaagugcgacaacgccugcaucggcagcaucagaaacggcaccuacgaccacgacguguacagagacgaggcccugaacaacagauuccagaucaagggcguggagcugaagagcggcuacaaggacuggauccuguggaucagcuucgccaucagcugcuuccugcugugcguggcccugcugggcuucaucaugugggccugccagaagggcaacaucagaugcaacaucugcaucuga

SEQ ID NO: 161372 - RNA, 1701 nt, Artificial Sequence; identical to SEQ ID NO: 161371
  derived and/or modified CDS sequence (opt4) from hemagglutinin__InfluenzaA__ABI92698

SEQ ID NO: 161373 - RNA, 1701 nt, Artificial Sequence; identical to SEQ ID NO: 160576
  derived and/or modified CDS sequence (opt4) from hemagglutinin__InfluenzaA__ABI92709

SEQ ID NO: 161374 - RNA, 1701 nt, Artificial Sequence
  derived and/or modified CDS sequence (opt4) from hemagglutinin__InfluenzaA__ABI92720
augaagaccaucaucgcccugagcuacauccugugccugguguucgcccagaagcugcccggcaacgacaacagcaccgccacccugugccugggccaccacgccgugcccaacggcaccaucgugaagaccaucaccaacgaccagaucgaggugaccaacgccaccgagcuggugcagagcagcagcaccggcggcaucugcgacagcccccaccagauccuggacggcgagaacugcacccugaucgacgcccugcugggcgacccccagugcgacggcuuccagaacaagaagugggaccuguucguggagagaagcaaggccuacagcaacugcuaccccuacgacgugcccgaccacgccagccugagaagccugguggccagcagcggcacccuggaguucaacaacgagagcuucgacuggaccggcgugacccagaacggcaccagcagcgccugcaagagaagaagcaacaagagcuucuucagcagacugaacuggcugacccaccugaaguacaaguaccccgcccugaacgugaccaugcccaacaacgagaaguucgacaagcuguacaucuggggcgugcaccaccccggcaccgagagcgaccagaucagccuguacgcccaggccagcggcagaaucaccgugagcaccaagagaagccagcagaccgugauccccaacaucggcagcagacccagagugagagacgugagcagcagaaucagcaucuacuggaccaucgugaagcccggcgacauccugcugaucaacagcaccggcaaccugaucgcccccagaggcuacuucaagaucagaagcggcaagagcagcaucaugagaagcgacgcccccaucggcaagugcaacagcgagugcaucacccccaacggcagcauccccaacgacaagcccuuccagaacgugaacagaaucaccuacggcgccugccccagauacgugaagcagaacacccugaagcuggccaccggcaugagaaacgugcccgagaagcagaccagaggcaucuucggcgccaucgccggcuucaucgagaacggcugggagggcaugguggacggcugguacggcuucagacaccagaacagcgagggcaccggccaggccgccgaccugaagagcacccaggccgccaucaaccagaucaacggcaagcugaacagacugaucggcaagaccaacgagaaguuccaccagaucgagaaggaguucagcgagguggagggcagaauccaggaccuggagaaguacguggaggacaccaagaucgaccuguggagcuacaacgccgagcugcugguggcccuggagaaccagcacaccaucgaccugaccgacagcgagaugaacaagcuguucgagagaaccaagaagcagcugagagagaacgccgaggacaugggcaacggcugcuucaagaucuaccacaagugcgacaacgccugcaucggcagcaucagaaacggcaccuacgaccacgacguguacagagacgaggcccugaacaacagauuccagaucaagggcguggagcugaagagcggcuacaaggacuggauccuguggaucagcuucgccaucagcugcuuccugcugugcguggcccugcugggcuucaucaugugggccugccagaagggcaacaucagaugcaacaucugcaucuga

SEQ ID NO: 161375 - RNA, 1701 nt, Artificial Sequence
  derived and/or modified CDS sequence (opt4) from hemagglutinin__InfluenzaA__ABI92731
augaagaccaucaucgcccugagcuacauccugugccugguguucgcccagaagcugcccggcaacgacaacagcaccgccacccugugccugggccaccacgccgugcccaacggcaccaucgugaagaccaucaccaacgaccagaucgaggugaccaacgccaccgagcuggugcagagcagcagcaccggcggcaucugcgacagcccccaccagauccuggacggcgagaacugcacccugaucgacgcccugcugggcgacccccagugcgacggcuuccagaacaagaagugggaccuguucguggagagaagcaaggccuacagcaacugcuaccccuacgacgugcccgacuacgccagccugagaagccugguggccagcagcggcacccuggaguucaacaacgagagcuucgacuggaccggcgugacccagaacggcaccagcagcgccugcaagagaagaagcaacaagagcuucuucagcagacugaacuggcugacccaccugaaguacaaguaccccgcccugaacgugaccaugcccaacaacgagaaguucgacaagcuguacaucuggggcgugcaccaccccggcaccgacagcgaccagaucagccuguacgcccaggccagcggcagaaucaccgugagcaccaagagaagccagcagaccgugauccccaacaucggcagcagacccagagugagagacgugagcagcagaaucagcaucuacuggaccaucgugaagcccggcgacauccugcugaucaacagcaccggcaaccugaucgcccccagaggcuacuucaagaucagaagcggcaagagcagcaucaugagaagcgacgcccccaucggcaagugcaacagcgagugcaucacccccaacggcagcauccccaacgacaagcccuuccagaacgugaacagaaucaccuacggcgccugccccagauacgugaagcagaacacccugaagcuggccaccggcaugagaaacgugcccgagaagcagaccagaggcaucuucggcgccaucgccggcuucaucgagaacggcugggagggcaugguggacggcugguacggcuucagacaccagaacagcgagggcaccggccaggccgccgaccugaagagcacccaggccgccaucaaccagaucaacggcaagcugaacagacugaucggcaagaccaacgagaaguuccaccagaucgagaaggaguucagcgagguggagggcagaauccaggaccuggagaaguacguggaggacaccaagaucgaccuguggagcuacaacgccgagcugcugguggcccuggagaaccagcacaccaucgaccugaccgacagcgagaugaacaagcuguucgagagaaccaagagacagcugagagagaacgccgaggacaugggcaacggcugcuucaagaucuaccacaagugcgacaacgccugcaucggcagcaucagaaacggcaccuacgaccacgacguguacagagacgaggcccugaacaacagauuccagaucaagggcguggagcugaagagcggcuacaaggacuggauccuguggaucagcuucgccaucagcugcuuccugcugugcguggcccugcugggcuucaucaugugggccugccagaagggcaacaucagaugcaacaucugcaucuga

SEQ ID NO: 161376 - RNA, 1701 nt, Artificial Sequence
  derived and/or modified CDS sequence (opt4) from hemagglutinin__InfluenzaA__ABI92742
augaagaccaucaucgcccugagcuacauccugugccugguguucagccagaagcugcccggcaacgacaacagcaccgccacccugugccugggccaccacgccgugcccaacggcaccaucgugaagaccaucaccaacgaccagaucgaggugaccaacgccaccgagcuggugcagagcagcagcaccggcggcaucugcgacagcccccaccagauccuggacggcgagaacugcacccugaucgacgcccugcugggcgacccccagugcgacggcuuccagaacaagaagugggaccuguucguggagagaagcaaggccuacagcaacugcuaccccuacgacgugcccgaccacgccagccugagaagccugguggccagcagcggcacccuggaguucaacaacgagagcuucgacuggaccggcgugacccagaacggcaccagcagcgccugcaagagaagaagcaacaagagcuucuucagcagacugaacuggcugacccaccugaaguacaaguaccccgcccugaacgugaccaugcccaacaacgagaaguucgacaagcuguacaucuggggcgugcaccaccccggcaccgacagcgaccagaucagccuguacgcccaggccagcggcagaaucaccgugagcaccaagagaagccagcagaccgugauccccaacaucggcagcagacccagagugagagacgugagcagcagaaucagcaucuacuggaccaucgugaagcccggcgacauccugcugaucaacagcaccggcaaccugaucgcccccagaggcuacuucaagaucagaagcggcaagagcagcaucaugagaagcgacgcccccaucggcaagugcaacagcgagugcaucacccccaacggcagcauccccaacgacaagcccuuccagaacgugaacagaaucaccuacggcgccugccccagauacgugaagcagaacacccugaagcuggccaccggcaugagaaacgugcccgagaagcagaccagaggcaucuucggcgccaucgccggcuucaucgagaacggcugggagggcaugguggacggcugguacggcuucagacaccagaacagcgagggcaccggccaggccgccgaccugaagagcacccaggccgccaucaaccagaucaacggcaagcugaacagacugaucggcaagaccaacgagaaguuccaccagaucgagaaggaguucagcgagguggagggcagaauccaggaccuggagaaguacguggaggacaccaagaucgaccuguggagcuacaacgccgagcugcugguggcccuggagaaccagcacaccaucgaccugaccgacagcgagaugaacaagcuguucgagagaaccaagaagcagcugagagagaacgccgaggacaugggcaacggcugcuucaagaucuaccacaagugcgacaacgccugcaucggcagcaucagaaacggcaccuacgaccacgacguguacagagacgaggcccugaacaacagauuccagaucaagggcguggagcugaagagcggcuacaaggacuggauccuguggaucagcuucgccaucagcugcuuccugcugugcguggcccugcugggcuucaucaugugggccugccagaagggcaacaucagaugcaacaucugcaucuga

SEQ ID NO: 161377 - RNA, 1701 nt, Artificial Sequence
  derived and/or modified CDS sequence (opt4) from hemagglutinin__InfluenzaA__ABI92753
augaagaccaucaucgcccugagcuacauccugugccugguguucgcccagaagcugcccggcaacgacaacagcaccgccacccugugccugggccaccacgccgugcccaacggcaccaucgugaagaccaucaccaacgaccagaucgaggugaccaacgccaccgagcuggugcagagcagcagcaccggcggcaucugcgacagcccccaccagauccuggacggcgagaacugcacccugaucgacgcccugcugggcgacccccagugcgacggcuuccagaacaagaagugggaccuguucguggagagaagcaaggccuacagcaacugcuaccccuacgacgugcccgacuacgccuaccugagaagccugguggccagcagcggcacccuggaguucaacaacgagagcuucgacuggaccggcgugacccagaacggcaccagcagcgccugcaagagaagaagcaacaagagcuucuucagcagacugaacuggcugacccaccugaaguacaaguaccccgcccugaacgugaccaugcccaacaacgagaaguucgacaagcuguacaucuggggcgugcaccaccccggcaccgacagcgaccagaucagccuguacgcccaggccagcggcagaaucaccgugagcaccaagagaagccagcagaccgugauccccaacaucggcagcagacccagagugagagacgugagcagcagaaucagcaucuacuggaccaucgugaagcccggcgacauccugcugaucaacagcaccggcaaccugaucgcccccagaggcuacuucaagaucagaagcggcaagagcagcaucaugagaagcgacgcccccaucggcaagugcaacagcgagugcaucacccccaacggcagcauccccaacgacaagcccuuccagaacgugaacagaaucaccuacggcgccugccccagauacgugaagcagaacacccugaagcuggccaccggcaugagaaacgugcccgagaagcagaccagaggcaucuucggcgccaucgccggcuucaucgagaacggcugggagggcaugguggacggcugguacggcuucagacaccagaacagcgagggcaccggccaggccgccgaccugaagagcacccaggccgccaucaaccagaucaacggcaagcugaacagacugaucggcaagaccaacgagaaguuccaccagaucgagaaggaguucagcgagguggagggcagaauccaggaccuggagaaguacguggaggacaccaagaucgaccuguggagcuacaacgccgagcugcugguggcccuggagaaccagcacaccaucgaccugaccgacagcgagaugaacaagcuguucgagagaaccaagagacagcugagagagaacgccgaggacaugggcaacggcugcuucaagaucuaccacaagugcgacaacgccugcaucggcagcaucagaaacggcaccuacgaccacgacguguacagagacgaggcccugaacaacagauuccagaucaagggcguggagcugaagagcggcuacaaggacuggauccuguggaucagcuucgccaucagcugcuuccugcugugcguggcccugcugggcuucaucaugugggccugccagaagggcaacaucagaugcaacaucugcaucuga

SEQ ID NO: 161378 - RNA, 1701 nt, Artificial Sequence
  derived and/or modified CDS sequence (opt4) from hemagglutinin__InfluenzaA__ABI92764
augaagaccaucaucgcccugagcuacauccugugccugguguucgcccagaagcugcccggcaacgacaacagcaccgccacccugugccugggccaccacgccgugcccaacggcaccaucgugaagaccaucaccaacgaccagaucgaggugaccaacgccaccgagcuggugcagagcagcagcaccggcgagaucugcgacagcccccaccagauccuggacggcgagaacugcacccugaucgacgcccugcugggcgacccccagugcgacggcuuccagaacaagaagugggaccuguucguggagagaagcaaggccuacagcaacugcuaccccuacgacgugcccgacuacgccagccugagaagccugguggccagcagcggcacccuggaguucaacaacgagagcuucgacuggaccggcgugacccagaacggcaccagcagcgccugcaagagaggcagcaacaagagcuucuucagcagacugaacuggcugacccaccugaaguacaaguaccccgcccugaacgugaccaugcccaacaacgagaaguucgacaagcuguacaucuggggcgugcaccaccccggcaccgacagcgaccagaucagccuguacgcccaggccagcggcagaaucaccgugagcaccaagagaagccagcagaccgugauccccaacaucggcagcagacccagagugagagacgugagcagcagaaucagcaucuacuggaccaucgugaagcccggcgacauccugcugaucaacagcaccggcaaccugaucgcccccagaggcuacuucaagaucagaagcggcaagagcagcaucaugagaagcgacgcccccaucggcaagugcaacagcgagugcaucacccccaacggcagcauccccaacgacaagcccuuccagaacgugaacagaaucaccuacggcgccugccccagauacgugaagcagaacacccugaagcuggccaccggcaugagaaacgugcccgagaagcagaccagaggcaucuucggcgccaucgccggcuucaucgagaacggcugggagggcaugguggacggcugguacggcuucagacaccagaacagcgagggcaccggccaggccgccgaccugaagagcacccaggccgccaucaaccagaucaacggcaagcugaacagacugaucggcaagaccaacgagaaguuccaccagaucgagaaggaguucagcgagguggagggcagaauccaggaccuggagaaguacguggaggacaccaagaucgaccuguggagcuacaacgccgagcugcugguggcccuggagaaccagcacaccaucgaccugaccgacagcgagaugaacaagcuguucgagagaaccaagagacagcugagagagaacgccgaggacaugggcaacggcugcuucaagaucuaccacaagugcgacaacgccugcaucggcagcaucagaaacggcaccuacgaccacgacguguacagagacgaggcccugaacaacagauuccagaucaagggcguggagcugaagagcggcuacaaggacuggauccuguggaucagcuucgccaucagcugcuuccugcugugcguggcccugcugggcuucaucaugugggccugccagaagggcaacaucagaugcaacaucugcaucuga

SEQ ID NO: 161379 - RNA, 1701 nt, Artificial Sequence; identical to SEQ ID NO: 161371
  derived and/or modified CDS sequence (opt4) from hemagglutinin__InfluenzaA__ABI92775

SEQ ID NO: 161380 - RNA, 1701 nt, Artificial Sequence; identical to SEQ ID NO: 160303
  derived and/or modified CDS sequence (opt4) from hemagglutinin__InfluenzaA__ABI92786

SEQ ID NO: 161381 - RNA, 1701 nt, Artificial Sequence
  derived and/or modified CDS sequence (opt4) from hemagglutinin__InfluenzaA__ABI92797
augaagaccaucaucgcccugagcuacauccugugccugguguucgcccagaagcugcccggcaacgacaacagcaccgccacccugugccugggccaccacgccgugcccaacggcaccaucgugaagaccaucaccaacgaccagaucgaggugaccaacgccaccgagcuggugcagagcagcagcaccggcggcaucugcgacagcccccaccagauccuggacggcgagaacugcacccugaucgacgcccugcugggcgacccccagugcgacggcuuccagaacaagaagugggaccuguucguggagagaagcaaggccuacagcaacugcuaccccuacgacgugcccgacuacgccagccugagaagccugguggccagcagcggcacccuggaguucaacaacgagagcuucaacuggaccggcgugacccagaacggcaccagcagcgccugcaagagaagaagcaacaacagcuucuucagcagacugaacuggcugacccaccugaaguucaaguaccccgcccugaacgugaccaugcccaacaacgagaaguucgacaagcuguacaucuggggcgugcaccaccccggcaccgacaacgaccagaucagccuguacgcccaggccagcggcagaaucaccgugagcaccaagagaagccagcagaccgugaucagcaacaucggcagcagacccagagugagagacauccccagcagaaucagcaucuacuggaccaucgugaagcccggcgacauccugcugaucaacagcaccggcaaccugaucgcccccagaggcuacuucaagaucagaagcggcaagagcagcaucaugagaagcgacgcccccaucggcaagugcaacagcgagugcaucacccccaacggcagcauccccaacgacaagcccuuccagaacgugaacagaaucaccuacggcgccugccccagauacgugaagcagaacacccugaagcuggccaccggcaugagaaacgugcccgagaagcagaccagaggcaucuucggcgccaucgccggcuucaucgagaacggcugggagggcaugguggacggcugguacggcuucagacaccagaacagcgagggcaucggccaggccgccgaccugaagagcacccaggccgccaucaaccagaucaacggcaagcugaacagacugaucggcaagaccaacgagaaguuccaccagaucgagaaggaguucagcgagguggagggcagaauccaggaccuggagaaguacguggaggacaccaagaucgaccuguggagcuacaacgccgagcugcugguggcccuggagaaccagcacaccaucgaccugaccgacagcgagaugaacaagcuguucgagagaaccaagaagcagcugagagagaacgccgaggacaugggcaacggcugcuucaagaucuaccacaagugcgacaacgccugcaucggcagcaucagaaacggcaccuacgaccacgacguguacagagacgaggcccugaacaacagauuccagaucaagggcguggagcugaagagcggcuacaaggacuggauccuguggaucagcuucgccaucagcugcuuccugcugugcguggcccugcugggcuucaucaugugggccugccagaagggcaacaucagaugcaacaucugcaucuga

SEQ ID NO: 161382 - RNA, 1701 nt, Artificial Sequence; identical to SEQ ID NO: 160303
  derived and/or modified CDS sequence (opt4) from hemagglutinin__InfluenzaA__ABI92808

SEQ ID NO: 161383 - RNA, 1701 nt, Artificial Sequence; identical to SEQ ID NO: 160303
  derived and/or modified CDS sequence (opt4) from hemagglutinin__InfluenzaA__ABI92819

SEQ ID NO: 161384 - RNA, 1701 nt, Artificial Sequence; identical to SEQ ID NO: 160303
  derived and/or modified CDS sequence (opt4) from hemagglutinin__InfluenzaA__ABI92841

SEQ ID NO: 161385 - RNA, 1701 nt, Artificial Sequence
  derived and/or modified CDS sequence (opt4) from hemagglutinin__InfluenzaA__ABI92852
augaagaccaucaucgcccugagcuacauccugugccugguguucgcccagaagcugcccggcaacgacaacagcaccgccacccugugccugggccaccacgccgugcccaacggcaccaucgugaagaccaucaccaacgaccagaucgaggugaccaacgccaccgagcuggugcagagcagcagcaccggcggcaucugcgacagcccccaccagauccuggacggcgagaacugcacccugaucgacgcccugcugggcgacccccagugcgacggcuuccagaacaagaagugggaccuguucguggagagaagcaaggccuacagcaacugcuaccccuacgacgugcccgacuacgccagccugagaagccugguggccagcagcggcacccuggaguucaacaacgagagcuucaacuggaccggcgugacccagaacggcaccagcagcgccugcaagagaagaagcaacaacagcuucuucagcagacugaacuggcugacccaccugaaguucaaguaccccgcccugaacgugaccaugcccaacaacgagaaguucgacaagcuguacaucuggggcgugcaccaccccggcaccgacaacgaccagaucagccuguacgcccaggccagcggcagaaucaccgugagcaccaagagaagccagcagaccgugauccccaacaucggcuacagacccagagugagagacauccccagcagaaucagcaucuacuggaccaucgugaagcccggcgacauccugcugaucaacagcaccggcaaccugaucgcccccagaggcuacuucaagaucagaagcggcaagagcagcaucaugagaagcgacgcccccaucggcaagugcaacagcgagugcaucacccccaacggcagcauccccaacgacaagcccuuccagaacgugaacagaaucaccuacggcgccugccccagauacgugaagcagaacacccugaagcuggccaccggcaugagaaacgugcccgagaagcagaccagaggcaucuucggcgccaucgccggcuucaucgagaacggcugggagggcaugguggacggcugguacggcuucagacaccagaacagcgagggcaucggccaggccgccgaccugaagagcacccaggccgccaucaaccagaucaacggcaagcugaacagacugaucggcaagaccaacgagaaguuccaccagaucgagaaggaguucagcgagguggagggcagaauccaggaccuggagaaguacguggaggacaccaagaucgaccuguggagcuacaacgccgagcugcugguggcccuggagaaccagcacaccaucgaccugaccgacagcgagaugaacaagcuguucgagagaaccaagaagcagcugagagagaacgccgaggacaugggcaacggcugcuucaagaucuaccacaagugcgacaacgccugcaucggcagcaucagaaacggcaccuacgaccacgacguguacagagacgaggcccugaacaacagauuccagaucaagggcguggagcugaagagcggcuacaaggacuggauccuguggaucagcuucgccaucagcugcuuccugcugugcguggcccugcugggcuucaucaugugggccugccagaagggcaacaucagaugcaacaucugcaucuga

SEQ ID NO: 161386 - RNA, 1701 nt, Artificial Sequence
  derived and/or modified CDS sequence (opt4) from hemagglutinin__InfluenzaA__ABI92863
augaagaccaucaucgcccugagcuacauccugugccugguguucgcccagaagcugcccggcaacgacaacagcaccgccacccugugccugggccaccacgccgugcccaacggcaccaucgugaagaccaucaccaacgaccagaucgaggugaccaacgccaccgagcuggugcagagcagcagcaccggcggcaucugcgacagcccccaccagauccuggacggcgagaacugcacccugaucgacgcccugcugggcgacccccagugcgacggcuuccagaacaagaagugggaccuguucguggagagaagcaaggcccacagcaacugcuaccccuacgacgugcccgacuacgccagccugagaagccugaucgccagcagcggcacccuggaguucaacaacgagagcuucaacuggaccggcgugacccagaacggcaccagcagcgccugcaagagaagaagcaaccagagcuucuucagcagacugaacuggcugacccaccugaaguucaaguaccccgcccugaacgugaccaugcccaacaacgagaaguucgacaagcuguacaucuggggcgugcaccaccccggcaccgacagcgaccagaucagccuguacgcccaggcccccggcagaaucaccgugagcaccaagagaagccagcagaccgugauccccaacaucggcagcagacccagagugagagacaucagcagcagaaucagcaucuacuggaccaucgugaagcccggcgacauccugcugaucaacagcaccggcaaccugaucgcccccagaggcuacuucaagaucagaagcggcaagagcagcaucaugaagagcgacgcccccaucggcagaugcaacagcgagugcaucacccccaacggcagcauccccaacgacaagcccuuccagaacgugaacagaaucaccuacggcgccugccccagauacgugaagcagaacacccugaagcuggccaccggcaugagaaacgugcccgagaagcagaccagaggcaucuucggcgccaucgccggcuucaucgagaacggcugggagggcaugguggacggcugguacggcuucagacaccagaacagcgagggcaccggccaggccgccgaccugaagagcacccaggccgccaucaaccagaucaacggcaagcugaacagacugaucggcaagaccaacgagaaguuccaccagaucgagaaggaguucagcgagguggagggcagaauccaggaccuggagaaguacguggaggacaccaagaucgaccuguggagcuacaacgccgagcugcugguggcccuggagaaccagcacaccaucgaccugaccgacagcgagaugaacaagcuguucgagagaaccaagaagcagcugagagagaacgccgaggacaugggcaacggcugcuucaagaucuaccacaagugcgacaacgccugcaucggcagcaucagaaacggcaccuacgaccacgacguguacagagacgaggcccugaacaacagauuccagaucaagggcguggagcugaagagcggcuacaaggacuggauccuguggaucagcuucgccaucagcugccugcugcugugcguggcccugcugggcuucaucaugugggccugccagaagggcaacaucagaugcaacaucugcaucuga

SEQ ID NO: 161387 - RNA, 1701 nt, Artificial Sequence; identical to SEQ ID NO: 160303
  derived and/or modified CDS sequence (opt4) from hemagglutinin__InfluenzaA__ABI92874

SEQ ID NO: 161388 - RNA, 1701 nt, Artificial Sequence; identical to SEQ ID NO: 160303
  derived and/or modified CDS sequence (opt4) from hemagglutinin__InfluenzaA__ABI92885

SEQ ID NO: 161389 - RNA, 1701 nt, Artificial Sequence
  derived and/or modified CDS sequence (opt4) from hemagglutinin__InfluenzaA__ABI92907
augaagaccaucaucgcccugagcuacauccugugccugguguucgcccagaagcugcccggcaacgacaacagcaccgccacccugugccugggccaccacgccgugcccaacggcaccaucgugaagaccaucaccaacgaccagaucgaggugaccaacgccaccgagcuggugcagagcagcagcaccggcggcaucugcgacagccccuaccagauccuggacggcgagaacugcacccugaucgacgcccugcugggcgacccccagugcgacggcuuccagaacaagaagugggaccuguucguggagagaagcaaggccuacagcaacugcuaccccuacgacgugcccgacuacgugagccugagaagccugguggccagcagcggcacccuggaguucaacaacgagagcuucaacuggaccggcgugacccagaacggcaccagcagcgccugcaagagaagaagcaacaacagcuucuucagcagacugaacuggcugacccaccugaaguucaaguaccccgcccugaacgugaccaugcccaacaacgagaaguucgacaagcuguacaucuggggcgugcaccaccccggcaccgacaacgaccagaucagccuguacgcccaggccagcggcagaaucaccgugagcaccaagagaagccagcagaccgugauccccaacaucggcagcagacccagagugagagacauccccagcagaaucagcaucuacuggaccaucgugaagcccggcgacauccugcugaucaacagcaccggcaaccugaucgcccccagaggcuacuucaagaucagaagcggcaagagcagcaucaugagaagcgacgcccccaucggcaagugcaacagcgagugcaucacccccaacggcagcauccccaacgacaagcccuuccagaacgugaacagaaucaccuacggcgccugccccagauacgugaagcagaacacccugaagcuggccaccggcaugagaaacgugcccgagaagcagaccagaggcaucuucggcgccaucgccggcuucaucgagaacggcugggagggcaugguggacggcugguacggcuucagacaccagaacagcgagggcaucggccaggccgccgaccugaagagcacccaggccgccaucaaccagaucaacggcaagcugaacagacugaucggcaagaccaacgagaaguuccaccagaucgagaaggaguucagcgagguggagggcagaauccaggaccuggagaaguacguggaggacaccaagaucgaccuguggagcuacaacgccgagcugcugguggcccuggagaaccagcacaccaucgaccugaccgacagcgagaugaacaagcuguucgagagaaccaagaagcagcugagagagaacgccgaggacaugggcaacggcugcuucaagaucuaccacaagugcgacaacgccugcaucggcagcaucagaaacggcaccuacgaccacgacguguacagagacgaggcccugaacaacagauuccagaucaagggcguggagcugaagagcggcuacaaggacuggauccuguggaucagcuucgccaucagcugcuuccugcugugcguggcccugcugggcuucaucaugugggccugccagaagggcaacaucagaugcaacaucugcaucuga

SEQ ID NO: 161390 - RNA, 1701 nt, Artificial Sequence; identical to SEQ ID NO: 160303
  derived and/or modified CDS sequence (opt4) from hemagglutinin__InfluenzaA__ABI92918

SEQ ID NO: 161391 - RNA, 1701 nt, Artificial Sequence; identical to SEQ ID NO: 161389
  derived and/or modified CDS sequence (opt4) from hemagglutinin__InfluenzaA__ABI92929

SEQ ID NO: 161392 - RNA, 1701 nt, Artificial Sequence
  derived and/or modified CDS sequence (opt4) from hemagglutinin__InfluenzaA__ABI92940
augaagaccaucaucgccuucaacuacauccugugccugguguucgcccagaagcugcccggcaacgacaacagcaccgccacccugugccugggccaccacgccgugcccaacggcaccaucgugaagaccaucaccaacgaccagaucgaggugaccaacgccaccgagcuggugcagagcagcagcaccggcggcaucugcgacagcccccaccagauccuggacggcgagaacugcacccugaucgacgcccugcugggcgacccccagugcgacggcuuccagaacaagaagugggaccuguucguggagagaagcaaggccuacagcaacugcuaccccuacgacgugcccgacuacgccagccugagaagccugguggccagcagcggcacccuggaguucaacaacgagaucuucaacuggaccggcgugacccagaacggcaccagcagcgccugcaagagaagaagcaacaacagcuucuucagcagacugaacuggcugacccaccugaaguucaaguaccccgcccugaacgugaccaugcccaacaacgagaaguucgacaagcuguacaucuggggcgugcaccaccccggcaccgacaacgaccagaucagccuguacgcccaggccagcggcagaaucaccgugagcaccaagagaagccagcagaccgugauccccaacaucggcagcagacccagagugagagacauccccagcagaaucagcaucuacuggaccaucgugaagcccggcgacauccugcugaucaacagcaccggcaaccugaucgcccccagaggcuacuucaagaucagaagcggcaagagcagcaucaugagaagcgacgcccccaucggcaagugcaacagcgagugcaucacccccaacggcagcauccccaacgacaagcccuuccagaacgugaacagaaucaccuacggcgccugccccagauacgugaagcagaacacccugaagcuggccaccggcaugagaaacgugcccgagaagcagaccagaggcaucuucggcgccaucgccggcuucaucgagaacggcugggagggcaugguggacggcugguacggcuucagacaccagaacagcgagggcaccggccaggccgccgaccugaagagcacccaggccgccaucaaccagaucaacggcaagcugaacagacugaucggcaagaccaacgagaaguuccaccagaucgagaaggaguucagcgagguggagggcagaauccaggaccuggagaaguacguggaggacaccaagaucgaccuguggagcuacaacgccgagcugcugguggcccuggagaaccagcacaccaucgaccugaccgacagcgagaugaacaagcuguucgagagaaccaagaagcagcugagagagaacgccgaggacaugggcaacggcugcuucaagaucuaccacaagugcgacaacgccugcaucggcagcaucagaaacggcaccuacgaccacgacguguacagagacgaggcccugaacaacagauuccagaucaagggcguggagcugaagagcggcuacaaggacuggauccuguggaucagcuucgccaucagcugcuuccugcugugcguggcccugcugggcuucaucaugugggccugccagaagggcaacaucagaugcaacaucugcaucuga

SEQ ID NO: 161393 - RNA, 1701 nt, Artificial Sequence
  derived and/or modified CDS sequence (opt4) from hemagglutinin__InfluenzaA__ABI92951
augaagaccaucaucgcccugagcuacauccugugccugguguucgcccagaagcugcccggcaacgacaacagcaccgccacccugugccugggccaccacgccgugcccaacggcaccaucgugaagaccaucaccaacgaccagaucgaggugaccaacgccaccgagcuggugcagagcagcagcaccggcggcaucugcgacagcccccaccagauccuggacggcgagaacugcacccugaucgacgcccugcugggcgacccccagugcgacggcuuccagaacaagaagugggaccuguucguggagagaagcaaggccuacagcaacugcuaccccuacgacgugcccgacuacgccagccugagaagccugaucgccagcagcggcacccuggaguucaacaacgagagcuucaacuggaccggcgugacccagaacggcaccagcagcgccugcaagagaagaagcaacagcagcuucuucagcagacugaacuggcugacccaccugaaguucaaguaccccgcccugaacgugaccaugcccaacaacgaggaguucgacaagcuguacaucuggggcgugcaccaccccggcaccuacaacgaccagaucagccuguacgcccaggccagcggcagaaucaccgugagcaccaagagaagccagcagaccgugauccccaacaucggcagcagacccagagugagagacauccccagcagaaucagcaucuacuggaccaucgugaagcccggcgacauccugcugaucaacagcaccggcaaccugaucgcccccagaggcuacuucaagaucagaagcggcaagagcagcaucaugagaagcgacgcccccaucggcaagugcaacagcgagugcaucacccccaacggcagcauccccaacgacaagcccuuccagaacgugaacagaaucaccuacggcgccugccccagauacgugaagcagaacacccugaagcuggccaccggcaugagaaacgugcccgagaagcagaccagaggcaucuucggcgccaucgccggcuucaucgagaacggcugggagggcaugguggacggcugguacggcuucagacaccagaacagcgagggcaucggccaggccgccgaccugaagagcacccaggccgccaucgaccagaucaacggcaagcugaacagacugaucggcaagaccaacgagaaguuccaccagaucgagaaggaguucagcgagguggagggcagaauccaggaccuggagaaguacguggaggacaccaagaucgaccuguggagcuacaacgccgagcugcugguggcccuggagaaccagcacaccaucgaccugaccgacagcgagaugaacaagcuguucgagagaaccaagaagcagcugagagagaacgccgaggacaugggcaacggcugcuucaagaucuaccacaagugcgacaacagcugcaucggcagcaucagaaacggcaccuacgaccacgacguguacagagacgaggcccugaacaacagauuccagaucaagggcguggagcugaagagcggcuacaaggacuggauccuguggaucagcuucgccaucagcugcuuccugcugugcguggcccugcugggcuucaucaugugggccugccagaagggcaacaucagaugcaacaucugcaucuga

SEQ ID NO: 161394 - RNA, 1701 nt, Artificial Sequence
  derived and/or modified CDS sequence (opt4) from hemagglutinin__InfluenzaA__ABI92962
augaagaccaucaucgcccugagcuacauccugugccugguguucgcccagaagcugcccggcaacgacaacagcaccgccacccugugccugggccaccacgccgugcccaacggcaccaucgugaagaccaucaccaacgaccagaucgaggugaccaacgccaccgagcuggugcagagcagcagcaccggcggcaucugcgacagcccccaccagauccuggacggcgagaacugcacccugaucgacgcccugcugggcgacccccagugcgacggcuuccagaacaagaagugggaccuguucguggagagaaacaaggccuacagcaacugcuaccccuacgacgugcccgacuacgccagccugagaagccugaucgccagcagcggcacccuggaguucaacaacgagagcuucaacuggaccggcgugacccagaacggcaccagcagcgccugcaagagaagaagcaacagcagcuucuucagcagacugaacuggcugacccaccugaaguucaaguaccccgcccugaacgugaccaugcccaacaacgaggaguucgacaagcuguacaucuggggcgugcaccaccccggcaccuacaacgaccagaucagccuguacgcccaggccagcggcagaaucaccgugagcaccaagagaagccagcagaccgugauccccaacaucggcagcagacccagagugagagacauccccagcagaaucagcaucuacuggaccaucgugaagcccggcgacauccugcugaucaacagcaccggcaaccugaucgcccccagaggcuacuucaagaucagaagcggcaagagcagcaucaugagaagcgacgcccccaucggcaagugcaacagcgagugcaucacccccaacggcagcauccccaacgacaagcccuuccagaacgugaacagaaucaccuacggcgccugccccagauacgugaagcagaacacccugaagcuggccaccggcaugagaaacgugcccgagaagcagaccagaggcaucuucggcgccaucgccggcuucaucgagaacggcugggagggcaugguggacggcugguacggcuucagacaccagaacagcgagggcaucggccaggccgccgaccugaagagcacccaggccgccaucgaccagaucaacggcaagcugaacagacugaucggcaagaccaacgagaaguuccaccagaucgagaaggaguucagcgagguggagggcagaauccaggaccuggagaaguacguggaggacaccaagaucgaccuguggagcuacaacgccgagcugcugguggcccuggagaaccagcacaccaucgaccugaccgacagcgagaugaacaagcuguucgagagaaccaagaagcagcugagagagaacgccgaggacaugggcaacggcugcuucaagaucuaccacaagugcgacaacgccugcaucggcagcaucagaaacggcaccuacgaccacgacguguacagagacgaggcccugaacaacagauuccagaucaagggcguggagcugaagagcggcuacaaggacuggauccuguggaucagcuucgccaucagcugcuuccugcugugcguggcccugcugggcuucaucaugugggccugccagaagggcaacaucagaugcaacaucugcaucuga

SEQ ID NO: 161395 - RNA, 1701 nt, Artificial Sequence; identical to SEQ ID NO: 160693
  derived and/or modified CDS sequence (opt4) from hemagglutinin__InfluenzaA__ABI92973

SEQ ID NO: 161396 - RNA, 1701 nt, Artificial Sequence; identical to SEQ ID NO: 160693
  derived and/or modified CDS sequence (opt4) from hemagglutinin__InfluenzaA__ABI92984

SEQ ID NO: 161397 - RNA, 1701 nt, Artificial Sequence
  derived and/or modified CDS sequence (opt4) from hemagglutinin__InfluenzaA__ABI92995
augaagaccaucaucgcccugagcuacauccugugccugguguucgcccagaagcugcccggcaacgacaacagcaccgccacccugugccugggccaccacgccgugcccaacggcaccaucgugaagaccaucaccaacgaccagaucgaggugaccaacgccaccgagcuggugcagagcagcagcaccggcggcaucugcgacagcccccaccagauccuggacggcgagaacugcacccugaucgacgcccugcugggcgacccccagugcgacggcuuccagaacaagaagugggaccuguucguggagagaagcaaggccuacagcaacugcuaccccuacgacgugcccgacuacgccagccugagaagccugaucgccagcagcggcacccuggaguucaacaacgagagcuucaacuggaccggcgugacccagaacggcaccagcagcgccugcaagagaagaagcaacagcagcuucuucagcagacugaacuggcugacccaccugaaguucaaguaccccgcccugaacgugaccaugcccaacaacgaggaguucgacaagcuguacaucuggggcgugcaccaccccggcaccuacaacgaccagaucagccuguacgcccaggccagcggcagaaucaccgugagcaccaagagaagccagcagaccgugauccccaacaucggcagcagacccagaaucagagacauccccagcagaaucagcaucuacuggaccaucgugaagcccggcgacauccugcugaucaacagcaccggcaaccugaucgcccccagaggcuacuucaagaucagaagcggcaagagcagcaucaugagaagcgacgcccccaucggcaagugcaacagcgagugcaucacccccaacggcagcauccccaacgacaagcccuuccagaacgugaacagaaucaccuacggcgccugccccaaguacgugaagcagaacacccugaagcuggccaccggcaugagaaacgugcccgagaagcagaccagaggcaucuucggcgccaucgccggcuucaucgagaacggcugggagggcaugguggacggcugguacggcuucagacaccagaacagcgagggcaucggccaggccgccgaccugaagagcacccaggccgccaucgaccagaucaacggcaagcugaacagacugaucggcaagaccaacgagaaguuccaccagaucgagaaggaguucagcgagguggagggcagaauccaggaccuggagaaguacguggaggacaccaagaucgaccuguggagcuacaacgccgagcugcugguggcccuggagaaccagcacaccaucgaccugaccgacagcgagaugaacaagcuguucgagagaaccaagaagcagcugagagagaacgccgaggacaugggcaacggcugcuucaagaucuaccacaagugcgacaacgccugcaucggcagcaucagaaacggcaccuacgaccacgacguguacagagacgaggcccugaacaacagauuccagaucaagggcguggagcugaagagcggcuacaaggacuggauccuguggaucagcuucgccaucagcugcuuccugcugugcguggcccugcugggcuucaucaugugggccugccagaagggcaacaucagaugcaacaucugcaucuga

SEQ ID NO: 161398 - RNA, 1701 nt, Artificial Sequence; identical to SEQ ID NO: 160693
  derived and/or modified CDS sequence (opt4) from hemagglutinin__InfluenzaA__ABI93006

SEQ ID NO: 161399 - RNA, 1701 nt, Artificial Sequence; identical to SEQ ID NO: 160693
  derived and/or modified CDS sequence (opt4) from hemagglutinin__InfluenzaA__ABI93017

SEQ ID NO: 161400 - RNA, 1698 nt, Artificial Sequence; identical to SEQ ID NO: 161292
  derived and/or modified CDS sequence (opt4) from hemagglutinin__InfluenzaA__ABI93028

SEQ ID NO: 161401 - RNA, 1701 nt, Artificial Sequence; identical to SEQ ID NO: 161026
  derived and/or modified CDS sequence (opt4) from hemagglutinin__InfluenzaA__ABI93039

SEQ ID NO: 161402 - RNA, 1701 nt, Artificial Sequence
  derived and/or modified CDS sequence (opt4) from hemagglutinin__InfluenzaA__ABI93061
augaagaccaucaucgcccugagcuacauccugugccugguguucgcccagaagcugcccggcaacgacaacagcaccgccacccugugccugggccaccacgccgugcccaacggcacccuggugaagaccaucaccaacgaccagaucgaggugaccaacgccaccgagcuggugcagagcagcagcaccggcagaaucugcgacagcccccaccagauccuggacggcgagaacugcacccugaucgacgcccugcugggcgacccccacugcgacggcuuccagaacaaggagugggaccuguucguggagagaagcaaggccuacagcaacugcuaccccuacgacgugcccgacuacgccagccugagaagccugguggccagcagcggcacccuggaguucaacaacgagagcuucaacuggaccggcguggcccagaacggcaccagcagcgccugcaagagaagaagcaacaagagcuucuucagcagacugaacuggcugcaccagcugaaguacaaguaccccgcccugaacgugaccaugcccaacaacgagaaguucgacaagcuguacaucuggggcgugcaccaccccagcaccgacagcgaccagaucagccuguacgcccaggccagcggcagagugaccgugagcaccaagagaagccagcagaccgugauccccaacaucggcagcagacccugggugagaggcgugagcagcagaaucagcaucuacuggaccaucgugaagcccggcgacauccugcugaucaacagcaccggcaaccugaucgcccccagaggcuacuucaagaucagaagcggcaagagcagcaucaugagaagcgacgccagcaucggcaagugcaacagcgagugcaucacccccaacggcagcauccccaacgacaagcccuuccagaacgugaacagaaucaccuacggcgccugccccagauacgugaagcagaacacccugaagcuggccaccggcaugagaaacgugcccgagaagcagaccagaggcaucuucggcgccaucgccggcuucaucgagaacggcugggagggcaugguggacggcugguacggcuucagacaccagaacagcgagggcaccggccaggccgccgaccugaagagcacccaggccgccaucaaccagaucaacggcaagcugaacagacugaucgagaagaccaacgagaaguuccaccagaucgagaaggaguucagcgagguggagggcagaauccaggaccuggagaaguacguggaggacaccaagaucgaccuguggagcuacaacgccgagcugcugguggcccuggagaaccagcacaccaucgaccugaccgacagcgagaugaacaagcuguucgagagaaccaagaagcagcugagagagaacgccgaggacaugggcaacggcugcuucaagaucuaccacaagugcgacaacgccugcaucggcagcaucagaaacggcaccuacgaccacgacguguacagagacgaggcccugaacaacagauuccagaucaagggcguggagcugaagagcggcuacaaggacuggauccuguggaucagcuucgccaucagcugcuuccugcugugcguggugcugcugggcuucaucaugugggccugccagaagggcaacaucagaugcaacaucugcaucuga

SEQ ID NO: 161403 - RNA, 1701 nt, Artificial Sequence; identical to SEQ ID NO: 160710
  derived and/or modified CDS sequence (opt4) from hemagglutinin__InfluenzaA__ABI93072

SEQ ID NO: 161404 - RNA, 1701 nt, Artificial Sequence; identical to SEQ ID NO: 160710
  derived and/or modified CDS sequence (opt4) from hemagglutinin__InfluenzaA__ABI93083

SEQ ID NO: 161405 - RNA, 1701 nt, Artificial Sequence; identical to SEQ ID NO: 160710
  derived and/or modified CDS sequence (opt4) from hemagglutinin__InfluenzaA__ABI93094

SEQ ID NO: 161406 - RNA, 1701 nt, Artificial Sequence; identical to SEQ ID NO: 160710
  derived and/or modified CDS sequence (opt4) from hemagglutinin__InfluenzaA__ABI93105

SEQ ID NO: 161407 - RNA, 1701 nt, Artificial Sequence
  derived and/or modified CDS sequence (opt4) from hemagglutinin__InfluenzaA__ABI93116
augaagaccaucaucgcccugagcuacauccugugccugguguucgcccagaagcugcccggcaacgacaacagcaccgccacccugugccugggccaccacgccgugcccaacggcacccuggugaagaccaucaccaacgaccagaucgaggugaccaacgccaccgagcuggugcagagcagcagcaccggcggcaucugcgacagcccccaccagauccuggacggcgagaacugcacccugaucgacgcccugcugggcgacccccacugcgacggcuuccagaacaaggagugggaccuguucguggagagaagcaaggccuacagcaacugcuaccccuacgacgugcccgacuacgccagccugagaagccugguggccagcagcggcacccuggaguucaacaacgagagcuucaacuggaccggcguggcccagaacggcaccagcagcgccugcaagagaagaagcaacaagagcuucuucagcagacugaacuggcugcaccagcugaaguacaaguaccccgcccugaacgugaccaugcccaacaacgagaaguucgacaagcuguacaucuggggcgugcaccaccccagcaccgacagcgaccagaucagccuguacgcccaggcccccggcagagugaccgugagcaccaagagaagccagcagaccgugauccccaacaucggcagcagacccugggugagaggcgugagcagcagaaucagcaucuacuggaccaucgugaagcccggcgacauccugcugaucaacugcaccggcaaccugaucgcccccagaggcuacuucaagaugagaagcggcaagagcagcaucaugagaagcgacgccagcaucggcaagugcaacagcgagugcaucacccccaacggcagcauccccaacgacaagcccuuccagaacgugaacagaaucaccuacggcgccugccccagauacgugaagcagaacacccugaagcuggccaccggcaugagaaacgugcccgagaagcagaccagaggcaucuucggcgccaucgccggcuucaucgagaacggcugggagggcaugguggacggcugguacggcuucagacaccagaacagcgagggcaccggccaggccgccgaccugaagagcacccaggccgccaucaaccagaucaacggcaagcugaacagacugaucgagaagaccaacgagaaguuccaccagaucgagaaggaguucagcgagguggagggcagaauccaggaccuggagaaguacguggaggacaccaagaucgaccuguggagcuacaacgccgagcugcugguggcccuggagaaccagcacaccaucgaccugaccgacagcgagaugaacaagcuguucgagagaaccaagaagcagcugagagagaacgccgaggacaugggcaacggcugcuucaagaucuaccacaagugcgacaacgccugcaucggcagcaucagaaacggcaccuacgaccacggcguguacagagacgaggcccugaacaacagauuccagaucaagggcguggagcugaagagcggcuacaaggacuggauccuguggaucagcuucgccaucagcugcuuccugcugugcguggugcugcugggcuucaucaugugggccugccagaagggcaacaucagaugcaacaucugcaucuga

SEQ ID NO: 161408 - RNA, 1689 nt, Artificial Sequence
  derived and/or modified CDS sequence (opt4) from hemagglutinin__InfluenzaA__ABI94581
augaacacccagauccugguguucgcccugguggccagcauccccaccaacgccgacaagaucugccugggccaccacgccgugagcaacggcaccaaggugaacacccugaccgagagaggcguggagguggugaacgccaccgagaccguggagagaaccaacgugcccagaaucugcagcaagggcaagagaaccguggaccugggccagugcggccugcugggcaccaucaccggccccccccagugcgaccaguuccuggaguucagcgccgaccugaucaucgagagaagagagggcagcgacgugugcuaccccggcaaguucgugaacgaggaggcccugagacagauccugagagagagcggcggcaucgacaaggagaccaugggcuucaccuacagcggcaucagaaccaacggcaccaccagcgccugcagaagaagcggcagcagcuucuacgccgagaugaaguggcugcugagcaacaccgacaacgccgccuucccccagaugaccaagagcuacaagaacaccagaaaggaccccgcccugaucaucuggggcauccaccacagcggcagcaccaccgagcagaccaagcuguacggcagcggcaacaagcugaucaccgugggcagcagcaacuaccagcagagcuucgugcccagccccggcgccagaccccaggugaacggccagagcggcagaaucgacuuccacuggcugauccugaaccccaacgacaccgugaccuucagcuucaacggcgccuucaucgcccccgacagagccagcuuccugagaggcaagagcaugggcauccagagcgaggugcagguggacgccaacugcgagggcgacugcuaccacagcggcggcaccaucaucagcaaccugcccuuccagaacaucaacagcagagccgugggcaagugccccagauacgugaagcaggagagccugcugcuggccaccggcaugaagaacgugcccgagauccccaagagaagaagaagaggccuguucggcgccaucgccggcuucaucgagaacggcugggagggccugaucgacggcugguacggcuucagacaccagaacgcccagggcgagggcaccgccgccgacuacaagagcacccagagcgccaucgaccagaucaccggcaagcugaacagacugaucgagaagaccaaccagcaguucgagcugaucgacaacgaguucaccgagguggagaagcagaucggcaacgugaucaacuggaccagagacagcaugaccgagguguggagcuacaacgccgagcugcugguggccauggagaaccagcacaccaucgaccuggccgacagcgagaugaacaagcuguacgagagagugaagagacagcugagagagaacgccgaggaggacggcaccggcugcuucgagaucuuccacaagugcgacgacgacugcauggccagcaucagaaacaacaccuacgaccacagcaaguacagagaggaggccauccagaacagaauccagaucgaccccgugaagcugagcagcggcuacaaggacgugauccugugguucagcuucggcgccagcugcuucauccugcuggccaucgccaugggccugguguucaucugcgugaagaacggcaacaugagaugcaccaucugcaucuga

SEQ ID NO: 161409 - RNA, 1701 nt, Artificial Sequence; identical to SEQ ID NO: 160826
  derived and/or modified CDS sequence (opt4) from hemagglutinin__InfluenzaA__ABI95228

SEQ ID NO: 161410 - RNA, 1701 nt, Artificial Sequence
  derived and/or modified CDS sequence (opt4) from hemagglutinin__InfluenzaA__ABI95239
augaagaccaucaucgcccugagcuacauccugugccugguguucgcccagaagcugcccggcaacgacaacagcaccgccacccugugccugggccaccacgccgugcccaacggcaccaucgugaagaccaucaccaacgaccagaucgaggugaccaacgccaccgagcuggugcagagcagcagcaccggcggcaucugcgacagcccccaccagauccuggacggcgagaacugcacccugaucgacgcccugcugggcgacccccagugcgacggcuuccagaacaagaagugggaccuguucguggagagaagcaaggccuacagcaacugcuaccccuacgacgugcccgacuacgccagccugagaagccugguggccagcagcggcacccuggaguucaacaacgagagcuucaacuggaccggcgugacccagaacggcaccagcagcgccugcaagagaagaagcaacaacagcuucuucagcagacugaacuggcugacccaccugaaguucaaguaccccgcccugaacgugaccaugcccaacaacgagaaguucgacaagcuguacaucuggggcgugcaccaccccggcaccgacaacgaccagaucagccuguacgcccaggccagcggcagaaucaccgugagcaccaagagaagccagcagaccgugauccccaacaucggcagcagacccagagugagagacauccccagcagaaucagcaucuacuggaccaucgugaagcccggcgacauccugcugaucaacagcaccggcaaccugaucgcccccagaggcuacuucaagaucagaagcggcaagagcagcaucaugagaagcgacgcccccaucggcaagugcaacagcgagugcaucacccccaacggcagcauccccaacgacaagcccuuccagaacgugaacagaaucaccuacggcgccugccccagauacgugaagcagaacacccugaagcuggccaccggcaugagaaacgugcccgagaagcagaccagaggcaucuucggcgccaucgccggcuucaucgagaacggcugggagggcauggugaacggcugguacggcuucagacaccagaacagcgagggcaucggccaggccgccgaccugaagagcacccaggccgccaucaaccagaucaacggcaagcugaacagacugaucggcaagaccaacgagaaguuccaccagaucgagaaggaguucagcgagguggagggcagaauccaggaccuggagaaguacguggaggacaccaagaucgaccuguggagcuacaacgccgagcugcugguggcccuggagaaccagcacaccaucgaccugaccgacagcgagaugaacaagcuguucgagagaaccaagaagcagcugagagagaacgccgaggacaugggcaacggcugcuucaagaucuaccacaagugcgacaacgccugcaucggcagcaucagaaacggcaccuacgaccacgacguguacagagacgaggcccugaacaacagauuccagaucaagggcguggagcugaagagcggcuacaaggacuggauccuguggaucagcuucgccaucagcugcuuccugcugugcguggcccugcugggcuucaucaugugggccugccagaagggcaacaucagaugcaacaucugcaucuga

SEQ ID NO: 161411 - RNA, 1698 nt, Artificial Sequence
  derived and/or modified CDS sequence (opt4) from hemagglutinin__InfluenzaA__ABI95250
augaaggccaagcugcuggugcugcugugcaccuucaccgccaccuacgccgacaccaucugcgugggcuaccacgccaacaacagcaccgacaccguggacaccgugcuggagaagaacgugaccgugacccacagcgugaaccugcuggaggacagccacaacggcaagcugugccugcugaagggcaucgccccccugcagcugggcaacugcagcguggccggcuggauccugggcaaccccgagugcgagagccugaucagcaaggagagcuggagcuacaucguggagacccccaaccccgagaacggcaccugcuaccccggcuacuucgccgacuacgaggagcugagagagcagcugagcagcgugagcagcuucgagagauucgagaucuuccccaaggagagcagcuggcccaaccacaccgugaccggcgugagcgccagcugcagccacaacggcaagagcagcuucuacagaaaccugcuguggcugaccgagaagaacggccuguaccccaaccugagcaagagcuacgugaacaacaaggagaaggaggugcuggugcuguggggcgugcaccaccccagcaacaucggcgaccagagagccaucuaccacaccgagaacgccuacgugagcguggugagcagccacuacagcagaagauucacccccgagaucgccaagagacccaaggugagaggccaggagggcagaaucaacuacuacuggacccugcuggagcccggcgacaccaucaucuucgaggccaacggcaaccugaucgcccccugguacgccuucgcccugagcagaggcuucggcagcggcaucaucaccagcaacgcccccaugaacgagugcgacgccaagugccagaccccccagggcgccaucaacagcagccugcccuuccagaacgugcaccccgugaccaucggcgagugccccaaguacgugagaagcgccaagcugagaauggugaccggccugagaaacauccccagcauccagagcagaggccuguucggcgccaucgccggcuucaucgagggcggcuggaccggcaugaucgacggcugguacggcuaccaccaccagaacgagcagggcagcggcuacgccgccgaccagaagagcacccagaacgccaucaacggcaucaccaacaaggugaacagcgugaucgagaagaugaacacccaguucaccgccgugggcaaggaguucaacaagcuggagagaagaauggagaaccugaacaagaagguggacgacggcuuccuggacaucuggaccuacaacgccgagcugcuggugcugcuggagaacgagagaacccuggacuuccacgacagcaacgugaagaaccuguacgagaaggugaagagccagcugaagaacaacgccaaggagaucggcaacggcugcuucgaguucuaccacaagugcaacaacgagugcauggagagcgugaagaacggcaccuacgacuaccccaaguacagcgaggagagcaagcugaacagagagaagaucgacggcgugaagcuggagagcaugggcguguaccagauccuggccaucuacagcaccguggccagcagccuggugcugcuggugagccugggcgccaucagcuucuggaugugcagcaacggcagccugcagugcagaaucugcaucuga

SEQ ID NO: 161412 - RNA, 1698 nt, Artificial Sequence
  derived and/or modified CDS sequence (opt4) from hemagglutinin__InfluenzaA__ABI95261
augaaggccaagcugcuggugcugcugugcaccuucaccgccaccuacgccgacaccaucugcaucggcuaccacgccaacaacagcaccgacaccguggacaccgugcuggagaagaacgugaccgugacccacagcgugaaccugcuggaggacagccacaacggcaagcugugccugcugaagggcaucgccccccugcagcugggcaacugcagcguggccggcuggauccugggcaaccccgagugcgagagccugaucagcaaggagagcuggagcuacaucguggagacccccaaccccgagaacggcaccugcuaccccggcuacuucgccgacuacgaggagcugagagagcagcugagcagcgugagcagcuucgagagauucgagaucuuccccaaggagagcagcuggcccaaccacaccgugaccggcgugagcgccagcugcagccacaacggcaagagcagcuucuacagaaaccugcuguggcugaccgagaagaacggccuguaccccaaccugagcaagagcuacgugaacaacaaggagaaggaggugcuggugcuguggggcgugcaccaccccagcaacaucggcgugcagagagccaucuaccacaccgagaacgccuacgugagcguggugagcagccacuacagcagaagauucacccccgagaucgccaagagacccaaggugagagaccaggagggcagaaucaacuacuacuggacccugcuggagcccggcgacaccaucaucuucgaggccaacggcaaccugaucgcccccugguacgccuucgcccugagcagaggcuucgagagcggcaucaucaccagcaacgcccccaugaacgagugcgacgccaagugccagaccccccagggcgccaucaacagcagccugcccuuccagaacgugcaccccgugaccaucggcgagugccccaaguacgugagaagcgccaagcugagaauggugaccggccugagaaacauccccagcauccagagcagaggccuguucggcgccaucgccggcuucaucgagggcggcuggaccggcaugaucgacggcugguacggcuaccaccaccagaacgagcagggcagcggcuacgccgccgaccagaagagcacccagaacgccaucaacggcaucaccaacaaggugaacagcgugaucgagaagaugaacacccaguucaccgccgugggcaaggaguucaacaagcuggagagaagaauggagaaccugaacaagaagguggacgacggcuuccuggacaucuggaccuacaacgccgagcugcuggugcugcuggagaacgagagaacccuggacuuccacgacagcaacgugaagaaccuguacgagaaggugaagagccagcugaagaacaacgccaaggagaucggcaacggcugcuucgaguucuaccacaagugcaacaacgagugcauggagagcgugaagaacggcaccuacgacuaccccaaguacagcgaggagagcaagcugaacagagagaagaucgacggcgugaagcuggagagcaugggcguguaccagauccuggccaucuacagcaccguggccagcagccuggugcugcuggugagccugggcgccaucagcuucuggaugugcagcaacggcagccugcagugcagaaucugcaucuga

SEQ ID NO: 161413 - RNA, 1698 nt, Artificial Sequence; identical to SEQ ID NO: 161292
  derived and/or modified CDS sequence (opt4) from hemagglutinin__InfluenzaA__ABI95272

SEQ ID NO: 161414 - RNA, 1698 nt, Artificial Sequence; identical to SEQ ID NO: 161292
  derived and/or modified CDS sequence (opt4) from hemagglutinin__InfluenzaA__ABI95283

SEQ ID NO: 161415 - RNA, 1698 nt, Artificial Sequence; identical to SEQ ID NO: 160356
  derived and/or modified CDS sequence (opt4) from hemagglutinin__InfluenzaA__ABI95294

SEQ ID NO: 161416 - RNA, 1698 nt, Artificial Sequence
  derived and/or modified CDS sequence (opt4) from hemagglutinin__InfluenzaA__ABI96104
augaaggugaagcugcugauccugcugugcaccuucaccgccaccuacgccgacaccaucugcaucggcuaccacgccaacaacagcaccgacaccguggacaccgugcuggagaagaacgugaccgugacccacagcgugaaccugcuggaggacagccacaacggcaagcugugccugcugaagggcaucgccccccugcagcugggcaacugcagcguggccggcuggauccugggcaaccccgagugcgagcugcugaucagcaaggagagcuggagcuacaucguggagacccccaaccccgagaacggcgccugcuaccccggcuacuucgccgacuacgaggagcugagagagcagcugagcagcgugagcagcuucgagagauucgagaucuuccccaaggagagcagcuggcccaaccacaccgugaccggcgugagcgccagcugcagccacaacggcaagagcagcuucuacagaaaccugcuguggcugaccggcaagaacggccuguaccccaaccugaucaagagcuacgccaacaacaaggagaaggaggugcugauccuguggggcgugcaccacccccccaacaucggcgaccagagaacccuguaccacaccgagaacgccuacgugagcguggugagcagccacuacagcagaagauucacccccgagaucaccaagagacccaaggugagagaccaggagggcagaaucaacuacuacuggacccugcuggagcccggcgacaccaucaucuucgaggccaacggcaaccugaucgcccccugguacgccuucgcccugagcagaggcuucggcagcggcaucaucaccagcaacgcccccauggacgagugcgacgccaagugccagaccccccagggcgccaucaacagcagccugcccuuccagaacgugcaccccgugaccaucggcgagugccccaaguacgugagaagcgccaagcugagaauggugaccggccugagaaacauccccagcauccagagcagaggccuguucggcgccaucgccggcuucaucgagggcggcuggaccggcaugguggacggcugguacggcuaccaccaccagaacgagcagggcagcggcuacgccgccgaccagaagagcacccagaacgccaucaacggcaucaccaacaaggugaacagcgugaucgagaagaugaacacccaguucaccgccgugggcaaggaguucaacaagcuggagagaagaauggagaaccugaacaagaagguggacgacggcuuccuggacaucuggaccuacaacgccgagcugcuggugcugcuggagaacgagagaacccuggacuuccacgacagcaacgugaagaaccuguacgagaaggugaagagccagcugaagaacaacgccaaggagaucggcaacggcugcuucgaguucuaccacaagugcaacaacgagugcauggagagcgugaagaacggcaccuacgacuaccccaaguacagcgaggagagcaagcugaacagagagaagaucgacggcgugaagcuggacagcaugggcguguaccagauccuggccaucuacagcaccguggccagcagccuggugcugcuggugagccugggcgccaucagcuucuggaugugcagcaacggcagccugcagugcagaaucugcaucuga

SEQ ID NO: 161417 - RNA, 1701 nt, Artificial Sequence; identical to SEQ ID NO: 160710
  derived and/or modified CDS sequence (opt4) from hemagglutinin__InfluenzaA__ABJ09107

SEQ ID NO: 161418 - RNA, 1701 nt, Artificial Sequence
  derived and/or modified CDS sequence (opt4) from hemagglutinin__InfluenzaA__ABJ09140
augaagaccaucaucgcccugagcuacauccugugccugguguucgcccagaagcugcccggcaacgacaacagcaccgccacccugugccugggccaccacgccgugcccaacggcacccuggugaagaccaucaccaacgaccagaucgaggugaccaacgccaccgagcuggugcagagcagcagcaccggcagaaucugcgacagcccccacagaauccuggacggcaagaacugcacccugaucgacgcccugcugggcgacccccacugcgacggcuuccagaacaaggagugggaccuguucguggagagaagcaaggccuacagcaacugcuaccccuacgacgugcccgacuacgccagccugagaagccugguggccagcagcggcacccuggaguucaucaacgaggacuucaacuggaccggcguggcccaggacggcaagagcuacagcugcaagagaggcagcgugaacagcuucuucagcagacugaacuggcugcacaagcuggaguacaaguaccccgcccugaacgugaccaugcccaacaacggcaaguucgacaagcuguacaucuggggcgugcaccaccccagcaccgacagcgaccagaccagccuguacgugagagccagcggcagagugaccgugagcaccaagagaagccagcagaccgugauccccaacaucggcuucagacccugggugagaggccugagcagcagaaucagcaucuacuggaccaucgugaagcccggcgacauccugcugaucaacagcaccggcaaccugaucgcccccagaggcuacuucaagaucagaaacggcaagagcagcaucaugagaagcgacgcccccaucggcaacugcagcagcgagugcaucacccccaacggcagcauccccaacgacaagcccuuccagaacgugaacagaaucaccuacggcgccugccccagauacgugaagcagaacacccugaagcuggccaccggcaugagaaacgugcccgagaagcagaccagaggcaucuucggcgccaucgccggcuucaucgagaacggcugggagggcaugguggacggcugguacggcuucagacaccagaacagcgagggcaccggccaggccgccgaccugaagagcacccaggccgccaucgaccagaucaacggcaagcugaacagacugaucgagaagaccaacgagaaguuccaccagaucgagaaggaguucagcgagguggagggcagaauccaggaccuggagaaguacguggaggacaccaagaucgaccuguggagcuacaacgccggccugcugguggcccuggagaaccagcacaccaucgaccugaccgacagcgagaugaacaagcuguucgagagaaccagaaagcagcugagagagaacgccgaggacaugggcaacggcugcuucaagaucuaccacaagugcgacaacgccugcaucggcagcaucagaaacggcaccuacgaccacgacguguacagagacgaggcccugaacaacagauuccagaucaagggcguggagcugaagagcggcuacaaggacuggauccuguggaucagcuucgccaucagcugcuuccugcugugcguggugcugcugggcuucaucaugugggccugccagaagggcaacaucagaugcaacaucugcaucuga

SEQ ID NO: 161419 - RNA, 1698 nt, Artificial Sequence
  derived and/or modified CDS sequence (opt4) from hemagglutinin__InfluenzaA__ABJ09151
augaaggccaagcugcuggugcugcugugcaccuucaccgccaccuacgccgacaccaucugcaucggcuaccacgccaacaacagcaccgacaccguggacaccgugcuggagaagaacgugaccgugacccacagcgugaaccugcuggaggacagccacaacggcaagcugugccugcugaagggcaucgccccccugcagcugggcaacugcagcguggccggcuggauccugggcaaccccgagugcgagcugcugaucagcaaggagagcuggagcuacaucguggagacccccaaccccgagaacggcaccugcuaccccggcuacuucgccgacuacgaggagcugagagagcagcugagcagcgugagcagcuucgagagauucgagaucuuccccaagggcagcagcuggcccaaccacaccgugaccggcgugagcgccagcugcagccacaacggcaagagcagcuucuacagaaaccugcuguggcugaccggcaagaacggccuguaccccaaccugagcaugagcuacgugaacaacaagggcaaggaggugcuggugcuguggggcgugcaccacccccccaacaucggcgaccagagagcccuguaccacaccgagaacgccuacgugagcguggugagcagccacuacagcagaagauucacccccgagaucgccaagagacccaaggugagagaccaggagggcagaaucaacuacuacuggacccugcuggagcccggcgacaccaucaucuucgaggccaacggcaaccugaucgcccccugguacgccuucgcccugagcagaggcuucggcagcggcaucaucaccagcaacgcccccaugggcgagugcgacgccaagugccagaccccccagggcgccaucaacagcagccugcccuuccagaacgugcaccccgugaccaucggcgagugccccaaguacgugagaagcgccaagcugagaauggugaccggccugagaaacauccccagcauccagagcagaggccuguucggcgccaucgccggcuucaucgagggcggcuggaccggcaugguggacggcugguacggcuaccaccaccagaacgagcagggcagcggcuacgccgccgaccagaagagcacccagaacgccaucaacggcaucaccaacaaggugaacagcgugaucgagaagaugaacacccaguucaccgccgugggcaaggaguucaacaagcuggagagaagaauggagaaccugaacaagaagguggacgacggcuuccuggacaucuggaccuacaacgccgagcugcuggugcugcuggagaacgagagaacccuggacuuccacgacagcaacgugaagaaccuguacgagaaggugaagagccagcugaagaacaacgccaaggagaucggcaacggcugcuucgaguucuaccacaagugcaacaacgagugcauggagagcgugaagaacggcaccuacgacuaccccaaguacagcaaggagagcaagcugaacagagagaagaucgacggcgugaagcuggagagcaugggcguguaccagauccuggccaucuacagcaccguggccagcagccuggugcugcuggugagccugggcgccaucagcuucuggaugugcagcaacggcagccugcagugcagaaucugcaucuga

SEQ ID NO: 161420 - RNA, 1701 nt, Artificial Sequence
  derived and/or modified CDS sequence (opt4) from hemagglutinin__InfluenzaA__ABJ09162
augaagaccaucaucgcccugagcuacauccugugccugguguucgcccagaagcugcccggcaacgacaacagcaccgccacccugugccugggccaccacgccgugcccaacggcaccaucgugaagaccaucaccaacgaccagaucgaggugaccaacgccaccgagcuggugcagagcagcagcaccggcggcaucugcgacagcccccaccagauccuggacggcgagaacugcacccugaucgacgcccugcugggcgacccccagugcgacggcuuccagaacaagaagugggaccuguucguggagagaagcaaggccuacagcaacugcuaccccuacgacgugcccgacuacgccagccugagaagccugguggccagcagcggcacccuggaguucaacaacgagagcuucaacuggaccggcgugacccagaacggcaccagcagcgccugcaagagaagaagcaacaacagcuucuucagcagacugaacuggcugacccaccugaaguucaaguaccccgcccugaacgugaccaugcccaacaacgagaaguucgacaagcuguacaucuggggcgugcaccaccccggcaccaacaacgaccagaucagccuguacgcccaggccagcggcagaaucaccgugagcaccaagagaagccagcagaccgugauccccaacaucggcagcagacccagagugagagacauccccagcagaaucagcaucuacuggaccaucgugaagcccggcgacauccugcugaucaacagcaccggcaaccugaucgcccccagaggcuacuucaagaucagaagcggcaagagcagcaucaugagaagcgacgcccccaucggcaagugcaacagcgagugcaucacccccaacggcagcauccccaacgacaagcccuuccagaacgugaacagaaucaccuacggcgccugccccagauacgugaagcagaacacccugaagcuggccaccggcaugagaaacgugcccgagaagcagaccagaggcaucuucggcgccaucgccggcuucaucgagaacggcugggagggcaugguggacggcugguacggcuucagacaccagaacagcgagggcaucggccaggccgccgaccugaagagcacccaggccgccaucaaccagaucaacggcaagcugaacagacugaucggcaagaccaacgagaaguuccaccagaucgagaaggaguucagcgagguggagggcagaauccaggaccuggagaaguacguggaggacaccaagaucgaccuguggagcuacaacgccgagauccugguggcccuggagaaccagcacaccaucgaccugaccgacagcgagaugaacaagcuguucgagagaaccaagaagcagcugagagagaacgccgaggacaugggcaacggcugcuucaagaucuaccacaagugcgacaacgccugcaucggcagcaucagaaacggcaccuacgaccacgacguguacagagacgaggcccugaacaacagauuccagaucaagggcguggagcugaagagcggcuacaaggacuggauccuguggaucagcuucgccaucagcugcuuccugcugugcguggcccugcugggcuucaucaugugggccugccagaagggcaacaucagaugcaacaucugcaucuga

SEQ ID NO: 161421 - RNA, 1701 nt, Artificial Sequence; identical to SEQ ID NO: 160303
  derived and/or modified CDS sequence (opt4) from hemagglutinin__InfluenzaA__ABJ09173

SEQ ID NO: 161422 - RNA, 1698 nt, Artificial Sequence
  derived and/or modified CDS sequence (opt4) from hemagglutinin__InfluenzaA__ABJ09184
augaaggugaagcugcuggugcugcugugcaccuucaccgccaccuacgccgacaccaucugcaucggcuaccacgccaacaacagcaccgacaccguggacaccgugcuggagaagaacgugaccgugacccacagcgugaaccugcuggaggacagccacaacggcaagcugugccugcugaagggcaucgccccccugcagcugggcaacugcagcguggccggcuggauccugggcaaccccgagugcgagcugcugaucagcaaggagagcuggagcuacaucguggagacccccaaccccgagaacggcaccugcuaccccggcuacuucgccgacuacgaggagcugagagagcagcugagcagcgugagcagcuucgagagauucgagaucuuccccaaggagagcagcuggcccaaccacaccgugaccggcgugagcgccagcugcagccacaacggcaagagcagcuucuacagaaaccugcuguggcugaccggcaagaacggccuguaccccaaccugagcaagagcuacgccaacaacaaggagaaggaggugcuggugcuguggggcgugcaccacccccccaacaucggcgaccagagagcccuguaccacaccgagaacgccuacgugagcguggugagcagccacuacagcagaagauucacccccgagaucgccaagagacccaaggugagagaccaggagggcagaaucaacuacuacuggacccugcuggaggccggcgacaccaucaucuucgaggccaacggcaaccugaucgcccccagauucgccuucgcccugagcagaggcuucggcagcggcaucaucaccagcaacgcccccauggacgagugcgacgccaagugccagaccccccagggcgccaucaacagcagccugcccuuccagaacgugcaccccgugaccaucggcgagugccccaaguacgugagaagcgccaagcugagaauggccaccggccugagaaacauccccagcauccagagcagaggccuguucggcgccaucgccggcuucaucgagggcggcuggaccggcaugguggacggcugguacggcuaccaccaccagaacgagcagggcagcggcuacgccgccgaccagaagagcacccagaacgccaucaacggcaucaccaacaaggugaacagcgugaucgagaagaugaacacccaguucaccgccgugggcaaggaguucagcaagcuggagagaagaauggagaaccugaacaagaagguggacgacggcuuccuggacaucuggaccuacaacgccgagcugcuggugcugcuggagaacgagagaacccuggacuuccacgacagcaacgugaagaaccuguacgagaaggugaagagccagcugaagaacaacgccaaggagaucggcaacggcugcuucgaguucuaccacaagugcaacgacgagugcauggagagcgugaagaacggcaccuacgacuaccccaaguacagcgaggagagcaagcugaacagagagaagaucgacggcgugaagcuggagagcaugggcguguaccagauccuggccaucuacagcaccguggccagcagccuggugcugcuggugagccugggcgccaucagcuucuggaugugcagcaacggcagccugcagugcagaaucugcaucuga

SEQ ID NO: 161423 - RNA, 1701 nt, Artificial Sequence; identical to SEQ ID NO: 160693
  derived and/or modified CDS sequence (opt4) from hemagglutinin__InfluenzaA__ABJ09195

SEQ ID NO: 161424 - RNA, 1701 nt, Artificial Sequence; identical to SEQ ID NO: 160693
  derived and/or modified CDS sequence (opt4) from hemagglutinin__InfluenzaA__ABJ09206

SEQ ID NO: 161425 - RNA, 1701 nt, Artificial Sequence; identical to SEQ ID NO: 161273
  derived and/or modified CDS sequence (opt4) from hemagglutinin__InfluenzaA__ABJ09217

SEQ ID NO: 161426 - RNA, 1701 nt, Artificial Sequence; identical to SEQ ID NO: 160710
  derived and/or modified CDS sequence (opt4) from hemagglutinin__InfluenzaA__ABJ09228

SEQ ID NO: 161427 - RNA, 1701 nt, Artificial Sequence
  derived and/or modified CDS sequence (opt4) from hemagglutinin__InfluenzaA__ABJ09239
augaagaccaucaucgcccugagcuacauccugugccugguguucgcccagaagcugcccggcaacgacaacagcaccgccacccugugccugggccaccacgccgugcccaacggcacccuggugaagaccaucaccaacgaccagaucgaggugaccaacgccaccgagcuggugcagagcagcagcaccggcggcaucugcgacagcccccaccagauccuggacggcgagaacugcacccugaucgacgcccugcugggcgacccccacugcgacggcuuccagaacaaggagugggaccuguucguggagagaagcaaggccuacagcaacugcuaccccuacgacgugcccgacuacgccagccugagaagccugguggccagcagcggcaccauggaguucaacaacgagagcuucaacuggaccggcguggcccagaacggcaccagcagcgccugcaagagaagaagcaacaagagcuucuucagcagacugaacuggcugcaccagcugaaguacaaguaccccgcccugaacgugaccaugcccaacaacgagaaguucgacaagcuguacaucuggggcgugcaccaccccagcaccgacagcgaccagaucagccuguacgcccaggcccccggcagagugaccgugagcaccaagagaagccagcagaccgugauccccaacaucggcagcagacccugggugagaggcgugagcagcagaaucagcaucuacuggaccaucgugaagcccggcgacauccugcugaucaacugcaccggcaaccugaucgcccccagaggcuacuucaagaucagaagcggcaagagcagcaucaugagaagcgacgccagcaucggcaagugcaacagcgagugcaucacccccaacggcagcauccccaacgacaagcccuuccagaacgugaacagaaucaccuacggcgccugccccagauacgugaagcagaacacccugaagcuggccaccggcaugagaaacgugcccgagaagcagaccagaggcaucuucggcgccaucgccggcuucaucgagaacggcugggagggcaugguggacggcugguacggcuucagacaccagaacagcgagggcaccggccaggccgccgaccugaagagcacccaggccgccaucaaccagaucaacggcaagcugaacagacugaucgagaagaccaacgagaaguuccaccagaucgagaaggaguucagcgagguggagggcagaauccaggaccuggagaaguacguggaggacaccaagaucgaccuguggagcuacaacgccgagcugcugguggcccuggagaaccagcacaccaucgaccugaccgacagcgagaugaacaagcuguucgagagaaccaagaagcagcugagagagaacgccgaggacaugggcaacggcugcuucaagaucuaccacaagugcgacaacgccugcaucggcagcaucagaaacggcaccuacgaccacgacguguacagagacgaggcccugaacaacagauuccagaucaagggcguggagcugaagagcggcuacaaggacuggauccuguggaucagcuucgccaucagcugcuuccugcugugcguggugcugcugggcuucaucaugugggccugccagaagggcaacaucagaugcaacaucugcaucuga

SEQ ID NO: 161428 - RNA, 1701 nt, Artificial Sequence
  derived and/or modified CDS sequence (opt4) from hemagglutinin__InfluenzaA__ABJ09250
augaagaccaucaucgcccugagcuacauccugugccugguguucgcccagaagcugcccggcaacgacaacagcaccgccacccugugccugggccaccacgccgugcccaacggcacccuggugaagaccaucaccaacgaccagaucgaggugaccaacgccaccgagcuggugcagagcagcagcaccggcagaaucugcgacagcccccaccagauccuggacggcgagaacugcacccugaucgacgcccugcugggcgacccccacugcgacggcuuccagaacaaggagugggaccuguucguggagagaagcaaggccuacagcaacugcuaccccuacgacgugcccgacuacgccagccugagaagccugguggccagcagcggcacccuggaguucaacaacgagagcuucaacuggaccggcguggcccagaacggcaccagcagcgccugcaagagaagaagcaacaagagcuucuucagcagacugaacuggcugcaccagcugaaguacaaguaccccgcccugaacgugaccaugcccaacaacgagaaguucgacaagcuguacaucuggggcauccaccaccccagcaccgacagcgaccagaucagccuguacgcccaggccagcggcagagugaccgugagcaccaagagaagccagcagaccgugauccccaacaucggcagcagacccugggugagaggcgugagcagcagaaucagcaucuacuggaccaucgugaagcccggcgacauccugcugaucaacagcaccggcaaccugaucgcccccagaggcuacuucaagaucagaagcggcaagagcagcaucaugagaagcgacgcccccaucggcaagugcaacagcgagugcaucacccccaacggcagcauccccaacgacaagcccuuccagaacgugaacagaaucaccuacggcgccugccccagauacgugaagcagaacacccugaagcuggccaccggcaugagaaacgugcccgagaagcagaccagaggcaucuucggcgccaucgccggcuucaucgagaacggcugggagggcaugguggacggcugguacggcuucagacaccagaacagcgagggcaccggccaggccgccgaccugaagagcacccaggccgccaucaaccagaucaacggcaagcugaacagacugaucgagaagaccaacgagaaguuccaccagaucgagaaggaguucagcgagguggagggcagaauccaggaccuggagaaguacguggaggacaccaagaucgaccuguggagcuacaacgccgagcugcugguggcccuggagaaccagcacaccaucgaccugaccgacagcgagaugaacaagcuguucgagagaaccaagaagcagcugagagagaacgccgaggacaugggcaacggcugcuucaagaucuaccacaagugcgacaacgccugcaucggcagcaucagaaacgagaccuacgaccacgacguguacagagacgaggcccugaacaacagauuccagaucaagggcguggagcugaagagcggcuacaaggacuggauccuguggaucagcuucgccaucagcugcuuccugcugugcguggugcugcugggcuucaucaugugggccugccagaagggcaacaucagaugcaacaucugcaucuga

SEQ ID NO: 161429 - RNA, 1701 nt, Artificial Sequence
  derived and/or modified CDS sequence (opt4) from hemagglutinin__InfluenzaA__ABJ09261
augaagaccaucaucgcccugagcuacauccugugccugguguucgcccagaagcugcccggcaacgacaacagcaccgccacccugugccugggccaccacgccgugcccaacggcacccuggugaagaccaucaccaacgaccagaucgaggugaccaacgccaccgagcuggugcagagcagcagcaccggcaagaucugcgacagcccccaccagauccuggacggcgagaacugcacccugaucgacgcccugcugggcgacccccacugcgacggcuuccagaacaaggagugggaccuguucguggagagaagcaaggccuacagcaacugcuaccccuacgacgugcccgacuacgccagccugagaagccugguggccagcagcggcacccuggaguucaacaacgagagcuucaacuggaccggcguggcccagaacggcaccagcagcgccugcaagagaagaagcaucaagagcuucuucagcagacugaacuggcugcaccagcugaaguacaaguaccccgcccugaacgugaccaugcccaacaacgagaaguucgacaagcuguacaucuggggcgugcaccaccccagcaccgacagcgaccagaccagccuguacgcccaggccagcggcagagugaccgugagcaccaagagaagccagcagaccgugauccccaacaucggcagcagacccugggugagaggcgugagcagcagaaucagcaucuacuggaccaucgugaagcccggcgacauccugcugaucaacagcaccggcaaccugaucgcccccagaggcuacuucaagaucagaagcggcaagagcagcaucaugagaagcgacgcccccaucggcaagugcaacagcgagugcaucacccccaacggcagcauccccaacgacaagcccuuccagaacgugaacagaaucaccuacggcgccugccccagauacgugaagcagaacacccugaagcuggccaccggcaugagaaacgugcccgagaagcagaccagaggcaucuucggcgccaucgccggcuucaucgagaacggcugggagggcaugguggacggcugguacggcuucagacaccagaacagcgagggcaccggccaggccgccgaccugaagagcacccaggccgccaucaaccagaucaacggcaagcugaacagacugaucgagaagaccaacgagaaguaccaccagaucgagaaggaguucagcgagguggagggcagaauccaggaccuggagaaguacguggaggacaccaagaucgaccuguggagcuacaacgccgagcugcugguggcccuggagaaccagcacaccaucgaccugaccgacagcgagaugaacaagcuguucgagagaaccagaaagcagcugagagagaacgccgaggacaugggcaacggcugcuucaagaucuaccacaagugcgacaacgccugcaucggcagcaucagaaacggcaccuacgaccacgacguguacagagacgaggcccugaacaacagauuccagaucaagggcguggagcugaagagcggcuacaaggacuggauccuguggaucagcuucgccaucagcugcuuccugcugugcguggugcugcugggcuucaucaugugggccugccagaagggcaacaucagaugcaacaucugcaucuga

SEQ ID NO: 161430 - RNA, 1701 nt, Artificial Sequence
  derived and/or modified CDS sequence (opt4) from hemagglutinin__InfluenzaA__ABJ09272
augaagaccaucaucgcccugagcuacauccugugccugguguucgcccagaagcugcccggcaacgacaacagcaccgccacccugugccugggccaccacgccgugcccaacggcacccuggugaagaccaucaccaacgaccagaucgaggugaccaacgccaccgagcuggugcagagcagcagcaccggcagaaucugcaacagcccccaccagauccuggacggcgagaacugcacccugaucgacgcccugcugggcgacccccacugcgacggcuuccagaacaaggagugggaccuguucguggagagaagaaaggccuacagcaacugcuaccccuacgacgugcccgacuacgccagccugagaagccugguggccagcagcggcacccuggaguucaacaacgagagcuucaacuggaccggcguggcccagaacggcaccagcagcgccugcaagagaagaagcaucaagagcuucuucagcagacugaacuggcugcaccagcugaaguacaaguaccccgcccugaacgugaccaugcccaacaacgagaaguucgacaagcuguacaucuggggcgugcaccaccccagcaccgacagcgaccagaucagccuguacgcccaggccagcggcagagugaccgugagcaccaagagaagccagcagaccgugauccccaacaucggcagcagacccugggugagaggcgugagcagcagaaucagcaucuacuggaccaucgugaagcccggcgacauccugcugaucaacagcaccggcaaccugaucgcccccagaggcuacuucaagaucagaagcggcaagagcagcaucaugagaagcgacgcccccaucggcaagugcaacagcgagugcaucacccccaacggcagcauccccaacgacaagcccuuccagaacgugaacagaaucaccuacggcgccugccccagauacgugaagcagaacacccugaagcuggccaccggcaugagaaacgugcccgagaagcagaccagaggcaucuucggcgccaucgccggcuucaucgagaacggcugggagggcaugguggacggcugguacggcuucagacaccagaacagcgagggcaccggccaggccgccgaccugaagagcacccaggccgccaucaaccagaucaacggcaagcugaacagacugaucgagaagaccaacgagaaguuccaccagaucgagaaggaguucagcgagguggagggcagaauccaggaccuggagaaggacguggaggacaccaagaucgaccuguggagcuacaacgccgagcugcugguggcccuggagaaccagcacaccaucgaccugaccgacagcgagaugaacaagcuguucgagagaaccaagaagcagcugagagagaacgccgaggacaugggcaacggcugcuucaagaucuaccacaagugcgacaacgccugcaucggcagcaucagaaacggcaccuacgaccacgacguguacagagacgaggcccugaacaacagauuccagaucaagggcguggagcugaagagcggcuacaaggacuggauccuguggaucagcuucgccaucagcugcuuccugcugugcguggugcugcugggcuucaucaugugggccugccagaagggcaacaucagaugcaacaucugcaucuga

SEQ ID NO: 161431 - RNA, 1701 nt, Artificial Sequence; identical to SEQ ID NO: 160132
  derived and/or modified CDS sequence (opt4) from hemagglutinin__InfluenzaA__ABJ09294

SEQ ID NO: 161432 - RNA, 1701 nt, Artificial Sequence
  derived and/or modified CDS sequence (opt4) from hemagglutinin__InfluenzaA__ABJ09305
augaagaccaucaucgcccugagcuacauccugugccugguguucgcccagaagcugcccggcaacgacaacagcaccgccacccugugccugggccaccacgccgugcccaacggcacccuggugaagaccaucaccaacgaccagaucgaggugaccaacgccaccgagcuggugcagagcagcagcaccggcagaaucugcgacagcccccaccagauccuggacggcgagaacugcacccugaucgacgcccugcugggcgacccccacugcgacggcuuccagaacaaggagugggaccuguucguggagagaagcaaggccuacagcaacugcuaccccuacgacgugcccgacuacgccagccugagaagccugguggccagcagcggcacccuggaguucaacaacgagagcuucaacuggaccggcguggcccagaacggcaccagcagcgccugcaagagaagaagcaacaagagcuucuucagcagacugaacuggcugcaccagcugaaguacaaguaccccgcccugaacgugaccaugcccaacaacgagaaguucgacaagcuguacaucuggggcgugcaccaccccagcaccgacagcgaccagaucagccuguacgcccaggccagcggcagagugaccgugagcaccaagagaagccagcagaccgugauccccaacaucggcagcagacccugggugagaggcgugagcagcagaaucagcaucuacuggaccaucgugaagcccggcgacauccugcugaucaacagcaccggcaaccugaucgcccccagaggcuacuucaagaucagaagcggcaagagcagcaucaugagaagcgacgcccccaucggcaagugcaacagcgagugcaucacccccaacggcagcauccccaacgacaagcccuuccagaacgugaacagaaucaccuacggcgccugccccagauacgugaagcagaacacccugaagcuggccaccggcaugagaaacgugcccgagaagcagaccagaggcaucuucggcgccaucgccggcuucaucgagaacggcugggagggcaugguggacggcugguacggcuucagacaccagaacagcgagggcaccggccaggccgccgaccugaagagcacccaggccgccaucaaccagaucaacggcaagcugaacagacugaucgagaagaccaacgagaaguuccaccagaucgagaaggaguucagcgagguggagggcagaauccaggaccuggagaaguacguggaggacaccaagaucgaccuguggagcuacaacgccgagcugcugguggcccuggagaaccagcacaccaucgaccugaccgacagcgagaugaacaagcuguucgagagaaccaagaagcagcugagagagaacgccgaggacaugggcaacggcugcuucaagaucuaccacaagugcgacaacgccugcaucggcagcaucagaaacgagaccuacgaccacgacguguacagagacgaggcccugaacaacagauuccagaucaagggcguggagcugaagagcggcuacaaggacuggauccuguggaucagcuucgccaucagcugcuuccugcugugcguggugcugcugggcuucaucaugugggccugccagaagggcaacaucagaugcaacaucugcaucuga

SEQ ID NO: 161433 - RNA, 1701 nt, Artificial Sequence
  derived and/or modified CDS sequence (opt4) from hemagglutinin__InfluenzaA__ABJ09316
augaagaccaucaucgcccugagcuacauccugugccugguguucgcccagaagcugcccggcaacgacaacagcaccgccacccugugccugggccaccacgccgugcccaacggcacccuggugaagaccaucaccaacgaccagaucgaggugaccaacgccaccgagcuggugcagagcagcagcaccggcagaaucugcgacagcccccaccagauccuggacggcgagaacugcacccugaucgacgcccugcugggcgacccccacugcgacggcuuccagaacaaggagugggaccuguucguggagagaagcaaggccuacagcaacugcuaccccuacgacgugcccgacuacgccagccugagaagccugguggccagcagcggcacccuggaguucaacaacgagagcuucaacuggaccggcguggcccagaacggcaccagcagcgccugcaagagaagaagcaacaagagcuucuucagcagacugaacuggcugcaccagcugaaguacaaguaccccgcccugaacgugaccaugcccaacaacgagaaguucgacaagcuguacaucuggggcgugcaccaccccagcaccgacagcgaccagaucagccuguacgcccaggccagcggcagagugaccgugagcaccaagagaagccagcagaccgugauccccaacaucggcagcagacacugggugagaggcgugagcagcagaaucagcaucuacuggaccaucgugaagcccggcgacauccugcugaucaacagcaccggcaaccugaucgcccccagaggcuacuucaagaucagaagcggcaagagcagcaucaugagaagcgacgccagcaucggcaagugcaacagcgagugcaucacccccaacggcagcauccccaacgacaagcccuuccagaacgugaacagaaucaccuacggcgccugccccagauacgugaagcagaacacccugaagcuggccaccggcaugagaaacgugcccgagaagcagaccagaggcaucuucggcgccaucgccggcuucaucgagaacggcugggagggcaugguggacggcugguacggcuucagacaccagaacagcgagggcaccggccaggccgccgaccugaagagcacccaggccgccaucaaccagaucaacggcaagcugaacagacugaucgagaagaccaacgagaaguuccaccagaucgagaaggaguucagcgagguggagggcagaauccaggaccuggagaaguacguggaggacaccaagaucgaccuguggagcuacaacgccgagcugcugguggcccuggagaaccagcacaccaucgaccugaccgacagcgagaugaacaagcuguucgagagaaccaagaagcagcugagagagaacgccgaggacaugggcaacggcugcuucaagaucuaccacaagugcgacaacgccugcaucggcagcaucagaaacggcaccuacgaccacgacguguacagagacgaggcccugaacaacagauuccagaucaagggcguggagcugaagagcggcuacaaggacuggauccuguggaucagcuucgccaucagcugcuuccugcugugcguggugcugcugggcuucaucaugugggccugccagaagggcaacaucagaugcaacaucugcaucuga

SEQ ID NO: 161434 - RNA, 1701 nt, Artificial Sequence; identical to SEQ ID NO: 160710
  derived and/or modified CDS sequence (opt4) from hemagglutinin__InfluenzaA__ABJ09338

SEQ ID NO: 161435 - RNA, 1701 nt, Artificial Sequence
  derived and/or modified CDS sequence (opt4) from hemagglutinin__InfluenzaA__ABJ09349
augaagaccaucaucgcccugagcuacauccugugccugguguucgcccagaagcugcccggcaacgacaacagcaccgccacccugugccugggccaccacgccgugcccaacggcacccuggugaagaccaucaccaacgaccagaucgaggugaccaacgccaccgagcugauccagagcagcagcaccggcggcaucugcgacagcccccaccagauccuggacggcgagaacugcacccugaucgacgcccugcugggcgacccccacugcgacggcuuccagaacaaggagugggaccuguucguggagagaagcaaggccuacagcaacugcuaccccuacgacgugcccgacuacgccagccugagaagccugguggccagcagcggcacccuggaguucaacaacgagagcuucaacuggaccggcguggcccagaacggcaccagcagcgccugcaagagaagaagcaacaagagcuucuucagcagacugaacuggcugcaccagcugaaguacaaguaccccgcccugaacgugaccaugcccaacaacgagaaguucgacaagcuguacaucuggggcgugcaccaccccagcaccgacagcgaccagaucagccuguacgcccaggcccccggcagagugaccgugagcaccaagagaagccagcagaccgugauccccaacaucggcagcagacccugggugagaggcgugagcagcagaaucagcaucuacuggaccaucgugaagcccggcgacauccugcugaucaacugcaccggcaaccugaucgcccccagaggcuacuucaagaucagaagcggcaagagcagcaucaugagaagcgacgccagcaucggcaagugcaacagcgagugcaucacccccaacggcagcauccccaacgacaagcccuuccagaacgugaacagaaucaccuacggcgccugccccagauacgugaagcagaacacccugaagcuggccaccggcaugagaaacgugcccgagaagcagaccagaggcaucuucggcgccaucgccggcuucaucgagaacggcugggagggcaugguggacggcugguacggcuucagacaccagaacagcgagggcaccggccaggccgccgaccugaagagcacccaggccgccaucaaccagaucaacggcaagcugaacagacugaucgagaagaccaacgagaaguuccaccagaucgagaaggaguucagcgagguggagggcagaauccaggaccuggagaaguacguggaggacaccaagaucgaccuguggagcuacaacgccgagcugcugguggcccuggagaaccagcacaccaucgaccugaccgacagcgagaugaacaagcuguucgagagaaccaagaagcagcugagagagaacgccgaggacaugggcaacggcugcuucaagaucuaccacaagugcgacaacgccugcaucggcagcaucagaaacggcaccuacgaccacgacguguacagagacgaggcccugaacaacagauuccagaucaagggcguggagcugaagagcggcuacaaggacuggauccuguggaucagcuucgccaucagcugcuuccugcugugcguggugcugcugggcuucaucaugugggccugccagaagggcaacaucagaugcaacaucugcaucuga

SEQ ID NO: 161436 - RNA, 1701 nt, Artificial Sequence; identical to SEQ ID NO: 160710
  derived and/or modified CDS sequence (opt4) from hemagglutinin__InfluenzaA__ABJ09360

SEQ ID NO: 161437 - RNA, 1701 nt, Artificial Sequence
  derived and/or modified CDS sequence (opt4) from hemagglutinin__InfluenzaA__ABJ09371
augaagaccaucaucgcccugagcuacauccugugccugguguucgcccagaagcugcccggcaacgacaacagcaccgccacccugugccugggccaccacgccgugcccaacggcaccaucgugaagaccaucaccaacgaccagaucgaggugaccaacgccaccgagcuggugcagagcagcagcaccggcggcaucugcgacagcccccaccagauccuggacggcgagaacugcacccugaucgacgcccugcugggcgacccccagugcgacggcuuccagaacaagaagugggaccuguucguggagagaagcaaggccuacagcaacugcuaccccuacgacgugcccgacuacgccagccugagaagccugaucgccagcagcggcacccuggaguucaacaacgagagcuucaacuggaccggcgugacccagaacggcaccagcagcgccugcaagagaagaagcaacagcagcuucuucagcagacugaacuggcugacccaccugaaguucaaguaccccgcccugaacgugaccaugcccaacaacgaggaguucgacaagcuguacaucuggggcgugcaccaccccggcaccuacaacgaccagaucagccuguacgcccaggccagcggcagaaucaccgugagcaccaagagaagccagcagaccgugauccccaacaucggcagcagacugagagugagagacauccccagcagaaucagcaucuacuggaccaucgugaagcccggcgacauccugcugaucaacagcaccggcaaccugaucgcccccagaggcuacuucaagaucagaagcggcaagagcagcaucaugagaagcgacgcccccaucggcaagugcaacagcgagugcaucacccccaacggcagcauccccaacgacaagcccuuccagaacgugaacagaaucaccuacggcgccugccccagauacgugaagcagaacacccugaagcuggccaccggcaugagaaacgugcccgagaagcagaccagaggcaucuucggcgccaucgccggcuucaucgagaacggcugggagggcaugguggacggcugguacggcuucagacaccagaacagcgagggcaucggccaggccgccgaccugaagagcacccaggccgccaucgaccagaucaacggcaagcugaacagacugaucggcaagaccaacgagaaguuccaccagaucgagaaggaguucagcgagguggagggcagaauccaggaccuggagaaguacguggaggacaccaagaucgaccuguggagcuacaacgccgagcugcugguggcccuggagaaccagcacaccaucgaccugaccgacagcgagaugaacaagcuguucgagagaaccaagaagcagcugagagagaacgccgaggacaugggcaacggcugcuucaagaucuaccacaagugcgacaacgccugcaucggcagcaucagaaacggcaccuacgaccacgacguguacagagacgaggcccugaacaacagauuccagaucaagggcguggagcugaagagcggcuacaaggacuggauccuguggaucagcuucgccaucagcugcuuccugcugugcguggcccugcugggcuucaucaugugggccugccagaagggcaacaucagaugcaacaucugcaucuga

SEQ ID NO: 161438 - RNA, 1701 nt, Artificial Sequence; identical to SEQ ID NO: 160693
  derived and/or modified CDS sequence (opt4) from hemagglutinin__InfluenzaA__ABJ09382

SEQ ID NO: 161439 - RNA, 1701 nt, Artificial Sequence
  derived and/or modified CDS sequence (opt4) from hemagglutinin__InfluenzaA__ABJ16587
augaagaccaucaucgcccugagcuacaucagcugccugguguucgcccagaagcugcccggcaacgacaacagcaccgccacccugugccugggccaccacgccgugcccaacggcacccuggugaagaccaucaccaacgaccagaucgaggugaccaacgccaccgagcuggugcagagcagcagcaccggcagaaucugcgacagcccccaccagauccuggacggcgagaacugcacccugaucgacgcccugcugggcgacccccacugcgacggcuuccagaacaaggagugggaccuguucguggagagaagcaaggccuacagcaacugcuaccccuacgacgugcccgacuacgccagccugagaagccugguggccagcagcggcacccuggaguucaacaacgagagcuucaacuggaccggcguggcccagaacggcaccagcagcgccugcaagagaagaagcaucaagagcuucuucagcagacugaacuggcugcaccagcugaaguacagauaccccgcccugaacgugaccaugcccaacaacgacaaguucgacaagcuguacaucuggggcgugcaccaccccagcaccgacagcgaccagaccagccuguacgcccaggccagcggcagagugaccgugagcaccaagagaagccagcagaccgugauccccaacaucggcagcagacccugggugagaggcgugagcagcagaaucagcaucuacuggaccaucgugaagcccggcgacauccugcugaucaacagcaccggcaaccugaucgcccccagaggcuacuucaagaucagaagcggcaagagcagcaucaugagaagcgacgcccccaucggcaagugcaacagcgagugcaucacccccaacggcagcauccccaacgacaagcccuuccagaacgugaacagaaucaccuacggcgccugccccagauacgugaagcagaacacccugaagcuggccaccggcaugagaaacgugcccgagaagcagaccagaggcaucuucggcgccaucgccggcuucaucgagaacggcugggagggcaugauggacggcugguacggcuucagacaccagaacagcgagggcaccggccaggccgccgaccugaagagcacccaggccgccaucaaccagaucaacggcaagcugaacagacugaucgagaagaccaacgagaaguuccaccagaucgagaaggaguucagcgagguggagggcagaauccaggaccuggagaaguacguggaggacaccaagaucgaccuguggagcuacaacgccgagcugcugguggcccuggagaaccagcacaccaucgaccugaccgacagcgagaugaacaagcuguucgagagaaccagaaagcagcugagagagaacgccgaggacaugggcaacggcugcuucaagaucuaccacaagugcgacaacgccugcaucggcagcaucagaaacggcaccuacgaccacgacguguacagagacgaggcccugaacaacagauuccagaucaagggcguggagcugaagagcggcuacaaggacuggauccuguggaucagcuucgccaucagcugcuuccugcugugcguggugcugcugggcuucaucaugugggccugccagaagggcaacaucagaugcaacaucugcaucuga

SEQ ID NO: 161440 - RNA, 1701 nt, Artificial Sequence
  derived and/or modified CDS sequence (opt4) from hemagglutinin__InfluenzaA__ABJ16598
augaagaccaucaucgcccugagcuacauccugugccugguguucgcccagaagcugcccggcaacgacaacagcaccgccacccugugccugggccaccacgccgugcccaacggcacccuggugaagaccaucaccaacgaccagaucgaggugaccaacgccaccgagcuggugcagagcagcagcaccggcagaaucugcaacagcccccaccagauccuggacggcgagaacugcacccugaucgacgcccugcugggcgacccccacugcgacggcuuccagaacaaggagugggaccuguucguggagagaagcaaggccuacagcaacugcuaccccuacgacgugcccgacuacgccagccugagaagccugguggccagcagcggcacccuggaguucaacaacgagagcuucaacuggaccggcguggcccagaacggcaccagcagcgccugcaagagaagaagcaucaagagcuucuucagcagacugaacuggcugcaccagcugaaguacaaguaccccgcccugaacgugaccaugcccaacaacgagaaguucgacaagcuguacaucuggggcgugcaccaccccagcaccgacagcgaccagaucagccuguacgcccaggccagcggcagagugaccgugagcaccaagagaagccagcagaccgugauccccaacaucggcagcagacccugggugagaggcgugagcagcagaaucagcaucuacuggaccaucgugaagcccggcgacauccugcugaucaacagcaccggcaaccugaucgcccccagaggcuacuucaagaucagaagcggcaagagcagcaucaugagaagcgacgcccccaucggcaagugcaacagcgagugcaucacccccaacggcagcauccccaacgacaagcccuuccagaacgugaacagaaucaccuacggcgccugccccagauacgugaagcagaacacccugaagcuggccaccggcaugagaaacgugcccgagaagcagaccagaggcaucuucggcgccaucgccggcuucaucgagaacggcugggagggcaugguggacggcugguacggcuucagacaccagaacagcgagggcaccggccaggccgccgaccugaagagcacccaggccgccaucaaccagaucaacggcaagcugaacagacugaucgagaagaccaacgagaaguuccaccagaucgagaaggaguucagcgagguggagggcagaauccaggaccuggagaaguacguggaggacaccaagaucgaccuguggagcuacaacgccgagcugcugguggcccuggagaaccagcacaccaucgaccugaccgacagcgagaugaacaagcuguucgagagaaccaagaagcagcugagagagaacgccgaggacaugggcaacggcugcuucaagaucuaccacaagugcgacaacgccugcaucggcagcaucagaaacggcaccuacgaccacgacguguacagagacgaggcccugaacaacagauuccagaucaagggcguggagcugaagagcggcuacaaggacuggauccuguggaucagcuucgccaucagcugcuuccugcugugcguggugcugcugggcuucaucaugugggccugccagaagggcaacaucagaugcaacaucugcaucuga

SEQ ID NO: 161441 - RNA, 1701 nt, Artificial Sequence
  derived and/or modified CDS sequence (opt4) from hemagglutinin__InfluenzaA__ABJ16620
augaagaccaucaucgcccugagcuacauccugugccugguguucgcccagaagcugcccggcaacgacaacagcaccgccacccugugccugggccaccacgccgugcccaacggcacccuggugaagaccaucaccaacgaccagaucgaggugaccaacgccaccgagcuggugcagagcagcagcaccggcagaaucugcaacagcccccaccagauccuggacggcgagaacugcacccugaucgacgcccugcugggcgacccccacugcgacggcuuccagaacaaggagugggaccuguucguggagagaaacaaggccuacagcaacugcuaccccuacgacgugcccgacuacgccagccugagaagccugguggccagcagcggcacccuggaguucaacaacgagagcuucaacuggaccggcguggcccagaacggcaccagcagcgccugcaagagaagaagcaucaagagcuucuucagcagacugaacuggcugcaccagcugaaguacaaguaccccgcccugaacgugaccaugcccaacaacgagaaguucgacaagcuguacaucuggggcgugcaccaccccagcaccgacagcgaccagaucagccuguacgcccaggccagcggcagagugaccgugagcaccaagagaagccagcagaccgugauccccaacaucggcagcagacccugggugagaggcgugagcagcagaaucagcaucuacuggaccaucgugaagcccggcgacauccugcugaucaacagcaccggcaaccugaucgcccccagaggcuacuucaagaucagaagcggcaagagcagcaucaugagaagcgacgcccccaucggcaagugcaacagcgagugcaucacccccaacggcagcauccccaacgacaagcccuuccagaacgugaacagaaucaccuacggcgccugccccagauacgugaagcagaacacccugaagcuggccaccggcaugagaaacgugcccgagaagcagaccagaggcaucuucggcgccaucgccggcuucaucgagaacggcugggagggcaugguggacggcugguacggcuucagacaccagaacagcgagggcaccggccaggccgccgaccugaagagcacccaggccgccaucaaccagaucaacggcaagcugaacagacugaucgagaagaccaacaagaaguuccaccagaucgagaaggaguucagcgagguggagggcagaauccaggaccuggagaaguacguggaggacaccaagaucgaccuguggagcuacaacgccgagcugcugguggcccuggagaaccagcacaccaucgaccugaccgacagcgagaugaacaagcuguucgagagaaccaagaagcagcugagagagaacgccgaggacaugggcaacggcugcuucaagaucuaccacaagugcgacaacgccugcaucggcagcaucagaaacggcaccuacgaccacgacguguacagagacgaggcccugaacaacagauuccagaucaagggcguggagcugaagagcggcuacaaggacuggauccuguggaucagcuucgccaucagcugcuuccugcugugcguggugcugcugggcuucaucaugugggccugccagaagggcaacaucagaugcaacaucugcaucuga

SEQ ID NO: 161442 - RNA, 1701 nt, Artificial Sequence
  derived and/or modified CDS sequence (opt4) from hemagglutinin__InfluenzaA__ABJ16631
augaagaccaucaucgcccugagcuacauccugugccugguguucgcccagaagcugcccggcaacgacaacagcaccgccacccugugccugggccaccacgccgugcccaacggcaccaucgugaagaccaucaccaacgaccagaucgaggugaccaacgccaccgagcuggugcagagcagcagcaccggcggcaucugcgacagcccccaccagauccuggacggcgagaacugcacccugaucgacgcccugcugggcgacccccagugcgacggcuuccagaacaagaagugggaccuguucguggagagaagcaaggccuacagcaacugcuaccccuacgacgugcccgacuacgccagccugagaagccugaucgccagcagcggcacccuggaguucaacaacgagagcuucaacuggaccggcgugacccagaacggcaccagcagcgccugcaagagaagaagcaacagcagcuucuucagcagacugaacuggcugacccaccugaaguucaaguaccccgcccugaacgugaccaugcccaacaacgaggaguucgacaagcuguacaucuggggcgugcaccaccccggcaccuacaacgaccagaucagccuguacgcccaggccagcggcagaaucaccgugagcaccaagagaagccagcagaccgugauccccaacaucggcagcagacccagagugagagacauccccagcagaaucagcaucuacuggaccaucgugaagcccggcgacauccugcugaucaacagcaccggcaaccugaucgcccccagaggcuacuucaagaucagaagcggcaagagcagcaucaugagaagcgacgcccccaucggcaagugcaacagcgagugcaucacccccaacggcagcauccccaacgacaagcccuuccagaacgugaacagaaucaccuacggcgccugccccagauacgugaagcagaacacccugaagcuggccaccggcaugagaaacgugcccgagaagcagaccagaggcaucuucggcgccaucgccggcuucaucgagaacggcugggagggcaugguggacggcugguacggcuucagacaccagaacagcgagggcaucggccaggccgccgaccugaagagcacccaggccgccaucgaccagaucaacggcaagcugaacagacugaucggcaagaccaacgagaaguuccaccagaucgagaaggaguucagcgagguggagggcagaauccaggaccuggagaaguacguggaggacaccaagaucgaccuguggagcuacaacgccgagcugcugguggcccuggagaaccagcacaccaucgaccugaccgacagcgagaugaacaagcuguucgagaagaccaagaagcagcugagagagaacgccgaggacaugggcaacggcugcuucaagaucuaccacaagugcgacaacgccugcaucggcagcaucagaaacggcaccuacgaccacgacguguacagagacgaggcccugaacaacagauuccagaucaagggcguggagcugaagagcggcuacaaggacuggauccuguggaucagcuucgccaucagcugcuuccugcugugcguggcccugcugggcuucaucaugugggccugccagaagggcaacaucagaugcaacaucugcaucuga

SEQ ID NO: 161443 - RNA, 1698 nt, Artificial Sequence
  derived and/or modified CDS sequence (opt4) from hemagglutinin__InfluenzaA__ABJ16664
augaaggugaagcugcuggugcugcugugcaccuucaccgccaccuacgccgacaccaucugcaucggcuaccacgccaacaacagcaccgacaccguggacaccgugcuggagaagaacgugaccgugacccacagcgugaaccugcuggaggacagccacaacggcaagcugugccugcugaagggcaucgccccccugcagcugggcaacugcagcguggccggcuggauccugggcaaccccgagugcgagcugcugaucagcaaggagagcuggagcuacaucguggagacccccaaccccgagaacggcaccugcuaccccggccacuucgccgacuacgaggagcugagagagcagcugagcagcgugagcagcuucgagagauucgagaucuuccccaaggagagcagcuggcccaaccacaccgugaccggcgugagcgccagcugcagccacaacggcaagagcagcuucuacagaaaccugcuguggcugaccggcaagaacggccuguaccccaaccugagcaagagcuacgccaacaacaaggagaaggaggugcuggugcuguggggcgugcaccacccccccaacaucggcgaccagagagcccuguaccacaccgagaacgccuacgugagcguggugagcagccacuacagcagaagauucacccccgagaucgccaagagacccaaggugagagaccaggagggcagaaucaacuacuacuggacccugcuggagcccggcgacaccaucaucuucgaggccaacggcaaccugaucgcccccagauucgccuucgcccugagcagaggcuucggcagcggcaucaucaccagcaacgcccccauggacgagugcgacgccaagugccagaccccccagggcgccaucaacagcagccugcccuuccagaacgugcaccccgugaccaucggcgagugccccaaguacgugagaagcgccaagcugagaauggugaccggccugagaaacauccccagcauccagagcagaggccuguucggcgccaucgccggcuucaucgagggcggcuggaccggcaugguggacggcugguacggcuaccaccaccagaacgagcagggcagcggcuacgccgccgaccagaagagcacccagaacgccaucaacggcaucaccaacaaggugaacagcgugaucgagaagaugaacacccaguucaccgccgugggcaaggaguucaacaagcuggagagaagaauggagaaccugaacaagaagguggacgacggcuuccuggacaucuggaccuacaacgccgagcugcuggugcugcuggagaacgagagaacccuggacuuccacgacagcaacgugaagaaccuguacgagaaggugaagagccagcugaagaacaacgccaaggagaucggcaacggcugcuucgaguucuaccacaagugcaacgacgagugcauggagagcgugaagaacggcaccuacgacuaccccaaguacagcgaggagagcaagcugaacagagagagaaucgacggcgugaagcuggagagcaugggcguguaccagauccuggccaucuacagcaccguggccagcagccuggugcugcuggugagccugggcgccaucagcuucuggaugugcagcaacggcagccugcagugcagaaucugcaucuga

SEQ ID NO: 161444 - RNA, 1698 nt, Artificial Sequence; identical to SEQ ID NO: 161264
  derived and/or modified CDS sequence (opt4) from hemagglutinin__InfluenzaA__ABJ16675

SEQ ID NO: 161445 - RNA, 1698 nt, Artificial Sequence
  derived and/or modified CDS sequence (opt4) from hemagglutinin__InfluenzaA__ABJ16686
augaaggugaagcugcuggugcugcugugcaccuucaccgccaccuacgccgacaccaucugcaucggcuaccacgccaacaacagcaccgacaccguggacaccgugcuggagaagaacgugaccgugacccacagcgugaaccugcuggaggacagccacaacggcaagcugugccugcugaagggcaucgccccccugcagcugggcaacugcagcguggccggcuggauccugggcaaccccgagugcgagcugcugaucagcaaggagagcuggagcuacaucguggagacccccaaccccgagaacggcaccugcuaccccggcuacuucgccgacuacgaggagcugagagagcagcugagcagcgugagcagcuucgagagauucgagaucuuccccaaggagagcagcuggcccaaccacaccgugaccggcgugagcgccagcugcagccacaacggcaagagcagcuucuacagaaaccugcuguggcugaccggcaagaacggccuguaccccaaccugagcaagagcuacgccaacaacaaggagaaggaggugcuggugcuguggggcgugcaccacccccccaacaucggcgaccagagagcccuguaccacaccgagaacgccuacgugagcguggugagcagccacuacagcagaagauucacccccgagaucgccaagagacccaaggugagagaccaggagggcagaaucaacuacuacuggacccugcuggagcccggcgacaccaucaucuucgaggccaacggcaaccugaucgcccccagauucgccuucgcccugagcagaggcuucggcagcggcaucaucaccagcaacgcccccauggacgagugcgacgccaagugccagaccccccagggcgccaucaacagcagccugcccuuccagaacgugcaccccgugaccaucggcgagugccccaaguacgugagaagcgccaagcugagaauggccaccggccugagaaacauccccagcauccagagcagaggccuguucggcgccaucgccggcuucaucgagggcggcuggaccggcaugguggacggcugguacggcuaccaccaccagaacgagcagggcagcggcuacgccgccgaccagaagagcacccagaacgccaucaacggcaucaccaacaaggugaacagcgugaucgagaagaugaacacccaguucaccgccgugggcaaggaguucagcaagcuggagagaagaauggagaaccugaacaagaagguggacgacggcuuccuggacaucuggaccuacaacgccgagcugcuggugcugcuggagaacgagagaacccuggacuuccacgacagcaacgugaagaaccuguacgagaaggugaagagccagcugaagaacaacgccaaggagaucggcaacggcugcuucgaguucuaccacaagugcaacgacgagugcauggagagcgugaagaacggcaccuacgacuaccccaaguacagcgaggagagcaagcugaacagagagaagaucgacggcgugaagcuggagagcaugggcguguaccagauccuggccaucuacagcaccguggccagcagccuggugcugcuggugagccugggcgccaucagcuucuggaugugcagcaacggcagccugcagugcagaaucugcaucuga

SEQ ID NO: 161446 - RNA, 1701 nt, Artificial Sequence
  derived and/or modified CDS sequence (opt4) from hemagglutinin__InfluenzaA__ABJ16697
augaagaccaucaucgcccugagcuacauccugugccugguguucgcccagaagcugcccggcaacgacaacagcaccgccacccugugccugggccaccacgccgugcccaacggcacccuggugaagaccaucaccaacgaccagaucgaggugaccaacgccaccgagcuggugcagagcagcagcaccggcggcaucugcgacagcccccaccagauccuggacggcgagaacugcacccugaucgacgcccugcugggcgacccccacugcgacggcuuccagaacaaggagugggaccuguucguggagagaagcaaggccuacagcaacugcuaccccuacgacgugcccgacuacgccagccugagaagccugguggccagcagcggcacccuggaguucaacaacgagagcuucaacuggaccggcguggcccagaacggcaccagcagcgccugcaagagaagaagcaacaagagcuucuucagcagacugaacuggcugcaccagcugaaguacaaguaccccgcccugaacgugaccaugcccaacaacgagaaguucgacaagcuguacaucuggggcgugcaccaccccagcaccgacagcgaccagaucagccuguacgcccaggcccccggcagagugaccgugagcaccaagagaagccagcagaccgugauccccaacaucggcagcagacccugggugagaggcgugagcagcagaaucagcaucuacuggaccaucgugaagcccggcgacauccugcugaucaacugcaccggcaaccugaucgcccccagaggcuacuucaagaucagaagcggcaagagcagcaucaugagaagcgacgccagcaucggcaagugcaacagcgagugcaucacccccaacggcagcauccccaacgacaagcccuuccagaacgugaacagaaucaccuacggcgccugccccagauacgugaagcagaacacccugaagcuggccaccggcaugagaaacgugcccgagaagcagaccagaggcaucuucggcgccaucgccggcuucaucgagaacggcugggagggcaugguggacggcugguacggcuucagacaccagaacagcgagggcaccggccaggccgccgaccugaagagcacccaggccgccaucaaccagaucaacggcaagcugaacagacugaucgagaagaccaacgagaaguuccaccagaucgagaaggaguucagcgagguggagggcagaauccaggaccuggagaaguacguggaggacaccaagaucgaccuguggagcuacaacgccgagcugcugguggcccuggagaaccagcacaccaucgaccugaccgacagcgagaugaacaagcuguucgagagaaccaagaagcagcugagagagaacgccgaggacaugggcaacggcugcuucaagaucuaccacaagugcgacaacgccugcaucggcagcaucagaaacggcaccuacgaccacgacguguacagagacgaggcccugaacaacagauuccagaucaagggcguggagcugaagagcggcuacaaggacuggauccuguggaucagcuucgccaucagcugcuuccugcugugcgccgugcugcugggcuucaucaugugggccugccagaagggcaacaucagaugcaacaucugcaucuga

SEQ ID NO: 161447 - RNA, 1701 nt, Artificial Sequence
  derived and/or modified CDS sequence (opt4) from hemagglutinin__InfluenzaA__ABJ16730
augaaggccaagcugcuggugcugcugugcgccuucaccgccaccuacgccgacaccaucugcaucggcuaccacgccaacaacagcaccgacaccguggacaccgugcuggagaagaacgugaccgugacccacagcgugaaccugcuggaggacagccacaacggcaagcugugcagacugaagggcaccgccccccugcagcugggcaacugcagcaucgccggcuggauccugggcaaccccgagugcgagagccuguucagcaaggagagcuggagcuacaucgccgagacccccaaccccaagaacggcaccugcuaccccggcuacuucgccgacuacgaggagcugagagagcagcugagcagcgugagcagcuucgagagauucgagaucuuccccaaggacagcagcuggcccaaccacaccgugaccaagggcgugaccgccagcugcagccacaacggcaagagcagcuucuacaagaaccugcuguggcugaccgagaagaacggccuguaccccaaccugagcaagagcuacgugaacaagaagggcaaggaggugcuggugcuguggggcgugcaccaccccagcaacaugggcgaccagagagccaucuaccacaaggagaacgccuacgugagcgugcugagcagccacuacagcagaagauucacccccgagaucgccagaagacccaaggugagagaccaggagggcagaaucaacuacuacuggacccugcuggagcccggcgacaccaucaucuucgaggccaacggcaaccugaucgcccccugguacgccuucgcccugagcagaggcuucggcagcggcaucaucaucagcaacgccagcaugggcgagugcgacgccaagugccagaccccccagggcgccaucaacagcagccugcccuuccagaacgugcaccccgugaccaucggcgagugccccaaguacgugagaagcaccaagcugagaauggugaccggccugagaaacgugcccagcauccagagcagaggccuguucggcgccaucgccggcuucaucgagggcggcuggaccggcaugaucgacggcugguacggcuaccaccaccagaacgagcagggcagcggcuacgccgccgaccagaagagcacccagaacgccaucaacggcaucaccaacaaggugaacagcaucaucgagaagaugaacacccaguucaccgccgugggcaaggaguucaacaagcuggagagaagaauggagaaccugaacaagaagguggacgacggcuuccuggacaucuggaccuacaacgccgagcugcuggugcugcuggagaacgagagaacccuggacuuccacgacagcaacgugaagaaccuguacgagaaggugaagaaccagcugaagaacaacgccaaggagaucggcaacggcugcuucgaguucuaccacaagugcaacaacgagugcauggagagcgugaagaacggcaccuacgacuaccccaaguacagcaaggagagcaagcugaacagagagaagaucgacggcgugaagcuggagagcaugggcguguaccagauccuggccaucuacagcaccguggccagcagccuggugcugcuggugagccugggcgccaucagcuucuggaugugcagcaacggcagccugcagugcagaaucugcaucuga

SEQ ID NO: 161448 - RNA, 1701 nt, Artificial Sequence
  derived and/or modified CDS sequence (opt4) from hemagglutinin__InfluenzaA__ABJ16741
augaagaccaucaucgcccugagcuacauccugugccugguguucgcccagaagcugcccggcaacgacaacagcaccgccacccugugccugggccaccacgccgugcccaacggcacccuggugaagaccaucaccaacgaccagaucgaggugaccaacgccaccgagcuggugcagagcagcagcaccggcggcaucugcgacagcccccaccagauccuggacggcgagaacugcacccugaucgacgcccugcugggcgacccccacugcgacggcuuccagaacaaggagugggaccuguucguggagagaagcaaggccuacagcaacugcuaccccuacgacgugcccgacuacgccagccugagaagccugguggccagcagcggcacccuggaguucaacaacgagagcuucaacuggaccggcguggcccagaacggcaccagcagcgccugcaagagaagaagcaacaagggcuucuucagcagacugaacuggcugcaccagcugaaguacaaguaccccgcccugaacgugaccaugcccaacaacgagaaguucgacaagcuguacaucuggggcgugcaccaccccagcaccgacagcgaccagaucagccuguacgcccaggcccccggcagagugaccgugagcaccaagagaagccagcagaccgugauccccaacaucggcagcagacccugggugagaggcgugagcagcaucaucagcaucuacuggaccaucgugaagcccggcgacauccugcugaucaacugcaccggcaaccugaucgcccccagaggcuacuucaagaucagaagcggcaagagcagcaucaugagaagcgacgccagcaucggcaagugcaacagcgagugcaucacccccaacggcagcauccccaacgacaagcccuuccagaacgugaacagaaucaccuacggcgccugccccagauacgugaagcagaacacccugaagcuggccaccggcaugagaaacgugcccgagaagcagaccagaggcaucuucggcgccaucgccggcuucaucgagaacggcugggagggcaugguggacggcugguacggcuucagacaccagaacagcgagggcaccggccaggccgccgaccugaagagcacccaggccgccaucaaccagaucaacggcaagcugaacagacugaucggcaagaccaacgagaaguuccaccagaucgagaaggaguucagcgagguggagggcagaauccaggaccuggagaaguacguggaggacaccaagaucgaccuguggagcuacaacgccgagcugcugguggcccuggagaaccagcacaccaucgaccugaccgacagcgagaugaacaagcuguucgagagaaccaagaagcagcugagagagaacgccgaggacaugggcaacggcugcuucaagaucuaccacaagugcgacaacgccugcaucggcagcaucagaaacggcaccuacgaccacgacguguacagagacgaggcccugaacaacagauuccagaucaagggcguggagcugaagagcggcuacaaggacuggauccuguggaucagcuucgccaucagcugcuuccugcugugcguggugcugcugggcuucaucaugugggccugccagaagggcaacaucagaugcaacaucugcaucuga

SEQ ID NO: 161449 - RNA, 1701 nt, Artificial Sequence
  derived and/or modified CDS sequence (opt4) from hemagglutinin__InfluenzaA__ABJ16752
augaagaccaucaucgcccugagcuacauccugugccugguguucgcccagaagcugcccggcaacgacaacagcaccgccacccugugccugggccaccacgccgugcccaacggcacccuggugaagaccaucaccaacgaccagaucgaggugaccaacgccaccgagcuggugcagagcagcagcaccggcggcaucugcgacagcccccaccagauccuggacggcgagaacugcacccugaucgacgcccugcugggcgacccccacugcgacggcuuccagaacaaggagugggaccuguucguggagagaagcaaggccuacagcaacugcuaccccuacgacgugcccgacuacgccagccugagaagccugguggccagcagcggcacccuggaguucaacaacgagagcuucaacuggaccggcguggcccagaacggcaccagcagcgccugcaagagaagaagcaacaagagcuucuucagcagacugaacuggcugcaccagcugaaguacaaguaccccgcccugaacgugaccaugcccaacaacgagaaguucgacaagcuguacaucuggggcgugcaccaccccagcaccgacagcgaccagaucagccuguacgcccaggcccccggcagagugaccgugagcaccaagagaagccagcagaccgugauccccaacaucggcagcagacccugggugagaggcgugagcagcggcaucagcaucuacuggaccaucgugaagcccggcgacauccugcugaucaacugcaccggcaaccugaucgcccccagaggcuacuucaagaucagaagcggcaagagcagcaucaugagaagcgacgccagcaucggcaagugcaacagcgagugcaucacccccaacggcagcauccccaacgacaagcccuuccagaacgugaacagaaucaccuacggcgccugccccagauacgugaagcagaacacccugaagcuggccaccggcaugagaaacgugcccgagaagcagaccagaggcaucuucggcgccaucgccggcuucaucgagaacggcugggagggcaugguggacggcugguacggcuucagacaccagaacagcgagggcaccggccaggccgccgaccugaagagcacccaggccgccaucaaccagaucaacggcaagcugaacagacugaucgagaagaccaacgagaaguuccaccagaucgagaaggaguucagcgagguggagggcagaauccaggaccuggagaaguacguggaggacaccaagaucgaccuguggagcuacaacgccgagcugcugguggcccuggagaaccagcacaccaucgaccugaccgacagcgagaugaacaagcuguucgagagaaccaagaagcagcugagagagaacgccgaggacaugggcaacggcugcuucaagaucuaccacaagugcgacaacgccugcaucggcagcaucagaaacggcaccuacgaccacgacguguacagagacgaggcccugaacaacagauuccagaucaagggcguggagcugaagagcggcuacaaggacuggauccuguggaucagcuucgccaucagcugcuuccugcugugcguggugcugcugggcuucaucaugugggccugccagaagggcaacaucagaugcaacaucugcaucuga

SEQ ID NO: 161450 - RNA, 1701 nt, Artificial Sequence
  derived and/or modified CDS sequence (opt4) from hemagglutinin__InfluenzaA__ABJ16763
augaagaccaucaucgcccugagcuacauccugugccugguguucgcccagaagcugcccggcaacgacaacagcaccgccacccugugccugggccaccacgccgugcccaacggcacccuggugaagaccaucaccaacgaccagaucgaggugaccaacgccaccgagcuggugcagagcagcagcaccggcggcaucugcgacagcccccaccagauccuggacggcgagaacugcacccugaucgacgcccugcugggcgacccccacugcgacggcuuccagaacaaggagugggaccuguucguggagagaagcaaggccuacagcaacugcuaccccuacgacgugcccgacuacgccagccugagaagccugguggccagcagcggcacccuggaguucaacaacgagagcuucaacuggaccggcguggcccagaacggcaccagcagcgccugcaagagaagaagcaacaagagcuucuucagcagacugaacuggcugcaccagcugaaguacaaguaccccgcccugaacgugaccaugcccaacaacgagaaguucgacaagcuguacaucuggggcgugcaccaccccagcaccgacagcgaccagaucagccuguacgcccaggcccccggcagagugaccgugagcaccaagagaagccagcagaccgugauccccaacaucggcagcagacacugggugagaggcgugagcagcagaaucagcaucuacuggaccaucgugaagcccggcgacauccugcugaucaacugcaccggcaaccugaucgcccccagaggcuacuucaagaucagaagcggcaagagcagcaucaugagaagcgacgccagcaucggcaagugcaacagcgagugcaucacccccaacggcagcauccccaacgacaagcccuuccagaacgugaacagaaucaccuacggcgccugccccagauacgugaagcagaacacccugaagcuggccaccggcaugagaaacgugcccgagaagcagaccagaggcaucuucggcgccaucgccggcuucaucgagaacggcugggagggcaugguggacggcugguacggcuucagacaccagaacagcgagggcaccggccaggccgccgaccugaagagcacccaggccgccaucaaccagaucaacggcaagcugaacagacugaucgagaagaccaacgagaaguuccaccagaucgagaaggaguucagcgagguggagggcagaauccaggaccuggagaaguacguggaggacaccaagaucgaccuguggagcuacaacgccgagcugcugguggcccuggagaaccagcacaccaucgaccugaccgacagcgagaugaacaagcuguucgagagaaccaagaagcagcugagagagaacgccgaggacaugggcaacggcugcuucaagaucuaccacaagugcgacaacgccugcaucggcagcaucagaaacggcaccuacgaccacgacguguacagagacgaggcccugaacaacagauuccagaucaagggcguggagcugaagagcggcuacaaggacuggauccuguggaucagcuucgccaucagcugcuuccugcugugcguggugcugcugggcuucaucaugugggccugccagaagggcaacaucagaugcaacaucugcaucuga

SEQ ID NO: 161451 - RNA, 1701 nt, Artificial Sequence
  derived and/or modified CDS sequence (opt4) from hemagglutinin__InfluenzaA__ABJ16774
augaagaccaucaucgcccugagcuacauccugugccugguguucgcccagaagcugcccgugaacgacaacagcaccgccacccugugccugggccaccacgccgugcccaacggcacccuggugaagaccaucaccaacgaccacaucgaggugaccaacgccaccgagcuggugcagagcagccccaccggcagaaucugcgacagcccccaccagauccuggacggcgagaacugcacccugaucgacgcccugcugggcgacccccacugcgacggcuuccagaacaaggagugggaccuguucguggagagaagcaccgccuacagcaacugcuaccccuacgacgugcccgacuacgccagccugagaagccugguggccagcagcggcacccuggaguucaacaacgagagcuucaacuggaccggcguggcccagaacggcaccagcagcgccugcaagagaagaagcaucaagagcuucuucagcagacugaacuggcugcaccagcugaaguacaaguaccccgcccugaacgugaccaugcccaacaacgagaaguucgacaagcuguacaucuggggcgugcaccaccccagcaccgacagcgaccagaucagccuguacgcccaggccagcggcagagugaccgugagcaccaagagaagccagcagaccgugauccccaacaucggcagcggccccugggugagaggcgugagcagcagaaucagcaucuacuggaccaucgugaagcccggcgacauccugcugaucaacagcaccggcaaccugaucgcccccagaggcuacuucaagaucagaaacggcaagagcagcaucaugagaagcaacacccccaucggcaagugcaacagcgagugcaucacccccaacggcagcauccccaacgacaagcccuuccagaacgugaacagaaucaccuacggcgccugccccagauacgugaagcagaacacccugaagcuggccaccggcaugagaaacgugcccgagaagcagaccagaggcaucuucggcgccaucgccggcuucaucgagaacggcugggagggcaugguggacggcugguacggcuucagacaccagaacagcgagggcaccggccaggccgccgaccugaagagcacccaggccgccaucaaccagaucaacggcaagcugaacagacugaucgagaagaccaacgagaaguuccaccagaucgagaaggaguucagcgagguggagggcagaauccaggaccuggagaaguacguggaggacaccaagaucgaccuguggagcuacaacgccgagcugcugguggcccuggagaaccagcacaccaucgaccugaccgacagcgagaugaacaagcuguucgagagaaccagaaagcagcugagagagaacgccgaggacaugggcaacggcugcuucaagaucuaccacaagugcgacaacgccugcaucggcagcaucagaaacggcaccuacgaccacgacguguacagagacgaggcccugaacaacagauuccagaucaagggcguggagcugaagagcggcuacaaggacuggauccuguggaucagcuucgccaucagcugcuuccugcugugcguggugcugcugggcuucaucaugugggccugccagaagggcaacaucagaugcaacaucugcaucuga

SEQ ID NO: 161452 - RNA, 1701 nt, Artificial Sequence
  derived and/or modified CDS sequence (opt4) from hemagglutinin__InfluenzaA__ABJ16785
augaagaccaucaucgcccugagcuacauccugugccugguguucgcccagaagcugcccggcaacgacaacagcaccgccacccugugccugggccaccacgccgugcccaacggcacccuggugaagaccaucaccaacgaccagaucgaggugaccaacgccaccgagcuggugcagagcagcagcaccggcggcaucugcgacagcccccaccagauccuggacggcgagaacugcacccugaucgacgcccugcugggcgacccccacugcgacggcuuccagaacaaggagugggaccuguucguggagagaagcaaggccuacagcaacugcuaccccuacgacgugcccgacuacgccagccugagaagccugguggccagcagcggcacccuggaguucaacaacgagagcuucaacuggaccggcguggcccagaacggcaccagcuacgccugcaagagaagaagcaacaagagcuucuucagcagacugaacuggcugcaccagcugaaguacaaguaccccgcccugaacgugaccaugcccaacaacgagaaguucgacaagcuguacaucuggggcgugcaccaccccagcaccgacagcgaccagaucagccuguacgcccaggcccccggcagagugaccgugagcaccaagagaagccagcagaccgugauccccaacaucggcagcagacccugggugagaggcgugagcagcagaaucagcaucuacuggaccaucgugaagcccggcgacauccugcugaucaacugcaccggcaaccugaucgcccccagaggcuacuucaagaucagaagcggcaagagcagcaucaugagaagcgacgccagcaucggcaagugcaacagcgagugcaucacccccaacggcagcauccccaacgacaagcccuuccagaacgugaacagaaucaccuacggcgccugccccagauacgugaagcagaacacccugaagcuggccaccggcaugagaaacgugcccgagaagcagaccagaggcaucuucggcgccaucgccggcuucaucgagaacggcugggagggcaugguggacggcugguacggcuucagacaccagaacagcgagggcaccggccaggccgccgaccugaagagcacccaggccgccaucaaccagaucaacggcaagcugaacagacugaucgagaagaccaacgagaaguuccaccagaucgagaaggaguucagcgagguggagggcagaauccaggaccuggagaaguacguggaggacaccaagaucgaccuguggagcuacaacgccgagcugcugguggcccuggagaaccagcacaccaucgaccugaccgacagcgagaugaacaagcuguucgagagaaccaagaagcagcugagagagaacgccgaggacaugggcaacggcugcuucaagaucuaccacaagugcgacaacgccugcaucggcagcaucagaaacggcaccuacgaccacgacguguacagagacgaggcccugaacaacagauuccagaucaagggcguggagcugaagagcggcuacaaggacuggauccuguggaucagcuucgccaucagcugcuuccugcugugcguggugcugcugggcuucaucaugugggccugccagaagggcaacaucagaugcaacaucugcaucuga

SEQ ID NO: 161453 - RNA, 1701 nt, Artificial Sequence; identical to SEQ ID NO: 160970
  derived and/or modified CDS sequence (opt4) from hemagglutinin__InfluenzaA__ABJ53438

SEQ ID NO: 161454 - RNA, 1698 nt, Artificial Sequence; identical to SEQ ID NO: 160802
  derived and/or modified CDS sequence (opt4) from hemagglutinin__InfluenzaA__ABJ53449

SEQ ID NO: 161455 - RNA, 1701 nt, Artificial Sequence
  derived and/or modified CDS sequence (opt4) from hemagglutinin__InfluenzaA__ABJ53471
augaagaccaucaucgcccugagcuacauccugugccugguguucgcccagaagauccccggcaacgacaacagcaccgccacccugugccugggccaccacgccgugcccaacggcaccaucgugaagaccaucaccaacgaccagaucgaggugaccaacgccaccgagcuggugcagagcagcagcaccggcggcaucugcgacagcccccaccagauccuggacggcgagaacugcacccugaucgacgcccugcugggcgacccccagugcgacggcuuccagaacaagaagugggaccuguucguggagagaagcaaggccuacagcaacugcuaccccuacgacgugcccgacuacgccagccugagaagccugguggccagcagcggcacccuggaguucaacaacgagagcuucaacuggaccggcgugacccagaacggcaccagcagcgccugcaagagaggcagcaacaacagcuucuucagcagacugaacuggcugacccaccugaaguucaaguaccccgcccugaacgugaccaugcccaacaacgagaaguucgacaagcuguacaucuggggcgugcaccaccccggcaccgacaacgaccagaucuuccuguacgcccaggccagcggcagaaucaccgugagcaccaagagaagccagcagaccgugauccccaacaucggcagcagacccagagugagaaacauccccagcagaaucagcaucuacuggaccaucgugaagcccggcgacauccugcugaucaacagcaccggcaaccugaucgcccccagaggcuacuucaagaucagaagcggcaagagcagcaucaugagaagcgacgcccccaucggcaagugcaacagcgagugcaucacccccaacggcagcauccccaacgacaagcccuuccagaacgugaacagaaucaccuacggcgccugccccagauacgugaagcagaacacccugaagcuggccaccggcaugagaaacgugcccgagaagcagaccagaggcaucuucggcgccaucgccggcuucaucgagaacggcugggagggcaugguggacggcugguacggcuucagacaccagaacagcgagggcaucggccaggccgccgaccugaagagcacccaggccgccaucaaccagaucaacggcaagcugaacagacugaucggcaagaccaacgagaaguuccaccagaucgagaaggaguucagcgagguggagggcagaauccaggaccuggagaaguacguggaggacaccaagaucgaccuguggagcuacaacgccgagcugcugguggcccuggagaaccagcacaccaucgaccugaccgacagcgagaugaacaagcuguucgagagaaccaagaagcagcugagagagaacgccgaggacaugggcaacggcugcuucaagaucuaccacaagugcgacaacgccugcaucggcagcaucagaaacggcaccuacgaccacgacguguacagagacgaggcccugaacaacagauuccagaucaagggcguggagcugaagagcggcuacaaggacuggauccuguggaucagcuucgccaucagcugcuuccugcugugcguggcccugcugggcuucaucaugugggccugccagaagggcaacaucagaugcaacaucugcaucuga

SEQ ID NO: 161456 - RNA, 1701 nt, Artificial Sequence
  derived and/or modified CDS sequence (opt4) from hemagglutinin__InfluenzaA__ABJ53482
augaagaccaucaucgcccugagcuacauccugugccugguguucgcccagaagcugcccggcaacgacaacagcaccgccacccugugccugggccaccacgccgugcccaacggcaccaucgugagaaccaucaccaacgaccagaucgaggugaccaacgccaccgagcuggugcagagcagcagcaccggcgagaucugcgacagcccccaccagauccuggacggcgagaacugcacccugaucgacgcccugcugggcgacccccagugcgacggcuuccagaacaagaagugggaccuguucguggagagaagcaaggccuacagcaacugcuaccccuacgacgugcccgacuacgccagccugagaagccugguggccagcagcggcacccuggaguucaacaacgagagcuucaacuggaccggcgugacccagaacggcaccagcagcgccugcaagagaagaagcaacaacagcuucuucagcagacugaacuggcugacccaccugaaguucaaguaccccgcccugaacgugaccaugcccaacaacgagaaguucgacaagcuguacaucuggggcgugcaccaccccggcaccgacaacgaccagaucuuccuguacgcccaggccagcggcagaaucaccgugagcaccaagagaagccagcagaccgugauccccaacaucggcagcagacccagagugagaaacauccccagcagaaucagcaucuacuggaccaucgugaagcccggcgacauccugcugaucaacagcaccggcaaccugaucgcccccagaggcuacuucaagaucagaagcggcaagagcagcaucaugagaagcgacgcccccaucggcaagugcaacagcgagugcaucacccccaacggcagcauccccaacgacaagcccuuccagaacgugaacagaaucaccuacggcgccugccccagauacgugaagcagaacacccugaagcuggccaccggcaugagaaacgugcccgagaagcagaccagaggcaucuucggcgccaucgccggcuucaucgagaacggcugggagggcaugguggacggcugguacggcuucagacaccagaacagcgagggcaucggccaggccgccgaccugaagagcacccaggccgccaucaaccagaucaacggcaagcugaacagacugaucggcaagaccaacgagaaguuccaccagaucgagaaggaguucagcgagguggagggcagaauccaggaccuggagaaguacguggaggacaccaagaucgaccuguggagcuacaacgccgagcugcugguggcccuggagaaccagcacaccaucgaccugaccgacagcgagaugaacaagcuguucgagagaaccaagaagcagcugagagagaacgccgaggacaugggcaacggcugcuucaagaucuaccacaagugcgacaacgccugcaucggcagcaucagaaacggcaccuacgaccacgacguguacagagacgaggcccugaacaacagauuccagaucaagggcguggagcugaagagcggcuacaaggacuggauccuguggaucagcuucgccaucagcugcuuccugcugugcguggcccugcugggcuucaucaugugggccugccagaagggcaacaucagaugcaacaucugcaucuga

SEQ ID NO: 161457 - RNA, 1698 nt, Artificial Sequence; identical to SEQ ID NO: 161292
  derived and/or modified CDS sequence (opt4) from hemagglutinin__InfluenzaA__ABJ53493

SEQ ID NO: 161458 - RNA, 1698 nt, Artificial Sequence
  derived and/or modified CDS sequence (opt4) from hemagglutinin__InfluenzaA__ABJ53504
augaaggccaagcugcuggugcugcugugcaccuucaccgccaccuacgccgacaccaucugcaucggcuaccacgccaacaacagcaccgacaccguggacaccgugcuggagaagaacgugaccgugacccacagcgugaaccugcuggaggacagccacaacggcaagcugugccugcugaagggcaucgccccccugcagcugggcaacugcagcguggccggcuggauccugggcaaccccgagugcgagagccugaucagcaaggagagcuggagcuacaucguggagacccccaaccccgagaacggcaccugcuaccccggcuacuucgccgacuacgaggagcugagagagcagcugagcagcgugagcagcuucgagagauucgagaucuuccccaaggagagcagcuggcccaaccacaccgugaccggcgugagcgccagcugcagccacaacggcaagagcagcuucuacagaaaccugcuguggcugaccgagaagaacggccuguaccccaaccugagcaagagcuacgugaacaacaaggagaaggaggugcuggugcuguggggcgugcaccaccccagcaacaucggcgugcagagagccaucuaccacaccgagaacgccuacgugagcguggugagcagccacuacagcagaagauucacccccgagaucgccaagagacccaaggugagagaccaggagggcagaaucaacuacuacuggacccugcuggagcccggcgacaccaucaucuucgaggccaacggcaaccugaucgcccccugguacgccuucgcccugagcagaggcuucgagagcggcaucaucaccagcaacgcccccaugaacgagugcgacgccaagugccagaccccccugggcgccaucaacagcagccugcccuuccagaacgugcaccccgugaccaucggcgagugccccaaguacgugagaagcgccaagcugagaauggugaccggccugagaaacauccccagcauccagagcagaggccuguucggcgccaucgccggcuucaucgagggcggcuggaccggcaugaucgacggcugguacggcuaccaccaccagaacgagcagggcagcggcuacgccgccgaccagaagagcacccagaacgccaucaacggcaucaccaacaaggugaacagcgugaucgagaagaugaacacccaguucaccgccgugggcaaggaguucaacaagcuggagagaagaauggagaaccugaacaagaagguggacgacggcuuccuggacaucuggaccuacaacgccgagcugcuggugcugcuggagaacgagagaacccuggacuuccacgacagcaacgugaagaaccuguacgagaaggugaagagccagcugaagaacaacgccaaggagaucggcaacggcugcuucgaguucuaccacaagugcaacaacgagugcauggagagcgugaagaacggcaccuacgacuaccccaaguacagcgaggagagcaagcugaacagagagaagaucgacggcgugaagcuggagagcaugggcguguaccagauccuggccaucuacagcaccguggccagcagccuggugcugcuggugagccugggcgccaucagcuucuggaugugcagcaacggcagccugcagugcagaaucugcaucuga

SEQ ID NO: 161459 - RNA, 1701 nt, Artificial Sequence; identical to SEQ ID NO: 161447
  derived and/or modified CDS sequence (opt4) from hemagglutinin__InfluenzaA__ABJ53515

SEQ ID NO: 161460 - RNA, 1701 nt, Artificial Sequence
  derived and/or modified CDS sequence (opt4) from hemagglutinin__InfluenzaA__ABK39962
augaagaccaucaucgcccugagcuacauccugugccugguguucgcccagaagcugcccggcaacgacaacagcaccgccacccugugccugggccaccacgccgugcccaacggcacccuggugaagaccaucaccaacgaccagaucgaggugaccaacgccaccgagcuggugcagagcagcagcaccggcagaaucugcgacagcccccaccagauccuggacggcgagaacugcacccugaucgacgcccugcugggcgacccccacugcgacggcuuccagaacaaggagugggaccuguucguggagagaagcaaggccuacagcaacugcuaccccuacgacgugcccgacuacgugagccugagaagccugguggccagcagcggcacccuggaguucaacaacgagagcuucaacuggaccggcguggcccagaacggcaccagcagcgccugcaagagaagaagcgacaagagcuucuucagcagacugaacuggcugcaccagcugaaguacaaguaccccgcccugaacgugaccaugcccaacaacgagaaguucgacaagcuguacaucuggggcgugcaccaccccggcaccgacagcgaccagaucagccuguacgcccaggccagcggcagagugaccgugagcaccaagagaagccagcagaccgugauccccaacaucggcagcagacccugggugagaggcgugagcagcagaaucagcaucuacuggaccaucgugaagcccggcgacauccugcugaucaacagcaccggcaaccugaucgcccccagaggcuacuucaagaucagaagcggcaagagcagcaucaugagaagcgacgcccccaucggcaagugcaacagcgagugcaucacccccaacggcagcauccccaacgacaagcccuuccagaacgugaacagaaucaccuacggcgccugccccagauacgugaagcagaagacccugaagcuggccaccggcaugagaaacgugcccgagaagcagaccagaggcaucuucggcgccaucgccggcuucaucgagaacggcugggagggcaugauggacggcugguacggcuucagacaccagaacagcgagggcaccggccaggccgccgaccugaagagcacccaggccgccaucaaccagaucaacggcaagcugaacagacugaucgagaagaccaacgagaaguuccaccagaucgagaaggaguucagcgagguggagggcagaauccaggaccuggagaaguacguggaggacaccaagaucgaccuguggagcuacaacgccgagcugcugguggcccuggagaaccagcacaccaucgaccugaccgacagcgagaugaacaagcuguucgagagaaccaagaagcagcugagagagaacgccgaggacaugggcaacggcugcuucaagaucuaccacaagugcgacaacgccugcaucggcagcaucagaaacggcaccuacgaccacgacguguacagagacgaggcccugaacaacagauuccagaucaagggcguggagcugaagagcggcuacaaggacuggauccuguggaucagcuucgccaucagcugcuuccugcugugcaucgugcugcugggcuucaucaugugggccugccagaagggcaacaucagaugcaacaucugcaucuga

SEQ ID NO: 161461 - RNA, 1701 nt, Artificial Sequence; identical to SEQ ID NO: 160690
  derived and/or modified CDS sequence (opt4) from hemagglutinin__InfluenzaA__ABK39973

SEQ ID NO: 161462 - RNA, 1701 nt, Artificial Sequence
  derived and/or modified CDS sequence (opt4) from hemagglutinin__InfluenzaA__ABK39984
augaagaccaucaucgcccugagcuacauccugugccugguguucgcccagaagcugcccggcaacgacaacagcagagccacccugugccugggccaccacgccgugcccaacggcaccaucgugaagaccaucaccaacgaccagaucgaggugaccaacgccaccgagcuggugcagagcagcagcaccggcggcaucugcgacagcccccaccagauccuggacggcgagaacugcacccugaucgacgcccugcugggcgacccccagugcgacggcuuccagaacaagaagugggaccuguucguggagagaagcaaggccuacagcaacugcuaccccuacgacgugcccgacuacgccagccugagaagccugguggccagcagcggcacccuggaguucaacaacgagagcuucaacuggaccggcgugacccagaacggcaccagcagcgccugcaagagaagaagcaacaacagcuucuucagcagacugaacuggcugacccaccugaaguucaaguaccccgcccugaacgugaccaugcccaacaacgagaaguucgacaagcuguacaucuggggcgugcaccaccccggcaccgacaacgaccagaucuuccuguacgcccaggccagcggcagaaucaccgugagcaccaagagaagccagcagaccgugauccccaacaucggcagcagacccagagugagaaacauccccagcagaaucagcaucuacuggaccaucgugaagcccggcgacauccugcugaucaacagcaccggcaaccugaucgcccccagaggcuacuucaagaucagaagcggcaagagcagcaucaugagaagcgacgcccccaucggcaagugcaacagcgagugcaucacccccaacggcagcauccccaacgacaagcccuuccagaacgugaacagaaucaccuacggcgccugccccagauacgugaagcagaacacccugaagcuggccaccggcaugagaaacgugcccgagaagcagaccagaggcaucuucggcgccaucgccggcuucaucgagaacggcugggagggcaugguggacggcugguacggcuucagacaccagaacagcgagggcaucggccaggccgccgaccugaagagcacccaggccgccaucgaccagaucaacggcaagcugaacagacugaucggcaagaccaacgagaaguuccaccagaucgagaaggaguucagcgagguggagggcagaauccaggaccuggagaaguacguggaggacaccaagaucgaccuguggagcuacaacgccgagcugcugguggcccuggagaaccagcacaccaucgaccugaccgacagcgagaugaacaagcuguucgagagaaccaagaagcagcugagagagaacgccgaggacaugggcaacggcugcuucaagaucuaccacaagugcgacaacgccugcaucggcagcaucagaaacggcaccuacgaccacgacguguacagagacgaggcccugaacaacagauuccagaucaagggcguggagcugaagagcggcuacaaggacuggauccuguggaucagcuucgccaucagcugcuuccugcugugcguggcccugcugggcuucaucaugugggccugccagaagggcaacaucagaugcaacaucugcaucuga

SEQ ID NO: 161463 - RNA, 1698 nt, Artificial Sequence
  derived and/or modified CDS sequence (opt4) from hemagglutinin__InfluenzaA__ABK39995
augaaggugaagcugcugauccugcugugcaccuucaccgccaccuacgccgacaccaucugcaucggcuaccacgccaacaacagcaccgacaccguggacaccgugcuggagaagaacgugaccgugacccacagcgugaaccugcuggaggacagccacaacggcaagcugugccugcugaagggcaucgccccccugcagcugggcaacugcagcguggccggcuggauccugggcaaccccgagugcgagcugcugaucagcaaggagagcuggagcuacaucguggagacccccaaccccgagaacggcgccugcuaccccggcuacuucgccgacuacgaggagcugagagagcagcugagcagcguguacagcuucgagagauucgagaucuuccccaaggagagcagcuggcccaaccacaccgugaccggcgugagcgccagcugcagccacaacggcaagagcagcuucuacagaaaccugcuguggcugaccggcaagaacggccuguaccccaaccugagcaagagcuacgccaacaacaaggagaaggaggugcugauccuguggggcgugcaccacccccccaacaucggcaaccagagaacccuguaccacaccgagaacgccuacgugagcguggugagcagccacuacagcagaagauucacccccgagaucaccaagagacccaaggugagagaccaggagggcagaaucaacuacuacuggacccugcuggagcccggcgacaccaucaucuucgaggccaacggcaaccugaucgcccccugguacgccuucgcccugagcagaggcuucggcagcggcaucaucaccagcaacgcccccauggacgagugcgacgccaagugccagaccccccagggcgccaucaacagcagccugcccuuccagaacgugcaccccgugaccaucggcgagugccccaaguacgugagaagcgccaagcugagaauggugaccggccugagaaacauccccagcauccagagcagaggccuguucggcgccaucgccggcuucaucgagggcggcuggaccggcaugguggacggcugguacggcuaccaccaccagaacgagcagggcagcggcuacgccgccgaccagaagagcacccagaacgccaucaacggcaucaccaacaaggugaacagcgugaucgagaagaugaacacccaguucaccgccgugggcaaggaguucaacaagcuggagagaagaauggagaaccugaacaagaagguggacgacggcuuccuggacaucuggaccuacaacgccgagcugcuggugcugcuggagaacgagagaacccuggacuuccacgacagcaacgugaagaaccuguacgagaaggugaagagccagcugaagaacaacgccaaggagaucggcaacggcugcuucgaguucuaccacaagugcaacaacgagugcauggagagcgugaagaacggcaccuacgacuaccccaaguacagcgaggagagcaagcugaacagagagaagaucgacggcgugaagcuggacagcaugggcguguaccagauccuggccaucuacagcaccguggccagcagccuggugcugcuggugagccugggcgccaucagcuucuggaugugcagcaacggcagccugcagugcagaaucugcaucuga

SEQ ID NO: 161464 - RNA, 1701 nt, Artificial Sequence
  derived and/or modified CDS sequence (opt4) from hemagglutinin__InfluenzaA__ABK40017
augaagaccaucaucgcccugagcuacauccugugccugguguucgcccagaagcugcccggcaacgacaacagcaccgccacccugugccugggccaccacgccgugcccaacggcaccaucgugaagaccaucaccaacgaccagaucgaggugaccaacgccaccgagcuggugcagagcagcagcaccggcggcaucugcgacagcccccaccagauccuggacggcgagaacugcacccugaucgacgcccugcugggcgacccccagugcgacggcuuccagaacaagaagugggaccuguucguggagagaagcaaggccuacagcaacugcuaccccuacgacgugcccgacuacgccagccugagaagccugguggccagcagcggcacccuggaguucaacaacgagagcuucaacuggaccggcgugacccagaacggcaccagcagcgccugcaagagaagaagcaacaacagcuucuucagcagacugaacuggcugacccaccugaaguucaaguaccccgcccugaacgugaccaugcccaacaacaagaaguucgacaagcuguacaucuggggcgugcaccaccccggcaccgacaacgaccagaucagccuguacgcccaggccagcggcagaaucaccgugagcaccaagagaagccagcagaccgugauccccaacaucggcagcagacccagagugagagacauccccagcagaaucagcaucuacuggaccaucgugaagcccggcgacauccugcugaucaacagcaccggcaaccugaucgcccccagaggcuacuucaagaucagaagcggcaagagcagcaucaugagaagcgacgcccccaucggcaagugcaacagcgagugcaucacccccaacggcagcauccccaacgacaagcccuuccagaacgugaacagaaucaccuacggcgccugccccagauacgugaagcagaacacccugaagcuggccaccggcaugagaaacgugcccgagaagcagaccagaggcaucuucggcgccaucgccggcuucaucgagaacggcugggagggcaugguggacggcugguacggcuucagacaccagaacagcgagggcaucggccaggccgccgaccugaagagcacccaggccgccaucaaccagaucaacggcaagcugaacagacugaucggcaagaccaacgagaaguuccaccagaucgagaaggaguucagcgagguggagggcagaauccaggaccuggagaaguacguggaggacaccaagaucgaccuguggagcuacaacgccgagcugcugguggcccuggagaaccagcacaccaucgaccugaccgacagcgagaugaacaagcuguucgagagaaccaagaagcagcugagagagaacgccgaggacaugggcaacggcugcuucaagaucuaccacaagugcgacaacgccugcaucggcagcaucagaaacggcaccuacgaccacgacguguacagagacgaggcccugaacaacagauuccagaucaagggcguggagcugaagagcggcuacaaggacuggauccuguggaucagcuucgccaucagcugcuuccugcugugcguggcccugcugggcuucaucaugugggccugccagaagggcaacaucagaugcaacaucugcaucuga

SEQ ID NO: 161465 - RNA, 1701 nt, Artificial Sequence
  derived and/or modified CDS sequence (opt4) from hemagglutinin__InfluenzaA__ABK40028
augaaggccaagcugcuggugcugcugugcgccuucaccgccaccuacgccgacaccaucugcaucggcuaccacgccaacaacagcaccgacaccguggacaccgugcuggagaagaacgugaccgugacccacagcgugaaccugcuggaggacagccacaacggcaagcugugcagacugaagggcaccgccccccugcagcugggcaacugcagcaucgccggcuggauccugggcaaccccgagugcgagagccuguucagcaaggagagcuggagcuacaucgccgagacccccaaccccaagaacggcaccugcuaccccggcuacuucgccgacuacgaggagcugagagagcagcugagcagcgugagcagcuucgagagauucgagaucuuccccaaggacagcagcuggcccaaccacaccgugaccaagggcgugaccgccagcugcagccacaacggcaagagcagcuucuacaagaaccugcuguggcugaccgagaagaacggccuguaccccaaccugagcaagagcuacgugaacaagaagggcaaggaggugcuggugcuguggggcgugcaccaccccagcaacaugggcgaccagagagccaucuaccacaaggagaacgccuacgugaccgugcugagcagccacuacagcagaagauucacccccgagaucgccagaagacccaaggugagagaccaggagggcagaaucaacuacuacuggacccugcuggagcccggcgacaccaucaucuucgaggccaacggcaaccugaucgcccccugguacgccuucgcccugagcagaggcuucggcagcggcaucaucaucagcaacgccagcaugggcgagugcgacgccaagugccagaccccccagggcgccaucaacagcagccugcccuuccagaacgugcaccccgugaccaucggcgagugccccaaguacgugagaagcaccaagcugagaauggugaccggccugagaaacgugcccagcauccagagcagaggccuguucggcgccaucgccggcuucaucgagggcggcuggaccggcaugaucgacggcugguacggcuaccaccaccagaacgagcagggcagcggcuacgccgccgaccagaagagcacccagaacgccaucaacggcaucaccaacaaggugaacagcaucaucgagaagaugaacacccaguucaccgccgugggcaaggaguucaacaagcuggagagaagaauggagaaccugaacaagaagguggacgacggcuuccuggacaucuggaccuacaacgccgagcugcuggugcugcuggagaacgagagaacccuggacuuccacgacagcaacgugaagaaccuguacgagaaggugaagaaccagcugaagaacaacgccaaggagaucggcaacggcugcuucgaguucuaccacaagugcaacaacgagugcauggagagcgugaagaacggcaccuacgacuaccccaaguacagcaaggagagcaagcugaacagagagaagaucgacggcgugaagcuggagagcaugggcguguaccagauccuggccaucuacagcaccguggccagcagccuggugcugcuggugagccugggcgccaucagcuucuggaugugcagcaacggcagccugcagugcagaaucugcaucuga

SEQ ID NO: 161466 - RNA, 1701 nt, Artificial Sequence; identical to SEQ ID NO: 161447
  derived and/or modified CDS sequence (opt4) from hemagglutinin__InfluenzaA__ABK40039

SEQ ID NO: 161467 - RNA, 1701 nt, Artificial Sequence; identical to SEQ ID NO: 161447
  derived and/or modified CDS sequence (opt4) from hemagglutinin__InfluenzaA__ABK40050

SEQ ID NO: 161468 - RNA, 1701 nt, Artificial Sequence; identical to SEQ ID NO: 160710
  derived and/or modified CDS sequence (opt4) from hemagglutinin__InfluenzaA__ABK40061

SEQ ID NO: 161469 - RNA, 1701 nt, Artificial Sequence; identical to SEQ ID NO: 160710
  derived and/or modified CDS sequence (opt4) from hemagglutinin__InfluenzaA__ABK40075

SEQ ID NO: 161470 - RNA, 1701 nt, Artificial Sequence; identical to SEQ ID NO: 160981
  derived and/or modified CDS sequence (opt4) from hemagglutinin__InfluenzaA__ABK40510

SEQ ID NO: 161471 - RNA, 1701 nt, Artificial Sequence; identical to SEQ ID NO: 160981
  derived and/or modified CDS sequence (opt4) from hemagglutinin__InfluenzaA__ABK40534

SEQ ID NO: 161472 - RNA, 1701 nt, Artificial Sequence
  derived and/or modified CDS sequence (opt4) from hemagglutinin__InfluenzaA__ABK40546
augaaggccaagcugcuggugcugcugugcgcccugagcgccaccgacgccgacaccaucugcaucggcuaccacgccaacaacagcaccgacaccguggacaccgugcuggagaagaacgugaccgugacccacagcgugaaccugcuggaggacaaccacaacggcaagcugugcaagcugaagggcaucgccccccugcagcugggcaagugcagcaucgccggcuggauccugggcaaccccgagugcgagagccuguucagcaacaagagcuggagcuacaucgccgagacccccaacagcgagaacggcaccugcuaccccggcuacuucgccgacuacgaggagcugagagagcagcugagcagcgugagcagcuucgagagauucgagaucuuccccaaggagagcagcuggcccaagcacaacgugaccaagggcgugaccgccagcugcagccacaagggcaagagcagcuucuacagaaaccugcuguggcugaccgagaagaacggcagcuaccccaaccugagcaagagcuacgugaacaacaaggagaaggaggugcuggugcuguggggcgugcaccaccccagcaacaucgaggaccagaagaccaucuacagaaaggagaacgccuacgugagcguggugagcagccacuacaacagaagauucacccccgagaucgccaagagacccaaggugagaaaccaggagggcagaaucaacuacuacuggacccugcuggagcccggcgacaccaucaucuucgaggccaacggcaaccugaucgcccccugguacgccuucgcccugagcagaggcuucggcagcggcaucaucaccagcaacgccagcauggacgagugcgacgccaagugccagaccccccagggcgccaucaacagcagccugcccuuccagaacgugcaccccgugaccaucggcgagugccccaaguacgugagaagcaccaagcugagaauggugaccggccugagaaacauccccagcauccagagcagaggccuguucggcgccaucgccggcuucaucgagggcggcuggaccggcaugaucgacggcugguacggcuaccaccaccagaacgagcagggcagcggcuacgccgccgaccagaagagcacccagaacgccaucaacggcaucaccaacaaggugaacagcaucaucgagaagaugaacacccaguucaccgccgugggcaaggaguucaacaagcuggagaagagaauggagaaccugaacaagaagguggacgacggcuuccuggacaucuggaccuacaacgccgagcugcuggugcugcuggagaacgagagaacccuggacuuccacgacagcaacgugaagaaccuguacgagaaggugaagagccagcugaagaacaacgccaaggagaucggcaacggcugcuucgaguucuaccacaagugcaacaacgagugcauggagagcgugaagaacggcaccuacgacuaccccaaguacagcgaggagagcaagcugaacagagagaagaucgacggcgugaagcuggagagcaugggcguguaccagauccuggccaucuacagcaccguggccagcagccuggugcugcuggugagccugggcgccaucagcuucuggaugugcagcaacggcagccugcagugcagaaucugcaucuga

SEQ ID NO: 161473 - RNA, 1701 nt, Artificial Sequence; identical to SEQ ID NO: 160981
  derived and/or modified CDS sequence (opt4) from hemagglutinin__InfluenzaA__ABK40557

SEQ ID NO: 161474 - RNA, 1701 nt, Artificial Sequence; identical to SEQ ID NO: 160981
  derived and/or modified CDS sequence (opt4) from hemagglutinin__InfluenzaA__ABK40568

SEQ ID NO: 161475 - RNA, 1701 nt, Artificial Sequence; identical to SEQ ID NO: 160981
  derived and/or modified CDS sequence (opt4) from hemagglutinin__InfluenzaA__ABK40579

SEQ ID NO: 161476 - RNA, 1701 nt, Artificial Sequence
  derived and/or modified CDS sequence (opt4) from hemagglutinin__InfluenzaA__ABK40590
augaaggccaagcugcuggugcugcugugcgcccugagcgccaccgacgccgacaccaucugcaucggcuaccacgccaacaacagcaccgacaccguggacaccgugcuggagaagaacgugaccgugacccacagcgugaaccugcuggaggacaaccacaacggcaagcugugcaagcugaagggcaucgccccccugcagcugggcaagugcagcaucgccggcuggauccugggcaaccccgagugcgagagccuguucagcaagaagagcuggagcuacaucgccgagacccccaacagcgagaacggcaccugcuaccccggcuacuucgccgacuacgaggagcugagagagcagcugagcagcgugagcagcuucgagagauucgagaucuuccccaaggagagcagcuggcccaagcacaacgugaccaagggcgugaccgccagcugcagccacaagggcaagagcagcuucuacagaaaccugcuguggcugaccgagaagaacggcagcuaccccaaccugagcaagagcuacgugaacaacaaggagaaggaggugcuggugcuguggggcgugcaccaccccagcaacaucgaggaccagaagaccaucuacagaaaggagaacgccuacgugagcguggugagcagccacuacaacagaagauucacccccgagaucgccaagagacccaaggugagaaaccaggagggcagaaucaacuacuacuggacccugcuggagcccggcgacaccaucaucuucgaggccaacggcaaccugaucgcccccugguacgccuucgcccugagcagaggcuucggcagcggcaucaucaccagcaacgccagcauggacgagugcgacgccaagugccagaccccccagggcgccaucaacagcagccugcccuuccagaacgugcaccccgugaccaucggcgagugccccaaguacgugagaagcaccaagcugagaauggugaccggccugagaaacauccccagcauccagagcagaggccuguucggcgccaucgccggcuucaucgagggcggcuggaccggcaugaucgacggcugguacggcuaccaccaccagaacgagcagggcagcggcuacgccgccgaccagaagagcacccagaacgccaucaacggcaucaccaacaaggugaacagcaucaucgagaagaugaacacccaguucaccgccgugggcaaggaguucaacaagcuggagaagagaauggagaaccugaacaagaagguggacgacggcuuccuggacaucuggaccuacaacgccgagcugcuggugcugcuggagaacgagagaacccuggacuuccacgacagcaacgugaagaaccuguacgagaaggugaagaaccagcugaagaacaacgccaaggagaucggcaacggcugcuucgaguucuaccacaagugcaacaacgagugcauggagagcgugaagaacggcaccuacgacuaccccaaguacagcgaggagagcaagcugaacagagagaagaucgacggcgugaagcuggagagcaugggcguguaccagauccuggccaucuacagcaccguggccagcagccuggugcugcuggugagccugggcgccaucagcuucuggaugugcagcaacggcagccugcagugcagaaucugcaucuga

SEQ ID NO: 161477 - RNA, 1701 nt, Artificial Sequence; identical to SEQ ID NO: 160981
  derived and/or modified CDS sequence (opt4) from hemagglutinin__InfluenzaA__ABK40601

SEQ ID NO: 161478 - RNA, 1701 nt, Artificial Sequence; identical to SEQ ID NO: 160710
  derived and/or modified CDS sequence (opt4) from hemagglutinin__InfluenzaA__ABK40612

SEQ ID NO: 161479 - RNA, 1701 nt, Artificial Sequence
  derived and/or modified CDS sequence (opt4) from hemagglutinin__InfluenzaA__ABK40623
augaagaccaucaucgcccugagcuacauccugugccugguguucgcccagaagcugcccgugaacgacaacagcaccgccacccugugccugggccaccacgccgugcccaacggcacccuggugaagaccaucaccaacgaccacaucgaggugaccaacgccaccgagcuggugcagagcagcagcaccggcagaaucugcgacagcccccaccagauccuggacggcgagaacugcacccugaucgacgcccugcugggcgacccccacugcgacggcuuccagaacaaggagugggaccuguucguggagagaagcaccgccuacagcaacugcuaccccuacgacgugcccgacuacgccagccugagaagccugguggccagcagcggcacccuggaguucaacaacgagagcuucaacuggaccggcguggcccagaacggcaccagcagcgccugcaagagaagaagcaucaagagcuucuucagcagacugaacuggcugcaccagcugaaguacaaguaccccgcccugaacgugaccaugcccaacaacgagaaguucgacaagcuguacaucuggggcgugcaccaccccagcaccgacagcgaccagaucagccuguacgcccaggccagcggcagagugaccgugagcaccaagagaagccagcagaccgugauccccaacaucggcagcagacccugggugagaggcgugagcagcagaaucagcaucuacuggaccaucgugaagcccggcgacauccugcugaucaacagcaccggcaaccugaucgcccccagaggcuacuucaagaucagaagcggcaagagcagcaucaugagaagcaacgcccccaucggcaagugcaacagcgagugcaucacccccaacggcagcauccccaacgacaagcccuuccagaacgugaacagaaucgccuacggcgccugccccagauacgugaagcagaacacccugaagcuggccaccggcaugagaaacgugcccgagaagcagaccagaggcaucuucggcgccaucgccggcuucaucgagaacggcugggagggcaugguggacggcugguacggcuucagacaccugaacagcgagggcaccggccaggccgccgaccugaagagcacccaggccgccaucaaccagaucaacggcaagcugaacagacugaucgagaagaccaacgagaaguuccaccagaucgagaaggaguucagcgagguggagggcagaauccaggaccuggagaaguacgugaaggacaccaagaucgaccuguggagcuacaacgccgagcugcugguggcccuggagaaccagcacaccaucgaccugaccgacagcgagaugaacaagcuguucgagagaaccagaaagcagcugagagagaacgccgaggacgugggcaacggcugcuucaagaucuaccacaagugcgacaacgccugcaucggcagcaucagaaacggcaccuacgaccacgacguguacagagacgaggcccugaacaacagauuccagaucaagggcguggagcugaagagcggcuacaaggacuggauccuguggaucagcuucgccaucagcugcuuccugcugugcguggugcugcugggcuucaucaugugggccugccagaagggcaacaucagaugcaacaucugcaucuga

SEQ ID NO: 161480 - RNA, 1701 nt, Artificial Sequence; identical to SEQ ID NO: 161044
  derived and/or modified CDS sequence (opt4) from hemagglutinin__InfluenzaA__ABK40645

SEQ ID NO: 161481 - RNA, 1701 nt, Artificial Sequence
  derived and/or modified CDS sequence (opt4) from hemagglutinin__InfluenzaA__ABK40656
augaagaccaucaucgcccugagcuacauccugugccugguguucgcccagaagcugcccggcaacgacaacagcaccgccacccugugccugggccaccacgccgugcccaacggcacccuggugaagaccaucaccaacgaccagaucgaggugaccaacgccaccgagcuggugcagagcagccccaccggcagaaucugcgacagcccccacagaauccuggacggcaagaacugcacccugaucgacgcccugcugggcgacccccacugcgacggcuuccagaacaaggagugggaccuguucguggagagaagcaaggccuacagcaacugcuaccccuacgacgugcccgacuacgccagccugagaagccugguggccagcagcggcacccuggaguucaccaacgagaacuucaacuggaccggcguggcccaggacggcaagagcuacagcugcaagagaggcagcgugaacagcuucuucagcagacugaacuggcugcacaagcuggaguacaaguaccccgcccugaacgugaccaugcccaacaacggcaaguucgacaagcuguacaucuggggcgugcaccaccccagcaccgacagcgaccagaccagccuguacgugagagccagcggcaaggugaccgugagcaccaagagaagccagcagaccgugauccccgacaucggcuacagacccugggugagaggccugagcagcagaaucagcaucuacuggaccaucgugaagcccggcgacauccugcugaucaacagcaccggcaaccugaucgcccccagaggcuacuucaagaucagaaacggcaagagcagcaucaugagaagcgacgcccccaucggcaacugcagcagcgagugcaucacccccaacggcagcauccccaacgacaagcccuuccagaacgugaacagaaucaccuacggcaccugccccagauacgugaagcagaacacccugaagcuggccaccggcaugagaaacgugcccgagaagcagaccagaggcaucuucggcgccaucgccggcuucaucgagaacggcugggagggcaugguggacggcugguacggcuucagacaccagaacagcgagggcaccggccaggccgccgaccugaagagcacccaggccgccaucgaccagaucaacggcaagcugaacagacugguggagaagaccaacgagaaguuccaccagaucgagaaggaguucagcgagguggagggcagaauccaggaccuggagaaguacguggaggacaccaagaucgaccuguggagcuacaacgccgagcugcugguggcccuggagaaccagcacaccaucgaccugaccgacagcgagaugaacaagcuguucgagagaaccagaaagcagcugagagagaacgccgaggacaugggcaacggcugcuucaagaucuaccacaagugcgacaacgccugcaucggcagcaucagaaacggcaccuacgaccacgacguguacagagacgaggcccugaacaacagauuccagaucaagggcguggagcugaagagcggcuacaaggacuggauccuguggaucagcuucgccaucagcugcuuccugcugugcguggugcugcugggcuucaucaugugggccugccagaagggcaacaucagaugcaacaucugcaucuga

SEQ ID NO: 161482 - RNA, 1701 nt, Artificial Sequence
  derived and/or modified CDS sequence (opt4) from hemagglutinin__InfluenzaA__ABK40667
augaagaccaucaucgcccugagcuacauccugugccugguguucgcccagaagcugcccggcaacgacaacagcaccgccacccugugccugggccaccacgccgugcccaacggcacccuggugaagaccaucaccaacgaccagaucgaggugaccaacgccaccgagcuggugcagagcagcagcaccggcagaaucugcgacagcccccacagaauccuggacggcaagaacugcacccugaucgacgcccugcugggcgacccccacugcgacggcuuccagaacaaggagugggaccuguucguggagagaagcaaggccuacagcaacugcuaccccuacgacgugcccgacuacgccagccugagaagccugguggccagcagcggcacccuggaguucaccaacgagggcuucaacuggaccggcguggcccaggacggcaagagcuacgccugcaagagaggcagcgugaacagcuucuucagcagacugaacuggcugcacaagcuggaguacaaguaccccgcccugaacgugaccaugcccaacaacgacaaguucgacaagcuguacaucuggggcgugcaccaccccagcaccgacagcgaccagaccagccuguacgugcaggccagcggcagagugaccgugagcaccaagagaagccagcagaccgugauccccaacaucggcagcagacccugggugagaggcaucagcagcagaaucagcaucuacuggaccaucgugaagcccggcgacauccugcugaucaacagcaccggcaaccugaucgcccccagaggcuacuucaagcugagaaacggcaagagcagcaucaugagaagcgacgcccccaucgacaacugcaacagcgagugcaucacccccaacggcagcauccccaacgacaagcccuuccagaacgugaacagaaucaccuacggcgccugccccagauacgugaagcagaacacccugaagcuggccaccggcaugagaaacgugcccgagaagcagaccagaggcaucuucggcgccaucgccggcuucaucgagaacggcugggagggcaugguggacggcugguacggcuucagacaccagaacagcgagggcaccggccaggccgccgaccugaagagcacccaggccgccaucgaccagaucaacggcaagcugaacagacugaccgagaagaccaacgagaaguuccaccagaucgagaaggaguucagcgagguggagggcagaauccaggaccuggagaaguacguggaggacaccaagaucgaccuguggagcuacaacgccgagcugcugguggcccuggagaaccagcacaccaucgaccugaccgacagcgagaugaacaagcuguucgagagaaccagaaagcagcugagagagaacgccgaggacaugggcaacggcugcuucaagaucuaccacaagugcgacaacgccugcaucggcagcaucagaaacggcaccuacaaccacgacguguacagagacgaggcccugaacaacagauuccagaucaagggcguggagcugaagagcggcuacaaggacuggauccuguggaucagcuucgccaucagcugcuuccugcugugcguggugcugcugggcuucaucaugugggccugccagaagggcaacaucagaugcaacaucugcaucuga

SEQ ID NO: 161483 - RNA, 1701 nt, Artificial Sequence; identical to SEQ ID NO: 161126
  derived and/or modified CDS sequence (opt4) from hemagglutinin__InfluenzaA__ABK40678

SEQ ID NO: 161484 - RNA, 1698 nt, Artificial Sequence
  derived and/or modified CDS sequence (opt4) from hemagglutinin__InfluenzaA__ABK40689
augaaggugaagcugcuggugcugcugugcaccuucaccgccaccuacgccgacaccaucugcaucggcuaccacgccaacaacagcaccgacaccguggacaccgugcuggagaagaacgugaccgugacccacagcgugaaccugcuggaggacagccacaacggcaagcugugccugcugaagggcaucgccccccugcagcugggcaacugcagcguggccggcuggauccugggcaaccccgagugcgagcugcugaucagcaaggagagcuggagcuacaucguggagacccccaaccccgagaacggcaccugcuaccccggcuacuucgccgacuacgaggagcugagagagcagcugagcagcgugagcagcuucgagagauucgagaucuuccccaaggagagcagcuggcccaaccacaccgugaccggcgugagcgccagcugcagccacaacggcaagagcagcuucuacagaaaccugcuguggcugaccggcaagaacggccuguaccccaaccugagcaagagcuacgccaacaacaaggagaaggaggugcuggugcuguggggcgugcaccacccccccaacaucggcaaccagagagcccuguaccacaccgagaacgccuacgugagcguggugagcagccacuacagcagaagauucacccccgagaucgccaagagacccaaggugagagaccaggagggcagaaucaacuacuacuggacccugcuggagcccggcgacaccaucaucuucgaggccaacggcaaccugaucgcccccagauucgccuucgcccugagcagaggcuucggcagcggcaucaucaccagcaacgcccccauggacgagugcgacgccaagugccagaccccccagggcgccaucaacagcagccugcccuuccagaacgugcaccccgugaccaucggcgagugccccaaguacgugagaagcgccaagcugagaauggccaccggccugagaaacauccccagcauccagagcagaggccuguucggcgccaucgccggcuucaucgagggcggcuggaccggcaugguggacggcugguacggcuaccaccaccagaacgagcagggcagcggcuacgccgccgaccagaagagcacccagaacgccaucaacggcaucaccaacaaggugaacagcgugaucgagaagaugaacacccaguucaccgccgugggcaaggaguucagcaagcuggagagaagaauggagaaccugaacaagaagguggacgacggcuuccuggacaucuggaccuacaacgccgagcugcuggugcugcuggagaacgagagaacccuggacuuccacgacagcaacgugaagaaccuguacgagaaggugaagagccagcugaagaacaacgccaaggagaucggcaacggcugcuucgaguucuaccacaagugcaacgacgagugcauggagagcgugaagaacggcaccuacgacuaccccaaguacagcgaggagagcaagcugaacagagagaagaucgacggcgugaagcuggagagcaugggcguguaccagauccuggccaucuacagcaccguggccagcagccuggugcugcuggugagccugggcgccaucagcuucuggaugugcagcaacggcagccugcagugcagaaucugcaucuga

SEQ ID NO: 161485 - RNA, 1701 nt, Artificial Sequence; identical to SEQ ID NO: 160710
  derived and/or modified CDS sequence (opt4) from hemagglutinin__InfluenzaA__ABK40700

SEQ ID NO: 161486 - RNA, 1701 nt, Artificial Sequence; identical to SEQ ID NO: 160710
  derived and/or modified CDS sequence (opt4) from hemagglutinin__InfluenzaA__ABK40711

SEQ ID NO: 161487 - RNA, 1701 nt, Artificial Sequence
  derived and/or modified CDS sequence (opt4) from hemagglutinin__InfluenzaA__ABK40722
augaagaccaucaucgcccugagcuacauccugugccugguguucgcccagaagcugcccggcaacgacaacagcaccgccacccugugccugggccaccacgccgugcccaacggcacccuggugaagaccaucaccaacgaccagaucgaggugaccaacgccaccgagcuggugcagagcagcagcaccggcggcaucugcgacagcccccaccagauccuggacggcgagaacugcacccugaucgacgcccugcugggcgacccccacugcgacggcuuccagaacaaggagugggaccuguucguggagagaagcaaggccuacagcaacugcuaccccuacgacgugcccgacuacgccagccugagaagccugguggccagcagcggcacccuggaguucaacaacgagagcuucaacuggaccggcguggcccagaacggcaccagcagcgccugcaagagaagaagcaacaagagcuucuucagcagacugaacuggcugcaccagcugaaguacaaguaccccgcccugaacgugaccaugcccaacaacgagaaguucgacaagcuguacaucuggggcgugcaccaccccagcaccgacaacgaccagaucagccuguacgcccaggcccccggcagagugaccgugagcaccaagagaagccagcagaccgugauccccaacaucggcagcagacccugggugagaggcgugagcagcagaaucagcaucuacuggaccaucgugaagcccggcgacauccugcugaucaacugcaccggcaaccugaucgcccccagaggcuacuucaagaucagaagcggcaagagcagcaucaugagaagcgacgccagcaucggcaagugcaacagcgagugcaucacccccaacggcagcauccccaacgacaagcccuuccagaacgugaacagaaucaccuacggcgccugccccagauacgugaagcagaacacccugaagcuggccaccggcaugagaaacgugcccgagaagcagaccagaggcaucuucggcgccaucgccggcuucaucgagaacggcugggagggcaugguggacggcugguacggcuucagacaccagaacagcgagggcaccggccaggccgccgaccugaagagcacccaggccgccaucaaccagaucaacggcaagcugaacagacugaucgagaagaccaacgagaaguuccaccagaucgagaaggaguucagcgagguggagggcagaauccaggaccuggagaaguacguggaggacaccaagaucgaccuguggagcuacaacgccgagcugcugguggcccuggagaaccagcacaccaucgaccugaccgacagcgagaugaacaagcuguucgagagaaccaagaagcagcugagagagaacgccgaggacaugggcaacggcugcuucaagaucuaccacaagugcgacaacgccugcaucggcagcaucagaaacggcaccuacgaccacgacguguacagagacgaggcccugaacaacagauuccagaucaagggcguggagcugaagagcggcuacaaggacuggauccuguggaucagcuucgccaucagcugcuuccugcugugcguggugcugcugggcuucaucaugugggccugccagaagggcaacaucagaugcaacaucugcaucuga

SEQ ID NO: 161488 - RNA, 1701 nt, Artificial Sequence; identical to SEQ ID NO: 160710
  derived and/or modified CDS sequence (opt4) from hemagglutinin__InfluenzaA__ABK40733

SEQ ID NO: 161489 - RNA, 1701 nt, Artificial Sequence; identical to SEQ ID NO: 161365
  derived and/or modified CDS sequence (opt4) from hemagglutinin__InfluenzaA__ABK40744

SEQ ID NO: 161490 - RNA, 1701 nt, Artificial Sequence; identical to SEQ ID NO: 160975
  derived and/or modified CDS sequence (opt4) from hemagglutinin__InfluenzaA__ABK79948

SEQ ID NO: 161491 - RNA, 1698 nt, Artificial Sequence; identical to SEQ ID NO: 161264
  derived and/or modified CDS sequence (opt4) from hemagglutinin__InfluenzaA__ABK79959

SEQ ID NO: 161492 - RNA, 1701 nt, Artificial Sequence
  derived and/or modified CDS sequence (opt4) from hemagglutinin__InfluenzaA__ABK79970
augaaggccaagcugcuggugcugcugugcgccuucaccgccaccuacgccgacaccaucugcaucggcuaccacgccaacaacagcaccgacaccguggacaccgugcuggagaagaacgugaccgugacccacagcgugaaccugcuggaggacagccacaacggcaagcugugcagacugaagggcaccgccccccugcagcugggcaacugcagcaucgccggcuggauccugggcaaccccgagugcgagagccuguucagcaagaagagcuggagcuacaucgccgagacccccaaccccaagaacggcaccugcuaccccggcuacuucgccgacuacgaggagcugagagagcagcugagcagcgugagcagcuucgagagauucgagaucuuccccaaggacagcagcuggcccaaccacaccgugaccaagggcgugaccgccagcugcagccacaacggcaagagcagcuucuacaagaaccugcuguggcugaccgagaagaacggccuguaccccaaccugagcaagagcuacgugaacaagaagggcaaggaggugcuggugcuguggggcgugcaccaccccagcaacaugggcgaccagagagccaucuaccacaaggagaacgccuacgugagcgugcugagcagccacuacagcagaagauucacccccgagaucgccagaagacccaaggugagagaccaggagggcagaaucaacuacuacuggacccugcuggagcccggcgacaccaucaucuucgaggccaacggcaaccugaucgcccccugguacgccuucgcccugagcagaggcuucggcagcggcaucaucaucagcaacgccagcaugggcgagugcgacgccaagugccagaccccccagggcgccaucaacagcagccugcccuuccagaacgugcaccccgugaccaucggcgagugccccaaguacgugagaagcaccaagcugagaauggugaccggccugagaaacgugcccagcauccagagcagaggccuguucggcgccaucgccggcuucaucgagggcggcuggaccggcaugaucgacggcugguacggcuaccaccaccagaacgagcagggcagcggcuacgccgccgaccagaagagcacccagaacgccaucaacggcaucaccaacaaggugaacagcaucaucgagaagaugaacacccaguucaccgccgugggcaaggaguucaacaagcuggagagaagaauggagaaccugaacaagaagguggacgacggcuuccuggacaucuggaccuacaacgccgagcugcuggugcugcuggagaacgagagaacccuggacuuccacgacagcaacgugaagaaccuguacgagaaggugaagaaccagcugaagaacaacgccaaggagaucggcaacggcugcuucgaguucuaccacaagugcaacaacgagugcauggagagcgugaagaacggcaccuacgacuaccccaaguacagcaaggagagcaagcugaacagagagaagaucgacggcgugaagcuggagagcaugggcguguaccagauccuggccaucuacagcaccguggccagcagccuggugcugcuggugagccugggcgccaucagcuucuggaugugcagcaacggcagccugcagugcagaaucugcaucuga

SEQ ID NO: 161493 - RNA, 1701 nt, Artificial Sequence
  derived and/or modified CDS sequence (opt4) from hemagglutinin__InfluenzaA__ABK79981
augaagaccaucaucgcccugagcuacauccugugccugguguucacccagaagcugcccggcaacgacaacagcaccgccacccugugccugggccaccacgccgugcccaacggcacccuggugaagaccaucaccaacgaccagaucgaggugaccaacgccaccgagcuggugcagagcagcagcaccggcggcaucugcgacagcccccaccagauccuggacggcgagaacugcacccugaucgacgcccugcugggcgacccccacugcgacggcuuccagaacaaggagugggaccuguucguggagagaagcaaggccuacagcaacugcuaccccuacgacgugcccgacuacgccagccugagaagccugguggccagcagcggcacccuggaguucaacaacgagagcuucaacuggaccggcguggcccagaacggcaccagcagcgccugcaagagaagaagcaacaagagcuucuucagcagacugaacuggcugcaccagcugaaguacaaguaccccgcccugaacgugaccaugcccaacaacgagaaguucgacaagcuguacaucuggggcgugcaccaccccagcaccgacagcgaccagaucagccuguacgcccaggcccccggcagagugaccgugagcaccaagagaagccagcagaccgugauccccaacaucggcagcagacccugggugagaggcgugagcagcagaaucagcaucuacuggaccaucgugaagcccggcgacauccugcugaucaacugcaccggcaaccugaucgcccccagaggcuacuucaagaucagaagcggcaagagcagcaucaugagaagcgacgccagcaucggcaagugcaacagcgagugcaucacccccaacggcagcauccccaacgacaagcccuuccagaacgugaacagaaucaccuacggcgccugccccagauacgugaagcagaacacccugaagcuggccaccggcaugagaaacgugcccgagaagcagaccagaggcaucuucggcgccaucgccggcuucaucgagaacggcugggagggcaugguggacggcugguacggcuucagacaccagaacagcgagggcaccggccaggccgccgaccugaagagcacccaggccgccaucaaccagaucaacggcaagcugaacagacugaucgagaagaccaacgagaaguuccaccagaucgagaaggaguucagcgagguggagggcagaauccaggaccuggagaaguacguggaggacaccaagaucgaccuguggagcuacaacgccgagcugcugguggcccuggagaaccagcacaccaucgaccugaccgacagcgagaugaacaagcuguucgagagaaccaagaagcagcugagagagaacgccgaggacaugggcaacggcugcuucaagaucuaccacaagugcgacaacgccugcaucggcagcaucagaaacggcaccuacgaccacgacguguacagagacgaggcccugaacaacagauuccagaucaagggcguggagcugaagagcggcuacaaggacuggauccuguggaucagcuucgccaucagcugcuuccugcugugcguggugcugcugggcuucaucaugugggccugccagaagggcaacaucagaugcaacaucugcaucuga

SEQ ID NO: 161494 - RNA, 1701 nt, Artificial Sequence; identical to SEQ ID NO: 160710
  derived and/or modified CDS sequence (opt4) from hemagglutinin__InfluenzaA__ABK79992

SEQ ID NO: 161495 - RNA, 1701 nt, Artificial Sequence; identical to SEQ ID NO: 160981
  derived and/or modified CDS sequence (opt4) from hemagglutinin__InfluenzaA__ABK80025

SEQ ID NO: 161496 - RNA, 1701 nt, Artificial Sequence; identical to SEQ ID NO: 160981
  derived and/or modified CDS sequence (opt4) from hemagglutinin__InfluenzaA__ABK80036

SEQ ID NO: 161497 - RNA, 1701 nt, Artificial Sequence; identical to SEQ ID NO: 160981
  derived and/or modified CDS sequence (opt4) from hemagglutinin__InfluenzaA__ABK80047

SEQ ID NO: 161498 - RNA, 1701 nt, Artificial Sequence; identical to SEQ ID NO: 160826
  derived and/or modified CDS sequence (opt4) from hemagglutinin__InfluenzaA__ABK80058

SEQ ID NO: 161499 - RNA, 1701 nt, Artificial Sequence
  derived and/or modified CDS sequence (opt4) from hemagglutinin__InfluenzaA__ABK80069
augaagaccaucaucgcccugagcuacauccugugccugguguucgcccagaagcugcccgugaacgacaacagcaccgccacccugugccugggccaccacgccgugcccaacggcacccuggugaagaccaucaccaacgaccacaucgaggugaccaacgccaccgagcuggugcagagcagcagcaccggcagaaucugcgacagcccccaccagauccuggacggcgagaacugcacccugaucgacgcccugcugggcgacccccacugcgacggcuuccagaacaaggagugggaccuguucguggagagaagcaccgccuacagcaacugcuaccccuacgacgugcccgacuacgccagccugagaagccugguggccagcagcggcacccuggaguucaacaacgagagcuucaacuggaccggcguggcccagaacggcaccagcagcgccugcaagagaagaagcaucaagagcuucuucagcagacugaacuggcugcaccagcugaaguacaaguaccccgcccugaacgugaccaugcccaacaacgagaaguucgacaagcuguacaucuggggcgugcaccaccccagcaccgacagcgaccagaucagccuguacgcccaggccagcggcagagugaccgugagcaccaagagaagccagcagaccgugauccccaacaucggcagcagacccuggaucagaggcgugagcagcagaaucagcaucuacuggaccaucgugaagcccggcgacauccugcugaucaacagcaccggcaaccugaucgcccccagaggcuacuucaagaucagaagcggcaagagcagcaucaugagaagcaacgcccccaucggcaagugcaacagcgagugcaucacccccaacggcagcauccccaacgacaagcccuuccagaacgugaacagaaucgccuacggcgccugccccagauacgugaagcagaacacccugaagcuggccaccggcaugagaaacgugcccgagaagcagaccagaggcaucuucggcgccaucgccggcuucaucgagaacggcugggagggcaugguggacggcugguacggcuucagacaccugaacagcgagggcaccggccaggccgccgaccugaagagcacccaggccgccaucaaccagaucaacggcaagcugaacagacugaucgagaagaccaacgagaaguuccaccagaucgagaaggaguucagcgagguggagggcagaauccaggaccuggagaaguacguggaggacaccaagaucgaccuguggagcuacaacgccgagcugcugguggcccuggagaaccagcacaccaucgaccugaccgacagcgagaugaacaagcuguucgagagaaccagaaagcagcugagagagaacgccgaggacgugggcaacggcugcuucaagaucuaccacaagugcgacaacgccugcaucggcagcaucagaaacggcaccuacgaccacgacguguacagagacgaggcccugaacaacagauuccagaucaagggcguggagcugaagagcggcuacaaggacuggauccuguggaucagcuucgccaucagcugcuuccugcugugcguggugcugcugggcuucaucaugugggccugccagaagggcaacaucagaugcaacaucugcaucuga

SEQ ID NO: 161500 - RNA, 1701 nt, Artificial Sequence
  derived and/or modified CDS sequence (opt4) from hemagglutinin__InfluenzaA__ABK80080
augaagaccaucaucgcccugagcuacauccugugccugguguucgcccagaagcugcccgugaacgacaacagcaccgccacccugugccugggccaccacgccgugcccaacggcacccuggugaagaccaucaccaacgaccacaucgaggugaccaacgccaccgagcuggugcagagcagcagcaccggcagaaucugcgacagcccccaccagauccuggacggcgagaacugcacccugaucgacgcccugcugggcgacccccacugcgacggcuuccagaacaaggagugggaccuguucguggagagaagcaccgccuacagcaacugcuaccccuacgacgugcccgacuacgccagccugagaagccugguggccagcagcggcacccuggaguucaacaacgagagcuucaacuggaccggcguggcccagaacggcaccagcagcgccugcaagagaagaagcaucaagagcuucuucagcagacugaacuggcugcaccagcugaaguacaaguaccccgcccugaacgugaccaugcccaacaacgagaaguucgacaagcuguacaucuggggcgugcaccaccccagcaccgacagcgaccagaucagccuguacgcccaggccagcggcagagugaccgugagcaccaagagaagccagcagaccgugauccccaacaucggcagcagacccugggugagaggcgugagcagcagaaucagcaucuacuggaccaucgugaagcccggcgacauccugcugaucaacagcaccggcaaccugaucgcccccagaggcuacuucaagaucagaagcggcaagagcagcaucaugagaagcaacgcccccaucggcaagugcaacagcgagugcaucacccccaacggcagcauccccaacgacaagcccuuccagaacgugaacagaaucaccuacggcgccugccccagauacgugaagcagaacacccugaagcuggccaccggcaugagaaacgugcccgagaagcagaccagaggcaucuucggcgccaucgccggcuucaucgagaacggcugggagggcaugguggacggcugguacggcuucagacaccagaacagcgagggcaccggccaggccgccgaccugaagagcacccaggccgccaucaaccagaucaacggcaagcugaacagacugaucgagaagaccaacgagaaguuccaccagaucgagaaggaguucagcgagguggagggcagaauccaggaccuggagaaguacguggaggacaccaagaucgaccuguggagcuacaacgccgagcugcugguggcccuggagaaccagcacaccaucgaccugaccgacagcgagaugaacaagcuguucgagagaaccagaaagcagcugagagagaacgccgaggacaugggcaacggcugccugaagaucuaccacaagugcgacaacgccugcaucggcagcaucagaaacggcaccuacgaccacgacguguacagagacgaggcccugaacaacagauuccagaucaagggcguggagcugaagagcggcuacaaggacuggauccuguggaucagcuucgccaucagcugcuuccugcugugcguggugcugcugggcuucaucaugugggccugccagaagggcaacaucagaugcaacaucugcaucuga

SEQ ID NO: 161501 - RNA, 1701 nt, Artificial Sequence; identical to SEQ ID NO: 160710
  derived and/or modified CDS sequence (opt4) from hemagglutinin__InfluenzaA__ABK80091

SEQ ID NO: 161502 - RNA, 1701 nt, Artificial Sequence; identical to SEQ ID NO: 160710
  derived and/or modified CDS sequence (opt4) from hemagglutinin__InfluenzaA__ABK80102

SEQ ID NO: 161503 - RNA, 1701 nt, Artificial Sequence; identical to SEQ ID NO: 160111
  derived and/or modified CDS sequence (opt4) from hemagglutinin__InfluenzaA__ABK80113

SEQ ID NO: 161504 - RNA, 1701 nt, Artificial Sequence
  derived and/or modified CDS sequence (opt4) from hemagglutinin__InfluenzaA__ABK80124
augaagaccaucaucgcccugagcuacauccugugccugguguucgcccagaagcugcccggcaacgacaacagcaccgccacccugugccugggccaccacgccgugcccaacggcacccuggugaagaccaucaccaacgaccagaucgaggugaccaacgccaccgagcuggugcagagcagcagcaccggcagaaucugcgacagcccccaccagauccuggacggcgagaacugcacccugaucgacgcccugcugggcgacccccacugcgacggcuuccagaacaaggagugggaccuguucguggagagaagcaaggccuacagcaacugcuaccccuacgacgugcccgacuacgugagccugagaagccugguggccagcagcggcacccuggaguucaacaacgagagcuucaacuggaccggcguggcccagaacggcaccagcagcgccugcaagagaagaagcgacaagagcuucuucagcagacugaacuggcugcaccagcugaaguacaaguaccccgcccugaacgugaccaugcccaacaacgagaaguucgacaagcuguacaucuggggcgugcaccaccccggcaccgacagcgaccagaucagccuguacgcccaggccagcggcagagugaccgugagcaccaagagaagccagcagaccgugauccccaacaucggcagcagacccugggugagaggcgugagcagcagaaucagcaucuacuggaccaucgugaagcccggcgacauccugcugaucaacagcaccggcaaccugaucgcccccagaggcuacuucaagaucagaagcggcaagagcagcaucaugagaagcgacgcccccaucggcaagugcaacagcgagugcaucacccccaacggcagcauccccaacgacaagcccuuccagaacgugaacagaaucaccuacggccccugccccagauacgugaagcagaacacccugaagcuggccaccggcaugagaaacgugcccgagaagcagaccagaggcaucuucggcgccaucgccggcuucaucgagaacggcugggagggcaugauggacggcugguacggcuucagacaccagaacagcgagggcaccggccaggccgccgaccugaagagcacccaggccgccaucaaccagaucaacggcaagcugaacagacugaucgagaagaccaacgagaaguuccaccagaucgagaaggaguucagcgagguggagggcagaauccaggaccuggagaaguacguggaggacaccaagaucgaccuguggagcuacaacgccgagcugcugguggcccuggagaaccagcacaccaucgaccugaccgacagcgagaugaacaagcuguucgagagaaccaagaagcagcugagagagaacgccgaggacaugggcaacggcugcuucaagaucuaccacaagugcgacaacgccugcaucggcagcaucagaaacggcaccuacgaccacgacguguacagagacgaggcccugaacaacagauuccagaucaagggcguggagcugaagagcggcuacaagaacuggauccuguggaucagcuucgccaucagcugcuuccugcugugcaucgugcugcugggcuucaucaugugggccugccagaagggcaacaucagaugcaacaucugcaucuga

SEQ ID NO: 161505 - RNA, 1701 nt, Artificial Sequence; identical to SEQ ID NO: 160111
  derived and/or modified CDS sequence (opt4) from hemagglutinin__InfluenzaA__ABK80135

SEQ ID NO: 161506 - RNA, 1701 nt, Artificial Sequence; identical to SEQ ID NO: 160111
  derived and/or modified CDS sequence (opt4) from hemagglutinin__InfluenzaA__ABK80146

SEQ ID NO: 161507 - RNA, 1701 nt, Artificial Sequence; identical to SEQ ID NO: 160111
  derived and/or modified CDS sequence (opt4) from hemagglutinin__InfluenzaA__ABK80157

SEQ ID NO: 161508 - RNA, 1701 nt, Artificial Sequence; identical to SEQ ID NO: 160622
  derived and/or modified CDS sequence (opt4) from hemagglutinin__InfluenzaA__ABK80168

SEQ ID NO: 161509 - RNA, 1701 nt, Artificial Sequence
  derived and/or modified CDS sequence (opt4) from hemagglutinin__InfluenzaA__ABK80179
augaagaccaucaucgcccugagcuacauccugugccugguguucgcccagaagcugcccggcaacgacaacagcaccgccacccugugccugggccaccacgccgugcccaacggcacccuggugaagaccaucaccaacgaccagaucgaggugaccaacgccaccgagcuggugcagagcagcagcaccggcagaaucugcgacagcccccaccagauccuggacggcgagaacugcacccugaucgacgcccugcugggcgacccccacugcgacggcuuccagaacaaggagugggaccuguucguggagagaagcaaggccuacagcaacugcuaccccuacgacgugcccgacuacgugagccugagaagccugguggccagcagcggcacccuggaguucaacaacgagagcuucaacuggaccggcguggcccagaacggcaccagcagcgccugcaagagaagaagcgacaagagcuucuucagcagacugaacuggcugcaccagcugaaguacaaguaccccgcccugaacgugaccaugcccaacaacgagaaguucgacaagcuguacaucuggggcgugcaccaccccggcaccgacagcgaccagaucagccuguacgcccaggccagcggcagagugaccgugagcaccaagagaagccagcagaccgugauccccaacaucggcagcagacccugggugagaggcgugagcagcagaaucagcaucuacuggaccaucgugaagcccggcgacauccugcugaucaacagcaccggcaaccugaucgcccccagaggcuacuucaagaucagaagcggcaagagcagcaucaugagaagcgacgcccccaucggcaagugcaacagcgagugcaucacccccaacggcagcgugcccaacgacaagcccuuccagaacgugaacagaaucaccuacggcgccugccccagauacgugaagcagaacacccugaagcuggccaccggcaugagaaacgugcccgagaagcagaccagaggcaucuucggcgccaucgccggcuucaucgagaacggcugggagggcaugauggacggcugguacggcuucagacaccagaacagcgagggcaccggccaggccgccgaccugaagagcacccaggccgccaucaaccagaucaacggcaagcugaacagacugaucgagaagaccaacgagaaguuccaccagaucgagaaggaguucagcgagguggagggcagaauccaggaccuggagaaguacguggaggacaccaagaucgaccuguggagcuacaacgccgagcugcugguggcccuggagaaccagcacaccaucgaccugaccgacagcgagaugaacaagcuguucgagagaaccaagaagcagcugagagagaacgccgaggacaugggcaacggcugcuucaagaucuaccacaagugcgacaacgccugcaucggcagcaucagaaacggcaccuacgaccacgacguguacagagacgaggcccugaacaacagacugcagaucaagggcguggagcugaagagcggcuacaaggacuggauccuguggaucagcuucgccaucagcugcuuccugcugugcaucgugcugcugggcuucaucaugugggccugccagaagggcaacaucagaugcaacaucugcaucuga

SEQ ID NO: 161510 - RNA, 1701 nt, Artificial Sequence; identical to SEQ ID NO: 160622
  derived and/or modified CDS sequence (opt4) from hemagglutinin__InfluenzaA__ABK80190

SEQ ID NO: 161511 - RNA, 1701 nt, Artificial Sequence; identical to SEQ ID NO: 161365
  derived and/or modified CDS sequence (opt4) from hemagglutinin__InfluenzaA__ABK80201

SEQ ID NO: 161512 - RNA, 1701 nt, Artificial Sequence
  derived and/or modified CDS sequence (opt4) from hemagglutinin__InfluenzaA__ABK80212
augaagaccaucaucgcccugagcuacauccugugccugguguucgcccagaagcugcccggcaacgacaacagcaccgccacccugugccugggccaccacgccgugcccaacggcaccaucgugaagaccaucaccaacgaccagaucgaggugaccaacgccaccgagcuggugcagagcagcagcaccggcggcaucugcgacagcccccaccagauccuggacggcgagaacugcacccugaucgacgcccugcugggcgacccccagugcgacggcuuccagaacaagaagugggaccuguucguggagagaagcaaggccuacagcaacugcuaccccuacgacgugcccgacuacgccagccugagaagccugguggccagcagcggcacccuggaguucaacaacgagagcuucgacuggaccggcgugacccagaacggcaccagcagcgccugcaagagaagaagcaacaagagcuucuucagcagacugaacuggcugacccaccugaaguacaaguaccccgcccugaacgugaccaugcccaacaacgagaaguucgacaagcuguacaucuggggcgugcaccaccccggcaccgacagcgaccagaucagccuguacgcccaggccagcggcagaaucaccgugagcaccaagagaagccagcagaccgugauccccaacaucggcagcagacccagagugagagacgugagcagcagaaucagcaucuacuggaccaucgugaagcccggcgacauccugcugaucaacagcaccggcaaccugaucgcccccagaggcuacuucaagaucagaagcggcaagagcagcaucaugagaagcgacgcccccaucggcaagugcaacagcgagugcaucacccccaacggcagcauccccaacgacaagcccuuccagaacgugaacagaaucaccuacggcgccugccccagauacgugaagcagaacacccugaagcuggccaccggcaugagaaacgugcccgagaagcagaccagaggcaucuucggcgccaucgccggcuucaucgagaacggcugggagggcaugguggacggcugguacggcuucagacaccagaacagcgagggcaccggccaggccgccgaccugaagagcacccaggccgccaucaaccagaucaacggcaagcugaacagacugaucggcaagaccaacgagaaguuccaccagaucgagaaggaguucagcgagguggagggcagaauccaggaccuggagaaguacguggaggacaccaagaucgaccuguggagcuacaacgccgagcugcugguggcccuggagaaccagcacaccaucgaccugaccgacagcgagaugaacaagcuguucgagagaaccaagaagcagcugagagagaacgccgaggacaugggcaacggcugcuucaagaucuaccacaagugcgacaacgccugcaucggcagcaucagaaacggcaccuacgaccacgacguguacagagacgaggcccugaacaacagauuccagaucaagggcguggagcugaagagcggcuacaagaacuggauccuguggaucagcuucgccaucagcugcuuccugcugugcguggcccugcugggcuucaucaugugggccugccagaagggcaacaucagaugcaacaucugcaucuga

SEQ ID NO: 161513 - RNA, 1701 nt, Artificial Sequence; identical to SEQ ID NO: 160576
  derived and/or modified CDS sequence (opt4) from hemagglutinin__InfluenzaA__ABK80223

SEQ ID NO: 161514 - RNA, 1701 nt, Artificial Sequence
  derived and/or modified CDS sequence (opt4) from hemagglutinin__InfluenzaA__ABK80234
augagaaccaucaucgcccugagcuacauccugugccugguguucgcccagaagcugcccggcaacgacaacagcaccgccacccugugccugggccaccacgccgugcccaacggcaccaucgugaagaccaucaccaacgaccagaucgaggugaccaacgccaccgagcuggugcagagcagcagcaccggcggcaucugcgacagcccccaccagauccuggacggcgagaacugcacccugaucgacgcccugcugggcgacccccagugcgacggcuuccagaacaagaagugggaccuguucguggagagaagcaaggccuacagcaacugcuaccccuacgacgugcccgaccacgccagccugagaagccugguggccagcagcggcacccuggaguucaacaacgagagcuucgacuggaccggcgugacccagaacggcaccagcagcgccugcaagagaagaagcaacaagagcuucuucagcagacugaacuggcugacccaccugaaguacaaguaccccgcccugaacgugaccaugcccaacaacgagaaguucgacaagcuguacaucuggggcgugcaccaccccggcaccgacagcgaccagaucagccuguacgcccaggccagcggcagaaucaccgugagcaccaagagaagccagcagaccgugauccccaacaucggcagcagacccagagugagagacgugagcagcagaaucagcaucuacuggaccaucgugaagcccggcgacauccugcugaucaacagcaccggcaaccugaucgcccccagaggcuacuucaagaucagaagcggcaagagcagcaucaugagaagcgacgcccccaucggcaagugcaacagcgagugcaucacccccaacggcagcauccccaacgacaagcccuuccagaacgugaacagaaucaccuacggcgccugccccagauacgugaagcagaacacccugaagcuggccaccggcaugagaaacgugcccgagaagcagaccagaggcaucuucggcgccaucgccggcuucaucgagaacggcugggagggcaugguggacggcugguacggcuucagacaccagaacagcgagggcaccggccaggccgccgaccugaagagcacccaggccgccaucaaccagaucaacggcaagcugaacagacugaucggcaagaccaacgagaaguuccaccagaucgagaaggaguucagcgagguggagggcagaauccaggaccuggagaaguacguggaggacaccaagaucgaccuguggagcuacaacgccgagcugcugguggcccuggagaaccagcacaccaucgaccugaccgacagcgagaugaacaagcuguucgagagaaccaagaagcagcugagagagaacgccgaggacaugggcaacggcugcuucaagaucuaccacaagugcgacaacgccugcaucggcagcaucagaaacggcaccuacgaccacgacguguacagagacgaggcccugaacaacagauuccagaucaagggcguggagcugaagagcggcuacaaggacuggauccuguggaucagcuucgccaucagcugcuuccugcugugcguggcccugcugggcuucaucaugugggccugccagaagggcaacaucagaugcaacaucugcaucuga

SEQ ID NO: 161515 - RNA, 1701 nt, Artificial Sequence
  derived and/or modified CDS sequence (opt4) from hemagglutinin__InfluenzaA__ABK80245
augaagaccaucaucgcccugagcuacauccugugccugguguucgcccagaagcugcccggcaacgacaacagcaccgccacccugugccugggccaccacgccgugcccaacggcaccaucgugaagaccaucaccaacgaccagaucgaggugaccaacgccaccgagcuggugcagagcagcagcaccggcggcaucugcgacagcccccaccagauccuggacggcgagaacugcacccugaucgacgcccugcugggcgacccccagugcgacggcuuccagaacaagaagugggaccuguucguggagagaagcaaggcccacagcaacugcuaccccuacgacgugcccgacuacgccagccugagaagccugaucgccagcagcggcacccuggaguucaacaacgagagcuucaacuggaccggcgugacccagaacggcaccagcagcgccugcaagagaagaagcaaccagagcuucuucagcagacugaacuggcugacccaccugaaguucaaguaccccgcccugaacgugaccaugcccaacaacgagaaguucgacaagcuguacaucuggggcgugcaccaccccggcaccgacagcgaccagaucagccuguacgcccaggcccccggcagaaucaccgugagcaccaagagaagccagcagaccgugauccccaacaucggcagcagacccagagugagagacaucagcagcagaaucagcaucuacuggaccaucgugaagcccggcgacauccugcugaucaacagcaccggcaaccugaucgcccccagaggcuacuucaagaucagaagcggcaagagcagcaucaugaagagcgacgcccccaucggcaagugcaacagcgagugcaucacccccaacggcagcauccccaacgacaagcccuuccagaacgugaacagaaucaccuacggcgccugccccagauacgugaagcagaacacccugaagcuggccaccggcaugagaaacgugcccgagaagcagaccagaggcaucuucggcgccaucgccggcuucaucgagaacggcugggagggcaugguggacggcugguacggcuucagacaccagaacagcgagggcaccggccaggccgccgaccugaagagcacccaggccgccaucaaccagaucaacggcaagcugaacagacugaucggcaagaccaacgagaaguuccaccagaucgagaaggaguucagcgagguggagggcagaauccaggaccuggagaaguacguggaggacaccaagaucgaccuguggagcuacaacgccgagcugcugguggcccuggagaaccagcacaccaucgaccugaccgacagcgagaugaacaagcuguucgagagaaccaagaagcagcugagagagaacgccgaggacaugggcaacggcugcuucaagaucuaccacaagugcgacaacgccugcaucggcagcaucagaaacggcaccuacgaccacgacguguacagagacgaggcccugaacaacagauuccagaucaagggcguggagcugaagagcggcuacaaggacuggauccuguggaucagcuucgccaucagcugccugcugcugugcguggcccugcugggcuucaucaugugggccugccagaagggcaacaucagaugcaacaucugcaucuga

SEQ ID NO: 161516 - RNA, 1701 nt, Artificial Sequence; identical to SEQ ID NO: 161515
  derived and/or modified CDS sequence (opt4) from hemagglutinin__InfluenzaA__ABK80256

SEQ ID NO: 161517 - RNA, 1701 nt, Artificial Sequence; identical to SEQ ID NO: 160672
  derived and/or modified CDS sequence (opt4) from hemagglutinin__InfluenzaA__ABK80267

SEQ ID NO: 161518 - RNA, 1701 nt, Artificial Sequence; identical to SEQ ID NO: 160693
  derived and/or modified CDS sequence (opt4) from hemagglutinin__InfluenzaA__ABK80278

SEQ ID NO: 161519 - RNA, 1701 nt, Artificial Sequence
  derived and/or modified CDS sequence (opt4) from hemagglutinin__InfluenzaA__ABK80289
augaagaccaucaucgcccugagcuacauccugugccugguguucgcccagaagcugcccggcaacgacaacagcaccgccacccugugccugggccaccacgccgugcccaacggcaccaucgugaagaccaucaccaacgaccagaucgaggugaccaacgccaccgagcuggugcagagcagcagcaccggcggcaucugcgacagcccccaccagauccuggacggcgagaacugcacccugaucgacgcccugcugggcgacccccagugcgacggcuuccagaacaagaagugggaccuguucguggagagaagcaaggccuacagcaacugcuaccccuacgacgugcccgacuacgccagccugagaagccugguggccagcagcggcacccuggaguucaacaacgagagcuucaacuggaccggcgugacccagaacggcaccagcagcgccugcaagagaagaagcaacaacagcuucuucagcagacugaacuggcugacccaccugaaguucaaguaccccgcccugaacgugaccaugcccaacaacgagaaguucgacaagcuguacaucuggggcgugcaccaccccggcaccgacaacgaccagaucuuccuguacgcccaggccagcggcagaaucaccgugagcaccaagagaagccagcagaccgugauccccaacaucggcagcagacccagagugagaaacauccccagcagaaucagcaucuacuggaccaucgugaagcccggcgacauccugcugaucaacagcaccggcaaccugaucgcccccagaggcuacuucaagaucagaagcggcaagagcagcaucaugagaagcgacgcccccaucggcaagugcaacagcgagugcaucacccccaacggcagcauccccaacgacaagcccuuccagaacgugaacagaaucaccuacggcgccugccccagauacgugaagcagaacacccugaagcuggccaccggcaugagaaacgugcccgagaagcagaccagaggcaucuucggcgccaucgccggcuucaucgagaacggcugggagggcaugguggacggcugguacggcuucagacaccagaacagcgagggcaccggccaggccgccgaccugaagagcacccaggccgccaucaaccagaucaacggcaagcugaacagacugaucggcaagaccaacgagaaguuccaccagaucgagaaggaguucagcgagguggagggcagaauccaggaccuggagaaguacguggaggacaccaagaucgaccuguggagcuacaacgccgagcugcugguggcccuggagaaccagcacaccaucgaccugaccgacagcgagaugaacaagcuguucgagagaaccaagaagcagcugagagagaacgccgaggacaugggcaacggcugcuucaagaucuaccacaagugcgacaacgccugcaucggcagcaucagaaacggcaccuacgaccacgacguguacagagacgaggcccugaacaacagauuccagaucaagggcguggagcugaagagcggcuacaaggacuggauccuguggaucagcuucgccaucagcugcuuccugcugugcguggcccugcugggcuucaucaugugggccugccagaagggcaacaucagaugcaacaucugcaucuga

SEQ ID NO: 161520 - RNA, 1701 nt, Artificial Sequence; identical to SEQ ID NO: 160111
  derived and/or modified CDS sequence (opt4) from hemagglutinin__InfluenzaA__ABK80300

SEQ ID NO: 161521 - RNA, 1701 nt, Artificial Sequence; identical to SEQ ID NO: 160111
  derived and/or modified CDS sequence (opt4) from hemagglutinin__InfluenzaA__ABK80311

SEQ ID NO: 161522 - RNA, 1707 nt, Artificial Sequence
  derived and/or modified CDS sequence (opt4) from hemagglutinin__InfluenzaA__ABL07019
auggagaagaucgugcugcugcugagcaucgugagccuggugaagagcgaccagaucugcaucggcuaccacgccaacaacagcaccgagcagguggacaccaucauggagaagaacgugaccgugacccacgcccaggacauccuggagaagacccacaacggcaagcugugcgaccuggacggcgugaagccccugauccugagagacugcagcguggccggcuggcugcugggcaaccccaugugcgacgaguucaucaacgugcccgaguggagcuacaucguggagaaggccaaccccaccaacgaccugugcuaccccggcagcuucaacgacuacgaggagcugaagcaccugcugagcagaaucaaccacuucgagaagauccagaucauccccaagagcagcuggagcgaccacgaggccagcagcggcgugagcagcgccugccccuaccugggcagccccagcuucuucagaaacgugguguggcugaccaagaagaacagcaccuaccccaccaucaagaagagcuacaacaacaccaaccaggaggaccugcuggugcuguggggcauccaccaccccaacaacgaggccgagcagaccagacuguaccagaaccccaccaccuacaucagcaucggcaccagcacccugaaccagagacuggugcccaagaucgccaccagaagcaaggugaacggccagagcggcagaauggaguucuucuggaccauccugaagcccaacgacgccaucaacuucgagagcaacggcaacuucaucgcccccgaguacgccuacaagaucgugaagaagggcgacagcgccaucaugaagagcgagcuggaguacagcaacugcaacaccaagugccagacccccaugggcgccaucaacagcagcaugcccuuccacaacauccacccccugaccaucggcgagugccccaaguacgugaagagcaacagacuggugcuggccaccggccugagaaacagcccccagagagagagcagaagaaagaagagaggccuguucggcgccaucgccggcuucaucgagggcggcuggcagggcaugguggacggcugguacggcuaccaccacagcaacgagcagggcagcggcuacgccgccgacaaggagagcacccagaaggccaucgacggcgugaccaacaaggugaacagcaucaucgacaagaugaacacccaguucgaggccgugggcagagaguucaacaaccuggagagaagaaucgagaaccugaacaagaagauggaggacggcuuccuggacguguggaccuacaacgccgagcugcuggugcugauggagaacgagagaacccuggacuuccacgacagcaacgugaagaaccuguacgacaaggugagacugcagcugagagacaacgccaaggagcugggcaacggcugcuucgaguucuaccacaagugcgacaacgagugcauggagagcaucagaaacggcaccuacaacuacccccaguacagcgaggaggccagacugaagagagaggagaucagcggcgugaagcuggagagcaucggcaccuaccagauccugagcaucuacagcaccguggccagcagccuggcccuggccaucaugaucgccggccugagccuguggaugugcagcaacggcagccugcagugcagaaucugcaucuga

SEQ ID NO: 161523 - RNA, 1707 nt, Artificial Sequence
  derived and/or modified CDS sequence (opt4) from hemagglutinin__InfluenzaA__ABL07030
auggagaagaucgugcugcugcuggccaucgugagccuggugaagagcgaccagaucugcaucggcuaccacgccaacaacagcaccgagcagguggacaccaucauggagaagaacgugaccgugacccacgcccaggacauccuggagaagacccacaacggcaagcugugcgaccuggacggcgugaagccccugauccugagagacugcagcguggccggcuggcugcugggcaaccccaugugcgacgaguucaucaacgugcccgaguggagcuacaucguggagaaggccaaccccaccaacgaccugugcuaccccggcagcuucaacgacuacgaggagcugaagcaccugcugagcagaaucaaccacuucgagaagauccagaucauccccaagagcagcuggagcgaccacgaggccagcagcggcgugagcagcgccugccccuaccugggcagccccagcuucuucagaaacgugguguggcugaucaagaagaacagcaccuaccccaccaucaagaagagcuacaacaacaccaaccaggaggaccugcuggugcuguggggcauccaccaccccaacgacgccgccgagcagaccagacuguaccagaaccccaccaccuacaucagcaucggcaccagcacccugaaccagagacuggugcccaagaucgccaccagaagcaaggugaacggccagagcggcagaauggaguucuucugggccauccugaagcccaacgacgccaucaacuucgagagcaacggcaacuucaucgcccccgaguacgccuacaagaucgugaagaagggcgacagcgccaucaugaagagcgagcuggaguacggcaacugcaacaccaagugccagacccccaugggcgccaucaacagcagcaugcccuuccacaacauccacccccugaccaucggcgagugccccaaguacgugaagagcaacagacuggugcuggccaccggccugagaaacagcccccagagagagagcagaagaaagaagagaggccuguucggcgccaucgccggcuucaucgagggcggcuggcagggcaugguggacggcugguacggcuaccaccacagcaacgagcagggcagcggcuacgccgccgacaaggagagcacccagaaggccaucgacggcgugaccaacaaggugaacagcaucaucgacaagaugaacacccaguucgaggccgugggcagagaguucaacaaccuggagagaagaaucgagaaccugaacaagaagauggaggacggcuuccuggacguguggaccuacaacgccgagcugcuggugcugauggagaacgagagaacccuggacuuccacgacagcaacgugaagaaccuguacgacaaggugagacugcagcugagagacaacgccaaggagcugggcaacggcugcuucgaguucuaccacaagugcgacaacgagugcauggagagcaucagaaacggcaccuacaacuacccccaguacagcgaggaggccagacugaagagagaggagaucagcggcgugaagcuggagagcaucggcaccuaccagauccugagcaucuacagcaccguggccagcagccuggcccuggccaucaugaucgccggccugagccuguggaugugcagcaacggcagccugcagugcagaaucugcaucuga

SEQ ID NO: 161524 - RNA, 1707 nt, Artificial Sequence
  derived and/or modified CDS sequence (opt4) from hemagglutinin__InfluenzaA__ABL10088
auggagaagaucgugcugcuguucgccaucgugagccuggugaagagcgaccagaucugcaucggcuaccacgccaacaacagcaccgagcagguggacaccaucauggagaagaacgugaccgugacccacgcccaggacauccuggagaagacccacaacggcaagcugugcgaccuggacggcgugaagccccugauccugagagacugcagcguggccggcuggcugcugggcaaccccaugugcgacgaguucaucaacgugcccgaguggagcuacaucguggagaaggccaaccccgugaacgaccugugcuaccccggcgacuucaacgacuacgaggagcugaagcaccugcugagcagaaucaaccacuucgagaagauccagaucauccccaagagcagcuggagcagccacgaggccagccugggcgugagcagcgccugccccuaccagggcaagagcagcuucuucagaaacgugguguggcugaucaagaagaacagcaccuaccccaccaucaagagaagcuacaacaacaccaaccaggaggaccugcuggugcuguggggcauccaccaccccaacgacgccgccgagcagaccaagcuguaccagaaccccaccaccuacaucagcgugggcaccagcacccugaaccagagacuggugcccagaaucgccaccagaagcgaggugaacggccagagcggcagaauggaguucuucuggaccauccugaagcccaacgacgccaucaacuucgagagcaacggcaacuucguggcccccgaguacgccuacaagaucgugaagaagggcgacagcaccaucaugaagagcgagcuggaguacggcaacugcaacaccaagugccagacccccaugggcgccaucaacagcagcaugcccuuccacaacauccacccccugaccaucggcgagugccccaaguacgugaagagcaacagacuggugcuggccaccggccugagaaacagcccccagagagagagaagaagaaagaagagaggccuguucggcgccaucgccggcuucaucgagggcggcuggcagggcaugguggacggcugguacggcuaccaccacagcaacgagcagggcagcggcuacgccgccaacaaggagagcacccagaaggccaucgacggcgugaccaacaaggugaacagcaucaucgacaagaugaacacccaguucgaggccgugggcagagaguucaacaaccuggagagaagaaucgagaaccugaacaagaagauggaggacggcuuccuggacguguggaccuacaacgccgagcugcuggugcugauggagaacgagagaacccuggacuuccacgacagcaacgugaagaaccuguacgacaaggugagacugcagcugagagacaacgccaaggagcugggcaacggcugcuucgaguucuaccacaagugcgacaacgagugcauggagagcgugagaaacggcaccuacgacuacccccaguacagcgaggaggccagacugaagagagaggagaucagcggcgugaagcuggagagcaucggcaucuaccagauccugagcaucuacagcaccguggccagcagccuggcccuggccaucaugguggccggccugagccuguggaugugcagcaacggcagccugcagugcagaaucugcaucuga

SEQ ID NO: 161525 - RNA, 1707 nt, Artificial Sequence
  derived and/or modified CDS sequence (opt4) from hemagglutinin__InfluenzaA__ABL31766
auggagaagaucgugcugcugcuggccaucgugagcuucgugaagagcgaccagaucugcaucggcuaccacgccaacaacagcaccgagcagguggacaccaucauggagaagaacgugaccgugacccacgcccaggacauccuggagaagacccacaacggcaagcugugcgaccuggacggcgugaagccccugauccugagagacugcagcguggccggcuggcugcugggcaaccccaugugcgacgaguucaucaacgugcccgaguggagcuacaucguggagaaggccaaccccaccaacgaccugugcuaccccggcagcuucaacgacuacgaggagcugaagcaccugcugagcagaaucaaccacuucgagaagauccagaucauccccaagagcagcuggagcgaccacgaggccagcagcggcgugagcagcgccugccccuaccugggcagccccagcuucuucagaaacgugguguggcugaucaagaagaacagcaccuaccccaccaucaagaagagcuacaacaacaccaaccaggaggaccugcuggugcuguggggcauccaccaccccaacgacgccgccgagcagaccagacuguaccagaaccccaccaccuacaucagcaucggcaccagcacccugaaccagagacuggugcccaagaucgccaccagaagcaaggugaacggccagagcggcagaauggaguucuucugggccauccugaagcccaacgacgccaucaacuucgagagcaacggcaacuucaucgcccccgaguacgccuacaagaucgugaagaagggcgacagcgccaucaugaagagcgagcuggaguacggcaacugcaacaccaagugccagacccccaugggcgccaucaacagcagcaugcccuuccacaacauccacccccugaccaucggcgagugccccaaguacgugaagagcaacagacuggugcuggccaccggccugagaaacagcccccagagagagagcagaagaaagaagagaggccuguucggcgccaucgccggcuucaucgagggcggcuggcagggcaugguggacggcugguacggcuaccaccacagcaacgagcagggcagcggcuacgccgccgacaaggagagcacccagaaggccaucgacggcgugaccaacaaggugaacagcaucaucgacaagaugaacacccaguucgaggccgugggcagagaguucaacaaccuggagagaagaaucgagaaccugaacaagaagauggaggacggcuuccuggacguguggaccuacaacgccgagcugcuggugcugauggagaacgagagaacccuggacuuccacgacagcaacgugaagaaccuguacgacaaggugagacugcagcugagagacaacgccaaggagcugggcaacggcugcuucgaguucuaccacaagugcgacaacgagugcauggagagcaucagaaacggcaccuacaacuacccccaguacagcgaggaggccagacugaagagagaggagaucagcggcgugaagcuggagagcaucggcaccuaccagauccugagcaucuacagcaccguggccagcagccuggcccuggccaucaugaucgccggccugagccuguggaugugcagcaacggcagccugcagugcagaaucugcaucuga

SEQ ID NO: 161526 - RNA, 1707 nt, Artificial Sequence
  derived and/or modified CDS sequence (opt4) from hemagglutinin__InfluenzaA__ABL31780
auggagaagaucgugcugcugcugagcaucgugagccuggugaagagcgaccagaucugcaucggcuaccacgccaacaacagcaccgagcagguggacaccaucauggagaagaacgugaccgugacccacgcccaggacauccuggagaagacccacaacggcaagcugugcgaccuggacggcgugaagccccugauccugagagacugcagcguggccggcuggcugcugggcaaccccaugugcgacgaguucaucaacgugcccgaguggagcuacaucguggagaaggccaaccccaccaacgaccugugcuaccccggcagcuucaacgacuacgaggagcugaagcaccugcugagcagaaucaaccacuucgagaagauccagaucauccccaagggcagcuggagcgaccacgaggccagcagcggcgugagcagcgccugccccuaccugagaagccccagcuucuucagaaacgugguguggcugaucaagaagaacagcaccuaccccaccaucaagaagagcuacaacaacaccaaccaggaggaccugcuggugcuguggggcauccaccaccccaacaacgaggccgagcagaccagacuguaccagaaccccaccaccuacaucagcaucggcaccagcacccugaaccagagacuggugcccaagaucgccaccagaagcaaggugaacggccagagcggcagaauggaguucuucuggaccauccugaagcccaacgacgccaucaacuucgagagcaacggcaacuucaucgcccccgaguacgccuacaagaucgugaagaagggcgacagcgccaucaugaagagcgagcuggaguacggcaacugcaacaccaagugccagacccccaugggcgccaucaacagcagcaugcccuuccacaacauccacccccugaccaucggcgagugccccaaguacgugaagagcaacagacuggugcuggccaccggccugagaaacagcccccagagagagagcagaagaaagaagagaggccuguucggcgccaucgccggcuucaucgagggcggcuggcagggcaugguggacggcugguacggcuaccaccacagcaacgagcagggcagcggcuacgccgccgacaaggagagcacccagaaggccaucgacggcgugaccaacaaggugaacagcaucaucgacaagaugaacacccaguucgaggccgugggcagagaguucaacaaccuggagagaagaaucgagaaccugaacaagaagauggaggacggcuuccuggacguguggaccuacaacgccgagcugcuggugcugauggagaacgagagaacccuggacuuccacgacagcaacgugaagaaccuguacgacaaggugagacugcagcugagagacaacgccaaggagcugggcaacggcugcuucgaguucuaccacaagugcgacaacgagugcauggagagcaucagaaacggcaccuacaacuacccccaguacagcgaggaggccagacugaagagagaggagaucagcggcgugaagcuggagagcaucggcaccuaccagauccugagcaucuacagcaccguggccagcagccuggcccuggccaucaugaucgccggccugagccuguggaugugcagcaacggcagccugcagugcagaaucugcaucuga

SEQ ID NO: 161527 - RNA, 1701 nt, Artificial Sequence
  derived and/or modified CDS sequence (opt4) from hemagglutinin__InfluenzaA__ABL67165
augaagaccaucaucgcccugagcuacauccugugccugguguucgcccagaagcugcccggcaacgacaacagcaccgccacccugugccugggccaccacgccgugcccaacggcaccaucgugaagaccaucaccaacgaccagaucgaggugaccaacgccaccgagcuggugcagagcagcagcaccagcggcaucugcgacagcccccaccagauccuggacggcgagaacugcacccugaucgacgcccugcugggcgacccccagugcgacggcuuccagaacaagaagugggaccuguucguggagagaagcaaggccuacagcaacugcuaccccuacgacgugcccgaccacgccagccugagaagccugguggccagcagcggcacccuggaguucaacaacgagagcuucgacuggaccggcgugacccagaacggcaccagcagcgccugcaagagaagaagcaacaagagcuucuucagcagacugaacuggcugacccaccugaaguacaaguaccccgcccugaacgugaccaugcccaacaacgagaaguucgacaagcuguacaucuggggcgugcaccaccccggcaccgacagcgaccagaucagccuguacgcccaggccagcggcagaaucaccgugagcaccaagagaagccagcagaccgugauccccaacaucggcagcagacccagagugagagacgugagcagcagaaucagcaucuacuggaccaucgugaagcccggcgacauccugcugaucaacagcaccggcaaccugaucgcccccagaggcuacuucaagaucagaagcggcaagagcagcaucaugagaagcgacgcccccaucggcaagugcaacagcgagugcaucacccccaacggcagcauccccaacgacaagcccuuccagaacgugaacagaaucaccuacggcgccugccccagauacgugaagcagaacacccugaagcuggccaccggcaugagaaacgugcccgagaagaagaccagaggcaucuucggcgccaucgccggcuucaucgagaacggcugggagggcaugguggacggcugguacggcuucagacaccagaacagcgagggcaccggccaggccgccgaccugaagagcacccaggccgccaucaaccagaucaacggcaagcugaacagacugaucggcaagaccaacgagaaguuccaccagaucgagaaggaguucagcgagguggagggcagaauccaggaccuggagaaguacguggaggacaccaagaucgaccuguggagcuacaacgccgagcugcugguggcccuggagaaccagcacaccaucgaccugaccgacagcgagaugaacaagcuguucgagagaaccaagaagcagcugagagagaacgccgaggacaugggcaacggcugcuucaagaucuaccacaagugcgacaacgccugcaucggcagcaucagaaacggcaccuacgaccacgacguguacagagacgaggcccugaacaacagauuccagaucaagggcguggagcugaagagcggcuacaaggacuggauccuguggaucagcuucgccaucagcugcuuccugcugugcguggcccugcugggcuucaucaugugggccugccagaagggcaacaucagaugcaacaucugcaucuga

SEQ ID NO: 161528 - RNA, 1701 nt, Artificial Sequence
  derived and/or modified CDS sequence (opt4) from hemagglutinin__InfluenzaA__ABL67176
augaagaccaucaucgcccugagcuacauccugugccugguguucacccagaagcugcccggcaacgacaacagcaccgccacccugugccugggccaccacgccgugcccaacggcacccuggugaagaccaucaccaacgaccagaucgaggugaccaacgccaccgagcuggugcagagcagcagcaccggcggcaucugcgacagcccccaccagauccuggacggcgagaacugcacccugaucgacgcccugcugggcgacccccacugcgacggcuuccagaacaaggagugggaccuguucguggagagaagcagagccuacagcaacugcuaccccuacgacgugcccgacuacgccagccugagaagccugguggccagcagcggcacccuggaguucaacaacgagagcuucaacuggaccggcguggcccagaacggcaccagcagcgccugcaagagaagaagcaacaagagcuucuucagcagacugaacuggcugcaccagcugaaguacaaguaccccgcccugaacgugaccaugcccaacaacgagaaguucgacaagcuguacaucuggggcgugcaccaccccagcaccgacagcgaccagaucagccuguacgcccaggcccccggcagagugaccgugagcaccaagagaagccagcagaccgugauccccaacaucggcagcagacccugggugagaggcgugagcagcagaaucagcaucuacuggaccaucgugaagcccggcgacauccugcugaucaacugcaccggcaaccugaucgcccccagaggcuacuucaagaucagaagcggcaagagcagcaucaugagaagcgacgccagcaucggcaagugcaacagcgagugcaucacccccaacggcagcauccccaacgacaagcccuuccagaacgugaacagaaucaccuacggcgccugccccagauacgugaagcagaacacccugaagcuggccaccggcaugagaaacgugcccgagaagcagaccagaggcaucuucggcgccaucgccggcuucaucgagaacggcugggagggcaugguggacggcugguacggcuucagacaccagaacagcgagggcaccggccaggccgccgaccugaagagcacccaggccgccaucaaccagaucaacggcaagcugaacagacugaucgagaagaccaacgagaaguuccaccagaucgagaaggaguucagcgagguggagggcagaauccaggaccuggagaaguacguggaggacaccaagaucgaccuguggagcuacaacgccgagcugcugguggcccuggagaaccagcacaccaucgaccugaccgacagcgagaugaacaagcuguucgagagaaccaagaagcagcugagagagaacgccgaggacaugggcaacggcugcuucaagaucuaccacaagugcgacaacgccugcaucggcagcaucagaaacggcaccuacgaccacgacguguacagagacgaggcccugaacaacagauuccagaucaagggcguggagcugaagagcggcuacaaggacuggauccuguggaucagcuucgccaucagcugcuuccugcugugcguggugcugcugggcuucaucaugugggccugccagaagggcaacaucagaugcaacaucugcaucuga

SEQ ID NO: 161529 - RNA, 1701 nt, Artificial Sequence; identical to SEQ ID NO: 161492
  derived and/or modified CDS sequence (opt4) from hemagglutinin__InfluenzaA__ABL67187

SEQ ID NO: 161530 - RNA, 1701 nt, Artificial Sequence; identical to SEQ ID NO: 161447
  derived and/or modified CDS sequence (opt4) from hemagglutinin__InfluenzaA__ABL67209

SEQ ID NO: 161531 - RNA, 1701 nt, Artificial Sequence; identical to SEQ ID NO: 160981
  derived and/or modified CDS sequence (opt4) from hemagglutinin__InfluenzaA__ABL67253

SEQ ID NO: 161532 - RNA, 1701 nt, Artificial Sequence
  derived and/or modified CDS sequence (opt4) from hemagglutinin__InfluenzaA__ABL67264
augaaggccaagcugcuggugcugcugugcgcccugagcgccaccgacgccgacaccaucugcaucggcuaccacgccaacaacagcaccgacaccguggacaccgugcuggagaagaacgugaccgugacccacagcgugaaccugcuggaggacaaccacaacggcaagcugugcaagcugaagggcaucgccccccugcagcugggcaagugcagcaucgccggcuggauccugggcaaccccgagugcgagagccuguucagcaagaagagcuggagcuacaucgccgagacccccaacagcgagaacggcaccugcuaccccggcuacuucgccgacuacgaggagcugagagagcagcugagcagcgugagcagcuucgagagauucgagaucuuccccaaggagagcagcuggcccaagcacaacgugaccaagggcgugaccgccagcugcagccacaagggcaagagcagcuucuacagaaaccugcuguggcugaccgagaagaacggcagcuaccccaaccugagcaagagcuacgugaacaacaaggagaaggaggugcuggugcuguggggcgugcaccaccccagcaacaucgaggaccagaagaccaucuacagaaaggagaacgccuacgugagcguggugagcagccacuacaacagaagauucacccccgagaucgccaagagacccaaggugagaaaccaggagggcagaaucaacuacuacuggacccugcuggagcccggcgacaccaucaucuucgaggccaacggcaaccugaucgcccccugguacgccuucgcccugagcagaggcuucggcagcggcaucaucaccagcaacgccagcauggacgagugcgacgccaagugccagaccccccagggcgccaucaacagcagcuuccccuuccagaacgugcaccccgugaccaucggcgagugccccaaguacgugagaagcaccaagcugagaauggugaccggccugagaaacauccccagcauccagagcagaggccuguucggcgccaucgccggcuucaucgagggcggcuggaccggcaugaucgacggcugguacggcuaccaccaccagaacgagcagggcagcggcuacgccgccgaccagaagagcacccagaacgccaucaacggcaucaccaacaaggugaacagcaucaucgagaagaugaacacccaguucaccgccgugggcaaggaguucaacaagcuggagaagagaauggagaaccugaacaagaagguggacgacggcuuccuggacaucuggaccuacaacgccgagcugcuggugcugcuggagaacgagagaacccuggacuuccacgacagcaacgugaagaaccuguacgagaaggugaagagccagcugaagaacaacgccaaggagaucggcaacggcugcuucgaguucuaccacaagugcaacaacgagugcauggagagcgugaagaacggcaccuacgacuaccccaaguacagcgaggagagcaagcugaacagagagaagaucgacggcgugaagcuggagagcaugggcguguaccagauccuggccaucuacagcaccguggccagcagccuggugcugcuggugagccugggcgccaucagcuucuggaugugcagcaacggcagccugcagugcagaaucugcaucuga

SEQ ID NO: 161533 - RNA, 1701 nt, Artificial Sequence
  derived and/or modified CDS sequence (opt4) from hemagglutinin__InfluenzaA__ABL67275
augaagaccaucaucgcccugagcuacauccugugccugguguucgcccagaagcugcccgugaacgacaacagcaccgccacccugugccugggccaccacgccgugcccaacggcacccuggugaagaccaucaccaacgaccacaucgaggugaccaacgccaccgagcuggugcagagcagcagcaccggcagaaucugcgacagcccccaccagauccuggacggcgagaacugcacccugaucgacgcccugcugggcgacccccacugcgacggcuuccagaacaaggagugggaccuguucguggagagaagcaccgccuacagcaacugcuaccccuacgacgugcccgacuacgccagccugagaagccugguggccagcagcggcacccuggaguucaacaacgagagcuucaacuggaccggcguggcccagaacggcaccagcagcgccugcaagagaagaagcaucaagagcuucuucagcagacugaacuggcugcaccagcugaaguacaaguaccccgcccugaacgugaccaugcccaacaacgagaaguucgacaagcuguacaucuggggcgugcaccaccccagcaccgacagcgaccagaucagccuguacgcccaggccagcggcagagugaccgugagcaccaagagaagccagcagaccgugauccccaacaucggcagcagacccugggugagaggcgugagcagcagaaucagcaucuacuggaccaucgugaagcccggcgacauccugcugaucaacagcaccggcaaccugaucgcccccagaggcuacuucaagaucagaagcggcaagagcagcaucaugagaagcaacgcccccaucggcaagugcaacagcgagugcaucacccccaacggcagcauccccaacgacaagcccuuccagaacgugaacagaaucaccuacggcgccugccccagauacgugaagcagaacacccugaagcuggccaccggcaugagaaacgugcccgagaagcagaccagaggcaucuucggcgccaucgccggcuucaucgagaacggcugggagggcaugguggacggcugguacggcuucagacaccagaacagcgagggcaccggccaggccgccgaccugaagagcacccaggccgccaucaaccagaucaacggcaagcugaacagacugaucgagaagaccaacgagaaguuccaccagaucgagaaggaguucagcgagguggagggcagaauccaggaccuggagaaguacguggaggacaccaagaucgaccuguggagcuacaacgccgagcugcugguggcccuggagaaccagcacaccaucgaccugaccgacagcgagaugaacaagcuguucgagagaaccagaaagcagcugagagagaacgccgaggacgugggcaacggcugcuucaagaucuaccacaagugcgacaacgccugcaucggcagcaucagaaacggcaccuacgaccacgacguguacagagacgaggcccugaacaacagauuccagaucaagggcgugaagcugaagagcggcuacaaggacuggauccuguggaucagcuucgccaucagcugcuuccugcugugcguggugcugcugggcuucaucaugugggccugccagaagggcaacaucagaugcaacaucugcaucuga

SEQ ID NO: 161534 - RNA, 1701 nt, Artificial Sequence
  derived and/or modified CDS sequence (opt4) from hemagglutinin__InfluenzaA__ABL67286
augaagaccaucaucgcccugagcuacauccugugccugguguucgcccagaagcugcccggcaacgacaacagcaccgccacccugugccugggccaccacgccgugcccaacggcacccuggugaagaccaucaccaacgaccagaucgaggugaccaacgccaccgagcuggugcagagcagcagcaccggcagaaucugcgacagcccccaccagauccuggacggcgagaacugcacccugaucgacgcccugcugggcgacccccacugcgacggcuuccagaacaaggagugggaccuguucguggagagaagcaaggccuacagcaacugcuaccccuacgacgugcccgacuacgugagccugagaagccugguggccagcagcggcacccuggaguucaacaacgagagcuucaacuggaccggcguggcccagaacggcaccagcagcgccugcaagagaagaagcgacaagagcuucuucagcagacugaacuggcugcaccagcugaaguacaaguaccccgcccugaacgugaccaugcccaacaacgagaaguucgacaagcuguacaucuggggcgugcaccaccccggcaccgacagcgaccagaucagccuguacgcccaggccagcggcagagugaccgugagcaccaagagaagccagcagaccgugauccccaacaucggcagcagacccugggugagaggcgugagcagcagaaucagcaucuacuggaccaucgugaagagcggcgacauccugcugaucaacagcaccggcaaccugaucgcccccagaggcuacuucaagaucagaagcggcaagagcagcaucaugagaagcgacgcccccaucggcaagugcaacagcgagugcaucacccccaacggcagcauccccaacgacaagcccuuccagaacgugaacagaaucaccuacggccccugccccagauacgugaagcagaacacccugaagcuggccaccggcaugagaaacgugcccgagaagcagaccagaggcaucuucggcgccaucgccggcuucaucgagaacggcugggagggcaugauggacggcugguacggcuucagacaccagaacagcgagggcaccggccaggccgccgaccugaagagcacccaggccgccaucaaccagaucaacggcaagcugaacagacugaucgagaagaccaacgagaaguuccaccagaucgagaaggaguucagcgagguggagggcagaauccaggaccuggagaaguacguggaggacaccaagaucgaccuguggagcuacaacgccgagcugcugguggcccuggagaaccagcacaccaucgaccugaccgacagcgagaugaacaagcuguucgagagaaccaagaagcagcugagagagaacgccgaggacaugggcaacggcugcuucaagaucuaccacaagugcgacaacgccugcaucggcagcaucagaaacggcaccuacgaccacgacguguacagagacgaggcccugaacaacagauuccagaucaagggcguggagcugaagagcggcuacaaggacuggauccuguggaucagcuucgccaucagcugcuuccugcugugcaucgugcugcugggcuucaucaugugggccugccagaagggcaacaucagaugcaacaucugcaucuga

SEQ ID NO: 161535 - RNA, 1701 nt, Artificial Sequence; identical to SEQ ID NO: 161065
  derived and/or modified CDS sequence (opt4) from hemagglutinin__InfluenzaA__ABL67297

SEQ ID NO: 161536 - RNA, 1701 nt, Artificial Sequence
  derived and/or modified CDS sequence (opt4) from hemagglutinin__InfluenzaA__ABL67308
augaagaccaucaucgcccugagcuacauccugugccugguguucgcccagaagcugcccggcaacgacaacagcauggccacccugugccugggccaccacgccgugcccaacggcacccuggugaagaccaucaccaacgaccagaucgaggugaccaacgccaccgagcuggugcagagcagcagcaccggcagaaucugcgacagcccccaccagauccuggacggcgagaacugcacccugaucgacgcccugcugggcgacccccacugcgacggcuuccagaacaaggagugggaccuguucguggagagaagcaaggccuacagcagcugcuaccccuacgacgugcccgacuacgugagccugagaagccugguggccagcagcggcacccuggaguucaacaacgagagcuucaacuggaccggcguggcccagaacggcaccagcagcgccugcaagagaagaagcgacaagagcuucuucagcagacugaacuggcugcaccagcugaaguacaaguaccccgcccugaacgugaccaugcccaacaacgagaaguucgacaagcuguacaucuggggcgugcaccaccccggcaccgacagcgaccagaucagccuguacgcccaggccagcggcagagugaccgugagcaccaagagaagccagcagaccgugauccccaacaucggcagcagacccugggugagaggcgugagcagcagaaucagcaucuacuggaccaucgugaagcccggcgacauccugcugaucaacagcaccggcaaccugaucgcccccagaggcuacuucaagaucagaagcggcaagagcagcaucaugagaagcgacgcccccaucgacaagugcaacagcgagugcaucacccccaacggcagcauccccaacgacaagcccuuccagaacgugaacagaaucaccuacggccugugccccagauacgugaagcagaacacccugaagcuggccaccggcaugagaaacgugcccgagaagcagaccagaggcaucuucggcgccaucgccggcuucaucgagaacggcugggagggcaugauggacggcugguacggcuucagacaccagaacagcgagggcaccggccaggccgccgaccugaagagcacccaggccgccaucaaccagaucaacggcaagcugaacagacugaucgagaagaccaacgagaaguuccaccagaucgagaaggaguucagcgagguggagggcagaauccaggaccuggagaaguacguggaggacaccaagaucgaccuguggagcuacaacgccgagcugcugguggcccuggagaaccagcacaccaucgaccugaccgacagcgagaugaacaagcuguucgagagaaccaagaagcagcugagagagaacgccgaggacaugggcaacggcugcuucaagaucuaccacaagugcgacaacgccugcaucggcagcaucagaaacggcaccuacgaccacgacguguacagagacgaggcccugaacaacagauuccagaucaagggcguggagcugaagagcggcuacaaggacuggauccuguggaucagcuucgccaucagcugcuuccugcugugcaucgugcugcugggcuucaucaugugggccugccagaagggcaacgugagaugcaacaucugcaucuga

SEQ ID NO: 161537 - RNA, 1701 nt, Artificial Sequence; identical to SEQ ID NO: 160622
  derived and/or modified CDS sequence (opt4) from hemagglutinin__InfluenzaA__ABL67319

SEQ ID NO: 161538 - RNA, 1701 nt, Artificial Sequence; identical to SEQ ID NO: 161365
  derived and/or modified CDS sequence (opt4) from hemagglutinin__InfluenzaA__ABL67330

SEQ ID NO: 161539 - RNA, 1701 nt, Artificial Sequence; identical to SEQ ID NO: 160576
  derived and/or modified CDS sequence (opt4) from hemagglutinin__InfluenzaA__ABL67341

SEQ ID NO: 161540 - RNA, 1701 nt, Artificial Sequence; identical to SEQ ID NO: 160576
  derived and/or modified CDS sequence (opt4) from hemagglutinin__InfluenzaA__ABL67352

SEQ ID NO: 161541 - RNA, 1701 nt, Artificial Sequence; identical to SEQ ID NO: 160092
  derived and/or modified CDS sequence (opt4) from hemagglutinin__InfluenzaA__ABL67363

SEQ ID NO: 161542 - RNA, 1701 nt, Artificial Sequence
  derived and/or modified CDS sequence (opt4) from hemagglutinin__InfluenzaA__ABL67374
augaagaccaucaucgcccugagcuacauccugugccugguguucgcccagaagcugcccggcaacgacaacagcaccgccacccugugccugggccaccacgccgugcccaacggcaccaucgugaagaccaucaccaacgaccagaucgaggugaccaacgccaccgagcuggugcagagcagcagcaccggcggcaucugcgacagcccccaccagauccuggacggcgagaacugcacccugaucgacgcccugcugggcgacccccagugcgacggcuuccagaacaagaagugggaccuguucguggagagaagcaaggcccacagcaacugcuaccccuacgacgugcccgacuacgccagccugagaagccugaucgccagcagcggcacccuggaguucaacaacgagagcuucaacuggaccggcgugacccagaacggcaccagcagcgccugcaagagaagaagcaaccagagcuucuucagcagacugaacuggcugacccaccugaaguucaaguaccccgcccugaacgugaccaugcccaacaacgagaaguucgacaagcuguacaucuggggcgugcaccaccccggcaccgacagcgaccagaucagccuguacgcccaggcccccggcagaaucaccgugagcaccaagagaagccagcagaccgugauccccaacaucggcagcagacccagagugagagacaucagcagcagaaucagcaucuacuggaccaucgugaagcccggcgacauccugcugaucaacagcaccggcaaccugaucgcccccagaggcuacuucaagaugagaagcggcaagagcagcaucaugaagagcgacgcccccaucggcaagugcaacagcgagugcaucacccccaacggcagcauccccaacgacaagcccuuccagaacgugaacagaaucaccuacggcgccugccccagauacgugaagcagaacacccugaagcuggccaccggcaugagaaacgugcccgagaagcagaccagaggcaucuucggcgccaucgccggcuucaucgagaacggcugggagggcaugguggacggcugguacggcuucagacaccagaacagcgagggcaccggccaggccgccgaccugaagagcacccaggccgccaucaaccagaucaacggcaagcugaacagacugaucggcaagaccaacgagaaguuccaccagaucgagaaggaguucagcgagguggagggcagaauccaggaccuggagaaguacguggaggacaccaagaucgaccuguggagcuacaacgccgagcugcugguggcccuggagaaccagcacaccaucgaccugaccgacagcgagaugaacaagcuguucgagagaaccaagaagcagcugagagagaacgccgaggacaugggcgacggcugcuucaagaucuaccacaagugcgacaacgccugcaucggcagcaucagaaacggcaccuacgaccacgacguguacagagacgaggcccugaacaacagauuccagaucaagggcguggagcugaagagcggcuacaaggacuggauccuguggaucagcuucgccaucagcugccugcugcugugcguggcccugcugggcuucaucaugugggccugccagaagggcaacaucagaugcaacaucugcaucuga

SEQ ID NO: 161543 - RNA, 1701 nt, Artificial Sequence; identical to SEQ ID NO: 160342
  derived and/or modified CDS sequence (opt4) from hemagglutinin__InfluenzaA__ABL67385

SEQ ID NO: 161544 - RNA, 1701 nt, Artificial Sequence; identical to SEQ ID NO: 160672
  derived and/or modified CDS sequence (opt4) from hemagglutinin__InfluenzaA__ABL67396

SEQ ID NO: 161545 - RNA, 1701 nt, Artificial Sequence; identical to SEQ ID NO: 160690
  derived and/or modified CDS sequence (opt4) from hemagglutinin__InfluenzaA__ABL67407

SEQ ID NO: 161546 - RNA, 1701 nt, Artificial Sequence
  derived and/or modified CDS sequence (opt4) from hemagglutinin__InfluenzaA__ABL67418
augaagaccaucaucgcccugagcuacauccugugccugguguucgcccagaagcugcccggcaacgacaacagcaccgccacccugugccugggccaccacgccgugcccaacggcaccaucgugaagaccaucaccaacgaccagaucgaggugaccaacgccaccgagcuggugcagagcagcagcaccggcggcaucugcaacagcccccaccagauccuggacggcgagaacugcacccugaucgacgcccugcugggcgacccccagugcgacggcuuccagaacaagaagugggaccuguucguggagagaagcaaggccuacagcaacugcuaccccuacgacgugcccgacuacgccagccugagaagccugguggccagcagcggcacccuggaguucaacaacgagagcuucaacuggaccggcgugacccagaacggcaccagcagcgccugcaagagaagaagcaacaacagcuucuucagcagacugaacuggcugacccaccugaaguucaaguaccccgcccugaacgugaccaugcccaacaacgagaaguucgacaagcuguacaucuggggcgugcaccaccccggcaccgacaacgaccagaucuuccuguacgcccaggccagcggcagaaucaccgugagcaccaagagaagccagcagaccgugauccccaacaucggcagcagacccagagugagaaacauccccagcagaaucagcaucuacuggaccaucgugaagcccggcgacauccugcugaucaacagcaccggcaaccugaucgcccccagaggcuacuucaagaucagaagcggcaagagcagcaucaugagaagcgacgcccccaucggcaagugcaacagcgagugcaucacccccaacggcagcauccccaacgacaagcccuuccagaacgugaacagaaucaccuacggcgccugccccagauacgugaagcagaacacccugaagcuggccaccggcaugagaaacgugcccgagaagcagaccagaggcaucuucggcgccaucgccggcuucaucgagaacggcugggagggcaugguggacggcugguacggcuucagacaccagaacagcgagggcaucggccaggccgccgaccugaagagcacccaggccgccaucaaccagaucaacggcaagcugaacagacugaucggcaagaccaacgagaaguuccaccagaucgagaaggaguucagcgagguggagggcagaauccaggaccuggagaaguacguggaggacaccaagaucgaccuguggagcuacaacgccgagcugcugguggcccuggagaaccagcacaccaucgaccugaccgacagcgagaugaacaagcuguucgagagaaccaagaagcagcugagagagaacgccgaggacaugggcaacggcugcuucaagaucuaccacaagugcgacaacgccugcaucggcagcaucagaaacggcaccuacgaccacgacguguacagagacgaggcccugaacaacagauuccagaucaagggcguggagcugaagagcggcuacaaggacuggauccuguggaucagcuucgccaucagcugcuuccugcugugcguggcccugcugggcuucaucaugugggccugccagaagggcaacaucagaugcaacaucugcaucuga

SEQ ID NO: 161547 - RNA, 1707 nt, Artificial Sequence; identical to SEQ ID NO: 160088
  derived and/or modified CDS sequence (opt4) from hemagglutinin__InfluenzaA__ABL67781

SEQ ID NO: 161548 - RNA, 1707 nt, Artificial Sequence
  derived and/or modified CDS sequence (opt4) from hemagglutinin__InfluenzaA__ABL67794
auggagaagaucgugcugcuguucgccaucgugagccuggugaagagcgaccagaucugcaucggcuaccacgccaacaacagcaccgagcagguggacaccaucauggagaagaacgugaccgugacccacgcccaggacauccuggagaagacccacaacggcaagcugugcgaccuggacggcgugaagccccugauccugagagacugcagcguggccggcuggcugcugggcaaccccaugugcgacgaguucaucaacgugcccgaguggagcuacaucguggagaaggccaaccccgugaacgaccugugcuaccccggcgacuucaacgacuacgaggagcugaagcaccugcugagcagaaucaaccacuucgagaagauccagaucauccccaagagcagcuggagcagccacgaggccagccugggcgugagcagcgccugccccuaccagggcaagagcagcuucuucagaaacgugguguggcugaucaagaagaacagcaccuaccccaccaucaagagaagcuacaacaacaccaaccaggaggaccugcuggugcuguggggcauccaccaccccaacgacgccgccgagcagaccaagcuguaccagaaccccaccaccuacaucagcgugggcaccagcacccugaaccagagacuggugcccagaaucgccaccagaagcaaggugaacggccagagcggcagaauggaguucuucuggaccauccugaagcccaacgacgccaucaacuucgagagcaacggcaacuucaucgcccccgaguacgccuacaagaucgugaagaagggcgacagcaccaucaugaagagcgagcuggaguacggcaacugcaacaccaagugccagacccccaugggcgccaucaacagcagcaugcccuuccacaacauccacccccugaccaucggcgagugccccaaguacgugaagagcaacagacuggugcuggccaccggccugagaaacagcccccagagagagaagagaagaaagaagagaggccuguucggcgccaucgccggcuucaucgagggcggcuggcagggcaugguggacggcugguacggcuaccaccacagcaacgagcagggcagcggcuacgccgccgacaaggagagcacccagaaggccaucgacggcgugaccaacaaggugaacagcaucaucgacaagaugaacacccaguucgaggccgugggcagagaguucaacaaccuggagagaagaaucgagaaccugaacaagaagauggaggacggcuuccuggacguguggaccuacaacgccgagcugcuggugcugauggagaacgagagaacccuggacuuccacgacagcaacgugaagaaccuguacgacaaggugagacugcagcugagagacaacgccaaggagcugggcaacggcugcuucgaguucuaccacaagugcgacaacgagugcauggagagcgugagaaacggcaccuacgacuacccccaguacagcgaggaggccagacugaagagagaggagaucagcggcgugaagcuggagagcaucggcaucuaccagauccugagcaucuacagcaccguggccagcagccuggcccuggccaucaugguggccggccugagccuguggaugugcagcaacggcagccugcagugcagaaucugcaucuga

SEQ ID NO: 161549 - RNA, 1707 nt, Artificial Sequence
  derived and/or modified CDS sequence (opt4) from hemagglutinin__InfluenzaA__ABL67816
auggagaagaucgugcugcuguucgccaucgugagccuggugaagagcgaccagaucugcaucggcuaccacgccaacaacagcaccgagcagguggacaccaucauggagaagaacgugaccgugacccacgcccaggacauccuggagaagacccacaacggcaagcugugcgaccuggacggcgugaagccccugauccugagagacugcagcguggccggcuggcugcugggcaaccccaugugcgacgaguucaucaacgugcccgaguggagcuacaucguggagaaggccaaccccgugaacgaccugugcuaccccggcgacuucaacgacuacgaggagcugaagcaccugcugagcagaaucaaccacuucgagaagauccagaucauccccaagagcagcuggagcagccacgaggccagccugggcgugagcagcgccugccccuaccagggcaagagcagcuucuucagaaacgugguguggcugaucaagaagaacagcaccuaccccaccaucaagagaagcuacaacaacaccaaccaggaggaccugcuggugcuguggggcauccaccaccccaacgacgccgccgagcagaccaagcuguaccagaaccccaccaccuacaucagcgugggcaccagcacccugaaccagagacuggugcccagaaucgccaccagaagcaaggugaacggccagagcggcagaauggaguucuucuggaccauccugaagcccaacgacgccaucaacuucgagagcaacggcaacuucaucgcccccgaguacgccuacaagaucgugaagaagggcgacagcaccaucaugaagagcgagcuggaguacggcaacugcaacaccaagugccagacccccaugggcgccaucaacagcagcaugcccuuccacaacauccacccccugaccaucggcgagugccccaaguacgugaagagcaacagacuggugcuggccaccggccugagaaacagcccccagagagagagaagaagaaagaagagaggccuguucggcgccaucgccggcuucaucgagggcggcuggcagggcaugguggacggcugguacggcuaccaccacagcaacgagcagggcagcggcuacgccgccgacaaggagagcacccagaaggccaucgacggcgugaccaacaaggugaacagcaucaucaacaagaugaacacccaguucgaggccgugggcagagaguucaacaaccuggagagaagaaucgagaaccugaacaagaagauggaggacggcuuccuggacguguggaccuacaacgccgagcugcuggugcugauggagaacgagagaacccuggacuuccacgacagcaacgugaagaaccuguacgacaaggugagacugcagcugagagacaacgccaaggagcugggcaacggcugcuucgaguucuaccacaagugcgacaacgagugcauggagagcgugagaaacggcaccuacgacuacccccaguacagcgaggaggccagacugaagagagaggagaucagcggcgugaagcuggagagcaucggcaucuaccagauccugagcaucuacagcaccguggccagcagccuggcccuggccaucaugguggccggccugagccuguggaugugcagcaacggcagccugcagugcagaaucugcaucuga

SEQ ID NO: 161550 - RNA, 1707 nt, Artificial Sequence
  derived and/or modified CDS sequence (opt4) from hemagglutinin__InfluenzaA__ABL67827
auggagaagaucgugcugcuguucgccaucgugagccuggugaagagcgaccacaucugcaucggcuaccacgccaacaacagcaccgagcagguggacaccaucauggagaagaacgugaccgugacccacgcccaggacauccuggagaagacccacaacggcaagcugugcgaccuggacggcgugaagccccugauccugagagacugcagcguggccggcuggcugcugggcaaccccaugugcgacgaguucaucaacgugcccgaguggagcuacaucguggagaaggccaaccccgugaacgaccugugcuaccccggcgacuucaacgacuacgaggagcugaagcaccugcugagcagaaucaaccacuucgagaagauccagaucauccccaagagcagcuggagcagccacgaggccagccugggcgugagcagcgccugccccuaccagggcaagagcagcuucuucagaaacgugguguggcugaucaagaagaacagcaccuaccccaccaucaagagaagcuacaacaacaccaaccaggaggaccugcuggugcuguggggcauccaccaccccaacgacgccgccgagcagaccaagcuguaccagaaccccaccaccuacaucagcgugggcaccagcacccugaaccagagacuggugcccagaaucgccaccagaagcaaggugaacggccagagcggcagaauggaguucuucuggaccauccugaagcccaacgacgccaucaacuucgagagcaacggcaacuucaucgcccccgaguacgccuacgagaucgugaagaagggcgacagcaccaucaugaagagcgagcuggaguacggcaacugcaacaccaagugccagacccccaugggcgccaucaacagcagcaugcccuuccacaacauccacccccugaccaucggcgagugccccaaguacgugaagagcaacagacuggugcuggccaccggccugagaaacagcccccagaucgagagaagaagaaagaagagaggccuguucggcgccaucgccggcuuccuggagggcggcuggcagggcaugguggacggcugguacggcuaccaccacagcaacgagcagggcagcggcuacgccgccgacaaggagagcacccagaaggccaucgacggcgugaccaacaaggugaacagcaucaucaacaagaugaacacccaguucgaggccgugggcagagaguucaacaaccuggagagaagaaucgagaaccugaacaagaagauggaggacggcuuccuggacguguggaccuacaacgccgagcugcuggugcugauggagaacgagagaacccuggacuuccacgacagcaacgugaagaaccuguacgacaaggugagacugcagcugagagacaacgccaaggagcugggcaacggcugcuucgaguucuaccacaagugcgacaacgagugcauggagagcgugagaaacggcaccuacgacuacccccaguacagcgaggaggccagacugaagagagaggagaucagcggcgugaagcuggagagcaucggcaucuaccagauccugagcaucuacagcaccguggccagcagccuggcccuggccaucaugguggccggccugagccuguggaugugcagcaacggcagccugcagugcagaaucugcaucuga

SEQ ID NO: 161551 - RNA, 1701 nt, Artificial Sequence
  derived and/or modified CDS sequence (opt4) from hemagglutinin__InfluenzaA__ABM22015
augaagaccaucaucgcccugagcuacauccugugccugguguucgcccagaagcugcccggcaacgacaacagcaccgccacccugugccugggccaccacgccgugcccaacggcaccaucgugaagaccaucaccaacgaccagaucgaggugaccaacgccaccgagcuggugcagagcagcagcaccggcggcaucugcgacagcccccaccagauccuggacggcgagaacugcacccugaucgacgcccugcugggcgacccccagugcgacggcuuccagaacaagaagugggaccuguucguggagagaagcaaggccuacagcaacugcuaccccuacgacgugcccgacuacgccagccugagaagccugguggccagcagcggcacccuggaguucaacaacgagagcuucaacuggaccggcgugacccagaacggcaccagcagcgccugcaagagaagaagcaacaacagcuucuucagcagacugaacuggcugacccaccugaaguucaaguaccccgcccugaacgugaccaugcccaacaacgagaaguucgacaagcuguacaucuggggcgugcaccaccccggcaccgacaacgaccagaucuuccuguacgcccaggccagcggcagaaucaccgugagcaccaagagaagccagcagaccgugauccccaacaucggcagcagacccagagugagaaacauccccagcagaaucagcaucuacuggaccaucgugaagcccggcgacauccugcugaucaacagcaccggcaaccugaucgcccccagaggcuacuucaagaucagaagcggcaagagcagcaucaugagaagcgacgcccccaucggcaagugcaacagcgagugcaucacccccaacggcagcauccccaacgacaagcccuuccagaacgugaacagaaucaccuacggcgccugccccagauacgugaagcagaacacccugaagcuggccaccggcaugagaaacgugcccgagaagcagaccagaggcaucuucggcgccaucgccggcuucaucgagaacggcugggagggcaugguggacggcugguacggcuucagacaccagaacagcgagggcaucggccaggccgccgaccugaagagcacccaggccgccaucaaccagaucaacggcaagcugaacagacugaucggcaagaccaacgagaaguuccaccagaucgagaaggaguucagcgagguggagggcagaauccaggaccuggagaaguacguggaggacaccaagaucgaccuguggagcuacaacgccgagcugcugguggcccuggagaaccagcacaccaucgaccugaccgacagcgagaugaacaagcuguucgagagaaccaagaagcagcugagagagaacgccgaggacaugggcaacggcugcuucaagaucuaccacaagugcgacaacgccugcaucggcagcaucagaaacggcaccuacgaccacgacguguacagagacgaggcccugaacaacagauuccagaucaagggcguggagcugaagagcggcuacaaggacuggauccuguggaucagcuucgccaucagcugcuuccugcugugcguggcccugcugggcuucaucaugugggccugccagaagggcaacaucagaugcgacaucugcaucuga

SEQ ID NO: 161552 - RNA, 1701 nt, Artificial Sequence
  derived and/or modified CDS sequence (opt4) from hemagglutinin__InfluenzaA__ABM22026
augaaggccaagcugcuggugcugcugugcgccuucaccgccaccuacgccgacaccaucugcaucggcuaccacgccaacaacagcaccgacaccguggacaccgugcuggagaagaacgugaccgugacccacagcgugaaccugcuggaggacagccacaacggcaagcugugcagacugaagggcaccgccccccugcagcugggcaacugcagcaucgccggcuggauccugggcaaccccgagugcgagagccuguucagcaaggagagcuggagcuacaucgccgagacccccaaccccaagaacggcaccugcuaccccggcuacuucgccgacuacgaggagcugagagagcagcugagcagcgugagcagcuucaagagauucgagaucuuccccaaggacagcagcuggcccaaccacaccgugaccaagggcgugaccgccagcugcagccacaacggcaagagcagcuucuacaagaaccugcuguggcugaccgagaagaacggccuguaccccaaccugagcaagagcuacgugaacaagaagggcaaggaggugcuggugcuguggggcgugcaccaccccagcaacaugggcgaccagagagccaucuaccacaaggagaacgccuacgugagcgugcugagcagccacuacagcagaagauucacccccgagaucgccagaagacccaaggugagagaccaggagggcagaaucaacuacuacuggacccugcuggagcccggcgacaccaucaucuucgaggccaacggcaaccugaucgcccccugguacgccuucgcccugagcagaggcuucggcagcggcaucaucaucagcaacgccagcaugggcgagugcgacgccaagugccagaccccccagggcgccaucaacagcagccugcccuuccagaacgugcaccccgugaccaucggcgagugccccaaguacgugagaagcaccaagcugagaauggugaccggccugagaaacgugcccagcauccagagcagaggccuguucggcgccaucgccggcuucaucgagggcggcuggaccggcaugaucgacggcugguacggcuaccaccaccagaacgagcagggcagcggcuacgccgccgaccagaagagcacccagaacgccaucaacggcaucaccaacaaggugaacagcaucaucgagaagaugaacacccaguucaccgccgugggcaaggaguucaacaagcuggagagaagaauggagaaccugaacaagaagguggacgacggcuuccuggacaucuggaccuacaacgccgagcugcuggugcugcuggagaacgagagaacccuggacuuccacgacagcaacgugaagaaccuguacgagaaggugaagaaccagcugaagaacaacgccaaggagaucggcaacggcugcuucgaguucuaccacaagugcaacaacgagugcauggagagcgugaagaacggcaccuacgacuaccccaaguacagcaaggagagcaagcugaacagagagaagaucgacggcgugaagcuggagagcaugggcguguaccagauccuggccaucuacagcaccguggccagcagccuggugcugcuggugagccugggcgccaucagcuucuggaugugcagcaacggcagccugcagugcagaaucugcaucuga

SEQ ID NO: 161553 - RNA, 1701 nt, Artificial Sequence; identical to SEQ ID NO: 160693
  derived and/or modified CDS sequence (opt4) from hemagglutinin__InfluenzaA__ABM22037

SEQ ID NO: 161554 - RNA, 1701 nt, Artificial Sequence; identical to SEQ ID NO: 160111
  derived and/or modified CDS sequence (opt4) from hemagglutinin__InfluenzaA__ABM22059

SEQ ID NO: 161555 - RNA, 1701 nt, Artificial Sequence; identical to SEQ ID NO: 161365
  derived and/or modified CDS sequence (opt4) from hemagglutinin__InfluenzaA__ABM22070

SEQ ID NO: 161556 - RNA, 1701 nt, Artificial Sequence
  derived and/or modified CDS sequence (opt4) from hemagglutinin__InfluenzaA__ABM22081
augaagaccaucaucgcccugagcuacauccugugccugguguucgcccagaagcugcccggcaacgacaacagcaccgccacccugugccugggccaccacgccgugcccaacggcaccaucgugaagaccaucaccaacgaccagaucgaggugaccaacgccaccgagcuggugcagagcagcagcaccggcggcaucugcgacagcccccaccagauccuggacggcgagaacugcacccugaucgacgcccugcugggcgacccccagugcgacggcuuccagaacaagaagugggaccuguucguggagagaagcaaggccuacagcaacugcuaccccuacgacgugcccgaccacgccagccugagaagccugguggccagcagcggcacccuggaguucaacaacgagagcuucgacuggaccggcgugacccagaacggcaccagcagcgccugcaagagaagaagcaacaagagcuucuucagcagacugaacuggcugacccaccugaaguacaaguaccccgcccugaacgugaccaugcccaacaacgagaaguucgacaagcuguacaucuggggcgugcaccaccccggcaccgacagcgaccagaucagccuguacgcccaggccagcggcagaaucaccgugagcaccaagagaagccagcagaccgugauccccaacaucggcagcagacccagagugagagacgugagcagcagaaucagcaucuacuggaccaucgugaagcccggcgacauccugcugaucaacagcaccggcaaccugaucgcccccagaggcuacuucaagaucagaagcggcaagagcagcaucaugagaagcgacgcccccaucggcaagugcaacagcgagugcaucacccccaacggcagcauccccaacgacaagcccuuccagaacgugaacagaaucaccuacggcgccugccccagauacgugaagcagaacacccugaagcuggccaccggcaugagaaacauccccgagaagcagaccagaggcaucuucggcgccaucgccggcuucaucgagaacggcugggagggcaugguggacggcugguacggcuucagacaccagaacagcgagggcaccggccaggccgccgaccugaagagcacccaggccgccaucaaccagaucaacggcaagcugaacagacugaucggcaagaccaacgagaaguuccaccagaucgagaaggaguucagcgagguggagggcagaauccaggaccuggagaaguacguggaggacaccaagaucgaccuguggagcuacaacgccgagcugcugguggcccuggagaaccagcacaccaucgaccugaccgacagcgagaugaacaagcuguucgagagaaccaagaagcagcugagagagaacgccgaggacaugggcaacggcugcuucaagaucuaccacaagugcgacaacgccugcaucggcagcaucagaaacggcaccuacgaccacgacguguacagagacgaggcccugaacaacagauuccagaucaagggcguggagcugaagagcggcuacaaggacuggauccuguggaucagcuucgccaucagcugcuuccugcugugcguggcccugcugggcuucaucaugugggccugccagaagggcaacaucagaugcaacaucugcaucuga

SEQ ID NO: 161557 - RNA, 1701 nt, Artificial Sequence
  derived and/or modified CDS sequence (opt4) from hemagglutinin__InfluenzaA__ABM22092
augaagaccaucaucgcccugagcuacauccugugccugguguucgcccagaagcugcccggcaacgacaacagcaccgccacccugugccugggccaccacgccgugcccaacggcaccaucgugaagaccaucaccaacgaccagaucgaggugaccaacgccaccgagcuggugcagagcagcagcaccggcgagaucugcgacagcccccaccagauccuggacggcgagaacugcacccugaucgacgcccugcugggcgacccccagugcgacggcuuccagaacaagaagugggaccuguucguggagagaagcaaggccuacagcaacugcuaccccuacgacgugcccgaccacgccagccugagaagccugguggccagcagcggcacccuggaguucaacaacgagagcuucgacugggccggcgugacccagaacggcaccagcagcgccugcaagagaagaagcaacaagagcuucuucagcagacugaacuggcugacccaccugaaguacaaguaccccgcccugaacgugaccaugcccaacaacgagaaguucgacaagcuguacaucuggggcgugcaccaccccggcaccgacagcgaccagaucagccuguacgcccaggccagcggcagaaucaccgugagcaccaagagaagccagcagaccgugauccccaacaucggcagcagacccagagugagagacgugagcagcagaaucagcaucuacuggaccaucgugaagcccggcgacauccugcugaucaacagcaccggcaaccugaucgcccccagaggcuacuucaagaucagaagcggcaagagcagcaucaugagaagcgacgcccccaucggcaagugcaacagcgagugcaucacccccaacggcagcauccccaacgacaagcccuuccagaacgugaacagaaucaccuacggcgccugccccagauacgugaagcagaacacccugaagcuggccaccggcaugagaaacgugcccgagaagcagaccagaggcaucuucggcgccaucgccggcuucaucgagaacggcugggagggcaugguggacggcugguacggcuucagacaccagaacagcgagggcaccggccaggccgccgaccugaagagcacccaggccgccaucaaccagaucaacggcaagcugaacagacugaucggcaagaccaacgagaaguuccaccagaucgagaaggaguucagcgagguggagggcagaauccaggaccuggagaaguacguggaggacaccaagaucgaccuguggagcuacaacgccgagcugcugguggcccuggagaaccagcacaccaucgaccugaccgacagcgagaugaacaagcuguucgagagaaccaagaagcagcugagagagaacgccgaggacaugggcaacggcugcuucaagaucuaccacaagugcgacaacgccugcaucggcagcaucagaaacggcaccuacgaccacgacguguacagagacgaggcccugaacaacagauuccagaucaagggcguggagcugaagagcggcuacaaggacuggauccuguggaucagcuucgccaucagcugcuuccugcugugcguggcccugcugggcuucaucaugugggccugccagaagggcaacaucagaugcaacaucugcaucuga

SEQ ID NO: 161558 - RNA, 1701 nt, Artificial Sequence; identical to SEQ ID NO: 161370
  derived and/or modified CDS sequence (opt4) from hemagglutinin__InfluenzaA__ABM22103

SEQ ID NO: 161559 - RNA, 1701 nt, Artificial Sequence; identical to SEQ ID NO: 160576
  derived and/or modified CDS sequence (opt4) from hemagglutinin__InfluenzaA__ABM22114

SEQ ID NO: 161560 - RNA, 1701 nt, Artificial Sequence; identical to SEQ ID NO: 161515
  derived and/or modified CDS sequence (opt4) from hemagglutinin__InfluenzaA__ABM22125

SEQ ID NO: 161561 - RNA, 1701 nt, Artificial Sequence
  derived and/or modified CDS sequence (opt4) from hemagglutinin__InfluenzaA__ABM22136
augaagaccaucaucgcccugagcuacauccugugccugguguucgcccagaagcugcccggcaacgacaacagcaccgccacccugugccugggccaccacgccgugcccaacggcaccaucgugaagaccaucaccaacgaccagaucgaggugaccaacgccaccgagcuggugcagagcagcagcaccggcggcaucugcgacagcccccaccagauccuggacggcgagaacugcacccugaucgacgcccugcugggcgacccccagugcgacggcuuccagaacaagaagugggaccuguucguggagagaagcaaggccuacagcaacugcuaccccuacgacgugcccgacuacgccagccugagaagccugguggccagcagcggcacccuggaguucaacaacgagagcuucaacuggaccggcgugacccagaacggcaccagcagcgccugcaagagaagaagcaacaacagcuucuucagcagacugaacuggcugacccaccugaaguucaaguaccccgcccugaacgugaccaugcccaacaacgagaaguucgacaagcuguacaucuggggcgugcaccaccccggcaccgacaacgaccagaucuuccuguacgcccaggccagcggcagaaucaccgugagcaccaagagaagccagcagaccgugauccccaacaucggcagcagacccagagugagaaacauccccagcagaaucagcaucuacuggaccaucgugaagcccggcgacauccugcugaucaacagcaccggcaaccugaucgcccccagaggcuacuucaagaucagaagcggcaagagcagcaucaugagaagcgacgcccccaucggcaagugcaacagcgagugcaucacccccaacggcagcauccccaacgacaagcccuuccagaacgugaacagaaucaccuacggcgccugccccagauacgugaagcagaacacccugaagcuggccaucggcaugagaaacgugcccgagaagcagaccagaggcaucuucggcgccaucgccggcuucaucgagaacggcugggagggcaugguggacggcugguacggcuucagacaccagaacagcgagggcaucggccaggccgccgaccugaagagcacccaggccgccaucaaccagaucaacggcaagcugaacagacugaucggcaagaccaacgagaaguuccaccagaucgagaaggaguucagcgagguggagggcagaauccaggaccuggagaaguacguggaggacaccaagaucgaccuguggagcuacaacgccgagcugcugguggcccuggagaaccagcacaccaucgaccugaccgacagcgagaugaacaagcuguucgagagaaccaagaagcagcugagagagaacgccgaggacaugggcaacggcugcuucaagaucuaccacaagugcgacaacgccugcaucggcagcaucagaaacggcaccuacgaccacgacguguacagagacgaggcccugaacaacagauuccagaucaagggcguggagcugaagagcggcuacaaggacuggauccuguggaucagcuucgccaucagcugcuuccugcugugcguggcccugcugggcuucaucaugugggccugccagaagggcaacaucagaugcaacaucugcaucuga

SEQ ID NO: 161562 - RNA, 1701 nt, Artificial Sequence; identical to SEQ ID NO: 160693
  derived and/or modified CDS sequence (opt4) from hemagglutinin__InfluenzaA__ABM22147

SEQ ID NO: 161563 - RNA, 1701 nt, Artificial Sequence; identical to SEQ ID NO: 160981
  derived and/or modified CDS sequence (opt4) from hemagglutinin__InfluenzaA__ABM22158

SEQ ID NO: 161564 - RNA, 1701 nt, Artificial Sequence; identical to SEQ ID NO: 160981
  derived and/or modified CDS sequence (opt4) from hemagglutinin__InfluenzaA__ABM22169

SEQ ID NO: 161565 - RNA, 1701 nt, Artificial Sequence; identical to SEQ ID NO: 160981
  derived and/or modified CDS sequence (opt4) from hemagglutinin__InfluenzaA__ABM22180

SEQ ID NO: 161566 - RNA, 1701 nt, Artificial Sequence; identical to SEQ ID NO: 160981
  derived and/or modified CDS sequence (opt4) from hemagglutinin__InfluenzaA__ABM22191

SEQ ID NO: 161567 - RNA, 1701 nt, Artificial Sequence; identical to SEQ ID NO: 160981
  derived and/or modified CDS sequence (opt4) from hemagglutinin__InfluenzaA__ABM22202

SEQ ID NO: 161568 - RNA, 1701 nt, Artificial Sequence; identical to SEQ ID NO: 160981
  derived and/or modified CDS sequence (opt4) from hemagglutinin__InfluenzaA__ABM22213

SEQ ID NO: 161569 - RNA, 1701 nt, Artificial Sequence; identical to SEQ ID NO: 160981
  derived and/or modified CDS sequence (opt4) from hemagglutinin__InfluenzaA__ABM22224

SEQ ID NO: 161570 - RNA, 1701 nt, Artificial Sequence; identical to SEQ ID NO: 160981
  derived and/or modified CDS sequence (opt4) from hemagglutinin__InfluenzaA__ABM22235

SEQ ID NO: 161571 - RNA, 1701 nt, Artificial Sequence
  derived and/or modified CDS sequence (opt4) from hemagglutinin__InfluenzaA__ABM22268
augaaggugaagcugcuggugcugcugugcgccuucaccgccaccuacgccgacaccaucugcaucggcuaccacgccaacaacagcaccgacaccguggacaccgugcuggagaagaacgugaccgugacccacagcgugaaccugcuggaggacagccacaacggcaagcugugcagacugaagggcaccgccccccugcagcugggcaacugcagcguggccggcuggauccugggcaaccccgagugcgagagccuguucagcaaggagagcuggagcuacaucgccgagacccccaaccccgagaacggcaccugcuaccccggcuacuucgccgacuacgaggagcugagagagcagcugagcagcgugagcagcuucgagagauucgagaucuuccccaaggagagcagcuggcccaaccacaccgugaccaagggcgugaccgccagcugcagccacaacggcaagagcagcuucuacaagaaccugcuguggcugaccgagaagaacggccuguaccccaaccugagcaagagcuacgugaacaacaaggagaaggaggugcuggugcuguggggcgugcaccaccccagcaacaucggcgaccagagagccaucuaccacaccgagaacgccuacgugagcguggugagcagccacuacagcagaagauucacccccgagaucgccaagagacccaaggugagagaccaggagggcagaaucaacuacuacuggacccugcuggagcccggcgacaccaucaucuucgaggccaacggcaaccugaucgcccccugguacgccuucgcccugagcagaggcuucggcagcggcaucaucaccagcaacgccagcaugggcgagugcgacgccaagugccagaccccccagggcgccaucaacagcagccugcccuuccagaacgugcaccccgugaccaucggcgagugccccaaguacgugagaagcaccaagcugagaauggugaccggccugagaaacauccccagcauccagagcagaggccuguucggcgccaucgccggcuucaucgagggcggcuggaccggcaugaucgacggcugguacggcuaccaccaccagaacgagcagggcagcggcuacgccgccgaccagaagagcacccagaacgccaucgacggcaucaccaacaaggugaacagcgugaucgagaagaugaacacccaguucaccgccgugggcaaggaguucaacaagcuggagagaagaauggagaaccugaacaagaagguggacgacggcuuccuggacaucuggaccuacaacgccgagcugcuggugcugcuggagaacgagagaacccuggacuuccacgacagcaacgugaagaaccuguacgagaaggugaagaaccagcugaagaacaacgccaaggagaucggcaacggcugcuucgaguucuaccacaagugcaacaacgagugcauggagagcgugaagaacggcaccuacgacuaccccaaguacagcgaggagagcaagcugaacagagagaagaucgacggcgugaagcuggagagcaugggcguguaccagauccuggccaucuacagcaccguggccagcagccuggugcugcuggugagccugggcgccaucagcuucuggaugugcagcaacggcagccugcagugcagaaucugcaucuga

SEQ ID NO: 161572 - RNA, 1701 nt, Artificial Sequence
  derived and/or modified CDS sequence (opt4) from hemagglutinin__InfluenzaA__ABM22279
augaaggccaagcugcuggugcugcugugcgccuucaccgccaccuacgccgacaccaucugcaucggcuaccacgccaacaacagcaccgacaccguggacaccgugcuggagaagaacgugaccgugacccacagcgugaaccugcuggaggacagacacaacggcaagcugugcagacugaagggcaccgccccccugcagcugggcaacugcagcguggccggcuggauccugggcaaccccgagugcgagagccuguucagcaaggagagcuggagcuacaucgccgagacccccaaccccgagaacggcaccugcuaccccggcuacuucgccgacuacgaggagcugagagagcagcugagcagcgugagcagcuucgagagauucgagaucuuccccaaggagagcagcuggcccaaccacaccgugaccaagggcgugaccgccagcugcagccacaacggcaagagcagcuucuacaagaaccugcuguggcugaccgagaagaacggccuguaccccaaccugagcaagagcuacgugaacaacaaggagaaggaggugcuggugcuguggggcgugcaccaccccagcaacaucggcgaccagagagccaucuaccacaccgagaacgccuacgugagcguggugagcagccacuacagcagaagauucacccccgagaucgccaagagacccaaggugagagaccaggagggcagaaucaacuacuacuggacccugcuggagcccggcgacaccaucaucuucgaggccaacggcaaccugaucgcccccugguacgccuucgcccugagcagaggcuucggcagcggcaucaucaccagcaacgccagcaugggcgacugcgacgccaagugccagaccccccagggcgccaucaacagcagccugcccuuccagaacgugcaccccgugaccaucggcggcugccccaaguacgugagaagcaccaagcugagaauggugaccggccugagaaacauccccagcauccagagcagaggccuguucggcgccaucgccggcuucaucgagggcggcuggaccggcaugaucgacggcugguacggcuaccaccaccagaacgagcagggcagcggcuacgccgccgacaagaagagcacccagaacgccaucgacggcaucaccaacaaggugaacagcgugaucgagaagaugaacacccaguucaccgccgugggcaaggaguucaacaagcuggagagaagaauggagaaccugaacaagaagguggacgacggcuuccuggacaucuggaccuacaacgccgagcugcuggugcugcuggagaacgagagaacccuggacuaccacgacagcaacgugaagaaccuguacgagaaggugaagaaccagcugaagaacaacgccaaggagaucggcaacggcugcuucgaguucuaccacaagugcaacaacgagugcauggagagcgugaagaacggcaccuacgacuaccccaaguacagcgaggagagcaagcugaagagagagaagaucgacggcgugaagcuggagagcaugggcguguaccagauccuggccaucuacagcaccguggccagcagccuggugcugcuggugagccugggcgccaucagcuucuggaugugcagcaacggcagccugcagugcagaaucugcaucuga

SEQ ID NO: 161573 - RNA, 1701 nt, Artificial Sequence
  derived and/or modified CDS sequence (opt4) from hemagglutinin__InfluenzaA__ABM22290
augaaggccaagcugcuggugcugcugugcgccuucaccgccaccuacgccgacaccaucugcaucggcuaccacgccaacaacagcaccgacaccguggacaccgugcuggagaagaacgugaccgugacccacagcgugaaccugcuggagaacagccacaacggcaagcugugcagacugaagggcaccgccccccugcagcugggcaacugcagcguggccggcuggauccugggcaaccccgagugcgagagccuguucagcaaggagagcuggagcuacaucgccgagacccccaaccccgagaacggcaccugcuaccccggcuacuucgccgacuacgaggagcugagagagcagcugagcagcgugagcagcuucgagagauucgagaucuuccccaaggagagcagcuggcccaaccacaccgugaccaagggcgugaccgccagcugcagccacaacggcaagagcagcuucuacaagaaccugcuguggcugaccgagaagaacggccuguaccccaaccugagcaagagcuacgugaacaacaaggagaaggaggugcuggugcuguggggcgugcaccaccccagcaacaucggcgaccagagagccaucuaccacaccgagaacgccuacgugagcguggugagcagccacuacagcagaagauucacccccgagaucgccaagagacccaaggugagagaccaggagggcagaaucaacuacuacuggacccugcuggagcccggcgacaccaucaucuucgaggccaacggcaaccugaucgcccccugguacgccuucgcccugagcagaggcuucggcagcggcaucaucaccagcaacgccagcaugggcgagugcgacgccaagugccagaccccccagggcgccaucaacagcagccugcccuuccagaacgugcaccccgugaccaucggcgagugccccaaguacgugagaagcaccaagcugagaauggugaccggccugagaaacauccccagcauccagagcagaggccuguucggcgccaucgccggcuucaucgagggcggcuggaccggcaugaucgacggcugguacggcuaccaccaccagaacgagcagggcagcggcuacgccgccgaccagaagagcacccagaacgccaucgacggcaucaccaacaaggugaacagcgugaucgagaagaugaacacccaguucaccgccgugggcaaggaguucaacaagcuggagagaagaauggagaaccugaacaagaagguggacgacggcuuccuggacaucuggaccuacaacgccgagcugcuggugcugcuggagaacgagagaacccuggacuuccacgacagcaacgugaagaaccuguacgagaaggugaagaaccagcugaagaacaacgccaaggagaucggcaacggcugcuucgaguucuaccacaagugcaacaacgagugcauggagagcgugaagaacggcaccuacgacuaccccaaguacagcgaggagagcaagcugaacagagagaagaucgacggcgugaagcuggagagcaugggcguguaccagauccuggccaucuacagcaccguggccagcagccuggugcugcuggugagccugggcgccaucagcuucuggaugugcagcaacggcagccugcagugcagaaucugcaucuga

SEQ ID NO: 161574 - RNA, 1701 nt, Artificial Sequence; identical to SEQ ID NO: 160315
  derived and/or modified CDS sequence (opt4) from hemagglutinin__InfluenzaA__ABM22301

SEQ ID NO: 161575 - RNA, 1701 nt, Artificial Sequence; identical to SEQ ID NO: 160315
  derived and/or modified CDS sequence (opt4) from hemagglutinin__InfluenzaA__ABM22312

SEQ ID NO: 161576 - RNA, 1701 nt, Artificial Sequence; identical to SEQ ID NO: 160315
  derived and/or modified CDS sequence (opt4) from hemagglutinin__InfluenzaA__ABM22323

SEQ ID NO: 161577 - RNA, 1701 nt, Artificial Sequence; identical to SEQ ID NO: 160315
  derived and/or modified CDS sequence (opt4) from hemagglutinin__InfluenzaA__ABM22334

SEQ ID NO: 161578 - RNA, 1701 nt, Artificial Sequence; identical to SEQ ID NO: 160316
  derived and/or modified CDS sequence (opt4) from hemagglutinin__InfluenzaA__ABM22345

SEQ ID NO: 161579 - RNA, 1701 nt, Artificial Sequence; identical to SEQ ID NO: 160316
  derived and/or modified CDS sequence (opt4) from hemagglutinin__InfluenzaA__ABM22356

SEQ ID NO: 161580 - RNA, 1701 nt, Artificial Sequence; identical to SEQ ID NO: 160316
  derived and/or modified CDS sequence (opt4) from hemagglutinin__InfluenzaA__ABM22367

SEQ ID NO: 161581 - RNA, 1698 nt, Artificial Sequence; identical to SEQ ID NO: 160901
  derived and/or modified CDS sequence (opt4) from hemagglutinin__InfluenzaA__ABM66864

SEQ ID NO: 161582 - RNA, 1701 nt, Artificial Sequence; identical to SEQ ID NO: 160981
  derived and/or modified CDS sequence (opt4) from hemagglutinin__InfluenzaA__ABM66886

SEQ ID NO: 161583 - RNA, 1701 nt, Artificial Sequence; identical to SEQ ID NO: 160981
  derived and/or modified CDS sequence (opt4) from hemagglutinin__InfluenzaA__ABM66897

SEQ ID NO: 161584 - RNA, 1701 nt, Artificial Sequence; identical to SEQ ID NO: 160981
  derived and/or modified CDS sequence (opt4) from hemagglutinin__InfluenzaA__ABM66908

SEQ ID NO: 161585 - RNA, 1701 nt, Artificial Sequence; identical to SEQ ID NO: 160316
  derived and/or modified CDS sequence (opt4) from hemagglutinin__InfluenzaA__ABM66919

SEQ ID NO: 161586 - RNA, 1701 nt, Artificial Sequence; identical to SEQ ID NO: 160316
  derived and/or modified CDS sequence (opt4) from hemagglutinin__InfluenzaA__ABM66930

SEQ ID NO: 161587 - RNA, 1701 nt, Artificial Sequence; identical to SEQ ID NO: 160316
  derived and/or modified CDS sequence (opt4) from hemagglutinin__InfluenzaA__ABM66941

SEQ ID NO: 161588 - RNA, 1701 nt, Artificial Sequence; identical to SEQ ID NO: 160316
  derived and/or modified CDS sequence (opt4) from hemagglutinin__InfluenzaA__ABM66952

SEQ ID NO: 161589 - RNA, 1701 nt, Artificial Sequence; identical to SEQ ID NO: 160316
  derived and/or modified CDS sequence (opt4) from hemagglutinin__InfluenzaA__ABM66963

SEQ ID NO: 161590 - RNA, 1701 nt, Artificial Sequence; identical to SEQ ID NO: 160316
  derived and/or modified CDS sequence (opt4) from hemagglutinin__InfluenzaA__ABM66974

SEQ ID NO: 161591 - RNA, 1701 nt, Artificial Sequence; identical to SEQ ID NO: 160316
  derived and/or modified CDS sequence (opt4) from hemagglutinin__InfluenzaA__ABM66985

SEQ ID NO: 161592 - RNA, 1701 nt, Artificial Sequence; identical to SEQ ID NO: 160316
  derived and/or modified CDS sequence (opt4) from hemagglutinin__InfluenzaA__ABM66996

SEQ ID NO: 161593 - RNA, 1701 nt, Artificial Sequence; identical to SEQ ID NO: 160316
  derived and/or modified CDS sequence (opt4) from hemagglutinin__InfluenzaA__ABM67007

SEQ ID NO: 161594 - RNA, 1701 nt, Artificial Sequence; identical to SEQ ID NO: 160316
  derived and/or modified CDS sequence (opt4) from hemagglutinin__InfluenzaA__ABM67018

SEQ ID NO: 161595 - RNA, 1701 nt, Artificial Sequence
  derived and/or modified CDS sequence (opt4) from hemagglutinin__InfluenzaA__ABM67029
augaagaccaucaucgcccugagcuacaucaucugccugguguucgcccagaagcugcccggcaacgacaacagcaccgccacccugugccugggccaccacgccgugcccaacggcaccaucgugaagaccaucaccaacgaccagaucgaggugaccaacgccaccgagcuggugcagagcagcagcaccggcgagaucugcgacagcccccaccagauccuggacggcgagaacugcacccugaucgacgcccugcugggcgacccccagugcgacggcuuccagaacaagaagugggaccuguucguggagagaagcaaggccuacagcaacugcuaccccuacgacgugcccgacuacgccagccugagaagccugguggccagcagcggcacccuggaguucaacaacgagagcuucaacuggaccggcgugacccagaacggcaccagcagcgccugcaagagaagaagcaacaacagcuucuucagcagacugaacuggcugacccaccugaaguucaaguaccccgcccugaacgugaccaugcccaacaacgagaaguucgacaagcuguacaucuggggcgugcaccaccccggcaccgacaacgaccagaucuuccuguacgcccaggccagcggcagaaucaccgugagcaccaagagaagccagcagaccgugauccccaacaucggcagcagacccagagugagagacauccccagcagaaucagcaucuacuggaccaucgugaagcccggcgacauccugcugaucaacagcaccggcaaccugaucgcccccagaggcuacuucagaaucagaagcggcaagagcagcaucaugagaagcgacgcccccaucggcaagugcaacagcgagugcaucacccccaacggcagcauccccaacgacaagcccuuccagaacgugaacagaaucaccuacggcgccugccccagauacgugaagcagaacacccugaagcuggccaccggcaugagaaacgugcccgagaagcagaccagaggcaucuucggcgccaucgccggcuucaucgagaacggcugggagggcaugguggacggcugguacggcuucagacaccagaacagcgagggcaucggccaggccgccgaccugaagagcacccaggccgccaucaaccagaucaacggcaagcugaacagacugaucggcaagaccaacgagaaguuccaccagaucgagaaggaguucagcgagguggagggcagaauccaggaccuggagaaguacguggaggacaccaagaucgaccuguggagcuacaacgccgagcugcugguggcccuggagaaccagcacaccaucgaccugaccgacagcgagaugaacaagcuguucgagagaaccaagaagcagcugagagagaacgccgaggacaugggcaacggcugcuucaagaucuaccacaagugcgacaacgccugcaucggcagcaucagaaacggcaccuacgaccacgacguguacagagacgaggcccugaacaacagauuccagaucaagggcguggagcugaagagcggcuacaaggacuggauccuguggaucagcuucgccaucagcugcuuccugcugugcguggcccugcugggcuucaucaugugggccugccagaagggcaacaucagaugcaacaucugcaucuga

SEQ ID NO: 161596 - RNA, 1698 nt, Artificial Sequence; identical to SEQ ID NO: 160359
  derived and/or modified CDS sequence (opt4) from hemagglutinin__InfluenzaA__ABM67051

SEQ ID NO: 161597 - RNA, 1707 nt, Artificial Sequence
  derived and/or modified CDS sequence (opt4) from hemagglutinin__InfluenzaA__ABM90467
auggagaagaucgugcugcugcugagcaucgugagccuggugaagagcgaccagaucugcaucggcuaccacgccaacaacagcaccgagcagguggacaccaucauggagaagaacgugaccgugacccacgcccaggacauccuggagaagacccacaacggcaagcugugcgaccuggacggcgugaagccccugauccugagagacugcagcguggccggcuggcugcugggcaaccccaugugcgacgaguucaucaacgugcccgaguggagcuacaucguggagaaggccaaccccaccaacgaccugugcuaccccggcagcuucaacgacuacgaggagcugaagcaccugcugagcagaaucaaccacuucgagaagauccagaucauccccaagagcagcuggagcgaccacgaggccagcagcggcgugagcagcgccugccccuaccugggcagccccagcuucuucagaaacgugguguggcugaucaagaagaacagcaccuaccccaccaucaagaagagcuacaacaacaccaaccaggaggaccugcuggugcuguggggcauccaccaccccaacaacgaggccgagcagaccagacuguaccagaaccccaccaccuacaucagcaucggcaccagcacccugaaccagagacuggugcccaagaucgccaccagaagcaaggugaacggccagagcggcagaauggaguucuucuggaccauccugaagcccaacgacgccaucaacuucgagagcaacggcaacuucaucgcccccgaguacgccuacaagaucgugaagaagggcgacagcgccaucaugaagagcgagcuggaguacggcaacugcaacaccaagugccagacccccaugggcgccaucaacagcagcaugcccuuccacaacauccacccccugaccaucggcgagugccccaaguacgugaagagcaacagacuggugcuggccaccggccugagaaacagcccccagagagagagcagaagaaagaagagaggccuguucggcgccaucgccggcuucaucgagggcggcuggcagggcaugguggacggcugguacggcuaccaccacagcaacgagcagggcagcggcuacgccgccgacaaggagagcacccagaaggccaucgacggcgugaccaacaaggugaacagcaucaucgacaagaugaacacccaguucgaggccgugggcagagaguucaacaaccuggagagaagaaucgagaaccugaacaagaagauggaggacggcuuccuggacguguggaccuacaacgccgagcugcuggugcugauggagaacgagagaacccuggacuuccacgacagcaacgugaagaaccuguacgacaaggugagacugcagcugagagacaacgccaaggagcugggcaacggcugcuucgaguucuaccacaagugcgacaacgagugcauggagagcaucagaaacggcaccuacaacuacccccaguacagcgaggaggccagacugaagagagaggagaucagcggcgugaagcuggagagcaucggcaccuaccagauccugagcaucuacagcaccguggccagcagccuggcccuggccaucaugaucgccggccugagccuguggaugugcagcaacggcagccugcagugcagaaucugcaucuga

SEQ ID NO: 161598 - RNA, 1707 nt, Artificial Sequence
  derived and/or modified CDS sequence (opt4) from hemagglutinin__InfluenzaA__ABM90511
auggagaagaucgugcugcugcugagcaucgugagccuggugaagagcgaccagaucugcaucggcuaccacgccaacaacagcaccgagcagguggacaccaucaucgagaagaacgugaccgugacccacgcccaggacauccuggagaagacccacaacggcaagcugugcgaccuggacggcgugaagccccugauccugaaggacugcagcguggccggcuggcugcugggcaaccccaugugcgacgaguucaucaacgugcccgaguggagcuacaucguggagaaggccaaccccaccaacgaccugugcuaccccggcagcuucaacgacuacgaggagcugaagcaccugcugagcagaaucaaccacuucgagaagauccagaucauccccaagagcagcuggagcgaccacgaggccagcagcggcgugagcagcgccugccccuaccugggcagccccagcuucuucagaaacgugguguggcugaucaagaagaacagcaccuaccccaccaucaagaagagcuacaacaacaccaaccaggaggaccugcuggugcuguggggcauccaccaccccaacaacgaggaggagcagaccagacuguaccagaaccccaccaccuacaucagcaucggcaccagcacccugaaccagagacuggugcccaagaucgccaccagaagcaaggugaacggccagagcggcagaauggaguucuucuggaccauccugaagcccaacgacgccaucaacuucgagagcaacggcaacuucaucgcccccgaguacgccuacaagaucgugaagaagggcgacagcgccaucaugaagagcgagcuggaguacagcaacugcaacaccaagugccagacccccaugggcgccaucaacagcagcaugcccuuccacaacauccacccccugaccaucggcgagugccccaaguacgugaagagcagcagacuggugcuggccaccggccugagaaacagcccccagagagagagcagaagaaagaagagaggccuguucggcgccaucgccggcuucaucgagggcggcuggcagggcaugguggacggcugguacggcuaccaccacagcaacgagcagggcagcggcuacgccgccgacaaggagagcacccagaaggccaucgacggcgugaccaacaaggugaacagcaucaucgacaagaugaacacccaguucgaggccgugggcagagaguucaacaaccuggagagaagaaucgagaaccugaacaagaagauggaggacggcuuccuggacguguggaccuacaacgccgagcugcuggugcugauggagaacgagagaacccuggacuuccacgacagcaacgugaagaaccuguacgacaaggugagacugcagcugagagacaacgccaaggagcugggcaacggcugcuucgaguucuaccacaagugcgacaacgagugcauggagagcaucagaaacggcaccuacaacuacccccaguacagcgaggaggccagacugaagagagaggagaucagcggcgugaagcuggagagcaucggcaccuaccagauccugagcaucuacagcaccguggccagcagccuggcccuggccaucaugaucgccggccugagccuguggaugugcagcaacggcagccugcagugcagaaucugcaucuga

SEQ ID NO: 161599 - RNA, 1707 nt, Artificial Sequence
  derived and/or modified CDS sequence (opt4) from hemagglutinin__InfluenzaA__ABM90533
auggagaagaucgugcugcugcugagcaucgugagccuggugaagagcgaccagaucugcaucggcuaccacgccaacaacagcaccgagcagguggacaccaucauggagaagaacgugaccgugacccacgcccaggacauccuggagaagacccacaacggcaagcugugcgaccuggacggcgugaagccccugauccugaaggacugcagcguggccggcuggcugcugggcaaccccaugugcgacgaguucaucaacgugcccgaguggagcuacaucguggagaaggccaaccccaccaacgaccugugcuaccccggcagcuucaacgacuacgaggagcugaagcaccugcugagcagaaucaaccacuucgagaagauccagaucauccccaagagcagcuggagcgaccacgaggccagcagcggcgugagcagcgccugccccuaccugggcagccccagcuucuucagaaacgugguguggcugaucaagaagaacagcaccuaccccaccaucaagaagagcuacaacaacaccaaccaggaggaccugcuggugcuguggggcauccaccaccccaacaacgaggaggagcagaccagacuguaccagaaccccaccaccuacaucagcaucggcaccagcacccugaaccagagacuggugcccaagaucgccaccagaagcaaggugaacggccagagcggcagaauggaguucuucuggaccauccugaagcccaacgacgccaucaacuucgagagcaacggcaacuucaucgcccccgaguacgccuacaagaucgugaagaagggcgacagcgccaucaugaagagcgagcuggaguacagcaacugcaacaccaagugccagacccccaugggcgccaucaacagcagcaugcccuuccacaacauccacccccugaccaucggcgagugccccaaguacgugaagagcagcagacuggugcuggccaccggccugagaaacagcccccagagagagagcagaagaaagaagagaggccuguucggcgccaucgccggcuucaucgagggcggcuggcagggcaugguggacggcugguacggcuaccaccacagcaacgagcagggcagcggcuacgccgccgacaaggagagcacccagaaggccaucgacggcgugaccaacaaggugaacagcaucaucgacaagaugaacacccaguucgaggccgugggcagagaguucaacaaccuggagagaagaaucgagaaccugaacaagaagauggaggacggcuuccuggacguguggaccuacaacgccgagcugcuggugcugauggagaacgagagaacccuggacuuccacgacagcaacgugaagaaccuguacgacaaggugagacugcagcugagagacaacgccaaggagcugggcaacggcugcuucgaguucuaccacaagugcgacaacgagugcauggagagcaucagaaacggcaccuacaacuacccccaguacagcgaggaggccagacugaagagagaggagaucagcggcgugaagcuggagagcaucggcaccuaccagauccugagcaucuacagcaccguggccagcagccuggcccuggccaucaugaucgccggccugagccuguggaugugcagcaacggcagccugcagugcagaaucugcaucuga

SEQ ID NO: 161600 - RNA, 1707 nt, Artificial Sequence; identical to SEQ ID NO: 161599
  derived and/or modified CDS sequence (opt4) from hemagglutinin__InfluenzaA__ABM90544

SEQ ID NO: 161601 - RNA, 1701 nt, Artificial Sequence
  derived and/or modified CDS sequence (opt4) from hemagglutinin__InfluenzaA__ABN50900
augaaggccaagcugcuggugcugcugugcgcccugagcgccaccgacgccgacaccaucugcaucggcuaccacgccaacaacagcaccgacaccguggacaccgugcuggagaagaacgugaccgugacccacagcgugaaccugcuggaggacagccacaacggcaagcugugcagacugaagggcaucgccccccugcagcugggcaagugcagcaucgccggcuggauccugggcaaccccgagugcgagagccuguucagcaagaagagcuggagcuacaucgccgagacccccaacagcgagaacggcaccugcuaccccggcuacuucgccgacuacgaggagcugagagagcagcugagcagcgugagcagcuucgagagauucgagaucuuccccaaggagagcagcuggcccaagcacaacgugaccagaggcgugaccgccagcugcagccacaagggcaagagcagcuucuacagaaaccugcuguggcugaccgagaagaacggcagcuaccccaaccugagcaagagcuacgugaacaacaaggagaaggaggugcuggugcuguggggcgugcaccaccccagcaacaucgaggaccagaagaccaucuacagaaaggagaacgccuacgugagcguggugagcagccacuacaacagaagauucacccccgagaucgccaagagacccaaggugagaggccaggagggcagaaucaacuacuacuggacccugcuggagcccggcgacaccaucaucuucgaggccaacggcaaccugaucgcccccugguacgccuucgcccugagcagaggcuucggcagcggcaucaucaccagcaacgccagcauggacgagugcgacgccaagugccagaccccccagggcgccaucaacagcagccugcccuuccagaacgugcaccccgugaccaucggcgagugccccaaguacgugagaagcaccaagcugagaauggugaccggccugagaaacauccccagcauccagagcagaggccuguucggcgccaucgccggcuucaucgagggcggcuggaccggcaugaucgacggcugguacggcuaccaccaccagaacgagcagggcagcggcuacgccgccgaccagaagagcacccagaacgccaucaacggcaucaccaacaaggugaacagcgugaucgagaagaugaacacccaguucaccgccgugggcaaggaguucaacaagcuggagaagagaauggagaaccugaacaagaagguggacgacggcuuccuggacaucuggaccuacaacgccgagcugcuggugcugcuggagaacgagagaacccuggacuuccacgacagcaacgugaagaaccuguacgagaaggugaagagccagcugaagaacaacgccaaggagaucggcaacggcugcuucgaguucuaccacaagugcaacaacgagugcauggagagcgugaagaacggcaccuacgacuaccccaaguacagcgaggagagcaagcugaacagagagaagaucgacggcgugaagcuggagagcaugggcguguaccagauccuggccaucuacagcaccguggccagcagccuggugcugcuggugagccugggcgccaucagcuucuggaugugcagcaacggcagccugcagugcagaaucugcaucuga

SEQ ID NO: 161602 - RNA, 1701 nt, Artificial Sequence; identical to SEQ ID NO: 160981
  derived and/or modified CDS sequence (opt4) from hemagglutinin__InfluenzaA__ABN50917

SEQ ID NO: 161603 - RNA, 1701 nt, Artificial Sequence
  derived and/or modified CDS sequence (opt4) from hemagglutinin__InfluenzaA__ABN50928
augaaggccaagcugcugauccugcugugcgccuucaccgccaccgacgccgacaccaucugcaucggcuaccacgccaacaacagcaccgacaccguggacaccgugcuggagaagaacgugaccgugacccacagcgugaaccugcuggaggacagccacaacggcaagcugugcagacugaagggcaucgccccccugcagcugggcaacugcagcaucgccggcuggauccugggcaaccccgagugcgagagccuguucagcaagaagagcuggagcuacaucgccgagacccccaacagcgagaacggcaccugcuaccccggcuacuucgccgacuacgaggagcugagagagcagcugagcagcgugagcagcuucgagagauucgagaucuuccccaaggagagcagcuggcccaaccacaccgugaccaagggcgugaccgccagcugcagccacaagggcaagagcagcuucuacagaaaccugcuguggcugaccgagaagaacggcagcuaccccaaccugagcaagagcuacgugaacaacaaggagaaggaggugcuggugcuguggggcgugcaccaccccagcaacaucggcgaccagagagccaucuaccacaccgagaacgccuacgugagcguggugagcagccacuacaacagaagauucacccccgagaucgccaagagacccaaggugagaggccaggagggcagaaucaacuacuacuggacccugcuggagcccggcgacaccaucaucuucgaggccaacggcaaccugaucgcccccugguacgccuucgcccugagcagaggcuucggcagcggcaucaucaccagcaacgccagcauggacgagugcgacgccaagugccagaccccccagggcgccaucaacagcagccugcccuuccagaacgugcaccccgugaccaucggcgagugccccaaguacgugagaagcaccaagcugagaauggugaccggccugagaaacauccccagcauccagagcagaggccuguucggcgccaucgccggcuucaucgagggcggcuggaccggcaugaucgacggcugguacggcuaccaccaccagaacgagcagggcagcggcuacgccgccgaccagaagagcacccagaacgccaucaacggcaucaccaacaaggugaacagcgugaucgagaagaugaacacccaguucaccgccgugggcaaggaguucaacaagcuggagagaagaauggagaaccugaacaagaagguggacgacggcuuccuggacaucuggaccuacaacgccgagcugcuggugcugcuggagaacgagagaacccuggacuuccacgacagcaacgugaagaaccuguacgagaaggugaagagccagcugaagaacaacgccaaggagaucggcaacggcugcuucgaguucuaccacaagugcaacaacgagugcauggagagcgugaagaacggcaccuacgacuaccccaaguacagcgaggagagcaagcugaacagagagaagaucgacggcgugaagcuggagagcaugggcguguaccagauccuggccaucuacagcaccguggccagcagccuggugcugcuggugagccugggcgccaucagcuucuggaugugcagcaacggcagccugcagugcagaaucugcaucuga

SEQ ID NO: 161604 - RNA, 1701 nt, Artificial Sequence
  derived and/or modified CDS sequence (opt4) from hemagglutinin__InfluenzaA__ABN50940
augaaggccaagcugcuggugcugcugugcgccuucaccgccaccgacgccgacaccaucugcaucggcuaccacgccaacaacagcaccgacaccguggacaccgugcuggagaagaacgugaccgugacccacagcgugaaccugcuggaggacagccacaacggcaagcugugcagacugaagggcaucgccccccugcagcugggcaacugcagcaucgccggcuggauccugggcaaccccgagugcgagagccuguucagcaagaagagcuggagcuacaucgccgagacccccaacagcgagaacggcaccugcuaccccggcuacuucagcgacuacgaggagcugagagagcagcugagcagcgugagcagcuucgagagauucgagaucuuccccaaggagagcagcuggcccaaccacaccgugaccaagggcgugaccgccagcugcagccacaagggcaagagcagcuucuacagaaaccugcuguggcugaccgagaagaacggcagcuaccccaaccugagcaagagcuacgugaacaacaaggagaaggaggugcuggugcuguggggcgugcaccaccccagcaacaucggcgaccagagagccaucuaccacaccgagaacgccuacgugagcguggugagcagccacuacaacagaagauucacccccgagaucgccaagagacccaaggugagagaccaggagggcagaaucaacuacuacuggacccugcuggagcccgaggacaccaucaucuucgaggccaacggcaaccugaucgcccccugguacgccuucgcccugagcagaggcuucggcagcggcaucaucaccagcaacgccagcauggacgagugcgacgccaagugccagaccccccagggcgccaucaacagcagccugcccuuccagaacgugcaccccgugaccaucggcgagugccccaaguacgugagaagcaccaagcugagaauggugaccggccugagaaacauccccagcauccagagcagaggccuguucggcgccaucgccggcuucaucgagggcggcuggaccggcaugaucgacggcugguacggcuaccaccaccagaacgagcagggcagcggcuacgccgccgaccagaagagcacccagaacgccaucaacggcaucaccaacaaggugaacagcgugaucgagaagaugaacacccaguucaccgccgugggcaaggaguucaacaagcuggagagaagaauggagaaccugaacaagaagguggacgacggcuuccuggacaucuggaccuacaacgccgagcugcuggugcugcuggagaacgagagaacccuggacuuccacgacagcaacgugaagaaccuguacgagaaggugaagagccagcugaagaacaacgccaaggagaucggcaacggcugcuucgaguucuaccacaagugcaacaacgagugcauggagagcgugaagaacggcaccuacgacuaccccaaguacagcgaggagagcaagcugaacagagagaagaucgacggcgugaagcuggagagcaugggcguguaccagauccuggccaucuacagcaccguggccagcagccuggugcugcuggugagccugggcgccaucagcuucuggaugugcagcaacggcagccugcagugcagaaucugcaucuga

SEQ ID NO: 161605 - RNA, 1701 nt, Artificial Sequence; identical to SEQ ID NO: 161571
  derived and/or modified CDS sequence (opt4) from hemagglutinin__InfluenzaA__ABN50951

SEQ ID NO: 161606 - RNA, 1701 nt, Artificial Sequence
  derived and/or modified CDS sequence (opt4) from hemagglutinin__InfluenzaA__ABN50962
augaaggccaagcugcuggugcugcugugcgccuucaccgccaccuacgccgacaccaucugcaucggcuaccacgccaacaacagcaccgacaccguggacaccgugcuggagaagaacgugaccgugacccacagcgugaaccugcuggaggacagccacaacggcaagcugugcagacugaagggcaccgccccccugcagcugggcaacugcagcguggccggcuggauccugggcaaccccgagugcgagagccuguucagcaaggagagcuggagcuacaucgccgagacccccaaccccgagaacggcaccugcuaccccggcuacuucgccgacuacgaggagcugagagagcagcugagcagcgugagcagcuucgagagauucgagaucuuccccaaggagagcagcuggcccaaccacaccgugaccaagggcgugaccgccagcugcagccacaacggcaagagcagcuucuacaagaaccugcuguggcugaccgagaagaacggccuguaccccaaccugagcaagagcuacgugaacaacaaggagaaggaggugcuggugcuguggggcgugcaccaccccagcaacaucggcgaccagagagccaucuaccacaccgagaacgccuacgugagcguggugagcagccacuacagcagaagauucacccccgagaucgccaagagacccaaggugagagaccaggagggcagaaucaacuacuacuggacccugcuggagcccggcgacaccaucaucuucgaggccaacggcaaccugaucgcccccugguacgccuucgcccugagcagaggcuucggcagcggcaucaucaccagcaacgccagcaugggcgagugcgacgccaagugccagaccccccagggcgccaucaacagcagccugcccuuccagaacgugcaccccgugaccaucggcgagugccccaaguacgugagaagcaccaagcugagaauggugaccggccugagaaacauccccagcauccagagcagaggccuguucggcgccaucgccggcuucaucgagggcggcuggaccggcaugaucgacggcugguacggcuaccaccaccagaacgagcagggcagcggcuacgccgccgacaagaagagcacccagaacgccaucgacggcaucaccaacaaggugaacagcgugaucgagaagaugaacacccaguucaccgccgugggcaaggaguucaacaagcuggagagaagaauggagaaccugaacaagaagguggacgacggcuuccuggacaucuggaccuacaacgccgagcugcuggugcugcuggagaacgagagaacccuggacuuccacgacagcaacgugaagaaccuguacgagaaggugaagaaccagcugaagaacaacgccaaggagaucggcaacggcugcuucgaguucuaccacaagugcaacaacgagugcauggagagcgugaagaacggcaccuacgacuaccccaaguacagcgaggagagcaagcugaagagagagaagaucgacggcgugaagcuggagagcaugggcguguaccagauccuggccaucuacagcaccguggccagcagccuggugcugcuggugagccugggcgccaucagcuucuggaugugcagcaacggcagccugcagugcagaaucugcaucuga

SEQ ID NO: 161607 - RNA, 1701 nt, Artificial Sequence; identical to SEQ ID NO: 160970
  derived and/or modified CDS sequence (opt4) from hemagglutinin__InfluenzaA__ABN50973

SEQ ID NO: 161608 - RNA, 1701 nt, Artificial Sequence; identical to SEQ ID NO: 160315
  derived and/or modified CDS sequence (opt4) from hemagglutinin__InfluenzaA__ABN50984

SEQ ID NO: 161609 - RNA, 1701 nt, Artificial Sequence; identical to SEQ ID NO: 160316
  derived and/or modified CDS sequence (opt4) from hemagglutinin__InfluenzaA__ABN50995

SEQ ID NO: 161610 - RNA, 1701 nt, Artificial Sequence
  derived and/or modified CDS sequence (opt4) from hemagglutinin__InfluenzaA__ABN51043
augaagaccaucaucgcccugagcuacauccugugccugguguucgcccagaagcugcccggcaacgacaacagcaccgccacccugugccugggccaccacgccgugcccaacggcaccaucgugaagaccaucaccaacgaccagaucgaggugaccaacgccaccgagcuggugcagagcagcagcaccggcgagaucugcgacagcccccaccagauccuggacggcgagaacugcacccugaucgacgcccugcugggcgacccccagugcgacggcuuccagaacaagaagugggaccuguucguggagagaagcaaggccuacagcaacugcuaccccuacgacgugcccgacuacgccagccugagaagccugguggccagcagcggcacccuggaguucaacaacgagagcuucaacuggaccggcgugacccagaacggcaccagcagcgccugcaagagaagaagcaacaacagcuucuucagcagacugaacuggcugacccaccugaaguucaaguaccccgcccugaacgugaccaugcccaacaacgagaaguucgacaagcuguacaucuggggcgugcaccaccccggcaccgacaacgaccagaucuuccuguacgcccaggccagcggcagaaucaccgugagcaccaagagaagccagcagaccgugauccccaacaucggcagcagacccagagugagagacauccccagcagaaucagcaucuacuggaccaucgugaagcccggcgacauccugcugaucaacagcaccggcaaccugaucgcccccagaggcuacuucaagaucagaagcggcaagagcagcaucaugagaagcgacgcccccaucggcaagugcaacagcgagugcaucacccccaacggcagcauccccaacgacaagcccuuccagaacgugaacagaaucaccuacggcgccugccccagauacgugaagcagaacacccugaagcuggccaccggcaugagaaacgugcccgagaagcagaccagaggcaucuucggcgccaucgccggcuucaucgagaacggcugggagggcaugguggacggcugguacggcuucagacaccagaacagcgagggcaucggccaggccgccgaccugaagagcacccaggccgccaucaaccagaucaacggcaagcugaacagacugaucggcaagaccaacgagaaguuccaccagaucgagaaggaguucagcgagguggagggcagaauccaggaccuggagaaguacguggaggacaccaagaucgaccuguggagcuacaacgccgagcugcugguggcccuggagaaccagcacaccaucgaccugaccgacagcgagaugaacaagcuguucgagagaaccaagaagcagcugagagagaacgccgaggacaugggcaacggcugcuucaagaucuaccacaagugcgacaacgccugcaucggcagcaucagaaacggcaccuacgaccacgacguguacagagacgaggcccugaacaacagauuccagaucaagggcguggagcugaagagcggcuacaaggacuggauccuguggaucagcuucgccaucagcugcuuccugcugugcguggugcugcugggcuucaucaugugggccugccagaagggcaacaucagaugcaacaucugcaucuga

SEQ ID NO: 161611 - RNA, 1701 nt, Artificial Sequence; identical to SEQ ID NO: 161456
  derived and/or modified CDS sequence (opt4) from hemagglutinin__InfluenzaA__ABN51054

SEQ ID NO: 161612 - RNA, 1701 nt, Artificial Sequence
  derived and/or modified CDS sequence (opt4) from hemagglutinin__InfluenzaA__ABN51066
augaaggccaagcugcuggugcugcugugcgccuucaccgccaccuacgccgacaccaucugcaucggcuaccacgccaacaacagcaccgacaccguggacaccgugcuggagaagaacgugaccgugacccacagcgugaaccugcuggaggacagccacaacggcaagcugugcagacugaagggcaccgccccccugcagcugggcaacugcagcguggccggcuggauccugggcaaccccgagugcgagagccuguucagcaaggagagcuggagcuacaucgccgagacccccaaccccgagaacggcaccugcuaccccggcuacuucgccgacuacgaggagcugagagagcagcugagcagcgugagcagcuucgagagauucgagaucuuccccaagaagagcagcuggcccaaccacaccgugaccaagggcgugaccgccagcugcagccacaacggcaagagcagcuucuacaagaaccugcuguggcugaccgagaagaacggccuguaccccaaccugagcaagagcuacgugaacaacaaggagaaggaggugcuggugcuguggggcgugcaccaccccagcaacaucggcgaccagagaaccaucuaccacaccgagaacgccuacgugagcguggugagcagccacuacagcagaagauucacccccgagaucgccaagagacccaaggugagagaccaggagggcagaaucaacuacuacuggacccugcuggagcccggcgacaccaucaucuucgaggccaacggcaaccugaucgcccccugguacgccuucgcccugagcagaggcuucggcagcggcaucaucaccagcaacgccagcaugggcgacugcgacgccaagugccagaccccccagggcgccaucaacagcagccugcccuuccagaacgugcaccccgugaccaucggcgagugccccaaguacgugagaagcaccaagcugagaauggugaccggccugagaaacauccccagcauccagagcagaggccuguucggcgccaucgccggcuucaucgagggcggcuggaccggcaugaucgacggcugguacggcuaccaccaccagaacgagcagggcagcggcuacgccgccgacaagaagagcacccagaacgccaucgacggcaucaccaacaaggugaacagcgugaucgagaagaugaacacccaguucaccgccgugggcaaggaguucaacaagcuggagagaagaauggagaaccugaacaagaagguggacgacggcuuccuggacaucuggaccuacaacgccgagcugcuggugcugcuggagaacgagagaacccuggacuuccacgacagcaacgugaagaaccuguacgagaaggugaagaaccagcugaagaacaacgccaaggagaucggcaacggcugcuucgaguucuaccacaagugcaacaacgagugcaucgagagcgugaagaacggcaccuacgacuaccccaaguacagcgaggagagcaagcugaagagagagaagaucgacggcgugaagcuggagagcaugggcguguaccagauccuggccaucuacagcaccguggccagcagccuggugcugcuggugagccugggcgccaucggcuucuggaugugcagcaacggcagccugcagugcagaaucugcaucuga

SEQ ID NO: 161613 - RNA, 1698 nt, Artificial Sequence; identical to SEQ ID NO: 160356
  derived and/or modified CDS sequence (opt4) from hemagglutinin__InfluenzaA__ABN51077

SEQ ID NO: 161614 - RNA, 1698 nt, Artificial Sequence; identical to SEQ ID NO: 160359
  derived and/or modified CDS sequence (opt4) from hemagglutinin__InfluenzaA__ABN51088

SEQ ID NO: 161615 - RNA, 1701 nt, Artificial Sequence
  derived and/or modified CDS sequence (opt4) from hemagglutinin__InfluenzaA__ABN51099
augaagaccaucaucgcccugagcuacaucuucugccuggcccugggccaggaccugcccggcaacgacaacagcaccgccacccugugccugggccaccacgccgugcccaacggcacccuggugaagaccaucaccaacgaccagaucgaggugaccaacgccaccgagcuggugcagagcagcagcaccggcaagaucugcaacaacccccacagaauccuggacggcaucgacugcacccugaucgacgcccugcugggcgacccccacugcgacguguuccagaacgagaccugggaccuguucguggagagaagcaaggccuucagcaacugcuaccccuacgacgugcccgacuacgccagccugagaagccugguggccagcagcggcacccuggaguucaucaccgagggcuucaccuggaccggcgugacccagaacggcggcagcaacgccugcaagagaggccccggcagcggcuucuucagcagacugaacuggcugaccaagagcggcagcaccuaccccgugcugaacgugaccaugcccaacaacgacaacuucgacaagcuguacaucuggggcgugcaccaccccagcaccaaccaggagcagaccagccuguacgugcaggccagcggcagagugaccgugagcaccagaagaagccagcagaccaucauccccaacaucggcagcagacccugggugagaggccugagcagcagaaucagcaucuacuggaccaucgugaagcccggcgacgugcuggugaucaacagcaacggcaaccugaucgcccccagaggcuacuucaagaugagaaccggcaagagcagcaucaugagaagcgacgcccccaucgacaccugcaucagcgagugcaucacccccaacggcagcauccccaacgacaagcccuuccagaacgugaacaagaucaccuacggcgccugccccaaguacgugaagcagaacacccugaagcuggccaccggcaugagaaacgugcccgagaagcagaccagaggccuguucggcgccaucgccggcuucaucgagaacggcugggagggcaugaucgacggcugguacggcuucagacaccagaacagcgagggcaccggccaggccgccgaccugaagagcacccaggccgccaucgaccagaucaacggcaagcugaacagagugaucgagaagaugaacgagaaguuccaccagaucgagaaggaguucagcgagguggagggcagaauccaggaccuggagaaguacguggaggacaccaagaucgaccuguggagcuacaacgccgagcugcugguggcccuggagaaccagcacaccaucgaccugaccgacagcgagaugaacaagcuguucgagaagaccagaagacagcugagagagaacgccgaggacaugggcaacggcugcuucaagaucuaccacaagugcgacaacgccugcaucgagagcaucagaaacggcaccuacgaccacgacguguacagagacgaggcccugaacaacagauuccagaucaagggcguggagcugaagagcggcuacaaggacuggauccuguggaucagcuucgccaucagcugcuuccugcugugcguggugcugcugggcuucaucaugugggccugccagagaggcaacaucagaugcaacaucugcaucuga

SEQ ID NO: 161616 - RNA, 1701 nt, Artificial Sequence
  derived and/or modified CDS sequence (opt4) from hemagglutinin__InfluenzaA__ABN51110
augaagaccaucaucgcccugagcuacaucuucugccuggcccugggccaggaccugcccggcaacgacaacagcaccgccacccugugccugggccaccacgccgugcccaacggcacccuggugaagaccaucaccgacgaccagaucgaggugaccaacgccaccgagcuggugcagagcagcagcaccggcaagaucugcaacaacccccacagaauccuggacggcaucaacugcacccugaucgacgcccugcugggcgacccccacugcgacguguuccaggacgagaccugggaccuguucguggagagaagcaaggccuucagcaacugcuaccccuacgacgugcccgacuacgccagccugagaagccugguggccagcagcggcacccuggaguucaucaccgagggcuucaccuggaccggcgugacccagaacggcggcagcaacgccugcaagagaggccccggcagcggcuucuucagcagacugaacuggcugaccaagagcggcagcaccuaccccgugcugaacgugaccaugcccaacaacgacaacuucgacaagcuguacaucuggggcgugcaccaccccagcaccaaccaggagcagaccagccuguacgugcaggccagcggcagagugaccgugagcaccagaagaagccagcagaccaucauccccaacaucggcagcagacccugggugagaggccugagcagcagaaucagcaucuacuggaccaucgugaagcccggcgacgugcuggugaucaacagcaacggcaaccugaucgcccccagaggcuacuucaagaugagaaccggcaagagcagcaucaugagaagcgacgcccccaucgacaccugcaucagcgagugcaucacccccaacggcagcauccccaacgacaagcccuuccagaacgugaacaagaucaccuacggcgccugccccaaguacgugaagcagaacacccugaagcuggccaccggcaugagaaacgugcccgagaagcagaccagaggccuguucggcgccaucgccggcuucaucgagaacggcugggagggcaugaucgacggcugguacggcuucagacaccagaacagcgagggcaccggccaggccgccgaccugaagagcacccaggccgccaucgaccagaucaacggcaagcugaacagagugaucgagaagaccaacgagaaguuccaccagaucgagaaggaguucagcgagguggagggcagaauccaggaccuggagaaguacguggaggacaccaagaucgaccuguggagcuacaacgccgagcugcugguggcccuggagaaccagcacaccaucgaccugaccgacagcgagaugaacaagcuguucgagaagaccagaagacagcugagagagaacgccgaggacaugggcaacggcugcuucaagaucuaccacaagugcgacaacgccugcaucgagagcaucagaaacggcaccuacgaccacgacguguacagagacgaggcccugaacaacagauuccagaucaagggcguggagcugaagagcggcuacaaggacuggauccuguggaucagcuucgccaucagcugcuuccugcugugcguggugcugcugggcuucaucaugugggccugccagagaggcaacaucagaugcaacaucugcaucuga

SEQ ID NO: 161617 - RNA, 1701 nt, Artificial Sequence
  derived and/or modified CDS sequence (opt4) from hemagglutinin__InfluenzaA__ABN51121
augaagaccaucaucgcccugagcuacaucuucugccuggcccugggccaggaccugcccggcaacgacaacagcaccgccacccugugccugggccaccacgccgugcccaacggcacccuggugaagaccaucaccgacgaccagaucgaggugaccaacgccaccgagcuggugcagagcagcagcaccggcaagaucugcaacaacccccacagaauccuggacggcaucaacugcacccugaucgacgcccugcugggcgacccccacugcgacguguuccaggacgagaccugggaccuguucguggagagaagcaaggccuucagcaacugcuaccccuacgacgugcccgacuacgccagccugagaagccugguggccagcagcggcacccuggaguucaucaccgagggcuucaccuggaccggcgugacccagaacggcggcagcaacgccugcaagagaggccccggcagcggcuucuucagcagacugaacuggcugaccaagagcggcagcaccuaccccgugcugaacgugaccaugcccaacaacgacaacuucgacaagcuguacaucuggggcgugcaccaccccagcaccaaccaggagcagaccagccuguacgugcaggccagcggcagagugaccgugagcaccagaagaagccagcagaccaucauccccaacaucggcagcagacccugggugagaggccugagcagcagaaucagcaucuacuggaccaucgugaagcccggcgacgugcuggugaucaacagcaacggcaaccugaucgcccccagaggcuacuucaagaugagaaccggcaagagcagcaucaugagaagcgacgcccccaucgacaccugcaucagcgagugcaucacccccaacggcagcauccccaacgacaagcccuuccagaacgugaacaagaucaccuacggcaccugccccaaguacgugaagcagaacacccugaagcuggccaccggcaugagaaacgugcccgagaagcagaccagaggccuguucggcgccaucgccggcuucaucgagaacggcugggagggcaugaucgacggcugguacggcuucagacaccagaacagcgagggcaccggccaggccgccgaccugaagagcacccaggccgccaucgaccagaucaacggcaagcugaacagagugaucgagaagaccaacgagaaguuccaccagaucgagaaggaguucagcgagguggagggcagaauccaggaccuggagaaguacguggaggacaccaagaucgaccuguggagcuacaacgccgagcugcugguggcccuggagaaccagcacaccaucgaccugaccgaccuggagaugaacaagcuguucgagaagaccagaagacagcugagagagaacgccgaggacaugggcaacggcugcuucaagaucuaccacaagugcgacaacgccugcaucgagagcaucagaaacggcaccuacgaccacgacguguacagagacgaggcccugaacaacagauuccagaucaagggcguggagcugaagagcggcuacaaggacuggauccuguggaucagcuucgccaucagcugcuuccugcugugcguggugcugcugggcuucaucaugugggccugccagagaggcaacaucagaugcaacaucugcaucuga

SEQ ID NO: 161618 - RNA, 1701 nt, Artificial Sequence
  derived and/or modified CDS sequence (opt4) from hemagglutinin__InfluenzaA__ABN51132
augaagaccaucaucgcccugagcuacaucuucugccuggcccugggccaggaccugcccggcaacgacaacagcaccgccacccugugccugggccaccacgccgugcccaacggcacccuggugaagaccaucaccgacgaccagaucgaggugaccaacgccaccgagcuggugcagagcagcagcaccggcaagaucugcaacaacccccacagaauccuggacggcaucaacugcacccugaucgacgcccugcugggcgacccccacugcgacguguuccaggacgagaccugggaccuguucguggagagaagcaaggccuucagcaacugcuaccccuacgacgugcccgacuacgccagccugagaagccugguggccagcagcggcacccuggaguucaucaccgagggcuucaccuggaccggcgugacccagaacggcggcagcaacgccugcaagagaggccccggcagcggcuucuucagcagacugaacuggcugaccaagagcggcagcaccuaccccgugcugaacgugaccaugcccaacaacgacaacuucgacaagcuguacaucuggggcgugcaccaccccagcaccaaccaggagcagaccagccuguacgugcaggccagcggcagagugaccgugagcaccagaagaagccagcagaccaucauccccaacaucggcagcagacccugggugagaggccugagcagcagaaucagcaucuacuggaccaucgugaagcccggcgacgugcuggugaucaacagcaacggcaaccugaucgcccccagaggcuacuucaagaugagaaccggcaagagcagcaucaugagaagcgacgccagcaucgacaccugcaucagcgagugcaucacccccaacggcagcauccccaacgacaagcccuuccagaacgugaacaagaucaccuacggcgccugccccaaguacgugaagcagaacacccugaagcuggccaccggcaugagaaacgugcccgagaagcagaccagaggccuguucggcgccaucgccggcuucaucgagaacggcugggagggcaugaucgacggcugguacggcuucagacaccagaacagcgagggcaccggccaggccgccgaccugaagagcacccaggccgccaucgaccagaucaacggcaagcugaacagagugaucgagaagaccaacgagaaguuccaccagaucgagaaggaguucagcgagguggagggcagaauccaggaccuggagaaguacguggaggacaccaagaucgaccuguggagcuacaacgccgagcugcugguggcccuggagaaccagcacaccaucgaccugaccgacagcgagaugaacaagcuguucgagaagaccagaagacagcugagagagaacgccgaggacaugggcaacggcugcuucaagaucuaccacaagugcgacaacgccugcaucgagagcaucagaaacggcaccuacgaccacgacguguacagagacgaggcccugaacaacagauuccagaucaagggcguggagcugaagagcggcuacaaggacuggauccuguggaucagcuucgccaucagcugcuuccugcugugcguggugcugcugggcuucaucaugugggccugccagagaggcaacaucagaugcaacaucugcaucuga

SEQ ID NO: 161619 - RNA, 1698 nt, Artificial Sequence; identical to SEQ ID NO: 160860
  derived and/or modified CDS sequence (opt4) from hemagglutinin__InfluenzaA__ABN51143

SEQ ID NO: 161620 - RNA, 1701 nt, Artificial Sequence
  derived and/or modified CDS sequence (opt4) from hemagglutinin__InfluenzaA__ABN51154
augaagaccaucaucgcccugagcuacauccugugccugguguucacccagaagcugcccggcaacgacaacagcaccgccacccugugccugggccaccacgccgugcccaacggcacccuggugaagaccaucaccaacgaccagaucgaggugaccaacgccaccgagcuggugcagagcagcagcaccggcagaaucugcgacagcccccaccagauccuggacggcgagaacugcacccugaucgacgcccugcugggcgacccccacugcgacggcuuccagaacaaggagugggaccuguucguggagagaagcaaggccuacagcaacugcuaccccuacgacgugcccgacuacgugagccugagaagccugguggccagcagcggcacccuggaguucaacaacgagagcuucaacuggaccggcguggcccagaacggcaccagcagcgccugcaagagaagaagcgacaagagcuucuucagcagacugaacuggcugcaccagcugaaguacaaguaccccgcccugaacgugaccaugcccaacaacgagaaguucgacaagcuguacaucuggggcgugcaccaccccggcaccgacagcgaccagaucagccuguacgcccaggccagcggcagagugaccgugagcaccaagagaagccagcagaccgugauccccaacaucggcagcggccccugggugagaggcgugagcagcagaaucagcaucuacuggaccaucgugaagcccggcgacauccugcugaucaacagcaccggcaaccugaucgcccccagaggcuacuucaagaucagaagcggcaagagcagcaucaugagaagcgacgcccccaucggcaagugcaacagcgagugcaucacccccaacggcagcauccccaacgacaagcccuuccagaacgugaacagaaucaccuacggccccugccccagauacgugaagcagaacacccugaagcuggccaccggcaugagaaacgugcccgagaagcagaccagaggcaucuucggcgccaucgccggcuucaucgagaacggcugggagggcaugauggacggcugguacggcuucagacaccagaacagcgagggcaccggccaggccgccgaccugaagagcacccaggccgccaucaaccagaucaacggcaagcugaacagacugaucgagaagaccaacgagaaguuccaccagaucgagaaggaguucagcgagguggagggcagaauccaggaccuggagaaguacguggaggacaccaagaucgaccuguggagcuacaacgccgagcugcugguggcccuggagaaccagcacaccaucgaccugaccgacagcgagaugaacaagcuguucgagagaaccaagaagcagcugagagagaacgccgaggacaugggcaacggcugcuucaagaucuaccacaagugcgacaacgccugcaucggcagcaucagaaacggcaccuacgaccacgacguguacagagacgaggcccugaacaacagauuccagaucaagggcguggagcugaagagcggcuacaaggacuggauccuguggaucagcuucgccaucagcugcuuccugcugugcaucgugcugcugggcuucaucaugugggccugccagaagggcaacaucagaugcaacaucugcaucuga

SEQ ID NO: 161621 - RNA, 1701 nt, Artificial Sequence
  derived and/or modified CDS sequence (opt4) from hemagglutinin__InfluenzaA__ABN59390
augaagaccaucaucgcccugagcuacaucaucugccugguguucgcccagaagcugcccggcaacgacaacagcaccgccacccugugccugggccaccacgccgugcccaacggcaccaucgugaagaccaucaccaacgaccagaucgaggugaccaacgccaccgagcuggugcagagcagcagcaccggcgagaucugcgacagcccccaccagauccuggacggcgagaacugcacccugaucgacgcccugcugggcgacccccagugcgacggcuuccagaacaagaagugggaccuguucguggagagaagcaaggccuacagcaacugcuaccccuacgacgugcccgacuacgccagccugagaagccugguggccagcagcggcacccuggaguucaacaacgagagcuucaacuggaccggcgugacccagaacggcaccagcagcgccugcaagagaagaagcaacaacagcuucuucagcagacugaacuggcugacccaccugaaguucaaguaccccgcccugaacgugaccaugcccaacaacgagaaguucgacaagcuguacaucuggggcgugcaccaccccggcaccgacaacgaccagaucuuccuguacgcccaggccagcggcagaaucaccgugagcaccaagagaagccagcagaccgugauccccaacaucggcagcagacccagagugagaaacauccccagcagaaucagcaucuacuggaccaucgugaagcccggcgacauccugcugaucaacagcaccggcaaccugaucgcccccagaggcuacuucagaaucagaagcggcaagagcagcaucaugagaagcgacgcccccaucggcaagugcaacagcgagugcaucacccccaacggcagcauccccaacgacaagcccuuccagaacgugaacagaaucaccuacggcgccugccccagauacgugaagcagaacacccugaagcuggccaccggcaugagaaacgugcccgagaagcagaccagaggcaucuucggcgccaucgccggcuucaucgagaacggcugggagggcaugguggacggcugguacggcuucagacaccagaacagcgagggcaucggccaggccgccgaccugaagagcacccaggccgccaucaaccagaucaacggcaagcugaacagacugaucggcaagaccaacgagaaguuccaccagaucgagaaggaguucagcgagguggagggcagaauccaggaccuggagaaguacguggaggacaccaagaucgaccuguggagcuacaacgccgagcugcugguggcccuggagaaccagcacaccaucgaccugaccgacagcgagaugaacaagcuguucgagagaaccaagaagcagcugagagagaacgccgaggacaugggcaacggcugcuucaagaucuaccacaagugcgacaacgccugcaucggcagcaucagaaacggcaccuacgaccacgacguguacagagacgaggcccugaacaacagauuccagaucaagggcguggagcugaagagcggcuacaaggacuggauccuguggaucagcuucgccaucagcugcuuccugcugugcguggcccugcugggcuucaucaugugggccugccagaagggcaacaucagaugcaacaucugcaucuga

SEQ ID NO: 161622 - RNA, 1701 nt, Artificial Sequence
  derived and/or modified CDS sequence (opt4) from hemagglutinin__InfluenzaA__ABN59401
augaaggccaagcugcuggugcugcugugcgcccugagcgccaccgacgccgacaccaucugcaucggcuaccacgccaacaacagcaccgacaccguggacaccgugcuggagaagaacgugaccgugacccacagcgugaaccugcuggaggacagccacaacggcaagcugugcagacugaagggcaucgccccccugcagcugggcaagugcaacaucgccggcuggauccugggcaaccccgagugcgagagccuguucagcaagaagagcuggagcuacaucgccgagacccccaacagcgagaacggcaccugcuaccccggcuacuucgccgacuacgaggagcugagagagcagcugagcagcgugagcagcuucgagagauucgagaucuuccccaaggagagaagcuggcccaagcacaacaucaccagaggcgugaccgccgccugcagccacaagggcaagagcagcuucuacagaaaccugcuguggcugaccgagaagaacggcagcuaccccaaccugaacaagagcuacgugaacaacaaggagaaggaggugcuggugcuguggggcgugcaccaccccagcaacaucgaggaccagaagacccuguacagaaaggagaacgccuacgugagcguggugagcagcaacuacaacagaagauucacccccgagaucgccgagagacccaaggugagaggccaggccggcagaaucaacuacuacuggacccugcuggagcccggcgacaccaucaucuucgaggccaacggcaaccugaucgcccccuggcacgccuucgcccugagcagaggcuucggcagcggcaucaucaccagcaacgccagcauggacgagugcgacaccaagugccagaccccccagggcgccaucaacagcagccugcccuuccagaacauccaccccgugaccaucggcgagugccccaaguacgugagaagcaccaagcugagaauggugaccggccugagaaacauccccagcauccagagcagaggccuguucggcgccaucgccggcuucaucgagggcggcuggaccggcaugaucgacggcugguacggcuaccaccaccagaacgagcagggcagcggcuacgccgccgaccagaagagcacccagaacgccaucaacggcaucaccaacaaggugaacagcgugaucgagaagaugaacacccaguucaccgccgugggcaaggaguucaacaagcuggagaagagaauggagaaccugaacaagaagguggacgacggcuuccuggacaucuggaccuacaacgccgagcugcuggugcugcuggagaacgagagaacccuggacuuccacgacagcaacgugaagaaccuguacgagaaggugaagagccagcugaagaacaacgccaaggagaucggcaacggcugcuucgaguucuaccacaagugcaacaacgagugcauggagagcgugaagaacggcaccuacgacuaccccaaguacagcgaggagagcaagcugaacagagagaagaucgacggcgugaagcuggagagcaugggcguguaccagauccuggccaucuacagcaccguggccagcagccuggugcugcuggugagccugggcgccaucagcuucuggaugugcagcaacggcagccugcagugcagaaucugcaucuga

SEQ ID NO: 161623 - RNA, 1698 nt, Artificial Sequence
  derived and/or modified CDS sequence (opt4) from hemagglutinin__InfluenzaA__ABN59412
augaaggccaaccugcuggugcugcugugcgcccuggccgccgccgacgccgacaccaucugcaucggcuaccacgccaacaacagcaccgacaccguggacaccgugcuggagaagaacgugaccgugacccacagcgugaaccugcuggaggacagccacaacggcaagcugugcagacugaagggcaucgccccccugcagcugggcaagugcaacaucgccggcuggcugcugggcaaccccgagugcgacccccugcugcccgugagaagcuggagcuacaucguggagacccccaacagcgagaacggcaucugcuaccccggcgacuucaucgacuacgaggagcugagagagcagcugagcagcgugagcagcuucgagagauucgagaucuuccccaaggagagcagcuggcccaaccacaacaccaacggcgugaccgccgccugcagccacgagggcaagagcagcuucuacagaaaccugcuguggcugaccgagaaggagggcagcuaccccaagcugaagaacagcuacgugaacaagaagggcaaggaggugcuggugcuguggggcauccaccacccccccaacagcaaggagcagcagaaccuguaccagaacgagaacgccuacgugagcguggugaccagcaacuacaacagaagauucacccccgagaucgccgagagacccaaggugagagaccaggccggcagaaugaacuacuacuggacccugcugaagcccggcgacaccaucaucuucgaggccaacggcaaccugaucgcccccauguacgccuucgcccugagcagaggcuucggcagcggcaucaucaccagcaacgccagcaugcacgagugcaacaccaagugccagaccccccugggcgccaucaacagcagccugcccuaccagaacauccaccccgugaccaucggcgagugccccaaguacgugagaagcgccaagcugagaauggugaccggccugagaaacauccccagcauccagagcagaggccuguucggcgccaucgccggcuucaucgagggcggcuggaccggcaugaucgacggcugguacggcuaccaccaccagaacgagcagggcagcggcuacgccgccgaccagaagagcacccagaacgccaucaacggcaucaccaacaaggugaacaccgugaucgagaagaugaacauccaguucaccgccgugggcaaggaguucaacaagcuggagaagagaauggagaaccugaacaagaagguggacgacggcuuccuggacaucuggaccuacaacgccgagcugcuggugcugcuggagaacgagagaacccuggaguuccacgacagcaacgugaagaaccuguacgagaaggugaagagccagcugaagaacaacgccaaggagaucggcaacggcugcuucgaguucuaccacaagugcgacaacgagugcauggagagcgugagaaacggcaccuacgacuaccccaaguacagcgaggagagcaagcugaacagagagaagguggacggcgugaagcuggagagcaugggcaucuaccagauccuggccaucuacagcaccguggccagcagccuggugcugcuggugagccugggcgccaucagcuucuggaugugcagcaacggcagccugcagugcagaaucugcaucuga

SEQ ID NO: 161624 - RNA, 1701 nt, Artificial Sequence
  derived and/or modified CDS sequence (opt4) from hemagglutinin__InfluenzaA__ABN59423
augaaggccaagcugcuggugcugcugugcgcccugagcgccaccgacgccgacaccaucugcaucggcuaccacgccaacaacagcaccgacaccguggacaccgugcuggagaagaacgugaccgugacccacagcgugaaccugcuggaggacagccacaacggcaagcugugcagacugaagggcaucgccccccugcagcugggcaagugcagcaucgccggcuggauccugggcaaccccgagugcgagagccuguucagcaagaagagcuggagcuacaucgccgagacccccaacagcgagaacggcaccugcuaccccggcuacuucgccgacuacgaggagcugagagagcagcugagcagcgugagcagcuucgagagauucgagaucuuccccaaggagagaagcuggcccaagcacaacgugaccagaggcgugaccgccagcugcagccacaagggcaagagcagcuucuacagaaaccugcuguggcugaccgagaagaacggcagcuaccccaaccugagcaagagcuacgugaacaacaaggagaaggaggugcuggugcuguggggcgugcaccaccccagcaacaucgagaaccagaagaccaucuacagaaaggagaacgccuacgugagcguggugagcagcaacuacaacagaagauucacccccgagaucgccgagagacccaaggugagagaccaggagggcagaaucaacuacuacuggacccugcuggagcccggcgacaccaucaucuucgaggccaacggcaaccugaucgcccccugguacgccuucgcccugagcagaggcuucggcagcggcaucaucaccagcaacgccagcauggacgagugcgacaccaagugccagaccccccagggcgccaucaacagcagccugcccuuccagaacgugcaccccgugaccaucggcgagugccccaaguacgugagaagcaccaagcugagaauggugaccggccugagaaacauccccagcauccagagcagaggccuguucggcgccaucgccggcuucaucgagggcggcuggaccggcaugaucgacggcugguacggcuaccaccaccagaacgagcagggcagcggcuacgccgccgaccagaagagcacccagaacgccaucaacggcaucaccaacaaggugaacagcgugaucgagaagaugaacacccaguucaccgccgugggcaaggaguucaacaagcuggagaagagaauggagaaccugaacaagaagguggacgacggcuuccuggacaucuggaccuacaacgccgagcugcuggugcugcuggagaacgagagaacccuggacuuccacgacagcaacgugaagaaccuguacgagaaggugaagagccagcugaagaacaacgccaaggagaucggcaacggcugcuucgaguucuaccacaagugcaacaacgagugcauggagagcgugaagaacggcaccuacgacuaccccaaguacagcgaggagagcaagcugaacagagagaagaucgacggcgugaagcuggagagcaugggcguguaccagauccuggccaucuacagcaccguggccagcagccuggugcugcuggugagccugggcgccaucagcuucuggaugugcagcaacggcagccugcagugcagaaucugcaucuga

SEQ ID NO: 161625 - RNA, 1701 nt, Artificial Sequence; identical to SEQ ID NO: 160826
  derived and/or modified CDS sequence (opt4) from hemagglutinin__InfluenzaA__ABO32656

SEQ ID NO: 161626 - RNA, 1701 nt, Artificial Sequence
  derived and/or modified CDS sequence (opt4) from hemagglutinin__InfluenzaA__ABO32667
augaagaccaucaucgcccugagcuacauccugugccugguguucgcccagaagcugcccggcaacgacaacagcaccgccacccugugccugggccaccacgccgugcccaacggcacccuggugaagaccaucaccaacgaccagaucgaggugaccaacgccaccgagcuggugcagagcagcagcaccggcggcaucugcgacagcccccaccagauccuggacggcgagaacugcacccugaucgacgcccugcugggcgacccccacugcgacggcuuccagaacaaggagugggaccuguucguggagagaagcaaggccuacagcaacugcuaccccuacgacgugcccgacuacgccagccugagaagccugguggccagcagcggcacccuggaguucaacaacgagagcuucaacuggaccggcguggcccagaacggcaccagcagcgccugcaagagaagaagcaacaagagcuucuucagcagacugaacuggcugcaccagcugaaguacaaguaccccgcccugaacgugaccaugcccaacaacgagaaguucgacaagcuguacaucuggggcgugcaccaccccagcaccgacagcgaccagaucagccuguacgcccaggccagcggcagagugaccgugagcaccaagagaagccagcagaccgugauccccaacaucggcagcagacccugggugagagacgugagcagcagaaucagcaucuacuggaccaucgugaagcccggcgacauccugcugaucaacagcaccggcaaccugaucgcccccagaggcuacuucaagaucagaagcggcaagagcagcaucaugagaagcgacgcccccaucggcaagugcaacagcgagugcaucacccccaacggcagcauccccaacgacaagcccuuccagaacgugaacagaaucaccuacggcgccugccccagauacgugaagcagaacacccugaagcuggccaccggcaugagaaacgugcccgagaagcagaccagaggcaucuucggcgccaucgccggcuucaucgagaacggcugggagggcaugguggacggcugguacggcuucagacaccagaacagcgagggcaccggccaggccgccgaccugaagagcacccaggccgccaucaaccagaucaacggcaagcugaacagacugaucggcaagaccaacgagaaguuccaccagaucgagaaggaguucagcgagguggagggcagaauccaggaccuggagaaguacguggaggacaccaagaucgaccuguggagcuacaacgccgagcugcugguggcccuggagaaccagcacaccaucgaccugaccgacagcgagaugaacaagcuguucgagagaaccaagaagcagcugagagagaacgccgaggacaugggcaacggcugcuucaagaucuaccacaagugcgacaacgccugcaucggcagcaucagaaacggcaccuacgaccacgacguguacagagacgaggcccugaacaacagauuccagaucaagggcguggagcugaagagcggcuacaaggacuggauccuguggaucagcuucgccaucagcugcuuccugcugugcguggugcugcugggcuucaucaugugggccugccagaagggcaacaucagaugcaacaucugcaucuga

SEQ ID NO: 161627 - RNA, 1698 nt, Artificial Sequence
  derived and/or modified CDS sequence (opt4) from hemagglutinin__InfluenzaA__ABO32678
augaaggugaagcugcuggugcugcugugcaccuucaccgccaccuacgccgacaccaucugcaucggcuaccacgccaacaacagcaccgacaccguggacaccgugcuggagaagaacgugaccgugacccacagcgugaaccugcuggaggacagccacaacggcaagcugugccugcugaagggcaucgccccccugcagcugggcaacugcagcguggccggcuggauccugggcaaccccgagugcgagcugcugaucagcaaggagagcuggagcuacaucguggagacccccaaccccgagaacggcaccugcuaccccggcuacuucgccgacuacgaggagcugagagagcagcugagcagcgugagcagcuucgagagauucgagaucuuccccaaggagagcagcuggcccaaccacaccgugaccggcgugagcgccagcugcagccacaacggcaagagcagcuucuacagaaaccugcuguggcugaccggcaagaacggccuguaccccaaccugagcaagagcuacgccaacaacaaggagaaggaggugcuggugcuguggggcgugcaccacccccccaacaucggcgaccagagagcccuguaccacaccgagaacgccuacgugagcguggugagcagccacuacagcagaagauucacccccgagaucgccaagagacccaaggugagagaccaggagggcagaaucaacuacuacuggacccugcuggagcccggcgacaccaucaucuucgaggccaacggcaaccugaucgcccccagauucgccuucgcccugagcagaggcuucggcagcggcaucaucaccagcaacgcccccauggacgagugcgacgccaagugccagaccccccagggcgccaucaacagcagccugcccuuccagaacgugcaccccgugaccaucggcgagugccccaaguacgugagaagcgccaagcugagaauggccaccggccugagaaacauccccagcauccagagcagaggccuguucggcgccaucgccggcuucaucgagggcggcuggaccggcaugguggacggcugguacggcuaccaccaccagaacgagcagggcagcggcuacgccgccgaccagaagagcacccagaacgccaucaacggcaucaccaacaaggugaacagcgugaucgagaagaugaacacccaguucaccgccgugggcaaggaguucagcaagcuggagagaagaauggagaaccugcacaagaagguggacgacggcuuccuggacaucuggaccuacaacgccgagcugcuggugcugcuggagaacgagagaacccuggacuuccacgacagcaacgugaagaaccuguacgagaaggugaagagccagcugaagaacaacgccaaggagaucggcaacggcugcuucgaguucuaccacaagugcaacgacgagugcauggagagcgugaagaacggcaccuacgacuaccccaaguacagcgaggagagcaagcugaacagagagaagaucgacggcgugaagcuggagagcaugggcguguaccagauccuggccaucuacagcaccguggccagcagccuggugcugcuggugagccugggcgccaucagcuucuggaugugcagcaacggcagccugcagugcagaaucugcaucuga

SEQ ID NO: 161628 - RNA, 1701 nt, Artificial Sequence
  derived and/or modified CDS sequence (opt4) from hemagglutinin__InfluenzaA__ABO32692
augaagaccaucaucgcccugagcuacauccugugccugguguucgcccagaagcugcccggcaacgacaacagcaccgccacccugugccugggccaccacgccgugcccaacggcaccaucgugaagaccaucaccaacgaccagaucgaggugaccaacgccaccgagcuggugcagagcagcagcaccggcggcaucugcgacagcccccaccagauccuggacggcgagaacugcacccugaucgacgcccugcugggcgacccccagugcgacggcuuccagaacaagaagugggaccuguucguggagagaagcaaggccuacagcaacugcuaccccuacgacgugcccgacuacgccagccugagaagccugguggccagcagcggcacccuggaguucaacaacgagagcuucaacuggaccggcgugacccagaacggcaccagcagcgccugcaagagaagaagcaacaacagcuucuucagcagacugaacuggcugacccaccugaaguucaaguaccccgcccugaacgugaccaugcccaacaacgagaaguucgacaagcuguacaucuggggcgugcaccaccccggcaccgacaacgaccagaucuuccuguacgcccaggccagcggcagaaucaccgugagcaccaagagaagccagcagaccgugauccccaacaucggcagcagacccagagugagaaacauccccagcagaaucagcaucuacuggaccaucgugaagcccggcgacauccugcugaucaacagcaccggcaaccugaucgcccccagaggcuacuucaagaucagaagcggcaagagcagcaucaugagaagcgacgcccccaucggcaagugcaacagcgagugcaucacccccaacggcagcauccccaacgacaagcccuuccagaacgugaacagaaucaccuacggcgccugccccagauacgugaagcagaacacccugaagcuggccaccggcaugagaaacgugcccgagaagcagaccagaggcaucuucggcgccaucgccggcuucaucgagaacggcugggagggcaugguggacggcugguacggcuucagacaccagaacagcgagggcaucggccaggccgccgaccugaagagcacccaggccgccaucaaccagaucaacggcaagcugaacagacugaucggcaagaccaacgagaaguuccaccagaucgagaaggaguucagcgagguggagggcagaauccaggaccuggagaaguacguggaggacaccaagaucgaccuguggagcuacaacgccgagcugcugguggcccuggagaaccagcacaccaucgaccugaccgacagcgagaugaacaagcuguucgagagaaccaagaagcagcugagagagaacgccgaggacaugggcaacggcugcuucaagaucuaccacaagugcgacaacgccugcaucggcagcaucagaaacggcaccuacgaccacgacguguacagagacgaggcccugaacaacagauuccagaucaagggcguggagcugaagagcggcuacaaggacuggauccuguggaucagcuucgccaucagcugcuuccugcugugcguggugcugcugggcuucaucaugugggccugccagaagggcaacaucagaugcaacaucugcaucuga

SEQ ID NO: 161629 - RNA, 1701 nt, Artificial Sequence; identical to SEQ ID NO: 161493
  derived and/or modified CDS sequence (opt4) from hemagglutinin__InfluenzaA__ABO32751

SEQ ID NO: 161630 - RNA, 1701 nt, Artificial Sequence; identical to SEQ ID NO: 161493
  derived and/or modified CDS sequence (opt4) from hemagglutinin__InfluenzaA__ABO32762

SEQ ID NO: 161631 - RNA, 1701 nt, Artificial Sequence; identical to SEQ ID NO: 161515
  derived and/or modified CDS sequence (opt4) from hemagglutinin__InfluenzaA__ABO32775

SEQ ID NO: 161632 - RNA, 1701 nt, Artificial Sequence; identical to SEQ ID NO: 160303
  derived and/or modified CDS sequence (opt4) from hemagglutinin__InfluenzaA__ABO32790

SEQ ID NO: 161633 - RNA, 1701 nt, Artificial Sequence
  derived and/or modified CDS sequence (opt4) from hemagglutinin__InfluenzaA__ABO32803
augaagaccaucaucgcccugagcuacauccugugccugguguucgcccagaagcugcccggcaacgacaacagcaccgccacccugugccugggccaccacgccgugcccaacggcaccaucgugaagaccaucaccaacgaccagaucgaggugaccaacgccaccgagcuggugcagagcagcagcaccggcggcaucugcgacagcccccaccagauccuggacggcgagaacugcacccugaucgacgcccugcugggcgacccccagugcgacggcuuccagaacaagaagugggaccuguucguggagagaagcaaggccuacagcaacugcuaccccuacgacgugcccgacuacgugagccugagaagccugguggccagcagcggcacccuggaguucaacaacgagagcuucaacuggaccggcgugacccagaacggcaccagcagcgccugcaagagaagaagcaacaacagcuucuucagcagacugaacuggcugacccaccugaaguucaaguaccccgcccugaacgugaccaugcccaacaacgagaaguucgacaagcuguacaucuggggcgugcaccaccccggcaccgacaacgaccagaucagccuguacgcccaggccagcggcagaaucaccgugagcaccaagagaagccagcagaccgugauccccaacaucggcagcagacccagagugagagacauccccagcagaaucagcaucuacuggaccaucgugaagcccggcgacacccugcugaucaacagcaccggcaaccugaucgcccccagaggcuacuucaagaucagaagcggcaagagcagcaucaugagaagcgacgcccccaucgacaagugcaacagcgagugcaucacccccaacggcagcauccccaacgacaagcccuuccagaacgugaacagaaucaccuacggcgccugccccagauacgugaagcagaacacccugaagcuggccaccggcaugagaaacgugcccgagaagcagaccagaggcaucuucggcgccaucgccggcuucaucgagaacggcugggagggcaugguggacggcugguacggcuucagacaccagaacagcgagggcaucggccaggccgccgaccugaagagcacccaggccgccaucaaccagaucaacggcaagcugaacagacugaucggcaagaccaacgagaaguuccaccagaucgagaaggaguucagcgagguggagggcagaauccaggaccuggagaaguacguggaggacaccaagaucgaccuguggagcuacaacgccgagcugcugguggcccuggagaaccagcacaccaucgaccugaccgacagcgagaugaacaagcuguucgagagaaccaagaagcagcugagagagaacgccgaggacaugggcaacggcugcuucaagaucuaccacaagugcgacaacgccugcaucggcagcaucagaaacggcaccuacgaccacgacguguacagagacgaggcccugaacaacagauuccagaucaagggcguggagcugaagagcggcuacaaggacuggauccuguggaucagcuucgccaucagcugcuuccugcugugcguggcccugcugggcuucaucaugugggccugccagaagggcaacaucagaugcaacaucugcaucuga

SEQ ID NO: 161634 - RNA, 1701 nt, Artificial Sequence; identical to SEQ ID NO: 160693
  derived and/or modified CDS sequence (opt4) from hemagglutinin__InfluenzaA__ABO32816

SEQ ID NO: 161635 - RNA, 1701 nt, Artificial Sequence; identical to SEQ ID NO: 160316
  derived and/or modified CDS sequence (opt4) from hemagglutinin__InfluenzaA__ABO32827

SEQ ID NO: 161636 - RNA, 1701 nt, Artificial Sequence
  derived and/or modified CDS sequence (opt4) from hemagglutinin__InfluenzaA__ABO32838
augaagaccaucaucgcccugagcuacauccugugccugguguucgcccagaagcugcccggcaacgacaacagcaccgccacccugugccugggccaccacgccgugcccaacggcaccaucgugaagaccaucaccaacgaccagaucgaggugaccaacgccaccgagcuggugcagagcagcagcaccggcggcaucugcgacagcccccaccagauccuggacggcgagaacugcacccugaucgacgcccugcugggcgacccccagugcgacggcuuccagaacaagagaugggaccuguucguggagagaagcaaggccuacagcaacugcuaccccuacgacgugcccgacuacgccagccugagaagccugguggccagcagcggcacccuggaguucaacaacgagagcuucaacuggaccggcgugacccagaacggcaccagcagcgccugcaagagaagaagcaacaacagcuucuucagcagacugaacuggcugacccaccugaaguucaaguaccccgcccugaacgugaccaugcccaacaacgagaaguucgacaagcuguacaucuggggcgugcaccaccccggcaccgacaacgaccagaucuuccuguacgcccaggccagcggcagaaucaccgugagcaccaagagaagccagcagaccgugauccccaacaucggcagcagacccagagugagaaacauccccagcagaaucagcaucuacuggaccaucgugaagcccggcgacauccugcugaucaacagcaccggcaaccugaucgcccccagaggcuacuucaagaucagaagcggcaagagcagcaucaugagaagcgacgcccccaucggcaagugcaacagcgagugcaucacccccaacggcagcauccccaacgacaagcccuuccagaacgugaacagaaucaccuacggcgccugccccagauacgugaagcagaacacccugaagcuggccaccggcaugagaaacgugcccgagaagcagaccagaggcaucuucggcgccaucgccggcuucaucgagaacggcugggagggcaugguggacggcugguacggcuucagacaccagaacagcgagggcaucggccaggccgccgaccugaagagcacccaggccgccaucaaccagaucaacggcaagcugaacagacugaucggcaagaccaacgagaaguuccaccagaucgagaaggaguucagcgagguggagggcagaauccaggaccuggagaaguacguggaggacaccaagaucgaccuguggagcuacaacgccgagcugcugguggcccuggagaaccagcacaccaucgaccugaccgacagcgagaugaacaagcuguucgagagaaccaagaagcagcugagagagaacgccgaggacaugggcaacggcugcuucaagaucuaccacaagugcgacaacgccugcaucggcagcaucagaaacggcaccuacgaccacgacguguacagagacgaggcccugaacaacagauuccagaucaagggcguggagcugaagagcggcuacaaggacuggauccuguggaucagcuucgccaucagcugcuuccugcugugcguggcccugcugggcuucaucaugugggccugccagaagggcaacaucagaugcaacaucugcaucuga

SEQ ID NO: 161637 - RNA, 1701 nt, Artificial Sequence; identical to SEQ ID NO: 161636
  derived and/or modified CDS sequence (opt4) from hemagglutinin__InfluenzaA__ABO32849

SEQ ID NO: 161638 - RNA, 1701 nt, Artificial Sequence
  derived and/or modified CDS sequence (opt4) from hemagglutinin__InfluenzaA__ABO32860
augaagaccaucaucgcccugagcuacauccugugccugguguucgcccagaagcugcccggcaacgacaacagcaccgccacccugugccugggccaccacgccgugcccaacggcaccaucgugaagaccaucaccaacgaccagaucgaggugaccaacgccaccgagcuggugcagagcagcagcaccggcggcaucugcgacagcccccaccagauccuggacggcgagaacugcacccugaucgacgcccugcugggcgacccccagugcgacggcuuccagaacaagagaugggaccuguucguggagagaagcaaggccuacagcaacugcuaccccuacgacgugcccgacuacgccagccugagaagccugguggccagcagcggcacccuggaguucaacaacgagagcuucaacuggaccggcgugacccagaacggcaccagcagcgccugcaagagaagaagcaacaacagcuucuucagcagacugaacuggcugacccaccugaaguucaaguaccccgcccugaacgugaccaugcccaacaacgagaaguucgacaagcuguacaucuggggcgugcaccaccccggcaccgacaacgaccagaucuuccuguacgcccaggccagcggcagaaucaccgugagcaccaagagaagccagcagaccgugauccccaacaucggcagcagacccagagugagagacauccccagcagaaucagcaucuacuggaccaucgugaagcccggcgacauccugcugaucaacagcaccggcaaccugaucgcccccagaggcuacuucaagaucagaagcggcaagagcagcaucaugagaagcgacgcccccaucggcaagugcaacagcgagugcaucacccccaacggcagcauccccaacgacaagcccuuccagaacgugaacagaaucaccuacggcgccugccccagauacgugaagcagaacacccugaagcuggccaccggcaugagaaacgugcccgagaagcagaccagaggcaucuucggcgccaucgccggcuucaucgagaacggcugggagggcaugguggacggcugguacggcuucagacaccagaacagcgagggcaucggccaggccgccgaccugaagagcacccaggccgccaucaaccagaucaacggcaagcugaacagacugaucggcaagaccaacgagaaguuccaccagaucgagaaggaguucagcgagguggagggcagaauccaggaccuggagaaguacguggaggacaccaagaucgaccuguggagcuacaacgccgagcugcugguggcccuggagaaccagcacaccaucgaccugaccgacagcgagaugaacaagcuguucgagagaaccaagaagcagcugagagagaacgccgaggacaugggcaacggcugcuucaagaucuaccacaagugcgacaacgccugcaucggcagcaucagaaacggcaccuacgaccacgacguguacagagacgaggcccugaacaacagauuccagaucaagggcguggagcugaagagcggcuacaaggacuggauccuguggaucagcuucgccaucagcugcuuccugcugugcguggcccugcugggcuucaucaugugggccugccagaagggcaacaucagaugcaacaucugcaucuga

SEQ ID NO: 161639 - RNA, 1701 nt, Artificial Sequence; identical to SEQ ID NO: 161621
  derived and/or modified CDS sequence (opt4) from hemagglutinin__InfluenzaA__ABO32871

SEQ ID NO: 161640 - RNA, 1701 nt, Artificial Sequence
  derived and/or modified CDS sequence (opt4) from hemagglutinin__InfluenzaA__ABO32882
augaagaccaucaucgcccugagcuacaucaucugccugguguucgcccagaagcugcccggcaacgacaacagcaccgccacccugugccugggccaccacgccgugcccaacggcaccaucgugaagaccaucaccaacgaccagaucgaggugaccaacgccaccgagcuggugcagagcagcagcaccggcgagaucugcgacagcccccaccagauccuggacggcgagaacugcacccugaucgacgcccugcugggcgacccccagugcgacggcuuccagaacaagaagugggaccuguucguggagagaagcaaggccuacagcaacugcuaccccuacgacgugcccgacuacgccagccugagaagccugguggccagcagcggcacccuggaguucaacaacgagagcuucaacuggaccggcgugacccagaacggcaccagcagcgccugcaagagaagaagcaacaacagcuucuucagcagacugaacuggcugacccaccugaaguucaaguaccccgcccugaacgugaccaugcccaacaacgagaaguucgacaagcuguacaucuggggcgugcaccaccccggcaccgacaacgaccagaucuuccccuacgcccaggccagcggcagaaucaccgugagcaccaagagaagccagcagaccgugauccccaacaucggcagcagacccagagugagaaacauccccagcagaaucagcaucuacuggaccaucgugaagcccggcgacauccugcugaucaacagcaccggcaaccugaucgcccccagaggcuacuucagaaucagaagcggcaagagcagcaucaugagaagcgacgcccccaucggcaagugcaacagcgagugcaucacccccaacggcagcauccccaacgacaagcccuuccagaacgugaacagaaucaccuacggcgccugccccagauacgugaagcagaacacccugaagcuggccaccggcaugagaaacgugcccgagaagcagaccagaggcaucuucggcgccaucgccggcuucaucgagaacggcugggagggcaugguggacggcugguacggcuucagacaccagaacagcgagggcaucggccaggccgccgaccugaagagcacccaggccgccaucaaccagaucaacggcaagcugaacagacugaucggcaagaccaacgagaaguuccaccagaucgagaaggaguucagcgagguggagggcagaauccaggaccuggagaaguacguggaggacaccaagaucgaccuguggagcuacaacgccgagcugcugguggcccuggagaaccagcacaccaucgaccugaccgacagcgagaugaacaagcuguucgagagaaccaagaagcagcugagagagaacgccgaggacaugggcaacggcugcuucaagaucuaccacaagugcgacaacgccugcaucggcagcaucagaaacggcaccuacgaccacgacguguacagagacgaggcccugaacaacagauuccagaucaagggcguggagcugaagagcggcuacaaggacuggauccuguggaucagcuucgccaucagcugcuuccugcugugcguggcccugcugggcuucaucaugugggccugccagaagggcaacaucagaugcaacaucugcaucuga

SEQ ID NO: 161641 - RNA, 1701 nt, Artificial Sequence
  derived and/or modified CDS sequence (opt4) from hemagglutinin__InfluenzaA__ABO32893
augaagaccaucaucgcccugagcuacauccugugccugguguucgcccagaagcugcccggcaacgacaacagcaccgccacccugugccugggccaccacgccgugcccaacggcaccaucgugaagaccaucaccaacgaccagaucgaggugaccaacgccaccgagcuggugcagagcagcagcaccggcgagaucugcgacagcccccaccagauccuggacggcgagaacugcacccugaucgacgcccugcugggcgacccccagugcgacggcuuccagaacaagaagugggaccuguucguggagagaagcaaggccuacagcaacugcuaccccuacgacgugcccgacuacgccagccugagaagccugguggccagcagcggcacccuggaguucaacaacgagagcuucaacuggaccggcgugacccagaacggcaccagcagcgccugcaagagaagaagcaacaacagcuucuucagcagacugaacuggcugacccaccugaaguucaaguaccccgcccugaacgugaccaugcccaacaacgagaaguucgacaagcuguacaucuggggcgugcaccaccccggcaccgacaacgaccagaucuuccuguacgcccaggccagcggcagaaucaccgugagcaccaagagaagccagcagaccgugauccccaacaucggcagcagacccagagugagaaacauccccagcagaaucagcaucuacuggaccaucgugaagcccggcgacauccugcugaucaacagcaccggcaaccugaucgcccccagaggcuacuucaagaucagaagcggcaagagcagcaucaugagaagcgacgcccccaucggcaagugcaacagcgagugcaucacccccaacggcagcauccccaacgacaagcccuuccagaacgugaacagaaucaccuacggcgccugccccagauacgugaagcagaacacccugaagcuggccaccggcaugagaaacgugcccgagaagcagaccagaggcaucuucggcgccaucgccggcuucaucgagaacggcugggagggcaugguggacggcugguacggcuucagacaccagaacagcgagggcaucggccaggccgccgaccugaagagcacccaggccgccaucaaccagaucaacggcaagcugaacagacugaucggcaagaccaacgagaaguuccaccagaucgagaaggaguucagcgagguggagggcagaauccaggaccuggagaaguacguggaggacaccaagaucgaccuguggagcuacaacgccgagcugcugguggcccuggagaaccagcacaccaucgaccugaccgacagcgagaugaacaagcuguucgagagaaccaagaagcagcugagagagaacgccgaggacaugggcaacggcugcuucaagaucuaccacaagugcgacaacgccugcaucggcagcaucagaaacggcaccuacgaccacgacguguacagagacgaggcccugaacaacagauuccagaucaagggcguggagcugaagagcggcuacaaggacuggauccuguggaucagcuucgccaucagcugcuuccugcugugcguggugcugcugggcuucaucaugugggccugccagaagggcaacaucagaugcaacaucugcaucuga

SEQ ID NO: 161642 - RNA, 1701 nt, Artificial Sequence; identical to SEQ ID NO: 161641
  derived and/or modified CDS sequence (opt4) from hemagglutinin__InfluenzaA__ABO32904

SEQ ID NO: 161643 - RNA, 1701 nt, Artificial Sequence; identical to SEQ ID NO: 161456
  derived and/or modified CDS sequence (opt4) from hemagglutinin__InfluenzaA__ABO32915

SEQ ID NO: 161644 - RNA, 1701 nt, Artificial Sequence; identical to SEQ ID NO: 161456
  derived and/or modified CDS sequence (opt4) from hemagglutinin__InfluenzaA__ABO32926

SEQ ID NO: 161645 - RNA, 1701 nt, Artificial Sequence
  derived and/or modified CDS sequence (opt4) from hemagglutinin__InfluenzaA__ABO32937
augaagaccaucaucgcccugagcuacauccugugccugguguucgcccagaagcugcccggcaacgacaacagcaccgccacccugugccugggccaccacgccgugcccaacggcaccaucgugagaaccaucaccaacgaccagaucgaggugaccaacgccaccgagcuggugcagagcagcagcaccggcgagaucugcgacagcccccaccagauccuggacggcgagaacugcacccugaucgacgcccugcugggcgacccccagugcgacggcuuccagaacaagaagugggaccuguucguggagagaagcaaggccuacagcaacugcuaccccuacgacgugcccgacuacgccagccugagaagccugguggccagcagcggcacccuggaguucaacaacgagagcuucaacuggaccggcgugacccagaacggcaccagcagcagcugcaagagaagaagcaacaacagcuucuucagcagacugaacuggcugacccaccugaaguucaaguaccccgcccugaacgugaccaugcccaacaacgagaaguucgacaagcuguacaucuggggcgugcaccaccccggcaccgacaacgaccagaucuuccuguacgcccaggccagcggcagaaucaccgugagcaccaagagaagccagcagaccgugauccccaacaucggcagcagacccagagugagaaacauccccagcagaaucagcaucuacuggaccaucgugaagcccggcgacauccugcugaucaacagcaccggcaaccugaucgcccccagaggcuacuucaagaucagaagcggcaagagcagcaucaugagaagcgacgcccccaucggcaagugcaacagcgagugcaucacccccaacggcagcauccccaacgacaagcccuuccagaacgugaacagaaucaccuacggcgccugccccagauacgugaagcagaacacccugaagcuggccaccggcaugagaaacgugcccgagaagcagaccagaggcaucuucggcgccaucgccggcuucaucgagaacggcugggagggcaugguggacggcugguacggcuucagacaccagaacagcgagggcaucggccaggccgccgaccugaagagcacccaggccgccaucaaccagaucaacggcaagcugaacagacugaucggcaagaccaacgagaaguuccaccagaucgagaaggaguucagcgagguggagggcagaauccaggaccuggagaaguacguggaggacaccaagaucgaccuguggagcuacaacgccgagcugcugguggcccuggagaaccagcacaccaucgaccugaccgacagcgagaugaacaagcuguucgagagaaccaagaagcagcugagagagaacgccgaggacaugggcaacggcugcuucaagaucuaccacaagugcgacaacgccugcaucggcagcaucagaaacggcaccuacgaccacgacguguacagagacgaggcccugaacaacagauuccagaucaagggcguggagcugaagagcggcuacaaggacuggauccuguggaucagcuucgccaucagcugcuuccugcugugcguggcccugcugggcuucaucaugugggccugccagaagggcaacaucagaugcaacaucugcaucuga

SEQ ID NO: 161646 - RNA, 1698 nt, Artificial Sequence
  derived and/or modified CDS sequence (opt4) from hemagglutinin__InfluenzaA__ABO32948
augagagccaagcugcuggugcugcugugcaccuucaccgccaccuacgccgacaccaucugcaucggcuaccacgccaacaacagcaccgacaccguggacaccgugcuggagaagaacgugaccgugacccacagcgugaaccugcuggaggacagccacaacggcaagcugugccugcugaagggcaucgccccccugcagcugggcaacugcagcguggccggcuggauccugggcaaccccgagugcgagcugcugaucagcaaggagagcuggagcuacaucguggagacccccaaccccgagaacggcaccugcuaccccggcuacuucgccgacuacgaggagcugagagagcagcugagcagcgugagcagcuucgagagauucgagaucuuccccaagggcagcagcuggcccaaccacaccgugaccggcgugagcgccagcugcagccacaacggcaagagcagcuucuacagaaaccugcuguggcugaccggcaagaacggccuguaccccaaccugagcaugagcuacgugaacaacaaggagaaggaggugcuggugcuguggggcgugcaccacccccccaacaucggcgaccagagagcccuguaccacaccgagaacgccuacgugagcguggugagcagccacuacagcagaagauucacccccgagaucgccaagagacccaaggugagagaccaggagggcagaaucaacuacuacuggacccugcuggagcccggcgacaccaucaucuucgaggccaacggcaaccugaucgcccccugguacgccuucgcccugagcagaggcuucggcagcggcaucaucaccagcaacgcccccauggacgagugcgacgccaagugccagaccccccagggcgccaucaacagcagccugcccuuccagaacgugcaccccgugaccaucggcgagugccccaaguacgugagaagcgccaagcugagaauggugaccggccugagaaacauccccagcauccagagcagaggccuguucggcgccaucgccggcuucaucgagggcggcuggaccggcaugguggacggcugguacggcuaccaccaccagaacgagcagggcagcggcuacgccgccgaccagaagagcacccagaacgccaucaacggcaucaccaacaaggugaacagcgugaucgagaagaugaacacccaguucaccgccgugggcaaggaguucaacaagcuggagagaagaauggagaaccugaacaagaagguggacgacggcuuccuggacaucuggaccuacaacgccgagcugcuggugcugcuggagaacgagagaacccuggacuuccacgacagcaacgugaagaaccuguacgagaaggugaagagccagcugaagaacaacgccaaggagaucggcaacggcugcuucgaguucuaccacaagugcaacaacgagugcauggagagcgugaagaacggcaccuacgacuaccccaaguacagcgaggagagcaagcugaacagagagaagaucgacggcgugaagcuggagagcaugggcguguaccagauccuggccaucuacagcaccguggccagcagccuggugcugcuggugagccugggcgccaucagcuucuggaugugcagcaacggcagccugcagugcagaaucugcaucuga

SEQ ID NO: 161647 - RNA, 1698 nt, Artificial Sequence
  derived and/or modified CDS sequence (opt4) from hemagglutinin__InfluenzaA__ABO32959
augaaggccaagcugcuggugcugcugugcaccuucaccgccaccuacgccgacaccaucugcaucggcuaccacgccaacaacagcaccgacaccguggacaccgugcuggagaagaacgugaccgugacccacagcgugaaccugcuggaggacagccacaacggcaagcugugccugcugaagggcaucgccccccugcagcugggcaacugcagcguggccggcuggauccugggcaaccccgagugcgagcugcugaucagcaaggagagcuggagcuacaucguggagacccccaaccccgagaacggcaccugcuaccccggcuacuucgccgacuacgaggagcugagagagcagcugagcagcgugagcagcuucgagagauucgagaucuuccccaaggagagcagcuggcccaaccacaccgugaccggcgugagcgccagcugcagccacaacggcaagagcagcuucuacagaaaccugcuguggcugaccggcaagaacggccuguaccccaaccugagcagaagcuacgugaacaacaaggagaaggaggugcuggugcuguggggcgugcaccacccccccaacaucggcgaccagagagcccuguaccacaccgagaacgccuacgugagcguggugagcagccacuacagcagaagauucacccccgagaucgccaagagacccaaggugagagaccaggagggcagaaucaacuacuacuggacccugcuggagcccggcgacacccugaucuucgaggccaacggcaaccugaucgcccccugguacgccuucgcccugagcagaggcuucggcagcggcaucaucaccagcaacgcccccauggacgagugcgacgccaagugccagaccccccagggcgccaucaacagcagccugcccuuccagaacgugcaccccgugaccaucggcgagugccccaaguacgugagaagcaccaagcugagaauggugaccggccugagaaacauccccagcauccagagcagaggccuguucggcgccaucgccggcuucaucgagggcggcuggaccggcaugguggacggcugguacggcuaccaccaccagaacgagcagggcagcggcuacgccgccgaccagaagagcacccagaacgccaucaacggcaucaccaacaaggugaacagcgugaucgagaagaugaacacccaguucaccgccgugggcaaggaguucaacaagcuggagagaagaauggagaaccugaacaagaagguggacgacggcuuccuggacaucuggaccuacaacgccgagcugcuggugcugcuggagaacgagagaacccuggacuuccacgacagcaacgugaagaaccuguacgagaaggugaagagccagcugaagaacaacgccaaggagaucggcaacggcugcuucgaguucuaccacaagugcaacaacgagugcauggagagcgugaagaacggcaccuacgacuaccccaaguacagcgaggagagcaagcugaacagagagaagaucgacggcgugaagcuggagagcaugggcguguaccagauccuggccaucuacagcaccguggccagcagccuggugcugcuggugagccugggcgccaucagcuucuggaugugcagcaacggcagccugcagugcagaaucugcaucuga

SEQ ID NO: 161648 - RNA, 1698 nt, Artificial Sequence; identical to SEQ ID NO: 161264
  derived and/or modified CDS sequence (opt4) from hemagglutinin__InfluenzaA__ABO32970

SEQ ID NO: 161649 - RNA, 1701 nt, Artificial Sequence
  derived and/or modified CDS sequence (opt4) from hemagglutinin__InfluenzaA__ABO32981
augaaggccaagcugcuggugcugcugugcgcccugagcgccaccgacgccgacaccaucugcaucggcuaccacgccaacaacagcaccgacaccguggacaccgugcuggagaagaacgugaccgugacccacagcgugaaccugcuggaggacagccacaacggcaagcugugcagacugaagggcaucgccccccugcagcugggcaagugcagcaucgccggcuggauccugggcaaccccgagugcgagagccuguucagcaagaagagcuggagcuacaucgccgagacccccaacagcgagaacggcaccugcuaccccggcuacuucgccgacuacgaggagcugagagagcagcugagcagcgugagcagcuucgagagauucgagaucuuccccaaggagagaagcuggcccaagcacaacgugaccagaggcgugaccgccagcugcagccacaagggcaagagcagcuucuacagaaaccugcuguggcugaccgagaagaacggcagcuaccccaaccugagcaagagcuacgugaacaacaaggagaaggaggugcuggugcuguggggcgugcaccaccccagcaacaucaaggaccagaagaccaucuacagaaaggagaacgccuacgugagcguggugagcagcaacuacaacagaagauucacccccgagaucgccgagagacccaaggugagagaccaggccggcagaaucaacuacuacuggacccugcuggagcccggcgacaccaucaucuucgaggccaacggcaaccugaucgcccccugguacgccuucgcccugagcagaggcuucggcagcggcaucaucaccagcaacgccagcauggacgagugcgacaccaagugccagaccccccagggcgccaucaacagcagccugcccuuccagaacgugcaccccgugaccaucggcgagugccccaaguacgugagaagcaccaagcugagaauggugaccggccugagaaacauccccagcauccagagcagaggccuguucggcgccaucgccggcuucaucgagggcggcuggaccggcaugaucgacggcugguacggcuaccaccaccagaacgagcagggcagcggcuacgccgccgaccagaagagcacccagaacgccaucaacggcaucaccaacaaggugaacagcgugaucgagaagaugaacacccaguucaccgccgugggcaaggaguucaacaagcuggagaagagaauggagaaccugaacaagaagguggacgacggcuuccuggacaucuggaccuacaacgccgagcugcuggugcugcuggagaacgagagaacccuggacuuccacgacagcaacgugaagaaccuguacgagaaggugaagagccagcugaagaacaacgccaaggagaucggcaacggcugcuucgaguucuaccacaagugcaacaacgagugcauggagagcgugaagaacggcaccuacgacuaccccaaguacagcgaggagagcaagcugaacagagagaagaucgacggcgugaagcuggagagcaugggcguguaccagauccuggccaucuacagcaccguggccagcagccuggugcugcuggugagccugggcgccaucagcuucuggaugugcagcaacggcagccugcagugcagaaucugcaucuga

SEQ ID NO: 161650 - RNA, 1701 nt, Artificial Sequence
  derived and/or modified CDS sequence (opt4) from hemagglutinin__InfluenzaA__ABO32992
augaaggccaagcugcuggugcugcugugcgcccugagcgccaccgacgccgacaccaucugcaucggcuaccacgccaacaacagcaccgacaccguggacaccgugcuggagaagaacgugaccgugacccacagcgugaaccugcuggaggacagccacaacggcaagcugugcagacugaagggcaucgccccccugcagcugggcaagugcagcaucgccggcuggauccugggcaaccccgagugcgagagccuguucagcaagaagagcuggagcuacaucgccgagacccccaacagcgagaacggcaccugcuaccccggcuacuucgccgacuacgaggagcugagagagcagcugagcagcgugagcagcuucgagagauucgagaucuuccccaaggagagaagcuggcccaagcacgacgugaccagaggcgugaccgccagcugcagccacaagggcaagagcagcuucuacagaaaccugcuguggcugaccgagaagaacggcagcuaccccaaccugagcaagagcuacgugaacaacaaggagaaggaggugcuggugcuguggggcgugcaccaccccagcaacaucgaggaccagaagaccaucuacagaaaggagaacgccuacgugagcguggugagcagcaacuacaacagaagauucacccccgagaucagcgagagacccaaggugagagaccagaagggcagaaucaacuacuacuggacccugcuggagcccggcgacaccaucaucuucgaggccaacggcaaccugaucgcccccugguacgccuucgcccugagcagaggcuucggcagcggcaucaucaccagcaacgccagcauggacgagugcgacaccaagugccagaccccccagggcgccaucaacagcagccugcccuuccagaacgugcaccccgugaccaucggcgagugccccaaguacgugagaagcaccaagcugagaauggugaccggccugagaaacauccccagcauccagagcagaggccuguucggcgccaucgccggcuucaucgagggcggcuggaccggcaugaucgacggcugguacggcuaccaccaccagaacgagcagggcagcggcuacgccgccgaccagaagagcacccagaacgccaucaacggcaucaccaacaaggugaacagcgugaucgagaagaugaacacccaguucaccgccgugggcaaggaguucaacaagcuggagaagagaauggagaaccugaacaagaagguggacgacggcuuccuggacaucuggaccuacaacgccgagcugcuggugcugcuggagaacgagagaacccuggacuuccacgacagcaacgugaagaaccuguacgagaaggugaagagccagcugaagaacaacgccaaggagaucggcaacggcugcuucgaguucuaccacaagugcaacaacgagugcauggagagcgugaagaacggcaccuacgacuaccccaaguacagcgaggagagcaagcugaacagagagaagaucgacggcgugaagcuggagagcaugggcguguaccagauccuggccaucuacagcaccguggccagcagccuggugcugcuggugagccugggcgccaucagcuucuggaugugcagcaacggcagccugcagugcagaaucugcaucuga

SEQ ID NO: 161651 - RNA, 1701 nt, Artificial Sequence
  derived and/or modified CDS sequence (opt4) from hemagglutinin__InfluenzaA__ABO33006
augaaggccaagauccuggugcugcugugcgcccugagcgccaccgacgccgacaccaucugcaucggcuaccacgccaacaacagcaccgacaccguggacaccgugcuggagaagaacgugaccgugacccacagcgugaaccugcuggaggacagccacaacggcaagcugugcagacugaagggcaucgccccccugcagcugggcaagugcagcaucgccggcuggauccugggcaaccccgagugcgagagccuguucagcaagaagagcuggagcuacaucgccgagacccccaacagcgagaacggcaccugcuaccccggcuacuucgccgacuacgaggagcugagagagcagcugagcagcgugagcagcuucgagagauucgagaucuuccccaaggagagaagcuggcccaagcacaacgugaccagaggcgugaccgccagcugcagccacaagggcaagagcagcuucuacagaaaccugcuguggcugaccgagaagaacggcagcuaccccaaccugagcaagagcuacgugaacaacaaggagaaggaggugcuggugcuguggggcgugcaccaccccagcaacaucgaggaccagaagaccaucuacagaaaggagaacgccuacgugagcguggugagcagcaacuacaacagaagauucacccccgagaucagcaagagacccaaggugagagaccaggagggcagaaucaacuacuacuggacccugcuggagcccggcgacaccaucaucuucgaggccaacggcaaccugaucgcccccugguacgccuucgcccugagcagaggcuucggcagcggcaucaucaccagcaacgccagcauggacgagugcgacaccaagugccagaccccccagggcgccaucaacagcagccugcccuuccagaacgugcaccccgugaccaucggcgagugccccaaguacgugagaagcaccaagcugagaauggugaccggccugagaaacauccccagcauccagagcagaggccuguucggcgccaucgccggcuucaucgagggcggcuggaccggcaugaucgacggcugguacggcuaccaccaccagaacgagcagggcagcggcuacgccgccgaccagaagagcacccagaacgccaucaacggcaucaccaacaaggugaacagcgugaucgagaagaugaacacccaguucaccgccgugggcaaggaguucaacaagcuggagaagagaauggagaaccugaacaagaagguggacgacggcuuccuggacaucuggaccuacaacgccgagcugcuggugcugcuggagaacgagagaacccuggacuuccacgacagcaacgugaagaaccuguacgagaaggugaagagccagcugaagaacaacgccaaggagaucggcaacggcugcuucgaguucuaccacaagugcaacaacgagugcauggagagcgugaagaacggcaccuacgacuaccccaaguacagcgaggagagcaagcugaacagagagaagaucgacggcgugaagcuggagagcaugggcguguaccagauccuggccaucuacagcaccguggccagcagccuggugcugcuggugagccugggcgccaucagcuucuggaugugcagcaacggcagccugcagugcagaaucugcaucuga

SEQ ID NO: 161652 - RNA, 1701 nt, Artificial Sequence
  derived and/or modified CDS sequence (opt4) from hemagglutinin__InfluenzaA__ABO33025
augaaggccaagcugcuggugcugcugugcgcccugagcgccaccgacgccgacaccaucugcaucggcuaccacgccaacaacagcaccgacaccguggacaccgugcuggagaagaacgugaccgugacccacagcgugaaccugcuggaggacaaccacaacggcaagcugugcaagcugaagggcaucgccccccugcagcugggcaagugcagcaucgccggcuggauccugggcaaccccgagugcgagagccuguucagcaagaagagcuggagcuacaucgccgagacccccaacagcgagaacggcaccugcuaccccggcuacuucgccgacuacgaggagcugagagagcagcugagcagcgugagcagcuucgagagauucgagaucuuccccaaggagagcagcuggcccaaccacaacgugaccaagggcgugaccgccagcugcagccacaagggcaagagcagcuucuacagaaaccugcuguggcugaccgagaagaacggcagcuaccccaaccugagcaagagcuacgugaacaacaaggagaaggaggugcuggugcuguggggcgugcaccaccccagcaacaucaaggaccagagaaccaucuacagaaaggagaacgccuacgugagcguggugagcagccacuacaacagaagauucacccccgagaucgccaagagacccaaggugagagaccaggagggcagaaucaacuacuacuggacccugcuggagcccggcgacaccaucaucuucgaggccaacggcaaccugaucgcccccugguacgccuucgcccugagcagaggcuucggcagcggcaucaucaccagcaacgccagcauggacgagugcgacgccaagugccagaccccccagggcgccaucaacagcagccugcccuuccagaacgugcaccccgugaccaucggcgagugccccaaguacgugagaagcaccaagcugagaauggugaccggccugagaaacauccccagcauccagagcagaggccuguucggcgccaucgccggcuucaucgagggcggcuggaccggcaugaucgacggcugguacggcuaccaccaccagaacgagcagggcagcggcuacgccgccgaccagaagagcacccagagcgccaucaacggcaucaccaacaaggugaacagcaucaucgagaagaugaacacccaguucaccgccgugggcaaggaguucaacaagcuggagaagagaauggagaaccugaacaagaagguggacgacggcuuccuggacaucuggaccuacaacgccgagcugcuggugcugcuggagaacgagagaacccuggacuuccacgacagcaacgugaagaaccuguacgagaaggugaagagccagcugaagaacaacgccaaggagaucggcaacggcugcuucgaguucuaccacaagugcaacaacgagugcauggagagcgugaagaacggcaccuacgacuaccccaaguacagcgaggagagcaagcugaacagagagaagaucgacggcgugaagcuggagagcaugggcguguaccagauccuggccaucuacagcaccguggccagcagccuggugcugcuggugagccugggcgccaucagcuucuggaugugcagcaacggcagccugcagugcagaaucugcaucuga

SEQ ID NO: 161653 - RNA, 1701 nt, Artificial Sequence
  derived and/or modified CDS sequence (opt4) from hemagglutinin__InfluenzaA__ABO33036
augaagaccaucaucgcccugagcuacauccugugccugguguucgcccagaagcugcccggcaacgacaacagcaccgccacccugugccugggccaccacgccgugcccaacggcacccuggugaagaccaucaccaacgaccagaucgaggugaccaacgccaccgagcuggugcagagcagcagcaccggcagaaucugcaacagcccccaccagauccuggacggcgagaacugcacccugaucgacgcccugcugggcgacccccacugcgacggcuuccagaacaaggagugggaccuguucguggagagaagaaaggccuacagcaacugcuaccccuacgacgugcccgacuacgccagccugagaagccugguggccagcagcggcacccuggaguucaacaacgagagcuucaacuggaccggcguggcccagaacggcaccagcagcgccugcaagagaagaagcaucaagagcuucuucagcagacugaacuggcugcaccagcugaaguacaaguaccccgcccugaacgugaccaugcccaacaacgagaaguucgacaagcuguacaucuggggcgugcaccaccccagcaccgacagcgaccagaucagccuguacgcccaggccagcggcagagugaccgugagcaccaagagaagccagcagaccgugauccccaacaucggcagcagacccugggugagaggcgugagcagcagaaucagcaucuacuggaccaucgugaagcccggcgacauccugcugaucaacagcaccggcaaccugaucgcccccagaggcuacuucaagaucagaagcggcaagagcagcaucaugagaagcgacgcccccaucggcaagugcaacagcgagugcaucacccccaacggcagcauccccaacgacaagcccuuccagaacgugaacagaaucaccuacggcgccugccccagauacgugaagcagaacacccugaagcuggccaccggcaugagaaacgugcccgagaagcagaccagaggcaucuucggcgccaucgccggcuucaucgagaacggcugggagggcaugguggacggcugguacggcuucagacaccagaacagcgagggcaccggccaggccgccgaccugaagagcacccaggccgccaucaaccagaucaacggcaagcugaacagacugaucgagaagaccaacgagaaguuccaccagaucgagaaggaguucagcgagguggagggcagaauccaggaccuggagaaguacguggaggacaccaagaucgaccuguggagcuacaacgccgagcugcugguggcccuggagaaccagcacaccaucgaccugaccgacagcgagaugaacaagcuguucgagagaaccaagaagcagcugagagagaacgccgaggacaugggcaacggcugcuucaagaucuaccacaagugcgacaacgccugcaucggcagcaucagaaacggcaccuacgaccacgacguguacagagacgaggcccugaacaacagauuccagaucaagggcguggagcugaagagcggcuacaaggacuggauccuguggaucagcuucgccaucagcugcuuccugcugugcguggugcugcugggcuucaucaugugggccugccagaagggcaacaucagaugcaacaucugcaucuga

SEQ ID NO: 161654 - RNA, 1701 nt, Artificial Sequence; identical to SEQ ID NO: 160132
  derived and/or modified CDS sequence (opt4) from hemagglutinin__InfluenzaA__ABO33047

SEQ ID NO: 161655 - RNA, 1701 nt, Artificial Sequence; identical to SEQ ID NO: 160710
  derived and/or modified CDS sequence (opt4) from hemagglutinin__InfluenzaA__ABO33058

SEQ ID NO: 161656 - RNA, 1701 nt, Artificial Sequence
  derived and/or modified CDS sequence (opt4) from hemagglutinin__InfluenzaA__ABO33069
augaagaccaucaucgcccugagcuacaucuucugccugguguucgcccagaaccugcccggcaacgacaacagcaccgccacccugugccugggccaccacgccgugcccaacggcacccuggugaagaccaucaccaacgaccagaucgaggugaccaacgccaccgagcuggugcagagcagcagcaccggcagaaucugcgacagcccccacagaauccuggacggcaagaacugcacccugaucgacgcccugcugggcgacccccacugcgacggcuuccagaacgagaagugggaccuguucguggagagaagcaaggccuucagcaacugcuaccccuacgacgugcccgacuacgccagccugagaagccugguggccagcagcggcacccuggaguucaucaacgagggcuucaacuggaccggcgugacccagaacggcggcagcuacgccugcaagagaggccccgacaacagcuucuucagcagacugaacuggcuguacgagagcgagagcaaguaccccgugcugaacgugaccaugcccaacaacgacaacuucgacaagcuguacaucuggggcgugcaccaccccagcaccgacaaggagcagaccaaccuguacgugcaggccagcggcagagugaccgugagcaccaagaagagccagcagaccaucauccccaacgugggcagcagacccugggugagaggccugagcagcagaaucagcaucuacuggaccaucgugaagcccggcgacauccugcugaucaacagcaacggcaaccugaucgcccccagaggcuacuucaagaucagaaccggcaagagcagcaucaugagaagcgacgcccccaucggcaccugcagcagcgagugcaucacccccaacggcagcauccccaacgacaagcccuuccagaacgugaacaagaucaccuacggcgccugccccaaguacgugaagcagaacacccugaagcuggccaccggcaugagaaacgugcccgagaagcagaccagaggcaucuucggcgccaucgccggcuucaucgagaacggcugggagggcaugguggacggcugguacggcuucagacaccagaacagcgagggcaccggccaggccgccgaccugaagagcacccaggccgccaucgaccagaucaacggcaagcugaacagagugaucgagaagaccaacgagaaguuccaccagaucgagaaggaguucagcgagguggagggcagaauccaggaccuggagaaguacaucgaggacaccaagaucgaccuguggagcuacaacgccgagcugcugguggcccuggagaaccagcacaccaucgaccugaccgacagcaagaugaacaagcuguucgagaagaccagaagacagcugagagagaacgccgaggacaugggcaacggcugcuucaagaucuaccacaagugcgacaacgccugcaucggcagcaucagaaacggcaccuacgaccacgacguguacagagacgaggcccugaacaacagauuccagaucaagggcguggagcugaagagcggcuacaaggacuggauccuguggaucagcuucgccaucagcugcuuccugcugugcguggugcugcugggcuucaucaugugggccugccagaagggcaacaucagaugcaacaucugcaucuga

SEQ ID NO: 161657 - RNA, 1701 nt, Artificial Sequence; identical to SEQ ID NO: 160981
  derived and/or modified CDS sequence (opt4) from hemagglutinin__InfluenzaA__ABO37988

SEQ ID NO: 161658 - RNA, 1701 nt, Artificial Sequence
  derived and/or modified CDS sequence (opt4) from hemagglutinin__InfluenzaA__ABO38010
augaaggccaagcugcuggugcugcugugcgccuucaccgccaccuacgccgacaccaucugcaucggcuaccacgccaacaacagcaccgacaccguggacaccgugcuggagaagaacgugaccgugacccacagcgugaaccugcuggaggacagccacaacggcaagcugugcagacugaagggcaccgccccccugcagcugggcaacugcagcguggccggcuggauccugggcaaccccgagugcgagagccuguucagcaaggagagcuggagcuacaucgccgagacccccaaccccgagaacggcaccugcuaccccggcuacuucgccgacuacgaggagcugagagagcagcugagcagcgugagcagcuucgagagauucgagaucuuccccaaggagagcagcuggcccaaccacaccgugaccaagggcgugaccgccagcugcagccacaacggcaagagcagcuucuacaagaaccugcuguggcugaccgagaagaacggccuguaccccaaccugagcaagagcuacgugaacaacaaggagaaggaggugcuggugcuguggggcgugcaccaccccagcaacaucggcgaccagagagccaucuaccacaccgagaacgccuacgugagcguggugagcagccacuacagcagaagauucacccccgagaucgccaagagacccaaggugagagaccaggagggcagaaucaacuacuacuggacccugcuggagcccggcgacaccaucaucuucgaggccaacggcaaccugaucgcccccugguacgccuucgcccugagcagaggcgugggcagcggcaucaucaccagcaacgccagcaugggcgacugcgacgccaagugccagaccccccagggcgccaucaacagcagccugcccuuccagaacgugcaccccgugaccaucggcgagugccccaaguacgugagaagcaccaagcugagaauggugaccggccugagaaacauccccagcauccagagcagaggccuguucggcgccaucgccggcuucaucgagggcggcuggaccggcaugaucgacggcugguacggcuaccaccaccagaacgagcagggcagcggcuacgccgccgacaagaagagcacccagaacgccaucgacggcaucaccaacaaggugaacagcgugaucgagaagaugaacacccaguucaccgccgugggcaaggaguucaacaagcuggagagaagaauggagaaccugaacaagaagguggacgacggcuuccuggacaucuggaccuacaacgccgagcugcuggugcugcuggagaacgagagaacccuggacuuccacgacagcaacgugaagaaccuguacgagaaggugaagaaccagcugaagaacaacgccaaggagaucggcaacggcugcuucgaguucuaccacaagugcaacaacgagugcauggagagcgugaagaacggcaccuacgacuaccccaaguacagcgaggagagcaagcugaagagagagaagaucgacggcgugaagcuggagagcaugggcguguaccagauccuggccaucuacagcaccguggccagcagccuggugcugcuggugagccugggcgccaucagcuucuggaugugcagcaacggcagccugcagugcagaaucugcaucuga

SEQ ID NO: 161659 - RNA, 1698 nt, Artificial Sequence
  derived and/or modified CDS sequence (opt4) from hemagglutinin__InfluenzaA__ABO38021
augaaggccaagcugcuggugcugcugugcaccuucaccgccaccuacgccgacaccaucugcaucggcuaccacgccaacaacagcaccgacaccguggacaccgugcuggagaagaacgugaccgugacccacagcgugaaccugcuggaggacagccacaacggcaagcugugccugcugaagggcaucgccccccugcagcugggcaacugcagcguggccggcuggauccugggcaaccccgagugcgagcugcugauccccaaggagagcuggagcuacaucguggagacccccaaccccgagaacggcaccugcuaccccggcuacuucgccgacuacgaggagcugagagagcagcugagcagcgugagcagcuucgagagauucgagaucuuccccaaggagagcagcuggcccaaccacaccgugaccggcgugagcgccagcugcagccacaacggcaagagcagcuucuacagaaaccugcuguggcugaccggcaagaacggccuguaccccaaccugagcaagagcuacgccaacaacaaggagaaggaggugcuggugcuguggggcgugcaccacccccccaacaucggcgaccagagagcccuguaccacaccgagaacgccuacgugagcguggugagcagccacuacagcagaagauucauccccgagauggccaagagacccaaggugagagaccaggagggcagaaucaacuacuacuggacccugcuggagcccggcgacaccaucaucuucgaggccaacggcaaccugaucgcccccugguacgccuucgcccugagcagaggcuucggcagcggcaucaucaccagcaacgcccccaugggcgagugcgacgccaagugccagaccccccagggcgccaucaacagcagccugcccuuccagaacgugcaccccgugaccaucggcgagugccccaaguacgugagaagcgccaagcugagaauggugaccggccugagaaacauccccagcauccagagcagaggccuguucggcgccaucgccggcuucaucgagggcggcuggaccggcaugguggacggcugguacggcuaccaccaccagaacgagcagggcagcggcuacgccgccgaccagaagagcacccagaacgccaucaacggcaucaccaacaaggugaacagcgugaucgagaagaugaacacccaguucaccgccgugggcaaggaguucaacaagcuggagagaagaauggagaaccugaacaagaagguggacgacggcuuccuggacaucuggaccuacaacgccgagcugcuggugcugcuggagaacgagagaacccuggacuuccacgacagcaacgugaagaaccuguacgagaaggugaagagccagcugaagaacaacgccaaggagaucggcaacggcugcuucgaguucuaccacaagugcaacaacgagugcauggagagcgugaagaacggcaccuacgacuaccccaaguacagcgaggagagcaagcugaacagagagaagaucgacggcgugaagcuggagagcaugggcguguaccagauccuggccaucuacagcaccguggccagcagccuggugcugcuggugagccugggcgccaucagcuucuggaugugcagcaacggcagccugcagugcagaaucugcaucuga

SEQ ID NO: 161660 - RNA, 1698 nt, Artificial Sequence
  derived and/or modified CDS sequence (opt4) from hemagglutinin__InfluenzaA__ABO38032
augaaggugaagcugcuggugcugcugugcaccuucaccgccaccuacgccgacaccaucugcaucggcuaccacgccaacaacagcaccgacaccguggacaccgugcuggagaagaacgugaccgugacccacagcgugaaccugcuggaggacagccacaacggcaagcugugccugcugaagggcaucgccccccugcagcugggcaacugcagcguggccggcuggauccugggcaaccccgagugcgagcugcugaucagcaaggagagcuggagcuacaucguggagacccccgaccccgagaacggcaccugcuaccccggcuacuucgccgacuacgaggagcugagagagcagcugagcagcgugagcagcuucgagagauucgagaucuuccccaaggagagcagcuggcccaaccacaccgugaccggcgugagcgccagcugcagccacaacggcaagagcagcuucuacagaaaccugcuguggcugaccggcaagaacggccuguaccccaaccugagcaagagcuacgccaacaacaaggagaaggaggugcuggugcuguggggcgugcaccacccccccaacaucggcgaccagagagcccuguaccacaccgagaacgccuacgugagcguggugagcagccacuacagcagaagauucacccccgagaucgccaagagacccaaggugagagaccaggagggcagaaucaacuacuacuggacccugcuggagcccggcgacaccaucaucuucgaggccaacggcaaccugaucgcccccagauacgccuucgcccugagcagaggcuucggcagcggcaucaucaccagcaacgcccccauggacgagugcgacgccaagugccagacccccaagggcgccaucaacagcagccugcccuuccagaacgugcaccccgugaccaucggcgagugccccaaguacgugagaagcgccaagcugagaauggugaccggccugagaaacauccccagcauccagagcagaggccuguucggcgccaucgccggcuucaucgagggcggcuggaccggcaugguggacggcugguacggcuaccaccaccagaacgagcagggcagcggcuacgccgccgaccagaagagcacccagaacgccaucaacggcaucaccaacaaggugaacagcgugaucgagaagaugaacacccaguucaccgccgugggcaaggaguucaacaagcuggagagaagaauggagaaccugaacaagaagguggacgacggcuuccuggacaucuggaccuacaacgccgagcugcuggugcugcuggagaacgagagaacccuggacuuccacgacagcaacgugaagaaccuguacgagaaggugaagagccagcugaagaacaacgccaaggagaucggcaacggcugcuucgaguucuaccacaagugcaacaacgagugcauggagagcgugaagaacggcaccuacgacuaccccaaguacagcgaggagagcaagcugaacagagagaagaucgacggcgugaagcuggagagcaugggcaucuaccagauccuggccaucuacagcaccguggccagcagccuggugcugcuggugagccugggcgccaucagcuucuggaugugcagcaacggcagccugcagugcagaaucugcaucuga

SEQ ID NO: 161661 - RNA, 1698 nt, Artificial Sequence; identical to SEQ ID NO: 160860
  derived and/or modified CDS sequence (opt4) from hemagglutinin__InfluenzaA__ABO38043

SEQ ID NO: 161662 - RNA, 1701 nt, Artificial Sequence
  derived and/or modified CDS sequence (opt4) from hemagglutinin__InfluenzaA__ABO38054
augaaggccagacugcuggugcugcugugcgcccuggccgccaccgacgccgacaccaucugcaucggcuaccacgccaacaacagcaccgacaccguggacaccgugcuggagaagaacgugaccgugacccacagcgugaaccugcuggaggacagccacaacggcaagcugugcagacugaagggcaucgccccccugcagcugggcaagugcaacaucgccggcuggauccugggcaaccccgagugcgagagccugcugagcgagagaagcuggagcuacaucguggagacccccaacagcgagaacggcaccugcuaccccggcgacuucaucgacuacgaggagcugagagagcagcugagcagcgugagcagcuucgagagauucgagaucuucagcaaggagagcagcuggcccaagcacaacaccaccagaggcgugaccgccgccugcagccacgccggcaagagcagcuucuacagaaaccugcuguggcugaccgagaaggacggcagcuaccccaaccugaacaacagcuacgugaacaagaagggcaaggaggugcuggugcuguggggcgugcaccaccccagcaacaucaaggaccagcagacccuguaccagaaggagaacgccuacgugagcguggugagcagcaacuacaacagaagauucacccccgagaucgccgagagacccaaggugagaggccaggccggcagaaugaacuacuacuggacccugcugaagcccggcgacaccaucauguucgaggccaacggcaaccugaucgcccccugguacgccuucgcccugagcagaggcuucggcagcggcaucaucaccagcaacgccagcaugcacgagugcgacaccaagugccagaccccccagggcgccaucaacagcagccugcccuuccagaacauccaccccgugaccaucggcgagugccccaaguacgugagaagcaccaagcugagaauggugaccggccugagaaacauccccagcauccagagcagaggccuguucggcgccaucgccggcuucaucgagggcggcuggaccggcaugaucgacggcugguacggcuaccaccaccagaacgagcagggcagcggcuacgccgccgaccagaagagcacccagaacgccaucaacggcaucaccaacaaggugaacagcgugaucgagaagaugaacacccaguucaccgccgugggcaaggaguucaacaaccuggagaagagaauggagaaccugaacaagaagguggacgacggcuuccuggacaucuggaccuacaacgccgagcugcuggugcugcuggagaacgagagaacccuggacuuccacgacagcaacgugaagaaccuguacgagaaggugaagaaccagcugagaaacaacgccaaggagaucggcaacggcugcuucgaguucuaccacaagugcaacaacgagugcauggagagcgugaagaacggcaccuacgacuaccccaaguacagcgaggagagcaagcugaacagagagaagaucgacggcgugaagcuggagagcaugggcguguaccagauccuggccaucuacagcaccguggccagcagccuggugcugcuggugagccugggcgccaucagcuucuggaugugcagcaacggcagccugcagugcagaaucugcaucuga

SEQ ID NO: 161663 - RNA, 1701 nt, Artificial Sequence
  derived and/or modified CDS sequence (opt4) from hemagglutinin__InfluenzaA__ABO38065
augaaggccaagcugcuggugcugcugugcgcccugagcgccaccgacgccgacaccaucugcaucggcuaccacgccaacaacagcaccgacaccguggacaccgugcuggagaagaacgugaccgugacccacagcgugaaccugcuggaggacagccacaacggcaagcugugcagacugaagggcaucgccccccugcagcugggcaagugcagcaucgccggcuggauccugggcaaccccgagugcgagagccuguucagcaagaagagcuggagcuacaucgccgagacccccaacagcgagaacggcaccugcuaccccggcuacuucgccgacuacgaggagcugagagagcagcugagcagcgugagcagcuucgagagauucgagaucuuccccaaggagagaagcuggcccaagcacaacaucaccagaggcgugaccgccagcugcagccacaagggcaagagcagcuucuacagaaaccugcuguggcugaccgagaagaacggcagcuaccccaaccugagcaagagcuacgugaacaacaaggagaaggaggugcuggugcuguggggcgugcaccaccccagcaacaucgaggaccagaagaccaucuacagaaaggagaacgccuacgugagcguggugagcagcaacuacaacagaagauucacccccgagaucgccaagagacccaaggugagaggccaggagggcagaaucaacuacuacuggacccugcuggagcccggcgacaccaucaucuucgaggccaacggcaaccugaucgcccccugguacgccuucgcccugagcagaggcuucggcagcggcaucaucaccagcaacgccagcauggacgagugcgacaccaagugccagaccccccagggcgccaucaacagcagccugcccuuccagaacgugcaccccgugaccaucggcgagugccccaaguacgugagaagcaccaagcugagaauggugaccggccugagaaacauccccagcauccagagcagaggccuguucggcgccaucgccggcuucaucgagggcggcuggaccggcaugaucgacggcugguacggcuaccaccaccagaacgagcagggcagcggcuacgccgccgaccagaagagcacccagaacgccaucaacggcaucaccaacaaggugaacagcgugaucgagaagaugaacacccaguucaccgccgugggcaaggaguucaacaagcuggagaagagaauggagaaccugaacaagaagguggacgacggcuuccuggacaucuggaccuacaacgccgagcugcuggugcugcuggagaacgagagaacccuggacuuccacgacagcaacgugaagaaccuguacgagaaggugaagagccagcugaagaacaacgccaaggagaucggcaacggcugcuucgaguucuaccacaagugcaacaacgagugcauggagagcgugaagaacggcaccuacgacuaccccaaguacagcgaggagagcaagcugaacagagagaagaucgacggcgugaagcuggagagcaugggcguguaccagauccuggccaucuacagcaccguggccagcagccuggugcugcuggugagccugggcgccaucagcuucuggaugugcagcaacggcagccugcagugcagaaucugcaucuga

SEQ ID NO: 161664 - RNA, 1701 nt, Artificial Sequence; identical to SEQ ID NO: 160303
  derived and/or modified CDS sequence (opt4) from hemagglutinin__InfluenzaA__ABO38076

SEQ ID NO: 161665 - RNA, 1701 nt, Artificial Sequence
  derived and/or modified CDS sequence (opt4) from hemagglutinin__InfluenzaA__ABO38087
augaagaccaucaucgcccugagcuacauccugugccugguguucgcccagaagcugcccgugaacgacaacagcaccgccacccugugccugggccaccacgccgugcccaacggcacccuggugaagaccaucaccaacgaccacaucgaggugaccaacgccaccgagcuggugcagagcagcagcaccggcagaaucugcgacagcccccaccagauccuggacggcgagaacugcacccugaucgacgcccugcugggcgacccccacugcgacggcuuccagaacaaggagugggaccuguucguggagagaagcaccgccuacagcaacugcuaccccuacgacgugcccgacuacgccagccugagaagccugguggccagcagcggcacccuggaguucaacaacgagagcuucaacuggaccggcguggcccagaacggcaccagcagcgccugcaagagaagaagcaucaagagcuucuucagcagacugaacuggcugcaccagcugaaguacaaguaccccgcccugaacgugaccaugcccaacaacgagaaguucgacaagcuguacaucuggggcgugcaccaccccagcaccgacagcgaccagaucagccuguacgcccaggccagcggcagagugaccgugagcaccaagagaagccagcagaccgugauccccaacaucggcagcagacccugggugagaggcgugagcagcagaaucagcaucuacuggaccaucgugaagcccggcgacauccugcugaucaacagcaccggcaaccugaucgcccccagaggcuacuucaagaucagaagcggcaagagcagcaucaugagaagcaacgcccccaucggcaagugcaacagcgagugcaucacccccaacggcagcauccccaacgacaagcccuuccagaacgugaacagaaucaccuacggcgccugccccagauacgugaagcagaacacccugaagcuggccaccggcaugagaaacgugcccgagaagcagaccagaggcaucuucggcgccaucgccggcuucaucgagaacggcugggagggcaugguggacggcugguacggcuucagacaccagaacagcgagggcaccggccaggccgccgaccugaagagcacccaggccgccaucaaccagaucaacggcaagcugaacagacugaucgagaagaccaacgagaaguuccaccagaucgagaaggaguucagcgagguggagggcagaauccaggaccuggagaaguacguggaggacaccaagaucgaccuguggagcuacaacgccgagcugcugguggcccuggagaaccagcacaccaucgaccugaccgacagcgagaugaacaagcuguucgagagaaccagaaagcagcugagagagaacgccgaggacgugggcaacggcugcuucaagaucuaccacaagugcgacaacgccugcaucggcagcaucagaaacggcaccuacgaccacgacguguacagagacgaggcccugaacaacagauuccagaucaagggcguggagcugaagagcggcuacaaggacuggauccuguggaucagcuucgccaucagcugcuuccugcugugcguggugcugcugggcuucaucaugugggccugccagaagggcaacaucagaugcaacaucugcaucuga

SEQ ID NO: 161666 - RNA, 1689 nt, Artificial Sequence
  derived and/or modified CDS sequence (opt4) from hemagglutinin__InfluenzaA__ABO38098
auggccaucaucuaccugauccugcuguucaccgccgugagaggcgaccagaucugcaucggcuaccacgccaacaacagcaccgagaagguggacaccauccuggagagaaacgugaccgugacccacgccaaggacauccuggagaagacccacaacggcaagcugugcaagcugaacggcauccccccccuggagcugggcgacugcagcaucgccggcuggcugcugggcaaccccgagugcgacagacugcugagcgugcccgaguggagcuacaucauggagaaggagaaccccagagacggccugugcuaccccggcagcuucaacgacuacgaggagcugaagcaccugcugagcagcgugaagcacuucgagaaggugaagauccugcccaaggacagauggacccagcacaccaccaccggcggcagcagagccugcgccgugagcggcaaccccagcuucuucagaaacaugguguggcugaccaagaagggcagcaacuaccccguggccaagggcagcuacaacaacaccagcggcgagcagaugcugaucaucuggggcgugcaccaccccaacgacgagaccgagcagagaacccuguaccagaacgugggcaccuacgugagcgugggcaccagcacccugaacaagagaagcacccccgacaucgccaccagacccaaggugaacggccagggcggcagaauggaguucagcuggacccugcuggacaugugggacaccaucaacuucgagagcaccggcaaccugaucgcccccgaguacggcuucaagaucagcaagagaggcagcagcggcaucaugaagaccgagggcacccugggcaacugcgagaccaagugccagaccccccugggcgccaucaacaccacccugcccuuccacaacgugcacccccugaccaucggcgagugccccaaguacgugaagagcgagaagcuggugcuggccaccggccugagaaacgugccccagaucgagagcagaggccuguucggcgccaucgccggcuucaucgagggcggcuggcagggcaugguggacggcugguacggcuaccaccacagcaacgaccagggcagcggcuacgccgccgacaaggagagcacccagaaggccuucgacggcaucaccaacaaggugaacagcgugaucgagaagaugaacacccaguucgaggccgugggcaaggaguucagcaaccuggagagaagacuggagaaccugaacaagaagauggaggacggcuuccuggacguguggaccuacaacgccgagcugcuggugcugauggagaacgagagaacccuggacuuccacgacagcaacgugaagaaccuguacgacaaggugagaaugcagcugagagacaacgugaaggagcugggcaacggcugcuucgaguucuaccacaagugcgacgacgagugcaugaacagcgugaagaacggcaccuacgacuaccccaaguacgaggaggagagcaagcugaacagaaacgagaucaagggcgugaagcugagcagcaugggcguguaccagauccuggccaucuacgccaccguggccggcagccugagccuggccaucaugauggccggcaucagcuucuggaugugcagcaacggcagccugcagugcagaaucugcaucuga

SEQ ID NO: 161667 - RNA, 1701 nt, Artificial Sequence
  derived and/or modified CDS sequence (opt4) from hemagglutinin__InfluenzaA__ABO38230
augaagaccaucaucgcccugagcuacaucuucugccagguguucgcccagaaccugcccggcaacgacaacagcaccgccacccugugccugggccaccacgccgugcccaacggcacccuggugaagaccaucaccaacgaccagaucgaggugaccaacgccaccgagcuggugcagagcagcagcaccggcagaaucugcgacaacccccacagaauccuggacggcaagaacugcacccugaucgacgcccugcugggcgacccccacugcgacggcuuccagaacgagaagugggaccuguucguggagagaagcaaggccuucagcaacugcuaccccuacgacgugcccgacuacgccagccugagaagccugguggccagcagcggcacccuggaguucuucaacgagggcuucaacuggaccggcgugacccagaacggcggcagcuacgccugcaagagaggccccgacaacagcuucuucagcagacugaacuggcuguacaagagcgagagcaccuaccccgugcugaacgugaccaugcccaacaacgacaacuucgacaagcuguacaucuggggcgugcaccaccccagcaccgacaaggagcagaccaaccuguacgugcaggccagcggcagagugaccgugagcaccaagagaagccagcagaccaucauccccagcgugggcagcagacccugggugagaggccugagcagcagaaucagcaucuacuggaccaucgugaagcccggcgacgugcugcugaucaacagcaacggcaaccugaucgcccccagaggcuacuucaagaucagaaccggcaagagcagcaucaugagaagcgacgcccccaucggcaccugcagcagcgagugcaucacccccaacggcagcauccccaacgacaagcccuuccagaacguggacaagaucaccuacggcgccugccccaaguacgugaagcagaacacccugaagcuggccaccggcaugagaaacgugcccgagaagcagaccagaggcaucuucggcgccaucgccggcuucaucgagaacggcugggagggcaugaucgacggcugguacggcuucagacaccagaacagcgagggcaccggccaggccgccgaccugaagagcacccaggccgccaucgaccagaucaacggcaagcugaacagagugaucgagaagaccaacgagaaguuccaccagaucgagaaggaguucagcgagguggagggcagaauccaggaccuggagaaguacguggaggacaccaagaucgaccuguggagcuacaacgccgagcugcugguggcccuggagaaccagcacaccaucgaccugaccgacagcgagaugaacaagcuguucgagaagaccagaagacagcugagagagaacgccgaggacaugggcaacggcugcuucaagaucuaccacaagugcgacaacgccugcaucggcagcaucagaaacggcaccuacgaccacgacguguacagagacgaggcccugaacaacagauuccagaucaagggcguggagcugaagagcggcuacaaggacuggauccuguggaucagcuucgccaucagcugcuuccugcugugcguggugcugcugggcuucaucaugugggccugccagaagggcaacaucagaugcaacaucugcaucuga

SEQ ID NO: 161668 - RNA, 1701 nt, Artificial Sequence
  derived and/or modified CDS sequence (opt4) from hemagglutinin__InfluenzaA__ABO38241
augaagaccaucaucgcccugagcuacaucagcugccugguguucgcccagaagcugcccggcaacgacaacagcaccgccacccugugccugggccaccacgccgugcccaacggcacccuggugaagaccaucaccaacgaccagaucgaggugaccaacgccaccgagcuggugcagagcagcagcaccggcagaaucugcgacagcccccacagaauccuggacggcaagaacugcacccugaucgacgcccugcugggcgacccccacugcgacggcuuccagaacgagaagugggaccuguucguggagagaagcaaggccuucagcaacugcuaccccuacgacgugcccgacuacgccagccugagaagccugguggccagcagcggcacccuggaguucaucaacgagggcuucaacuggaccggcgugacccagagcggcggcagcuacaccugcaagagaggcagcgugaacagcuucuucagcagacugaacuggcuguacgagagcgagagcaaguaccccgcccugaacgugaccaugcccaacaacggcaaguucgacaagcuguacaucuggggcgugcaccaccccagcaccgacaaggagcagaccaaccuguacgugagagccagcggcagagugaccgugagcaccaagagaagccagcagaccgugauccccaacaucggccccagacccugggugagaggccugagcagcagaaucagcaucuacuggaccaucgugaagcccggcgacauccugcugaucaacagcaccggcaaccugaucgcccccagaggcuacuucaagaucagaaccggcaagagcagcaucaugagaagcgacgcccccaucggcaccugcagcagcggcugcaucacccccaacggcagcauccccaacgacaagcccuuccagaacgugaacaagaucaccuacggcgccugccccagauacgugaagcagaacacccugaagcuggccaccggcaugagaaacgugcccgagaagcagaccagaggcaucuucggcgccaucgccggcuucaucgagaacggcugggagggcaugguggacggcugguacggcuucagacaccagaacagcgagggcaccggccaggccgccgaccugaagagcacccaggccgccaucgaccagaucaacggcaagcugaacagacugaucgagaagaccaacgagaaguuccaccagaucgagaaggaguucagcgagguggagggcagaauccaggaccuggagaaguacguggaggacaccaagaucgaccuguggagcuacaacgccgagcugcugguggcccuggagaaccagcacaccaucgacaugaccgacagcgagaugaacaagcuguucgagaagaccagaaagcagcugagagagaacgccgaggacaugggcaacggcugcuucaagaucuaccacaagugcgacaacgccugcaucggcagcaucagaaacggcaccuacgaccacgacguguacagagacgaggcccugaacaacagauuccagaucaagggcguggagcugaagagcggcuacaaggacuggauccuguggaucagcuucgccaucagcugcuuccugcugugcguggugcugcugggcuucaucaugugggccugccagaagggcaacaucagaugcaacaucugcaucuga

SEQ ID NO: 161669 - RNA, 1701 nt, Artificial Sequence; identical to SEQ ID NO: 160342
  derived and/or modified CDS sequence (opt4) from hemagglutinin__InfluenzaA__ABO38252

SEQ ID NO: 161670 - RNA, 1689 nt, Artificial Sequence
  derived and/or modified CDS sequence (opt4) from hemagglutinin__InfluenzaA__ABO38296
auggugaucaucuaccugauccugcuguucaccgccgugagaggcgaccagaucugcaucggcuaccacgccaacaacagcaccgagaagguggacaccauccuggagagaaacgugaccgugacccacgccaaggacauccuggagaagacccacaacggcaagcugugcaagcugaacggcauccccccccuggagcugggcgacugcagcaucgccggcuggcugcugggcaaccccgagugcgacagacugcugagcgugcccgaguggagcuacaucauggagaaggagaaccccagagacggccugugcuaccccggcagcuucaacgacuacgaggagcugaagcacuuccugagcagcgugaagcacuucgagaaggugaagauccugcccaaggacagauggacccagcacaccaccaccggcggcagcagagccugcgccgugagcggcaaccccagcuucuucagaaacaugguguggcugaccaagaagggcagcaacuaccccguggccaagggcagcuacaacaacaccagcggcgagcagaugcugaucaucuggggcgugcaccaccccaacgacgagaccgagcagagaacccuguaccagaacgugggcaccuacgugagcgugggcaccagcacccugaacaagagaagcacccccgacaucgccaccagacccaaggugaacggccugggcggcagaauggaguucagcuggacccugcuggacaugugggacaccaucaacuucgagagcaccggcaaccugaucgcccccgaguacggcuucaagaucagcaagagaggcagcagcggcaucaugaagaccgagggcacccugggcaacugcgagaccaagugccagaccccccugggcgccaucaacaccacccugcccuuccacaacgugcacccccugaccaucggcgagugccccaaguacgugaagagcgagaagcuggugcuggccaccggccugagaaacgugccccagaucgagagcagaggccuguucggcgccaucgccggcuucaucgagggcggcuggcagggcaugguggacggcugguacggcuaccaccacagcaacgaccagggcagcggcuacgccgccgacaaggagagcacccagaaggccuucgacggcaucaccaacaaggugaacagcgugaucgagaagaugaacacccaguucgaggccgugggcaaggaguucagcaaccuggagagaagacuggagaaccugaacaagaagauggaggacggcuuccuggacguguggaccuacaacgccgagcugcuggugcugauggagaacgagagaacccuggacuuccacgacagcaacgugaagaaccuguacgacaaggugagaaugcagcugagagacaacgccaaggagcugggcaacggcugcuucgaguucuaccacaagugcgacgacgagugcaugaacagcgugaagaacggcaccuacuacuaccccaaguacgaggaggagagcaagcugaacagaaacgagaucaagggcgugaagcugagcagcaugggcguguaccagauccuggccaucuacgccaccguggccggcagccugagccuggccaucaugauggccggcaucagcuucuggaugugcagcaacggcagccugcagugcagaaucugcaucuga

SEQ ID NO: 161671 - RNA, 1698 nt, Artificial Sequence; identical to SEQ ID NO: 160930
  derived and/or modified CDS sequence (opt4) from hemagglutinin__InfluenzaA__ABO38318

SEQ ID NO: 161672 - RNA, 1698 nt, Artificial Sequence; identical to SEQ ID NO: 160860
  derived and/or modified CDS sequence (opt4) from hemagglutinin__InfluenzaA__ABO38329

SEQ ID NO: 161673 - RNA, 1701 nt, Artificial Sequence
  derived and/or modified CDS sequence (opt4) from hemagglutinin__InfluenzaA__ABO38351
augaaggccagacugcuggugcugcugugcgcccuggccgccaccgacgccgacaccaucugcaucggcuaccacgccaacaacagcaccgacaccguggacaccgugcuggagaagaacgugaccgugacccacagcgugaaccugcuggaggacagccacaacggcaagcugugcagacugaagggcaucgccccccugcagcugggcaagugcaacaucgccggcuggcugcugggcaaccccgagugcgacccccugcugcccgccagaagcuggagcuacaucguggagacccccaacagcgagaacggcaucugcuaccccggcgccuucaucgacuacgaggagcugagagagcagcugagcagcgugagcagcuucgagagauucgagaucuuccccaaggagagcagcuggcccaaccacaacaccaacaucggcgugaccgccgccugcagccacgccggcaagagcagcuucuacagaaaccugcuguggcugaccaagaagggcggcagcuaccccaagcugaagaacagcuacgugaacaagaagggcaaggaggugcuggugcuguggggcauccaccaccccagcaacagcaaggaccagcagacccuguaccagaacgagaacgccuacgugagcguggugagcagcaacuacaacagaagauucacccccgagaucgccgagagacccgaggugagagaccaggccggcagaaugaacuacuacuggacccugcuggagcccggcgacaccaucauguucgaggccaacggcaaccugguggcccccugguacgccuucgcccugagcagaggcuucggcagcggcaucaucaccagcaacgccagcaugcacgagugcaacaccaagugccagaccccccagggcgccaucaacagcagccugcccuuccagaacauccaccccgugaccaucggcgagugccccaaguacgugagaagcgccaagcugagaauggugaccggccugagaaacauccccagcauccagagcagaggccuguucggcgccaucgccggcuucaucgagggcggcuggaccggcaugaucgacggcugguacggcuaccaccaccagaacgagcagggcagcggcuacgccgccgaccagaagagcacccagaacgccaucaacggcaucaccaacaaggugaacagcgugaucgagaagaugaacacccaguucaccgccgugggcaaggaguucaacaaccuggagaagagaauggagaaccugaacaagaagguggacgacggcuuccuggacaucuggaccuacaacgccgagcugcuggugcugcuggagaacgagagaacccuggacuuccacgacagcaacgugaagaaccuguacgagaaggugaagagccagcugaagaacaacgccaaggagaucggcaacggcugcuucgaguucuaccacaagugcgacaacgagugcauggagagcgugagaaacggcaccuacgacuaccccaaguacagcgaggagagcaagcugaacagagagaagaucgacggcgugaagcuggagagcaugggcguguaccagauccuggccaucuacagcaccguggccagcagccuggugcugcuggugagccugggcgccaucagcuucuggaugugcagcaacggcagccugcagugcagaaucugcaucuga

SEQ ID NO: 161674 - RNA, 1701 nt, Artificial Sequence
  derived and/or modified CDS sequence (opt4) from hemagglutinin__InfluenzaA__ABO38362
augaaggccaagcugcuggugcugcugugcgcccugagcgccaccgacgccgacaccaucugcaucggcuaccacgccaacaacagcaccgacaccguggacaccgugcuggagaagaacgugaccgugacccacagcgugaaccugcuggaggacagccacaacggcaagcugugcagacugaagggcaucgccccccugcagcugggcaagugcagcaucgccggcuggauccugggcaaccccgagugcgagagccuggugagcaagaagagcuggagcuacaucgccgagacccccaacagcgagaacggcaccugcuaccccggcuacuucgccgacuacgaggagcugagagagcagcugagcagcgugagcagcuucgagagauucgagaucuuccccaaggagagcagcuggcccaagcacaacgugaccagaggcgugaccgccagcugcagccacaagggcaagagcagcuucuacagaaaccugcuguggcugaccgagaagaacggcagcuaccccaaccugagcaagagcuacgugaacaacaaggagaaggaggugcuggugcuguggggcgugcaccaccccagcaacaucgagaaccagaagaccaucuacagaaaggagaacgccuacgugagcguggugagcagccacuacaacagaagauucacccccgagaucgccaagagacccaaggugagagaccaggagggcagaaucaacuacuacuggacccugcuggagcccggcgacaccaucaucuucgaggccaacggcaaccugaucgcccccugguacgccuucgcccugagcagaggcuucggcagcggcaucaucaccagcaacgccagcaucgacgagugcgacgccaagugccagaccccccagggcgccaucaacagcagccugcccuuccagaacgugcaccccgugaccaucggcgagugccccaaguacgugagaagcaccaagcugagaauggugaccggccugagaaacauccccagcauccagagcagaggccuguucggcgccaucgccggcuucaucgagggcggcuggaccggcaugaucgacggcugguacggcuaccaccaccagaacgagcagggcagcggcuacgccgccgaccagaagagcacccagaacgccaucaacggcaucaccaacaaggugaacagcgugaucgagaagaugaacacccaguucaccgccgugggcaaggaguucaacaagcuggagaagagaauggagaaccugaacaagaagguggacgacggcuuccuggacaucuggaccuacaacgccgagcugcuggugcugcuggagaacgagagaacccuggacuuccacgacagcaacgugaagaaccuguacgagaaggugaagagccagcugaagaacaacgccaaggagaucggcaacggcugcuucgaguucuaccacaagugcaacaacgagugcauggagagcgugaagaacggcaccuacgacuaccccaaguacagcgaggagagcaagcugaacagagagaagaucgacggcgugaagcuggagagcaugggcguguaccagauccuggccaucuacagcaccguggccagcagccuggugcugcuggugagccugggcgccaucagcuucuggaugugcagcaacggcagccugcagugcagaaucugcaucuga

SEQ ID NO: 161675 - RNA, 1698 nt, Artificial Sequence
  derived and/or modified CDS sequence (opt4) from hemagglutinin__InfluenzaA__ABO38373
augaaggccagacugcuggugcugcugugcgcccuggccgccaccgacgccgacaccaucugcaucggcuaccacgccaacaacagcaccgacaccguggacaccgugcuggagaagaacgugaccgugacccacagcgugaaccugcuggaggacagccacaacggcaagcugugcagacugaagggcaucgccccccugcagcugggcaagugcaacaucgccggcuggauccugggcaaccccgagugcgagagccugcugagcgagagaagcuggagcuacaucguggagacccccaacagcgagaacggcaccugcuaccccggcgacuucaucgacuacgaggagcugagagagcagcugagcagcgugagcagcuucgagagauucgagaucuucagcaaggagagcagcuggcccaagcacaccaccggcggcgugaccgccgccugcagccacgccggcaagagcagcuucuacagaaaccugcuguggcugaccgagaaggacggcagcuaccccaaccugaacaacagcuacgugaacaagaagggcaaggaggugcuggugcuguggggcgugcaccaccccagcaacaucaaggaccagcagacccuguaccagaaggagaacgccuacgugagcguggugagcagcaacuacaacagaagauucacccccgagaucgccgagagacccaaggugagaggccaggccggcagaaucaacuacuacuggacccugcugaagcccggcgacaccaucauguucgaggccaacggcaaccugaucgcccccugguacgccuucgcccugagcagaggcuucggcagcggcaucaucaccagcaacgccagcaugcacgagugcgacaccaagugccagaccccccagggcgccaucaacagcagccugcccuuccagaacauccaccccgugaccaucggcgagugccccaaguacgugagaagcaccaagcugagaauggugaccggccugagaaacauccccagcauccagagcagaggccuguucggcgccaucgccggcuucaucgagggcggcuggaccggcaugaucgacggcugguacggcuaccaccaccagaacgagcagggcagcggcuacgccgccgaccagaagagcacccagaacgccaucaacggcaucaccaacaaggugaacagcgugaucgagaagaugaacacccaguucaccgccgugggcaaggaguucaacaaccuggagaagagaauggagaaccugaacaagaagguggacgacggcuuccuggacaucuggaccuacaacgccgagcugcuggugcugcuggagaacgagagaacccuggacuuccacgacagcaacgugaagaaccuguacgagaaggugaagaaccagcugagaaacaacgccaaggagaucggcaacggcugcuucgaguucuaccacaagugcaacaacgagugcauggagagcgugaagaacggcaccuacgacuaccccaaguacagcgaggagagcaagcugaacagagagaagaucgacggcgugaagcuggagagcaugggcguguaccagauccuggccaucuacagcaccgccgccagcagccuggugcugcuggugagccugggcgccaucagcuucuggaugugcagcaacggcagccugcagugcagaaucugcaucuga

SEQ ID NO: 161676 - RNA, 1701 nt, Artificial Sequence
  derived and/or modified CDS sequence (opt4) from hemagglutinin__InfluenzaA__ABO38384
augaaggccagacugcuggugcugcugugcgcccuggccgccgccgacgccgacaccaucugcaucggcuaccacgccaacaacagcaccgacaccguggacaccgugcuggagaagaacgugaccgugacccacagcgugaaccugcuggaggacagccacaacggcaagcugugcagacugaagggcauccccccccugcagcugggcaagugcaacaucgccggcuggcugcugggcaaccccgagugcgacagccugcugcccgccagaagcuggagcuacaucguggagacccccaacagcgagaacggcgccugcuaccccggcgacuucaucaacuacgaggagcugagagagcagcugagcagcgugagcagcuucgagagauucgagaucuuccccaaggagagcagcuggcccaagcacaacaccaccaagggcgugaccgccgccugcagccacgccggcaagagcagcuucuacagaaaccugcuguggcugaccaagaaggaggacagcuaccccaagcugaagaacagcuacgugaacaagaagggcaaggaggugcuggugcuguggggcgugcaccaccccagcagcagcaaggagcagcagacccuguaccagaacgagaacgccuacgugagcguggugagcagcaacuacaacagaagauucacccccgagaucgccgagagacccaaggugagagaccagaccggcagaaugaacuacuacuggacccugcuggagcccggcgacaccaucaucuucgaggccaacggcaaccugaucgcccccugguacgccuucgcccugagcagaggcuucggcagcggcaucaucaccagcaacgccagcaugcacgagugcaacaccaagugccagaccccccagggcgccaucaacagcagccugcccuuccagaacauccaccccgugaccaucggcgagugccccaaguacgugagaagcgccaagcugagaauggugaccggccugagaaacauccccagcauccagagcagaggccuguucggcgccaucgccggcuucaucgagggcggcuggaccggcaugaucgacggcugguacggcuaccaccaccagaacgagcagggcagcggcuacgccgccgaccagaagagcacccagaacgccaucaacggcaucaccaacaaggugaacagcgugaucgagaagaugaacacccaguucaccgccgugggcaaggaguucaacaaccuggagaagagaauggagaaccugaacaagaagguggacgacggcuuccuggacaucuggaccuacaacgccgagcugcuggugcugcuggagaacgagagaacccuggacuuccacgacagcaacgugaagaaccuguacgagaaggugaagagccagcugaagaacaacgccaaggagaucggcaacggcugcuucgaguucuaccacaagugcgacaacgagugcauggagagcgugagaaacggcaccuacgacuaccccaaguacagcgaggagagcaagcugaacagagagaagaucgacggcgugaagcuggagagcaugggcguguaccagauccuggccaucuacagcaccguggccagcagccuggugcugcuggugagccugggcgccaucagcuucuggaugugcagcaacggcagccugcagugcagaaucugcaucuga

SEQ ID NO: 161677 - RNA, 1701 nt, Artificial Sequence
  derived and/or modified CDS sequence (opt4) from hemagglutinin__InfluenzaA__ABO38395
augaaggccaagcugcuggugcugcugugcgccuucaccgccaccgacgccgacaccaucugcaucggcuaccacgccaacaacagcaccgacaccguggacaccgugcuggagaagaacgugaccgugacccacagcgugaaccugcuggaggacagccacaacggcaagcugugcagacugaagggcaucgccccccugcagcugggcaacugcagcaucgccggcuggauccugggcaaccccgagugcgagagccuguucagcaagaagagcuggagcuacaucgccgagacccccaacagcgagaacggcaccugcuaccccggcuacuucgccgacuacgaggagcugagagagcagcugagcagcgugagcagcuucgagagauucgagaucuuccccaaggagagcagcuggcccaaccacaccgugaccaagggcgugaccgccagcugcagccacaagggcagaagcagcuucuacagaaaccugcuguggcugaccaagaagaacggcagcuaccccaaccugagcaagagcuacgugaacaacaaggagaaggaggugcuggugcuguggggcgugcaccaccccagcaacaucggcgaccagagagccaucuaccacaccgagaacgccuacgugagcguggugagcagccacuacaacagaagauucacccccgagaucgccaagagacccaaggugagagaccaggagggcagaaucaacuacuacuggacccugcuggagcccggcgacaccaucaucuucgaggccaacggcaaccugaucgcccccugguacgccuucgcccugagcagaggcuucggcagcggcaucaucaccagcaacgccagcauggacgagugcgacgccaagugccagaccccccagggcgccaucaacagcagccugcccuuccagaacgugcaccccgugaccaucggcgagugccccaaguacgugagaagcaccaagcugagaauggugaccggccugagaaacauccccagcauccagagcagaggccuguucggcgccaucgccggcuucaucgagggcggcuggaccggcaugaucgacggcugguacggcuaccaccaccagaacgagcagggcagcggcuacgccgccgaccagaagagcacccagaacgccaucaacggcaucaccaacaaggugaacagcgugaucgagaagaugaacacccaguucaccgccgugggcaaggaguucaacaagcuggagagaagaauggagaaccugaacaagaagguggacgacggcuuccuggacaucuggaccuacaacgccgagcugcuggugcugcuggagaacgagagaacccuggacuuccacgacagcaacgugaagaaccuguacgagaaggugaagagccagcugaagaacaacgccaaggagaucggcaacggcugcuucgaguucuaccacaagugcaacaacgagugcauggagagcgugaagaacggcaccuacgacuaccccaaguacagcgaggagagcaagcugaacagagagaagaucgacggcgugaagcuggagagcaugggcguguaccagauccuggccaucuacagcaccguggccagcagccuggugcugcuggugagccugggcgccaucagcuucuggaugugcagcaacggcagccugcagugcagaaucugcaucuga

SEQ ID NO: 161678 - RNA, 1701 nt, Artificial Sequence
  derived and/or modified CDS sequence (opt4) from hemagglutinin__InfluenzaA__ABO38406
augaaggccaagcugcuggugcugcugugcgcccugagcgccaccgacgccgacaccaucugcaucggcuaccacgccaacaacagcaccgacaccguggacaccgugcuggagaagaacgugaccgugacccacagcgugaaccugcuggaggacaaccacaacggcaagcugugcaagcugaagggcaucgccccccugcagcugggcaagugcagcaucgccggcuggauccugggcaaccccgagugcgagagccuguucagcaagaagagcuggagcuacaucgccgagacccccaacagcgagaacggcaccugcuaccccggcuacuucgccgacuacgaggagcugagagagcagcugagcagcgugagcagcuucgagagauucgagaucuuccccaaggagagcagcuggcccaaccacaacgugaccaagggcgugaccgccagcugcagccacaagggcaagagcagcuucuacagaaaccugcuguggcugaccgagaagaagggcagcuaccccaaccugagcaagagcuacgugaacaacaaggagaaggaggugcuggugcuguggggcauccaccaccccagcaacaucgaggaccagaagaccaucuacagaaaggagaacgccuacgugagcguggugagcagccacuacaacagaagauucacccccgagaucgccaagagacccaaggugagagaccaggagggcagaaucaacuacuacuggacccugcuggagcccggcgacaccaucaucuucgaggccaacggcaaccugaucgcccccugguacgccuucgcccugagcagaggcuucggcagcggcaucaucaccagcaacgccagcauggacgagugcgacgccaagugccagacccccagaggcgccaucaacagcagccugcccuuccagaacgugcaccccgugaccaucggcgagugccccaaguacgugagaagcaccaagcugagaauggugaccggccugagaaacauccccagcauccagagcagaggccuguucggcgccaucgccggcuucaucgagggcggcuggaccggcaugaucgacggcugguacggcuaccaccaccagaacgagcagggcagcggcuacgccgccgaccagaagagcacccagagcgccaucaacggcaucaccaacaaggugaacagcaucaucgagaagaugaacacccaguucaccgccgugggcaaggaguucaacaagcuggagaagagaauggagaaccugaacaagaagguggacgacggcuuccuggacaucuggaccuacaacgccgagcugcuggugcugcuggagaacgagagaacccuggacuuccacgacagcaacgugaagaaccuguacgagaaggugaagagccagcugaagaacaacgccaaggagaucggcaacggcugcuucgaguucuaccacaagugcaacaacgagugcauggagagcgugaagaacggcaccuacgacuaccccaaguacagcgaggagagcaagcugaacagagagaagaucgacggcgugaagcuggagagcaugggcguguaccagauccuggccaucuacagcaccguggccagcagccuggugcugcuggugagccugggcgccaucagcuucuggaugugcagcaacggcagccugcagugcagaaucugcaucuga

SEQ ID NO: 161679 - RNA, 1701 nt, Artificial Sequence
  derived and/or modified CDS sequence (opt4) from hemagglutinin__InfluenzaA__ABO38417
augaagaccaucaucgcccugagcuacauccugugccugguguucgcccagaagcugcccgugaacgacaacagcaccgccacccugugccugggccaccacgccgugcccaacggcacccuggugaagaccaucaccaacgaccacaucgaggugaccaacgccaccgagcuggugcagagcagccccaccggcagaaucugcgacagcccccaccagauccuggacggcgagaacugcacccugaucgacgcccugcugggcgacccccacugcgacggcuuccagaacaaggagugggaccuguucguggagagaagcaccgccuacagcaacugcuaccccuacgacgugcccgacuacgccagccugagaagccugguggccagcagcggcacccuggaguucaacaacgagagcuucaacuggaccggcguggcccagaacggcaccagcagcgccugcaagagaagaagcaucaagagcuucuucagcagacugaacuggcugcaccagcugaaguacaaguaccccgcccugaacgugaccaugcccaacaacgagaaguucgacaagcuguacaucuggggcgugcaccaccccagcaccgacagcgaccagaucagccuguacgcccaggccagcggcagagugaccgugagcaccaagagaagccagcagaccgugauccccaacaucggcagcagacccugggugagaggcgugagcagcagaaucagcaucuacuggaccaucgugaagcccggcgacauccugcugaucaacagcaccggcaaccugaucgcccccagaggcuacuucaagaucagaagcggcaagagcagcaucaugagaagcaacacccccaucggcaagugcaacagcgagugcaucacccccaacggcagcauccccaacgacaagcccuuccagaacgugaacagaaucaccuacggcgccugccccagauacgugaagcagaacacccugaagcuggccaccggcaugagaaacgugcccgagaagcagaccagaggcaucuucggcgccaucgccggcuucaucgagaacggcugggagggcaugguggacggcugguacggcuucagacaccagaacagcgagggcaccggccaggccgccgaccugaagagcacccaggccgccaucaaccagaucaacggcaagcugaacagacugaucgagaagaccaacgagaaguuccaccagaucgagaaggaguucagcgagguggagggcagaauccaggaccuggagaaguacguggaggacaccaagaucgaccuguggagcuacaacgccgagcugcugguggcccuggagaaccagcacaccaucgaccugaccgacagcgagaugaacaagcuguucgagagaaccagaaagcagcugagagagaacgccgaggacaugggcaacggcugcuucaagaucuaccacaagugcgacaacgccugcaucggcagcaucagaaacggcaccuacgaccacgacguguacagagacgaggcccugaacaacagauuccagaucaagggcguggagcugaagagcggcuacaaggacuggauccuguggaucagcuucgccaucagcugcuuccugcugugcguggugcugcugggcuucaucaugugggccugccagaagggcaacaucagaugcaacaucugcaucuga

SEQ ID NO: 161680 - RNA, 1689 nt, Artificial Sequence
  derived and/or modified CDS sequence (opt4) from hemagglutinin__InfluenzaA__ABO38712
auggccaucaucuacuucauccugcuguucaccgccgugagaggcgaccagaucugcaucggcuaccacgccaacaacagcaccgagaagguggacaccauccuggagagaaacgugaccgugacccacgccaaggacauccuggagaagacccacaacggcaagcugugcaagcugaacggcauccccccccuggagcugggcgacugcagcaucgccggcuggcugcugggcaaccccgagugcgacagacugcugagagugcccgaguggagcuacaucauggagaaggagaaccccagauacagccugugcuaccccggcagcuucaacgacuacgaggagcugaagcaccugcugagcagcgugaagcacuucgagaaggugagaauccugcccaaggacggcuggacccagcacaccaccagcggcggcagcaaggccugcgccgugagcggcaagagcagcuucuucagaaacaugguguggcugaccaagaagggccccaacuaccccguggccaagagaagcuacaacaacaccagcggcgagcagaugcugaucaucuggggcgugcaccaccccaaggacgaggccgagcagagagcccuguaccagaaggugggcaccuacgugagcgccagcaccagcacccugaacaagagaagcacccccgagaucgccgccagacccgaggugaacggccugggcagcagaauggaguucagcuggacccugcuggacgugugggacaccaucaacuucgagagcaccggcaaccugguggcccccgaguacggcuucaagaucagcaagagaggcagcagcggcaucaugaagaccgagggcacccugggcaacugcgagaccaagugccagaccccccugggcgccaucaacaccacccugcccuuccacaacgugcacccccugaccaucggcgagugccccaaguacgugaagagcgagaagcuggugcuggccaccggccugagaaacgugccccagaucgagagcagaggccuguucggcgccaucgccggcuucaucgagggcggcuggcagggcaugguggacggcugguacggcuaccaccacagcaacgaccagggcagcggcuacgccgccgacaaggagagcacccagaaggccuucgacagaaucaccaacaaggugaacagcgugaucgagaagaugaacacccaguucgaggccgugggcaaggaguucagcaaccuggagaagagacuggagaaccugaacaagaagauggaggacggcuuccuggacguguggaccuacaacgccgagcugcuggugcugauggagaacgagagaacccuggacuuccacgacagcaacgugaagaaccuguacaacaaggugagaaugcagcugagagacaacgugaaggagcugggcaacggcugcuucgaguucuaccacaagugcgacgacgagugcaugagcagcgugaagaacggcaccuacgacuaccccaaguacgaggaggagagcaagcugaagagaaacgagaucaagggcgugaagcugagcagcaugggcguguaccagauccuggccaucuacgccaccguggccggcagccugagccuggccaucaugaucgccggcaucagccuguggaugugcagcaacggcagccugcagugcagaaucugcaucuga

SEQ ID NO: 161681 - RNA, 1689 nt, Artificial Sequence
  derived and/or modified CDS sequence (opt4) from hemagglutinin__InfluenzaA__ABO38723
auggccaucaucuacuucauccugcuguucaccgccgugagaggcgaccagaucugcaucggcuaccacgccaacaacagcaccgagaagguggacaccauccuggagagaaacgugaccgugacccacgccaaggacauccuggagaagacccacaacggcaagcugugcaagcugaacggcauccccccccuggagcugggcgacugcagcaucgccggcuggcugcugggcaaccccgagugcgacagacugcugagagugcccgaguggagcuacaucauggagaaggagaaccccagauacagccugugcuaccccggcagcuucaacgacuacgaggagcugaagcaccugcugagcagcgugaagcacuucgagaaggugagaauccugcccaaggacggcuggacccagcacaccaccagcggcggcagcaaggccugcgccgugagcggcaagagcagcuucuucagaaacaugguguggcugaccaagaagggccccaacuaccccguggccaagagaagcuacaacaacaccagcggcgagcagaugcugaucaucuggggcgugcaccaccccaacgacgaggccgagcagagagcccuguaccagaaggugggcaccuacgugagcgccagcaccagcacccugaacaagagaagcacccccgagaucgccgccagacccgaggugaacggccugggcagcagaauggaguucagcuggacccugcuggacgugugggacaccaucaacuucgagagcaccggcaaccugguggcccccgaguacggcuucaagaucagcaagagaggcagcagcggcaucaugaagaccgagggcacccugggcaacugcgagaccaagugccagaccccccugggcgccaucaacaccacccugcccuuccacaacgugcacccccugaccaucggcgagugccccaaguacgugaagagcgagaagcuggugcuggccaccggccugagaaacgugccccagaucgagagcagaggccuguucggcgccaucgccggcuucaucgagggcggcuggcagggcaugguggacggcugguacggcuaccaccacagcaacgaccagggcagcggcuacgccgccgacaaggagagcacccagaaggccuucgacagaaucaccaacaaggugaacagcgugaucgagaagaugaacacccaguucgaggccgugggcaaggaguucagcaaccuggagaagagacugggcaaccugaacaagaagauggaggacggcuuccuggacguguggaccuacaacgccgagcugcuggugcugauggagaacgagagaacccuggacuuccacgacagcaacgugaagaaccuguacaacaaggugagaaugcagcugagagacaacgugaaggagcugggcaacggcugcuucgaguucuaccacaagugcgacgacgagugcaugagcagcgugaagaacggcaccuacgacuaccccaaguacgaggaggagagcaagcugaagagaaacgagaucaagggcgugaagcugagcagcaugggcguguaccagauccuggccaucuacgccaccguggccggcagccugagccuggccaucaugaucgccggcaucagccuguggaugugcagcaacggcagccugcagugcagaaucugcaucuga

SEQ ID NO: 161682 - RNA, 1698 nt, Artificial Sequence
  derived and/or modified CDS sequence (opt4) from hemagglutinin__InfluenzaA__ABO44046
augaaggugaagcugcuggugcugcugugcaccuucaccgccaccuacgccgacaccaucugcaucggcuaccacgccaacaacagcaccgacaccguggacaccgugcuggagaagaacgugaccgugacccacagcgugaaccugcuggaggacagccacaacggcaagcugugccugcugaagggcaucgccccccugcagcugggcaacugcagcguggccggcuggauccugggcaaccccgagugcgagcugcugaucagcaaggagagcuggagcuacaucguggagacccccaaccccgagaacggcaccugcuaccccggcuacuucgccgacuacgaggagcugagagagcagcugagcagcgugagcagcuucgagagauucgagaucuuccccaaggagagcagcuggcccaaccacaccgugaccggcgugagcgccagcugcagccacaacggcaagagcagcuucuacagaaaccugcuguggcugaccggcaagaacggccuguaccccaaccugagcaagagcuacgccaacaacaaggagaaggaggugcuggugcuguggggcgugcaccacccccccaacaucggcgaccagagagcccuguaccacaccgagaacgccuacgugagcguggugagcagccacuacagcagaagauucacccccgagaucgccaagagacccaaggugagagaccaggagggcagaaucaacuacuacuggacccugcuggagcccggcgacaccaucaucuucgaggccaacggcaaccugaucgcccccagauacgccuucgcccugagcagaggcuucggcagcggcaucaucaccagcaacgcccccauggacgagugcgacgccaagugccagaccccccagggcgccaucaacagcagccugcccuuccagaacgugcaccccgugaccaucggcgagugccccaaguacgugagaagcgccaagcugagaauggugaccggccugagaaacauccccagcauccagagcagaggccuguucggcgccaucgccggcuucaucgagggcggcuggaccggcaugguggacggcugguacggcuaccaccaccagaacgagcagggcagcggcuacgccgccgaccagaagagcacccagaacgccaucaacggcaucaccaacaagaugaacagcgugaucgagaagaugaacacccaguucaccgccgugggcaaggaguucaacaagcuggagagaagaauggagaaccugaacaagaagguggacgacggcuuccuggacaucuggaccuacaacgccgagcugcuggugcugcuggagaacgagagaacccuggacuuccacgacagcaacgugaagaaccuguacgagaaggugaagagccagcugaagaacaacgccaaggagaucggcaacggcugcuucgaguucuaccacaagugcaacaacgagugcauggagagcgugaagaacggcaccuacgacuaccccaaguacagcgaggagagcaagcugaacagagagaagaucgacggcgugaagcuggagagcaugggcguguaccagauccuggccaucuacagcaccguggccagcagccuggugcugcuggugagccugggcgccaucagcuucuggaugugcagcaacggcagccugcagugcagaaucugcaucuga

SEQ ID NO: 161683 - RNA, 1689 nt, Artificial Sequence
  derived and/or modified CDS sequence (opt4) from hemagglutinin__InfluenzaA__ABO44057
auggccaucaucuaccugauccugcuguucaccgccgugagaggcgaccagaucugcaucggcuaccacgccaacaacagcaccgagaagguggacaccauccuggagagaaacgugaccgugacccacgccaaggacauccuggagaagacccacaacggcaagcugugcaagcugaacggcauccccccccuggagcugggcgacugcagcaucgccggcuggcugcugggcaaccccgagugcgacagacugcugagagugcccgaguggagcuacaucauggagaaggagaaccccagauacagccugugcuaccccggcagcuucaacgacuacgaggagcugaagcaccugcugagcagcgugaagcacuucgagaaggugaagauccugcccaaggacggcuggacccagcacgagaccgacggcggcagcaaggccugcgccgugagcggcaaggccagcuucuucagaaacaugguguggcugaccaagagaggccccaacuaccagguggccaagagaagcuacaacaacaccagcggcgagcagaugcugaucaucuggggcgugcaccaccccaaggacgaggccgagcagagagcccuguaccagaaggugggcaccuacgugagcgccagcaccagcacccugaacaagagaagcacccccgagaucgccgccagacccgaggugaacggccuggagagcagaauggaguucagcuggacccugcuggacgugugggacaccaucaacuucgagagcaccggcaaccugguggcccccgaguacggcuucaagaucagcaagagaggcagcagcggcaucaugaagaccgagggcacccugggcaacugcgagaccaagugccagaccccccugggcgccaucaacaccacccugcccuuccacaacgugcacccccugaccaucggcgagugccccaaguacgugaagagcgagaagcuggugcuggccaccggccugagaaacgugccccagaucgagagcagaggccuguucggcgccaucgccggcuucaucgagggcggcuggcagggcaugguggacggcugguacggcuaccaccacagcaacgaccagggcagcggcuacgccgccgacaaggagagcacccagaaggccuucgacagaaucaccaacaaggugaacagcgugaucgagaagaugaacauccaguucgaggccgugggcaaggaguucagcaaccuggagaagagacuggagaaccugaacaagaagauggaggacggcuuccuggacguguggaccuacaacgccgagcugcuggugcugauggagaacgagagaacccuggacuuccacgacagcaacgugaagaaccuguacgacaaggugagaaugcagcugagagacaacgugaaggagcugggcaacggcugcuucgaguucuaccacaagugcgacgacgagugcaugaacagcgugaagaacggcaccuacgacuaccccaaguacgaggaggagagcaagcugaagagaaacgagaucaagggcgugaagcugagcagcaugggcguguaccagauccuggccaucuacgccaccguggccggcagccugagccuggccaucaugaucgccggcaucagcuucuggaugugcagcaacggcagccugcagugcagagugugcaucuga

SEQ ID NO: 161684 - RNA, 1701 nt, Artificial Sequence; identical to SEQ ID NO: 160316
  derived and/or modified CDS sequence (opt4) from hemagglutinin__InfluenzaA__ABO44079

SEQ ID NO: 161685 - RNA, 1689 nt, Artificial Sequence
  derived and/or modified CDS sequence (opt4) from hemagglutinin__InfluenzaA__ABO44090
auggccaucaucuaccugauccugcuguucaccgccgugagaggcgaccagaucugcaucggcuaccacgccaacaacagcaccgagaagguggacaccauccuggagagaaacgugaccgugacccacgccaaggacauccuggagaagacccacaacggcaagcugugcaagcugaacggcauccccccccuggagcugggcgacugcagcaucgccggcuggcugcugggcaaccccgagugcgacagacugcugagagugcccgaguggagcuacaucauggagaaggagaaccccagagacggccugugcuaccccggcagcuucaacgacuacgaggagcugaagcaccugcugagcagcgugaagcacuucgagaaggugaagauccugcccaaggacagauggacccagcacaccaccaccggcggcagcagagccugcgccgugagcggcaaccccagcuucuucagaaacaugaucuggcugaccaagaagggcagcaacuaccccguggccaagggcagcuacaacaacaccagcggcgagcagaugcugaucaucuggggcgugcaccaccccaacgacgagaccgagcagagaacccuguaccagaacgugggcaccuacgugagcguggugaccagcacccugaacaagagaagcacccccaagaucgccaccagacccaaggugaacggccugggcggcagaauggaguucagcuggacccugcuggacaugugggacaccaucaacuucgagagcaccggcaaccugaucgcccccgaguacggcuucaagaucagcaagagaggcagcagcggcaucaugaagaccgagggcacccuggagaacugcgagaccaagugccagaccccccugggcgccaucaacaccacccugcccuuccacaacgugcacccccugaccaucggcgagugccccaaguacgugaagagcgagaagcuggugcuggccaccggccugagaaacgugccccagaucgagagcagaggccuguucggcgccaucgccggcuucaucgagggcggcuggcagggcaugguggacggcugguacggcuaccaccacagcaacgaccagggcagcggcuacgccgccgacaaggagagcacccagagagccuucgacggcaucaccaacaaggugaacagcgugaucgagaagaugaacacccaguucgaggccgugggcaaggaguucagcaaccuggagagaagacuggagaaccugaacaagaagauggaggacggccugcuggacguguggaccuacaacgccgagcugcuggugcugauggagaacgagagaauccuggacuuccacgacagcaacgugaagaaccuguacgacaaggugagaaugcagcugagagacaacgugaaggagcugggcaacggcugcuucgaguucuaccacaagugcgacgacgagugcaugaacagcgugaagaacggcaccuacgacuaccccaaguacgaggaggagagcaagcugaacagaaacgagaucaagggcgugaagcugagcagcaugggcguguaccagauccuggccaucuacgccaccguggccggcagccugagccuggccaucaugauggccggcaucagcuucuggaugugcagcaacggcagccugcagugcagaaucugcaucuga

SEQ ID NO: 161686 - RNA, 1689 nt, Artificial Sequence
  derived and/or modified CDS sequence (opt4) from hemagglutinin__InfluenzaA__ABO44101
auggccaucaucuaccugauccugcuguucaccgccgugagaggcgaccagaucugcaucggcuaccacgccaacaacagcaccgagaagguggacaccauccuggagagaaacgugaccgugacccacgccaaggacauccuggagaagacccacaacggcaagcugugcaagcugaacggcauccccccccuggagcugggcgacugcagcaucgccggcuggcugcugggcaaccccgagugcgacagacugcugagagugcccgaguggagcuacaucauggagaaggagaaccccagauacagccugugcuaccccggcagcuucaacgacuacgaggagcugaagcaccugcugagcagcgugaagcacuucgagaaggugaagauccugcccaaggacggcuggacccagcacaagaccgacggcggcagcaaggccugcgccgugagcggcaagcccagcuucuucagaaacaugguguggcugaccaagaagggccccaacuaccccguggccaagagaagcuacaacaacaccagcggcgagcagaugcugaucaucuggggcgugcaccaccccaacgacgaggccgagcagagagcccuguaccagaaggugggcaccuacgugagcgccagcaccagcacccugaacaagagaagcacccccgagaucgccgccagacccgaggugagcggccugggcagcagaauggaguucagcuggacccugcuggacgugugggacaccaucagcuucgagagcaccggcaaccugguggcccccgaguacggcuucaagaucagcaagagaggcagcagcggcaucaugaagaccgagggcacccugggcaacugcgagaccaagugccagaccccccugggcgccaucaacaccacccugcccuuccacaacgugcacccccugaccaucggcgagugccccaaguacgugaagagcgagaagcuggugcuggccaccggccugagaaacgugccccagaucgagagcagaggccuguucggcgccaucgccggcuucaucgagggcggcuggcagggcaugguggacggcugguacggcuaccaccacagcaacgaccagggcagcggcuacgccgccgacaaggagagcacccagaaggccuucgacagaaucaccaacaaggugaacagcgugaucgagaagaugaacacccaguucgaggccgugggcaaggaguucagcaaccuggagaagagacuggagaaccugaacaagaagauggaggacggcuuccuggacguguggaccuacaacgccgagcugcuggugcugauggagaacgagagaacccuggacuuccacgacagcaacgugaagaaccuguacgacaaggugagaaugcagcugagagacaacgugaaggagcugggcaacggcugcuucgaguucuaccacaagugcgacgacgagugcaugaacagcgugaagaacggcaccuacgacuaccccaaguacgaggaggagagcaagcugaagagaaacgagaucaagggcgugaagcugagcagcaugggcguguaccagauccuggccaucuacgccaccguggccggcagccugagccuggccaucaugaucgccggcaucagcuucuggaugugcagcaacggcagccugcagugcagaaucugcaucuga

SEQ ID NO: 161687 - RNA, 1701 nt, Artificial Sequence
  derived and/or modified CDS sequence (opt4) from hemagglutinin__InfluenzaA__ABO44123
augaaggccaagcugcuggugcugcugugcgccuucaccgccaccgacgccgacaccaucugcaucggcuaccacgccaacaacagcaccgacaccguggacaccgugcuggagaagaacgugaccgugacccacagcgugaaccugcuggaggacagccacaacggcaagcugugcagacugaagggcaucgccccccugcagcugggcaacugcagcaucgccggcuggauccugggcaaccccgagugcgagagccuguucagcaagaagagcuggagcuacaucgccgagacccccaacagcgagaacggcaccugcuaccccggcuacuucgccgacuacgaggagcugagagagcagcugagcagcgugagcagcuucgagagauucgagaucuuccccaaggagagcagcuggcccaaccacaccgugaccaagggcgugaccgccagcugcagccacaagggcaagagcagcuucuacagaaaccugcuguggcugaccaagaagaacggcagcuaccccaaccugagcaagagcuacgugaacaacaaggagaaggaggugcuggugcuguggggcgugcaccaccccagcaacaucggcgaccagagagccaucuaccacaccgagaacgccuacgugagcguggugagcagccacuacaacagaagauucacccccgagaucgccaagagacccaaggugagagaccaggagggcagaaucaacuacuacuggacccugcuggagcccggcgacaccaucaucuucgaggccaacggcaaccugaucgcccccugguacgccuucgcccugagcagaggcuucggcagcggcaucaucaccagcaacgccagcauggacgagugcgacgccaagugccagaccccccagggcgccaucaacagcagccugcccuuccagaacgugcaccccgugaccaucggcgagugccccaaguacgugagaagcaccaagcugagaauggugaccggccugagaaacauccccagcauccagagcagaggccuguucggcgccaucgccggcuucaucgagggcggcuggaccggcaugaucgacggcugguacggcuaccaccaccagaacgagcagggcagcggcuacgccgccgaccagaagagcacccagaacgccaucaacggcaucaccaacaaggugaacagcgugaucgagaagaugaacacccaguucaccgccgugggcaaggaguucaacaagcuggagagaagaauggagaaccugaacaagaagguggacgacggcuuccuggacaucuggaccuacaacgccgagcugcuggugcugcuggagaacgagagaacccuggacuuccacgacagcaacgugaagaaccuguacgagaaggugaagagccagcugaagaacaacgccaaggagaucggcaacggcugcuucgaguucuaccacaagugcaacaacgagugcauggagagcgugaagaacggcaccuacgacuaccccaaguacagcgaggagagcaagcugaacagagagaagaucgacggcgugaagcuggagagcaugggcguguaccagauccuggccaucuacagcaccguggccagcagccuggugcugcuggugagccugggcgccaucagcuucuggaugugcagcaacggcagccugcagugcagaaucugcaucuga

SEQ ID NO: 161688 - RNA, 1701 nt, Artificial Sequence
  derived and/or modified CDS sequence (opt4) from hemagglutinin__InfluenzaA__ABO44134
augaaggccaagcugcuggugcugcugugcgcccugagcgccaccgacgccgacaccaucugcaucggcuaccacgccaacaacagcaccgacaccguggacaccgugcuggagaagaacgugaccgugacccacagcgugaaccugcuggaggacagccacaacggcaagcugugcagacugaagggcaucgccccccugcagcugggcaagugcagcaucgccggcuggauccugggcaaccccgagugcgagagccuguucagcaagaagagcuggagcuacaucgccgagacccccaacagcgagaacggcaccugcuaccccggcuacuucgccgacuacgaggagcugagagagcagcugagcagcgugagcagcuucgagagauucgagaucuuccccaaggagagaagcuggcccaagcacaacgugaccagaggcgugaccgccagcugcagccacaagggcaagagcagcuucuacagaaaccugcuguggcugaccgagaagaacggcagcuaccccaaccugagcaagagcuacgugaacaacaaggagaaggaggugcuggugcuguggggcgugcaccaccccagcaacaucgaggaccagaagaccaucuacagaaaggagaacgccuacgugagcguggugagcagcaacuacaacagaagauucacccccgagaucgccgagagacccaaggugagaggccaggccggcagaaucaacuacuacuggacccugcuggagcccggcgacaccaucaucuucgaggccaacggcaaccugaucgcccccuggcacgccuucgcccugagcagaggcuucggcagcggcaucaucaccagcaacgccagcauggacgagugcgacaccaagugccagaccccccagggcgccaucaacagcagccugcccuuccagaacauccaccccgugaccaucggcgagugccccaaguacgugagaagcaccaagcugagaauggugaccggccugagaaacauccccagcauccagagcagaggccuguucggcgccaucgccggcuucaucgagggcggcuggaccggcaugaucgacggcugguacggcuaccaccaccagaacgagcagggcagcggcuacgccgccgaccagaagagcacccagaacgccaucaacggcaucaccaacaaggugaacagcgugaucgagaagaugaacacccaguucaccgccgugggcaaggaguucaacaagcuggagaagagaauggagaaccugaacaagaagguggacgacggcuuccuggacaucuggaccuacaacgccgagcugcuggugcugcuggagaacgagagaacccuggacuuccacgacagcaacgugaagaaccuguacgagaaggugaagagccagcugaagaacaacgccaaggagaucggcaacggcugcuucgaguucuaccacaagugcaacaacgagugcauggagagcgugaagaacggcaccuacgacuaccccaaguacagcgaggagagcaagcugaacagagagaagaucgacggcgugaagcuggagagcaugggcguguaccagauccuggccaucuacagcaccguggccagcagccuggugcugcuggugagccugggcgccaucagcuucuggaugugcagcaacggcagccugcagugcagaaucugcaucuga

SEQ ID NO: 161689 - RNA, 1701 nt, Artificial Sequence
  derived and/or modified CDS sequence (opt4) from hemagglutinin__InfluenzaA__ABO52071
augaagaccaucaucgcccugagcuacauccugugccugguguucgcccagaagcugcccggcaacgacaacagcaccgccacccugugccugggccaccacgccgugcccaacggcaccaucgugaagaccaucaccaacgaccagaucgaggugaccaacgccaccgagcuggugcagaacagcagcaccggcggcaucugcgacagcccccaccagauccuggacggcgagaacugcacccugaucgacgcccugcugggcgacccccagugcgacggcuuccagaacaagaagugggaccuguucguggagagaagcaaggccuacagcaacugcuaccccuacgacgugcccgacuacgccagccugagaagccugguggccagcagcggcacccuggaguucaacaacgagagcuucaacuggaccggcgugacccagaacggcaccagcagcgccugcaagagaagaagcaacaacagcuucuucagcagacugaacuggcugacccaccugaaguucaaguaccccgcccugaacgugaccaugcccaacaacgagaaguucgacaagcuguacaucuggggcgugcaccaccccagcaccgacaacgaccagaucagccuguacgcccaggccagcggcagaaucaccgugagcaccaagagaagccagcagaccgugauccccaacaucggcagcagacccagagugagagacauccccagcagaaucagcaucuacuggaccaucgugaagcccggcgacauccugcugaucaacagcaccggcaaccugaucgcccccagaggcuacuucaagaucagaagcggcaagagcagcaucaugagaagcgacgcccccaucggcaagugcaacagcgagugcaucacccccaacggcagcauccccaacgacaagcccuuccagaacgugaacagaaucaccuacggcgccugccccagauacgugaagcagaacacccugaagcuggccaccggcaugagaaacgugcccgagaagcagaccagaggcaucuucggcgccaucgccggcuucaucgagaacggcugggagggcaugguggacggcugguacggcuucagacaccagaacagcgagggcaucggccaggccgccgaccugaagagcacccaggccgccaucaaccagaucaacggcaagcugaacagacugaucggcaagaccaacgagaaguuccaccagaucgagaaggaguucagcgagguggagggcagaauccaggaccuggagaaguacguggaggacaccaagaucgaccuguggagcuacaacgccgagcugcugguggcccuggagaaccagcacaccaucgaccugaccgacagcgagaugaacaagcuguucgagagaaccaagaagcagcugagagagaacgccgaggacaugggcaacggcugcuucaagaucuaccacaagugcgacaacgccugcaucggcagcaucagaaacggcaccuacgaccacgacguguacagagacgaggcccugaacaacagauuccagaucaagggcguggagcugaagagcggcuacaaggacuggauccuguggaucagcuucgccaucagcugcuuccugcugugcguggcccugcugggcuucaucaugugggccugccagaagggcaacaucagaugcaacaucugcaucuga

SEQ ID NO: 161690 - RNA, 1701 nt, Artificial Sequence
  derived and/or modified CDS sequence (opt4) from hemagglutinin__InfluenzaA__ABO52225
augaaggccaagcugcuggugcugcugugcgccuucaccgccaccuacgccgacaccaucugcaucggcuaccacgccaacaacagcaccgacaccguggacaccgugcuggagaagaacgugaccgugacccacagcgugaaccugcuggaggacagccacaacggcaagcugugcagacugaagggcaccgccccccugcagcugggcaacugcagcguggccggcuggauccugggcaaccccgagugcgagagccuguucagcaaggagagcuggagcuacaucgccgagacccccaaccccgagaacggcaccugcuaccccggcuacuucgccgacuacgaggagcugaaggagcagcugagcagcgugagcagcuucgagagauucgagaucuuccccaaggagagcagcuggcccaaccacaccgugaccaagggcgugaccgccagcugcagccacaacggcaagagcagcuucuacaagaaccugcuguggcugaccgagaagaacggccuguaccccaaccugagcaagagcuacgugaacaacaaggagaaggaggugcuggugcuguggggcgugcaccaccccagcaacaucggcgaccagagagccaucuaccacaccgagaacgccuacgugagcguggugagcagccacuacagcagaagauucacccccgagaucgccaagagacccaaggugagagaccaggagggcagaaucaacuacuacuggacccugcuggagcccggcgacaccaucaucuucgaggccaacggcaaccugaucgcccccugguacgccuucgcccugagcagaggcuucggcagcggcaucaucaccagcaacgccagcaugggcgagugcgacgccaagugccagaccccccagggcgccaucaacagcagccugcccuuccagaacgugcaccccgugaccaucggcgagugccccaaguacgugagaagcaccaagcugagaauggugaccggccugagaaacauccccagcauccagagcagaggccuguucggcgccaucgccggcuucaucgagggcggcuggaccggcaugaucgacggcugguacggcuaccaccaccagaacgagcagggcagcggcuacgccgccgacaagaagagcacccagaacgccaucgacggcaucaccaacaaggugaacagcgugaucgagaagaugaacacccaguucaccgccgugggcaaggaguucaacaagcuggagagaagaauggagaaccugaacaagaagguggacgacggcuuccuggacaucuggaccuacaacgccgagcugcuggugcugcuggagaacgagagaacccuggacuuccacgacagcaacgugaagaaccuguacgagaaggugaagaaccagcugaagaacaacgccaaggagaucggcaacggcugcuucgaguucuaccacaagugcaacgacgagugcauggagagcgugaagaacggcaccuacgacuaccccaaguacagcgaggagagcaagcugaagagagagaagaucgacggcgugaagcuggagagcaugggcguguaccagauccuggccaucuacagcaccguggccagcagccuggugcugcuggugagccugggcgccaucagcuucuggaugugcagcaacggcagccugcagugcagaaucugcaucuga

SEQ ID NO: 161691 - RNA, 1689 nt, Artificial Sequence
  derived and/or modified CDS sequence (opt4) from hemagglutinin__InfluenzaA__ABO52236
auggccaucaucuaccugauccugcuguucaccgccgugagaggcgaccagaucugcaucggcuaccacgccaacaacagcaccgagaagguggacaccauccuggagagaaacgugaccgugacccacgccaaggacauccuggagaagacccacaacggcaagcugugcaagcugaacggcauccccccccuggagcugggcgacugcagcaucgccggcuggcugcugggcaaccccgagugcgacagacugcugagcgugcccgaguggagcuacaucauggagaaggagaaccccagagacggccugugcuaccccggcagcuucaacgacuacgaggagcugaagcacuuccugagcagcgugaagcacuucgagaaggugaagauccugcccaaggacagauggacccagcacaccaccaccggcggcagcagagccugcgccgugagcggcaaccccagcuucuucagaaacaugguguggcugaccaagaagggcagcaacuaccccguggccaagggcagcuacaacaacaccagcggcgagcagaugcugaucaucuggggcgugcaccaccccaacgacgagaccgagcagagaacccuguaccagaacgugggcaccuacgugagcgugggcaccagcacccugaacaagagaagcacccccgacaucgccaccagacccaaggugaacggccugggcggcagaauggaguucagcuggacccugcuggacaugugggacaccaucaacuucgagagcaccggcaaccugaucgcccccgaguacggcuucaagaucagcaagagaggcagcagcggcaucaugaagaccgagggcacccugggcaacugcgagaccaagugccagaccccccugggcgccaucaacaccacccugcccuuccacaacgugcacccccugaccaucggcgagugccccaaguacgugaagagcgagaagcuggugcuggccaccggccugagaaacgugccccagaucgagagcagaggccuguucggcgccaucgccggcuucaucgagggcggcuggcagggcaugguggacggcugguacggcuaccaccacagcaacgaccagggcagcggcuacgccgccgacaaggagagcacccagaaggccuucgacggcaucaccaacaaggugaacagcgugaucgagaagaugaacacccaguucgaggccgugggcaaggaguucagcaaccuggagagaagacuggagaaccugaacaagaagauggaggacggcuuccuggacguguggaccuacaacgccgagcugcuggugcugauggagaacgagagaacccuggacuuccacgacagcaacgugaagaaccuguacgacaaggugagaaugcagcugagagacaacgccaaggagcugggcaacggcugcuucgaguucuaccacaagugcgacgacgagugcaugaacagcgugaagaacggcaccuacuacuaccccaaguacgaggaggagagcaagcugaacagaaacgagaucaagggcgugaagcugagcagcaugggcguguaccagauccuggccaucuacgccaccguggccggcagccugagccuggccaucaugauggccggcaucagcuucuggaugugcagcaacggcagccugcagugcagaaucugcaucuga

SEQ ID NO: 161692 - RNA, 1689 nt, Artificial Sequence
  derived and/or modified CDS sequence (opt4) from hemagglutinin__InfluenzaA__ABO52247
auggccaucaucuaccugauccugcuguucaccgccgugagaggcgaccagaucugcaucggcuaccacgccaacaacagcaccgagaagguggacaccauccuggagagaaacgugaccgugacccacgccaaggacauccuggagaagacccacaacggcaagcugugcaagcugaacggcauccccccccuggagcugggcgacugcagcaucgccggcuggcugcugggcaaccccgagugcgacagacugcugagagugcccgaguggagcuacaucauggagaaggagaaccccagauacagccugugcuaccccggcagcuucaacgacuacgaggagcugaagcaccugcugagcagcgugaagcacuucgagaaggugaagauccugcccaaggacggcuggacccagcacaagaccgacggcggcagcaaggccugcgccgugagcggcaagcccagcuucuucagaaacaugguguggcugaccaagaagggccccaacuaccccguggccaagagaagcuacaacaacaccagcggcgagcagaugcugaucaucuggggcgugcaccaccccaacgacgaggccgagcagagagcccuguaccagaaggugggcaccuacgugagcgccagcaccagcacccugaacaagagaagcacccccgagaucgccgccagacccgaggugagcggccugggcagcagaauggaguucagcuggacccugcuggacgugugggacaccaucagcuucgagagcaccggcaaccugguggcccccgaguacggcuucaagaucagcaagagaggcagcagcggcaucaugaagaccgagggcacccugggcaacugcgagaccaagugccagaccccccugggcgccaucaacaccacccugcccuuccacaacgugcacccccugaccaucggcgagugccccaaguacgugaagagcgagaagcuggugcuggccaccggccccagaaacgugccccagaucgagagcagaggccuguucggcgccaucgccggcuucaucgagggcggcuggcagggcaugguggacggcugguacggcuaccaccacagcaacgaccagggcagcggcuacgccgccgacaaggagagcacccagaaggccuucgacagaaucaccaacaaggugaacagcgugaucgagaagaugaacacccaguucgaggccgugggcaaggaguucagcaaccuggagaagagacuggagaaccugaacaagaagauggaggacggcuuccuggacguguggaccuacaacgccgagcugcuggugcugauggagaacgagagaacccuggacuuccacgacagcaacgugaagaaccuguacgacaaggugagaaugcagcugagagacaacgugaaggagcugggcaacggcugcuucgaguucuaccacaagugcgacgacgagugcaugaacagcgugaagaacggcaccuacgacuaccccaaguacgaggaggagagcaagcugaagagaaacgagaucaagggcgugaagcugagcagcaugggcguguaccagauccuggccaucuacgccaccguggccggcagccugagccuggccaucaugaucgccggcaucagcuucuggaugugcagcaacggcagccugcagugcagaaucugcaucuga

SEQ ID NO: 161693 - RNA, 1701 nt, Artificial Sequence
  derived and/or modified CDS sequence (opt4) from hemagglutinin__InfluenzaA__ABO52258
augaaggccaagcugcuggugcugcugugcgcccugagcgccaccgacgccgacaccaucugcaucggcuaccacgccaacaacagcaccgacaccguggacaccgugcuggagaagaacgugaccgugacccacagcgugaaccugcuggaggacagccacaacggcaagcugugcagacugaagggcaucgccccccugcagcugggcaagugcagcaucgccggcuggauccugggcaaccccgagugcgagagccuguucagcaagaagagcuggagcuacaucgccgagacccccaacagcgagaacggcaccugcuaccccggcuacuucgccgacuacgaggagcugagagagcagcugagcagcgugagcagcuucgagagauucgagaucuuccccaaggagagcagcuggcccaagcacaacgugaccagaggcgugaccgccagcugcagccacaagggcaagugcagcuucuacagaaaccugcuguggcugaccgagaagaacggcagcuaccccaaccugagcaagagcuacgugaacaacaaggagaaggaggugcuggugcuguggggcgugcaccaccccagcaacaucgaggaccagaagaccaucuacagaaaggagaacgccuacgugagcguggugagcagccacuacaacagaagauucacccccgagaucgccaagagacccaaggugagagaccaggagggcagaaucaacuacuacuggacccugcuggagcccggcgacaccaucaucuucgaggccaacggcaaccugaucgcccccugguacgccuucgcccugagcagaggcuucggcagcggcaucaucaccagcaacgccagcauggacgagugcgacgccaagugccagaccccccagggcgccaucaacagcagccugcccuuccagaacgugcaccccgugaccaucggcgagugccccaaguacgugagaagcaccaagcugagaauggugaccggccugagaaacauccccagcauccagagcagaggccuguucggcgccaucgccggcuucaucgagggcggcuggaccggcaugaucgacggcugguacggcuaccaccaccagaacgagcagggcagcggcuacgccgccgaccagaagagcacccagaacgccaucaacggcaucaccaacaaggugaacagcgugaucgagaagaugaacacccaguucaccgccgugggcaaggaguucaacaagcuggagaagagaauggagaaccugaacaagaagguggacgacggcuuccuggacaucuggaccuacaacgccgagcugcuggugcugcuggagaacgagagaacccuggacuuccacgacagcaacgugaagaaccuguacgagaaggugaagagccagcugaagaacaacgccaaggagaucggcaacggcugcuucgaguucuaccacaagugcaacaacgagugcauggagagcgugaagaacggcaccuacgacuaccccaaguacagcgaggagagcaagcugaacagagagaagaucgacggcgugaagcuggagagcaugggcguguaccagauccuggccaucuacagcaccguggccagcagccuggugcugcuggugagccugggcgccaucagcuucuggaugugcagcaacggcagccugcagugcagaaucugcaucuga

SEQ ID NO: 161694 - RNA, 1701 nt, Artificial Sequence
  derived and/or modified CDS sequence (opt4) from hemagglutinin__InfluenzaA__ABO52280
augaaggccagacugcugauccugcugugcgcccugagcgccaccgacgccgacaccaucugcaucggcuaccacgccaacaacagcaccgacaccguggacaccgugcuggagaagaacgugaccgugacccacagcgugaaccugcuggaggacagccacaacggcaagcugugcagacugaagggcaucgccccccugcagcugggcaagugcaacaucgccggcuggauccugggcaaccccgagugcgagagccugcugagcaacagaagcuggagcuacaucgccgagacccccaacagcgagaacggcaucugcuaccccggcgacuucgccgacuacgaggagcugagagagcagcugagcagcgugagcagcuucgagagauucgagaucuuccccaaggagagcagcuggcccaagcacaacaucaccagaggcgugaccguggccugcagccacgccaagaagagcagcuucuacaagaaccugcuguggcugaccgaggccaacggccuguaccccagccugagcaagagcuacgugaacgacagagagaaggaggugcuggugcuguggggcgugcaccaccccagcaacaucgaggaccagagaacccuguacagaaaggagaacgccuacgugagcguggugagcagcaacuacaacagaagauucacccccgagaucgccgagagacccaaggugagaggccagcccggcagaaugaacuacuacuggacccugcuggagcccggcgacaagaucaucuucgaggccaacggcaaccugaucgcccccugguacgccuucgcccugagcagaggccccggcagcggcaucaucaccagcaacgccagcauggacgagugcgacaccaagugccagaccccccagggcgccaucaacagcagccugcccuuccagaacauccaccccgugaccaucggcgagugccccaaguacgugagaagcaccaagcugagaauggugaccggccugagaaacauccccagcauccagagcagaggccuguucggcgccaucgccggcuucaucgagggcggcuggaccggcaugguggacggcugguacggcuaccaccaccagaacgagcagggcagcggcuacgccgccgaccagaagagcacccagaacgccaucaacggcaucaccaacaaggugaacagcgugaucgagaagaugaacacccaguucaccgccgugggcaaggaguucaacaagcuggagaagagaauggagaaccugaacaagaagguggacgacggcuuccuggacaucuggaccuacaacgccgagcugcuggugcugcuggagaacgagagaacccuggacuuccacgacagcaacgugaagaaccuguacgagaaggugaagaaccagcugagaaacaacgccaaggagaucggcaacggcugcuucgaguucuaccacaagugcgacaacgagugcauggagagcgugaagaacggcaccuacgacuaccccaaguacagcgaggagagcaagcugaacagagccaagaucgacggcgugaagcuggagagcaugggcguguaccagauccuggccaucuacagcaccguggccagcagccuggugcugcuggugagccugggcgccaucagcuucuggaugugcagcaacggcagccugcagugcagaaucugcaucuga

SEQ ID NO: 161695 - RNA, 1689 nt, Artificial Sequence
  derived and/or modified CDS sequence (opt4) from hemagglutinin__InfluenzaA__ABO52302
auggccaucaucuaccugauccugcuguucaccgccgugagaggcgaccagaucugcaucggcuaccacgccaacaacagcaccgagaagguggacaccauccuggagagaaacgugaccgugacccacgccaaggacauccuggagaagacccacaacggcaagcugugcaagcugaacggcauccccccccuggagcugggcaacugcagcaucgccggcuggcugcugggcaaccccgagugcgacagacugcugagcgugcccgaguggagcuacaucauggagaaggagaaccccagagacggccugugcuaccccggcagcuucaacgacuacgaggagcugaagcaccugcugagcagcgugaagcacuucgagaaggugaagauccugcccaaggacagauggacccagcacaccaccaccggcggcagcagagccugcgccgugagcggcaaccccagcuucuucagaaacaugguguggcugaccaagaagggcagcaacuaccccguggccaagggcagcuacaacaacaccagcggcgagcagaugcugaucaucuggggcgugcaccaccccaacgacgagaccgagcagagaacccuguaccagaacgugggcaccuacgugagcgugggcaccagcacccugaacaagagaagcacccccgacaucgccaccagacccaaggugaacggccugggcggcagaauggaguucagcuggacccugcuggacaugugggacaccaucaacuucgagagcaccggcaaccugaucgcccccgaguacggcuucaagaucagcaagagaggcagcagcggcaucaugaagaccgagggcacccugggcaacugcgagaccaagugccagaccccccugggcgccaucaacaccacccugcccuuccacaacgugcacccccugaccaucggcgagugccccaaguacgugaagagcgagaagcuggugcuggccaccggccugagaaacgugccccagaucgagagcagaggccuguucggcgccaucgccggcuucaucgagggcggcuggcagggcaugguggacggcugguacggcuaccaccacagcaacgaccagggcagcggcuacgccgccgacaaggagagcacccagaaggccuucgacggcaucaccaacaaggugaacagcgugaucgagaagaugaacacccaguucgaggccgugggcaaggaguucagcaaccuggagagaagacuggagaaccugaacaagaagauggaggacggcuuccuggacguguggaccuacaacgccgagcugcuggugcugauggagaacgagagaacccuggacuuccacgacagcaacgugaagaaccuguacgacaaggugagaaugcagcugagagacaacgugaaggagcugggcaacggcugcuucgaguucuaccacaagugcgacgacgagugcaugaacagcgugaagaacggcaccuacgacuaccccaaguacgaggaggagagcaagcugaacagaaacgagaucaagggcgugaagcugagcagcaugggcaucuaccagauccuggccaucuacgccaccguggccggcagccugagccuggccaucaugauggccggcaucagcuucuggaugugcagcaacggcagccugcagugcagaaucugcaucuga

SEQ ID NO: 161696 - RNA, 1701 nt, Artificial Sequence
  derived and/or modified CDS sequence (opt4) from hemagglutinin__InfluenzaA__ABO52313
augaagaccaucaucgcccugagcuacaucuucugccugguguucgcccagaaccugcccggcaacgacaacagcaccgccacccugugccugggccaccacgccgugcccaacggcacccuggugaagaccaucaccaacgaccagaucgaggugaccaacgccaccgagcuggugcagagcagcagcaccggcaagaucugcaacaacccccacagaauccuggacggcaucaacugcacccugaucgacgcccugcugggcgacccccacugcgacggcuuccagaacgagaagugggaccuguucguggagagaagcaaggccuucagcaacugcuaccccuacgacgugcccgacuacgccagccugagaagccugguggccagcagcggcacccuggaguucaucaacgagggcuucaacuggaccggcgugacccagaacggcggcagcaacgccugcaagagaggccccgacagcggcuucuucagcagacugaacuggcuguacaagagcggcagcaccuaccccgugcugaacgugaccaugcccaacaacgacaacuucgacaagcuguacaucuggggcgugcaccaccccagcaccgaccaggagcagaccaaccuguacgugcaggccagcggcagagugaccgugagcaccaagagaagccagcagaccaucauccccaacgugggcagcagacccugggugagaggccugagcagcagaaucagcaucuacuggaccaucgugaagcccggcgacauccuggugaucaacagcaacggcaaccugaucgcccccagaggccacuucaagaugagaaccggcaagagcagcaucaugagaagcgacgcccccaucggcaccugcagcagcgagugcaucacccccaacggcagcauccccaacgacaagcccuuccagaacgugaacaagaucaccuacggcgccugccccaaguacgugaagcagaacacccugaagcuggccaccggcaugagaaacgugcccgagaagcagaccagaggcaucuucggcgccaucgccggcuucaucgagaacggcugggagggcaugaucgacggcugguacggcuucagacacagaaacagcgagggcaccggccaggccgccgaccugaagagcacccaggccgccaucgaccagaucaacggcaagcugaacagagugaucgagaagaccaacgagaaguuccaccagaucgagaaggaguucagcgagguggagggcagaauccaggaccuggagaaguacguggaggacaccaagaucgaccuguggagcuacaacgccgagcugcugguggcccuggagaaccagcacaccaucgaccugaccgacagcgagaugaacaagcuguucgagaagaccagaagacagcugagagagaacgccgaggacaugggcaacggcugcuucaagaucuaccacaagugcgacaacgccugcaucggcagcaucagaaacggcaccuacgaccacgacguguacagagacgaggcccugaacaacagauuccagaucaagggcguggagcugaagagcggcuacaaggacuggauccuguggaucagcuucgccaucagcugcuuccugcugugcguggugcugcugggcuucaucaugugggccugccagaagggcaacaucagaugcaacaucugcaucuga

SEQ ID NO: 161697 - RNA, 1701 nt, Artificial Sequence
  derived and/or modified CDS sequence (opt4) from hemagglutinin__InfluenzaA__ABO52335
augaagaccaucaucgcccugagcuacaucuucugccuggugcugggccaggacuuccccagaaacgacaacagcaccgccacccugugccugggccaccacgccgugcccaacggcacccuggugaagaccaucaccaacgaccagaucgaggugaccaacgccaccgagcuggugcagagcagcagcaccggcaagaucugcaacaacccccacagaauccuggacggcaucgacugcacccugaucgacgcccugcugggcgacccccacugcgacggcuuccagaacgagaccugggaccuguucguggagagaagcaaggccuucagcaacugcuaccccuacgacgugcccgacuacgccagccugagaagccugguggccagcagcggcacccuggaguucaucaacgagggcuucaccuggaccggcgugacccagaacggcggcagcaacgccugcaagagaggccccgacagcggcuucuucagcagacugaacuggcuguacaagagcggcaacaccuaccccgugcugaacgugaccaugcccaacaacgacaacuucgacaagcuguacaucuggggcgugcaccaccccagcaccgaccaggaccagaccagccuguacgugcaggccagcggcagagugaccgugagcaccaagagaagccagcagaccgugauccccaacaucggccccagacccugggugagaggccugagcagcagaaucagcaucuacuggaccaucgugaagcccggcgacauccugcugaucaacagcaacggcaaccugaucgcccccagaggcuacuucaagaugagaaccggcaagagcagcaucaugagaagcgacgcccccaucggcaccugcaucagcgagugcaucacccccaacggcagcauccccaacgacaagcccuuccagaacgugaacaagaucaccuacggcgccugccccaaguacgugaagcagaacacccugaagcuggccaccggcaugagaaacgugcccgagaagcagaccagaggcaucuucggcgccaucgccggcuucaucgagaacggcugggagggcaugaucgacggcugguacggcuucagacaccagaacagcgagggcaccggccaggccgccgaccugaagagcacccaggccgccaucgaccagaucaacggcaagcugaacagagugaucgagaagaccaacgagaaguuccaccagaucgagaaggaguucagcgagguggagggcagaauccaggaccuggagaaguacguggaggacaccaagaucgaccuguggagcuacaacgccgagcugcugguggcccuggagaaccagcacaccaucgaccugaccgacagcgagaugaacaagcuguucgagaagaccagaagacagcugagagagaacgccgaggacaugggcaacggcugcuucaagaucuaccacagaugcgacaacgccugcaucggcagcaucagaaacggcaccuacgaccacgacguguacagagacgaggcccugaacaacagauuccagaucaagggcguggagcugaagagcggcuacaaggacuggauccuguggaucagcuucgccaucagcugcuuccugcugugcguggugcugcugggcuucaucaugugggccugccagaagggcaacaucagaugcaacaucugcaucuga

SEQ ID NO: 161698 - RNA, 1701 nt, Artificial Sequence
  derived and/or modified CDS sequence (opt4) from hemagglutinin__InfluenzaA__ABO52346
augaagaccaucaucgcccugagcuacaucuucugccugguguucgcccaggaccugcccggcaacgacaacagcaccgccacccugugccugggccaccacgccgugcccaacggcacccuggugaagaccaucaccaacgaccagaucgaggugaccaacgccaccgagcuggugcagagcagcagcaccggcaagaucugcgacaacccccacagaauccuggacggcaucaacugcacccugaucgacgcccugcugggcgacccccacugcgacggcuuccagaacgagaagugggaccuguucguggagagaagcaaggccuucagcgacugcuaccccuacgacgugcccgacuacgccagccugagaagccugguggccagcagcggcacccuggaguucaucaacgagggcuucaacuggaccggcgugacccagaacggcggcagcagcgccugcaagagaggccccgacaacggcuucuucagcagacugaacuggcuguacaagagcggcagcaccuaccccgugcagaacgugaccaugcccaacaacgacaacagcgacaagcuguacaucuggggcgugcaccaccccagcaccgacaaggagcagaccgaccuguacgugcaggccagcggcaaggugaccgugagcaccaagagaagccagcagaccgugauccccaacgugggcagcagacccugggugagaggccugagcagcagagugagcaucuacuggaccaucgugaagcccggcgacauccuggugaucaacagcaacggcaaccugaucgcccccagaggcuacuucaagaugagaaccggcaagagcagcaucaugagaagcgacgcccccaucggcaccugcagcagcgagugcaucacccccaacggcagcauccccaacgacaagcccuuccagaacgugaacaagaucaccuacggcgccugccccaaguacgugaagcagaacacccugaagcuggccaccggcaugagaaacgugcccgagaagcagaccagaggcaucuucggcgccaucgccggcuucaucgagaacggcugggagggcaugaucgacggcugguacggcuucagacaccagaacagcgagggcaccggccaggccgccgaccugaagagcacccaggccgccaucgaccagaucaacggcaagcugaacagagugaucgagaagaccaacgagaaguuccaccagaucgagaaggaguucagcgagguggagggcagaauccaggaccuggagaaguacguggaggacaccaagaucgaccuguggagcuacaacgccgagcugcugguggcccuggagaaccagcacaccaucgaccugaccgacagcgagaugaacaagcuguucgagaagaccagaagacagcugagagagaacgccgaggacaugggcaacggcugcuucaagaucuaccacaagugcgacaacgccugcaucggcagcaucagaaacggcaccuacgaccacgacguguacagagacgaggcccugaacaacagauuccagaucaagggcguggagcugaagagcggcuacaaggacuggauccuguggaucagcuucgccaucagcugcuuccugcugugcguggugcugcugggcuucaucaugugggccugccagaagggcaacaucagaugcaacaucugcaucuga

SEQ ID NO: 161699 - RNA, 1701 nt, Artificial Sequence
  derived and/or modified CDS sequence (opt4) from hemagglutinin__InfluenzaA__ABO52357
augaagaccaucaucgcccugagcuacaucuucugccuggcccugggccaggaccugcccggcaacgacaacagcaccgccacccugugccugggccaccacgccgugcccaacggcacccuggugaagaccaucaccgacgaccagaucgaggugaccaacgccaccgagcuggugcagagcagcagcaccggcaagaucugcaacaacccccacagaauccuggacggcaucgacugcacccugaucgacgcccugcugggcgacccccacugcgacguguuccagaacgagaccugggaccuguucguggagagaagcaaggccuucagcaacugcuaccccuacgacgugcccgacuacgccagccugagaagccugguggccagcagcggcacccuggaguucaucaccgagggcuucaccuggaccggcgugacccagaacggcggcagcaacgccugcaagagaggccccggcagcggcuucuucagcagacugaacuggcugaccaagagcggcagcaccuaccccgugcugaacgugaccaugcccaacaacgacaacuucgacaagcuguacaucuggggcgugcaccaccccagcaccaaccaggagcagaccagccuguacgugcaggccagcggcagagugaccgugagcaccagaagaagccagcagaccaucauccccaacaucggcagcagacccugggugagaggccugagcagcagaaucagcaucuacuggaccaucgugaagcccggcgacgugcuggugaucaacagcaacggcaaccugaucgcccccagaggcuacuucaagaugagaaccggcaagagcagcaucaugagaagcgacgcccccaucgacaccugcaucuucgagugcaucacccccaacggcagcauccccaacgacaagcccuuccagaacgugaacaagaucaccuacggcgccugccccaaguacgugaagcagaacacccugaagcuggccaccggcaugagaaacgugcccgagaagcagaccagaggcaucuucggcgccaucgccggcuucaucgagaacggcugggagggcaugaucgacggcugguacggcuucagacaccagaacagcgagggcaccggccaggccgccgaccugaagagcacccaggccgccaucgaccagaucaacggcaagcugaacagagugaucgagaagaccaacgagaaguuccaccagaucgagaaggaguucagcgagguggagggcagaauccaggaccuggagaaguacguggaggacaccaagaucgaccuguggagcuacaacgccgagcugcugguggcccuggagaaccagcacaccaucgaccugaccgacagcgagaugaacaagcuguucgagaagaccagaagacagcugagagagaacgccgaggacaugggcaacggcugcuucaagaucuaccacaagugcgacaacgccugcaucgagagcaucagaaacggcaccuacgaccacgacguguacagagacgaggcccugaacaacagauuccagaucaagggcguggagcugaagagcggcuacaaggacuggauccuguggaucagcuucgccaucagcugcuuccugcugugcguggugcugcugggcuucaucaugugggccugccagagaggcaacaucagaugcaacaucugcaucuga

SEQ ID NO: 161700 - RNA, 1701 nt, Artificial Sequence
  derived and/or modified CDS sequence (opt4) from hemagglutinin__InfluenzaA__ABO52368
augaagaccaucaucgcccugagcuacaucuucugccuggcccugggccaggaccugcccggcaacgacaacagcaccgccacccugugccugggccaccacgccgugcccaacggcacccuggugaagaccaucaccaacgaccagaucgaggugaccaacgccaccgagcuggugcagagcagcagcaccggcaagaucugcaacaacccccacagaauccuggacggcaucaacugcacccugaucgacgcccugcugggcgacccccacugcgacguguuccaggacgagaccugggaccuguucguggagagaagcaaggccuucagcaacugcuaccccuacgacgugcccgacuacgccagccugagaagccugguggccagcagcggcacccuggaguucaucaccgagggcuucaccuggaccggcgugacccagaacggcggcagcaacgccugcaagagaggccccggcagcggcuucuucagcagacugaacuggcugaccaagagcggcagcaccuaccccgugcugaacgugaccaugcccaacaacgacaacuucgacaagcuguacaucuggggcgugcaccaccccagcaccaaccaggagcagaccagccuguacgugcaggccagcggcagagugaccgugagcaccagaagaagccagcagaccaucauccccaacaucggcagcagacccugggugagaggccugagcagcagaaucagcaucuacuggaccaucgugaagcccggcgacgugcuggugaucaacagcaacggcaaccugaucgcccccagaggcuacuucaagaugagaaccggcaagagcagcaucaugagaagcgacgcccccaucgacaccugcaucagcgagugcaucacccccaacggcagcauccccaacgacaagcccuuccagaacgugaacaagaucaccuacggcgccugccccaaguacgugaagcagaacacccugaagcuggccaccggcaugagaaacgugcccgagaagcagaccagaggccuguucggcgccaucgccggcuucaucgagaacggcugggagggcaugaucgacggcugguacggcuucagacaccagaacagcgagggcaccggccaggccgccgaccugaagagcacccaggccgccaucgaccagaucaacggcaagcugaacagagugaucgagaagaccaacgagaaguuccaccagaucgagaaggaguucagcgagguggagggcagaauccaggaccuggagaaguacguggaggacaccaagaucgaccuguggagcuacaacgccgagcugcugguggcccuggagaaccagcacaccaucgaccugaccgacagcgagaugaacaagcuguucgagaagaccagaagacagcugagagagaacgccgaggacaugggcaacggcugcuucaagaucuaccacaagugcgacaacgccugcaucgagagcaucagaaacggcaccuacgaccacgacguguacagagacgaggcccugaacaacagauuccagaucaagggcguggagcugaagagcggcuacaaggacuggauccuguggaucagcuucgccaucagcugcuuccugcugugcguggugcugcugggcuucaucaugugggccugccagagaggcaacaucagaugcaacaucugcaucuga

SEQ ID NO: 161701 - RNA, 1701 nt, Artificial Sequence
  derived and/or modified CDS sequence (opt4) from hemagglutinin__InfluenzaA__ABO52797
augaaggccaagcugcuggugcugcugugcgcccugagcgccaccgacgccgacaccaucugcaucggcuaccacgccaacaacagcaccgacaccguggacaccgugcuggagaagaacgugaccgugacccacagcgugaaccugcuggaggacaaccacaacggcaagcugugcaagcugaagggcaucgccccccugcagcugggcaagugcagcaucgccggcuggauccugggcaaccccgagugcgagagccuguucagcaagaagagcuggagcuacaucgccgagacccccaacagcgagaacggcaccugcuaccccggcuacuucgccgacuacgaggagcugagagagcagcugagcagcgugagcagcuucgagagauucgagaucuuccccaaggagagcagcuggcccaaccacaacgugaccaagggcgugaccgccagcugcagccacaagggcaagagcagcuucuacagaaaccugcuguggcugaccgagaagaacggcagcuaccccagccugagcaagagcuacgugaacaacaaggagaaggaggugcuggugcuguggggcgugcaccaccccagcaacaucaaggaccagaagaccaucuacagaaaggagaacgccuacgugagcguggugagcagccacuacaacagaagauucacccccgagaucgccaagagacccaaggugagagaccaggagggcagaaucaacuacuacuggacccugcuggagcccggcgacaccaucaucuucgaggccaacggcaaccugaucgcccccugguacgccuucgcccugagcagaggcuucggcagcggcaucaucaccagcaacgccagcauggacgagugcgacgccaagugccagaccccccagggcgccaucaacagcagccugcccuuccagaacgugcaccccgugaccaucggcgagugccccaaguacgugagaagcaccaagcugagaauggugaccggccugagaaacauccccagcauccagagcagaggccuguucggcgccaucgccggcuucaucgagggcggcuggaccggcaugaucgacggcugguacggcuaccaccaccagaacgagcagggcagcggcuacgccgccgaccagaagagcacccagagcgccaucaacggcaucaccaacaaggugaacagcaucaucgagaagaugaacacccaguucaccgccgugggcaaggaguucaacaagcuggagaagagaauggagaaccugaacaagaagguggacgacggcuuccuggacaucuggaccuacaacgccgagcugcuggugcugcuggagaacgagagaacccuggacuuccacgacagcaacgugaagaaccuguacgagaaggugaagagccagcugaagaacaacgccaaggagaucggcaacggcugcuucgaguucuaccacaagugcaacaacgagugcauggagagcgugaagaacggcaccuacgacuaccccaaguacagcgaggagagcaagcugaacagagagaagaucgacggcgugaagcuggagagcaugggcguguaccagauccuggccaucuacagcaccguggccagcagccuggugcugcuggugagccugggcgccaucagcuucuggaugugcagcaacggcagccugcagugcagaaucugcaucuga

SEQ ID NO: 161702 - RNA, 1698 nt, Artificial Sequence; identical to SEQ ID NO: 160802
  derived and/or modified CDS sequence (opt4) from hemagglutinin__InfluenzaA__ABP49217

SEQ ID NO: 161703 - RNA, 1698 nt, Artificial Sequence
  derived and/or modified CDS sequence (opt4) from hemagglutinin__InfluenzaA__ABP49305
augaaggccaagcugauggugcugcugugcaccuucaccgccaccuacgccgacaccaucugcaucggcuaccacgccaacaacagcaccgacaccguggacaccgugcuggagaagaacgugaccgugacccacagcgugaaccugcuggaggacagccacaacggcaagcugugccugcugaagggcaucgccccccugcagcugggcaacugcagcguggccggcuggauccugggcaaccccgagugcgagcugcugaucagcaaggagagcuggagcuacaucguggagacccccaaccccgagaacggcaccugcuaccccggcuacuucgccgacuacgaggagcugagagagcagcugagcagcgugagcagcuucgagagauucgagaucuuccccaaggagagcagcuggcccaaccacaccgugaccggcgugagcgccagcugcagccacaacggcaagagcagcuucuacagaaaccugcuguggcugaccggcaagaacggccuguaccccaaccugagcaagagcuacgccaacaacaaggagaaggaggugcuggugcuguggggcgugcaccacccccccaacaucggcgaccagagagcccuguaccacaccgagaacgccuacgugagcguggugagcagccacuacagcagaagauucacccccgagaucgccaagagacccaaggugagagaccaggagggcagaaucaacuacuacuggacccugcuggagcccggcgacaccaucaucuucgaggccaacggcaaccugaucgcccccugguacgccuucgcccugagcagaggcuucggcagcggcaucaucaccagcaacgcccccaugggcgagugcgacgccaagugccagaccccccagggcgccaucaacagcagccugcccuuccagaacgugcaccccgugaccaucggcgagugccccaaguacgugagaagcgccaagcugagaauggugaccggccugagaaacauccccagcauccagagcagaggccuguucggcgccaucgccggcuucaucgagggcggcuggaccggcaugguggacggcugguacggcuaccaccaccagaacgagcagggcagcggcuacgccgccgaccagaagagcacccagaacgccaucaacggcaucaccaacaaggugaacagcgugaucgagaagaugaacacccaguucaccgccgugggcaaggaguucaacaagcuggagagaagaauggagaaccugaacaagaagguggacgacggcuuccuggacaucuggaccuacaacgccgagcugcuggugcugcuggagaacgagagaacccuggacuuccacgacagcaacgugaagaaccuguacgagaaggugaagagccagcugaagaacaacgccaaggagaucggcaacggcugcuucgaguucuaccacaagugcaacaacgagugcauggagagcgugaagaacggcaccuacgacuaccccaaguacagcgaggagagcaagcugaacagagagaagaucgacggcgugaagcuggagagcaugggcguguaccagauccuggccaucuacagcaccguggccagcagccuggugcugcuggugagccugggcgccaucagcuucuggaugugcagcaacggcagccugcagugcagaaucugcaucuga

SEQ ID NO: 161704 - RNA, 1701 nt, Artificial Sequence
  derived and/or modified CDS sequence (opt4) from hemagglutinin__InfluenzaA__ABP49316
augaaggccaagcugcuggugcugcugugcgcccugagcgccaccgacgccgacaccaucugcaucggcuaccacgccaacaacagcaccgacaccguggacaccgugcuggagaagaacgugaccgugacccacagcgugaaccugcuggaggacagccacaacggcaagcugugcagacugaagggcaucgccccccugcagcugggcaagugcaacaucgccggcuggauccugggcaaccccgagugcgagagccuguucagcaagaagagcuggagcuacaucgccgagacccccaacagcgagaacggcaccugcuaccccggcuacuucgccgacuacgaggagcugagagagcagcugagcagcgugagcagcuucgagagauucgagaucuuccccaaggagagaagcuggcccaagcacaacaucaccagaggcgugaccgccgccugcagccacaagggcaagagcagcuucuacagaaaccugcuguggcugaccgagaagaacggcagcuaccccaaccugaagaagagcuacgugaacaacaaggagaaggaggugcuggugcuguggggcgugcaccaccccagcaacaucgaggaccagaagacccuguacagaaaggagaacgccuacgugagcguggugagcagcaacuacaacaagagauucacccccgagaucgccgagagacccaaggugagaggccaggccggcagaaucaacuacuacuggacccugcuggagcccggcgacaccaucaucuucgaggccaacggcaaccugaucgcccccuggcacgccuucgcccugagcagaggcuucggcagcggcaucaucaccagcaacgccagcauggacgagugcgacaccaagugccagaccccccagggcgccaucaacagcagccugcccuuccagaacauccaccccgugaccaucggcgagugccccaaguacgugagaagcaccaagcugagaauggugaccggccugagaaacauccccagcauccagagcagaggccuguucggcgccaucgccggcuucaucgagggcggcuggaccggcaugaucgacggcugguacggcuaccaccaccagaacgagcagggcagcggcuacgccgccgaccagaagagcacccagaacgccaucaacggcaucaccaacaaggugaacagcgugaucgagaagaugaacacccaguucaccgccgugggcaaggaguucaacaagcuggagaagagaauggagaaccugaacaagaagguggacgacggcuuccuggacaucuggaccuacaacgccgagcugcuggugcugcuggagaacgagagaacccuggacuuccacgacagcaacgugaagaaccuguacgagaaggugaagagccagcugaagaacaacgccaaggagaucggcaacggcugcuucgaguucuaccacaagugcaacaacgagugcauggagagcgugaagaacggcaccuacgacuaccccaaguacagcgaggagagcaagcugaacagagagaagaucgacggcgugaagcuggagagcaugggcguguaccagauccuggccaucuacagcaccguggccagcagccuggugcugcuggugagccugggcgccaucagcuucuggaugugcagcaacggcagccugcagugcagaaucugcaucuga

SEQ ID NO: 161705 - RNA, 1701 nt, Artificial Sequence
  derived and/or modified CDS sequence (opt4) from hemagglutinin__InfluenzaA__ABP49327
augaaggccagacugcuggugcugcugugcgcccuggccgccaccgacgccgacaccaucugcaucggcuaccacgccaacaacagcaccgacaccguggacaccgugcuggagaagaacgugaccgugacccacagcgugaaccugcuggaggacagccacaacggcaagcugugcagacugaagggcaucgccccccugcagcugagaaagugcaacaucgccggcuggauccugggcaaccccgagugcgagagccugcugagcgagagaagcuggagcuacaucguggagacccccaacagcgagaacggcaccugcuaccccggcgacuucaccaacuacgaggagcugagagagcagcugagcagcgugagcagcuucgagagauucgagaucuuccccaaggagagcagcuggcccaagcacaacaccaccagaggcgugaccgccgccugcagccacgccggcaagagcagcuucuacagaaaccugcuguggcugaccgagaaggacggcagcuaccccaaccugaacaacagcuacgugaacaagaagggcaaggaggugcuggugcuguggggcgugcaccaccccagcaacaucaaggaccagcagacccuguaccagaaggagaacgccuacgugagcguggugagcagcaacuacaacagaagauucacccccgagaucgccgagagacccaaggugagaggccaggccggcagaaugaacuacuacuggacccugcugaagcccggcgacaccaucauguucgaggccaacggcaaccugaucgcccccugguacgccuucgcccugagcagaggcuucggcagcggcaucaucaccagcaacgccagcaugcacgagugcgacaccaagugccagaccccccagggcgccaucaacagcagccugcccuuccagaacauccaccccgugaccaucggcgagugccccaaguacgugagaagcaccaagcugagaauggugaccggccugagaaacauccccagcauccagagcagaggccuguucggcgccaucgccggcuucaucgagggcggcuggaccggcaugaucgacggcugguacggcuaccaccaccagaacgagcagggcagcggcuacgccgccgaccagaagagcacccagaacgccaucaacggcaucaccaacaaggugaacagcgugaucgagaagaugaacacccaguucaccgccgugggcaaggaguucaacaaccuggagaagagaauggagaaccugaacaagaagguggacgacggcuuccuggacaucuggaccuacaacgccgagcugcugauccugcuggagaacgagagaacccuggacuuccacgacagcaacgugaagaaccuguacgagaaggugaagagccagcugagaaacaacgccaaggagaucggcaacggcugcuucgaguucuaccacaagugcaacaacgagugcauggagagcgugaagaacggcaccuacgacuaccccaaguacagcgaggagagcaagcugaacagagagaagaucgacggcgugaagcuggagagcaugggcguguaccagauccuggccaucuacagcaccguggccagcagccuggugcugcuggugagccugggcgccaucagcuucuggaugugcagcaacggcagccugcagugcagaaucugcaucuga

SEQ ID NO: 161706 - RNA, 1701 nt, Artificial Sequence
  derived and/or modified CDS sequence (opt4) from hemagglutinin__InfluenzaA__ABP49338
augaaggccaagcugcuggugcugcugugcgcccugagcgccaccgacgccgacaccaucugcaucggcuaccacgccaacaacagcaccgacaccguggacaccgugcuggagaagaacgugaccgugacccacagcgugaaccugcuggaggacagccacaacggcaagcugugcagacugaagggcaucgccccccugcagcugggcaagugcagcaucgccggcuggauccugggcaaccccgagugcgagagccuguucagcaagaagagcuggagcuacaucgccgagacccccaacagcgagaacggcaccugcuaccccggcuacuucgccgacuacgaggagcugagagagcagcugagcagcgugagcagcuucgagagauucgagaucuuccccaaggagagaagcuggcccaagcacaacgugaccagaggcgugaccgccagcugcagccacaagggcaagagcagcuucuacagaaaccugcuguggcugaccgagaagaacggcagcuaccccaaccugagcaagagcuacgugaacaacaaggagaaggaggugcuggugcuguggggcgugcaccaccccagcaacaucgaggaccagaagaccaucuacagaaaggagaacgccuacgugagcguggugagcagcaacuacaacagaagauucacccccgagaucgccaagagacccaaggugagaggccaggagggcagaaucaacuacuacuggacccugcuggagcccggcgacaccaucaucuucgaggccaacggcaaccugaucgcccccugguacgccuucgcccugagcagaggcuucggcagcggcaucaucaccagcaacgccagcauggacgagugcgacaccaagugccagaccccccagggcgccaucaacagcagccugcccuuccagaacgugcaccccgugaccaucggcgagugccccaaguacgugagaagcaccaagcugagaauggugaccggccugagaaacauccccagcauccagagcagaggccuguucggcgccaucgccggcuucaucgagggcggcuggaccggcaugaucgacggcugguacggcuaccaccaccagaacgagcagggcagcggcuacgccgccgaccagaagagcacccagaacgccaucaacggcaucaccaacaaggugaacagcgugaucgagaagaugaacacccaguucaccgccgugggcaaggaguucaacaagcuggagaagagaauggagaaccugaacaagaagguggacgacggcuuccuggacaucuggaccuacaacgccgagcugcuggugcugcuggagaacgagagaacccuggacuuccacgacagcaacgugaagaaccuguacgagaaggugaagagccagcugaagaacaacgccaaggagaucggcaacggcugcuucgaguucuaccacaagugcaacaacgagugcauggagagcgugaagaacggcaccuacgacuaccccaaguacagcgaggagagcaagcugaacagagagaagaucgacggcgugaagcuggagagcaugggcguguaccagauccuggccaucuacagcaccguggccagcagccuggugcugcuggugagccugggcgccaucagcuucuggaugugcagcaacggcagccugcagugcagaaucugcaucuga

SEQ ID NO: 161707 - RNA, 1701 nt, Artificial Sequence
  derived and/or modified CDS sequence (opt4) from hemagglutinin__InfluenzaA__ABP49349
augaaggccaagcugcuggugcugcugugcgcccugagcgccaccgacgccgacaccaucugcaucggcuaccacgccaacaacagcaccgacaccguggacaccgugcuggagaagaacgugaccgugacccacagcgugaaccugcuggaggacaaccacaacggcaagcugugcaagcugaagggcaucgccccccugcagcugggcaagugcagcaucgccggcuggauccugggcaaccccgagugcgagagccuguucagcaagaagagcuggagcuacaucgccgagacccccaacagcgagaacggcaccugcuaccccggcuacuucgccgacuacgaggagcugagagagcagcugagcagcgugagcagcuucgagagauucgagaucuuccccaaggagagcagcuggcccaaccacaacgugaccaagggcgugaccgccagcugcagccacaagggcaagagcagcuucuacagaaaccugcuguggcugaccgagaagaacggcagcuaccccaaccugagcaagagcuacgugaacaacaaggagaaggaggugcuggugcuguggggcauccaccaccccagcaacaucgaggaccagaagaccaucuacagaaaggagaacgccuacgugagcguggugagcagccacuacaacagaagauucacccccgagaucgccaagagacccaaggugagagaccaggagggcagaaucaacuacuacuggacccugcuggagcccggcgacaccaucaucuucgaggccaacggcaaccugaucgcccccugguacgccuucgcccugagcagaggcuucggcagcggcaucaucaccagcaacgccagcauggacgagugcgacgccaagugccagaccccccugggcgccaucaacagcagccugcccuuccagaacgugcaccccgugaccaucggcgagugccccaaguacgugagaagcaccaagcugagaauggugaccggccugagaaacauccccagcauccagagcagaggccuguucggcgccaucgccggcuucaucgagggcggcuggaccggcaugaucgacggcugguacggcuaccaccaccagaacgagcagggcagcggcuacgccgccgaccagaagagcacccagagcgccaucaacggcaucaccaacaaggugaacagcaucaucgagaagaugaacacccaguucaccgccgugggcaaggaguucaacaagcuggagaagagaauggagaaccugaacaagaagguggacgacggcuuccuggacaucuggaccuacaacgccgagcugcuggugcugcuggagaacgagagaacccuggacuuccacgacagcaacgugaagaaccuguacgagaaggugaagagccagcugaagaacaacgccaaggagaucggcaacggcugcuucgaguucuaccacaagugcaacaacgagugcauggagagcgugaagaacggcaccuacgacuaccccaaguacagcgaggagagcaagcugaacagagagaagaucgacggcgugaagcuggagagcaugggcguguaccagauccuggccaucuacagcaccguggccagcagccuggugcugcuggugagccugggcgccaucagcuucuggaugugcagcaacggcagccugcagugcagaaucugcaucuga

SEQ ID NO: 161708 - RNA, 1701 nt, Artificial Sequence
  derived and/or modified CDS sequence (opt4) from hemagglutinin__InfluenzaA__ABP49360
augaaggccaagcugcugauccugcugugcgccuucaccgccaccgacgccgacaccaucugcaucggcuaccacgccaacaacagcaccgacaccguggacaccgugcuggagaagaacgugaccgugacccacagcgugaaccugcuggaggacagccacaacggcaagcugugcagacugaagggcaucgccccccugcagcugggcaacugcagcaucgccggcuggauccugggcaaccccgagugcgagagccuguucagcaagaagagcuggagcuacaucgccgagacccccaacagcgagaacggcaccugcuaccccggcuacuucgccgacuacgaggagcugagagagcagcugagcagcgugagcagcuucgagagauucgagaucuuccccaaggagagcagcuggcccaaccacaccgugaccaagggcgugaccgccagcugcagccacaacggcaagagcagcuucuacagaaaccugcuguggcugaccaagaagaacggcagcuaccccaaccugagcaagagcuacgugaacaacaaggagaaggaggugcuggugcuguggggcgugcaccaccccagcaacaucggcgaccagagagccaucuaccacaccgagaacgccuacgugagcguggugagcagccacuacaacagaagauucacccccgagaucgccaagagacccaaggugagagaccaggagggcagaaucaacuacuacuggacccugcuggagcccggcgacaccaucaucuucgaggccaacggcaaccugaucgcccccugguacgccuucgcccugagcagaggcuucggcagcggcaucaucaccagcaacgccagcauggacgagugcgacgccaagugccagaccccccagggcgccaucaacagcagccugcccuuccagaacgugcaccccgugaccaucggcgagugccccaaguacgugagaagcaccaagcugagaauggugaccggccugagaaacauccccagcauccagagcagaggccuguucggcgccaucgccggcuucaucgagggcggcuggaccggcaugaucgacggcugguacggcuaccaccaccagaacgagcagggcagcggcuacgccgccgaccagaagagcacccagaacgccaucaacggcaucaccaacaaggugaacagcgugaucgagaagaugaacacccaguucaccgccgugggcaaggaguucaacaagcuggagagaagaauggagaaccugaacaagaagguggacgacggcuuccuggacaucuggaccuacaacgccgagcugcuggugcugcuggagaacgagagaacccuggacuuccacgacagcaacgugaagaaccuguacgagaaggugaagagccagcugaagaacaacgccaaggagaucggcaacggcugcuucgaguucuaccacaagugcaacaacgagugcauggagagcgugaagaacggcaccuacgacuaccccaaguacagcgaggagagcaagcugaacagagagaagaucgacggcgugaagcuggagagcaugggcguguaccagauccuggccaucuacagcaccguggccagcagccuggugcugcuggugagccugggcgccaucagcuucuggaugugcagcaacggcagccugcagugcagaaucugcaucuga

SEQ ID NO: 161709 - RNA, 1701 nt, Artificial Sequence; identical to SEQ ID NO: 160710
  derived and/or modified CDS sequence (opt4) from hemagglutinin__InfluenzaA__ABP49371

SEQ ID NO: 161710 - RNA, 1701 nt, Artificial Sequence; identical to SEQ ID NO: 161447
  derived and/or modified CDS sequence (opt4) from hemagglutinin__InfluenzaA__ABP49382

SEQ ID NO: 161711 - RNA, 1698 nt, Artificial Sequence
  derived and/or modified CDS sequence (opt4) from hemagglutinin__InfluenzaA__ABP49393
augaaggugaagcugcuggugcugcugugcaccuucaccgccaccuacgccgacaccaucugcaucggcuaccacgccaacaacagcaccgacaccguggacaccgugcuggagaagaacgugaccgugacccacagcgugaaccugcuggaggacagccacaacggcaagcugugccugcugaagggcaucgccccccugcagcugggcaacugcagcguggccggcuggauccugggcaaccccgagugcgagcugcugaucagcaaggagagcuggagcuacaucguggagacccccaaccccgagaacggcaccugcuaccccggcuacuucgccgacuacgaggagcugagagagcagcugagcagcgugagcagcuucgagagauucgagaucuuccccaaggagagcagcuggcccaaccacaccgugaccggcgugagcgccagcugcagccacaacggcaagagcagcuucuacagaaaccugcuguggcugaccggcaagaacggccuguaccccaaccugagcaagagcuacgccaacaacaaggagaaggaggugcuggugcuguggggcauccaccacccccccaacaucggcgaccagagagcccuguaccacaccgagaacgccuacgugagcguggugagcagccacuacagcagaagauucacccccgagaucgccaagagacccaaggugagagaccaggagggcagaaucaacuacuacuggacccugcuggagcccggcgacaccaucaucuucgaggccaacggcaaccugaucgcccccagauucgccuucgcccugagcagaggcuucggcagcggcaucaucaccagcaacgcccccauggacgagugcgacgccaagugccagaccccccagggcgccaucaacagcagccugcccuuccagaacgugcaccccgugaccaucggcgagugccccaaguacgugagaagcgccaagcugagaauggugaccggccugagaaacauccccagcauccagagcagaggccuguucggcgccaucgccggcuucaucgagggcggcuggaccggcaugguggacggcugguacggcuaccaccaccagaacgagcagggcagcggcuacgccgccgaccagaagagcacccagaacgccaucaacggcaucaccaacaaggugaacagcgugaucgagaagaugaacacccaguucaccgccgugggcaaggaguucaacaagcuggagagaagaauggagaaccugaacaagaagguggacgacggcuuccuggacaucuggaccuacaacgccgagcugcuggugcugcuggagaacgagagaacccuggacuuccacgacagcaacgugaagaaccuguacgagaaggugaagagccagcugaagaacaacgccaaggagaucggcaacggcugcuucgaguucuaccacaagugcaacgacgagugcauggagagcgugaagaacggcaccuacgacuaccccaaguacagcgaggagagcaagcugaacagagagagaaucgacggcgugaagcuggagagcaugggcguguaccagauccuggccaucuacagcaccguggccagcagccuggugcugcuggugagccugggcgccaucagcuucuggaugugcagcaacggcagccugcagugcagaaucugcaucuga

SEQ ID NO: 161712 - RNA, 1701 nt, Artificial Sequence
  derived and/or modified CDS sequence (opt4) from hemagglutinin__InfluenzaA__ABP49404
augaagaccaucaucgcccugagcuacacccugugccugguguucgcccagaagcugcccggcaacgacaacagcaccgccacccugugccugggccaccacgccgugcccaacggcaccaucgugaagaccaucaccaacgaccagaucgaggugaccaacgccaccgagcuggugcagagcagcagcaccggcggcaucugcgacagcccccaccagauccuggacggcgagaacugcacccugaucggcgcccugcugggcgacccccagugcgacggcuuccagaacaagaagugggaccuguucguggagagaagcaaggccuacagcaacugcuaccccuacgacgugcccgacuacgccagccugagaagccugguggccagcagcggcacccuggaguucaacaacgagagcuucaacuggaccggcgugacccagaacggcaccagcagcgccugcaagagaagaagcaacaacagcuucuucagcagacugaacuggcugacccaccugaaguucaaguaccccgcccugaacgugaccaugcccaacaacgagaaguucgacaagcuguacaucuggggcgugcaccaccccggcaccuacaacgaccagaucagccuguacgcccaggccagcggcagaaucaccgugagcaccaagagaagccagcagaccgugauccccaacaucggcagcagacccagagugagagacauccccagcagaaucagcaucuacuggaccaucgugaagcccggcgacauccugcugaucaacagcaccggcaaccugaucgcccccagaggcuacuucaagaucagaagcggcaagagcagcaucaugagaagcgacgcccccaucggcaagugcaacagcgagugcaucacccccaacggcagcauccccaacgacaagcccuuccagaacgugaacagaaucaccuacggcgccugccccagauacgugaagcagaacacccugaagcuggccaccggcaugagaaacgugcccgagaagcagaccagaggcaucuucggcgccaucgccggcuucaucgagaacggcugggagggcaugguggacggcugguacggcuucagacaccagaacagcgagggcaucggccaggccgccgaccugaagagcacccaggccgccaucaaccagaucaacggcaagcugaacagacugaucggcaagaccaacgagaaguuccaccagaucgagaaggaguucagcgagguggagggcagaauccaggaccuggagaaguacguggaggacaccaagaucgaccuguggagcuacaacgccgagcugcugguggcccuggagaaccagcacaccaucgaccugaccgacagcgagaugaacaagcuguucgagagaaccaagaagcagcugagagagaacgccgaggacaugggcaacggcugcuucaagaucuaccacaagugcgacaacgccugcaucggcagcaucagaaacggcaccuacgaccacgacguguacagagacgaggcccugaacaacagauuccagaucaagggcguggagcugaagagcggcuacaaggacuggauccuguggaucagcuucgccaucagcugcuuccugcugugcguggcccugcugggcuucaucaugugggccugccagaagggcaacaucagaugcaacaucugcaucuga

SEQ ID NO: 161713 - RNA, 1701 nt, Artificial Sequence; identical to SEQ ID NO: 160710
  derived and/or modified CDS sequence (opt4) from hemagglutinin__InfluenzaA__ABP49415

SEQ ID NO: 161714 - RNA, 1701 nt, Artificial Sequence; identical to SEQ ID NO: 160710
  derived and/or modified CDS sequence (opt4) from hemagglutinin__InfluenzaA__ABP49426

SEQ ID NO: 161715 - RNA, 1689 nt, Artificial Sequence
  derived and/or modified CDS sequence (opt4) from hemagglutinin__InfluenzaA__ABP49437
auggccaucaucuaccugauccugcuguucaccgccgugagaggcgaccagaucugcaucggcuaccacgccaacaacagcaccgagaagguggacaccauccuggagagaaacgugaccgugacccacgccaaggacauccuggagaagacccacaacggcaagcugugcaagcugaacggcauccccccccuggagcugggcgacugcagcaucgccggcuggcugcugggcaaccccgagugcgacagacugcugagcgugcccgaguggagcuacaucauggagaaggagaaccccagagacggccugugcuaccccggcagcuucaacgacuacgaggagcugaagcaccugcugagcagcgugaagcacuucgagaaggugaagauccugcccaaggacagauggacccagcacaccaccaccggcggcagcagagccugcgccgugagcggcaaccccagcuucuucagaaacaugguguggcugaccaagaagggcagcaacuaccccguggccaagggcagcuacaacaacaccagcggcgagcagaugcugaucaucuggggcgugcaccaccccaacgacgagaccgagcagagaacccuguaccagaacgugggcaccuacgugagcgugggcaccagcacccugaacaagagaagcacccccgagaucgccaccagacccaaggugaacggccugggcggcagaauggaguucagcuggacccugcuggacaugugggacaccaucaacuucgagagcaccggcaaccugaucgcccccgaguacggcuucaagaucagcaagagaggcagcagcggcaucaugaagaccgagggcacccuggagaacugcgagaccaagugccagaccccccugggcgccaucaacaccacccugcccuuccacaacgugcacccccugaccaucggcgagugccccaaguacgugaagagcgagaagcuggugcuggccaccggccugagaaacgugccccagaucgagagcagaggccuguucggcgccaucgccggcuucaucgagggcggcuggcagggcaugguggacggcugguacggcuaccaccacagcaacgaccagggcagcggcuacgccgccgacaaggagagcacccagaaggccuucgacggcaucaccaacaaggugaacagcgugaucgagaagaugaacacccaguucgaggccgugggcaaggaguucagcaaccuggagagaagacuggagaaccugaacaagaagauggaggacggcuuccuggacguguggaccuacaacgccgagcugcuggugcugauggagaacgagagaacccuggacuuccacgacagcaacgugaagaaccuguacgacaaggugagaaugcagcugagagacaacgugaaggagcugggcaacggcugcuucgaguucuaccacaagugcgacgacgagugcaugaacagcgugaagaacggcaccuacgacuaccccaaguacgaggaggagagcaagcugaacagaaacgagaucaagggcgugaagcugagcagcaugggcguguaccagauccuggccaucuacgccaccguggccggcagccugagccuggccaucaugauggccggcaucagcuucuggaugugcagcaacggcagccugcagugcagaaucugcaucuga

SEQ ID NO: 161716 - RNA, 1701 nt, Artificial Sequence
  derived and/or modified CDS sequence (opt4) from hemagglutinin__InfluenzaA__ABP49448
augaaggccaagcugcuggugcugcugugcgcccugagcgccaccgacgccgacaccaucugcaucggcuaccacgccaacaacagcaccgacaccguggacaccgugcuggagaagaacgugaccgugacccacagcgugaaccugcuggaggacagccacaacggcaagcugugcagacugaagggcaucgccccccugcagcugggcaagugcagcaucgccggcuggauccugggcaaccccgagugcgagagccuguucagcaagaagagcuggagcuacaucgccgagacccccaacagcgagaacggcaccugcuaccccggcuacuucgccgacuacgaggagcugagagagcagcugagcagcgugagcagcuucgagagauucgagaucuuccccaaggagagaagcuggcccaagcacaacgugaccagaggcgugaccgccagcugcagccacaagggcaagagcagcuucuacagaaaccugcuguggcugaccgagaagaacggcagcuaccccaaccugagcaagagcuacgugaacaacaaggagaaggaggugcuggugcuguggggcgugcaccaccccagcaacaucgaggaccagaagaccaucuacagaaaggagaacgccuacgugagcguggugagcagcaacuacaacagaagauucacccccgagaucagcgagagacccaaggugagaggccaggagggcagaaucaacuacuacuggacccugcuggagcccggcgacaccaucaucuucgaggccaacggcaaccugaucgcccccugguacgccuucgcccugagcagaggcuucggcagcggcaucaucaccagcaacgccagcauggacgagugcgacaccaagugccagaccccccagggcgccaucaacagcagccugcccuuccagaacgugcaccccgugaccaucggcgagugccccaaguacgugagaagcaccaagcugagaauggugaccggccugagaaacauccccagcauccagagcagaggccuguucggcgccaucgccggcuucaucgagggcggcuggaccggcaugaucgacggcugguacggcuaccaccaccagaacgagcagggcagcggcuacgccgccgaccagaagagcacccagaacgccaucaacggcaucaccaacaaggugaacagcgugaucgagaagaugaacacccaguucaccgccgugggcaaggaguucaacaagcuggagaagagaauggagaaccugaacaagaagguggacgacggcuuccuggacaucuggaccuacaacgccgagcugcuggugcugcuggagaacgagagaacccuggacuuccacgacagcaacgugaagaaccuguacgagaaggugaagagccagcugaagaacaacgccaaggagaucggcaacggcugcuucgaguucuaccacaagugcaacaacgagugcauggagagcgugaagaacggcaccuacgacuaccccaaguacagcgaggagagcaagcugaacagagagaagaucgacggcgugaagcuggagagcaugggcguguaccagauccuggccaucuacagcaccguggccagcagccuggugcugcuggugagccugggcgccaucagcuucuggaugugcagcaacggcagccugcagugcagaaucugcaucuga

SEQ ID NO: 161717 - RNA, 1689 nt, Artificial Sequence
  derived and/or modified CDS sequence (opt4) from hemagglutinin__InfluenzaA__ABP49459
auggccaucaucuaccugauccugcuguucaccgccgugagaggcgaccagaucugcaucggcuaccacgccaacaacagcaccgagaagguggacaccauccuggagagaaacgugaccgugacccacgccaaggacauccuggagaagacccacaacggcaagcugugcaagcugaacggcauccccccccuggagcugggcgacugcagcaucgccggcuggcugcugggcaaccccgagugcgacagacugcugagcgugcccgaguggagcuacaucauggagaaggagaaccccagagacggccugugcuaccccggcagcuucaacgacuacgaggagcugaagcaccugcugagcagcgugaagcacuucgagaaggugaagauccugcccaaggacagauggacccagcacaccaccaccggcggcagcagagccugcgccgugagcggcaaccccagcuucuucagaaacaugguguggcugaccaagaagggcagcaacuaccccguggccaagggcagcuacaacaacaccagcggcgagcagaugcugaucaucuggggcgugcaccaccccaacgacgagaccgagcagagaacccuguaccagaacgugggcaccuacgugagcgugggcacccccacccugaacaagagaagcacccccgacaucgccaccagacccaaggugaacggccagggcggcagaauggaguucagcuggacccugcuggacaugugggacaccaucaacuucgagagcaccggcaaccugaucgcccccgaguacggcuucaagaucagcaagagaggcagcagcggcaucaugaagaccgagggcacccugggcaacugcgagaccaagugccagaccccccugggcgccaucaacaccacccugcccuuccacaacgugcacccccugaccaucggcgagugccccaaguacgugaagagcgagaagcuggugcuggccaccggccugagaaacgugccccagaucgagagcagaggccuguucggcgccaucgccggcuucaucgagggcggcuggcagggcaugguggacggcugguacggcuaccaccacagcaacgaccagggcagcggcuacgccgccgacaaggagagcacccagaaggccuucgacggcaucaccaacaaggugaacagcgugaucgagaagaugaacacccaguucgaggccgugggcaaggaguucagcaaccuggagagaagacuggagaaccugaacaagaagauggaggacggcuuccuggacguguggaccuacaacgccgagcugcuggugcugauggagaacgagagaacccuggacuuccacgacagcaacgugaagaaccuguacgacaaggugagaaugcagcugagagacaacgugaaggagcugggcaacggcugcuucgaguucuaccacaagugcgacgacgagugcaugaacagcgugaagaacggcaccuacgacuaccccaaguacgaggaggagagcaagcugaacagaaacgagaucaagggcgugaagcugagcagcaugggcguguaccagauccuggccaucuacgccaccguggccggcagccugagccuggccaucaugauggccggcaucagcuucuggaugugcagcaacggcagccugcagugcagaaucugcaucuga

SEQ ID NO: 161718 - RNA, 1689 nt, Artificial Sequence
  derived and/or modified CDS sequence (opt4) from hemagglutinin__InfluenzaA__ABP49470
auggccaucaucuaccugauccugcuguucaccgccgugagaggcgaccagaucugcaucggcuaccacgccaacaacagcaccgagaagguggacaccauccuggagagaaacgugaccgugacccacgccaaggacauccuggagaagacccacaacggcaagcugugcaagcugaacggcauccccccccuggagcugggcgacugcagcaucgccggcuggcugcugggcaaccccgagugcgacagacugcugagcgugcccgaguggagcuacaucauggagaaggagaaccccagagacggccugugcuaccccggcagcuucaacgacuacgaggagcugaagcaccugcugagcagcgugaagcacuucgagaaggugaagauccugcccaaggacagauggacccagcacaccaccaccggcggcagcagagccugcgccgugagcggcaaccccagcuucuucagaaacaugguguggcugaccaagaagggcagcaacuaccccguggccaagggcagcuacaacaacaccagcggcgagcagaugcugaucaucuggggcgugcaccaccccaacgacgagaccgagcagagaacccuguaccagaacgugggcaccuacgugagcgugagcaccagcacccugaacaagagaagcacccccgacaucgccaccagacccaaggugaacggccugggcggcagaauggaguucagcuggacccugcuggacaugugggacaccaucaacuucgagagcaccggcaaccugaucgcccccgaguacggcuucaagaucagcaagagaggcagcagcggcaucaugaagaccgagggcacccugggcaacugcgagaccaagugccagaccccccugggcgccaucaacaccacccugcccuuccacaacgugcacccccugaccaucggcgagugccccaaguacgugaagagcgagaagcuggugcuggccaccggccugagaaacgugccccagaucgagagcagaggccuguucggcgccaucgccggcuucaucgagggcggcuggcagggcaugguggacggcugguacggcuaccaccacagcaacgaccagggcagcggcuacgccgccgacaaggagagcacccagaaggccuucgacggcaucaccaacaaggugaacagcgugaucgagaagaugaacacccaguucgaggccgugggcaaggaguucagcaaccuggagagaagacuggagaaccugaacaagaagauggaggacggcuuccuggacguguggaccuacaacgccgagcugcuggugcugauggagaacgagagaacccuggacuuccacgacagcaacgugaagaaccuguacgacaaggugagaaugcagcugagagacaacgugaaggagcugggcaacggcugcuucgaguucuaccacaagugcgacgacgagugcaugaacagcgugaagaacggcaccuacgacuaccccaaguacgaggaggagagcaagcugaacagaaacgagaucaagggcgugaagcugagcagcaugggcguguaccagauccuggccaucuacgccaccguggccggcagccugagccuggccaucaugauggccggcaucagcuucuggaugugcagcaacggcagccugcagugcagaaucugcaucuga

SEQ ID NO: 161719 - RNA, 1701 nt, Artificial Sequence
  derived and/or modified CDS sequence (opt4) from hemagglutinin__InfluenzaA__ABP49492
augaagaccaucaucgcccugagcuacaucuucugccugguguucgcccagggccugcccggcaacgacaacagcaccgccacccugugccugggccaccacgccgugcccaacggcacccuggugaagaccaucaccaacgaccagaucgaggugaccaacgccaccgagcuggugcagagcagcagcaccggcaagaucugcgacaacccccacagaauccuggacggcaucaacugcacccugaucgacgcccugcugggcgacccccacugcgacggcuuccagaacgagaagugggaccuguucguggagagaagcaaggccuucagcaacugcuaccccuacgacgugcccgacuacgccagccugagaagccugguggccagcagcggcacccuggaguucaucaacgagggcuucaacuggaccggcgugacccagaacggcggcagcagcagcugcaagagaggccccgacaacggcuucuucagcagacugaacuggcuguacaagagcggcagcaccuaccccgugcagaacgugaccaugcccaacaacgacaacagcgacaagcuguacaucuggggcgugcaccaccccagcaccgacaaggagcagaccgaccuguacgugcaggccagcggcaaggugaccgugagcaccaagagaagccagcagaccgugauccccaacgugggcagcagacccugggugagaggccugagcagcagagugagcaucuacuggaccaucgugaagcccggcgacauccuggugaucaacagcaacggcaaccugaucgcccccagaggcuacuucaagaugagaaccggcaagagcagcaucaugagaagcgacgcccccaucggcaccugcagcagcgagugcaucacccccaacggcagcauccccaacgacaagcccuuccagaacgugaacaagaucaccuacggcgccugccccaaguacgugaagcagaacacccugaagcuggccaccggcaugagaaacgugcccgagaagcagaccagaggcaucuucggcgccaucgccggcuucaucgagaacggcugggagggcaugaucgacggcugguacggcuucagacaccagaacagcgagggcaccggccaggccgccgaccugaagagcacccaggccgccaucgaccagaucaacggcaagcugaacagagugaucgagaagaccaacgagaaguuccaccagaucgagaaggaguucagcgagguggagggcagaauccaggaccuggagaaguacguggaggacaccaagaucgaccuguggagcuacaacgccgagcugcugguggcccuggagaaccagcacaccaucgaccugaccgacagcgagaugaacaagcuguucgagaagaccagaagacagcugagagagaacgccgaggacaugggcaacggcugcuucaagaucuaccacaagugcgacaacgccugcaucggcagcaucagaaacggcaccuacgaccacgacguguacagagacgaggcccugaacaacagauuccagaucaagggcguggagcugaagagcggcuacaaggacuggauccuguggaucagcuucgccaucagcugcuuccugcugugcguggugcugcugggcuucaucaugugggccugccagaagggcaacaucagaugcaacaucugcaucuga

SEQ ID NO: 161720 - RNA, 1701 nt, Artificial Sequence; identical to SEQ ID NO: 161616
  derived and/or modified CDS sequence (opt4) from hemagglutinin__InfluenzaA__ABP49503

SEQ ID NO: 161721 - RNA, 1701 nt, Artificial Sequence
  derived and/or modified CDS sequence (opt4) from hemagglutinin__InfluenzaA__ABP49514
augaagaccaucaucgcccugagcuacaucuucuaccuggcccugggccaggaccugcccggcaacgacaacagcaccgccacccugugccugggccaccacgccgugcccaacggcacccuggugaagaccaucaccaacgaccagaucgaggugaccaacgccaccgagcuggugcagagcagcagcaccggcaagaucugcaacaacccccacagaauccuggacggcaucgacugcacccugaucgacgcccugcugggcgacccccacugcgacguguuccagaacgagaccugggaccuguucguggagagaagcaaggccuucagcaacugcuaccccuacgacgugcccgacuacgccagccugagaagccugguggccagcagcggcacccuggaguucaucaccgagggcuucaccuggaccggcgugacccagaacggcggcagcaacgccugcaagagaggccccggcagcggcuucuucagcagacugaacuggcugaccaagagcggcagcaccuaccccgugcugaacgugaccaugcccaacaacgacaacuucgacaagcuguacaucuggggcgugcaccaccccagcaccaaccaggagcagaccagccuguacgugcaggccagcggcagagugaccgugagcaccagaagaagccagcagaccaucauccccaacaucggcagcagacccugggugagaggccugagcagcagaaucagcaucuacuggaccaucgugaagcccggcgacgugcuggugaucaacagcaacggcaaccugaucgcccccagaggcuacuucaagaugagaaccggcaagagcagcaucaugagaagcgacgcccccaucgacaccugcaucagcgagugcaucacccccaacggcagcauccccaacgacaagcccuuccagaacgugaacaagaucaccuacggcgccugccccaaguacgugaagcagaacacccugaagcuggccaccggcaugagaaacgugcccgagaagcagaccagaggccuguucggcgccaucgccggcuucaucgagaacggcugggagggcaugaucgacggcugguacggcuucagacaccagaacagcgagggcaccggccaggccgccgaccugaagagcacccaggccgccaucgaccagaucaacggcaagcugaacagagugaucgagaagaccaacgagaaguuccaccagaucgagaaggaguucagcgagguggagggcagaauccaggaccuggagaaguacguggaggacaccaagaucgaccuguggagcuacaacgccgagcugcugguggcccuggagaaccagcacaccaucgaccugaccgacagcgagaugaacaagcuguucgagaagaccagaagacagcugagagagaacgccgaggacaugggcaacggcugcuucaagaucuaccacaagugcgacaacgccugcaucgagagcaucagaaacggcaccuacgaccacgacguguacagagacgaggcccugaacaacagauuccagaucaagggcguggagcugaagagcggcuacaaggacuggauccuguggaucagcuucgccaucagcugcuuccugcugugcguggugcugcugggcuucaucaugugggccugccagagaggcaacaucagaugcaacaucugcaucuga

SEQ ID NO: 161722 - RNA, 1701 nt, Artificial Sequence
  derived and/or modified CDS sequence (opt4) from hemagglutinin__InfluenzaA__ABQ01311
augaaggccagacugcugauccugcugugcgcccugagcgccaccgacgccgacaccaucugcaucggcuaccacgccaacaacagcaccgacaccguggacaccgugcuggagaagaacgugaccgugacccacagcgugaaccugcuggaggacagccacaacggcaagcugugcagacugaagggcaucgccccccugcagcugggcaagugcaacaucgccggcuggauccugggcaaccccgagugcgagagccugcugagcaacagaagcuggagcuacaucgccgagacccccaacagcgagaacggcaccugcuaccccggcgacuucgccgacuacgaggagcugagagagcagcugagcagcgugagcagcuucgagagauucgagaucuuccccaaggagagaagcuggcccaagcacaacaucaccagaggcgugaccgccgccugcagccacgccaagaagagcagcuucuacaagaaccugcuguggcugaccgaggccaacggcagcuaccccaaccugagcaagagcuacgugaacaacaaggagaaggaggugcuggugcuguggggcgugcaccaccccagcaagaucgaggaccagagaacccuguacagaaaggagaacgccuacgugagcguggugagcagcaacuacaacagaagauucacccccgagaucgccgagagacccaaggugagaggccaggccggcagaaugaacuacuacuggacccugcuggagcccggcgacaagaucaucuucgaggccaacggcaaccugaucgcccccugguacgccuucgcccugagcagaggccugggcagcggcaucaucaccagcaacgccagcauggacgagugcgacaccaagugccagaccccccagggcgccaucaacagcagccugcccuuccagaacauccaccccgugaccaucggcgagugccccaaguacgugagaagcaccaagcugagaauggugaccggccugagaaacauccccagcauccagagcagaggccuguucggcgccaucgccggcuucaucgagggcggcuggaccggcaugguggacggcugguacggcuaccaccaccagaacgagcagggcagcggcuacgccgccgaccagaagagcacccagaacgccaucaacggcaucaccaacaaggugaacagcgugaucgagaagaugaacacccaguucaccgccgugggcaaggaguucaacaagcuggagaagagaauggagaaccugaacaagaagguggacgacggcuuccuggacaucuggaccuacaacgccgagcugcuggugcugcuggagaacgagagaacccuggacuuccacgacagcaacgugaagaaccuguacgagaaggugaagaaccagcugagaaacaacgccaaggagaucggcaacggcugcuucgaguucuaccacaagugcgacaacgagugcauggagagcgugaagaacggcaccuacgacuaccccaaguacagcgaggagagcaagcugaacagagagaagaucgacggcgugaagcuggagagcaugggcguguaccagauccuggccaucuacagcaccguggccagcagccuggugcugcuggugagccugggcgccaucagcuucuggaugugcagcaacggcagccugcagugcagaaucugcaucuga

SEQ ID NO: 161723 - RNA, 1701 nt, Artificial Sequence
  derived and/or modified CDS sequence (opt4) from hemagglutinin__InfluenzaA__ABQ01322
augaaggccaagcugcuggugcugcugugcgcccugagcgccaccgacgccgacaccaucugcaucggcuaccacgccaacaacagcaccgacaccguggacaccgugcuggagaagaacgugaccgugacccacagcgugaaccugcuggaggacagccacaacggcaagcugugcagacugaagggcaucgccccccugcaccugggcaagugcagcaucgccggcuggauccugggcaaccccgagugcgagagccuguucagcaagaagagcuggagcuacaucgccgagacccccaacagcgagaacggcaccugcuaccccggcuacuucgccgacuacgaggagcugagagagcagcugagcagcgugagcagcuucgagagauucgagaucuuccccaaggagagaagcuggcccaagcacaacgugaccagaggcgugaccgccgccugcagccacaagggcaagagcagcuucuacagaaaccugcuguggcugaccgagaagaacggcagcuaccccaaccugagcaagagcuacgugaacaacaaggagaaggaggugcuggugcuguggggcgugcaccaccccagcaacaucgaggaccagaagaccaucuacagaaaggagaacgccuacgugagcguggugagcagcaacuacaacagaagauucacccccgagaucgccaagagacccaaggugagaggccaggagggcagaaucaacuacuacuggacccugcuggagcccggcgacaccaucaucuucgaggccaacggcaaccugaucgcccccugguacgccuucgcccugagcagaggcuucggcagcggcaucaucaccagcaacgccagcauggacgagugcgacgccaagugccagaccccccagggcgccaucaacagcagccugcccuuccagaacgugcaccccgugaccaucggcgagugccccaaguacgugagaagcaccaagcugagaauggugaccggccugagaaacauccccagcauccagagcagaggccuguucggcgccaucgccggcuucaucgagggcggcuggaccggcaugaucgacggcugguacggcuaccaccaccagaacgagcagggcagcggcuacgccgccgaccagaagagcacccagaacgccaucaacggcaucaccaacaaggugaacagcgugaucgagaagaugaacacccaguucaccgccgugggcaaggaguucaacaagcuggagaagagaauggagaaccugaacaagaagguggacgacggcuuccuggacaucuggaccuacaacgccgagcugcuggugcugcuggagaacgagagaacccuggacuuccacgacagcaacgugaagaaccuguacgagaaggugaagagccagcugaagaacaacgccaaggagaucggcaacggcugcuucgaguucuaccacaagugcaacaacgagugcauggagagcgugaagaacggcaccuacgacuaccccaaguacagcgaggagagcaagcugaacagagagaagaucgacggcgugaagcuggagagcaugggcguguaccagauccuggccaucuacagcaccguggccagcagccuggugcugcuggugagccugggcgccaucagcuucuggaugugcagcaacggcagccugcagugcagaaucugcaucuga

SEQ ID NO: 161724 - RNA, 1701 nt, Artificial Sequence; identical to SEQ ID NO: 160710
  derived and/or modified CDS sequence (opt4) from hemagglutinin__InfluenzaA__ABQ01333

SEQ ID NO: 161725 - RNA, 1701 nt, Artificial Sequence
  derived and/or modified CDS sequence (opt4) from hemagglutinin__InfluenzaA__ABQ01344
augaagaccaucaucgcccugagcuacauccugugccugguguucgcccagaagcugcccggcaacgacaacagcaccgccacccugugccugggccaccacgccgugcccaacggcacccuggugaagaccaucaccaacgaccagaucgaggugaccaacgccaccgagcuggugcagagcagcagcaccggcggcaucugcgacagcccccaccagauccuggacggcgagaacugcacccugaucgacgcccugcugggcgacccccacugcgacggcuuccagaacaaggagugggaccuguucguggagagaagcaaggccuacagcaacugcuaccccuacgacgugcccgacuacgccagccugagaagccugguggccagcagcggcacccuggaguucaacaacgagagcuucaacuggaccggcguggcccagaacggcaccagcagcgccugcaagagaagaagcaacaagagcuucuucagcagacugaacuggcugcaccagcugaaguacaaguaccccgcccugaacgugaccaugcccaacaacgagaaguucgacaagcuguacaucuggggcgugcaccaccccagcaccgacagcgaccagaucagccuguacgcccaggcccccggcagagugaccgugagcaccaagagaagccagcagaccgugauccccaacaucggcagcagacccugggugagaggcgugagcagcagaaucagcaucuacuggaccaucgugaagcccggcgacauccugcugaucaacugcaccggcaaccugaucgcccccagaggcuacuucaagaucagaagcggcaagagcagcaucaugagaagcgacgccagcaucggcaagugcaacagcgagugcaucacccccaacggcagcauccccaacgacaagcccuuccagaacgugaacagaaucaccuacggcgccugccccagauacgugaagcagaacacccugaagcuggccaccggcaugagaaacgugcccgagaagcagaccagaggcaucuucggcgccaucgccggcuucaucgagaacggcugggagggcaugguggacggcugguacggcuucagacaccagaacagcgagggcaccggccaggccgccgaccugaagagcacccaggccgccaucaaccagaucaacggcaagcugaacagacugaucggcaagaccaacgagaaguuccaccagaucgagaaggaguucagcgagguggagggcagaauccaggaccuggagaaguacguggaggacaccaagaucgaccuguggagcuacaacgccgagcugcugguggcccuggagaaccagcacaccaucgaccugaccgacagcgagaugaacaagcuguucgagagaaccaagaagcagcugagagagaacgccgaggacaugggcaacggcugcuucaagaucuaccacaagugcgacaacgccugcaucggcagcaucagaaacggcaccuacgaccacgacguguacagagacgaggcccugaacaacagauuccagaucaagggcguggagcugaagagcggcuacaaggacuggauccuguggaucagcuucgccaucagcugcuuccugcugugcguggugcugcugggcuucaucaugugggccugccagaagggcaacaucagaugcaacaucugcaucuga

SEQ ID NO: 161726 - RNA, 1689 nt, Artificial Sequence
  derived and/or modified CDS sequence (opt4) from hemagglutinin__InfluenzaA__ABQ01355
auggccaucaucuaccugauccugcuguucaccgccgugagaggcgaccagaucugcaucggcuaccacgccaacaacagcaccgagaagguggacaccauccuggagagaaacgugaccgugacccacgccaaggacauccuggagaagacccacaacggcaagcugugcaagcugaacggcauccccccccuggagcugggcgacugcagcaucgccggcuggcugcugggcaaccccgagugcgacagacugcugagagugcccgaguggagcuacaucauggagaaggagaaccccagagacggccugugcuaccccggcagcuucaacgacuacgaggagcugaagcaccugcugagcagcgugaagcacuucgagaaggugagaauccugcccaaggacagauggacccagcacaccaccaccggcggcagcagagccugcgccgugagcggcaaccccagcuucuucagaaacaugaucuggcugaccaagaagggcagcaacuaccccguggccaagggcagcuacaacaacaccagcggcgagcagaugcugaucaucuggggcgugcaccaccccaucgacgagaccgagcagagaacccuguaccagaacguggagaccuacgugagcguggugaccagcacccugaacaagagaagcacccccaagaucgccaccagacccaaggugaacggccugggcggcagaauggaguucagcuggacccugcuggacaugugggacaccaucaacuucgagagcaccggcaaccugaucgcccccgaguacggcuucaagaucagcaagagaggcagcagcggcaucaugaagaccgagggcacccuggagaacugcgagaccaagugccagaccccccugggcgccaucaacaccacccugcccuuccacaacgugcacccccugaccaucggcgagugccccaaguacgugaagagcgagaagcuggugcuggccaccggccugagaaacgugccccagaucgagagcagaggccuguucggcgccaucgccggcuucaucgagggcggcuggcagggcaugguggacggcugguacggcuaccaccacagcaacgaccagggcagcggcuacgccgccgacaaggagagcacccagagagccuucgacggcaucaccaacaaggugaacagcgugaucgagaagaugaacacccaguucgaggccgugggcaaggaguucagcaaccuggagagaagacuggagaaccugaacaagaagauggaggacggcuuccuggacguguggaccuacaacgccgagcugcuggugcugauggagaacgagagaacccuggacuuccacgacagcaacgugaagaaccuguacgacaaggugagaaugcagcugagagacaacgugaaggagcugggcaacggcugcuucgaguucuaccacaagugcgacgacgagugcaugaacagcgugaagaacggcaccuacgacuaccccaaguacgaggaggagagcaagcugaacagaaacgagaucaagggcgugaagcugagcagcaugggcguguaccagauccuggccaucuacgccaccguggccggcagccugagccuggccaucaugauggccggcaucagcuucuggaugugcagcaacggcagccugcagugcagaaucugcaucuga

SEQ ID NO: 161727 - RNA, 1701 nt, Artificial Sequence
  derived and/or modified CDS sequence (opt4) from hemagglutinin__InfluenzaA__ABQ01366
augaagaccaucaucgcccugagcuacaucuucugccugguguucgcccaggaccugcccggcaacgacaacagcaccgccacccugugccugggccaccacgccgugcccaacggcacccuggugaagaccaucaccaacgaccagaucgaggugaccaacgccaccgagcuggugcagagcagcagcaccggcaagaucugcgacaacccccacagaauccuggacggcaucaacugcacccugaucgacgcccugcugggcgacccccacugcgacggcuuccagaacgagaagugggaccuguucguggagagaagcaaggccuucagcaacugcuaccccuacgacgugcccgacuacgccagccugagaagccugguggccagcagcggcacccuggaguucaucaacgagggcuucaacuggaccggcgugacccagaacggcggcagcagcgccugcaagagaggccccgacaacggcuucuucagcagacugaacuggcuguacaagagcggcagcaccuaccccgugcagaacgugaccaugaccaacaacgacaacagcgacaagcuguacaucuggggcgugcaccaccccagcaccgacaaggagcagaccgaccuguacgugcaggccagcggcaaggugaccgugagcaccaagagaagccagcagaccaucauccccaacgugggcagcagacccugggugagaggccugagcagcagagugagcaucuacuggaccaucgugaagcccggcgacauccuggugaucaacagcaacggcaaccugaucgcccccagaggcuacuucaagaugagaaccggcaagagcagcaucaugagaagcgacgcccccaucggcaccugcagcagcgagugcaucacccccaacggcagcauccccaacgacaagcccuuccagaacgugaacaagaucaccuacggcgccugccccaaguacgugaagcagaacacccugaagcuggccaccggcaugagaaacgugcccgagaagcagaccagaggcaucuucggcgccaucgccggcuucaucgagaacggcugggagggcaugaucgacggcugguacggcuucagacaccagaacagcgagggcaccggccaggccgccgaccugaagagcacccaggccgccaucgaccagaucaacggcaagcugaacagagugaucgagaagaccaacgagaaguuccaccagaucgagaaggaguucagcgagguggagggcagaauccaggaccuggagaaguacguggaggacaccaagaucgaccuguggagcuacaacgccgagcugcugguggcccuggagaaccagcacaccaucgaccugaccgacagcgagaugaacaagcuguucgagaagaccagaagacagcugagagagaacgccgaggacaugggcaacggcugcuucaagaucuaccacaagugcgacaacgccugcaucggcagcaucagaaacggcaccuacgaccacgacguguacagagacgaggcccugaacaacagauuccagaucaagggcguggagcugaagagcggcuacaaggacuggauccuguggaucagcuucgccaucagcugcuuccugcugugcguggugcugcugggcuucaucaugugggccugccagaagggcaacaucagaugcaacaucugcaucuga

SEQ ID NO: 161728 - RNA, 1701 nt, Artificial Sequence; identical to SEQ ID NO: 161493
  derived and/or modified CDS sequence (opt4) from hemagglutinin__InfluenzaA__ABQ44383

SEQ ID NO: 161729 - RNA, 1701 nt, Artificial Sequence; identical to SEQ ID NO: 160693
  derived and/or modified CDS sequence (opt4) from hemagglutinin__InfluenzaA__ABQ44405

SEQ ID NO: 161730 - RNA, 1701 nt, Artificial Sequence
  derived and/or modified CDS sequence (opt4) from hemagglutinin__InfluenzaA__ABQ44416
augaaggccaagcugcuggugcugcugugcgccuucaccgccaccgacgccgacaccaucugcaucggcuaccacgccaacaacagcaccgacaccguggacaccgugcuggagaagaacgugaccgugacccacagcgugaaccugcuggaggacagccacaacggcaagcugugcagacugaagggcaucgccccccugcagcugggcaacugcagcaucgccggcuggauccugggcaaccccgagugcgagagccuguucagcaagaagagcuggagcuacaucgccgagacccccaacagcgagaacggcaccugcuaccccggcuacuucgccgacuacgaggagcugagagagcagcugagcagcgugagcagcuucgagagauucgagaucuuccccaaggagagcagcuggcccaaccacaccgugaccaagggcgugaccgccagcugcagccacaagggcaagagcagcuucuacagaaaccugcuguggcugaccgagaagaacggcagcuaccccaaccugagcaagagcuacgugaacaacaaggagaaggaggugcuggugcuguggggcgugcaccaccccagcaacaucggcgaccagagagccaucuaccacaccgagaacgccuacgugagcguggugagcagccacuacaacagaagauucacccccgagaucgccaagagacccaaggugagagaccaggagggcagaaucaacuacuacuggacccugcuggagcccgaggacaccaucaucuucgaggccaacggcaaccugaucgcccccugguacgccuucgcccugagcagaggcuucggcagcggcaucaucaccagcaacgccagcauggacgagugcgacgccaagugccagaccccccagggcgccaucaacagcagccugcccuuccagaacgugcaccccgugaccaucggcgagugccccaaguacgugagaagcaccaagcugagaauggugaccggccugagaaacauccccagcauccagagcagaggccuguucggcgccaucgccggcuucaucgagggcggcuggaccggcaugaucgacggcugguacggcuaccaccaccagaacgagcagggcagcggcuacgccgccgaccagaagagcacccagaacgccaucaacggcaucaccaacaaggugaacagcgugaucgagaagaugaacacccaguucaccgccgugggcaaggaguucaacaagcuggagagaagaauggagaaccugaacaagaagguggacgacggcuuccuggacaucuggaccuacaacgccgagcugcuggugcugcuggagaacgagagaacccuggacuuccacgacagcaacgugaagaaccuguacgagaaggugaagagccagcugaagaacaacgccaaggagaucggcaacggcugcuucgaguucuaccacaagugcaacaacgagugcauggagagcgugaagaacggcaccuacgacuaccccaaguacagcgaggagagcaagcugaacagagagaagaucgacggcgugaagcuggagagcaugggcguguaccagauccuggccaucuacagcaccguggccagcagccuggugcugcuggugagccugggcgccaucagcuucuggaugugcagcaacggcagccugcagugcagaaucugcaucuga

SEQ ID NO: 161731 - RNA, 1701 nt, Artificial Sequence; identical to SEQ ID NO: 160316
  derived and/or modified CDS sequence (opt4) from hemagglutinin__InfluenzaA__ABQ44427

SEQ ID NO: 161732 - RNA, 1689 nt, Artificial Sequence
  derived and/or modified CDS sequence (opt4) from hemagglutinin__InfluenzaA__ABQ44438
auggccaucaucuacuucauccugcuguucaccgccgugagaggcgaccagaucugcaucggcuaccacgccaacaacagcaccgagaagguggacaccauccuggagagaaacgugaccgugacccacgccaaggacauccuggagaagacccacaacggcaagcugugcaagcugaacggcauccccccccuggagcugggcgacugcagcaucaccggcuggcugcugggcaaccccgagugcgacagacugcugagagugcccgaguggagcuacaucauggagaaggagaaccccagauacagccugugcuaccccggcagcuucaacgacuacgaggagcugaagcaccugcugagcagcgugaagcacuucgagaaggugagaauccugcccaaggacggcuggacccagcacaccaccagcggcggcagcaaggccugcgccgugagcggcaagagcagcuucuucagaaacaugguguggcugaccaagaagggccccaacuaccccguggccaagagaagcuacaacaacaccagcggcgagcagaugcugaucaucuggggcgugcaccaccccaacgacgaggccgagcagagcgcccuguaccagaaggugggcaccuacgugagcgccagcaccagcacccugaacaagagaagcacccccgagaucgccgccagacccgaggugaacggccugggcagcagaauggaguucagcuggacccugcuggacgugugggacaccaucaacuucgagagcaccggcaaccugguggcccccgaguacggcuucaagaucagcaagagaggcagcagcggcaucaugaagaccgagggcacccugggcaacugcgagaccaagugccagaccccccugggcgccaucaacaccacccugcccuuccacaacgugcacccccugaccaucggcgagugccccaaguacgugaagagcgagaagcuggugcuggccaccggccugagaaacgugccccagaucgagagcagaggccuguucggcgccaucgccggcuucaucgagggcggcuggcagggcaugguggacggcugguacggcuaccaccacagcaacgaccagggcagcggcuacgccgccgacaaggagagcacccagaaggccuucgacagaaucaccaacaaggugaacagcgugaucgagaagaugaacacccaguucgaggccgugggcaaggaguucagcaaccuggagaagagacuggagaaccugaacaagaagauggaggacggcuuccuggacguguggaccuacaacgccgagcugcuggugcugauggagaacgagagaacccuggacuuccacgacagcaacgugaagaaccuguacaacaaggugagaaugcagcugagagacaacgugaaggagcugggcaacggcugcuucgaguucuaccacaagugcgacgacgagugcaugagcagcgugaagaacggcaccuacgacuaccccaaguacgaggaggagagcaagcugaagagaaacgagaucaagggcgugaagcugagcagcaugggcguguaccagauccuggccaucuacgccaccguggccggcagccugagccuggccaucaugaucgccggcaucagccuguggaugugcagcaacggcagccugcagugcagaaucugcaucuga

SEQ ID NO: 161733 - RNA, 1689 nt, Artificial Sequence
  derived and/or modified CDS sequence (opt4) from hemagglutinin__InfluenzaA__ABQ44460
auggccaucaucuaccugauccugcuguucaccgccgugagaggcgaccagaucugcaucggcuaccacgccaacaacagcaccgagaagguggacaccauccuggagagaaacgugaccgugacccacgccaaggacauccuggagaagacccacaacggcaagcugugcaagcugaacggcauccccccccuggagcugggcgacugcagcaucgccggcuggcugcugggcaaccccgagugcgacagacugcugagcgugcccgaguggagcuacaucauggagaaggagaaccccagagacggccugugcuaccccggcagcuucaacgacuacgaggagcugaagcaccugcugagcagcgugaagcacuucgagaaggugaagauccugcccaaggacagauggacccagcacaccaccaccggcggcagcagagccugcgccgugagcggcaaccccagcuucuucagaaacaugaucuggcugaccaagaagggcagcaacuaccccguggccaagggcagcuacaacaacaccagcggcgagcagaugcugaucaucuggggcgugcaccaccccaacgacgagaccgagcagagaacccuguaccagaacgugggcaccuacgugagcgugggcaccagcacccugaacaagagaagcacccccgacaucgccaccagacccaaggugaacggccugggcagcagaauggaguucagcuggacccugcuggacaugugggacaccaucaacuucgagagcaccggcaaccugaucgcccccgaguacggcuucaagaucagcaagagaggcagcagcggcaucaugaagaccgagggcacccugggcaacugcgagaccaagugccagaccccccugggcgccaucaacaccacccugcccuuccacaacgugcacccccugaccaucggcgagugccccaaguacgugaagagcgagaagcuggugcuggccaccggccugagaaacgugccccagaucgagagcagaggccuguucggcgccaucgccggcuucaucgagggcggcuggcagggcaugguggacggcugguacggcuaccaccacagcaacgaccagggcagcggcuacgccgccgacaaggagagcacccagaaggccuucgacggcaucaccaacaaggugaacagcgugaucgagaagaugaacacccaguucgaggccgugggcaaggaguucagcaaccuggagagaagacuggagaaccugaacaagaagauggaggacggcuuccuggacguguggaccuacaacgccgagcugcuggugcugauggagaacgagagaacccuggacuuccacgacagcaacgugaagaaccuguacgacaaggugagaaugcagcugagagacaacgugaaggagcugggcaacggcugcuucgaguucuaccacaagugcgacgacgagugcaugaacagcgugaagaacggcaccuacgacuaccccaaguacgaggaggagagcaagcugaacagaaacgagaucaagggcgugaagcugagcagcaugggcguguaccagauccuggccaucuacgccaccguggccggcagccugagccuggccaucaugauggccggcaucagcuucuggaugugcagcaacggcagccugcagugcagaaucugcaucuga

SEQ ID NO: 161734 - RNA, 1701 nt, Artificial Sequence
  derived and/or modified CDS sequence (opt4) from hemagglutinin__InfluenzaA__ABQ44471
augaaggccagacugcugauccugcugugcgcccugagcgccaccgacgccgacaccaucugcaucggcuaccacgccaacaacagcaccgacaccguggacaccgugcuggagaagaacgugaccgugacccacagcgugaaccugcuggaggacagccacaacggcaagcugugcagacugaagggcaucgccccccugcagcugggcaagugcaacaucgccggcuggauccugggcaaccccgagugcgagagccugcugagcaacagaagcuggagcuacaucgccgagacccccaacagcgagaacggcaccugcuaccccggcgacuucgccgacuacgaggagcugagagagcagcugagcagcgugagcagcuucgagagauucgagaucuuccccaaggagagaagcuggcccaagcacaacaucaccagaggcgugaccgccgccugcagccacgccaagaagagcagcuucuacaagaaccugcuguggcugaccgaggccaacggcagcuaccccaaccugagcaagagcuacgugaacaacaaggagaaggaggugcuggugcuguggggcgugcaccaccccagcaacaucgaggaccagagaacccuguacagaaaggagaacgccuacgugagcguggugagcagcaacuacaacagaagauucacccccgagaucgccgagagacccaaggugagaggccaggccggcagaaugaacuacuacuggacccugcuggagcccggcgacaagaucaucuucgaggccaacggcaaccugaucgcccccugguacgccuucgcccugagcagaggccugggcagcggcaucaucaccagcaacgccagcauggacgagugcgacaccaagugccagaccccccagggcgccaucaacaacagccugcccuuccagaacauccaccccgugaccaucggcgagugccccaaguacgugagaagcaccaagcugagaauggugaccggccugagaaacauccccagcauccagagcagaggccuguucggcgccaucgccggcuucaucgagggcggcuggaccggcaugguggacggcugguacggcuaccaccaccagaacgagcagggcagcggcuacgccgccgaccagaagagcacccagaacgccaucaacggcaucaccaacaaggugaacagcgugaucgagaagaugaacacccaguucaccgccgugggcaaggaguucaacaagcuggagaagagaauggagaaccugaacaagaagguggacgacggcuuccuggacaucuggaccuacaacgccgagcugcuggugcugcuggagaacgagagaacccuggacuuccacgacagcaacgugaagaaccuguacgagaaggugaagaaccagcugagaaacaacgccaaggagaucggcaacggcugcuucgaguucuaccacaagugcgacaacgagugcauggagagcgugaagaacggcaccuacgacuaccccaaguacagcgaggagagcaagcugaacagagagaagaucgacggcgugaagcuggagagcaugggcguguaccagauccuggccaucuacagcaccguggccagcagccuggugcugcuggugagccugggcgccaucagcuucuggaugugcagcaacggcagccugcagugcagaaucugcaucuga

SEQ ID NO: 161735 - RNA, 1701 nt, Artificial Sequence
  derived and/or modified CDS sequence (opt4) from hemagglutinin__InfluenzaA__ABR15797
augaagaccaucaucgcccugagcuacaucuucugccuggcccugggccaggaccugcccggcaacgacaacagcaccgccacccugugccugggccaccacgccgugcccaacggcacccuggugaagaccaucaccaacgaccagaucgaggugaccaacgccaccgagcuggugcagagcagcagcaccggcaagaucugcaacaacccccacagaauccuggacggcaucgacugcacccugaucgacgcccugcugggcgacccccacugcgacguguuccagaacgagaccugggaccuguucguggagagaagcaaggccuucagcaacugcuaccccuacgacgugcccgacuacgccagccugagaagccugguggccagcagcggcacccuggaguucaucaccgagggcuucaccuggaccggcgugacccagaacggcggcagcaacgccugcaagagaggccccggcagcggcuucuucagcagacugaacuggcugaccaagagcggcagcaccuaccccgugcugaacgugaccaugcccaacaacgacaacuucgacaagcuguacaucuggggcgugcaccaccccagcaccaaccaggagcagaccagccuguacgugcaggccagcggcagagugaccgugagcaccagaagaagccagcagaccaucauccccaacaucggcagcagacccugggugagaggccugagcagcagaaucagcaucuacuggaccaucgugaagcccggcgacgugcuggugaucaacagcaacggcaaccugaucgcccccagaggcuacuucaagaugagaaccggcaagagcagcaucaugagaagcgacgcccccaucgacaccugcaucagcgagugcaucacccccaacggcagcauccccaacgacaagcccuuccagaacgugaacaagaucaccuacggcgccugccccaaguacgugaagcagaacacccugaagcuggccaccggcaugagaaacgugcccgagaagcagaccagaggccuguucggcgccaucgccggcuucaucgagaacggcugggagggcaugaucgacggcugguacggcuucagacaccagaacagcgagggcaccggccaggccgccgaccugaagagcacccaggccgccaucgaccagaucaacggcaagcugaacagagugaucgagaagaccaacgagaaguuccaccagaucgagaaggaguucagcgagguggagggcagaauccaggaccuggagaaguacguggaggacaccaagaucgaccuguggagcuacaacgccgagcugcugguggcccuggagaaccagcacaccaucgaccugaccgacagcgagaugaacaagcuguucgagaagaccagaagacagcugagagagaacgccgaggacaugggcaacggcugcuucaagaucuaccacaagugcgacaacgccugcaucgagagcaucagaaacggcaccuacgaccacgacguguacagagacgaggcccugaacaacagauuccagaucaagggcguggagcugaagagcggcuacaaggacuggauccuguggaucagcuucgccaucagcugcuuccugcugugcguggugcugcugggcuucaucaugugggccugccagagaggcaacaucagaugcaacaucugcaucuga

SEQ ID NO: 161736 - RNA, 1701 nt, Artificial Sequence
  derived and/or modified CDS sequence (opt4) from hemagglutinin__InfluenzaA__ABR15808
augaaggccagacugcugauccugcugugcgcccugagcgccaccgacgccgacaccaucugcaucggcuaccacgccaacaacagcaccgacaccguggacaccgugcuggagaagaacgugaccgugacccacagcgugaaccugcuggaggacagccacaacggcaagcugugcagacugaagggcaucgccccccugcagcugggcaagugcaacaucgccggcuggauccugggcaaccccgagugcgagagccugcugagcaacagaagcuggagcuacaucgccgagacccccaacagcgagaacggcaccugcuaccccggcgacuucgccgacuacgaggagcugagagagcagcugagcagcgugagcagcuucgagagauucgagaucuuccccaaggagagaagcuggcccaagcacaacaucaccagaggcgugaccgccgccugcagccacgccaagaagagcagcuucuacaagaaccugcuguggcugaccgaggccaacggcagcuaccccaaccugagcaagagcuacgugaacaacaaggagaaggaggugcuggugcuguggggcgugcaccaccccagcaacaucgaggaccagagaacccuguacagaaaggagaacgccuacgugagcguggugagcagcaacuacaacagaagauucacccccgagaucgccgagagacccaaggugagaggccaggccggcagaaugaacuacuacuggacccugcuggagcccggcgacaagaucaucuucgaggccaacggcaaccugaucgcccccugguacgccuucgcccugagcagaggccugggcagcggcaucaucaccagcaacgccagcauggacgagugcgacaccaagugccagaccccccagggcgccaucaacagcagccugcccuuccagaacauccaccccgugaccaucggcgagugccccaaguacgugagaagcaccaagcugagaauggugaccggccugagaaacauccccagcauccagagcagaggccuguucggcgccaucgccggcuucaucgagggcggcuggaccggcaugguggacggcugguacggcuaccaccaccagaacgagcagggcagcggcuacgccgccgaccagaagagcacccagaacgccaucaacggcaucaccaacaaggugaacagcgugaucgagaagaugaacacccaguucaccgccgugggcaaggaguucaacaagcuggagaagagaauggagaaccugaacaagaagguggacgacggcuuccuggacaucuggaccuacaacgccgagcugcuggugcugcuggagaacgagagaacccuggacuuccacgacagcaacgugaagaaccuguacgagaaggugaagaaccagcugagaaacaacgccaaggagaucggcaacggcugcuucgaguucuaccacaagugcgacaacgagugcauggagagcgugaagaacggcaccuacgacuaccccaaguacagcgaggagagcaagcugaacagagagaagaucgacggcgugaagcuggagagcaugggcguguaccagauccuggccaucuacagcaccguggccagcagccuggugcugcuggugagccugggcgccaucagcuucuggaugugcagcaacggcagccugcagugcagaaucugcaucuga

SEQ ID NO: 161737 - RNA, 1698 nt, Artificial Sequence; identical to SEQ ID NO: 160802
  derived and/or modified CDS sequence (opt4) from hemagglutinin__InfluenzaA__ABR15885

SEQ ID NO: 161738 - RNA, 1698 nt, Artificial Sequence
  derived and/or modified CDS sequence (opt4) from hemagglutinin__InfluenzaA__ABR15896
augaaggccaagcugcuggugcugcugugcaccuucaccgccaccuacgccgacaccaucugcaucggcuaccacgccaacaacagcaccgacaccguggacaccgugcuggagaagaacgugaccgugacccacagcgugaaccugcuggaggacagccacaacggcaagcugugccugcugaagggcaucgccccccugcagcugggcaacugcagcguggccggcuggauccugggcaaccccgagugcgagcugcugaucagcaaggagagcuggagcuacaucguggaggcccccaaccccgagaacggcaccugcuaccccggcuacuucgccgacuacgaggagcugagagagcagcugagcagcgugagcagcuucgagagauucgagaucuuccccaaggagagcagcuggcccaaccacaccgugaccggcgugagcgccagcugcagccacaacggcaagagcagcuucuacagaaaccugcuguggcugaccggcaagaacggccuguaccccaaccugagcaugagcuacgugaacaacaaggagaaggaggugcuggugcuguggggcgugcaccacccccccaacaucggcgaccagagagcccuguaccacaccgagaacgccuacgugagcguggugagcagccacuacagcagaagauucacccccgagaucgccaagagacccaaggugagagaccaggagggcagaaucaacuacuacuggacccugcuggagcccggcgacaccaucaucuucgaggccaacggcaaccugaucgcccccugguacgccuucgcccugagcagaggcuucggcagcggcaucaucaccagcaacgcccccauggacgagugcgacgccaagugccagaccccccagggcgccaucaacagcagccugcccuuccagaacgugcaccccgugaccaucggcgagugccccaaguacgugagaagcgccaagcugagaauggugaccggccugagaaacauccccagcauccagagcagaggccuguucggcgccaucgccggcuucaucgagggcggcuggaccggcaugguggacggcugguacggcuaccaccaccagaacgagcagggcagcggcuacgccgccgaccagaagagcacccagaacgccaucaacggcaucaccaacaaggugaacagcgugaucgagaagaugaacacccaguucaccgccgugggcaaggaguucaacaagcuggagagaagaauggagaaccugaacaagaagguggacgacggcuuccuggacaucuggaccuacaacgccgagcugcuggugcugcuggagaacgagagaacccuggacuuccacgacagcaacgugaagaaccuguacgagaaggugaagagccagcugaagaacaacgccaaggagaucggcaacggcugcuucgaguucuaccacaagugcaacaacgagugcauggagagcgugaagaacggcaccuacgacuaccccaaguacagcgaggagagcaagcugaacagagagaagaucgacggcgugaagcuggagagcaugggcguguaccagauccuggccaucuacagcaccguggccagcagccuggugcugcuggugagccugggcgccaucagcuucuggaugugcagcaacggcagccugcagugcagaaucugcaucuga

SEQ ID NO: 161739 - RNA, 1698 nt, Artificial Sequence; identical to SEQ ID NO: 160801
  derived and/or modified CDS sequence (opt4) from hemagglutinin__InfluenzaA__ABR15907

SEQ ID NO: 161740 - RNA, 1698 nt, Artificial Sequence; identical to SEQ ID NO: 160802
  derived and/or modified CDS sequence (opt4) from hemagglutinin__InfluenzaA__ABR15918

SEQ ID NO: 161741 - RNA, 1701 nt, Artificial Sequence
  derived and/or modified CDS sequence (opt4) from hemagglutinin__InfluenzaA__ABR15929
augaagaccaucaucgcccugagcuacauccugugccugguguucgcccagaagcugcccggcaacgacaacagcaccgccacccugugccugggccaccacgccgugcccaacggcacccuggugaagaccaucaccaacgaccagaucgaggugaccaacgccaccgagcuggugcagagcagcagcaccggcagaaucugcgacagcccccaccagauccuggacggcgagaacugcacccugaucgacgcccugcugggcgacccccacugcgacggcuuccagaacaaggagugggaccuguucguggagagaagcaaggccuacagcaacugcuaccccuacgacgugcccgacuacgugagccugagaagccugguggccagcagcggcacccuggaguucaacaacgagagcuucaacuggaccggcguggcccagaacggcaccagcagcgccugcaagagaagaagcgacaagagcuucuucagcagacugaacuggcugcaccagcugaaguacaaguaccccgcccugaacgugaccaugcccaacaacgagaaguucgacaagcuguacaucuggggcgugcaccaccccggcaccgacagcgaccagaucagccuguacgcccaggccagcggcagagugaccgugagcaccaagagaagccagcagaccgugauccccaacaucggcagcagacccugggugagaggcaucagcagcagaaucagcaucuacuggaccaucgugaagcccggcgacauccugcugaucaacagcaccggcaaccugaucgcccccagaggcuacuucaagaucagaagcggcaagagcagcaucaugagaagcgacgcccccaucggcaagugcaacagcgagugcaucacccccaacggcagcauccccaacgacaagcccuuccagaacgugaacagaaucaccuacggccccugccccagauacgugaagcagaacacccugaagcuggccaccggcaugagaaacgugcccgagaagcagaccagaggcaucuucggcgccaucgccggcuucaucgagaacggcugggagggcaugauggacggcugguacggcuucagacaccagaacagcgagggcaccggccaggccgccgaccugaagagcacccaggccgccaucaaccagaucaacggcaagcugaacagacugaucgagaagaccaacgagaaguuccaccagaucgagaaggaguucagcgagguggagggcagaauccaggaccuggagaaguacguggaggacaccaagaucgaccuguggagcuacaacgccgagcugcugguggcccuggagaaccagcacaccaucgaccugaccgacagcgagaugaacaagcuguucgagagaaccaagaagcagcugagagagaacgccgaggacaugggcaacggcugcuucaagaucuaccacaagugcaacaacgccugcaucggcagcaucagaaacggcaccuacgaccacgacguguacagagacgaggcccugaacaacagauuccagaucaagggcguggagcugaagagcggcuacaaggacuggauccuguggaucagcuucgccaucagcugcuuccugcugugcaucgugcugcugggcuucaucaugugggccugccagaagggcaacaucagaugcaacaucugcaucuga

SEQ ID NO: 161742 - RNA, 1701 nt, Artificial Sequence
  derived and/or modified CDS sequence (opt4) from hemagglutinin__InfluenzaA__ABR15940
augaagaccaucaucgcccugagcuacauccugugccugguguucgcccagaagcugcccggcaacgacaacagcaccgccacccugugccugggccaccacgccgugcccaacggcacccuggugaagaccaucaccaacgaccagaucgaggugaccaacgccaccgagcuggugcagagcagcagcaccggcagaaucugcgacagcccccaccagauccuggacggcgagaacugcacccugaucgacgcccugcugggcgacccccacugcgacggcuuccagaacaaggagugggaccuguucguggagagaagcaaggccuacagcaacugcuaccccuacgacgugcccgacuacgugagccugagaagccugguggccagcagcggcacccuggaguucaacaacgagagcuucaacuggaccggcguggcccagaacggcaccagcagcgccugcaagagaagaagcgacaagagcuucuucagcagacugaacuggcugcaccagcugaaguacaaguaccccgcccugaacgugaccaugcccaacaacgagaaguucgacaagcuguacaucuggggcgugcaccaccccggcaccgacagcgaccagaucagccuguacgcccaggccagcggcagagugaccgugagcaccaagagaagccagcagaccgugauccccaacaucggcagcagacccugggugagaggcgugagcagcagaaucagcaucuacuggaccaucgugaagcccggcgacauccugcugaucaacagcaccggcaaccugaucgcccccagaggcuacuucaagaucagaagcggcaagagcagcaucaugagaagcgacgcccccaucggcaagugcaacagcgagugcaucacccccaacggcagcaucagcaacgacaagcccuuccagaacgugaacagaaucaccuacggcgccugccccagauacgugaagcagaacacccugaagcuggccaccggcaugagaaacgugcccgagaagcagaccagaggcaucuucggcgccaucgccggcuucaucgagaacggcugggagggcaugauggacggcugguacggcuucagacaccagaacagcgagggcaccggccaggccgccgaccugaagagcacccaggccgccaucaaccagaucaacggcaagcugaacagacugaucgagaagaccaacgagaaguuccaccagaucgagaaggaguucagcgagguggagggcagaauccaggaccuggagaaguacguggaggacaccaagaucgaccuguggagcuacaacgccgagcugcugguggcccuggagaaccagcacaccaucgaccugaccgacagcgagaugaacaagcuguucgagagaaccaagaagcagcugagagagaacgccgaggacaugggcaacggcugcuucaagaucuaccacaagugcgacaacgccugcaucggcagcaucagaaacggcaccuacgaccacgacguguacagagacgaggcccugaacaacagauuccagaucaagggcguggagcugaagagcggcuacaaggacugggugcuguggaucagcuucgccaucagcugcuuccugcugugcaucgugcugcugggcuucaucaugugggccugccagaagggcaacaucagaugcaacaucugcaucuga

SEQ ID NO: 161743 - RNA, 1701 nt, Artificial Sequence; identical to SEQ ID NO: 160622
  derived and/or modified CDS sequence (opt4) from hemagglutinin__InfluenzaA__ABR15951

SEQ ID NO: 161744 - RNA, 1701 nt, Artificial Sequence
  derived and/or modified CDS sequence (opt4) from hemagglutinin__InfluenzaA__ABR15962
augaagaccaucaucgcccugagcuacauccugugccugguguucgcccagaagcugcccggcaacgacaacagcaccgccacccugugccugggccaccacgccgugcccaacggcacccuggugaagaccaucaccaacgaccagaucgaggugaccaacgccaccgagcuggugcagagcagcagcaccggcagaaucugcgacagcccccaccagauccuggacggcgagaacugcacccugaucgacgcccugcugggcgacccccacugcgacggcuuccagaacaaggagugggaccuguucguggagagaagcagagccuacagcaacugcuaccccuacgacgugcccgacuacgugagccugagaagccugguggccagcagcggcacccuggaguucaacaacgagagcuucaacuggaccggcguggcccagaacggcaccagcagcgccugcaagagaagaagcgacaagagcuucuucagcagacugaacuggcugcaccagcugaaguacaaguaccccgcccugaacgugaccaugcccaacaacgagaaguucgacaagcuguacaucuggggcgugcaccaccccggcaccgacagcgaccagaucagccuguacgcccaggccagcggcagagugaccgugagcaccaagagaagccagcagaccgugauccccaacaucggcagcagacccugggugagaggcgugagcagcaucaucagcaucuacuggaccaucgugaagcccggcgacauccugcugaucaacagcaccggcaaccugaucgcccccagaggcuacuucaagaucagaagcggcaagagcagcaucaugagaagcgacgcccccaucggcaagugcaacagcgagugcaucacccccaacggcagcauccccaacgacaagcccuuccagaacgugaacagaaucaccuacggccccugccccagauacgugaagcagaacacccugaagcuggccaccggcaugagaaacgugcccgagaagcagaccagaggcaucuucggcgccaucgccggcuucaucgagaacggcugggagggcaugauggacggcugguacggcuucagacaccagaacagcgagggcaccggccaggccgccgaccugaagagcacccaggccgccaucaaccagaucaacggcaagcugaacagacugaucgagaagaccaacgagaaguuccaccagaucgagaaggaguucagcgagguggagggcagaauccaggaccuggagaaguacguggaggacaccaagaucgaccuguggagcuacaacgccgagcugcugguggcccuggagaaccagcacaccaucgaccugaccgacagcgagaugaacaagcuguucgagagaaccaagaagcagcugagagagaacgccgaggacaugggcaacggcugcuucaagaucuaccacaagugcgacaacgccugcaucggcagcaucagaaacggcaccuacgaccacgacguguacagagacgaggcccugaacaacagauuccagaucaagggcguggagcugaagagcggcuacaaggacuggauccuguggaucagcuucgccaucagcugcuuccugcugugcaucgugcugcugggcuucaucaugugggccugccagaagggcaacaucagaugcaacaucugcaucuga

SEQ ID NO: 161745 - RNA, 1701 nt, Artificial Sequence
  derived and/or modified CDS sequence (opt4) from hemagglutinin__InfluenzaA__ABR22241
augaagaccaucaucgcccugagcuacauccugugccuggccuucgcccagaagcugcccggcaacgacaacagcaccgccacccugugccugggccaccacgccgugcccaacggcacccuggugaagaccaucaccaacgaccagaucgaggugaccaacgccaccgagcuggugcagagcagcagcaccggcagaaucugcgacagcccccaccagauccuggacggcgagaacugcacccugaucgacgcccugcugggcgacccccacugcgacggcuuccagaacaaggagugggaccuguucguggagagaagcaaggccuacagcaacugcuaccccuacgacgugcccgacuacgccagccugagaagccugguggccagcagcggcacccuggaguucaacaacgagagcuucaacuggaccggcguggcccagaacggcaccagcagcgccugcaagagaagaagcaucaagagcuucuucagcagacugaacuggcugcaccagcuggaguacagauaccccgcccugaacgugaccaugcccaacaacgacaaguucgacaagcuguacaucuggggcgugcaccaccccagcaccgacagcgaccagaucagcguguacgcccaggccagcggcagagugaccgugagcaccaagagaagccagcagaccgugauccccaacaucggcagcagacccugggugagaggcaucagcagcagaaucagcaucuacuggaccaucgugaagcccggcgacauccugcugaucaacagcaccggcaaccugaucgcccccagaggcuacuucaagaucagaagcggcaagagcagcaucaugagaagcgacgcccccaucggcaagugcaacagcgagugcaucacccccaacggcagcauccccaacgacaagcccuuccagaacgugaacagaaucaccuacggcgccugccccagauacgugaagcagaacacccugaagcuggccaccggcaugagaaacgugcccgagaagcagaccagaggcaucuucggcgccaucgccggcuucaucgagaacggcugggagggcaugauggacggcugguacggcuucagacaccagaacagcgagggcaccggccaggccgccgaccugaagagcacccaggccgccaucaaccagaucaacggcaagcugaacaagcugaucgagaagaccaacgagaaguuccaccagaucgagaaggaguucagcgagguggagggcagaauccaggaccuggagaaguacguggaggacaccaagaucgaccuguggagcuacaacgccgagcugcugguggcccuggagaaccagaacaccaucgaccugaccgacagcgagaugaacaagcuguucgagagaaccagaaagcagcugagagagaacgccgaggacaugggcaacggcugcuucaagaucuaccacaagugcgacaacgccugcaucggcagcaucagaaacggcaccuacgaccacgacguguacagagacgaggcccugaacaacagauuccagaucaagggcguggagcugaagagcggcuacaaggacuggauccuguggaucagcuucgccaucagcugcuuccugcugugcguggugcugcugggcuucaucaugugggccugccagaagggcaacaucagaugcaacaucugcaucuga

SEQ ID NO: 161746 - RNA, 1701 nt, Artificial Sequence; identical to SEQ ID NO: 160710
  derived and/or modified CDS sequence (opt4) from hemagglutinin__InfluenzaA__ABR28515

SEQ ID NO: 161747 - RNA, 1701 nt, Artificial Sequence
  derived and/or modified CDS sequence (opt4) from hemagglutinin__InfluenzaA__ABR28592
augaagaccaucaucgcccugagcuacguguucugccugguguucgcccaggaccugcccggcaacgacaacagcaccgccacccugugccugggccaccacgccgugcccaacggcacccuggugaagaccaucaccaacgaccagaucgaggugaccaacgccaccgagcuggugcagagcagcagcaccggcaagaucugcgacaacccccacagaauccuggacggcaucaacugcacccugaucgacgcccugcugggcgacccccacugcgacggcuuccagaacgagaagugggaccuguucguggagagaagcaaggccuucagcaacugcuaccccuacgacgugcccgacuacgccagccugagaagccugguggccagcagcggcacccuggaguucaucaacgagggcuucaacuggaccggcgugacccagaacggcggcagcagcgccugcaagagaggccccgacaacggcuucuucagcagacugaacuggcuguacaagagcggcagcaccuaccccgugcagaacgugaccaugcccaacaacgacaacagcgacaagcuguacaucuggggcgugcaccaccccagcaccgacaaggagcagaccgaccuguacgugcaggccagcggcaaggugaccgugagcaccaagagaagccagcagaccgugauccccaacgugggcagcagacccugggugagaggccugagcagcagagugagcaucuacuggaccaucgugaagcccggcgacauccuggugaucaacagcaacggcaaccugaucgcccccagaggcuacuucaagaugagaaccggcaagagcagcaucaugagaagcgacgcccccaucggcaccugcagcagcgagugcaucacccccaacggcagcauccccaacgacaagcccuuccagaacgugaacaagaucaccuacggcgccugccccaaguacgugaagcagaacacccugaagcuggccaccggcaugagaaacgugcccgagaagcagaccagaggcaucuucggcgccaucgccggcuucaucgagaacggcugggagggcaugaucgacggcugguacggcuucagacaccagaacagcgagggcaccggccaggccgccgaccugaagagcacccaggccgccaucgaccagaucaacggcaagcugaacagagugaucgagaagaccaacgagaaguuccaccagaucgagaaggaguucagcgagguggagggcagaauccaggaccuggagaaguacguggaggacaccaagaucgaccuguggagcuacaacgccgagcugcugguggcccuggagaaccagcacaccaucgaccugaccgacagcgagaugaacaagcuguucgagaagaccagaagacagcugagagagaacgccgaggacaugggcaacggcugcuucaagaucuaccacaagugcgacaacgccugcaucggcagcaucagaaacggcaccuacgaccacgacguguacagagacgaggcccugaacaacagauuccagaucaagggcguggagcugaagagcggcuacaaggacuggauccuguggaucagcuucgccaucagcugcuuccugcugugcguggugcugcugggcuucaucaugugggccugccagaagggcaacaucagaugcaacaucugcaucuga

SEQ ID NO: 161748 - RNA, 1698 nt, Artificial Sequence; identical to SEQ ID NO: 160802
  derived and/or modified CDS sequence (opt4) from hemagglutinin__InfluenzaA__ABR28768

SEQ ID NO: 161749 - RNA, 1698 nt, Artificial Sequence; identical to SEQ ID NO: 160802
  derived and/or modified CDS sequence (opt4) from hemagglutinin__InfluenzaA__ABR28779

SEQ ID NO: 161750 - RNA, 1701 nt, Artificial Sequence; identical to SEQ ID NO: 161493
  derived and/or modified CDS sequence (opt4) from hemagglutinin__InfluenzaA__ABR28790

SEQ ID NO: 161751 - RNA, 1698 nt, Artificial Sequence; identical to SEQ ID NO: 160802
  derived and/or modified CDS sequence (opt4) from hemagglutinin__InfluenzaA__ABR28801

SEQ ID NO: 161752 - RNA, 1701 nt, Artificial Sequence; identical to SEQ ID NO: 160710
  derived and/or modified CDS sequence (opt4) from hemagglutinin__InfluenzaA__ABR28812

SEQ ID NO: 161753 - RNA, 1701 nt, Artificial Sequence
  derived and/or modified CDS sequence (opt4) from hemagglutinin__InfluenzaA__ABR28823
augaagaccaucaucgcccugagcuacauccugugccugguguucgcccagaagcugcccggcaacgacaacagcaccgccacccugugccugggccaccacgccgugcccaacggcacccuggugaagaccaucaccaacgaccagaucgaggugaccaacgccaccgagcuggugcagagcagcagcaccggcagaaucugcgacagcccccaccagauccuggacggcgagaacugcacccugaucgacgcccugcugggcgacccccacugcgacggcuuccagaacaaggagugggaccuguucguggagagaagcaaggccuacagcaacugcuaccccuacgacgugcccgacuacgugagccugagaagccugguggccagcagcggcacccuggaguucaacaacgagagcuucaacuggaccggcguggcccagaacggcaccagcagcgccugcaagagaagaagcgacaagagcuucuucagcagacugaacuggcugcaccagcugaaguacaaguaccccgcccugaacgugaccaugcccaacaacgagaaguucgacaagcuguacaucuggggcgugcaccaccccggcaccgacagcgaccagaucagccuguacgcccaggccagcggcagagugaccgugagcaccaagagaagccagcagaccgugauccccaacaucggcagcagacccugggugagaggcaucagcagcagaaucagcaucuacuggaccaucgugaagcccggcgacauccugcugaucaacagcaccggcaaccugaucgcccccagaggcuacuucaagaucagaagcggcaagagcagcaucaugagaagcgacgcccccaucggcaagugcaacagcgagugcaucacccccaacggcagcauccccaacgacaagcccuuccagaacgugaacagaaucaccuacggccccugccccagauacgugaagcagaacacccugaagcuggccaccggcaugagaaacgugcccgagaagcagaccagaggcaucuucggcgccaucgccggcuucaucgagaacggcugggagggcaugauggacggcugguacggcuucagacaccagaacagcgagggcaccggccaggccgccgaccugaagagcacccaggccgccaucaaccagaucaacggcaagcugaacagacugaucgagaagaccaacgagaaguuccaccagaucgagaaggaguucagcgagguggagggcagaauccaggaccuggagaaguacguggaggacaccaagaucgaccuguggagcuacaacgccgagcugcugguggcccuggagaaccagcacaccaucgaccugaccgacagcgagaugaacaagcuguucgagagaaccaagaagcagcugagagagaacgccgaggacaugggcaacggcugcuucaagaucuaccacaagugcgacaacgccugcaucggcagcaucagaaacggcaccuacgaccacgacguguacagagacgaggcccugaacaacagauuccagaucaagggcguggagcugaagagcggcuacaaggacuggauccuguggaucagcuucgccaucagcugcuuccugcugugcaucgugcugcugggcuucaucaugugggccugccagaagggcaacaucagaugcaacaucugcaucuga

SEQ ID NO: 161754 - RNA, 1698 nt, Artificial Sequence; identical to SEQ ID NO: 160930
  derived and/or modified CDS sequence (opt4) from hemagglutinin__InfluenzaA__ABR28834

SEQ ID NO: 161755 - RNA, 1698 nt, Artificial Sequence; identical to SEQ ID NO: 160901
  derived and/or modified CDS sequence (opt4) from hemagglutinin__InfluenzaA__ABR28845

SEQ ID NO: 161756 - RNA, 1701 nt, Artificial Sequence
  derived and/or modified CDS sequence (opt4) from hemagglutinin__InfluenzaA__ABR28856
augaagaccaucaucgcccugagcuacauccugugccugguguucgcccagaagcugcccggcaacgacaacagcaccgccacccugugccugggccaccacgccgugcccaacggcacccuggugaagaccaucaccaacgaccagaucgaggugaccaacgccaccgagcuggugcagagcagcagcaccggcagaaucugcgacagcccccaccagauccuggacggcgagaacugcacccugaucgacgcccugcugggcgacccccacugcgacggcuuccagaacaaggagugggaccuguucguggagagaagcaaggccuacagcaacugcuaccccuacgacgugcccgacuacgugagccugagaagccugguggccagcagcggcacccuggaguucaacaacgagagcuucaacuggaccggcguggcccagaacggcaccagcagcgccugcaagagaagaagcgacaagagcuucuucagcagacugaacuggcugcaccagcugaaguacaaguaccccgcccugaacgugaucaugcccaacaacgagaaguucgacaagcuguacaucuggggcgugcaccaccccggcaccgacagcgaccagaucagccuguacgcccaggccagcggcagagugaccgugagcaccaagagaagccagcagaccgugauccccaacaucggcagcagacccugggugagaggcgugagcagcagaaucagcaucuacuggaccaucgugaagcccggcgacauccugcugaucaacagcaccggcaaccugaucgcccccagaggcuacuucaagaucagaagcggcaagagcagcaucaugagaagcgacgcccccaucggcaagugcaacagcgagugcaucacccccaacggcagcauccccaacgacaagcccuuccagaacgugaacagaaucaccuacggcgccugccccagauacgugaagcagaagacccugaagcuggccaccggcaugagaaacgugcccgagaagcagaccagaggcaucuucggcgccaucgccggcuucaucgagaacggcugggagggcaugauggacggcugguacggcuucagacaccagaacagcgagggcaccggccaggccgccgaccugaagagcacccaggccgccaucaaccagaucaacggcaagcugaacagacugaucgagaagaccaacgagaaguuccaccagaucgagaaggaguucagcgagguggagggcagaauccaggaccuggagaaguacguggaggacaccaagaucgaccuguggagcuacaacgccgagcugcugguggcccuggagaaccagcacaccaucgaccugaccgacagcgagaugaacaagcuguucgagagaaccaagaagcagcugagagagaacgccgaggacaugggcaacggcugcuucaagaucuaccacaagugcgacaacgccugcaucggcagcaucagaaacggcaccuacgaccacgacguguacagagacgaggcccugaacaacagauuccagaucaagggcguggagcugaagagcggcuacaaggacuggauccuguggaucagcuucgccaucagcugcuuccugcugugcaucgugcugcugggcuucaucaugugggccugccagaagggcaacaucagaugcaacaucugcaucuga

SEQ ID NO: 161757 - RNA, 1701 nt, Artificial Sequence; identical to SEQ ID NO: 160667
  derived and/or modified CDS sequence (opt4) from hemagglutinin__InfluenzaA__ABR28867

SEQ ID NO: 161758 - RNA, 1701 nt, Artificial Sequence; identical to SEQ ID NO: 160622
  derived and/or modified CDS sequence (opt4) from hemagglutinin__InfluenzaA__ABR28878

SEQ ID NO: 161759 - RNA, 1698 nt, Artificial Sequence; identical to SEQ ID NO: 161264
  derived and/or modified CDS sequence (opt4) from hemagglutinin__InfluenzaA__ABR28900

SEQ ID NO: 161760 - RNA, 1701 nt, Artificial Sequence
  derived and/or modified CDS sequence (opt4) from hemagglutinin__InfluenzaA__ABR28922
augaagaccaucaucgcccugagcuacauccugugccugguguucgcccagaagcugcccggcaacgacaacagcaccgccacccugugccugggccaccacgccgugcccaacggcaccaucgugaagaccaucaccaacgaccagaucgaggugaccaacgccaccgagcuggugcagagcagcagcaccggcggcaucugcgacagcccccaccagauccuggacggcgagaacugcacccugaucgacgcccugcugggcgacccccagugcgacggcuuccagaacaagaagugggaccuguucguggagagaagcaaggccuacagcaacugcuaccccuacgacgugcccgacuacgccagccugagaagccugguggccagcagcggcacccuggaguucaacaacgagagcuucaacuggaccggcgugacccagaacggcaccagcagcgccugcaagagaagaagcaacaacagcuucuucagcagacugaacuggcugacccaccugaaguucaaguaccccgcccugaacgugaccaugcccaacaacgagaaguucgacaagcuguacaucuggggcgugcaccaccccggcaccgacaacgaccagaucagccuguacgcccaggccagcggcagaaucaccgugagcaccaagagaagccagcagaccgugauccccaacaucggcagcagacccagagugagagacauccccagcagagugagcaucuacuggaccaucgugaagcccggcgacauccugcugaucaacagcaccggcaaccugaucgcccccagaggcuacuucaagaucagaagcggcaagagcagcaucaugagaagcgacgcccccaucggcaagugcaacagcgagugcaucacccccaacggcagcauccccaacgacaagcccuuccagaacgugaacagaaucaccuacggcgccugccccagauacgugaagcagaacacccugaagcuggccaccggcaugagaaacgugcccgagaagcagaccagaggcaucuucggcgccaucgccggcuucaucgagaacggcugggagggcaugguggacggcugguacggcuucagacaccagaacagcgagggcaucggccaggccgccgaccugaagagcacccaggccgccaucaaccagaucaacggcaagcugaacagacugaucggcaagaccaacgagaaguuccaccagaucgagaaggaguucagcgagguggagggcagaauccaggaccuggagaaguacguggaggacaccaagaucgaccuguggagcuacaacgccgagcugcugguggcccuggagaaccagcacaccaucgaccugaccgacagcgagaugaacaagcuguucgagagaaccaagaagcagcugagagagaacgccgaggacaugggcaacggcugcuucaagaucuaccacaagugcgacaacgccugcaucggcagcaucagaaacggcaccuacgaccacgacguguacagagacgaggcccugaacaacagauuccagaucaagggcguggagcugaagagcggcuacaaggacuggauccuguggaucagcuucgccaucagcugcuuccugcugugcguggcccugcugggcuucaucaugugggccugccagaagggcaacaucagaugcaacaucugcaucuga

SEQ ID NO: 161761 - RNA, 1701 nt, Artificial Sequence; identical to SEQ ID NO: 161641
  derived and/or modified CDS sequence (opt4) from hemagglutinin__InfluenzaA__ABR88080

SEQ ID NO: 161762 - RNA, 1701 nt, Artificial Sequence
  derived and/or modified CDS sequence (opt4) from hemagglutinin__InfluenzaA__ABS00315
augaaggccaagcugcuggugcugcugugcgccuucaccgccaccgacgccgacaccaucugcaucggcuaccacgccaacaacagcaccgacaccguggacaccgugcuggagaagaacgugaccgugacccacagcgugaaccugcuggaggacagccacaacggcaagcugugcagacugaagggcaucgccccccugcagcugggcaacugcagcguggccggcuggauccugggcaaccccgagugcgagagccuguucagcaagaagagcuggagcuacaucgccgagacccccaacagcgagaacggcaccugcuaccccggcuacuucgccgacuacgaggagcugagagagcagcugagcagcgugagcagcuucgagagauucgagaucuuccccaaggagagcagcuggcccaaccacaccgugaccaagggcgugagcgccagcugcagccacaagggcagaagcagcuucuacagaaaccugcuguggcugaccgagaagaacggcagcuaccccaaccugagcaagagcuacgugaacaacaaggagagagaggugcuggugcuguggggcgugcaccaccccagcaacaucggcgagcagagagccaucuaccacaccgagaacgccuacgugagcguggugagcagccacuacaacagaagauucacccccgagaucgccaagagacccaaggugagaggccaggagggcagaaucaacuacuacuggacccugcuggagcccggcgacaccaucaucuucgaggccaacggcaaccugaucgcccccugguacgccuucgcccugagcagaggcuucggcagcggcaucaucaccagcaacgccagcauggacgagugcgacgccaagugccagaccccccagggcgccaucaacagcagccugcccuuccagaacgugcaccccgugaccaucggcgagugccccaaguacgugagaagcaccaagcugagaauggugaccggccugagaaacauccccagcauccagagcagaggccuguucggcgccaucgccggcuucaucgagggcggcuggaccggcaugaucgacggcugguacggcuaccaccaccagaacgagcagggcagcggcuacgccgccgaccagaagagcacccagaacgccaucaacggcaucaccaacaaggugaacagcgugaucgagaagaugaacacccaguucaccgccgugggcaaggaguucaacaagcuggagagaagaauggagaaccugaacaagaagguggacgacggcuuccuggacaucuggaccuacaacgccgagcugcuggugcugcuggagaacgagagaacccuggacuuccacgacagcaacgugaagaaccuguacgagaaggugaagagccagcugaagaacaacgccaaggagaucggcaacggcugcuucgaguucuaccacaagugcaacaacgagugcauggagagcgugaagaacggcaccuacgacuaccccaaguacagcgaggagagcaagcugaacagagagaagaucgacggcgugaagcuggagagcaugggcguguaccagauccuggccaucuacagcaccguggccagcagccuggugcugcuggugagccugggcgccaucagcuucuggaugugcagcaacggcagccugcagugcagaaucugcaucuga

SEQ ID NO: 161763 - RNA, 1701 nt, Artificial Sequence
  derived and/or modified CDS sequence (opt4) from hemagglutinin__InfluenzaA__ABS00326
augaaggccaagcugcuggugcugcugugcgccuucaccgccaccgacgccgacaccaucugcaucggcuaccacgccaacaacagcaccgacaccguggacaccgugcuggagaagaacgugaccgugacccacagcgugaaccugcuggaggacagccacaacggcaagcugugcagacugaagggcaucgccccccugcagcugggcaacugcagcguggccggcuggauccugggcaaccccgagugcgagagccuguucagcaagaagagcuggagcuacaucgccgagacccccaacagcgagaacggcaccugcuaccccggcuacuucgccgacuacgaggagcugagagagcagcugagcagcgugagcagcuucgagagauucgagaucuuccccaaggagagcagcuggcccaaccacaccgugaccaagggcgugagcgccagcugcagccacaagggcagaagcagcuucuacagaaaccugcuguggcugaccgagaagaacggcagcuaccccaaccugagcaagagcuacgugaacaacaaggagaaggaggugcuggugcuguggggcgugcaccaccccagcaacaucggcgagcagagagccaucuaccacaccgagaacgccuacgugagcguggugagcagccacuacaacagaagauucacccccgagaucgccaagagacccaaggugagaggccaggagggcagaaucaacuacuacuggacccugcuggagcccggcgacaccaucaucuucgaggccaacggcaaccugaucgcccccugguacgccuucgcccugagcagaggcuucggcagcggcaucaucaccagcaacgccagcauggacgagugcgacgccaagugccagaccccccagggcgccaucaacagcagccugcccuuccagaacgugcaccccgugaccaucggcgagugccccaaguacgugagaagcaccaagcugagaauggugaccggccugagaaacauccccagcauccagagcagaggccuguucggcgccaucgccggcuucaucgagggcggcuggaccggcaugaucgacggcugguacggcuaccaccaccagaacgagcagggcagcggcuacgccgccgaccagaagagcacccagaacgccaucaacggcaucaccaacaaggugaacagcgugaucgagaagaugaacacccaguucaccgccgugggcaaggaguucaacaagcuggagagaagaauggagaaccugaacaagaagguggacgacggcuuccuggacaucuggaccuacaacgccgagcugcuggugcugcuggagaacgagagaacccuggacuuccacgacagcaacgugaagaaccuguacgagaaggugaagagccagcugaagaacaacgccaaggagaucggcaacggcugcuucgaguucuaccacaagugcaacaacgagugcauggagagcgugaagaacggcaccuacgacuaccccaaguacagcgaggagagcaagcugaacagagagaagaucgacggcgugaagcuggagagcaugggcguguaccagauccuggccaucuacagcaccguggccagcagccuggugcugcuggugagccugggcgccaucagcuucuggaugugcagcaacggcagccugcagugcagaaucugcaucuga

SEQ ID NO: 161764 - RNA, 1701 nt, Artificial Sequence; identical to SEQ ID NO: 161700
  derived and/or modified CDS sequence (opt4) from hemagglutinin__InfluenzaA__ABS49899

SEQ ID NO: 161765 - RNA, 1701 nt, Artificial Sequence
  derived and/or modified CDS sequence (opt4) from hemagglutinin__InfluenzaA__ABS49910
augaagaccaucaucgcccugagcuacaucuucugccuggcccugggccaggaccugcccggcaacgacaacagcaccgccacccugugccugggccaccacgccgugcccaacggcacccuggugaagaccaucaccaacgaccagaucgaggugaccaacgccaccgagcuggugcagagcagcagcaccggcaagaucugcaacaacccccacagaauccuggacggcaucaacugcacccugaucgacgcccugcugggcgacccccacugcgacguguuccaggacgagaccugggaccuguucguggagagaagcaaggccuucagcaacugcuaccccuacgacgugcccgacuacgccagccugagaagccugguggccagcagcggcacccuggaguucaucaccgagggcuucaccuggaccggcgugacccagaacggcggcagcaacgccugcaagagaggccccggcagcggcuucuucagcagacugaacuggcugaccaagagcggcagcaccuaccccgugcugaacgugaccaugcccaacaacgacaacuucgacaagcuguacaucuggggcgugcaccaccccagcaccaaccaggagcagaccagccuguacgugcaggccagcggcagagugaccgugagcaccagaagaagccagcagaccaucauccccaacaucggcagcagacccugggugagaggccugagcagcagaaucagcaucuacuggaccaucgugaagcccggcgacgugcuggugaucaacagcaacggcaaccugaucgcccccagaggcuacuucaagaugagaaccggcaagagcagcaucaugagaagcgacgcccccaucgacaccugcaucagcgagugcaucacccccaacggcagcauccccaacgacaagcccuuccagaacgugaacaagaucaccuacggcgccugccccaaguacgugaagcagaacacccugaagcuggccaccggcaugagaaacgugcccgagaagcagaccagaggccuguucggcgccaucgccggcuucaucgagaacggcugggagggcaugaucgacggcugguacggcuucagacaccagaacagcgagggcaccggccaggccgccgaccugaagagcacccaggccgccaucgaccagaucaacggcaagcugaacagagugaucgagaagaccaacgagaaguuccaccagaucgagaaggaguucagcgagguggagggcagaauccaggaccuggagaaguacguggaggacaccaagaucgaccuguggagcuacaacgccgagcugcugguggcccuggagaaccagcacaccaucgaccugaccgacagcgagaugaacaagcuguucgagaagaccagaagacagaugagagagaacgccgaggacaugggcaacggcugcuucaagaucuaccacaagugcgacaacgccugcaucgagagcaucagaaacggcaccuacgaccacgacguguacagagacgaggcccugaacaacagauuccagaucaagggcguggagcugaagagcggcuacaaggacuggauccuguggaucagcuucgccaucagcugcuuccugcugugcguggugcugcugggcuucaucaugugggccugccagagaggcaacaucagaugcaacaucugcaucuga

SEQ ID NO: 161766 - RNA, 1701 nt, Artificial Sequence; identical to SEQ ID NO: 160710
  derived and/or modified CDS sequence (opt4) from hemagglutinin__InfluenzaA__ABS49965

SEQ ID NO: 161767 - RNA, 1698 nt, Artificial Sequence
  derived and/or modified CDS sequence (opt4) from hemagglutinin__InfluenzaA__ABS49976
augaaggugaagcugcuggugcugcugugcaccuucaccgccaccuacgccgacaccaucugcaucggcuaccacgccaacaacagcaccgacaccguggacaccgugcuggagaagaacgugaccgugacccacagcgugaaccugcuggaggacagccacaacggcaagcugugccugcugaagggcaucgccccccugcagcugggcaacugcagcguggccggcuggauccugggcaaccccgagugcgagcugcugaucagcaaggagagcuggagcuacaucguggagacccccaaccccgagaacggcaccugcuaccccggcuacuucgccgacuacgaggagcugagagagcagcugagcagcgugagcagcuucgagagauucgagaucuuccccaaggagagcagcuggcccaaccacaccgugaccggcgugagcgccagcugcagccacaacggcaagagcagcuucuacagaaaccugcuguggcugaccggcaagaacggccuguaccccaaccugagcaagagcuacgccaacaacaaggagaaggaggugcuggugcuguggggcgugcaccacccccccaacaucggcaaccagagagcccuguaccacaccgagaacgccuacgugagcguggugagcagccacuacagcagaagauucacccccgagaucgccaagagacccaaggugagagaccaggagggcagaaucaacuacuacuggacccugcuggagcccggcgacaccaucaucuucgaggccaacggcaaccugaucgcccccagauacgccuucgcccugagcagaggcuucggcagcggcaucaucaccagcaacgcccccauggacgagugcgacgccaagugccagaccccccagggcgccaucaacagcagccugcccuuccagaacgugcaccccgugaccaucggcgagugccccaaguacgugagaagcgccaagcugagaauggugaccggccugagaaacauccccagcauccagagcagaggccuguucggcgccaucgccggcuucaucgagggcggcuggaccggcaugguggacggcugguacggcuaccaccaccagaacgagcagggcagcggcuacgccgccgaccagaagagcacccagaacgccaucaacggcaucaccaacaaggugaacagcgugaucgagaagaugaacacccaguucaccgccgugggcaaggaguucaacaagcuggagagaagaauggagaaccugaacaagaagguggacgacggcuuccuggacaucuggaccuacaacgccgagcugcuggugcugcuggagaacgagagaacccuggacuuccacaacagcaacgugaagaaccuguacgagaaggugaagagccagcugaagaacaacgccaaggagaucggcaacggcugcuucgaguucuaccacaagugcaacaacgagugcauggagagcgugaagaacggcaccuacgacuaccccaaguacagcgaggagagcaagcugaacagagagaagaucgacggcgugaagcuggagagcaugggcguguaccagauccuggccaucuacagcaccguggccagcagccuggugcugcuggugagccugggcgccaucagcuucuggaugugcagcaacggcagccugcagugcagaaucugcaucuga

SEQ ID NO: 161768 - RNA, 1698 nt, Artificial Sequence
  derived and/or modified CDS sequence (opt4) from hemagglutinin__InfluenzaA__ABS49987
augaaggugaagcugcuggugcugcugugcaccuucaccgccaccuacgccgacaccaucugcaucggcuaccacgccaacaacagcaccgacaccguggacaccgugcuggagaagaacgugaccgugacccacagcgugaaccugcuggaggacagccacaacggcaagcugugccugcugaagggcaucgccccccugcagcugggcaacugcagcguggccggcuggauccugggcaaccccgagugcgagcugcugaucagcaaggagagcuggagcuacaucguggagacccccaaccccgagaacggcaccugcuaccccggcuacuucgccgacuacgaggagcugagagagcagcugagcagcgugagcagcuucgagagauucgagaucuuccccaaggagagcagcuggcccaaccacaccgugaccggcgugagcgccagcugcagccacaacggcaagagcagcuucuacagaaaccugcuguggcugaccggcaagaacggccuguaccccaaccugagcaagagcuacgccaacaacaaggagaaggaggugcuggugcuguggggcgugcaccacccccccaacaucggcgaccagagagcccuguaccacaccgagaacgccuacgugagcguggugagcagccacuacagcagaagauucacccccgagaucgccaagagacccaaggugagagaccaggagggcagaaucaacuacuacuggacccugcuggagcccggcgacaccaucaucuucgaggccaacggcaaccugaucgcccccagauacgccuucgcccugagcagaggcuucggcagcggcaucaucaccagcaacgcccccauggacgagugcgacgccaagugccagaccccccagggcgccaucaacagcagccugcccuuccagaacgugcaccccgugaccaucggcgagugccccaaguacgugagaagcgccaagcugagaauggugaccggccugagaaacauccccagcauccagagcagaggccuguucggcgccaucgccggcuucaucgagggcggcuggaccggcaugguggacggcugguacggcuaccaccaccagaacgagcagggcagcggcuacgccgccgaccagaagagcacccagaacgccaucaacggcaucaccaacaaggugaacagcgugaucgagaagaugaacacccaguucaccgccgugggcaaggaguucaacaagcuggagagaagaauggagaaccugaacaagaagguggacgacggcuuccuggacaucuggaccuacaacgccgagcugcuggugcugcuggagaacgagagaacccuggacuuccacgacagcaacaugaagaaccuguacgagaaggugaagagccagcugaagaacaacgccaaggagaucggcaacggcugcuucgaguucuaccacaagugcaacaacgagugcauggagagcgugaagaacggcaccuacgacuaccccaaguacagcgaggagagcaagcugaacagagagaagaucgacggcgugaagcuggagagcaugggcguguaccagauccuggccaucuacagcaccguggccagcagccuggugcugcuggugagccugggcgccaucagcuucuggaugugcagcaacggcagccugcagugcagaaucugcaucuga

SEQ ID NO: 161769 - RNA, 1701 nt, Artificial Sequence
  derived and/or modified CDS sequence (opt4) from hemagglutinin__InfluenzaA__ABS49998
augaagaccaucaucgcccugagcuacauccugugccugguguucgcccagaagcugcccggcaacgacaacagcaccgccacccugugccugggccaccacgccgugcccaacggcacccuggugaagaccaucaccaacgaccagaucgaggugaccaacgccaccgagcuggugcagagcagcagcaccggcggcaucugcgacagcccccaccagauccuggacggcgagaacugcacccugaucgacgcccugcugggcgacccccacugcgacggcuuccagaacaaggagugggaccuguucguggagagaagcaaggccuacagcaacugcuaccccuacgacgugcccgacuacgccagccugagaagccugguggccagcagcggcacccuggaguucaacaacgagagcuucaacuggaccggcguggcccagaacggcaccagcagcgccugcaagagaagaagcaacaagagcuucuucagcagacugaacuggcugcaccagcugaaguacaaguaccccgcccugaacgugaucaugcccaacaacgagaaguucgacaagcuguacaucuggggcgugcaccaccccagcaccgacagcgaccagaucagccuguacgcccaggcccccggcagagugaccgugagcaccaagagaagccagcagaccgugauccccaacaucggcagcagacccugggugagaggcgugagcagcagaaucagcaucuacuggaccaucgugaagcccggcgacauccugcugaucaacugcaccggcaaccugaucgcccccagaggcuacuucaagaucagaagcggcaagagcagcaucaugagaagcgacgccagcaucggcaagugcaacagcgagugcaucacccccaacggcagcauccccaacgacaagcccuuccagaacgugaacagaaucaccuacggcgccugccccagauacgugaagcagaacacccugaagcuggccaccggcaugagaaacgugcccgagaagcagaccagaggcaucuucggcgccaucgccggcuucaucgagaacggcugggagggcaugguggacggcugguacggcuucagacaccagaacagcgagggcaccggccaggccgccgaccugaagagcacccaggccgccaucaaccagaucaacggcaagcugaacagacugaucgagaagaccaacgagaaguuccaccagaucgagaaggaguucagcgagguggagggcagaauccaggaccuggagaaguacguggaggacaccaagaucgaccuguggagcuacaacgccgagcugcugguggcccuggagaaccagcacaccaucgaccugaccgacagcgagaugaacaagcuguucgagagaaccaagaagcagcugagagagaacgccgaggacaugggcaacggcugcuucaagaucuaccacaagugcgacaacgccugcaucggcagcaucagaaacggcaccuacgaccacgacguguacagagacgaggcccugaacaacagauuccagaucaagggcguggagcugaagagcggcuacaaggacuggauccuguggaucagcuucgccaucagcugcuuccugcugugcguggugcugcugggcuucaucaugugggccugccagaagggcaacaucagaugcaacaucugcaucuga

SEQ ID NO: 161770 - RNA, 1701 nt, Artificial Sequence
  derived and/or modified CDS sequence (opt4) from hemagglutinin__InfluenzaA__ABS50009
augaagaccaucaucgcccugagcuacauccugugccugguguucgcccagaagcugcccggcaacgacaacagcaccgccacccugugccugggccaccacgccgugcccaacggcacccuggugaagaccaucaccaacgaccagaucgaggugaccaacgccaccgagcuggugcagagcagcagcaccggcggcaucugcgacagcccccaccagauccuggacggcgagaacugcacccugaucgacgcccugcugggcgacccccacugcgacggcuuccagaacaaggagugggaccuguucguggagagaagcaaggccuacagcaacugcuaccccuacgacgugcccgacuacgccagccugagaagccugguggccagcagcggcacccuggaguucaacaacgagagcuucaacuggaccggcguggcccagaacggcaccagcagcgccugcaagagaagaagcaacaagagcuucuucagcagacugaacuggcugcaccagcugaaguacaaguaccccgcccugaacgugaccaugcccaacaacgagaaguucgacaagcuguacaucuggggcgugcaccaccccagcaccgacagcgaccagaucagccuguacgcccaggcccccggcagagugaccgugagcaccaagagaagccagcagaccgugauccccaacaucggcagcagacccugggugagaggcgugagcagcaagaucagcaucuacuggaccaucgugaagcccggcgacauccugcugaucaacugcaccggcaaccugaucgcccccagaggcuacuucaagaucagaagcggcaagagcagcaucaugagaagcgacgccagcaucggcaagugcaacagcgagugcaucacccccaacggcagcauccccaacgacaagcccuuccagaacgugaacagaaucaccuacggcgccugccccagauacgugaagcagaacacccugaagcuggccaccggcaugagaaacgugcccgagaagcagaccagaggcaucuucggcgccaucgccggcuucaucgagaacggcugggagggcaugguggacggcugguacggcuucagacaccagaacagcgagggcaccggccaggccgccgaccugaagagcacccaggccgccaucaaccagaucaacggcaagcugaacagacugaucgagaagaccaacgagaaguuccaccagaucgagaaggaguucagcgagguggagggcagaauccaggaccuggagaaguacguggaggacaccaagaucgaccuguggagcuacaacgccgagcugcugguggcccuggagaaccagcacaccaucgaccugaccgacagcgagaugaacaagcuguucgagagaaccaagaagcagcugagagagaacgccgaggacaugggcaacggcugcuucaagaucuaccacaagugcgacaacgccugcaucggcagcaucagaaacggcaccuacgaccacgacguguacagagacgaggcccugaacaacagauuccagaucaagggcguggagcugaagagcggcuacaaggacuggauccuguggaucagcuucgccaucagcugcuuccugcugugcguggugcugcugggcuucaucaugugggccugccagaagggcaacaucagaugcaacaucugcaucuga

SEQ ID NO: 161771 - RNA, 1701 nt, Artificial Sequence; identical to SEQ ID NO: 160770
  derived and/or modified CDS sequence (opt4) from hemagglutinin__InfluenzaA__ABS50020

SEQ ID NO: 161772 - RNA, 1701 nt, Artificial Sequence
  derived and/or modified CDS sequence (opt4) from hemagglutinin__InfluenzaA__ABS50031
augaagaccaucaucgcccugagcuacaugcugugccugguguucgcccagaagcugcccggcaacgacaacagcaccgccaugcugugccugggccaccacgccgugcccaacggcacccuggugaagaccaucaccaacgaccagaucgaggugaccaacgccaccgagcuggugcagagcagcagcaccggcggcaucugcgacagcccccaccagauccuggacggcgagaacugcacccugaucgacgcccugcugggcgacccccacugcgacggcuuccagaacaaggagugggaccuguucguggagagaagcaaggccuacagcaacugcuaccccuacgacgugcccgacuacgccagccugagaagccugguggccagcagcggcacccuggaguucaacaacgagagcuucaacuggaccggcguggcccagaacggcaccagcagcgccugcaagagaagaagcaacaagagcuucuucagcagacugaacuggcugcaccagcugaaguacaaguaccccgcccugaacgugaccaugcccaacaacgagaaguucgacaagcuguacaucuggggcgugcaccaccccagcaccgacagcgaccagaucagccuguacgcccaggcccccggcagagugaccgugagcaccaagagaagccagcagaccgugauccccaacaucggcagcggccccugggugagaggcgugagcagcagaaucagcaucuacuggaccaucgugaagcccggcgacauccugcugaucaacugcaccggcaaccugaucgcccccagaggcuacuucaagaucagaagcggcaagagcagcaucaugagaagcgacgccagcaucggcaagugcaacagcgagugcaucacccccaacggcagcauccccaacgacaagcccuuccagaacgugaacagaaucaccuacggcgccugccccagauacgugaagcagaacacccugaagcuggccaccggcaugagaaacgugcccgagaagcagaccagaggcaucuucggcgccaucgccggcuucaucgagaacggcugggagggcaugguggacggcugguacggcuucagacaccagaacagcgagggcaccggccaggccgccgaccugaagagcacccaggccgccaucaaccagaucaacggcaagcugaacagacugaucgagaagaccaacgagaaguuccaccagaucgagaaggaguucagcgagguggagggcagaauccaggaccuggagaaguacguggaggacaccaagaucgaccuguggagcuacaacgccgagcugcugguggcccuggagaaccagcacaccaucgaccugaccgacagcgagaugaacaagcuguucgagagaaccaagaagcagcugagagagaacgccgaggacaugggcaacggcugcuucaagaucuaccacaagugcgacaacgccugcaucggcagcaucagaaacggcaccuacgaccacgacguguacagagacgaggcccugaacaacagauuccagaucaagggcguggagcugaagagcggcuacaaggacuggauccuguggaucagcuucgccaucagcugcuuccugcugugcguggugcugcugggcuucaucaugugggccugccagaagggcaacaucagaugcaacaucugcaucuga

SEQ ID NO: 161773 - RNA, 1701 nt, Artificial Sequence; identical to SEQ ID NO: 160111
  derived and/or modified CDS sequence (opt4) from hemagglutinin__InfluenzaA__ABS50042

SEQ ID NO: 161774 - RNA, 1701 nt, Artificial Sequence; identical to SEQ ID NO: 161753
  derived and/or modified CDS sequence (opt4) from hemagglutinin__InfluenzaA__ABS50053

SEQ ID NO: 161775 - RNA, 1701 nt, Artificial Sequence
  derived and/or modified CDS sequence (opt4) from hemagglutinin__InfluenzaA__ABS50064
augaagaccaucaucgcccugagcuacauccugugccugguguucgcccagaagcugcccggcaacgacaacagcaccgccacccugugccugggccaccacgccgugcccaacggcacccuggugaagaccaucaccaacgaccagaucgaggugaccaacgccaccgagcuggugcagagcagcagcaccggcagaaucugcgacagcccccaccagauccuggacggcgagaacugcacccugaucgacgcccugcugggcgacccccacugcgacggcuuccagaacaaggagugggaccuguucguggagagaagcaaggccuacagcaacugcuaccccuacgacgugcccgacuacgugagccugagaagccugguggccagcagcggcacccuggaguucaacaacgagagcuucaacuggaccggcguggcccagaacggcaccagcagcgccugcaagagaagaagcgacaagagcuucuucagcagacugaacuggcugcaccagcugaaguacaaguaccccgcccugaacgugaccaugcccaacaacgagaaguucgacaagcuguacaucuggggcgugcaccaccccggcaccgacagcgaccagaucagccuguacgcccaggccagcggcagagugaccgugagcaccaagagaagccagcagaccgugauccccaacaucggcagcagacccugggugagaggcgugagcagcagaaucagcaucuacuggaccaucgugaagcccggcgacauccugcugaucaacagcaccggcaaccugaucgcccccagaggcuacuucaagaucagaagcggcaagagcagcaucaugagaagcgacgcccccaucggcaagugcaacagcgagugcaucacccccaacggcagcauccccaacgacaagcccuuccagaacgugaacagaaucaccuacggccccugccccagauacgugaagcagaccacccugaagcuggccaccggcaugagaaacgugcccgagaagcagaccagaggcaucuucggcgccaucgccggcuucaucgagaacggcugggagggcaugauggacggcugguacggcuucagacaccagaacagcgagggcaccggccaggccgccgaccugaagagcacccaggccgccaucaaccagaucaacggcaagcugaacagacugaucgagaagaccaacgagaaguuccaccagaucgagaaggaguucagcgagguggagggcagaauccaggaccuggagaaguacguggaggacaccaagaucgaccuguggagcuacaacgccgagcugcuggugagccuggagaaccagcacaccaucgaccugaccgacagcgagaugaacaagcuguucgagagaaccaagaagcagcugagagagaacgccgaggacaugggcaacggcugcuucaagaucuaccacaagugcgacaacgccugcaucggcagcaucagaaacggcaccuacgaccacgacguguacagagacgaggcccugaacaacagauuccagaucaagggcguggagcugaagagcggcuacaaggacuggauccuguggaucagcuucgccaucagcugcuuccugcugugcaucgugcugcugggcuucaucaugugggccugccagaagggcaacaucagaugcaacaucugcaucuga

SEQ ID NO: 161776 - RNA, 1701 nt, Artificial Sequence
  derived and/or modified CDS sequence (opt4) from hemagglutinin__InfluenzaA__ABS50075
augaagaccaucaucgcccugagcuacauccugugccugguguucgcccagaagcugcccggcaacgacaacagcaccgccacccugugccugggccaccacgccgugcccaacggcaccaucgugaagaccaucaccaacgaccagaucgaggugaccaacgccaccgagcuggugcagagcagcagcaccggcggcaucugcgacagcccccacaagauccuggacggcgagaacugcacccugaucgacgcccugcugggcgacccccagugcgacggcuuccagaacaagaagugggaccuguucguggagagaagcaaggccuacagcaacugcuaccccuacgacgugcccgacuacgccagccugagaagccugaucgccagcagcggcacccuggaguucaacaacgagagcuucaacuggaccggcgugacccagaacggcaccagcagcgccugcaagagaagaagcaacagcagcuucuucagcagacugaacuggcugacccaccugaaguucaaguaccccgcccugaacgugaccaugcccaacaacgaggaguucgacaagcuguacaucuggggcgugcaccaccccggcaccuacaacgaccagaucagccuguacgcccaggccagcggcagaaucaccgugagcaccaagagaagccagcagaccgugauccccaacaucggcagcagacccagagugagagacauccccagcagaaucagcaucuacuggaccaucgugaagcccggcgacauccugcugaucaacagcaccggcaaccugaucgcccccagaggcuacuucaagaucagaagcggcaagagcagcaucaugagaagcgacgcccccaucggcaagugcaacagcgagugcaucacccccaacggcagcauccccaacgacaagcccuuccagaacgugaacagaaucaccuacggcgccugccccagauacgugaagcagaacacccugaagcuggccaccggcaugagaaacgugcccgagaagcagaccagaggcaucuucggcgccaucgccggcuucaucgagaacggcugggagggcaugguggacggcugguacggcuucagacaccagaacagcgagggcaucggccaggccgccgaccugaagagcacccaggccgccaucgaccagaucaacggcaagcugaacagacugaucggcaagaccaacgagaaguuccaccagaucgagaaggaguucagcgagguggagggcagaauccaggaccuggagaaguacguggaggacaccaagaucgaccuguggagcuacaacgccgagcugcugguggcccuggagaaccagcacaccaucgaccugaccgacagcgagaugaacaagcuguucgagagaaccaagaagcagcugagagagaacgccgaggacaugggcaacggcugcuucaagaucuaccacaagugcgacaacgccugcaucggcagcaucagaaacggcaccuacgaccacgacguguacagagacgaggcccugaacaacagauuccagaucaagggcguggagcugaagagcggcuacaaggacuggauccuguggaucagcuucgccaucagcugcuuccugcugugcguggcccugcugggcuucaucaugugggccugccagaagggcaacaucagaugcaacaucugcaucuga

SEQ ID NO: 161777 - RNA, 1698 nt, Artificial Sequence
  derived and/or modified CDS sequence (opt4) from hemagglutinin__InfluenzaA__ABS71665
augaaggugaagcugcuggugcugcugugcaccuucaccgccaccuacgccgacaccaucugcaucggcuaccacgccaacaacagcaccgacaccguggacaccgugcuggagaagaacgugaccgugacccacagcgugaaccugcuggaggacagccacaacggcaagcugugccugcugaagggcaucgccccccugcagcugggcaacugcagcguggccggcuggauccugggcaaccccgagugcgagagccugaucagcagagagagcuggagcuacaucguggagaagcccagccccgagaacggcaccugcuaccccggccacuucgccgacuacgaggagcugagagagcagcugagcagcgugagcagcuucgagagauucgagaucuuccccaaggagagcagcuggcccaaccacaccgccaccggcgugagcgccagcugcagccacaacggcgagagcagcuucuacaagaaccugcuguggcugaccggcaagaacggccuguaccccaaccugagcaagagcuacgccaacaacaaggagaaggaggugcuggugcuguggggcgugcaccacccccccaacaucggcgaccagagagcccuguaccacaccgagaacgccuacgugagcguggugagcagccacuacagcagaaaguucacccccgagaucgccaagagacccaaggugagagaccaggagggcagaaucagcuacuacuggacccugcuggagcccggcgacaccaucaucuucgaggccaacggcaaccugaucgcccccagauacgccuucgcccugagcagaggcuucggcagcggcaucaucaacagcaacgcccccauggacgagugcgacgccaagugccagaccccccagggcgccaucaacagcagccugcccuuccagaacgugcaccccgugaccaucggcgagugccccaaguacgugagaagcgccaagcugagaauggugaccggccugagaaacauccccagcauccagagcagaggccuguucggcgccaucgccggcuucaucgagggcggcuggaccggcaugguggacggcugguacggcuaccaccaccagaacgagcagggcagcggcuacgccgccgaccagaagagcacccagaacgccaucaacggcaucaccaacaaggugaacagcgugaucgagaagaugaacacccaguucaccgccgugggcaaggaguucaacaagcuggagagaagaauggagaaccugaacaagaagguggacgacggcuucaucgacaucuggaccuacaacgccgagcugcuggugcugcuggagaacgagagaacccuggacuuccacgacagcaacgugaagaaccuguacgagaaggugaagagccagcugaagaacaacgccaaggagaucggcaacggcugcuucgaguucuaccacaagugcaacgacgagugcauggagagcgugaagaacggcaccuacgacuaccccaaguacagcgaggagagcaagcugaacagagagaagaucgacggcgugaagcuggagagcaugggcguguaccagauccuggccaucuacagcaccguggccagcagccuggugcugcuggugagccugggcgccaucagcuucuggaugugcagcaacggcagccugcagugcagaaucugcaucuga

SEQ ID NO: 161778 - RNA, 1698 nt, Artificial Sequence
  derived and/or modified CDS sequence (opt4) from hemagglutinin__InfluenzaA__ABS71666
augaaggugaagcugcuggugcugcugugcaccuucaccgccaccuacgccgacaccaucugcaucggcuaccacgccaacaacagcaccgacaccguggacaccgugcuggagaagaacgugaccgugacccacagcgugaaccugcuggaggacagccacaacggcaagcugugccugcugaagggcaucgccccccugcagcugggcaacugcagcguggccggcuggauccugggcaaccccgagugcgagagccugaucagcagagagagcuggagcuacaucguggagaagcccagccccgagaacggcaccugcuaccccggccacuucgccgacuacgaggagcugagagagcagcugagcagcgugagcagcuucgagagauucgagaucuuccccaaggagagcagcuggcccaaccacaccgccaccggcgugagcgccagcugcagccacaacggcaagagcagcuucuacaagaaccugcuguggcugaccggcaagaacggccuguaccccaaccugagcaagagcuacgccaacaacaaggagaaggaggugcuggugcuguggggcgugcaccacccccccaacaucggcgaccagagagcccuguaccacaccgagaacgccuacgugagcguggugagcagccacuacagcagaaaguucacccccgagaucgccaagagacccaaggugagagaccaggagggcagaaucagcuacuacuggacccugcuggagcccggcgacaccaucaucuucgaggccaacggcaaccugaucgcccccagauacgccuucgcccugagcagaggcuucggcagcggcaucaucaacagcaacgcccccauggacgagugcgacgccaagugccagaccccccagggcgccaucaacagcagccugcccuuccagaacgugcaccccgugaccaucggcgagugccccaaguacgugagaagcgccaagcugagaauggugaccggccugagaaacauccccagcauccagagcagaggccuguucggcgccaucgccggcuucaucgagggcggcuggaccggcaugguggacggcugguacggcuaccaccaccagaacgagcagggcagcggcuacgccgccgaccagaagagcacccagaacgccaucaacggcaucaccaacaaggugaacagcgugaucgagaagaugaacacccaguucaccgccgugggcaaggaguucaacaagcuggagagaagaauggagaaccugaacaagaagguggacgacggcuucaucgacaucuggaccuacaacgccgagcugcuggugcugcuggagaacgagagaacccuggacuuccacgacagcaacgugaagaaccuguacgagaaggugaagagccagcugaagaacaacgccaaggagaucggcaacggcugcuucgaguucuaccacaagugcaacgacgagugcauggagagcgugaagaacggcaccuacgacuaccccaaguacagcgaggagagcaagcugaacagagagaagaucgacggcgugaagcuggagagcaugggcguguaccagauccuggccaucuacagcaccguggccagcagccuggugcugcuggugagccugggcgccaucagcuucuggaugugcagcaacggcagccugcagugcagaaucugcaucuga

SEQ ID NO: 161779 - RNA, 1698 nt, Artificial Sequence
  derived and/or modified CDS sequence (opt4) from hemagglutinin__InfluenzaA__ABS71667
augaaggugaagcugcuggugcugcugugcaccuucaccgccaccuacgccgacaccaucugcaucggcuaccacgccaacaacagcaccgacaccguggacaccgugcuggagaagaacgugaccgugacccacagcgugaaccugcuggaggacagccacaacggcaagcugugccugcugaagggcaucgccccccugcagcugggcaacugcagcguggccggcuggauccugggcaaccccgagugcgagagccugaucagcagagagagcuggagcuacaucguggagaagcccagccccgagaacggcaccugcuaccccggccacuucgccgacuacgaggagcugagagagcagcugagcagcgugagcagcuucgagagauucgagaucuuccccaaggagagcagcuggcccaaccacaccgccaccggcgugagcgccagcugcagccacaacggcaagagcagcuucuacaagaaccugcuguggcugaccggcaagaacggccuguaccccaaccugagcaagagcuacgccaacaacaaggagaaggaggugcuggugcuguggggcgugcaccacccccccaacaucggcgaccagagagcccuguaccacaccgagaacgccuacaucagcguggugagcagccacuacagcagaaaguucacccccgagaucgccaagagacccaaggugagagaccaggagggcagaaucagcuacuacuggacccugcuggagcccggcgacaccaucaucuucgaggccaacggcaaccugaucgcccccagauacgccuucgcccugagcagaggcuucggcagcggcaucaucaacagcaacgcccccauggacgagugcgacgccaagugccagaccccccagggcgccaucaacagcagccugcccuuccagaacgugcaccccgugaccaucggcgagugccccaaguacgugagaagcgccaagcugagaauggugaccggccugagaaacauccccagcauccagagcagaggccuguucggcgccaucgccggcuucaucgagggcggcuggaccggcaugguggacggcugguacggcuaccaccaccagaacgagcagggcagcggcuacgccgccgaccagaagagcacccagaacgccaucaacggcaucaccaacaaggugaacagcgugaucgagaagaugaacacccaguucaccgccgugggcaaggaguucaacaagcuggagagaagaauggagaaccugaacaagaagguggacgacggcuucaucgacaucuggaccuacaacgccgagcugcuggugcugcuggagaacgagagaacccuggacuuccacgacagcaacgugaagaaccuguacgagaaggugaagagccagcugaagaacaacgccaaggagaucggcaacggcugcuucgaguucuaccacaagugcaacgacgagugcauggagagcgugaagaacggcaccuacgacuaccccaaguacagcgaggagagcaagcugaacagagagaagaucgacggcgugaagcuggagagcaugggcguguaccagauccuggccaucuacagcaccguggccagcagccuggugcugcuggugagccugggcgccaucagcuucuggaugugcagcaacggcagccugcagugcagaaucugcaucuga

SEQ ID NO: 161780 - RNA, 1698 nt, Artificial Sequence
  derived and/or modified CDS sequence (opt4) from hemagglutinin__InfluenzaA__ABS71668
augaaggugaagcugcuggugcugcugugcaccuucaccgccaccuacgccgacaccaucugcaucggcuaccacgccaacaacagcaccgacaccguggacaccgugcuggagaagaacgugaccgugacccacagcgugaaccugcuggaggacagccacaacggcaagcugugccugcugaagggcaucgccccccugcagcugggcaacugcagcguggccggcuggauccugggcaaccccgagugcgagagccugaucagcagagagagcuggagcuacaucguggagaagcccagccccgagaacggcaccugcuaccccggccacuucgccgacuacgaggagcugagagagcagcugagcagcgugagcagcuucgagagauucgagaucuuccccaaggagagcagcuggcccaaccacaccgccagcggcgugagcgccagcugcagccacaacggcaagagcagcuucuacaagaaccugcuguggcugaccggcaagaacggccuguaccccaaccugagcaagagcuacgccaacaacaaggagaaggaggugcuggugcuguggggcgugcaccacccccccaacaucggcgaccagagagcccuguaccacaccgagaacgccuacgugagcguggugagcagccacuacagcagaaaguucacccccgagaucgccaagagacccaaggugagagaccaggagggcagaaucaacuacuacuggacccugcuggagcccggcgacaccaucaucuucgaggccaacggcaaccugaucgcccccagauacgccuucgcccugagcagaggcuucggcagcggcaucaucaacagcaacgcccccauggacgagugcgacgccaagugccagaccccccagggcgccaucaacagcagccugcccuuccagaacgugcaccccgugaccaucggcgagugccccaaguacgugagaagcgccaagcugagaauggugaccggccugagaaacauccccagcauccagagcagaggccuguucggcgccaucgccggcuucaucgagggcggcuggaccggcaugguggacggcugguacggcuaccaccaccagaacgagcagggcagcggcuacgccgccgaccagaagagcacccagaacgccaucaacggcaucaccaacaaggugaacagcgugaucgagaagaugaacacccaguucaccgccgugggcaaggaguucaacaagcuggagagaagaauggagaaccugaacaagaagguggacgacggcuucaucgacaucuggaccuacaacgccgagcugcuggugcugcuggagaacgagagaacccuggacuuccacgacagcaacgugaagaaccuguacgagaaggugaagagccagcugaagaacaacgccaaggagaucggcaacggcugcuucgaguucuaccacaagugcaacgacgagugcauggagagcgugaagaacggcaccuacgacuaccccaaguacagcgaggagagcaagcugaacagagagaagaucgacggcgugaagcuggagagcaugggcguguaccagauccuggccaucuacagcaccguggccagcagccuggugcugcuggugagccugggcgccaucagcuucuggaugugcagcaacggcagccugcagugcagaaucugcaucuga

SEQ ID NO: 161781 - RNA, 1698 nt, Artificial Sequence
  derived and/or modified CDS sequence (opt4) from hemagglutinin__InfluenzaA__ABS71669
augaaggugaagcugcuggugcugcugugcaccuucaccgccaccuacgccgacaccaucugcaucggcuaccacgccaacaacagcaccgacaccguggacaccgugcuggagaagaacgugaccgugacccacagcgugaaccugcuggaggacagccacaacggcaagcugugccugcugaagggcaucgccccccugcagcugggcaacugcagcguggccggcuggauccugggcaaccccgagugcgagcugcugaucagcaaggagagcuggagcuacaucguggagaagcccaaccccgagaacggcaccugcuaccccggccacuucgccgacuacgaggagcugagagagcagcugagcagcgugagcagcuucgagagauucgagaucuuccccaaggagagcagcuggcccaaccacaccgugaccggcgugagcgccagcugcagccacaacggcgagagcagcuucuacaagaaccugcuguggcugaccggcaagaacggccuguaccccaaccugagcaagagcuacgccaacaacaaggagaaggaggugcuggugcuguggggcgugcaccacccccccaacaucggcgaccagaaggcccuguaccacaccgagaacgccuacgugagcguggugagcagccacuacagcagaaaguucacccccgagaucgccaagagacccaaggugagagaccaggagggcagaaucaacuacuacuggacccugcuggagcccggcgacaccaucaucuucgaggccaacggcaaccugaucgcccccagauacgccuucgcccugagcagaggcuucggcagcggcaucaucaacagcaacgcccccauggacaagugcgacgccaagugccagaccccccagggcgccaucaacagcagccugcccuuccagaacgugcaccccgugaccaucggcgagugccccaaguacgugagaagcgccaagcugagaauggugaccggccugagaaacauccccagcauccagagcagaggccuguucggcgccaucgccggcuucaucgagggcggcuggaccggcaugguggacggcugguacggcuaccaccaccagaacgagcagggcagcggcuacgccgccgaccagaagagcacccagaacgccaucaacggcaucaccaacaaggugaacagcgugaucgagaagaugaacacccaguucaccgccgugggcaaggaguucaacaagcuggagagaagaauggagaaccugaacaagaagguggacgacggcuucaucgacaucuggaccuacaacgccgagcugcuggugcugcuggagaacgagagaacccuggacuuccacgacagcaacgugaagaaccuguacgagaaggugaagagccagcugaagaacaacgccaaggagaucggcaacggcugcuucgaguucuaccacaagugcaacgacgagugcauggagagcgugaagaacggcaccuacgacuaccccaaguacagcgaggagagcaagcugaacagagagaagaucgacggcgugaagcuggagagcaugggcguguaccagauccuggccaucuacagcaccguggccagcagccuggugcugcuggugagccugggcgccaucagcuucuggaugugcagcaacggcagccugcagugcagaaucugcaucuga

SEQ ID NO: 161782 - RNA, 1698 nt, Artificial Sequence
  derived and/or modified CDS sequence (opt4) from hemagglutinin__InfluenzaA__ABS71671
augaaggugaagcugcuggugcugcugugcaccuucaccgccaccuacgccgacaccaucugcaucggcuaccacgccaacaacagcaccgacaccguggacaccgugcuggagaagaacgugaccgugacccacagcgugaaccugcuggaggacagccacaacggcaagcugugccugcugaagggcaucgccccccugcagcugggcaacugcagcguggccggcuggauccugggcaaccccgagugcgagcugcugaucagcaaggagagcuggagcuacaucguggagaagcccaaccccgagaacggcaccugcuaccccggccacuucgccgacuacgaggagcugagagagcagcugagcagcgugagcagcuucgagagauucgagauguuccccaaggagagcagcuggcccaaccacaccgugaccggcgugagcgccagcugcagccacaacggcaagagcagcuucuacaagaaccugcuguggcugaccggcaagaacggccuguaccccaaccugagcaagagcuacgccaacaacaaggagaaggaggugcuggugcuguggggcgugcaccacccccccaacaucggcgaccagagagcccuguaccacaccgagaacgccuacgugagcguggugagcagccacuacagcagaaaguucacccccgagaucgccaagagacccaaggugagagaccaggagggcagaaucaacuacuacuggacccugcuggagcccggcgacaccaucaucuucgaggccaacggcaaccugaucgcccccagauacgccuucgcccugagcagaggcuucggcagcggcaucaucaacagcaacgcccccauggacgagugcgacgccaagugccagaccccccagggcgccaucaacagcagccugcccuuccagaacgugcaccccgugaccaucggcgagugccccaaguacgugagaagcgccaagcugagaauggugaccggccugagaaacauccccagcauccagagcagaggccuguucggcgccaucgccggcuucaucgagggcggcuggaccggcaugguggacggcugguacggcuaccaccaccagaacgagcagggcagcggcuacgccgccgaccagaagagcacccagaacgccaucaacggcaucaccaacaaggugaacagcgugaucgagaagaugaacacccaguucaccgccgugggcaaggaguucaacaagcuggagagaagaauggagaaccugaacaagaagguggacgacggcuucaucgacaucuggaccuacaacgccgagcugcuggugcugcuggagaacgagagaacccuggacuuccacgacagcaacgugaagaaccuguacgagaaggugaagagccagcugaagaacaacgccaaggagaucggcaacggcugcuucgaguucuaccacaagugcaacgacgagugcauggagagcgugaagaacggcaccuacgacuaccccaaguacagcgaggagagcaagcugaacagagagaagaucgacggcgugaagcuggagagcaugggcguguaccagauccuggccaucuacagcaccguggccagcagccuggugcugcuggugagccugggcgccaucagcuucuggaugugcagcaacggcagccugcagugcagaaucugcaucuga

SEQ ID NO: 161783 - RNA, 1698 nt, Artificial Sequence
  derived and/or modified CDS sequence (opt4) from hemagglutinin__InfluenzaA__ABS71672
augaaggugaagcugcuggugcugcugugcaccuucaccgccaccuacgccgacaccaucugcaucggcuaccacgccaacaacagcaccgacaccguggacaccgugcuggagaagaacgugaccgugacccacagcgugaaccugcuggaggacagccacaacggcaagcugugccugcugaagggcaucgccccccugcagcugggcaacugcagcguggccggcuggauccugggcaaccccgagugcgagcugcugaucagcaaggagagcuggagcuacaucguggagaagcccaaccccgagaacggcaccugcuaccccggccacuucgccgacuacgaggagcugagagagagacugagcagcgugagcagcuucgagagauucgagauguuccccaaggagagcagcuggcccaaccacaccgugaccggcgugagcgccagcugcagccacaacggcaagagcagcuucuacaagaaccugcuguggcugaccggcaagaacggccuguaccccaaccugagcaagagcuacgccaacaacaaggagaaggaggugcuggugcuguggggcgugcaccacccccccaacaucggcgcccagagagcccuguaccacaccgagaacgccuacgugagcguggugagcagccacuacagcagaaaguucacccccgagaucgccaagagacccaaggugagagaccaggagggcagaaucaacuacuacuggacccugcuggagcccggcgacaccaucaucuucgaggccaacggcaaccugaucgcccccagauacgccuucgcccugagcagaggcuucggcagcggcaucaucaacagcaacgcccccauggacgagugcgacgccaagugccagaccccccagggcgccaucaacagcagccugcccuuccagaacgugcaccccgugaccaucggcgagugccccaaguacgugagaagcgccaagcugagaauggugaccggccugagaaacauccccagcauccagagcagaggccuguucggcgccaucgccggcuucaucgagggcggcuggaccggcaugguggacggcugguacggcuaccaccaccagaacgagcagggcagcggcuacgccgccgaccagaagagcacccagaacgccaucaacggcaucaccaacaaggugaacagcgugaucgagaagaugaacacccaguucaccgccgugggcaaggaguucaacaagcuggagagaagaauggagaaccugaacaagaagguggacgacggcuucaucgacaucuggaccuacaacgccgagcugcuggugcugcuggagaacgagagaacccuggacuuccacgacagcaacgugaagaaccuguacgagaaggugaagagccagcugaagaacaacgccaaggagaucggcaacggcugcuucgaguucuaccacaagugcaacgacgagugcauggagagcgugaagaacggcaccuacgacuaccccaaguacagcgaggagagcaagcugagcagagagaagaucgacggcgugaagcuggagagcaugggcguguaccagauccuggccaucuacagcaccguggccagcagccuggugcugcuggugagccugggcgccaucagcuucuggaugugcagcaacggcagccugcagugcagaaucugcaucuga

SEQ ID NO: 161784 - RNA, 1698 nt, Artificial Sequence
  derived and/or modified CDS sequence (opt4) from hemagglutinin__InfluenzaA__ABS71673
augaaggugaagcugcuggugcugcugugcaccuucaccgccaccuacgccgacaccaucugcaucggcuaccacgccaacaacagcaccgacaccguggacaccgugcuggagaagaacgugaccgugacccacagcgugaaccugcuggaggacagccacaacggcaagcugugccugcugaagggcaucgccccccugcagcugggcaacugcagcguggccggcuggauccugggcaaccccgagugcgagcugcugaucagcaaggagagcuggagcuacaucguggagacccccaaccccgagaacggcaccugcuaccccggcuacuucgccgacuacgaggagcugagagagcagcugagcagcgugagcagcuucgagagauucgagaucuuccccaaggagagcagcuggcccaaccacaccgugaccggcgugagcgccagcugcagccacaacggcagaagcagcuucuacagaaaccugcuguggcugaccggcaagaacggccuguaccccaaccugagcaagagcuacgccaacaacaaggagaaggaggugcuggugcuguggggcgugcaccacccccccaacaucggcgaccagagagcccuguaccacaccgagaacaccuacgugagcguggugagcagccacuacagcagaagauucacccccgagaucgccaagagacccaaggugagagaccaggagggcagaaucaacuacuacuggacccugcuggagcccggcgacaccaucaucuucgaggccaacggcaaccugaucgcccccagauucgccuucgcccugagcagaggcuucggcagcggcaucaucaccagcaacgcccccauggacgagugcgacgccaagugccagaccccccagggcgccaucaacagcagccugcccuuccagaacgugcaccccgugaccaucggcgagugccccaaguacgugagaagcgccaagcugagaauggccaccggccugagaaacauccccagcauccagagcagaggccuguucggcgccaucgccggcuucaucgagggcggcuggaccggcaugguggacggcugguacggcuaccaccaccagaacgagcagggcagcggcuacgccgccgaccagaagagcacccagaacgccaucaacggcaucaccaacaaggugaacagcgugaucgagaagaugaacacccaguucaccgccgugggcaaggaguucagcaagcuggagagaagaauggagaaccugaacaagaagguggacgacggcuuccuggacaucuggaccuacaacgccgagcugcuggugcugcuggagaacgagagaacccuggacuuccacgacagcaacgugaagaaccuguacgagaaggugaagagccagcugaagaacaacgccaaggagaucggcaacggcugcuucgaguucuaccacaagugcaacgacgagugcauggagagcgugaagaacggcaccuacgacuaccccaaguacagcgaggagagcaagcugaacagagagaagaucgacggcgugaagcuggagagcaugggcguguaccagauccuggccaucuacagcaccguggccagcagccuggugcugcuggugagccugggcgccaucagcuucuggaugugcagcaacggcagccugcagugcagaaucugcaucuga

SEQ ID NO: 161785 - RNA, 1701 nt, Artificial Sequence; identical to SEQ ID NO: 160690
  derived and/or modified CDS sequence (opt4) from hemagglutinin__InfluenzaA__ABS71674

SEQ ID NO: 161786 - RNA, 1701 nt, Artificial Sequence
  derived and/or modified CDS sequence (opt4) from hemagglutinin__InfluenzaA__ABS71675
augaagaccaucaucgcccugagcuacauccugugccugguguucgcccagaagcugcccggcaacgacaacagcaccgccacccugugccugggccaccacgccgugcccaacggcaccaucgugaagaccaucaccaacgaccagaucgaggugaccaacgccaccgagcuggugcagagcagcagcaccggcggcaucugcgacagcccccaccagauccuggacggcgagaacugcacccugaucgacgcccugcugggcgacccccagugcgacggcuuccagaacaagaagugggaccuguucguggagagaagcaaggcccacagcaacugcuaccccuacgacgugcccgacuacgccagccugagaagccugguggccagcagcggcacccuggaguucaacaacgagagcuucaacuggaccggcgugacccagaacggcaccagcagcgccugcaagagaagaagcaacaacagcuucuucagcagacugaacuggcugacccaccugaaguucaaguaccccgcccugaacgugaccaugcccaacaacgagaaguucgacaagcuguacaucuggggcgugcaccaccccggcaccgacaacgaccagaucuuccuguacgcccaggccagcggcagaaucaccgugagcaccaagagaagccagcagaccgugauccccaacaucggcagcagacccagagugagaaacauccccagcagaaucagcaucuacuggaccaucgugaagcccggcgacauccugcugaucaacagcaccggcaaccugaucgcccccagaggcuacuucaagaucagaagcggcaagagcagcaucaugagaagcgacgcccccaucggcaagugcaacagcgagugcaucacccccaacggcagcauccccaacgacaagcccuuccagaacgugaacagaaucaccuacggcgccugccccagauacgugaagcagaacacccugaagcuggccaccggcaugagaaacgugcccgagaagcagaccagaggcaucuucggcgccaucgccggcuucaucgagaacggcugggagggcaugguggacggcugguacggcuucagacaccagaacagcgagggcaucggccaggccgccgaccugaagagcacccaggccgccaucaaccagaucaacggcaagcugaacagacugaucggcaagaccaacgagaaguuccaccagaucgagaaggaguucagcgagguggagggcagaauccaggaccuggagaaguacguggaggacaccaagaucgaccuguggagcuacaacgccgagcugcugguggcccuggagaaccagcacaccaucgaccugaccgacagcgagaugaacaagcuguucgagagaaccaagaagcagcugagagagaacgccgaggacaugggcaacggcugcuucaagaucuaccacaagugcgacaacgccugcaucggcagcaucagaaacggcaccuacgaccacgacguguacagagacgaggcccugaacaacagauuccagaucaagggcguggagcugaagagcggcuacaaggacuggauccuguggaucagcuucgccaucagcugcuuccugcugugcguggcccugcugggcuucaucaugugggccugccagaagggcaacaucagaugcaacaucugcaucuga

SEQ ID NO: 161787 - RNA, 1701 nt, Artificial Sequence
  derived and/or modified CDS sequence (opt4) from hemagglutinin__InfluenzaA__ABS71676
augaagaccaucaucgcccugagcuacauccugugccugguguucgcccagaagcugcccggcaucgacaacagcaccgccacccugugccugggccaccacgccgugcccaacggcaccaucgugaagaccaucaccaacgaccagaucgaggugaccaacgccaccgagcuggugcagaacagcagcaccggcggcaucugcgacagcccccaccagauccuggacggcgagaacugcacccugaucgacgcccugcugggcgacccccagugcgacggcuuccagaacaagaagugggaccuguucguggagagaagcaaggccuacagcaacugcuaccccuacgacgugcccgacuacgccagccugagaagccugguggccagcagcggcacccuggaguucaacaacgagagcuucaacuggaccggcgugacccagaacggcaccagcagcgccugcaagagaggcagcaacaacagcuucuucagcagacugaacuggcugacccacagcaaguucaaguaccccgcccugaacgugaccaugcccaacaacgaggaguucgacaagcuguacaucuggggcgugcaccaccccggcaccgacaacgaccagaucuuccuguacgcccaggccagcggcagaaucaccgugagcaccaagagaagccagcagaccgugauccccaacaucggcagcagacccagagugagaaacauccccagcagaaucagcaucuacuggaccaucgugaagcccggcgacauccugcugaucaacagcaccggcaaccugaucgcccccagaggcuacuucaucaucagaagcggcaagagcagcaucaugagaagcgacgcccccaucggcaagugcaacagcgagugcaucacccccaacggcagcauccccaacgacaagcccuuccagaacgugaacagaaucaccuacggcgccugccccagauacgugaagcagaacacccugaagcuggccaccggcaugagaaacgugcccgagaagcagaccagaggcaucuucggcgccaucgccggcuucaucgagaacggcugggagggcaugguggacggcugguacggcuucagacaccagaacagcgagggcaucggccaggccgccgaccugaagagcacccaggccgccaucgaccagaucaacggcaagcugaacagacugaucggcaagaccaacgagaaguuccaccagaucgagaaggaguucagcgagguggagggcagaauccaggaccuggagaaguacguggaggacaccaagaucgaccuguggagcuacaacgccgagcugcugguggcccuggagaaccagcacaccaucgaccugaccgacagcgagaugaacaagcuguucgagaagaccaagaagcagcugagagagaacgccgaggacaugggcaacggcugcuucaagaucuaccacaagugcgacaacgccugcaucggcagcaucagaaacggcaccuacgaccacgacguguacagagacgaggcccugaacaacagauuccagaucaagggcguggagcugaagagcggcuacaaggacuggauccuguggaucagcuucgccaucagcugcuuccugcugugcguggcccugcugggcuucaucaugugggccugccagaagggcaacaucagaugcaacaucugcaucuga

SEQ ID NO: 161788 - RNA, 1701 nt, Artificial Sequence
  derived and/or modified CDS sequence (opt4) from hemagglutinin__InfluenzaA__ABS71677
augaagaccaucaucgcccugagcuacauccugugccugguguucgcccagaagcugcccggcaucgacaacagcaccgccacccugugccugggccaccacgccgugcccaacggcaccaucgugaagaccaucaccgacgaccagaucgaggugaccaacgccaccgagcuggugcagaacagcagcaccggcggcaucugcgacagcccccaccagauccuggacggcgagaacugcacccugaucgacgcccugcugggcgacccccagugcgacggcuuccagaacaagaagugggaccuguucguggagagaagcaaggccuacagcaacugcuaccccuacgacgugcccgacuacgccagccugagaagccugguggccagcagcggcacccuggaguucaacaacgagagcuucaacuggaccggcgugacccagaacggcaccagcagcgccugcaagagaggcagcaacaacagcuucuucagcagacugaacuggcugacccacagcaaguucaaguaccccgcccugaacgugaccaugcccaacaacgaggaguucgacaagcuguacaucuggggcgugcaccaccccggcaccgacaacgaccagaucuuccuguacgcccaggccagcggcagaaucaccgugagcaccaagagaagccagcagaccgugauccccaacaucggcagcagacccagagugagaaacauccccagcagaaucagcaucuacuggaccaucgugaagcccggcgacauccugcugaucaacagcaccggcaaccugaucgcccccagaggcuacuucaagaucagaagcggcaagagcagcaucaugagaagcgacgcccccaucgacaagugcaacagcgagugcaucacccccaacggcagcauccccaacgacaagcccuuccagaacgugaacagaaucaccuacggcgccugccccagauacgugaagcagaacacccugaagcuggccaccggcaugagaaacgugcccgagaagcagaccagaggcaucuucggcgccaucgccggcuucaucgagaacggcugggagggcaugguggacggcugguacggcuucagacaccagaacagcgagggcaucggccaggccgccgaccugaagagcacccaggccgccaucgaccagaucaacggcaagcugaacagacugaucggcaagaccaacgagaaguuccaccagaucgagaaggaguucagcgagguggagggcagaauccaggaccuggagaaguacguggaggacaccaagaucgaccuguggagcuacaacgccgagcugcugguggcccuggagaaccagcacaccaucgaccugaccgacagcgagaugaacaagcuguucgagaagaccaagaagcagcugagagagaacgccgaggacaugggcaacggcugcuucaagaucuaccacaagugcgacaacgccugcaucggcagcaucagaaacggcaccuacgaccacgacguguacagagacgaggcccugaacaacagauuccagaucaagggcguggagcugaagagcggcuacaaggacuggauccuguggaucagcuucgccaucagcugcuuccugcugugcguggcccugcugggcuucaucaugugggccugccagaagggcaacaucagaugcaacaucugcaucuga

SEQ ID NO: 161789 - RNA, 1701 nt, Artificial Sequence
  derived and/or modified CDS sequence (opt4) from hemagglutinin__InfluenzaA__ABS71679
augaagaccaucaucgcccugagcuacauccugugccugguguucgcccagaagcugcccggcaucgacaacagcaccgccacccugugccugggccaccacgccgugcccaacggcaccaucgugaagaccaucaccaacgaccagaucgaggugaccaacgccaccgagcuggugcagagcagcagcaccggcggcaucugcgacagcccccaccagauccuggacggcgagaacugcacccugaucgacgcccugcugggcgacccccagugcgacggcuuccagaacaagaagugggaccuguucguggagagaagcaaggccuacagcaacugcuaccccuacgacgugcccgacuacgccagccugagaagccugguggccagcagcggcacccuggaguucaacaacgagagcuucaacuggaccggcgugacccagaacggcaccagcagcgccugcaagagaggcagcaacaacagcuucuucagcagacugaacuggcugacccacagcaaguucaaguaccccgcccugaacgugaccaugcccaacaacgaggaguucgacaagcuguacaucuggggcgugcaccaccccggcaccgacaacgaccagaucuuccuguacgcccaggccagcggcagaaucaccgugagcaccaagagaagccagcagaccgugauccccaacaucggcagcagacccagagugagaaacauccccagcagaaucagcaucuacuggaccaucgugaagcccggcgacauccugcugaucaacagcaccggcaaccugaucgcccccagaggcuacuucaagaucagaagcggcaagagcagcaucaugagaagcgacgcccccaucggcaagugcaacagcgagugcaucacccccaacggcagcauccccaacgacaagcccuuccagaacgugaacagaaucaccuacggcgccugccccagauacgugaagcagaacacccugaagcuggccaccggcaugagaaacgugcccgagaagcagaccagaggcaucuucggcgccaucgccggcuucaucgagaacggcugggagggcaugguggacggcugguacggcuucagacaccagaacagcgagggcaucggccaggccgccgaccugaagagcacccaggccgccaucgaccagaucaacggcaagcugaacagacugaucggcaagaccaacgagaaguuccaccagaucgagaaggaguucagcgagguggagggcagaauccaggaccuggagaaguacguggaggacaccaagaucgaccuguggagcuacaacgccgagcugcugguggcccuggagaaccagcacaccaucgaccugaccgacagcgagaugaacaagcuguucgagaagaccaagaagcagcugagagagaacgccgaggacaugggcaacggcugcuucaagaucuaccacaagugcgacaacgccugcaucggcagcaucagaaacggcaccuacgaccacgacguguacagagacgaggcccugaacaacagauuccagaucaagggcguggagcugaagagcggcuacaaggacuggauccuguggaucagcuucgccaucagcugcuuccugcugugcguggcccugcugggcuucaucaugugggccugccagaagggcaacaucagaugcaacaucugcaucuga

SEQ ID NO: 161790 - RNA, 1701 nt, Artificial Sequence; identical to SEQ ID NO: 161789
  derived and/or modified CDS sequence (opt4) from hemagglutinin__InfluenzaA__ABS71680

SEQ ID NO: 161791 - RNA, 1701 nt, Artificial Sequence
  derived and/or modified CDS sequence (opt4) from hemagglutinin__InfluenzaA__ABS71682
augaagaccaucaucgcccugagcuacauccugugccugguguucgcccagaagcugcccggcaacgacaacagcaccgccacccugugccugggccaccacgccgugcccaacggcaccaucgugaagaccaucaccaacgaccagaucgaggugaccaacgccaccgagcuggugcagagcagcagcaccggcggcaucugcgacagcccccaccagauccuggacggcgagaacugcacccugaucgacgcccugcugggcgacccccagugcgacggcuuccagaacaagaagugggaccuguucguggagagaagcaaggccuacagcaacugcuaccccuacgacgugcccgacuacgccagccugagaagccugaucgccagcagcggcacccuggaguucaacaacgagagcuucaacuggaccggcgugacccagaacggcaccagcagcgccugcaagagaagaagcaacaacagcuucuucagcagacugaacuggcugacccaccugaaguucaaguaccccgcccugaacgugaccaugcccaacaacgagaaguucgacaagcuguacaucuggggcgugcaccaccccggcaccgacaacgaccagaucuuccuguacgcccaggccagcggcagaaucaccgugagcaccaagagaagccagcagaccgugauccccaacaucggcagcagacccagagugagaaacauccccagcagaaucagcaucuacuggaccaucgugaagcccggcgacauccugcugaucaacagcaccggcaaccugaucgcccccagaggcuacuucaagaucagaagcggcaagagcagcaucaugagaagcgacgcccccaucggcaagugcaacagcgagugcaucacccccaacggcagcauccccaacgacaagcccuuccagaacgugaacagaaucaccuacggcgccugccccagauacgugaagcagaacacccugaagcuggccaccggcaugagaaacgugcccgagaagcagaccagaggcaucuucggcgccaucgccggcuucaucgagaacggcugggagggcaugguggacggcugguacggcuucagacaccagaacagcgagggcaucggccaggccgccgaccugaagagcacccaggccgccaucgaccagaucaacggcaagcugaacagacugaucggcaagaccaacgagaaguuccaccagaucgagaaggaguucagcgagguggagggcagaauccaggaccuggagaaguacguggaggacaccaagaucgaccuguggagcuacaacgccgagcugcugguggcccuggagaaccagcacaccaucgaccugaccgacagcgagaugaacaagcuguucgagaagaccaagaagcagcugagagagaacgccgaggacaugggcaacggcugcuucaagaucuaccacaagugcgacaacgccugcaucggcagcaucagaaacggcaccuacgaccacgacguguacagagacgaggcccugaacaacagauuccagaucaagggcguggagcugaagagcggcuacaaggacuggauccuguggaucagcuucgccaucagcugcuuccugcugugcguggugcugcugggcuucaucaugugggccugccagaagggcaacaucagaugcaacaucugcaucuga

SEQ ID NO: 161792 - RNA, 1701 nt, Artificial Sequence
  derived and/or modified CDS sequence (opt4) from hemagglutinin__InfluenzaA__ABU80177
augaagaccaucaucgcccugagcuacauccugugccugguguucgcccagaagcugcccgugaacgacaacagcaccgccacccugugccugggccaccacgccgugcccaacggcacccuggugaagaccaucaccaacgaccacaucgaggugaccaacgccaccgagcuggugcagagcagcagcaccggcagaaucugcgacagcccccaccagauccuggacggcgagaacugcacccugaucgacgcccugcugggcgacccccacugcgacggcuuccagaacaaggagugggaccuguucguggagagaagcaccgccuacagcaacugcuaccccuacgacgugcccgacuacgccagccugagaagccugguggccagcagcggcacccuggaguucaacaacgagagcuucaacuggaccggcguggcccagaacggcaccagcagcagcugcaagagaagaagcaucaagagcuucuucagcagacugaacuggcugcaccagcugaaguacaaguaccccgcccugaacgugaccaugcccaacaacgagaaguucgacaagcuguacaucuggggcgugcaccaccccagcaccgacagcgaccagaucagccuguacgcccaggccagcggcagagugaccgugagcaccaagagaagccagcagaccgugauccccaacaucggcagcagacccugggugagaggcgugagcagcagaaucagcaucuacuggaccaucgugaagcccggcgacauccugcugaucaacagcaccggcaaccugaucgcccccagaggcuacuucaagaucagaagcggcaagagcagcaucaugagaagcaacgcccccaucggcaagugcaacagcgagugcaucacccccaacggcagcauccccaacgacaagcccuuccagaacgugaacagaaucaccuacggcgccugccccagauacgugaagcagaacacccugaagcuggccaccggcaugagaaacgugcccgagaagcagaccagaggcaucuucggcgccaucgccggcuucaucgagaacggcugggagggcaugguggacggcugguacggcuucagacaccagaacagcgagggcaccggccaggccgccgaccugaagagcacccaggccgccaucaaccagaucaacggcaagcugaacagacugaucgagaagaccaacgagaaguuccaccagaucgagaaggaguucagcgagguggagggcagaauccaggaccuggagaaguacguggaggacaccaagaucgaccuguggagcuacaacgccgagcugcugguggcccuggagaaccagcacaccaucgaccugaccgacagcgagaugaacaagcuguucgagagaaccagaaagcagcugagagagaacgccgaggacaugggcaacggcugcuucaagaucuaccacaagugcgacaacgccugcaucggcagcaucagaaacggcaccuacgaccacgacguguacagagacgaggcccugaacaacagauuccagaucaagggcguggagcugaagagcggcuacaaggacuggauccuguggaucagcuucgccaucagcugcuuccugcugugcguggugcugcugggcuucaucaugugggccugccagaagggcaacaucagaugcaacaucugcaucuga

SEQ ID NO: 161793 - RNA, 1698 nt, Artificial Sequence
  derived and/or modified CDS sequence (opt4) from hemagglutinin__InfluenzaA__ABU80298
augaaggugaagcugcuggugcugcugugcaccuucaccgccaccuacgccgacaccaucugcaucggcuaccacgccaacaacagcaccgacaccguggacaccgugcuggagaagaacgugaccgugacccacagcgugaaccugcuggaggacagccacaacggcaagcugugccugcugaagggcaucgccccccugcagcugggcaacugcagcguggccggcuggauccugggcaaccccgagugcgagcugcugaucagcaaggagagcuggagcuacaucguggagacccccaaccccgagaacggcaccugcuaccccggcuacuucgccgacuacgaggagcugagagagcagcugagcagcgugagcagcuucgagagauucgagaucuuccccaaggagagcagcuggcccaaccacaccgugaccggcgugagcgccagcugcagccacaacggcaagagcagcuucuacagaaaccugcuguggcugaccggcaagaacggccuguaccccaaccugagcaagagcuacgccaacaacaaggagaaggaggugcuggugcuguggggcgugcaccacccccccaacaucggcgaccagagagcccuguaccacaccgagaacgccuacgugagcguggugagcagccacuacagcagaagauucacccccgagaucgccaagagacccaaggugagagaccaggagggcagaaucaacuacuacuggacccugcuggagcccggcgacaccaucaucuucgaggccaacggcaaccugaucgcccccagauacgccuucgcccugagcagaggcuucggcagcggcaucaucaccagcaacgcccccauggacgagugcgacgccaagugccagaccccccagggcgccaucaacagcagccugcccuuccagaacgugcaccccgugaccaucggcgagugccccaaguacgugagaagcgccaagcugagaauggccaccggccugagaaacauccccagcauccagagcagaggccuguucggcgccaucgccggcuucaucgagggcggcuggaccggcaugguggacggcugguacggcuaccaccaccagaacgagcagggcagcggcuacgccgccgaccagaagagcacccagaacgccaucaacggcaucaccaacaaggugaacagcgugaucgagaagaugaacacccaguucaccgccgugggcaaggaguucaacaagcuggagagaagaauggagaaccugaacaagaagguggacgacggcuuccuggacaucuggaccuacaacgccgagcugcuggugcugcuggagaacgagagaacccuggacuuccacgacagcaacgugaagaaccuguacaagaaggugaagagccagcugaagaacaacgccaaggagaucggcaacggcugcuucgaguucuaccacaagugcaacaacgagugcauggagagcgugaagaacggcaccuacgacuaccccaaguacagcgaggagagcaagcugaacagagagaagaucgacggcgugaagcuggagagcaugggcguguaccagauccuggccaucuacagcaccguggccagcagccuggugcugcuggugagccugggcgccaucagcuucuggaugugcagcaacggcagccugcagugcagaaucugcaucuga

SEQ ID NO: 161794 - RNA, 1701 nt, Artificial Sequence
  derived and/or modified CDS sequence (opt4) from hemagglutinin__InfluenzaA__ABU80320
augaagaccaucaucgcccugagcuacauccugugccugguguucgcccagaagcugcccggcaacgacaacagcaccgccacccugugccugggccaccacgccgugcccaacggcacccuggugaagaccaucaccaacgaccagaucgaggugaccaacgccaccgagcuggugcagagcagcagcaccggcggcaucugcgacagcccccaccagauccuggacggcgagaacugcacccugaucgacgcccugcugggcgacccccacugcgacagcuuccagaacaaggagugggaccuguucguggagagaagcaaggccuacagcaacugcuaccccuacgacgugcccgacuacgccagccugagaagccugguggccagcagcggcacccuggaguucaacaacgagagcuucaacuggaccggcguggcccagaacggcaccagcagcgccugcaagagaagaagcaacaagagcuucuucagcagacugaacuggcugcaccagcugaaguacaaguaccccgcccugaacgugaccaugcccaacaacgagaaguucgacaagcuguacaucuggggcgugcaccaccccagcaccgacagcgaccagaucagccuguacgcccaggcccccggcagagugaccgugagcaccaagagaagccagcagaccgugauccccaacaucggcagcagacccugggugagaggcgugagcagcaucaucagcaucuacuggaccaucgugaagcccggcgacauccugcugaucaacugcaccggcaaccugaucgcccccagaggcuacuucaagaucagaagcggcaagagcagcaucaugagaagcgacgccagcaucggcaagugcaacagcgagugcaucacccccaacggcagcauccccaacgacaagcccuuccagaacgugaacagaaucaccuacggcgccugccccagauacgugaagcagaacacccugaagcuggccaccggcaugagaaacgugcccgagaagcagaccagaggcaucuucggcgccaucgccggcuucaucgagaacggcugggagggcaugguggacggcugguacggcuucagacaccagaacagcgagggcaccggccaggccgccgaccugaagagcacccaggccgccaucaaccagaucaacggcaagcugaacagacugaucgagaagaccaacgagaaguuccaccagaucgagaaggaguucagcgagguggagggcagaauccaggaccuggagaaguacguggaggacaccaagaucgaccuguggagcuacaacgccgagcugcugguggcccuggagaaccagcacaccaucgaccugaccgacagcgagaugaacaagcuguucgagagaaccaagaagcagcugagagagaacgccgaggacaugggcaacggcugcuucaagaucuaccacaagugcgacaacgccugcaucggcagcaucagaaacggcaccuacgaccacgacguguacagagacgaggcccugaacaacagauuccagaucaagggcguggagcugaagagcggcuacaaggacuggauccuguggaucagcuucgccaucagcugcuuccugcugugcguggugcugcugggcuucaucaugugggccugccagaagggcaacaucagaugcaacaucugcaucuga

SEQ ID NO: 161795 - RNA, 1701 nt, Artificial Sequence; identical to SEQ ID NO: 161099
  derived and/or modified CDS sequence (opt4) from hemagglutinin__InfluenzaA__ABU80331

SEQ ID NO: 161796 - RNA, 1701 nt, Artificial Sequence
  derived and/or modified CDS sequence (opt4) from hemagglutinin__InfluenzaA__ABU80400
augaaggccauccugcuggugcugcuguacaccuucaccgccgccaacgccgacacccugugcaucggcuaccacgccaacaacagcaccgacaccguggacaccgugcuggagaagaacgugaccgugacccacagcgugaaccugcuggaggacagacacaacggcaagcugugcaagcugagaggcguggccccccugcaccugggcaagugcaacaucgccggcuggcugcugggcaaccccgagugcgagcugcuguucaccgccagcagcuggagcuacaucguggagaccagcaacagcgacaacggcaccugcuaccccggcgacuucaucaacuacgaggagcugagagagcagcugagcagcgugagcagcuucgagagauucgagaucuuccccaaggccagcagcuggcccaaccacgagaccaacagaggcgugaccgccgccugccccuacgccggcgccaacagcuucuacagaaaccugaucuggcuggugaagaagggcaacagcuaccccaagcugagcaagagcuacgugaacaacaaggagaaggaggugcuggugcuguggggcauccaccacccccccaccagcaccgaccagcagagccuguaccagaacgccgacgccuacguguucgugggcagcagcaaguacaacaagaaguucaagcccgagaucgccaccagacccaaggugagaggccaggccggcagaaugaacuacuacuggacccugguggagcccggcgacaccaucaccuucgaggccaccggcaaccugguggugcccagauacgccuucgccaugaagagaggcagcggcagcggcaucaucaucagcgacacccccgugcacgacugcaacaccaccugccagacccccaagggcgccaucaacaccagccugcccuuccagaacauccaccccgugaccaucggcgagugccccaaguacgugaagagcaccaagcugagaauggccaccggccugagaaacauccccagcauccagagcagaggccuguucggcgccaucgccggcuucaucgagggcggcuggaccggcaugaucgacggcugguacggcuaccaccaccagaacgagcagggcagcggcuacgccgccgacagaaagagcacccagaacgccaucgacggcaucaccaacaaggugaacagcgugaucgagaagaugaacacccaguucaccgccgugggcaaggaguucaaccaccuggagaagagaaucgagaaccugaacagaaagguggacgacggcuuccuggacaucuggaccuacaacgccgagcugcuggugcugcuggagaacgagagaacccuggacuaccacgacagcaacgugaagaaccuguacgagaaggugagaagccagcugaagaacaacgccaaggagaucggcaacggcugcuucgaguucuaccacaagugcgacgacaccugcauggagagcgugaagaacggcaccuacgacuaccccaaguacagcgaggagagcaagcugaacagagaggagaucgacggcgugaagcuggagagcaccagaaucuaccagauccuggccaucuacagcaccguggccagcagccuggugcugcuggugagccugggcgccaucagcuucuggaugugcagcaacggcagccugcagugcagaaucugcaucuga

SEQ ID NO: 161797 - RNA, 1701 nt, Artificial Sequence
  derived and/or modified CDS sequence (opt4) from hemagglutinin__InfluenzaA__ABU92572
augaagaccaucaucgcccugagcuacauccugugccugguguucacccagaagcugcccggcaacgacaacagcaccgccacccugugccugggccaccacgccgugcccaacggcacccuggugaagaccaucaccaacgaccagaucgaggugaccaacgccaccgagcuggugcagagcagcagcaccggcagaaucugcgacagcccccaccagauccuggacggcgagaacugcacccugaucgacgcccugcugggcgacccccacugcgacggcuuccagaacaaggagugggaccuguucguggagagaagcaaggccuacagcaacugcuaccccuacgacgugcccgacuacgugagccugagaagccugguggccagcagcggcacccuggaguucaacaacgagagcuucaacuggaccggcguggcccagaacggcaccagcagcgccugcaagagaagaagcgacaagagcuucuucagcagacugaacuggcugcaccagcugaaguacaaguaccccgcccugaacgugaccaugcccaacaacgagaaguucgacaagcuguacaucuggggcgugcaccaccccggcaccgacagcgaccagaucagccuguacgcccaggccagcggcagagugaccgugagcaccaagagaagccagcagaccgugauccccaacaucggcagcagacccugggugagaggcgugagcagcagaaucagcaucuacuggaccaucgugaagcccggcgacauccugcugaucaacagcaccggcaaccugaucgcccccagaggcuacuucaagaucagaagcggcaagagcagcaucaugagaagcgacgcccccaucggcaagugcaacagcgagugcaucacccccaacggcagcauccccaacgacaagcccuuccagaacgugaacagaaucaccuacggccccugccccagauacgugaagcagaacacccugaagcuggccaccggcaugagaaacgugcccgagaagcagaccagaggcaucuucggcgccaucgccggcuucaucgagaacggcugggagggcaugauggacggcugguacggcuucagacaccagaacagcgagggcaccggccaggccgccgaccugaagagcacccaggccgccaucaaccagaucaacggcaagcugaacagacugaucgagaagaccaacgagaaguuccaccagaucgagaaggaguucagcgagguggagggcagaauccaggaccuggagaaguacguggaggacaccaagaucgaccuguggagcuacaacgccgagcugcugguggcccuggagaaccagcacaccaucgaccugaccgacagcgagaugaacaagcuguucgagagaaccaagaagcagcugagagagaacgccgaggacaugggcaacggcugcuucaagaucuaccacaagugcgacaacgccugcaucggcagcaucagaaacggcaccuacgaccacgacguguacagagacgaggcccugaacaacagauuccagaucaagggcguggagcugaagagcggcuacaaggacuggauccuguggaucagcuucgccaucagcugcuuccugcugugcaucgugcugcugggcuucaucaugugggccugccagaagggcaacaucagaugcaacaucugcaucuga

SEQ ID NO: 161798 - RNA, 1701 nt, Artificial Sequence
  derived and/or modified CDS sequence (opt4) from hemagglutinin__InfluenzaA__ABU92573
augaagaccaucaucgcccugagcuacauccugugccugguguucgcccagaagcugcccggcaacgacaacagcaccgccacccugugccugggccaccacgccgugcccaacggcacccuggugaagaccaucaccaacgaccagaucgaggugaccaacgccaccgagcuggugcagagcagcagcaccggcagaaucugcgacagcccccaccagauccuggacggcgagaacugcacccugaucgacgcccugcugggcgacccccacugcgacggcuuccagaacaaggagugggaccuguucguggagagaagcaaggccuacagcaacugcuaccccuacgacgugcccgacuacgugagccugagaagccugguggccagcagcggcacccuggaguucaacaacgagagcuucaacuggaccggcguggcccagaacggcaccagcagcgccugcaagagaagaagcgacaagagcuucuucagcagacugaacuggcugcaccagcugaaguacaaguaccccgcccugaacgugaccaugcccaacaacgagaaguucgacaagcuguacaucuggggcgugcaccaccccggcaccgacagcgaccagaucagccuguacgcccaggccagcggcagagugaccgugagcaccaagagaagccagcagaccgugauccccaacaucggcagcagacccugggugagaggcgugagcagcagaaucagcaucuacuggaccaucgugaagcccggcgacauccugcugaucaacagcaccggcaaccugaucgcccccagaggcuacuucaagaucagaagcggcaagagcagcaucaugagaagcgacgcccccaucggcaagugcaacagcgagugcaucacccccaacggcagcauccccaacggcaagcccuuccagaacgugaacagaaucaccuacggcgccugccccagauacgugaagcagaacacccugaagcuggccaccggcaugagaaacgugcccgagaagcagaccagaggcaucuucggcgccaucgccggcuucaucgagaacggcugggagggcaugauggacggcugguacggcuucagacaccagaacagcgagggcaccggccaggccgccgaccugaagagcacccaggccgccaucaaccagaucaacggcaagcugaacagacugaucaagaagaccaacgagaaguuccaccagaucgagaaggaguucagcgagguggagggcagaauccaggaccuggagaaguacguggaggacaccaagaucgaccuguggagcuacaacgccgagcugcugguggcccuggagaaccagcacaccaucgaccugaccgacagcgagaugaacaagcuguucgagagaaccaagaagcagcugagagagaacgccgaggacaugggcaacggcugcuucaagaucuaccacaagugcgacaacgccugcaucggcagcaucagaaacggcaccuacgaccacgacguguacagagacgaggcccugaacaacagauuccagaucaagggcguggagcugaagagcggcuacaaggacuggauccuguggaucagcuucgccaucagcugcuuccugcugugcaucgugcugcugggcuucaucaugugggccugccagaagggcaacaucagaugcaacaucugcaucuga

SEQ ID NO: 161799 - RNA, 1701 nt, Artificial Sequence
  derived and/or modified CDS sequence (opt4) from hemagglutinin__InfluenzaA__ABU92575
augaagaccaucaucgcccugagcuacauccugugccugguguucgcccagaagcugcccggcaacgacaacagcaccgccacccugugccugggccaccacgccgugcccaacggcacccuggugaagaccaucaccaacgaccagaucgaggugaccaacgccaccgagcuggugcagagcagcagcaccggcagaaucugcgacagcccccaccagauccuggacggcgagaacugcacccugaucgacgcccugcugggcgacccccacugcgacggcuuccagaacaaggagugggaccuguucguggagagaagcaaggccuacagcaacugcuaccccuacgacgugcccgacuacgugagccugagaagccugguggccagcagcggcacccuggaguucaacaacgagagcuucaacuggaccggcguggcccagaacggcaccagcagcgccugcaagagaagaagcgacaagagcuucuucagcagacugaacuggcugcaccagcugaaguacaaguaccccgcccugaacgugaccaugcccaacaacgagaaguucgacaagcuguacaucuggggcgugcaccaccccggcaccgacagcgaccagaucagccuguacgcccaggccagcggcagagugaccgugagcaccaagagaagccagcagaccgugauccccaacaucggcagcaagcccugggugagaggcgugagcagcagaaucagcaucuacuggaccaucgugaagcccggcgacauccugcugaucaacagcaccggcaaccugaucgcccccagaggcuacuucaagaucagaagcggcaagagcagcaucaugagaagcgacgcccccaucggcaagugcaacagcgagugcaucacccccaacggcagcauccccaacgacaagcccuuccagaacgugaacagaaucaccuacggccccugccccagauacgugaagcagaacacccugaagcuggccaccggcaugagaaacgugcccgagaagcagaccagaggcaucuucggcgccaucgccggcuucaucgagaacggcugggagggcaugauggacggcugguacggcuucagacaccagaacagcgagggcaccggccaggccgccgaccugaagagcacccaggccgccaucaaccagaucaacggcaagcugaacagacugaucgagaagaccaacgagaaguuccaccagaucgagaaggaguucagcgagguggagggcagaauccaggaccuggagaaguacguggaggacaccaagaucgaccuguggagcuacaacgccgagcugcugguggcccuggagaaccagcacaccaucgaccugaccgacagcgagaugaacaagcuguucgagagaaccaagaagcagcugagagagaacgccgaggacaugggcaacggcugcuucaagaucuaccacaagugcgacaacgccugcaucggcagcaucagaaacggcaccuacgaccacgacguguacagagacgaggcccugaacaacagauuccagaucaagggcguggagcugaagagcggcuacaaggacuggauccuguggaucagcuucgccaucagcugcuuccugcugugcaucgugcugcugggcuucaucaugugggccugccagaagggcaacaucagaugcaacaucugcaucuga

SEQ ID NO: 161800 - RNA, 1701 nt, Artificial Sequence; identical to SEQ ID NO: 160111
  derived and/or modified CDS sequence (opt4) from hemagglutinin__InfluenzaA__ABU92576

SEQ ID NO: 161801 - RNA, 1701 nt, Artificial Sequence; identical to SEQ ID NO: 160111
  derived and/or modified CDS sequence (opt4) from hemagglutinin__InfluenzaA__ABU92577

SEQ ID NO: 161802 - RNA, 1701 nt, Artificial Sequence; identical to SEQ ID NO: 160132
  derived and/or modified CDS sequence (opt4) from hemagglutinin__InfluenzaA__ABU92578

SEQ ID NO: 161803 - RNA, 1701 nt, Artificial Sequence; identical to SEQ ID NO: 160132
  derived and/or modified CDS sequence (opt4) from hemagglutinin__InfluenzaA__ABU92579

SEQ ID NO: 161804 - RNA, 1701 nt, Artificial Sequence; identical to SEQ ID NO: 160132
  derived and/or modified CDS sequence (opt4) from hemagglutinin__InfluenzaA__ABU92580

SEQ ID NO: 161805 - RNA, 1701 nt, Artificial Sequence; identical to SEQ ID NO: 161797
  derived and/or modified CDS sequence (opt4) from hemagglutinin__InfluenzaA__ABU92581

SEQ ID NO: 161806 - RNA, 1701 nt, Artificial Sequence
  derived and/or modified CDS sequence (opt4) from hemagglutinin__InfluenzaA__ABU92582
augaagaccaucaucgcccugagcuacauccugugccugguguucgcccagaagcugcccggcaacgacaacagcaccgccacccugugccugggccaccacgccgugcccaacggcacccuggugaagaccaucaccaacgaccagaucgaggugaccaacgccaccgagcuggugcagagcagcagcaccggcagaaucugcgacagcccccaccagauccuggacggcgagaacugcacccugaucgacgcccugcugggcgacccccacugcgacggcuuccagaacaaggagugggaccuguucguggagagaagcaaggccuacagcaacugcuaccccuacgacgugcccgacuacgugagccugagaagccugguggccagcagcggcacccuggaguucaacaacgagagcuucaacuggaccggcguggcccagaacggcaccagcagcgccugcaagagaagaagcgacaagagcuucuucagcagacugaacuggcugcaccagcugaaguacaaguaccccgcccagaacgugaccaugcccaacaacgagaaguucgacaagcuguacaucuggggcgugcaccaccccggcaccgacagcgaccagaucagccuguacgcccaggccagcggcagagugaccgugagcaccaagagaagccagcagaccgugauccccaacaucggcagcagacccugggugagaggcgugagcagcagaaucagcaucuacuggaccaucgugaagcccggcgacauccugcugaucaacagcaccggcaaccugaucgcccccagaggcuacuucaagaucagaagcggcaagagcagcaucaugagaagcgacgcccccaucggcaagugcaacagcgagugcaucacccccaacggcagcauccccaacgacaagcccuuccagaacgugaacagaaucaccuacggcgccugccccagauacgugaagcagaacacccugaagcuggccaccggcaugagaaacgugcccgagaagcagaccagaggcaucuucggcgccaucgccggcuucaucgagaacggcugggagggcaugauggacggcugguacggcuucagacaccagaacagcgagggcaccggccaggccgccgaccugaagagcacccaggccgccaucaaccagaucaacggcaagcugaacagacugaucgagaagaccaacgagaaguuccaccagaucgagaaggaguucagcgagguggagggcagaauccaggaccuggagaaguacguggaggacaccaagaucgaccuguggagcuacaacgccgagcugcugguggcccuggagaaccagcacaccaucgaccugaccgacagcgagaugaacaagcuguucgagagaaccaagaagcagcugagagagaacgccgaggacaugggcaacggcugcuucaagaucuaccacaagugcgacaacgccugcaucggcagcaucagaaacggcaccuacgaccacgacguguacagagacgaggcccugaacaacagauuccagaucaagggcguggagcugaagagcggcuacaaggacuggauccuguggaucagcuucgccaucagcugcuuccugcugugcaucgugcugcugggcuucaucaugugggccugccagaagggcaacaucagaugcaacaucugcaucuga

SEQ ID NO: 161807 - RNA, 1701 nt, Artificial Sequence; identical to SEQ ID NO: 161806
  derived and/or modified CDS sequence (opt4) from hemagglutinin__InfluenzaA__ABU92583

SEQ ID NO: 161808 - RNA, 1701 nt, Artificial Sequence
  derived and/or modified CDS sequence (opt4) from hemagglutinin__InfluenzaA__ABU92584
augaagaccaucaucgcccugagcuacauccugugccugguguucgcccagaagcugcccggcaacgacaacagcaccgccacccugugccugggccaccacgccgugcccaacggcacccuggugaagaccaucaccaacgaccagaucgaggugaccaacgccaccgagcuggugcagagcagcagcaccggcagaaucugcgacagcccccaccagauccuggacggcgagaacugcacccugaucgacgcccugcugggcgacccccacugcgacggcuuccagaacaaggagugggaccuguucguggagagaagcaaggccuacagcaacugcuaccccuacgacgugcccgacuacgugagccugagaagccugguggccagcagcggcacccuggaguucaacaacgagagcuucaacuggaccggcguggcccagaacggcaccagcagcgccugcaagagaagaagcgacaagagcuucuucagcagacugaacuggcugcaccagcugagauacaaguaccccgcccugaacgugaccaugcccaacaacgagaaguucgacaagcuguacaucuggggcgugcaccaccccggcaccgacagcgaccagaucagccuguacgcccaggccagcggcagagugaccgugagcaccaagagaagccagcagaccgugauccccaacaucggcagcagacccugggugagaggcgugagcagcagaaucagcaucuacuggaccaucgugaagcccggcgacauccugcugaucaacagcaccggcaaccugaucgcccccagaggcuacuucaagaucagaagcggcaagagcagcaucaugagaagcgacgcccccaucggcaagugcaacagcgagugcaucacccccaacggcagcauccccaacgacaagcccuuccagaacgugaacagaaucaccuacggcgccugccccagauacgugaagcagaagacccugaagcuggccaccggcaugagaaacgugcccgagaagcagaccagaggcaucuucggcgccaucgccggcuucaucgagaacggcugggagggcaugauggacggcugguacggcuucagacaccagaacagcgagggcaccggccaggccgccgaccugaagagcacccaggccgccaucaaccagaucaacggcaagcugaacagacugaucgagaagaccaacgagaaguuccaccagaucgagaaggaguucagcgagguggagggcagaauccaggaccuggagaaguacguggaggacaccaagaucgaccuguggagcuacaacgccgagcugcugguggcccuggagaaccagcacaccaucgaccugaccgacagcgagaugaacaagcuguucgagagaaccaagaagcagcugagagagaacgccgaggacaugggcaacggcugcuucaagaucuaccacaagugcgacaacgccugcaucggcagcaucagaaacggcaccuacgaccacgacguguacagagacgaggcccugaacaacagauuccagaucaagggcguggagcugaagagcggcuacaaggacuggauccuguggaucagcuucgccaucagcugcuuccugcugugcaucgugcugcugggcuucaucaugugggccugccagaagggcaacaucagaugcaacaucugcaucuga

SEQ ID NO: 161809 - RNA, 1701 nt, Artificial Sequence
  derived and/or modified CDS sequence (opt4) from hemagglutinin__InfluenzaA__ABU92586
augaagaccaucaucgcccugagcuacauccugugccugguguucgcccagaagcugcccggcaacgacaacagcaccgccacccugugccugggccaccacgccgugcccaacggcaccaucgugaagaccaucaccaacgaccagaucgaggugaccaacgccaccgagcuggugcagagcagcagcaccggcggcaucugcgacagcccccaccagauccuggacggcgagaacugcacccugaucgacgcccugcugggcgacccccagugcgacggcuuccagaacaagaagugggaccuguucguggagagaagcaaggccuacagcaacugcuaccccuacgacgugcccgacuacgccagccugagaagccugaucgccagcagcggcacccuggaguucaacaacgagagcuucaacuggaccggcgugacccagaacggcaccagcagcgccugcaagagaagaagcaacagcagcuucuucagcagacugaacuggcugacccaccugaaguucaaguaccccgcccugaacgugaccaugcccaacaacgaggaguucgacaagcuguacaucuggggcgugcaccaccccggcaccgacaacgaccagaucagccuguacgcccaggccagcggcagaaucaccgugagcaccaagagaagccagcagaccgugauccccaacaucggcagcagacccagagugagagacauccccagcagaaucagcaucuacuggaccaucgugaagcccggcgacauccugcugaucaacagcaccggcaaccugaucgcccccagaggcuacuucaagaucagaagcggcaagagcagcaucaugagaagcgacgcccccaucggcaagugcaacagcgagugcaucacccccaacggcagcauccccaacgacaagcccuuccagaacgugaacagaaucaccuacggcgccugccccagauacgugaagcagaacacccugaagcuggccaccggcaugagaaacgugcccgagaagcagaccagaggcaucuucggcgccaucgccggcuucaucgagaacggcugggagggcaugguggacggcugguacggcuucagacaccagaacagcgagggcaucggccaggccgccgaccugaagagcacccaggccgccaucgaccagaucaacggcaagcugaacagacugaucggcaagaccaacgagaaguuccaccagaucgagaaggaguucagcgagguggagggcagaauccaggaccuggagaaguacguggaggacaccaagaucgaccuguggagcuacaacgccgagcugcugguggcccuggagaaccagcacaccaucgaccugaccgacagcgagaugaacaagcuguucgagagaaccaagaagcagcugagagagaacgccgaggacaugggcaacggcugcuucaagaucuaccacaagugcgacaacgccugcaucggcagcaucagaaacggcaccuacgaccacgacguguacagagacgaggcccugaacaacagauuccagaucaagggcguggagcugaagagcggcuacaagaacuggauccuguggaucagcuucgccaucagcugcuuccugcugugcguggcccugcugggcuucaucaugugggccugccagaagggcaacaucagaugcaacaucugcaucuga

SEQ ID NO: 161810 - RNA, 1701 nt, Artificial Sequence
  derived and/or modified CDS sequence (opt4) from hemagglutinin__InfluenzaA__ABU92587
augaagaccaucaucgcccugagcuacauccugugccugguguucgcccagaagcugcccggcaacgacaacagcaccgccacccugugccugggccaccacgccgugcccaacggcaccaucgugaagaccaucaccaacgaccagaucgaggugaccaacgccaccgagcuggugcagagcagcagcaccggcggcaucugcgacagcccccaccagauccuggacggcgagaacugcacccugaucgacgcccugcugggcgacccccagugcgacggcuuccagaacaagaagugggaccuguucguggagagaagcaaggccuacagcaacugcuaccccuacgacgugcccgacuacgccagccugagaagccugaucgccagcagcggcacccuggaguucaacaacgagagcuucaacuggaccggcgugacccagaacggcaccagcagcgccugcaagagaagaagcaacagcagcuucuucagcagacugaacuggcugacccaccugaaguucaaguaccccgcccugaacgugaccaugcccaacaacgaggaguucgacaagcuguacaucuggggcgugcaccaccccggcaccuacaacgaccagaucagccuguacgcccaggccagcggcagaaucaccgugagcaccaagagaagccagcagaccgccauccccaacaucggcagcagacccagagugagagacauccccagcagaaucagcaucuacuggaccaucgugaagcccggcgacauccugcugaucaacagcaccggcaaccugaucgcccccagaggcuacuucaagaucagaagcggcaagagcagcaucaugagaagcgacgcccccaucggcaagugcaacagcgagugcaucacccccaacggcagcauccccaacgacaagcccuuccagaacgugaacagaaucaccuacggcgccugccccagauacgugaagcagaacacccugaagcuggccaccggcaugagaaacgugcccgagaagcagaccagaggcaucuucggcgccaucgccggcuucaucgagaacggcugggagggcaugguggacggcugguacggcuucagacaccagaacagcgagggcaucggccaggccgccgaccugaagagcacccaggccgccaucgaccagaucaacggcaagcugaacagacugaucggcaagaccaacgagaaguuccaccagaucgagaaggaguucagcgagguggagggcagaauccaggaccuggagaaguacguggaggacaccaagaucgaccuguggagcuacaacgccgagcugcugguggcccuggagaaccagcacaccaucgaccugaccgacagcgagaugaacaagcuguucgagagaaccaagaagcagcugagagagaacgccgaggacaugggcaacggcugcuucaagaucuaccacaagugcgacaacgccugcaucggcagcaucagaaacggcaccuacgaccacgacguguacagagacgaggcccugaacaacagauuccagaucaagggcguggagcugaagagcggcuacaaggacuggauccuguggaucagcuucgccaucagcugcuuccugcugugcguggcccugcugggcuucaucaugugggccugccagaagggcaacaucagaugcaacaucugcaucuga

SEQ ID NO: 161811 - RNA, 1701 nt, Artificial Sequence
  derived and/or modified CDS sequence (opt4) from hemagglutinin__InfluenzaA__ABU92588
augaagaccaucaucgcccugagcuacauccugugccugguguucgcccagaagcugcccggcaacgacaacagcaccgccacccugugccugggccaccacgccgugcccaacggcaccaucgugaagaccaucaccaacgaccagaucgaggugaccaacgccaccgagcuggugcagagcagcagcaccggcggcaucugcgacagcccccaccagauccuggacggcgagaacugcacccugaucgacgcccugcugggcgacccccagugcgacggcuuccagaacaagaagugggaccuguucguggagagaagcaaggccuacagcaacugcuaccccuacgacgugcccgacuacgccagccugagaagccugguggccagcagcggcacccuggaguucaacaacgagagcuucaacuggaccggcgugacccagaacggcaccagcagcgccugcaagagaaagagcaacaacagcuucuucagcagacugaacuggcugacccaccugaaguucaaguaccccgcccugaacgugaccaugcccaacaacgagaaguucgacaagcuguacaucuggggcgugcaccaccccggcaccgacaacgaccagaucagccuguacgcccaggccagcggcagaaucaccgugagcaccaagagaagccagcagaccgugauccccaacaucggcagcagacccagagugagagacauccccagcagaaucagcaucuacuggaccaucgugaagcccggcgacauccugcugaucaacagcaccggcaaccugaucgcccccagaggcuacuucaagaucagaagcggcaagagcagcaucaugagaagcgacgcccccaucggcaagugcaacagcgagugcaucacccccaacggcagcauccccaacgacaagcccuuccagaacgugaacagaaucaccuacggcgccugccccagauacgugaagcagaacacccugaagcuggccaccggcaugagaaacgugcccgagaagcagaccagaggcaucuucggcgccaucgccggcuucaucgagaacggcugggagggcaugguggacggcugguacggcuucagacaccagaacagcgagggcaucggccaggccgccgaccugaagagcacccaggccgccaucaaccagaucaacggcaagcugaacagacugaucggcaagaccaacgagaaguuccaccagaucgagaaggaguucagcgagguggagggcagaauccaggaccuggagaaguacguggaggacaccaagaucgaccuguggagcuacaacgccgaguuccugguggcccuggagaaccagcacaccaucgaccugaccgacagcgagaugaacaagcuguucgagagaaccaagaagcagcugagagagaacgccgaggacaugggcaacggcugcuucaagaucuaccacaagugcgacaacgccugcaucggcagcaucagaaacggcaccuacgaccacgacguguacagagacgaggcccugaacaacagauuccagaucaagggcguggagcugaagagcggcuacaaggacuggauccuguggaucagcuucgccaucagcugcuuccugcugugcguggcccugcugggcuucaucaugugggccugccagaagggcaacaucagaugcaacaucugcaucuga

SEQ ID NO: 161812 - RNA, 1701 nt, Artificial Sequence; identical to SEQ ID NO: 160693
  derived and/or modified CDS sequence (opt4) from hemagglutinin__InfluenzaA__ABU92590

SEQ ID NO: 161813 - RNA, 1701 nt, Artificial Sequence
  derived and/or modified CDS sequence (opt4) from hemagglutinin__InfluenzaA__ABU92591
augaagaccaucaucgcccugagcuacauccugugccugguguucgcccagaagcugcccggcaacgacaacagcaccgccacccugugccugggccaccacgccgugcccaacggcaccaucgugaagaccaucaccaacgaccagaucgaggugaccaacgccaccgagcuggugcagagcagcagcaccggcggcaucugcgacagcccccaccagauccuggacggcgagaacugcacccugaucgacgcccugcugggcgacccccagugcgacggcuuccagaacaagaagugggaccuguucguggagagaagcaaggccuacagcaacugcuaccccuacgacgugcccgacuacgccagccugagaagccugaucgccagcagcggcacccuggaguucaacaacgagagcuucaacuggaccggcgugacccagaacggcaccagcagcgccugcaagagaagaagcaacagcagcuucuucagcagacugaacuggcugacccaccugaaguucaaguaccccgcccugaacgugaccaugcccaacaacgaggaguucgacaagcuguacaucuggggcgugcaccaccccggcaccgacaacgaccagaucagccuguacgcccaggccagcggcagaaucaccgugagcaccaagagaagccagcagaccgugauccccaacaucggcagcagacccagagugagagacauccccagcagaaucagcaucuacuggaccaucgugaagcccggcgacauccugcugaucaacagcaccggcaaccugaucgcccccagaggcuacuucaagaucagaagcggcaagagcagcaucaugagaagcgacgcccccaucggcaagugcaacagcgagugcaucacccccaacggcagcauccccaacgacaagcccuuccagaacgugaacagaaucaccuacggcgccugccccagauacgugaagcagaacacccugaagcuggccaccggcaugagaaacgugcccgagaagcagaccagaggcaucuucggcgccaucgccggcuucaucgagaacggcugggagggcaugguggacggcugguacggcuucagacaccagaacagcgagggcaucggccaggccgccgaccugaagagcacccaggccgccaucgaccagaucaacggcaagcugaacagacugaucggcaagaccaacgagaaguuccaccagaucgagaaggaguucagcgagguggagggcagaauccaggaccuggagaaguacguggaggacaccaagaucgaccuguggagcuacaacgccgagcugcugguggcccuggagaaccagcacaccaucgaccugaccgacagcgagaugaacaagcuguucgagagaaccaagaagcagcugagagagaacgccgaggacaugggcaacggcugcuucaagaucuaccacaagugcgacaacgccugcaucggcagcaucagaaacggcaccuacgaccacgacguguacagagacgaggcccugaacaacagauuccagaucaagggcguggagcugaagagcggcuacaaggacuggauccuguggaucagcuucgccaucagcugcuuccugcugugcguggcccugcugggcuucaucaugugggccugccagaagggcaacaucagaugcaacaucugcaucuga

SEQ ID NO: 161814 - RNA, 1701 nt, Artificial Sequence; identical to SEQ ID NO: 161813
  derived and/or modified CDS sequence (opt4) from hemagglutinin__InfluenzaA__ABU92592

SEQ ID NO: 161815 - RNA, 1701 nt, Artificial Sequence
  derived and/or modified CDS sequence (opt4) from hemagglutinin__InfluenzaA__ABU92593
augaagaccaucaucgcccugagcuacauccugugccugguguucgcccagaagcugcccggcaacgacaacagcaccgccacccugugccugggccaccacgccgugcccaacggcaccaucgugaagaccaucaccaacgaccagaucgaggugaccaacgccaccgagcuggugcagagcagcagcaccggcggcaucugcgacagcccccaccagauccuggacggcgagaacugcacccugaucgacgcccugcugggcgacccccagugcgacggcuuccagaacaagaagugggaccuguucguggagagaagcaaggccuacagcaacugcuaccccuacgacgugcccgacuacgccagccugagaagccugguggccagcagcggcacccuggaguucaacaacgagagcuucaacuggaccggcgugacccagaacggcaccagcagcgccugcaagagaagaagcaacaacagcuucuucagcagacugaacuggcugacccaccugaaguucaaguaccccgcccugaacgugaccaugcccaacaacgagaaguucgacaagcuguacaucuggggcgugcaccaccccggcaccgacaacgaccagaucuuccuguacgcccaggccagcggcagaaucaccgugagcaccaagagaagccagcagaccgugauccccaacaucggcagcagacccagagugagaaacauccccagcagaaucagcaucuacuggaccaucgugaagcccggcgacauccugcugaucaacagcaccggcaaccugaucgcccccagaggcuacuucaagaucagaagcggcaagagcagcaucaugagaagcgacgcccccaucggcaagugcaacagcgagugcaucacccccaacggcagcauccccaacgacaagcccuuccagaacgugaacagaaucaccuacggcgccugccccagauacgugaagcagaacacccugaagcuggccaccggcaugagaaacgugcccgagaagcagaccagaggcaucuucggcgccaucgccggcuucaucgagaacggcugggagggcaugguggacggcugguacggcuucagacaccagaacagcgagggcaucggccaggccgccgaccugaagagcacccaggccgccaucgaccagaucaacggcaagcugaacagacugaucggcaagaccaacgagaaguuccaccagaucgagaaggaguucagcgagguggagggcagaauccaggaccuggagaaguacguggaggacaccaagaucgaccuguggagcuacaacgccgagcugcugguggcccuggagaaccagcacaccaucgaccugaccgacagcgagaugaacaagcuguucgagaagaccaagaagcagcugagagagaacgccgaggacaugggcaacggcugcuucaagaucuaccacaagugcgacaacgccugcaucggcagcaucagaaacggcaccuacgaccacgacguguacagagacgaggcccugaacaacagauuccagaucaagggcguggagcugaagagcggcuacaaggacuggauccuguggaucagcuucgccaucagcugcuuccugcugugcguggcccugcugggcuucaucaugugggccggccagaagggcaacaagagaugcaacaucugcaucuga

SEQ ID NO: 161816 - RNA, 1701 nt, Artificial Sequence
  derived and/or modified CDS sequence (opt4) from hemagglutinin__InfluenzaA__ABU92594
augaagaccaucaucgcccugagcuacauccugugccugguguucgcccagaagcugcccggcaacgacaacagcaccgccacccugugccugggccaccacgccgugcccaacggcaccaucgugaagaccaucaccaacgaccagaucgaggugaccaacgccaccgagcuggugcagagcagcagcaccggcgagaucugcaacagcccccaccagauccuggacggcgagagcugcacccugaucgacgcccugcugggcgacccccagugcgacggcuuccagaacaagaagugggaccuguucguggagagaagcaaggccuacagcaacugcuaccccuacgacgugcccgacuacgccagccugagaagccugguggccagcagcggcacccuggaguucaacaacgagagcuucaacuggaccggcgugacccagaacggcaccagcagcgccugcaagagaagaagcaacaacagcuucuucagcagacugaacuggcugacccaccugaaguucaaguaccccgcccugaacgugaccaugcccaacaacgagaaguucgacaagcuguacaucuggggcgugcaccaccccggcaccgacaacgaccagaucuuccuguacgcccaggccagcggcagaaucaccgugagcaccaagagaagccagcagaccgugauccccaacaucggcagcagacccagagugagaaacauccccagcagaaucagcaucuacuggaccaucgugaagcccggcgacauccugcugaucaacagcaccggcaaccugaucgcccccagaggcuacuucaagaucagaagcggcaagagcagcaucaugagaagcgacgcccccaucggcaagugcaacagcgagugcaucacccccaacggcagcauccccaacgacaagcccuuccagaacgugaacagaaucaccuacggcgccugccccagauacgugaagcagaacacccugaagcuggccaccggcaugagaaacgugcccgagaagcagaccagaggcaucuucggcgccaucgccggcuucaucgagaacggcugggagggcaugguggacggcugguacggcuucagacaccagaacagcgagggcaucggccaggccgccgaccugaagagcacccaggccgccaucaaccagaucaacggcaagcugaacagacugaucggcaagaccaacgagaaguuccaccagaucgagaaggaguucagcgagguggagggcagaauccaggaccuggagaaguacguggaggacaccaagaucgaccuguggagcuacaacgccgagcugcugguggcccuggagaaccagcacaccaucgaccugaccgacagcgagaugaacaagcuguucgagagaaccaagaagcagcugagagagaacgccgaggacaugggcaacggcugcuucaagaucuaccacaagugcgacaacgccugcaucggcagcaucagaaacggcaccuacgaccacgacguguacagagacgaggcccugaacaacagauuccagaucaagggcguggagcugaagagcggcuacaaggacuggauccuguggaucagcuucgccaucagcugcuuccugcugugcguggcccugagcggcuucaucaugugggccugccagaagggcaacaucagaugcaacaucugcaucuga

SEQ ID NO: 161817 - RNA, 1701 nt, Artificial Sequence
  derived and/or modified CDS sequence (opt4) from hemagglutinin__InfluenzaA__ABU92595
augaagaccaucaucgcccugagcuacauccugugccugguguucgcccagaagcugcccgagaacgacaacagcaccgccacccugugccugggccaccacgccgugcccaacggcaccaucgugaagaccaucaccaacgaccagaucgaggugaccaacgccaccgagcuggugcagagcagcagcaccggcggcaucugcgacagcccccaccagauccuggacggcgagaacugcacccugaucgacgcccugcugggcgacccccagugcgacggcuuccagaacaagaagugggaccuguucguggagagaagcaaggccuacagcaacugcuaccccuacgacgugcccgacuacgccagccugagaagccugguggccagcagcggcacccuggaguucaacaacgagagcuucaacuggaccggcgugacccagaacggcaccagcagcgccugcaagagaagaagcaacaacagcuucuucagcagacugaacuggcugacccaccugaaguucaaguaccccgcccugaacgugaccaugcccaacaacgagaaguucgacaagcuguacaucuggggcgugcaccaccccggcaccgacaacgaccagaucuuccuguacgcccaggccagcggcagaaucaccgugagcaccaagagaagccagcagaccgugauccccaacaucggcagcagacccagagugagaaacauccccagcagaaucagcaucuacuggaccaucgugaagcccggcgacauccugcugaucaacagcaccggcaaccugaucgcccccagaggcuacuucaagaucagaagcggcaagagcagcaucaugagaagcgacgcccccaucggcaagugcaacagcgagugcaucacccccaacggcagcauccccaacgacaagcccuuccagaacgugaacagaaucaccuacggcgccugccccagauacgugaagcagaacacccugaagcuggccaccggcaugagaaacgugcccgagaagcagaccagaggcaucuucggcgccaucgccggcuucaucgagaacggcugggagggcaugguggacggcugguacggcuucagacaccagaacagcgagggcaucggccaggccgccgaccugaagagcacccaggccgccaucgaccagaucaacggcaagcugaacagacugaucggcaagaccaacgagaaguuccaccagaucgagaaggaguucagcgagguggagggcagaauccaggaccuggagaaguacguggaggacaccaagaucgaccuguggagcuacaacgccgagcugcugguggcccuggagaaccagcacaccaucgaccugaccgacagcgagaugaacaagcuguucgagaagaccaagaagcagcugagagagaacgccgaggacaugggcaacggcugcuucaagaucuaccacaagugcgacaacgccugcaucggcagcaucagaaacggcaccuacgaccacgacguguacagagacgaggcccugaacaacagauuccagaucaagggcguggagcugaagagcggcuacaaggacuggauccuguggaucagcuucgccaucagcugcuuccugcugugcguggcccugcugggcuucaucaugugggccugccagaagggcaacaucagaugcaacaucugcaucuga

SEQ ID NO: 161818 - RNA, 1701 nt, Artificial Sequence
  derived and/or modified CDS sequence (opt4) from hemagglutinin__InfluenzaA__ABU92596
augaagaccaucaucgcccugagcuacauccugugccugguguucgcccagaagcugcccggcaacgacaacagcaccgccacccugugccugggccaccacgccgugcccaacggcaccauggugaagaccaucaccaacgaccagaucgaggugaccaacgccaccgagcuggugcagagcagcagcaccggcgagaucugcgacagcccccaccagauccuggacggcgagaacugcacccugaucgacgcccugcugggcgacccccagugcgacggcuuccagaacaagaagugggaccuguucguggagagaagcaaggcccacagcaacugcuaccccuacgacgugcccgacuacgccagccugagaagccugaucgccagcagcggcacccuggaguucaacaacgagagcuucaacuggaccggcgugacccagaacggcaccagcagcgccugcaagagaagaagcgacaacagcuucuucagcagacugaacuggcugacccaccugaaguucaaguaccccgcccugaacgugaccaugcccaacaacgaggaguucgacaagcuguacaucuggggcgugcaccaccccggcaccgacaacgaccagaucagccuguacgcccaggccagcggcagaaucaccgugagcaccaagagaagccagcagaccgugauccccaacaucggcagcagacccagagugagagacauccccagcagaaucagcaucuacuggaccaucgugaagcccggcgacauccugcugaucaacagcaccggcaaccugaucgcccccagaggcuacuucaagaucagaagcggcaagagcagcaucaugagaagcgacgcccccaucggcaagugcaacagcggcugcaucacccccaacggcagcauccccaacgacaagcccuuccagaacgugaacagaaucaccuacggcgccugccccagauacgugaagcagaacacccugaagcuggccaccggcaugagaaacgugcccgagaagcagaccagaggcaucuucggcgccaucgccggcuucaucgagaacggcugggagggcaugguggacggcugguacggcuucagacaccagaacagcgagggcaucggccaggccgccgaccugaagagcacccaggccgccaucgaccagaucaacggcaagcugaacagacugaucggcaagaccaacgagaaguuccaccagaucgagaaggaguucagcgagguggagggcagaauccaggaccuggagaaguacguggaggacaccaagaucgaccuguggagcuacaacgccgagcugcugguggcccuggagaaccagcacaccaucgaccugaccgacagcgagaugaacaagcuguucgagagaaccaagaagcagcugagagagaacgccgaggacaugggcaacggcugcuucaagaucuaccacaagugcgacaacgccugcaucggcagcaucagaaacggcaccuacgaccacgacguguacagagacgaggcccugaacaacagauuccagaucaagggcguggagcugaagagcggcuacaaggacuggauccuguggaucagcuucgccaucagcugcuuccugcugugcguggcccugcugggcuucaucaugugggccugccagaagggcaacaucagaugcaacaucugcaucuga

SEQ ID NO: 161819 - RNA, 1701 nt, Artificial Sequence; identical to SEQ ID NO: 160690
  derived and/or modified CDS sequence (opt4) from hemagglutinin__InfluenzaA__ABU92597

SEQ ID NO: 161820 - RNA, 1701 nt, Artificial Sequence; identical to SEQ ID NO: 160133
  derived and/or modified CDS sequence (opt4) from hemagglutinin__InfluenzaA__ABU92601

SEQ ID NO: 161821 - RNA, 1701 nt, Artificial Sequence; identical to SEQ ID NO: 160133
  derived and/or modified CDS sequence (opt4) from hemagglutinin__InfluenzaA__ABU92602

SEQ ID NO: 161822 - RNA, 1701 nt, Artificial Sequence
  derived and/or modified CDS sequence (opt4) from hemagglutinin__InfluenzaA__ABU92603
augaagaccaucaucgcccugagcuacauccugugccugguguucgcccagaagcugcccggcaacgacaacagcaccgccacccugugccugggccaccacgccgugcccaacggcaccaucgugaagaccaucaccaacgaccagaucgaggugaccaacgccaccgagcuggugcagaucagcagcaccggcgagaucugcgacagcccccaccagauccuggacggcgagaacugcacccugaucgacgcccugcugggcgacccccagugcgacggcuuccagaacaagaagugggaccuguucguggagagaagcaaggccuacagcaacugcuaccccuacgacgugcccgacuacgccagccugagaagccugguggccagcagcggcacccuggaguucaacaacgagagcuucgacuggaccggcgugacccagaacggcaccagcagcgccugcaagagaagaagcgacaagagcuucuucagcagacugaacuggcugacccaccugaaguacaaguaccccgcccugaacgugaccaugcccaacaacgagaaguucgacaagcuguacaucuggggcgugcaccaccccggcaccgacagcgaccagaucagccuguacgcccaggccagcggcagaaucaccgugagcaccaagagaagccagcagaccgugauccccaacaucggcagcagacccagagugagagacgugagcagcagaaucagcaucuacuggaccaucgugaagcccggcgacauccugcugaucaacagcaccggcaaccugaucgcccccagaggcuacuucaagaucagaagcggcaagagcagcaucaugagaagcgacgcccccaucggcaagugcaacagcgagugcaucacccccaacggcagcauccccaacgacaagcccuuccagaacgugaacagaaucaccuacggcgccugccccagauacgugaagcagaacacccugaagcuggccaccggcaugagaaacgugcccgagaagcagaccagaggcaucuucggcgccaucgccggcuucaucgagaacggcugggagggcaugguggacggcugguacggcuucagacaccagaacagcgagggcaccggccaggccgccgaccugaagagcacccaggccgccaucaaccagaucaacggcaagcugaacagacugaucggcaagaccaacgagaaguuccaccagaucgagaaggaguucagcgagguggagggcagaauccaggaccuggagaaguacguggaggacaccaagaucgaccuguggagcuacaacgccgagcugcugguggcccuggagaaccagcacaccaucgaccugaccgacagcgagaugaacaagcuguucgagagaaccaagaagcagcugagagagaacgccgaggacaugggcaacggcugcuucaagaucuaccacaagugcgacaacgccugcaucggcagcaucagaaacggcaccuacgaccacgacguguacagagacgaggcccugaacaacagauuccagaucaagggcguggagcugaagagcggcuacaaggacuggauccuguggaucagcuucgccaucagcugcuuccugcugugcguggcccugcugggcuucaucaugugggccugccagaagggcaacaucagaugcaacaucugcaucuga

SEQ ID NO: 161823 - RNA, 1701 nt, Artificial Sequence; identical to SEQ ID NO: 160133
  derived and/or modified CDS sequence (opt4) from hemagglutinin__InfluenzaA__ABU92604

SEQ ID NO: 161824 - RNA, 1701 nt, Artificial Sequence; identical to SEQ ID NO: 161822
  derived and/or modified CDS sequence (opt4) from hemagglutinin__InfluenzaA__ABU92605

SEQ ID NO: 161825 - RNA, 1701 nt, Artificial Sequence; identical to SEQ ID NO: 161822
  derived and/or modified CDS sequence (opt4) from hemagglutinin__InfluenzaA__ABU92606

SEQ ID NO: 161826 - RNA, 1701 nt, Artificial Sequence; identical to SEQ ID NO: 160672
  derived and/or modified CDS sequence (opt4) from hemagglutinin__InfluenzaA__ABU92608

SEQ ID NO: 161827 - RNA, 1701 nt, Artificial Sequence; identical to SEQ ID NO: 160672
  derived and/or modified CDS sequence (opt4) from hemagglutinin__InfluenzaA__ABU92609

SEQ ID NO: 161828 - RNA, 1701 nt, Artificial Sequence
  derived and/or modified CDS sequence (opt4) from hemagglutinin__InfluenzaA__ABU92610
augaagaccaucaucgcccugagcuacauccugugccugguguucgcccagaagcugcccggcaacgacaacagcaccgccacccugugccugggccaccacgccgugcccaacggcaccaucgugaagaccaucaccaacgaccagaucgaggugaccaacgccaccgagcuggugcagagcagcagcaccggcgagaucugcgacagcccccaccagauccuggacggcgagaacugcacccugaucgacgcccugcugggcgacccccagugcgacggcuuccagaacaagaagugggaccuguucguggagagaagcaaggccuacagcaacugcuaccccuacgacgugcccgacuacgccagccugagaagccugguggccagcagcggcacccuggaguucaacaacgagagcuucaacuggaccggcgugacccagaacggcaccagcagcgccugcaagagaagaagcaacaacagcuucuucagcagacugaacuggcugacccacagcaaguucaaguaccccgcccugaacgugaccaugcccaacaacgagaaguucgacaagcuguacaucuggggcgugcaccaccccggcaccgacaacgaccagaucuuccuguacgcccaggccagcggcagaaucaccgugagcaccaagagaagccagcagaccgugauccccaacaucggcagcagacccagagugagaaacauccccagcagaaucagcaucuacuggaccaucgugaagcccggcgacauccugcugaucaacagcaccggcaaccugaucgcccccagaggcuacuucaagaucagaagcggcaagagcagcaucaugagaagcgacgcccccaucggcaagugcaacagcgagugcaucacccccaacggcagcauccccaacgacaagcccuuccagaacgugaacagaaucgccuacggcgccugccccagauacgugaagcagaacacccugaagcuggccaccggcaugagaaacgugcccgagaagcagaccagaggcaucuucggcgccaucgccggcuucaucgagaacggcugggagggcaugguggacggcugguacggcuucagacaccagaacagcgagggcaucggccaggccgccgaccugaagagcacccaggccgccaucaaccagaucaacggcaagcugaacagacugaucggcaagaccaacgagaaguuccaccagaucgagaaggaguucagcgagguggagggcagaauccaggaccuggagaaguacguggaggacaccaagaucgaccuguggagcuacaacgccgagcugcugguggcccuggagaaccagcacaccaucgaccugaccgacagcgagaugaacaagcuguucgagagaaccaagaagcagcugagagagaacgccgaggacaugagcaacggcugcuucaagaucuaccacaagugcgacaacgccugcaucggcagcaucagaaacggcaccuacgaccacgacguguacagagacgaggcccugaacaacagauuccagaucaagggcguggagcugaagagcggcuacaaggacuggauccuguggaucagcuucgccaucagcugcuuccugcugugcguggugcugcugggcuucaucaugugggccugccagaagggcaacaucagaugcaacaucugcaucuga

SEQ ID NO: 161829 - RNA, 1701 nt, Artificial Sequence
  derived and/or modified CDS sequence (opt4) from hemagglutinin__InfluenzaA__ABU92611
augaagaccaucaucgcccugagcuacauccugugccugguguucgcccagaagcugcccggcaacgacaacagcaccgccacccugugccugggccaccacgccgugcccaacggcaccaucgugaagaccaucaccaacgaccagaucgaggugaccaacgccaccgagcuggugcagagcagcagcaccggcggcaucugcgacagcccccaccagauccuggacggcgagaacugcacccugaucgacgcccugcugggcgacccccagugcgacggcuuccagaacaagaagugggaccuguucguggagagaagcaaggccuacagcaacugcuaccccuacgacgugcccgacuacgccagccugagaagccugaucgccagcagcggcacccuggaguucaacaacgagagcuucaacuggaccggcgugacccagaacggcaccagcagcgccugcaagagaagaagcaacaacagcuucuucagcagacugaacuggcugacccaccugaaguucaaguaccccgcccugaacgugaccaugcccaacaacgaggaguucgacaagcuguacaucuggggcgugcaccaccccggcaccgacaacgaccagaucagccuguacgcccaggccagcggcaagaucaccgugagcaccaagagaagccagcagaccgugauccccaacaucggcagcagacccagagugagagacauccccagcagaaucagcaucuacuggaccaucgugaagcccggcgacauccugcugaucaacagcaccggcaaccugaucgcccccagaggcuacuucaagaucagaagcggcaagagcagcaucaugagaagcgacgcccccaucggcaagugcaacagcgagugcaucacccccaacggcagcauccccaacgacaagcccuuccagaacgugaacagaaucaccuacggcgccugccccagauacgugaagcagaacacccugaagcuggccaccggcaugagaaacgugcccgagaagcagaccagaggcaucuucggcgccaucgccggcuucaucgagaacggcugggagggcaugguggacggcugguacggcuucagacaccagaacagcgagggcaucggccaggccgccgaccugaagagcacccaggccgccaucgaccagaucaacggcaagcugaacagacugaucggcaagaccaacgagaaguuccaccagaucgagaaggaguucagcgagguggagggcagaauccaggaccuggagaaguacguggaggacaccaagaucgaccuguggagcuacaacgccgagcugcugguggcccuggagaaccagcacaccaucgaccugaccgacagcgagaugaacaagcuguucgagagaaccaagaagcagcugagagagaacgccgaggacaugggcaacggcugcuucaagaucuaccacaagugcgacaacgccugcaucggcagcaucagaaacggcaccuacgaccacgacguguacagagacgaggcccugaacaacagauuccagaucaagggcguggagcugaagagcggcuacaaggacuggauccuguggaucagcuucgccaucagcugcuuccugcugugcguggcccugcugggcuucaucaucugggccugccugaagggcaacaucagaugcaacaucugcaucuga

SEQ ID NO: 161830 - RNA, 1701 nt, Artificial Sequence
  derived and/or modified CDS sequence (opt4) from hemagglutinin__InfluenzaA__ABU92612
augaagaccaucaucgcccugagcuacauccugugccugguguucgcccagaagcugcccggcaacgacaacagcaccgccacccugugccugggccaccacgccgugcccaacggcaccauggugaagaccaucaccaacgaccagaucgaggugaccaacgccaccgagcuggugcagagcagcagcaccggcggcaucugcgacagcccccaccagauccuggacggcgagaacugcacccugaucgacgcccugcugggcgacccccagugcgacggcuuccagaacaagaagugggaccuguucguggagagaagcaaggcccacagcaacugcuaccccuacgacgugcccgacuacgccagccugagaagccugguggccagcagcggcacccuggaguucaacaacgagagcuucaacuggaccggcgugacccagaacggcaccagcagcgccugcaagagaagaagcaacaacagcuucuucagcagacugaacuggcugacccaccugaaguucaaguaccccgcccugaacgugaccaugcccaacaacgagaaguucgacaagcuguacaucuggggcgugcaccaccccggcaccgacaacgaccagaucagccuguacgcccaggccagcggcagaaucaccgugagcaccaagagaagccagcagaccgugauccccaacaucggcagcagacccagagugagagacauccccagcagaaucagcaucuacuggaccaucgugaagcccggcgacauccugcugaucaacagcaccggcaaccugaucgcccccagaggcuacuucaagaucagaagcggcaagagcagcaucaugagaagcgacgcccccaucggcaagugcaacagcgagugcaucacccccaacggcagcauccccaacaacaagcccuuccagaacgugaacagaaucaccuacggcgccugccccagauacgugaagcagaacacccugaagcuggccaccggcaugagaaacgugcccgagaagcagaccagaggcaucuucggcgccaucgccggcuucaucgagaacggcugggagggcaugguggacggcugguacggcuucagacaccagaacagcgagggcaucggccaggccgccgaccugaagagcacccaggccgccaucaaccagaucaacggcaagcugaacagacugaucggcaagaccaacgagaaguuccaccagaucgagaaggaguucagcgagguggagggcagaauccaggaccuggagaaguacguggaggacaccaagaucgaccuguggagcuacaacgccgagcugcugguggcccuggagaaccagcacaccaucgaccugaccgacagcgagaugaacaagcuguucgagagaaccaagaagcagcugagagagaacgccgaggacaugggcaacggcugcuucaagaucuaccacaagugcgacaacgccugcaucggcagcaucagaaacggcaccuacgaccacgacguguacagagacgaggcccugaacaacagauuccagaucaagggcguggagcugaagagcggcuacaaggacuggauccuguggaucagcuucgccaucagcugcuuccugcugugcguggcccugcugggcuucaucaugugggccugccagaagggcaacaucagaugcaacaucugcaucuga

SEQ ID NO: 161831 - RNA, 1701 nt, Artificial Sequence; identical to SEQ ID NO: 161318
  derived and/or modified CDS sequence (opt4) from hemagglutinin__InfluenzaA__ABU92613

SEQ ID NO: 161832 - RNA, 1701 nt, Artificial Sequence; identical to SEQ ID NO: 161817
  derived and/or modified CDS sequence (opt4) from hemagglutinin__InfluenzaA__ABU92614

SEQ ID NO: 161833 - RNA, 1701 nt, Artificial Sequence
  derived and/or modified CDS sequence (opt4) from hemagglutinin__InfluenzaA__ABU92615
augaagaccaucaucgcccugagcuacauccugugccugguguucgcccagaagcugcccggcaacgacaacagcaccgccacccugugccugggccaccacgccgugcccaacggcaccaucgugagaaccaucaccaacgaccagaucgaggugaccaacgccaccgagcuggugcagagcagcagcaccggcggcaucugcgacagcccccaccagauccuggacggcgagaacugcacccugaucgacgcccugcugggcgacccccagugcgacggcuuccagaacaagaagugggaccuguucguggagagaagcaaggccuacagcaacugcuaccccuacgacgugcccgacuacgccagccugagaagccugguggccagcagcggcacccuggaguucaacaacgagagcuucaacuggaccggcgugacccagaacggcaccagcagcgccugcaagagaagaagcaacaacagcuucuucagcagacugaacuggcugacccaccugaaguucaaguaccccgcccugaacgugaccaugcccaacaacgagaaguucgacaagcuguacaucuggggcgugcaccaccccggcaccgacaacgaccagaucagccuguacgcccaggccagcggcagaaucaccgugagcaccaagagaagccagcagaccgugauccccaacgugggcagcagacccagagugagagacauccccagcagaaucagcaucuacuggaccaucgugaagcccggcgacauccugcugaucaacagcaccggcaaccugaucgcccccagaggcuacuucaagaucagaagcggcaagagcagcaucaugagaagcgacgcccccaucggcaagugcaacagcgagugcaucacccccaacggcagcauccccaacgacaagcccuuccagaacgugaacagaaucaccuacggcgccugccccagauacgugaagcagaacacccugaagcuggccaccggcaugagaaacgugcccgagaagcagaccagaggcaucuucggcgccaucgccggcuucaucgagaacggcugggagggcaugguggacggcugguacggcuucagacaccagaacagcgagggcaucggccaggccgccgaccugaagagcacccaggccgccaucaaccagaucaacggcaagcugaacagacugaucggcaagaccaacgagaaguuccaccagaucgagaaggaguucagcgagguggagggcagaauccaggaccuggagaaguacguggaggacaccaagaucgaccuguggagcuacaacgccgagcugcugguggcccuggagaaccagcacaccaucgaccugaccgacagcgagaugaacaagcuguucgagagaaccaagaagcagcugagagagaacgccgaggacaugggcaacggcugcuucaagaucuaccacaagugcgacaacgccugcaucggcagcaucagaaacggcaccuacgaccacgacguguacagagacgaggcccugaacaacagauuccagaucaagggcguggagcugaagagcggcuacaaggacuggauccuguggaucagcuucgccaucagcugcuuccugcugugcguggcccugcugggcuucaucaugugggccugccagaagggcaacaucagaugcaacaucugcaucuga

SEQ ID NO: 161834 - RNA, 1701 nt, Artificial Sequence
  derived and/or modified CDS sequence (opt4) from hemagglutinin__InfluenzaA__ABU92617
augaagaccaucaucgcccugagcuacauccugugccugguguucgcccagaagcugcccggcaacgacaacagcaccgccacccugugccugggccaccacagcgugcccaacggcaccaucgugaagaccaucaccaacgaccagaucgaggugaccaacgccaccgagcuggugcagagcagcagcaccggcggcaucugcgacagcccccaccagauccuggacggcgagaacugcacccugaucgacgcccugcugggcgacccccagugcgacggcuuccagaacaagaagugggaccuguucguggagagaagcaaggccuacagcaacugcuaccccuacgacgugcccgacuacgccagccugagaagccugaucgccagcagcggcacccuggaguucaacaacgagagcuucaacuggaccggcgugacccagaacggcaccagcagcgccugcaagagaagaagcaacagcagcuucuucagcagacugaacuggcugacccaccugaaguucaaguaccccgcccugaacgugaccaugcccaacaacgaggaguucgacaagcuguacaucuggggcgugcaccaccccggcaccgacaacgaccagaucagccuguacgcccaggccagcggcagaaucaccgugagcaccaagagaagccagcagaccgugauccccaacaucggcagcagacccagagugagagacauccccagcagaaucagcaucuacuggaccaucgugaagcccggcgacauccugcugaucaacagcaccggcaaccugaucgcccccagaggcuacuucaagaucagaagcggcaagagcagcaucaugagaagcgacgcccccaucggcaagugcaacagcgagugcaucacccccaacggcagcauccccaacgacaagcccuuccagaacgugaacagaaucaccuacggcgccugccccagauacgugaagcagaacacccugaagcuggccaccggcaugagaaacgugcccgagaagcagaccagaggcaucuucggcgccaucgccggcuucaucgagaacggcugggagggcaugguggacggcugguacggcuucagacaccagaacagcgagggcaucggccaggccgccgaccugaagagcacccaggccgccaucgaccagaucaacggcaagcugaacagacugaucggcaagaccaacgagaaguuccaccagaucgagaaggaguucagcgagguggagggcagaauccaggaccuggagaaguacguggaggacaccaagaucgaccuguggagcuacaacgccgagcugcugguggcccuggagaaccagcacaccaucgaccugaccgacagcgagaugaacaagcuguucgagagaaccaagaagcagcugagagagaacgccgaggacaugggcaacggcugcuucaagaucuaccacaagugcgacaacgccugcaucggcagcaucagaaacggcaccuacgaccacgacguguacagagacgaggcccugaacaacagauuccagaucaagggcguggagcugaagagcggcuacaaggacuggauccuguggaucagcuucgccaucagcugcuuccugcugugcguggcccugcugggcuucaucaugugggccugccagaagggcaacaucagaugcaacaucugcaucuga

SEQ ID NO: 161835 - RNA, 1701 nt, Artificial Sequence; identical to SEQ ID NO: 161318
  derived and/or modified CDS sequence (opt4) from hemagglutinin__InfluenzaA__ABU92619

SEQ ID NO: 161836 - RNA, 1701 nt, Artificial Sequence; identical to SEQ ID NO: 161817
  derived and/or modified CDS sequence (opt4) from hemagglutinin__InfluenzaA__ABU92620

SEQ ID NO: 161837 - RNA, 1701 nt, Artificial Sequence
  derived and/or modified CDS sequence (opt4) from hemagglutinin__InfluenzaA__ABU92622
augaagaccaucaucgcccugagcuacauccugugccugguguucgcccagaagcugcccggcaacgacaacagcaccgccacccugugccugggccaccacgccgugcccaacggcaccaucgugaagaccaucaccaacgaccagaucgaggugaccaacgccaccgagcuggugcagagcagcagcaccggcggcaucugcgacagcccccaccagauccuggacggcgagaacugcacccugaucgacgcccugcugggcgacccccagugcgacggcuuccagaacaagaagugggaccuguucguggagagaagcaaggccuacagcaacugcuaccccuacgacgugcccgacuacgccagccugagaagccugaucgccagcagcggcacccuggaguucaacaacgagagcuucaacuggaccggcgugacccagaacggcaccagcagcgccugcaagagaagaagcaacagcagcuucuucagcagacugaacuggcugacccaccugaaguucaaguaccccgcccugaacgugaccaugcccaacaacgaggaguucgacaagcuguacaucuggggcgugcaccaccccggcaccgacaacgaccagaucagccuguacgcccaggccagcggcagaaucaccgugagcaccaagagaagccagcagaccgugauccccaacaucggcagcagacccagagugagagacauccccagcagaaucagcaucuacuggaccaucgugaagcccggcgacauccugcugaucaacagcaccggcaaccugaucgcccccagaggcuacuucaagaucagaagcggcaagagcagcaucaugagaagcgacgcccccaucggcaagugcaacagcgagugcaucacccccaacggcagcauccccaacgacaagcccuuccagaacgugaacagaaucaccuacggcgccugccccagaagcgugaagcagaacacccugaagcuggccaccggcaugagaaacgugcccgagaagcagaccagaggcaucuucggcgccaucgccggcuucaucgagaacggcugggagggcaugguggacggcugguacggcuucagacaccagaacagcgagggcaucggccaggccgccgaccugaagagcacccaggccgccaucgaccagaucaacggcaagcugaacagacugaucggcaagaccaacgagaaguuccaccagaucgagaaggaguucagcgagguggagggcagaauccaggaccuggagaaguacguggaggacaccaagaucgaccuguggagcuacaacgccgagcugcugguggcccuggagaaccagcacaccaucgaccugaccgacagcgagaugaacaagcuguucgagagaaccaagaagcagcugagagagaacgccgaggacaugggcaacggcugcuucaagaucuaccacaagugcgacaacgccugcaucggcagcaucagaaacggcaccuacgaccacgacguguacagagacgaggcccugaacaacagauuccagaucaagggcguggagcugaagagcggcuacaaggacuggauccuguggaucagcuucgccaucagcugcuuccugcugugcguggcccugcugggcuucaucaugugggccugccagaagggcaacaucagaugcaacaucugcaucuga

SEQ ID NO: 161838 - RNA, 1701 nt, Artificial Sequence; identical to SEQ ID NO: 160133
  derived and/or modified CDS sequence (opt4) from hemagglutinin__InfluenzaA__ABU92623

SEQ ID NO: 161839 - RNA, 1701 nt, Artificial Sequence
  derived and/or modified CDS sequence (opt4) from hemagglutinin__InfluenzaA__ABU92624
augaagaccaucaucgcccugagcuacauccugugccugguguucgcccagaagcugcccggcaacgacaacagcaccgccacccugugccugggccaccacgccgugcccaacggcaccaucgugaagaccaucaccaacgaccagaucgaggugaccaacgccaccgagcuggugcagaucagcagcaccggcgagaucugcgacagcccccaccagauccuggacggcgagaacugcacccugaucgacgcccugcugggcgacccccagugcgacggcuuccagaacaagaagugggaccuguucguggagagaagcaaggccuacagcaacugcuaccccuacgacgugcccgacuacgccagccugagaagccugguggccagcagcggcacccuggaguucaacaacgagagcuucgacuggaccggcgugacccagaacggcaccagcagcgccugcaagagaagaagcgacaagagcuucuucagcagacugaacuggcugacccaccugaaguacaaguaccccgcccugaacgugaccaugcccaacaacgagaaguucgacaagcuguacaucuggggcgugcaccaccccggcaccgacagcgaccagaucagccuguacgcccaggcccugggcagaaucaccgugagcaccaagagaagccagcagaccgugauccccaacaucggcagcagacccagagugagagacgugagcagcagaaucagcaucuacuggaccaucgugaagcccggcgacauccugcugaucaacagcaccggcaaccugaucgcccccagaggcuacuucaagaucagaagcggcaagagcagcaucaugagaagcgacgcccccaucggcaagugcaacagcgagugcaucacccccaacggcagcauccccaacgacaagcccuuccagaacgugaacagaaucaccuacggcgccugccccagauacgugaagcagaacacccugaagcuggccaccggcaugagaaacgugcccgagaagcagaccagaggcaucuucggcgccaucgccggcuucaucgagaacggcugggagggcaugguggacggcugguacggcuucagacaccagaacagcgagggcaccggccaggccgccgaccugaagagcacccaggccgccaucaaccagaucaacggcaagcugaacagacugaucggcaagaccaacgagaaguuccaccagaucgagaaggaguucagcgagguggagggcagaauccaggaccuggagaaguacguggaggacaccaagaucgaccuguggagcuacaacgccgagcugcugguggcccuggagaaccagcacaccaucgaccugaccgacagcgagaugaacaagcuguucgagagaaccaagaagcagcugagagagaacgccgaggacaugggcaacggcugcuucaagaucuaccacaagugcgacaacgccugcaucggcagcaucagaaacggcaccuacgaccacgacguguacagagacgaggcccugaacaacagauuccagaucaagggcguggagcugaagagcggcuacaaggacuggauccuguggaucagcuucgccaucagcugcuuccugcugugcguggcccugcugggcuucaucaugugggccugccagaagggcaacaucagaugcaacaucugcaucuga

SEQ ID NO: 161840 - RNA, 1701 nt, Artificial Sequence; identical to SEQ ID NO: 161822
  derived and/or modified CDS sequence (opt4) from hemagglutinin__InfluenzaA__ABU92625

SEQ ID NO: 161841 - RNA, 1701 nt, Artificial Sequence; identical to SEQ ID NO: 160133
  derived and/or modified CDS sequence (opt4) from hemagglutinin__InfluenzaA__ABU92626

SEQ ID NO: 161842 - RNA, 1701 nt, Artificial Sequence
  derived and/or modified CDS sequence (opt4) from hemagglutinin__InfluenzaA__ABU92627
augaagaccaucaucgcccugagcuacauccugugcaugguguucgcccagaagcugcccggcaacgacaacagcaccgccacccugugccugggccaccacgccgugcccaacggcaccaucgugaagaccaucaccaacgaccagaucgaggugaccaacgccaccgagcuggugcagaucagcagcaccggcgagaucugcgacagcccccaccagauccuggacggcgagaacugcacccugaucgacgcccugcugggcgacccccagugcgacggcuuccagaacaagaagugggaccuguucguggagagaagcaaggccuacagcaacugcuaccccuacgacgugcccgacuacgccagccugagaagccugguggccagcagcggcacccuggaguucaacaacgagagcuucgacuggaccggcgugacccagaacggcaccagcagcgccugcaagagaagaagcgacaagagcuucuucagcagacugaacuggcugacccaccugaaguacaaguaccccgcccugaacgugaccaugcccaacaacgagaaguucgacaagcuguacaucuggggcgugcaccaccccggcaccgacagcgaccagaucagccuguacgcccaggccagcggcagaaucaccgugagcaccaagagaagccagcagaccgugauccccaacaucggcagcagacccagagugagagacgugagcagcagaaucagcaucuacuggaccaucgugaagcccggcgacauccugcugaucaacagacccggcaaccugaucgcccccagaggcuacuucaagaucagaagcggcaagagcagcaucaugagaagcgacgcccccaucggcaagugcaacagcgagugcaucacccccaacggcagcauccccaacgacaagcccuuccagaacgugaacagaaucaccuacggcgccugccccagauacgugaagcagaacacccugaagcuggccaccggcaugagaaacgugcccgagaagcagaccagaggcaucuucggcgccaucgccggcuucaucgagaacggcugggagggcaugguggacggcugguacggcuucagacaccagaacagcgagggcaccggccaggccgccgaccugaagagcacccaggccgccaucaaccagaucaacggcaagcugaacagacugaucggcaagaccaacgagaaguuccaccagaucgagaaggaguucagcgagguggagggcagaauccaggaccuggagaaguacguggaggacaccaagaucgaccuguggagcuacaacgccgagcugcugguggcccuggagaaccagcacaccaucgaccugaccgacagcgagaugaacaagcuguucgagagaaccaagaagcagcugagagagaacgccgaggacaugggcaacggcugcuucaagaucuaccacaagugcgacaacgccugcaucggcagcaucagaaacggcaccuacgaccacgacguguacagagacgaggcccugaacaacagauuccagaucaagggcguggagcugaagagcggcuacaaggacuggauccuguggaucagcuucgccaucagcugcuuccugcugugcguggcccugcugggcuucaucaugugggccugccagaagggcaacaucagaugcaacaucugcaucuga

SEQ ID NO: 161843 - RNA, 1701 nt, Artificial Sequence; identical to SEQ ID NO: 161822
  derived and/or modified CDS sequence (opt4) from hemagglutinin__InfluenzaA__ABU92628

SEQ ID NO: 161844 - RNA, 1701 nt, Artificial Sequence; identical to SEQ ID NO: 161822
  derived and/or modified CDS sequence (opt4) from hemagglutinin__InfluenzaA__ABU92631

SEQ ID NO: 161845 - RNA, 1701 nt, Artificial Sequence
  derived and/or modified CDS sequence (opt4) from hemagglutinin__InfluenzaA__ABU92632
augaagaccaucaucgcccugagcuacauccugugccugguguucgcccagaagcugcccggcaacgacaacagcaccgccacccugugccugggccaccacgccgugcccaacggcaccaucgugaagaccaucaccaacgaccagaucgaggugaccaacgccaccgagcuggugcagagcagcagcaccggcggcaucugcgacagcccccaccagauccuggacggcgagaacugcacccugaucgacgcccugcugggcgacccccagugcgacggcuuccagaacaagaagugggaccuguucguggagagaagcaaggccuacagcaacugcuaccccuacgacgugcccgacuacgccagccugagaagccugaucgccagcagcggcacccuggaguucaacaacgagagcuucaacuggaccggcgugacccagaacggcaccagcagcgccugcaagagaagaagcaacaagagcuucuucagcagacugaacuggcugacccaccugaaguacaaguaccccgcccugaacgugaccaugcccaacaacgagaaguucgacaagcuguacaucuggggcgugcaccaccccggcaccgacagcgaccagaucagccuguacgcccaggccagcggcagaaucaccgugagcaccaagagaagccagcagaccgugauccccaacaucggcagcagacccagagugagagacgugagcagcagaaucagcaucuacuggaccaucgugaagcccggcgacauccugcugaucaacagcaccggcaaccugaucgcccccagaggcuacuucaagaucagaagcggcaagagcagcaucaugagaagcgacgcccccaucggcaagugcaacagcgagugcaucacccccaacggcagcauccccaacgacaagcccuuccagaacgugaacagaaucaccuacggcgccugccccagauacgugaagcagaacacccugaagcuggccaccggcaugagaaacgugcccgagaagcagaccagaggcaucuucggcgccaucgccggcuucaucgagaacggcugggagggcaugguggacggcugguacggcuucagacaccugaacagcgagggcaccggccaggccgccgaccugaagagcacccaggccgccaucaaccagaucaacggcaagcugaacagacugaucggcaagaccaacgagaaguuccaccagaucgagaaggaguucagcgagguggagggcagaauccaggaccuggagaaguacguggaggacaccaagaucgaccuguggagcuacaacgccgagcugcugguggcccuggagaaccagcacaccaucgaccugaccgacagcgagaugaacaagcuguucgagagaaccaagaagcagcugagagagaacgccgaggacaugggcaacggcugcuucaagaucuaccacaagugcgacaacgccugcaucggcagcaucagaaacggcaccuacgaccacgacguguacagagacgaggcccugaacaacagauuccagaucaagggcguggagcugaagagcggcuacaaggacuggauccuguggaucagcuucgccaucagcugcuuccugcugugcguggcccugcugggcuucaucaugugggccugccagaagggcaacaucagaugcaacaucugcaucuga

SEQ ID NO: 161846 - RNA, 1701 nt, Artificial Sequence
  derived and/or modified CDS sequence (opt4) from hemagglutinin__InfluenzaA__ABU92635
augaagaccaucaucgcccugagcuacauccugugccugguguucgcccagaagcugcccggcaacgacaacagcaccgccacccugugccugggccaccacgccgugcccaacggcaccaucgugaagaccaucaccaacgaccagaucgaggugaccaacgccaccgagcuggugcagagcagcagcaccggcggcaucugcgacagcccccaccagauccuggacggcgagaacugcacccugaucgacgcccugcugggcgacccccagugcgacggcuuccagaacaagaagugggaccuguucguggagagaagcaaggccuacagcaacugcuaccccuacgacgugcccgacuacgccagccugagaagcaucguggccagcagcggcacccuggaguucaacaacgagagcuucaacuggaccggcgugacccagaacggcaccagcagcgccugcaagagaaagagcaacaagagcuucuucagcagacugaacuggcugacccaccugaaguacaaguaccccgcccugaacgugaccaugcccaacaacgagaaguucgacaagcuguacaucuggggcgugcaccaccccggcaccgacaacgaccagaucagccuguacgcccaggccagcggcagaaucaccgugagcaccaagagaagccagcagaccgugauccccaacaucggcagcagacccagagugagagacgugagcagcagaaucagcaucuacuggaccaucgugaagcccggcgacauccugcugaucaacagcaccggcaaccugaucgcccccagaggcuacuucaagaucagaagcggcaagagcagcaucaugagaagcgacgcccccaucggcaagugcaacagcgagugcaucacccccaacggcagcauccccaacgacaagcccuuccagaacgugaacagaaucaccuacggcgccugccccagauacgugaagcagaacacccugaagcuggccaccggcaugagaaacgugcccgagaagcagaccagaggcaucuucggcgccaucgccggcuucaucgagaacggcugggagggcaugguggacggcugguacggcuucagacaccagaacagcgagggcaccggccaggccgccgaccugaagagcacccaggccgccaucaaccagaucaacggcaagcugaacagacugaucggcaagaccaacgagaaguuccaccagaucgagaaggaguucagcgagguggagggcagaauccaggaccuggagaaguacguggaggacaccaagaucgaccuguggagcuacaacgccgagcugcugguggcccuggagaaccagcacaccaucgaccugaccgacagcgagaugaacaagcuguucgagagaaccaagaagcagcugagagagaacgccgaggacaugggcaacggcugcuucaagaucuaccacaagugcgacaacgccugcaucggcagcaucagaaacggcaccuacgaccacgacguguacagagacgaggcccugaacaacagauuccagaucaagggcguggagcugaagagcggcuacaaggacuggauccuguggaucagcuucgccaucagcugcuuccugcugugcguggcccugcugggcuucaucaugugggccugccagaagggcaacaucagaugcaacaucugcaucuga

SEQ ID NO: 161847 - RNA, 1701 nt, Artificial Sequence; identical to SEQ ID NO: 160690
  derived and/or modified CDS sequence (opt4) from hemagglutinin__InfluenzaA__ABU92636

SEQ ID NO: 161848 - RNA, 1701 nt, Artificial Sequence
  derived and/or modified CDS sequence (opt4) from hemagglutinin__InfluenzaA__ABU92637
augaagaccaucaucgcccugagcuacauccugugccugguguucgcccagaagcugcccggcaacgacaacagcaccgccacccugugccugggccaccacgccgugcccaacggcaccaccgugaagaccaucaccaacgaccagaucgaggugaccaacgccaccgagcuggugcagagcagcagcaccggcggcaucugcgacagcccccaccagauccuggacggcgagaacugcacccugaucgacgcccugcugggcgacccccagugcgacggcuuccagaacaagaagugggaccuguucguggagagaagcaaggccuacagcaacugcuaccccuacgacgugcccgacuacgugagccugagaagccugguggccagcagcggcacccuggaguucaacaacgagagcuucaacuggaccggcgugacccagaacggcaccagcagcgccugcaagagaagaagcaacaacagcuucuucagcagacugaacuggcugacccaccugaaguucaaguaccccgcccugaacgugaccaugcccaacaacgagaaguucgacaagcuguacaucuggggcgugcaccaccccggcaccgacaacgaccagaucagccuguacgcccaggccagcggcagaaucaccgugagcaccaagagaagccagcagaccgugauccccaacaucggcagcagacccagagugagagacauccccagcagaaucagcaucuacuggaccaucgugaagcccggcgacauccugcugaucaacagcaccggcaaccugaucgcccccagaggcuacuucaagaucagaagcggcaagagcagcaucaugagaagcgacgcccccaucggcaagugcaacagcgagugcaucacccccaacggcagcauccccaacgacaagcccuuccagaacgugaacagaaucaccuacggcgccugccccagauacgugaagcagaacacccugaagcuggccaccggcaugagaaacgugcccgagaagcagaccagaggcaucuucggcgccaucgccggcuucaucgagaacggcugggagggcaugguggacggcugguacggcuucagacaccagaacagcgagggcaucggccaggccgccgaccugaagagcacccaggccgccaucaaccagaucaacggcaagcugaacagacugaucggcaagaccaacgagaaguuccaccagaucgagaaggaguucagcgagguggagggcagaauccaggaccuggagaaguacguggaggacaccaagaucgaccuguggagcuacaacgccgagcugcugguggcccuggagaaccagcacaccaucgaccugaccgacagcgagaugaacaagcuguucgagagaaccaagaagcagcugagagagaacgccgaggacaugggcaacggcugcuucaagaucuaccacaagugcgacaacgccugcaucggcagcaucagaaacggcaccuacgaccacgacguguacagagacgaggcccugaacaacagauuccagaucaagggcguggagcugaagagcggcuacaaggacuggauccuguggaucagcuucgccaucagcugcuuccugcugugcguggcccugcugggcuucaucaugugggccugccagaagggcaacaucagaugcaacaucugcaucuga

SEQ ID NO: 161849 - RNA, 1701 nt, Artificial Sequence
  derived and/or modified CDS sequence (opt4) from hemagglutinin__InfluenzaA__ABU92639
augaagaccaucaucgcccugagcuacauccugugccugguguucgcccagaagcugcccggcaacgacaacagcaccgccacccugugccugggccaccacgccgugcccaacggcaccaucgugaagaccaucaccaacgaccagaucgaggugaccaacgccaccgagcuggugcagaucagcagcaccggcgagaucugcgacagcccccaccagauccuggacggcgagaacugcacccugaucgacgcccugcugggcgacccccagugcgacggcuuccagaacaccaagugggaccuguucguggagagaagcaaggccuacagcaacugcuaccccuacgacgugcccgacuacgccagccugagaagccugguggccagcagcggcacccuggaguucaacaacgagagcuucgacuggaccggcgugacccagaacggcaccagcagcgccugcaagagaagaagcgacaagagcuucuucagcagacugaacuggcugacccaccugaaguacaaguaccccgcccugaacgugaccaugcccaacaacgagaaguucgacaagcuguacaucuggggcgugcaccaccccggcaccgacagcgaccagaucagccuguacgcccaggccagcggcagaaucaccgugagcaccaagagaagccagcagaccgugauccccaacaucggcagcagacccagagugagagacgugagcagcagaaucagcaucuacuggaccaucgugaagcccggcgacauccugcugaucaacagcaccggcaaccugaucgcccccagaggcuacuucaagaucagaagcggcaagagcagcaucaugagaagcgacgcccccaucggcaagugcaacagcgagugcaucacccccaacggcagcauccccaacgacaagcccuuccagaacgugaacagaaucaccuacggcgccugccccagauacgugaagcagaacacccugaagcuggccaccggcaugagaaacgugcccgagaagcagaccagaggcaucuucggcgccaucgccggcuucaucgagaacggcugggagggcaugguggacggcugguacggcuucagacaccagaacagcgagggcaccggccaggccgccgaccugaagagcacccaggccgccaucaaccagaucaacggcaagcugaacagacugaucggcaagaccaacgagaaguuccaccagaucgagaaggaguucagcgagguggagggcagaauccaggaccuggagaaguacaucgaggacaccaagaucgaccuguggagcuacaacgccgagcugcugguggcccuggagaaccagcacaccaucgaccugaccgacagcgagaugaacaagcuguucgagagaaccaagaagcagcugagagagaacgccgaggacaugggcaacggcugcuucaagaucuaccacaagugcgacaacgccugcaucggcagcaucagaaacggcaccuacgaccacgacguguacagagacgaggcccugaacaacagauuccagaucaagggcguggagcugaagagcggcuacaaggacuggauccuguggaucagcuucgccaucagcugcuuccugcugugcguggcccugcugggcuucaucaugugggccugccagaagggcaacaucagaugcaacaucugcaucuga

SEQ ID NO: 161850 - RNA, 1701 nt, Artificial Sequence
  derived and/or modified CDS sequence (opt4) from hemagglutinin__InfluenzaA__ABU92640
augaagaccaucaucgcccugagcuacauccugugccugguguucgcccagaagcugcccggcaacgacaacagcaccgccacccugugccugggccaccacgccgugcccaacggcaccaucgugaagaccaucaccaacgaccagaucgaggugaccaacgccaccgagcuggugcagagcagcagcaccggcgagaucugcgacagcccccaccagauccuggacggcgagaacugcacccugaucgacgcccugcugggcgacccccagugcgacggcuuccagaacaagaagugggaccuguucguggagagaagcaaggccuacagcaacugcuaccccuacgacgugcccgacuacgccagccugagaagccugguggccagcagcggcacccuggaguucaacaacgagagcuucaacuggaccggcgugacccagaacggcaccagcagcgccugcaagagaagaagcaacaacagcuucuucagcagacugaacuggcugacccaccugaaguucaaguaccccgcccugaacgugaccaugcccaacaacgagaaguucgacaagcuguacaucuggggcgugcaccaccccggcaccgacaacgaccagaucuuccuguacgcccaggccagcggcagaaucaccgugagcaccaagagaagccagcagaccgugauccccaacaucggcagcagacccagagugagaaacauccccagcagaaucagcaucuacuggaccaucgugaagcccggcgacauccugcugaucaacagcaccggcaaccugaucgcccccagaggcuacuucaagaucagaagcggcaagagcagcaucaugagaagcgacgcccccaucggcaagugcaacagcgagugcaucacccccaacggcagcauccccaacgacaagcccuuccagaacgugaacagaaucaccuacggcgccugccccagauacgugaagcagaacacccugaagcuggccaccggcaugagaaacgugcccgagaagcagaccagaggcaucuucggcgccaucgccggcuucaucgagaacggcugggagggcaugguggacggcugguacggcuucagacaccagaacagcgagggcaucggccaggccgccgaccugaagagcacccaggccgccaucaaccagaucaacggcaagcugaacagacugaucggcaagaccaacgagaaguuccaccagaucgagaaggaguucagcgagguggagggcagaauccaggaccuggagaaguacguggaggacaccaagaucgaccuguggagcuacaacgccgagcugcugguggcccuggagaaccagcacaccaucgaccugaccgacagcgagaugaacaagcuguucgagagaaccaagaagcagcugagagagaacgccgaggacaugggcaacggcugcuucaagaucuaccacaagugcgacaacgccugcaucggcagcaucagaaacggcaccuacgaccacgacguguacagagacgaggcccugaacaacagauuccagaucaagggcguggagcugaagagcggcuacaaggacuggauccuguggaucagcuucgccaucagcugcuuccugcugugcgccgcccugcugggcuucaucaugugggccugccagaagggcaacaucagaugcaacaucugcaucuga

SEQ ID NO: 161851 - RNA, 1701 nt, Artificial Sequence
  derived and/or modified CDS sequence (opt4) from hemagglutinin__InfluenzaA__ABU92641
augaagaccaucaucgcccugagcuacauccugugccugguguucgcccagaagcugcccggcaacgacaacagcaccgccacccugugccugggccaccacgccgugcccaacggcaccaucgugaagaccaucaccaacgaccagaucgaggugaccaacgccaccgagcuggugcagagcagcagcaccggcggcaucugcgacagcccccaccagauccuggacggcgagaacugcacccugaucgacgcccugcugggcgacccccagugcgacggcuuccagaacaagaagugggaccuguucguggagagaagcaaggccuacagcaacugcuaccccuacgacgugcccgacuacgccagccugagaagccugguggccagcagcggcacccuggaguucaacaacgagagcuucaacuggaccggcgugacccagaacggcaccagcagcgccugcaagagaaagagcaacaacagcuucuucagcagacugaacuggcugacccaccugaaguucaaguaccccgcccugaacgugaccaugcccaacaacgagaaguucgacaagcuguacaucuggggcgugcaccaccccggcaccgacaacgaccagaucagccuguacgcccaggccagcggcagaaucaccgugagcaccaagagaagccagcagaccgugauccccaacaucggcagcagacccagagugagagacauccccagcagaaucagcaucuacuggaccaucgugaagcccggcgacauccugcugaucaacagcaccggcaaccugaucgcccccagaggcuacuucaagaucagaagcggcaagagcagcaucaugagaagcgacgcccccaucggcaagugcaacagcgagugcaucacccccaacggcagcauccccaacgacaagcccuuccagaacgugaacagaaucaccuacggcgccugccccagauacgugaagcagaacacccugaagcuggccaccggcaugagaaacgugcccgagaagcagaccagaggcaucuucggcgccaucgccggcuucaucgagaacggcugggagggcaugguggacggcugguacggcuucagacaccagaacagcgagggcaucggccaggccgccgaccugaagagcacccaggccgccaucaaccagaucaacggcaagcugaacagacugaucggcaagaccaacgagaaguuccaccagaucgagaaggaguucagcgagguggagggcagaauccaggaccuggagaaguacguggaggacaccaagaucgaccuguggagcuacaacgccgagcugcugguggcccuggagaaccagcacaccaucgaccugaccgacagcgagaugaacaagcuguucgagagaaccaagaagcagcugagagagaacgccgaggacaugggcaacggcugcuucaagaucuaccacaagugcgacaacgccugcaucggcagcaucagaaacggcaccuacgaccacgacguguacagagacgaggcccugaacaacagauuccagaucaagggcguggagcugaagagcggcuacaaggacuggauccuguggaucagcuucgccaucagcugcuuccugcugugcguggcccugcugggcuucaucaugugggccugccagaagggcaacaucagaugcaacaucugcaucuga

SEQ ID NO: 161852 - RNA, 1701 nt, Artificial Sequence
  derived and/or modified CDS sequence (opt4) from hemagglutinin__InfluenzaA__ABU92642
augaagaccaucaucgcccugagcuacauccugugccugguguucgcccagaagcugcccggcaacgacaacagcaccgccacccugugccugggccaccacgccgugcccaacggcaccaucgugaagaccaucaccaacgaccagaucgaggugaccaacgccaccgagcuggugcagagcagcagcaccggcggcaucugcgacagcccccaccagauccuggacggcgagaacugcacccugaucgacgcccugcugggcgacccccagugcgacggcuuccagaacaagaagugggaccuguucguggagagaagcaaggccuacagcaacugcuaccccuacgacgugcccgacuacgccagccugagaagccugguggccagcagcggcacccuggaguucaacaacgagagcuucaacuggaccggcgugacccagaacggcaccagcagcgccugcaagagaagaagcaacaacagcuucuucagcagacugaacuggcugacccaccugaaguucaaguaccccgcccugaacgugaccaugcccaacaacgagaaguucgacaagcuguacaucuggggcgugcaccaccccggcaccgacaacgaccagaucuuccuguacgcccaggccagcggcagaaucaucgugagcaccaagagaagccagcagaccgugauccccaacaucggcagcagacccagagugagaaacauccccagcagaaucagcaucuacuggaccaucgugaagcccggcgacauccugcugaucaacagcaccggcaaccugaucgcccccagaggcuacuucaagaucagaagcggcaagagcagcaucaugagaagcgacgcccccaucggcaagugcaacagcgagugcaucacccccaacggcagcauccccaacgacaagcccuuccagaacgugaacagaaucaccuacggcgccugccccagauacgugaagcagaacacccugaagcuggccaccggcaugagaaacgugcccgagaagcagaccagaggcaucuucggcgccaucgccggcuucaucgagaacggcugggagggcaugguggacggcugguacggcuucagacaccagaacagcgagggcaucggccaggccgccgaccugaagagcacccaggccgccaucgaccagaucaacggcaagcugaacagacugaucggcaagaccaacgagaaguuccaccagaucgagaaggaguucagcgagguggagggcagaauccaggaccuggagaaguacguggaggacaccaagaucgaccuguggagcuacaacgccgagcugcugguggcccuggagaaccagcacaccaucgaccugaccgacagcgagaugaacaagcuguucgagaagaccaagaagcagcugagagagaacgccgaggacaugggcaacggcugcuucaagaucuaccacaagugcgacaacgccugcaucggcagcaucagaaacggcaccuacgaccacgacguguacagagacgaggcccugaacaacagauuccagaucaagggcguggagcugaagagcggcuacaaggacuggauccuguggaucagcuucgccaucagcugcuuccugcugugcguggcccugcugggcuucaucaugugggccugccagaagggcaacaucagaugcaacaucugcaucuga

SEQ ID NO: 161853 - RNA, 1701 nt, Artificial Sequence
  derived and/or modified CDS sequence (opt4) from hemagglutinin__InfluenzaA__ABU92643
augaagaccaucaucgcccugagcuacauccugugccugguguucgcccagaagcugcccggcaacgacaacagcaccgccacccugugccugggccaccacgccgugcccaacggcaccaucgugaagaccaucaccaacgaccagaucgaggugaccaacgccaccgagcuggugcagaucagcagcaccggcgagaucugcgacagcccccaccagauccuggacggcgagaacugcacccugaucgacgcccugcugggcgacccccagugcgacggcuuccagaacaagaagugggaccuguucguggagagaagcaaggccuacagcaacugcuaccccuacgacgugcccgacuacgccagccugagaagccugguggccagcagcggcacccuggaguucaacaacgagagcuucgacuggaccggcgugacccagaacggcaccagcagcgccugcaagagaagaagcgacaagagcuucuucagcagacugaacuggcugacccaccugaaguacaaguaccccgcccugaacgugaccaugcccaacaacgagaaguucgacaagcuguacaucuggggcgugcaccaccccggcaccgacagcgaccagaucagccuguacgcccaggccagcggcagaaucaccgugagcaccaagagaagccagcagaccgugauccccaacaucggcagcagacccagagugagagacgugagcagcagaaucagcaucuacuggaccaucgugaagcccggcgacauccugcugaucaacagcaccggcaaccugaucgcccccagaggcuacuucaagaucagaagcggcaagagcagcaucaugagaagcgacgcccccaucggcaagugcaacagcgagugcaucacccccaacggcagcauccccaacgacaagcccuuccagaacgugaacagaaucaccuacggcgccugccccagauacgugaagcagaacacccugaagcuggccaccggcaugagaaacgugcccgagaagcagaccagaggcaucuucggcgccaucgccggcuucaucgagaacggcugggagggcaugguggacggcugguacggcuucagacaccagaacagcgagggcaccggccaggccgccgaccugaagagcacccaggccgccaucaaccagaucaacggcaagcugaacagacugaucggcaagaccaacgagaaguuccaccagaucgagaaggaguucagcgagguggagggcagaauccaggaccuggagaaguacguggaggacaccaagaucgaccuguggagcuacaacgccgagcugcugguggcccuggagaaccagcacaccaucgaccugaccgacagcgagaugaacaagcuguucgagagaaccaagaagcagcugagagagaacgccgaggacaugggcaacggcugcuucaagaucuaccacaagugcgacaacgccugcaucggcagcaucagaaacggcaccuacgaccacaacguguacagagacgaggcccugaacaacagauuccagaucaagggcguggagcugaagagcggcuacaaggacuggauccuguggaucagcuucgccaucagcugcuuccugcugugcguggcccugcugggcuucaucaugugggccugccagaagggcaacaucagaugcaacaucugcaucuga

SEQ ID NO: 161854 - RNA, 1701 nt, Artificial Sequence
  derived and/or modified CDS sequence (opt4) from hemagglutinin__InfluenzaA__ABU92645
augaagaccaucaucgcccugagcuacauccugugccugguguucgcccagaagcugcccggcaacgacaacagcaccgccacccugugccugggccaccacgccgugcccaacggcaccaucgugaagaccaucaccaacgaccagaucgaggugaccaacgccaccgagcuggugcagagcagcagcaccggcgagaucugcgacagcccccaccagauccuggacggcgagaacugcacccugaucgacgcccugcugggcgacccccagugcgacggcuuccagaacaagaagugggaccuguucguggagagaagcaaggccuacagcaacugcuaccccuacgacgugcccgacuacgccagccugagaagccugguggccagcagcggcacccuggaguucaacaacgagagcuucaacuggaccggcgugacccagaacggcaccagcagcgccugcaagagaagaagcaacaacagcuucuucagcagacugaacuggcugacccaccugaaguucaaguaccccgcccugaacgugaccaugcccaacaacgagaaguucgacaagcuguacaucuggggcgugcaccaccccggcaccgacaacgaccagaucuuccuguacgcccaggccagcggcagaaucaccgugagcaccaagagaagccagcagaccgugauccccaacaucggcagcagacccagagugagaaacauccccagcagaaucagcaucuacuggaccaucgugaagcccggcgacauccugcugaucaacagcaccggcaaccugaucgcccccagaggcuacuucaagaucagaagcggcaagagcagcaucaugagaagcgacgcccccaucggcaagugcaacagcgagugcaucacccccaacggcagcauccccaacgacaagcccuuccagaacgugaacagaaucgccuacggcgccugccccagauacgugaagcagaacacccugaagcuggccaccggcaugagaaacgugcccgagaagcagaccagaggcaucuucggcgccaucgccggcuucaucgagaacggcugggagggcaugguggacggcugguacggcuucagacaccagaacagcgagggcaucggccaggccgccgaccugaagagcacccaggccgccaucaaccagaucaacggcaagcugaacagacugaucggcaagaccaacgagaaguuccaccagaucgagaaggaguucagcgagguggagggcagaauccaggaccuggagaaguacguggaggacaccaagaucgaccuguggagcuacaacgccgagcugcugguggcccuggagaaccagcacaccaucgaccugaccgacagcgagaugaacaagcuguucgagagaaccaagaagcagcugagagagaacgccgaggacaugggcaacggcugcuucaagaucuaccacaagugcgacaacgccugcaucggcagcaucagaaacggcaccuacgaccacgacguguacagagacgaggcccugaacaacagauuccagaucaagggcaucgagcugaagagcggcuacaaggacuggauccuguggaucagcuucgccaucagcugcuuccugcugugcguggugcugcugggcuucaucaugugggccugccagaagggcaacaucagaugcaacaucugcaucuga

SEQ ID NO: 161855 - RNA, 1701 nt, Artificial Sequence
  derived and/or modified CDS sequence (opt4) from hemagglutinin__InfluenzaA__ABU92646
augaagaccaucaucgcccugagcuacauccugugccugguguucgcccagaagcugcccggcaacgacaacagcaccgccacccugugccugggccaccacgccgugcccaacggcaccaucgugaagaccaucaccaacgaccagaucgaggugaccaacgccaccgagcuggugcagagcagcagcaccggcggcaucugcgacagcccccaccagauccuggacggcgagaacugcacccugaucgacgcccugcugggcgacccccagugcgacggcuuccagaacaagaagugggaccuguucguggagagaagcaaggccuacagcaacugcuaccccuacgacgugcccgacuacgccagccugagaagccugguggccagcagcggcacccuggaguucaacaacgagagcuucaacuggaccggcgugacccagaacggcaccagcagcgccugcaagagaagaagcaacaagagcuucuucagcagacugaacuggcugacccaccugaaguucaaguaccccgcccugaacgugaccaugcccaacaacgagaaguucgacaagcuguacaucuggggcgugcaccaccccggcaccgacaacgaccagaucagccuguacgcccaggccagcggcagaaucaccgugagcaccaagagaagccagcagaccgugauccccaacaucggcagcagacccagagugagagacgugcccagcagaaucagcaucuacuggaccaucgugaagcccggcgacauccugcugaucaacagcaccggcaaccugaucgcccccagaggcuacuucaagaucagaagcggcaagagcagcaucaugagaagcgacgcccccaucggcaagugcaacagcgagugcaucacccccaacggcagcauccccaacgacaagcccuuccagaacgugaacagaaucaccuacggcgccugccccagauacgugaagcagaacacccugaagcuggccaccggcaugagaaacgugcccgagaagcagaccagaggcaucuucggcgccaucgccggcuucaucgagaacggcugggagggcaugguggacggcugguacggcuucagacaccagaacagcgagggcaccggccaggccgccgaccugaagagcacccaggccgccaucaaccagaucaacggcaagcugaacagacugaucggcaagaccaacgagaaguuccaccagaucgagaaggaguucagcgagguggagggcagaauccaggaccuggagaaguacguggaggacaccaagaucgaccuguggagcuacaacgccgagcugcugguggcccuggagaaccagcacaccaucgaccugaccgacagcgagaugaacaagcuguucgagagaaccaagaagcagcugagagagaacgccgaggacaugggcaacggcugcuucaagaucuaccacaagugcgacaacgccugcaucggcagcaucagaaacggcaccuacgaccacgacguguacagagacgaggcccugaacaacagauuccagaucaagggcguggagcugaagagcggcuacaaggacuggauccuguggaucagcuucgccaucagcugcuuccugcugugcguggcccugcugggcuucaucaugugggccugccagaagggcaacaucagaugcaacaucugcaucuga

SEQ ID NO: 161856 - RNA, 1701 nt, Artificial Sequence; identical to SEQ ID NO: 160133
  derived and/or modified CDS sequence (opt4) from hemagglutinin__InfluenzaA__ABU92647

SEQ ID NO: 161857 - RNA, 1701 nt, Artificial Sequence
  derived and/or modified CDS sequence (opt4) from hemagglutinin__InfluenzaA__ABU92648
augaagaccaucaucgcccugagcuacauccugugccugguguucgcccagaagcugcccggcaacgacaacagcaccgccacccugugccugggccaccacgccgugcccaacggcaccaucgugaagaccaucaccaacgaccagaucgaggugaccaacgccaccgagcuggugcagaucagcagcaccggcgagaucugcgacagcccccaccagauccuggacggcgagaacugcacccugaucgacgcccugcugggcgacccccagugcgacggcuuccagaacaagaagugggaccuguucguggagagaagcaaggccuacagcaacugcuaccccuacgacgugcccgacuacgccagccugagaagccugguggccagcagcggcacccuggaguucaacaacgagagcuucaacuggaccggcgugacccagaacggcaccagcagcgccugcaagagaagaagcgacaagagcuucuucagcagacugaacuggcugacccaccugaaguacaaguaccccgcccugaacgugaccaugcccaacaacgagaaguucgacaagcuguacaucuggggcgugcaccaccccggcaccgacagcgaccagaucagccuguacgcccaggccagcggcagaaucaccgugagcaccaagagaagccagcagaccgugauccccaacaucggcagcagacccagagugagagacgugagcagcagaaucagcaucuacuggaccaucgugaagcccggcgacauccugcugaucaacagcaccggcaaccugaucgcccccagaggcuacuucaagaucagaagcggcaagagcagcaucaugagaagcgacgcccccaucggcaagugcaacagcgagugcaucacccccaacggcagcauccccaacgacaagcccuuccagaacgugaacagaaucaccuacggcgccugccccagauacgugaagcagaacacccugaagcuggccaccggcaugagaaacgugcccgagaagcagaccagaggcaucuucggcgccaucgccggcuucaucgagaacggcugggagggcaugguggacggcugguacggcuucagacaccagaacagcgagggcaccggccaggccgccgaccugaagagcacccaggccgccaucaaccagaucaacggcaagcugaacagacugaucggcaagaccaacgagaaguuccaccagaucgagaaggaguucagcgagguggagggcagaauccaggaccuggagaaguacguggaggacaccaagaucgaccuguggagcuacaacgccgagcugcugguggcccuggagaaccagcacaccaucgaccugaccgacagcgagaugaacaagcuguucgagagaaccaagaagcagcugagagagaacgccgaggacaugggcaacggcugcuucaagaucuaccacaagugcgacaacgccugcaucggcagcaucagaaacggcaccuacgaccacgacguguacagagacgaggcccugaacaacagauuccagaucaagggcguggagcugaagagcggcuacaaggacuggauccuguggaucagcuucgccaucagcugcuuccugcugugcguggcccugcugggcuucaucaugugggccugccagaagggcaacaucagaugcaacaucugcaucuga

SEQ ID NO: 161858 - RNA, 1701 nt, Artificial Sequence; identical to SEQ ID NO: 160133
  derived and/or modified CDS sequence (opt4) from hemagglutinin__InfluenzaA__ABU92649

SEQ ID NO: 161859 - RNA, 1701 nt, Artificial Sequence; identical to SEQ ID NO: 161822
  derived and/or modified CDS sequence (opt4) from hemagglutinin__InfluenzaA__ABU92650

SEQ ID NO: 161860 - RNA, 1701 nt, Artificial Sequence
  derived and/or modified CDS sequence (opt4) from hemagglutinin__InfluenzaA__ABU92651
augaagaccaucaucgcccugagcuacauccugugccugguguucgcccagaagcugcccggcaacgacaacagcaccgccacccugugccugggccaccacgccgugcccaacggcaccaucgugaagaccaucaccaacgaccagaucgaggugaccaacgccaccgagcuggugcagaucagcagcaccggcgagaucugcgacagcccccaccagauccuggacggcgagaacugcacccugaucgacgcccugcugggcgacccccagugcgacggcuuccagaacaagaagugggaccuguucguggagagaagcaaggccuacagcaacugcuaccccuacgacgugcccgacuacgccagccugagaagccugguggccagcagcggcacccuggaguucuacaacgagagcuucgacuggaccggcgugacccagaacggcaccagcagcgccugcaagagaagaagcgacaagagcuucuucagcagacugaacuggcugacccaccugaaguacaaguaccccgcccugaacgugaccaugcccaacaacgagaaguucgacaagcuguacaucuggggcgugcaccaccccggcaccgacagcgaccagaucagccuguacgcccaggccagcggcagaaucaccgugagcaccaagagaagccagcagaccgugauccccaacaucggcagcagacccagagugagagacgugagcagcagaaucagcaucuacuggaccaucgugaagcccggcgacauccugcugaucaacagcaccggcaaccugaucgcccccagaggcuacuucaagaucagaagcggcaagagcagcaucaugagaagcgacgcccccaucggcaagugcaacagcgagugcaucacccccaacggcagcauccccaacgacaagcccuuccagaacgugaacagaaucaccuacggcgccugccccagauacgugaagcagaacacccugaagcuggccaccggcaugagaaacgugcccgagaagcagaccagaggcaucuucggcgccaucgccggcuucaucgagaacggcugggagggcaugguggacggcugguacggcuucagacaccagaacagcgagggcaccggccaggccgccgaccugaagagcacccaggccgccaucaaccagaucaacggcaagcugaacagacugaucggcaagaccaacgagaaguuccaccagaucgagaaggaguucagcgagguggagggcagaauccaggaccuggagaaguacguggaggacaccaagaucgaccuguggagcuacaacgccgagcugcugguggcccuggagaaccagcacaccaucgaccugaccgacagcgagaugaacaagcuguucgagagaaccaagaagcagcugagagagaacgccgaggacaugggcaacggcugcuucaagaucuaccacaagugcgacaacgccugcaucggcagcaucagaaacggcaccuacgaccacgacguguacagagacgaggcccugaacaacagauuccagaucaagggcguggagcugaagagcggcuacaaggacuggauccuguggaucagcuucgccaucagcugcuuccugcugugcguggcccugcugggcuucaucaugugggccugccagaagggcaacaucagaugcaacaucugcaucuga

SEQ ID NO: 161861 - RNA, 1701 nt, Artificial Sequence
  derived and/or modified CDS sequence (opt4) from hemagglutinin__InfluenzaA__ABU92652
augaagaccaucaucgcccugagcuacauccugugccugguguucgcccagaagcugcccggcaacgacaacagcaccgccacccugugccugggccaccacgccgugcccaacggcaccaucgugaagaccaucaccaacgaccagaucgaggugaccaacgccaccgagcuggugcagagcagcagcaccggcggcaucugcgacagcccccaccagauccuggacggcgagaacugcacccugaucgacgcccugcugggcgacccccagugcgacggcuuccagaacaagaagugggaccuguucguggagagaagcaaggccuacagcaacugcuaccccuacgacgugcccgacuacgccagccugagaagccugguggccagcagcggcacccuggaguucaacaacgagagcuucgacuggaccggcgugacccagaacggcaccagcagcgccugcaagagaagaagcaacaagagcuucuucagcagacugaacuggcugacccaccugaaguacaaguaccccgcccugaacgugaccaugcccaacaacgagaaguucgacaagcuguacaucuggggcgugcaccaccccggcaccgacagcgaccagaucagccuguacgcccaggccagcggcagaaucaccgugagcaccaagagaagccagcagaccgugauccccaacaucggcagcagacccagagugagagacgugagcagcagaaucagcaucuacuggaccaucgugaagcccggcgacauccugcugaucaacagcaccggcaaccugaucgcccccagaggcuacuucaagaucagaagcggcaagagcagcaucaugagaagcgacgcccccaucggcaagugcaacagcgagugcaucacccccaacggcagcauccccaacgacaagcccuuccagaacgugaacagaaucaccuacggcgccugccccagauacgugaagcagaacacccugaagcuggccaccggcaugagaaacgugcccgagaagcagaccagaggcaucuucggcgccaucgccggcuucaucgagaacggcugggagggcaugguggacggcugguacggcuucagacaccagaacagcgagggcaccggccaggccgccgaccugaagagcacccaggccgccaucaaccagaucaacggcaagcugaacagacugaucggcaagaccaacgagaaguuccaccagaucgagaaggaguucagcgagguggagggcagaauccaggaccuggagaaguacguggaggacaccaagaucgaccuguggagcuacaacgccgagcugcugguggcccuggagaaccagcacaccaucgaccugaccgacagcgagaugaacaagcuguucgagagaaccaagaagcagcugagagagaacgccgaggacaucggcaacggcugcuucaagaucuaccacaagugcgacaacgccugcaucggcagcaucagaaacggcaccuacgaccacgacguguacagagacgaggcccugaacaacagauuccagaucaagggcguggagcugaagagcggcuacaaggacuggauccuguggaucagcuucgccaucagcugcuuccugcugugcguggcccugcugggcuucaucaugugggccugccagaagggcaacaucagaugcaacaucugcaucuga

SEQ ID NO: 161862 - RNA, 1701 nt, Artificial Sequence; identical to SEQ ID NO: 161822
  derived and/or modified CDS sequence (opt4) from hemagglutinin__InfluenzaA__ABU92653

SEQ ID NO: 161863 - RNA, 1701 nt, Artificial Sequence
  derived and/or modified CDS sequence (opt4) from hemagglutinin__InfluenzaA__ABU92654
augaagaccaucaucgcccugagcuacauccugugccugguguucgcccagaagcugcccggcaacgacaacagcaccgccacccugugccugggccaccacgccgugcccaacggcaccaucgugaagaccaucaccaacgaccagaucgaggugaccaacgccaccgagcuggugcagagcagcagcaccggcggcaucugcgacagcccccaccagauccuggacggcgagaacugcacccugaucgacgcccugcugggcgacccccagugcgacggcuuccagaacaagaagugggaccuguucguggagagaagcaaggccuacagcaacugcuaccccuacgacgugcccgacuacgccagccugagaagccugguggccagcagcggcacccuggaguucaacaacgagagcuucaacuggaccggcgugacccagaacggcaccagcagcgccugcaagagaagaagcaacaagagcuucuucagcagacugaacuggcugacccaccugaaguucaaguaccccgcccugaacgugaccaugcccaacaacgagaaguucgacaagcuguacaucuggggcgugcaccaccccggcaccgacaacgaccagaucagccuguacgcccaggccagcggcaagaucaccgugagcaccaagagaagccagcagaccgugauccccaacaucggcagcagacccagagugagagacgugcccagcagaaucagcaucuacuggaccaucgugaagcccggcgacauccugcugaucaacagcaccggcaaccugaucgcccccagaggcuacuucaagaucagaagcggcaagagcagcaucaugagaagcgacgcccccaucggcaagugcaacagcgagugcaucacccccaacggcagcauccugaacgacaagcccuuccagaacgugaacagaaucaccuacggcgccugccccagauacgugaagcagaacacccugaagcuggccaccggcaugagaaacgugcccgagaagcagaccagaggcaucuucggcgccaucgccggcuucaucgagaacggcugggagggcaugguggacggcugguacggcuucagacaccagaacgccgagggcaccggccaggccgccgaccugaagagcacccaggccgccaucaaccagaucaacggcaagcugaacagacugaucggcaagaccaacgagaaguuccaccagaucgagaaggaguucagcgagguggagggcagaauccaggaccuggagaaguacguggaggacaccaagaucgaccuguggagcuacaacgccgagcugcugguggcccuggagaaccagcacaccaucgaccugaccgacagcgagaugaacaagcuguucgagagaaccaagaagcagcugagagagaacgccgaggacaugggcaacggcugcuucaagaucuaccacaagugcgacaacgccugcaucggcagcaucagaaacggcaccuacgaccacgacguguacagagacgaggcccugaacaacagauuccagaucaagggcguggagcugaagagcggcuacaaggacuggauccuguggaucagcuucgccaucagcugcuuccugcugugcguggcccugcugggcuucaucaugugggccugccagaagggcaacaucagaugcaacaucugcaucuga

SEQ ID NO: 161864 - RNA, 1701 nt, Artificial Sequence
  derived and/or modified CDS sequence (opt4) from hemagglutinin__InfluenzaA__ABU92655
augaagaccaucaucgcccugagcuacauccugugccugguguucgcccagaagcugcccggcaacgacaacagcaccgccacccugugccugggccaccacgccgugcccaacggcaccaucgugaagaccaucaccaacgaccagaucgaggugaccaacgccaccgagcuggugcagagcagcagcaccggcggcaucugcgacagcccccaccagauccuggacggcgagaacugcacccugaucgacgcccugcugggcgacccccagugcgacggcuuccagaacaagaagugggaccuguucguggagagaagcaaggccuacagcaacugcuaccccuacgacgugcccgacuacgccagccugagaagccugguggccagcagcggcacccuggaguucaacaacgagagcuucaacuggaccggcgugacccagaacggcaccagcagcgccugcaagagaagaagcaacaagagcuucuucagcagacugaacuggcugacccaccugaaguucaaguaccccgcccugaacgugaccaugcccaacaacgagaaguucgacaagcuguacaucuggggcgugcaccaccccggcaccgacaacgaccagaucagccuguacgcccaggccagcggcagaaucaccgugagcaccaagagaagccagcagaccgugauccccaacaucggcagcagacccagagugagagacgugcccagcagaaucagcaucuacuggaccaucgugaagcccggcgacauccugcugaucaacagcaccggcaaccugaucgcccccagaggcuacuucaagaucagaagcggcaagagcagcaucaugagaagcgacgcccccaucggcaagugcaacagcgagugcaucacccccaacggcagcauccccaacgacaagcccuuccagaacgugaacagaaucaccuacggcgccugccccagauacgugaagcagaacacccugaagcuggccaccggcaugagaaacgugcccgagaagcagaccagaggcaucuucggcgccaucgccggcuucaucgagaacggcugggagggcaugguggacggcugguacggcuucagacaccagaacgccgagggcaccggccaggccgccgaccugaagagcacccaggccgccaucaaccagaucaacggcaagcugaacagacugaucggcaagaccaacgagaaguuccaccagaucgagaaggaguucagcgagguggagggcagaauccaggaccuggagaaguacguggaggacaccaagaucgaccuguggagcuacaacgccgagcugcugguggcccuggagaaccagcacaccaucgaccugaccgacagcgagaugaacaagcuguucgagagaaccaagaagcagcugagagagaacgccgaggacaugggcaacggcugcuucaagaucuaccacaagugcgacaacgccugcaucggcagcaucagaaacggcaccuacgaccacgacguguacagagacgaggcccugaacaacagauuccagaucaagggcguggagcugaagagcggcuacaaggacuggauccuguggaucagcuucgccaucagcugcuuccugcugugcguggcccugcugggcuucaucaugugggccugccagaagggcaacaucagaugcaacaucugcaucuga

SEQ ID NO: 161865 - RNA, 1701 nt, Artificial Sequence; identical to SEQ ID NO: 161822
  derived and/or modified CDS sequence (opt4) from hemagglutinin__InfluenzaA__ABU92656

SEQ ID NO: 161866 - RNA, 1701 nt, Artificial Sequence; identical to SEQ ID NO: 160693
  derived and/or modified CDS sequence (opt4) from hemagglutinin__InfluenzaA__ABU92657

SEQ ID NO: 161867 - RNA, 1701 nt, Artificial Sequence; identical to SEQ ID NO: 161822
  derived and/or modified CDS sequence (opt4) from hemagglutinin__InfluenzaA__ABU92658

SEQ ID NO: 161868 - RNA, 1701 nt, Artificial Sequence; identical to SEQ ID NO: 160693
  derived and/or modified CDS sequence (opt4) from hemagglutinin__InfluenzaA__ABU92659

SEQ ID NO: 161869 - RNA, 1701 nt, Artificial Sequence; identical to SEQ ID NO: 161822
  derived and/or modified CDS sequence (opt4) from hemagglutinin__InfluenzaA__ABU92660

SEQ ID NO: 161870 - RNA, 1701 nt, Artificial Sequence
  derived and/or modified CDS sequence (opt4) from hemagglutinin__InfluenzaA__ABU92661
augaagaccaucaucgcccugagcuacauccugugccugguguucgcccagaagcugcccggcaacgacaacagcaccgccacccugugccugggccaccacgccgugcccaacggcaccaucgugaagaccaucaccaacgaccagaucgaggugaccaacgccaccgagcuggugcagaucagcagcaccggcgagaucugcgacagcccccaccagauccuggacggcgagaacugcacccugaucgacgcccugcugggcgacccccagugcgacggcuuccagaacaagaagugggaccuguucguggagagaagcaaggccuacagcaacugcuaccccuacgacgugcccgacuacgccagccugagaagccugguggccagcagcggcacccuggaguucaacaacgagagcuucgacuggaccggcgugacccagaacggcaccagcagcgccugcaagagaagaagcgacaagagcuucuucagcagacugaacuggcugacccaccugaaguacaaguaccccgcccugaacgugaccaugcccaacaacgagaaguucgacaagcuguacaucuggggcgugcaccaccccggcaccgacagcgaccagaucagccuguacgcccaggccagcggcagaaucaccgugagcaccaagagaagccagcagaccgugauccccaacaucggcagcagacccagagugagagacgugagcagcagaaucagcaucuacuggaccaucgugaagcccggcgacauccugcugaucaacagcaccggcaaccugaucgcccccagaggcuacuucaagaucagaagcggcaagagcagcaucaugagaagcgacgcccccaucggcaagugcaacagcgagugcaucacccccaacggcagcauccccaacgacaagcccuuccagaacgugaacagaaucaccuacggcgccugccccagauacgugaagcagaacacccugaagcuggccaccggcaugagaaacgugcccgagaagcagaccagaggcaucuucggcgccaucgccggcuucaucgagaacggcugggagggcaugguggacggcugguacggcuucagacaccagaacagcgagggcaccggccaggccgccgaccugaagagcacccaggccgccaucaaccagaucaacggcaagcugaacagacugaucggcaagaccaacgagaaguuccaccagaucgagaaggaguucagcgagguggagggcagaauccaggaccuggagaaguacguggaggacaccaagaucgaccuguggagcuacaacgccgagcugcugguggcccuggagaaccagcacaccaucgaccugaccgacagcgagaugaacaagcuguucgagagaaccaagaagcagcugagagagaacgccgaggacaugggcaacggcugcuucaagaucuaccacaagugcgacaacgccugcaucggcagcaucagaaacggcaccuacgaccacgacguguacagagacgaggcccugaacaacagauuccagaucaagggcguggagcuggagagcggcuacaaggacuggauccuguggaucagcuucgccaucagcugcuuccugcugugcguggcccugcugggcuucaucaugugggccugccagaagggcaacaucagaugcaacaucugcaucuga

SEQ ID NO: 161871 - RNA, 1701 nt, Artificial Sequence; identical to SEQ ID NO: 160133
  derived and/or modified CDS sequence (opt4) from hemagglutinin__InfluenzaA__ABU92662

SEQ ID NO: 161872 - RNA, 1701 nt, Artificial Sequence; identical to SEQ ID NO: 161822
  derived and/or modified CDS sequence (opt4) from hemagglutinin__InfluenzaA__ABU92663

SEQ ID NO: 161873 - RNA, 1701 nt, Artificial Sequence; identical to SEQ ID NO: 161822
  derived and/or modified CDS sequence (opt4) from hemagglutinin__InfluenzaA__ABU92664

SEQ ID NO: 161874 - RNA, 1701 nt, Artificial Sequence
  derived and/or modified CDS sequence (opt4) from hemagglutinin__InfluenzaA__ABU92665
augaagaccaucaucgcccugagcuacauccugugccugguguucgcccagaagcugcccggcaacgacaacagcaccgccacccugugccugggccaccacgccgugcccaacggcaccaucgugaagaccaucaccaacgaccagaucgaggugaccaacgccaccgagcuggugcagagcagcagcaccggcggcaucugcgacagcccccaccagauccuggacggcgagaacugcacccugaucgacgcccugcugggcgacccccagugcgacggcuuccagaacaagaagugggaccuguucguggagagaagcaaggccuacagcaacugcuaccccuacgacgugcccgacuacgccagccugagaagccugguggccagcagcggcacccuggaguucaacaacgagagcuucaacuggaccggcgugacccagaacggcaccagcagcgccugcaagagaagaagcaacaagagcuucuucagcagacugaacuggcugacccaccugaaguucaaguaccccgcccugaacgugaccaugcccaacaacgagaaguucgacaagcuguacaucuggggcgugcaccaccccggcaccgacaacgaccagaucagccuguacgcccaggccagcggcagaaucaccgugagcaccaagagaagccagcagaccgugauccccaacaucggcagcagacccagagugagagacgugcccagcagaaucagcaucuacuggaccaucgugaagcccggcgacauccugcugaucaacagcaccggcaaccugaucgcccccagaggcuacuucaagaucagaagcggcaagagcagcaucaugagaagcgacgcccccaucggcaagugcaacagcgagugcaucacccccaacggcagcauccccaacgacaagcccuuccagaacgugaacagaaucaccuacggcgccugccccagauacgugacccagaacacccugaagcuggccaccggcaugagaaacgugcccgagaagcagaccagaggcaucuucggcgccaucgccggcuucaucgagaacggcugggagggcaugguggacggcugguacggcuucagacaccagaacagcgagggcaccggccaggccgccgaccugaagagcacccaggccgccaucaaccagaucaacggcaagcugaacagacugaucggcaagaccaacgagaaguuccaccagaucgagaaggaguucagcgagguggagggcagaauccaggaccuggagaaguacguggaggacaccaagaucgaccuguggagcuacaacgccgagcugcugguggcccuggagaaccagcacaccaucgaccugaccgacagcgagaugaacaagcuguucgagagaaccaagaagcagcugagagagaacgccgaggacaugggcaacggcugcuucaagaucuaccacaagugcgacaacgccugcaucggcagcaucagaaacggcaccuacgaccacgacguguacagagacgaggcccugaacaacagauuccagaucaagggcguggagcugaagagcggcuacaaggacuggauccuguggaucagcuucgccaucagcugcuuccugcugugcguggcccugcugggcuucaucaugugggccugccagaagggcaacaucagaugcaacaucugcaucuga

SEQ ID NO: 161875 - RNA, 1701 nt, Artificial Sequence; identical to SEQ ID NO: 161822
  derived and/or modified CDS sequence (opt4) from hemagglutinin__InfluenzaA__ABU92666

SEQ ID NO: 161876 - RNA, 1701 nt, Artificial Sequence; identical to SEQ ID NO: 160132
  derived and/or modified CDS sequence (opt4) from hemagglutinin__InfluenzaA__ABU92667

SEQ ID NO: 161877 - RNA, 1701 nt, Artificial Sequence; identical to SEQ ID NO: 160132
  derived and/or modified CDS sequence (opt4) from hemagglutinin__InfluenzaA__ABU92668

SEQ ID NO: 161878 - RNA, 1701 nt, Artificial Sequence
  derived and/or modified CDS sequence (opt4) from hemagglutinin__InfluenzaA__ABU92669
augaagaccaucaucgcccugagcuacauccugugccugguguucgcccagaagcugcccgugaacgacaacagcaccgccacccugugccugggccaccacgccgugcccaacggcacccuggugaagaccaucaccaacgaccacaucgaggugaccaacgccaccgagcuggugcagagcagcagcaccggcagaaucugcgacagcccccaccagauccuggacggcgagaacugcacccugaucgacgcccugcugggcgacccccacugcgacggcuuccagaacaaggagugggaccuguucguggagagaagcaccgccuacagcaacugcuaccccuacgacgugcccgacuacgccagccugagaagccugguggccagcagcggcacccuggaguucaacaacgagagcuucaacuggaccggcguggcccagaacggcaccagcagcgccugcaagagaagaagcaucaagagcuucuucagcagacugaacuggcugcaccagcugaaguacaaguaccccgcccugaacgugaccaugcccaacaacgagaaguucgacaagcuguacaucuggggcgugcaccaccccagcaccgacagcgaccagaucagccuguacgcccaggccagcggcagagugaccgugagcaccaagagaagccagcagaccgugauccccaacaucggcagcagacccugggugagaggcgugagcagcagaaucagcaucuacuggaccaucgugaagcccggcgacauccugcugaucaacagcaccggcaaccugaucgcccccagaggcuacuucaagaucagaaacggcaagagcagcaucaugagaagcaacgcccccaucggcaagugcaacagcgagugcaucacccccaacggcagcauccccaacgacaagcccuuccagaacgugaacagaaucaccuacggcgccugccccagauacgugaagcagaacacccugaagcuggccaccggcaugagaaacgugcccgagaagcagaccagaggcaucuucggcgccaucgccggcuucaucgagaacggcugggagggcaugguggacggcugguacggcuucagacaccagaacagcgagggcaccggccaggccgccgaccugaagagcacccaggccgccaucaaccagaucaacggcaagcugaacagacugaucgagaagaccaacgagaaguuccaccagaucgagaaggaguucagcgagguggagggcagaauccaggaccuggagaaguacguggaggacaccaagaucgaccuguggagcuacaacgccgagcugcugguggcccuggagaaccagcacaccaucgaccugaccgacagcgagaugaacaagcuguucgagagaaccagaaagcagcugagagagaacgccgaggacaugggcaacggcugcuucaagaucuaccacaagugcgacaacgccugcaucggcagcaucagaaacggcaccuacgaccacgacguguacagagacgaggcccugaacaacagauuccagaucaagggcguggagcugaagagcggcuacaaggacuggauccuguggaucagcuucgccaucagcugcuuccugcugugcguggugcugcugggcuucaucaugugggccugccagaagggcaacaucagaugcaacaucugcaucuga

SEQ ID NO: 161879 - RNA, 1701 nt, Artificial Sequence; identical to SEQ ID NO: 160132
  derived and/or modified CDS sequence (opt4) from hemagglutinin__InfluenzaA__ABU92670

SEQ ID NO: 161880 - RNA, 1701 nt, Artificial Sequence
  derived and/or modified CDS sequence (opt4) from hemagglutinin__InfluenzaA__ABU92671
augaagaccaucaucgcccugagccacauccugugccugguguucgcccagaagcugcccgugaacgacaacagcaccgccacccugugccugggccaccacgccgugcccaacggcacccuggugaagaccaucaccaacgaccacaucgaggugaccaacgccaccgagcuggugcagagcagcagcaccggcagaaucugcgacaucccccaccagauccuggacggcgagaacugcacccugaucgacgcccugcugggcgacccccacugcgacggcuuccagaacaaggagugggaccuguucguggagagaagcaccgccuacagcaacugcuaccccuacgacgugcccgacuacgccagccugagaagccugguggccagcagcggcacccuggaguucaacaacgagagcuucaacuggaccggcguggcccagaacggcaccagcagcgccugcaagagaagaagcaucaagagcuucuucagcagacugaacuggcugcaccagcugaaguacaaguaccccgcccugaacgugaccaugcccaacaacgagaaguucgacaagcuguacaucuggggcgugcaccaccccagcaccgacagcgaccagaucagccuguacgcccaggcccccggcagagugaccgugagcaccaagagaagccagcagaccgugauccccaacaucggcagcagacccugggugagaggcgugagcagcagaaucagcaucuacuggaccaucgugaagcccggcgacauccugcugaucaacagcaccggcaaccugaucgcccccagaggcuacuucaagaucagaagcggcaagagcagcaucaugagaagcaacgcccccaucggcaagugcaacagcgagugcaucacccccaacggcagcauccccaacgacaagcccuuccagaacgugaacagaaucaccuacggcgccugccccagauacgugaagcagaacacccugaagcuggccaccggcaugagaaacgugcccgagaagcagaccagaggcaucuucggcgccaucgccggcuucaucgagaacggcugggagggcaugguggacggcugguacggcuucagacaccagaacagcgagggcaccggccaggccgccgaccugaagagcacccaggccgccaucaaccagaucaacggcaagcugaacagacugaucgagaagaccaacgagaaguuccaccagaucgagaaggaguucagcgaggccgagggcagaauccaggaccuggagaaguacguggaggacaccaagaucgaccuguggagcuacaacgccgagcugcugguggcccuggagaaccagcacaccaucgaccugaccgacagcgagaugaacaagcuguucgagagaaccagaaagcagcugagagagaacgccgaggacaugggcaacggcugcuucaagaucuaccacaagugcgacaacgccugcaucggcagcaucagaaacggcaccuacgaccacgacguguacagagacgaggcccugaacaacagauuccagaucaagggcguggagcugaagagcggcuacaaggacuggauccuguggaucagcuucgccaucagcugcuuccugcugugcguggugcugcugggcuucaucaugugggccugccagaagggcaacaucagaugcaacaucugcaucuga

SEQ ID NO: 161881 - RNA, 1701 nt, Artificial Sequence; identical to SEQ ID NO: 160132
  derived and/or modified CDS sequence (opt4) from hemagglutinin__InfluenzaA__ABU92672

SEQ ID NO: 161882 - RNA, 1701 nt, Artificial Sequence; identical to SEQ ID NO: 160132
  derived and/or modified CDS sequence (opt4) from hemagglutinin__InfluenzaA__ABU92673

SEQ ID NO: 161883 - RNA, 1701 nt, Artificial Sequence
  derived and/or modified CDS sequence (opt4) from hemagglutinin__InfluenzaA__ABU92674
augaagaccaucaucgcccugagcuacauccugugccugguguucgcccagaagcugcccgugaacgacaacagcaccgccacccugugccugggccaccacgccgugcccaacggcacccuggugaagaccaucaccaacgaccacaucgaggugaccaacgccaccgagcuggugcagagcagcagcaccggcagaaucugcgacagcccccaccagauccuggacggcgagaacugcacccugaucgacgcccugcugggcgacccccacugcgacggcuuccagaacaaggagugggaccuguucguggagagaagaaccgccuacagcaacugcuaccccuacgacgugcccgacuacgccagccugagaagccugguggccagcagcggcacccuggaguucaacaacgagagcuucaacuggaccggcguggcccagaacggcaccagcagcgccugcaagagaagaagcaucaagagcuucuucagcagacugaacuggcugcaccagcugaaguacaaguaccccgcccugaacgugaccaugcccaacaacgagaaguucgacaagcuguacaucuggggcgugcaccaccccagcaccgacagcgaccagaucagccuguacgcccaggccagcggcagagugaccgugagcaccaagagaagccagcagaccgugauccccaacaucggcagcagacccugggugagaggcgugagcagcagaaucagcaucuacuggaccaucgugaagcccggcgacauccugcugaucaacagcaccggcaaccugaucgcccccagaggcuacuucaagaucagaagcggcaagagcagcaucaugagaagcaacgcccccaucggcaagugcaacagcgagugcaucacccccaacggcagcauccccaacgacaagcccuuccagaacgugaacagaaucaccuacggcgccugccccagauacgugaagcagaacacccugaagcuggccaccggcaugagaaacgugcccgagaagcagaccagaggcaucuucggcgccaucgccggcuucaucgagaacggcugggagggcaugguggacggcugguacggcuucagacaccagaacagcgagggcaccggccaggccgccgaccugaagagcacccaggccgccaucaaccagaucaacggcaagcugaacagacugaucgagaagaccaacgagaaguuccaccagaucgagaaggaguucagcgagguggagggcagaauccaggaccuggagaaguacguggaggacaccaagaucgaccuguggagcuacaacgccgagcugcugguggcccuggagaaccagcacaccaucgaccugaccgacagcgagaugaacaagcuguucgagagaaccagaaagcagcugagagagaacgccgaggacaugggcaacggcugcuucaagaucuaccacaagugcgacaacgccugcaucggcagcaucagaaacggcaccuacgaccacgacguguacagagacgaggcccugaacaacagauuccagaucaagggcguggagcugaagagcggcuacaaggacuggauccuguggaucagcuucgccaucagcugcuuccugcugugcguggugcugcugggcuucaucaugugggccugccagaagggcaacaucagaugcaacaucugcaucuga

SEQ ID NO: 161884 - RNA, 1701 nt, Artificial Sequence
  derived and/or modified CDS sequence (opt4) from hemagglutinin__InfluenzaA__ABU92675
augaagaccaucaucgcccugagcuacauccugugccugguguucgcccagaagcugcccggcaacgacaacagcaccgccacccugugccugggccaccacgccgugcccaacggcaccaucgugaagaccaucaccaacgaccagaucgaggugaccaacgccaccgagcuggugcagagcagcagcaccggcggcaucugcgacagcccccaccagauccuggacggcgagaacugcacccugaucgacgcccugcugggcgacccccagugcgacggcuuccagaacaagaagugggaccuguucguggagagaagcaaggccuacagcaacugcuaccccuacgacgugcccgacuacgccagccugagaagccugaucgccagcagcggcacccuggaguucaacaacgagagcuucaacuggaccggcgugacccagaacggcaccagcagcgccugcaagagaagaagcaacagcagcuucuucagcagacugaacuggcugacccaccugaaguucaaguaccccgcccugaacgugaccaugcccaacaacgaggaguucgacaagcuguacaucuggggcgugcaccaccccggcaccgacaacgaccagaucagccuguacgcccaggccagcggcagaaucaccgugagcaccaagagaagccagcagaccgugauccccaacaucggcagcagacccagagugagagacauccccagcagaaucagcaucuacuggaccaucgugaagcccggcgacauccugcugaucaacagcaccggcaaccugaucgcccccagaggcuacuucaagaucagaagcggcaagagcagcaucaugagaagcgacgcccccaucggcaagugcaacagcgagugcaucacccccaacggcagcauccccaacgacaagcccuuccagaacgugaacagaaucaccuacggcgccugccccagauacgugaagcagaacacccugaagcuggccaccggcaugagaaacgugcccgagaagcagaccagaggcaucuucggcgccaucgccggcuucaucgagaacggcugggagggcaugguggacggcugguacggcuucagacaccagaacagcgagggcaucggccaggccgccgaccugaagagcacccaggccgccaucgaccagaucaacggcaagcugaacagacugaucggcaagaccaacgagaaguuccaccagaucgagaaggaguucagcgagguggagggcagaauccaggaccuggagaaguacguggaggacaccaagaucgaccuguggagcuacaacgccgagcugcugguggcccuggagaaccagcacaccaucgaccugaccgacagcgagaugaacaagcuguucgagagaaccaagaagcagcugagagagaacgccgaggacaugggcaacggcugcuucaagaucuaccacaagugcgacaacgccugcaugggcagcaucagaaacggcaccuacgaccacgacguguacagagacgaggcccugaacaacagauuccagaucaagggcguggagcugaagagcggcuacaaggacuggauccuguggaucagcuucgccaucagcugcuuccugcugugcguggcccugcugggcuucaucaugugggccugccagaagggcaacaucagaugcaacaucugcaucuga

SEQ ID NO: 161885 - RNA, 1701 nt, Artificial Sequence; identical to SEQ ID NO: 160693
  derived and/or modified CDS sequence (opt4) from hemagglutinin__InfluenzaA__ABU92676

SEQ ID NO: 161886 - RNA, 1701 nt, Artificial Sequence; identical to SEQ ID NO: 161813
  derived and/or modified CDS sequence (opt4) from hemagglutinin__InfluenzaA__ABU92677

SEQ ID NO: 161887 - RNA, 1701 nt, Artificial Sequence
  derived and/or modified CDS sequence (opt4) from hemagglutinin__InfluenzaA__ABU92678
augaagaccaucaucgcccugagcuacauccugugccugguguucgcccagaagcugcccggcaacgacaacagcaccgccacccugugccugggccaccacgccgugcccaacggcaccaucgugaagaccaucaccaacgaccagaucgaggugaccaacgccaccgagcuggugcagagcagcagcaccggcggcaucugcgacagcccccaccagauccuggacggcgagaacugcacccugaucgacgcccugcugggcgacccccagugcgacggccugcagaacaagaagugggaccuguucguggagagaagcaaggccuacagcaacugcuaccccuacgacgugcccgacuacgccagccugagaagccugaucgccagcagcggcacccuggaguucaacaacgagagcuucaacuggaccggcgugacccagaacggcaccagcagcgccugcaagagaagaagcaacaacagcuucuucagcagacugaacuggcugacccaccugaaguucaaguaccccgcccugaacgugaccaugcccaacaacgaggaguucgacaagcuguacaucuggggcgugcaccaccccggcaccgacaacgaccagaucagccuguacgcccaggccagcggcagaaucaccgugagcaccaagagaagccagcagaccgugauccccaacaucggcagcagacccagagugagagacauccccagcagaaucagcaucuacuggaccaucgugaagcccggcgacauccugcugaucaacagcaccggcaaccugaucgcccccagaggcuacuucaagaucagaagcggcaagagcagcaucaugagaagcgacgcccccaucggcaacugcaacagcgagugcaucacccccaacggcagcauccccaacgacaagcccuuccagaacgugaacagaaucaccuacggcgccugccccagauacgugaagcagaacacccugaagcuggccaccggcaugagaaacgugcccgagaagcagaccagaggcaucuucggcgccaucgccggcuucaucgagaacggcugggagggcaugguggacggcugguacggcuucagacaccagaacagcgagggcaucggccaggccgccgaccugaagagcacccaggccgccaucgaccagaucaacggcaagcugaacagacugaucggcaagaccaacgagaaguuccaccagaucgagaaggaguucagcgagguggagggcagaauccaggaccuggagaaguacguggaggacaccaagaucgaccuguggagcuacaacgccgagcugcugguggcccuggagaaccagcacaccaucgaccugaccgacagcgagaugaacaagcuguucgagagaaccaagaagcagcugagagagaacgccgaggacaugggcaacggcugcuucaagaucuaccacaagugcgacaacgccugcaucggcagcaucagaaacggcaccuacgaccacgacguguacagagacgaggcccugaacaacagauuccagaucaagggcguggagcugaagagcggcuacaaggacuggauccuguggaucagcuucgccaucagcugcuuccugcugugcguggcccugcugggcuucaucaugugggccugccagaagggcaacaucagaugcaacaucugcaucuga

SEQ ID NO: 161888 - RNA, 1701 nt, Artificial Sequence
  derived and/or modified CDS sequence (opt4) from hemagglutinin__InfluenzaA__ABU92680
augaagaccaucaucgcccugagcuacauccugugccugguguucgcccagaagcugcccggcaacgacaacagcaccgccacccugugccugggccaccacgccgugcccaacggcaccaucgugaagaccaucaccaacgaccagaucgaggugaccaacgccaccgagcuggugcagagcagcagcaccggcggcaucugcgacagcccccaccagauccuggacggcgagaacugcacccugaucgacgcccugcugggcgacccccagugcgacggcuuccagaacaagaagugggaccuguucguggagagaagcaaggccuacagcaacugcuaccccuacgacgugcccgacuacgccagccugagaagccugguggccagcagcggcacccuggaguucaacaacgagagcuucaacuggaccggcgugacccagaacggcaccagcagcgccugcaagagaagaagcaacaacagcuucuucagcagacugaacuggcugacccaccugaaguucaaguaccccgcccugaacgugaccaugcccaacaacgagaaguucgacaagcuguacaucuggggcgugcaccaccccggcaccgacaacgaccagaucuuccuguacgcccaggccagcggcagaaucaccgugagcaccaagagaagccagcagaccgugauccccaacaucggcagcagacccagagugagaaacauccccagcagaaucagcaucuacuggaccaucgugaagcccggcgacauccugcugaucaacagcaccggcaaccugaucgcccccagaggcuacuucaagaucagaagcggcaagagcagcaucaugagaagcgacgcccccaucggcaagugcaacagcgagugcaucacccccaacggcagcauccccaacgacaagcccuuccagaacgugaacagaaucaccuacggcgccugccccagauacgugaagcagaacacccugaagcuggccaccggcaugagaaacgugcccgagaagcagaccagaggcaucuucggcgccaucgccggcuucaucgagaacggcugggagggcaugguggacggcugguacggcuucagacaccagaacagcgagggcaucggccaggccgccgaccugaagagcacccaggccgccaucgaccagaucaacggcaagcugaacagacugaucggcaagaccaacgagaaguuccaccagaucgagaaggaguucagcgagguggagggcagaauccaggaccuggagaaguacguggaggacaccaagaucgaccuguggagcuacaacgccgagcugcugguggcccuggagaaccagcacaccaucgaccugaccgacagcgagaugaacaagcuguucgagaagaccaagaagcagcugagagagaacgccgaggacaugggcaacggcugcuucaagaucuaccacaagugcgacaacgccugcaucggcagcaucagaaacggcaccuacgaccacgacguguacagagacgaggcccugaacaacagauuccagaucaagggcguggagcugaagagcggcuacaaggacuggauccuguggaucagcuucgccaucagcugcuuccugcugugcguggcccugcugggcuucaucaugugggccugccagaagggcaacaucagaugcaacaucugcaucuga

SEQ ID NO: 161889 - RNA, 1701 nt, Artificial Sequence; identical to SEQ ID NO: 161817
  derived and/or modified CDS sequence (opt4) from hemagglutinin__InfluenzaA__ABU92681

SEQ ID NO: 161890 - RNA, 1701 nt, Artificial Sequence; identical to SEQ ID NO: 160133
  derived and/or modified CDS sequence (opt4) from hemagglutinin__InfluenzaA__ABU92682

SEQ ID NO: 161891 - RNA, 1701 nt, Artificial Sequence; identical to SEQ ID NO: 161822
  derived and/or modified CDS sequence (opt4) from hemagglutinin__InfluenzaA__ABU92683

SEQ ID NO: 161892 - RNA, 1701 nt, Artificial Sequence
  derived and/or modified CDS sequence (opt4) from hemagglutinin__InfluenzaA__ABU92684
augaagaccaucaucgcccugagcuacauccugugccugguguucgcccagaagcugcccggcaacgacaacagcaccgccacccugugccugggccaccacgccgugcccaacggcaccaucgugaagaccaucaccaacgaccagaucgaggugaccaacgccaccgagcuggugcagaucagcagcaccggcggcaucugcgacagcccccaccagauccuggacggcgagaacugcacccugaucgacgcccugcugggcgacccccagugcgacggcuuccagaacaagaagugggaccuguucaucgagagaagcaaggccuacagcaacugcuaccccuacgacgugcccgacuacgccagccugagaagccugguggccagcagcggcacccuggaguucaacaacgagagcuucgacuggaccggcgugacccagaacggcaccagcagcgccugcaagagaagaagcaacaagagcuucuucagcagacugaacuggcugacccaccugaaguacaaguaccccgcccugaacgugaccaugcccaacaacgagaaguucgacaagcuguacaucuggggcgugcaccaccccggcaccgacagcgaccagaucagccuguacgcccaggcccccggcagaaucaccgugagcaccaagagaagccagcagaccgugauccccaacaucggcagcagacccagagugagagacgugagcagcagaaucagcaucuacuggaccaucgugaagcccggcgacauccugcugaucaacagcaccggcaaccugaucgcccccagaggcuacuucaagaucagaagcggcaagagcagcaucaugagaagcgacgcccccaucggcaagugcaacagcgagugcaucacccccaacggcagcauccccaacgacaagcccuuccagaacgugaacagaaucaccuacggcgccugccccagauacgugaagcagaacacccugaagcuggccaccggcaugagaaacgugcccgagaagcagaccagaggcaucuucggcgccaucgccggcuucaucgagaacggcugggagggcaugguggacggcugguacggcuucagacaccagaacagcgagggcaccggccaggccgccgaccugaagagcacccaggccgccaucaaccagaucaacggcaagcugaacagacugaucggcaagaccaacgagaaguuccaccagaucgagaaggaguucagcgagguggagggcagaauccaggaccuggagaaguacguggaggacaccaagaucgaccuguggagcuacaacgccgagcugcugguggcccuggagaaccagcacaccaucgaccugaccgacagcgagaugaacaagcuguucgagagaaccaagaagcagcugagagagaacgccgaggacaugggcaacggcugcuucaagaucuaccacaagugcgacaacgccugcaucggcagcaucagaaacggcaccuacgaccacgacguguacagagacgaggcccugaacaacagauuccagaucaagggcguggagcugaagagcggcuacaaggacuggauccuguggaucagcuucgccaucagcugcuuccugcugugcguggcccugcugggcuucaucaugugggccugccagaagggcaacaucagaugcaacaucugcaucuga

SEQ ID NO: 161893 - RNA, 1701 nt, Artificial Sequence
  derived and/or modified CDS sequence (opt4) from hemagglutinin__InfluenzaA__ABU92685
augaagaccaucaucgcccugagcuacauccugugccugguguucgcccagaagcugcccggcaacgacaacagcaccgccacccugugccugggccaccacgccgugcccaacggcaccaucgugaagaccaucaccaacgaccagaucgaggugaccaacgccaccgagcuggugcagaucagcagcaccggcggcaucugcgacagcccccaccagauccuggacggcgagaacugcacccugaucgacgcccugcugggcgacccccagugcgacggcuuccagaacaagaagugggaccuguucguggagagaagcaaggccuacagcaacugcuaccccuacgacgugcccgacuacgccagccugagaagccugguggccagcagcggcacccuggaguucaacaacgagagcuucgacuggaccggcgugacccagaacggcaccagcagcgccugcaagagaagaagcaacaagagcuucuucagcagacugaacuggcugacccaccugaaguacaaguaccccgcccugaacgugaccaugcccaacaacgagaaguucgacaagcuguacaucuggggcgugcaccaccccggcaccgacagcgaccagaucagccuguacgcccaggccagcggcagaaucaccgugagcaccaagagaagccagcagaccgugauccccaacaucggcagcagacccagagugagagacgugagcagcagaaucagcaucuacuggaccaucgugaagcccggcgacauccugcugaucaacagcaccggcaaccugaucgcccccagaggcuacuucaagaucagaagcggcaagagcagcaucaugaagagcgacgcccccaucggcaagugcaacagcgagugcaucacccccaacggcagcauccccaacgacaagcccuuccagaacgugaacagaaucaccuacggcgccugccccagauacgugaagcagaacacccugaagcuggccaccggcaugagaaacgugcccgagaagcagaccagaggcaucuucggcgccaucgccggcuucaucgagaacggcugggagggcaugguggacggcugguacggcuucagacaccagaacagcgagggcaccggccaggccgccgaccugaagagcacccaggccgccaucaaccagaucaacggcaagcugaacagacugaucggcaagaccaacgagaaguuccaccagaucgagaaggaguucagcgagguggagggcagaauccaggaccuggagaaguacguggaggacaccaagaucgaccuguggagcuacaacgccgagcugcugguggcccuggagaaccagcacaccaucgaccugaccgacagcgagaugaacaagcuguucgagagaaccaagaagcagcugagagagaacgccgaggacaugggcaacggcugcuucaagaucuaccacaagugcgacaacgccugcaucggcagcaucagaaacggcaccuacgaccacgacguguacagagacgaggcccugaacaacagauuccagaucaagggcguggagcugaagagcggcuacaaggacuggauccuguggaucagcuucgccaucagcugcuuccugcugugcguggcccugcugggcuucaucaugugggccugccagaagggcaacaucagaugcaacaucugcaucuga

SEQ ID NO: 161894 - RNA, 1701 nt, Artificial Sequence; identical to SEQ ID NO: 161822
  derived and/or modified CDS sequence (opt4) from hemagglutinin__InfluenzaA__ABU92686

SEQ ID NO: 161895 - RNA, 1701 nt, Artificial Sequence; identical to SEQ ID NO: 161822
  derived and/or modified CDS sequence (opt4) from hemagglutinin__InfluenzaA__ABU92687

SEQ ID NO: 161896 - RNA, 1701 nt, Artificial Sequence; identical to SEQ ID NO: 161855
  derived and/or modified CDS sequence (opt4) from hemagglutinin__InfluenzaA__ABU92688

SEQ ID NO: 161897 - RNA, 1701 nt, Artificial Sequence; identical to SEQ ID NO: 161822
  derived and/or modified CDS sequence (opt4) from hemagglutinin__InfluenzaA__ABU92689

SEQ ID NO: 161898 - RNA, 1701 nt, Artificial Sequence
  derived and/or modified CDS sequence (opt4) from hemagglutinin__InfluenzaA__ABU92691
augaagaccaucaucgcccugagcuacauccugugccugguguucgcccagaagcugcccggcaacgacaacagcaccgccacccugugccugggccaccacgccgugcccaacggcaccaucgugaagaccaucaccaacgaccagaucgaggugaccaacgccaccgagcuggugcagaucagcagcaccggcggcaucugcgacagcccccaccagauccuggacggcgagaacugcacccugaucgacgcccugcugggcgacccccagugcgacggcuuccagaacaagaagugggaccuguucguggagagaagcaaggccuacagcaacugcuaccccuacgacgugcccgacuacgccagccugagaagccugguggccagcagcggcacccuggaguucaacaacgagagcuucgacuggaccggcgugacccagaacggcaccagcagcgccugcaagagaagaagcaacaagagcuucuucagcagacugaacuggcugacccaccugaaguacaaguaccccgcccugaacgugaccaugcccaacaacgagaaguucgacaagcuguacaucuggggcgugcaccaccccggcaccgacagcgaccagaucagccuguacgcccaggccagcggcagaaucaccgugagcaccaagagaagccagcagaccgugauccccaacaucggcagcagacccagagugagagacgugagcagcagaaucagcaucuacuggaccaucgugaagcccggcgacauccugcugaucaacagcaccggcaaccugaucgcccccagaggcuacuucaagaucagaagcggcaagagcagcgugaugagaagcgacgcccccaucggcaagugcaacagcgagugcaucacccccaacggcagcauccccaacgacaagcccuuccagaacgugaacagaaucaccuacggcgccugccccagauacgugaagcagaacacccugaagcuggccaccggcaugagaaacgugcccgagaagcagaccagaggcaucuucggcgccaucgccggcuucaucgagaacggcugggagggcaugguggacggcugguacggcuucagacaccagaacagcgagggcaccggccaggccgccgaccugaagagcacccaggccgccaucaaccagaucaacggcaagcugaacagacugaucggcaagaccaacgagaaguuccaccagaucgagaaggaguucagcgagguggagggcagaauccaggaccuggagaaguacguggaggacaccaagaucgaccuguggagcuacaacgccgagcugcugguggcccuggagaaccagcacaccaucgaccugaccgacagcgagaugaacaagcuguucgagagaaccaagaagcagcugagagagaacgccgaggacaucggcaacggcugcuucaagaucuaccacaagugcgacaacgccugcaucggcagcaucagaaacggcaccuacgaccacaacguguacagagacgaggcccugaacaacagauuccagaucaagggcguggagcugaagagcggcuacaaggacuggauccuguggaucagcuucgccaucagcugcuuccugcugugcguggcccugcugggcuucaucaugugggccugccagaagggcaacaucagaugcaacaucugcaucuga

SEQ ID NO: 161899 - RNA, 1701 nt, Artificial Sequence; identical to SEQ ID NO: 160750
  derived and/or modified CDS sequence (opt4) from hemagglutinin__InfluenzaA__ABU92692

SEQ ID NO: 161900 - RNA, 1701 nt, Artificial Sequence
  derived and/or modified CDS sequence (opt4) from hemagglutinin__InfluenzaA__ABU92693
augaaggccaucaucgcccugagcuacauccugugccugguguucgcccagaagcugcccggcaacgacaacagcaccgccacccugugccugggccaccacgccgugcccaacggcaccaucgugaagaccaucaccaacgaccagaucgaggugaccaacgccaccgagcuggugcagaucagcagcaccggcgagaucugcgacagcccccaccagauccuggacggcgagaacugcacccugaucgacgcccugcugggcgacccccagugcgacggcuuccagaacaagaagugggaccuguucguggagagaagcaaggccuacagcaacugcuaccccuacgacgugcccgacuacgccagccugagaagccugguggccagcagcggcacccuggaguucaacaacgagagcuucgacuggaccggcgugacccagaacggcaccagcagcgccugcaagagaagaagcgacaagagcuucuucagcagacugaacuggcugacccaccugaaguacaaguaccccgcccugaacgugaccaugcccaacaacgagaaguucgacaagcuguacaucuggggcgugcaccaccccggcaccgacagcgaccagaucagccuguacgcccaggccagcggcagaaucaccgugagcaccaagagaagccagcagaccgugauccccaacaucggcagcagacccagagugagagacgugagcagcagaaucagcaucuacuggaccaucgugaagcccggcgacauccugcugaucaacagcaccggcaaccugaucgcccccagaggcuacuucaagaucagaagcggcaagagcagcaucaugagaagcgacgcccccaucggcaagugcaacagcgagugcaucacccccaacggcagcauccccaacgacaagcccuuccagaacgugaacagaaucaccuacggcgccugccccagauacgugaagcagaacacccugaagcuggccaccggcaugagaaacgugcccgagaagcagaccagaggcaucuucggcgccaucgccggcuucaucgagaacggcugggagggcaugguggacggcugguacggcuucagacaccagaacagcgagggcaccggccaggccgccgaccugaagagcacccaggccgccaucaaccagaucaacggcaagcugaacagacugaucggcaagaccaacgagaaguuccaccagaucgagaaggaguucagcgagguggagggcagaauccaggaccuggagaaguacguggaggacaccaagaucgaccuguggagcuacaacgccgagcugcugguggcccuggagaaccagcacaccaucgaccugaccgacagcgagaugaacaagcuguucgagagaaccaagaagcagcugagagagaacgccgaggacaugggcaacggcugcuucaagaucuaccacaagugcgacaacgccugcaucggcagcaucagaaacggcaccuacgaccacgacguguacagagacgaggcccugaacaacagauuccagaucaagggcguggagcugaagagcggcuacaaggacuggauccuguggaucagcuucgccaucagcugcuuccugcugugcguggcccugcugggcuucaucaugugggccugccagaagggcaacaucagaugcaacaucugcaucuga

SEQ ID NO: 161901 - RNA, 1701 nt, Artificial Sequence
  derived and/or modified CDS sequence (opt4) from hemagglutinin__InfluenzaA__ABU92694
augaagaccaucaucgcccugagcuacauccugugccugguguucgcccagaagcugcccggcaacgacaacagcaccgccacccugugccugggccaccacgccgugcccaacggcaccaucgugaagaccaucaccaacgaccagaucgaggugaccaacgccaccgagcuggugcagagcagcagcaccggcggcaucugcgacagcccccaccagauccuggacggcgagaacugcacccugaucgacgcccugcugggcgacccccagugcgacggcuuccagaacaagaagugggaccuguucguggagagaagcaaggccuacagcaacugcuaccccuacgacgugcccgacuacgccagccugagaagccugguggccagcagcggcacccuggaguucaacaacgagagcuucaacuggaccggcgugacccagaacggcaccagcagcgccugcaagagaagaagcaacaacagcuucuucagcagacugaacuggcugacccaccugaaguucaaguaccccgcccugaacgugaccaugcccaacaacgagaaguucgacaagcuguacaucuggggcgugcaccaccccggcaccgacaacgaccagaucagccuguacgcccaggccagcggcagaaucaccgugagcaccaagagaagccagcagaccgugauccccaacaucggcagcagacccagagugagagacauccccagcagaaucagcaucuacuggaccaucgugaagcccggcgacauccugcugaucaacagcaccggcaaccugaucgcccccagaggcuacuucaagaucagaagcggcaagagcagcaucaugagaagcgacgcccccaucggcaagugcaacagcgagugcaucacccccaacggcagcauccccaacgacaagcccuuccagaacgugaacagaaucaccuacggcgccugccccagauacgugaagcagaacacccugaagcuggccaccggcaugagaaacgugcccgagaagcagaccagaggcaucuucggcgccaucgccggcuucaucgagaacggcugggagggcaugguggacggcugguacggcuucagacaccagaacagcgagggcaucggccaggccgccgaccugaagagcacccaggccgccaucaaccagaucaacggcaagcugaacagacugaucggcaagaccaacgagaaguuccaccagaucgagaaggaguucagcgagguggagggcagaauccaggaccuggagaaguacguggaggacaccaagguggaccuguggagcuacaacgccgagcugcugguggcccuggagaaccagcacaccaucgaccugaccgacagcgagaugaacaagcuguucgagagaaccaagaagcagcugagagagaacgccgaggacaugggcaacggcugcuucaagaucuaccacaagugcgacaacgccugcaucggcagcaucagaaacggcaccuacgaccacgacguguacagagacgaggcccugaacaacagauuccagaucaagggcguggagcugaagagcggcuacaaggacuggauccuguggaucagcuucgccaucagcugcuuccugcugugcguggcccugcugggcuucaucaugugggccugccagaagggcaacaucagaugcaacaucugcaucuga

SEQ ID NO: 161902 - RNA, 1701 nt, Artificial Sequence; identical to SEQ ID NO: 161813
  derived and/or modified CDS sequence (opt4) from hemagglutinin__InfluenzaA__ABU92695

SEQ ID NO: 161903 - RNA, 1701 nt, Artificial Sequence
  derived and/or modified CDS sequence (opt4) from hemagglutinin__InfluenzaA__ABU92696
augaagaccaucaucgcccugggcuacauccugugccugguguucgcccagaagcugcccggcaacgacaacagcaccgccacccugugccugggccaccacgccgugcccaacggcaccaucgugaagaccaucaccaacgaccagaucgaggugaccaacgccaccgagcuggugcagagcagcagcaccggcggcaucugcgacagcccccaccagauccuggacggcgagaacugcacccugaucgacgcccugcugggcgacccccagugcgacggcuuccagaacaagaagugggaccuguucguggagagaagcaaggccuacagcaacugcuaccccuacgacgugcccgacuacgccagccugagaagccugaucgccagcagcggcacccuggaguucaacaacgagagcuucaacuggaccggcgugacccagaacggcaccagcagcgccugcaagagaagaagcaacagcagcuucuucagcagacugaacuggcugacccaccugaaguucaaguaccccgcccugaacgugaccaugcccaacaacgaggaguucgacaagcuguacaucuggggcgugcaccaccccggcaccgacaacgaccagaucagccuguacgcccaggccagcggcagaaucaccgugagcaccaagagaagccagcagaccgugauccccaacaucggcagcagacccagagugagagacauccccagcagaaucagcaucuacuggaccaucgugaagcccggcgacauccugcugaucaacagcaccggcaaccugaucgcccccagaggcuacuucaagaucagaagcggcaagagcagcaucaugagaagcgacgcccccaucggcaagugcaacagcgagugcaucacccccaacggcagcauccccaacgacaagcccuuccagaacgugaacagaaucaccuacggcgccugccccagauacgugaagcagaacacccugaagcuggccaccggcaugagaaacgugcccgagaagcagaccagaggcaucuucggcgccaucgccggcuucaucgagaacggcugggagggcaugguggacggcugguacggcuucagacaccagaacagcgagggcaucggccaggccgccgaccugaagagcacccaggccgccaucgaccagaucaacggcaagcugaacagacugaucggcaagaccaacgagaaguuccaccagaucgagaaggaguucagcgagguggagggcagaauccaggaccuggagaaguacguggaggacaccaagaucgaccuguggagcuacaacgccgagcugcugguggcccuggagaaccagcacaccaucgaccugaccgacagcgagaugaacaagcuguucgagagaaccaagaagcagcugagagagaacgccgaggacaugggcaacggcugcuucaagaucuaccacaagugcgacaacgccugcaucggcagcaucagaaacggcaccuacgaccacgacguguacagagacgaggcccugaacaacagauuccagaucaagggcguggagcugaagagcggcuacaaggacuggauccuguggaucagcuucgccaucagcugcuuccugcugugcguggcccugcugggcuucaucaugugggccugccagaagggcaacaucagaugcaacaucugcaucuga

SEQ ID NO: 161904 - RNA, 1701 nt, Artificial Sequence; identical to SEQ ID NO: 160693
  derived and/or modified CDS sequence (opt4) from hemagglutinin__InfluenzaA__ABU92697

SEQ ID NO: 161905 - RNA, 1701 nt, Artificial Sequence; identical to SEQ ID NO: 160303
  derived and/or modified CDS sequence (opt4) from hemagglutinin__InfluenzaA__ABU92698

SEQ ID NO: 161906 - RNA, 1701 nt, Artificial Sequence
  derived and/or modified CDS sequence (opt4) from hemagglutinin__InfluenzaA__ABU92699
augaagaccaucaucgcccugagcuacauccugugccugguguucgcccagaagcugcccggcaacgacaacagcaccgccacccugugccugggccaccacgccgugcccaacggcaccaucgugaagaccaucaccaacgaccagaucgaggugaccaacgccaccgagcuggugcagagcagcagcaccggcggcaucugcgacagcccccaccagauccuggacggcgagaacugcacccugaucgacgcccugcugggcgacccccagugcgacggcuuccagaacaagaagugggaccuguucguggagagaagcaaggccuacagcaacugcuaccccuacgacgugcccgacuacgccagccugagaagccugguggccagcagcggcacccuggaguucaacaacgagagcuucaacugggccggcgugacccagaacggcaccagcagcgccugcaagagaagaagcaacaacagcuucuucagcagacugaacuggcugacccaccugaaguucaaguaccccgcccugaacgugaccaugcccaacaacgagaaguucgacaagcuguacaucuggggcgugcaccaccccggcaccgacaacgaccagaucuuccuguacgcccaggccagcggcagaaucaccgugagcaccaagagaagccagcagaccgugauccccaacaucggcagcagacccagagugagaaacauccccagcagaaucagcaucuacuggaccaucgugaagcccggcgacauccugcugaucaacagcaccggcaaccugaucgcccccagaggcuacuucaagaucagaagcggcaagagcagcaucaugagaagcgacgcccccaucggcaagugcaacagcgagugcaucacccccaacggcagcauccccaacgacaagcccuuccagaacgugaacagaaucaccuacggcgccugccccagauacgugaagcagaacacccugaagcuggccaccggcaugagaaacgugcccgagaagcagaccagaggcaucuucggcgccaucgccggcuucaucgagaacggcugggagggcaugguggacggcugguacggcuucagacaccagaacagcgagggcaucggccaggccgccgaccugaagagcacccaggccgccaucgaccagaucaacggcaagcugaacagacugaucggcaagaccaacgagaaguuccaccagaucgagaaggaguucagcgagguggagggcagaauccaggaccuggagaaguacguggaggacaccaagaucgaccuguggagcuacaacgccgagcugcugguggcccuggagaaccagcacaccaucgaccugaccgacagcgagaugaacaagcuguucgagaagaccaagaagcagcugagagagaacgccgaggacaugggcaacggcugcuucaagaucuaccacaagugcgacaacgccugcaucggcagcaucagaaacggcaccuacgaccacgacguguacagagacgaggcccugaacaacagauuccagaucaagggcguggagcugaagagcggcuacaaggacuggauccuguggaucagcuucgccaucagcugcuuccugcugugcguggcccugcugggcuucaucaugugggccugccagaagggcaacaucagaugcaacaucugcaucuga

SEQ ID NO: 161907 - RNA, 1701 nt, Artificial Sequence
  derived and/or modified CDS sequence (opt4) from hemagglutinin__InfluenzaA__ABU92700
augaagaccaucaucgcccugagcuacauccugugccugguguucgcccagaagcugcccgagaacgacaacagcaccgccacccugugccugggccaccacgccgugcccaacggcaccaucgugaagaccaucaccaacgaccagaucgaggugaccaacgccaccgagcuggugcagagcagcagcaccggcggcaucugcgacagcccccaccagauccuggacggcgagaacugcacccugaucgacgcccugcugggcgacccccagugcgacggcuuccagaacaagaagugggaccuguucguggagagaagcaaggccuacagcaacugcuaccccuacgacgugcccgacuacgccagccugagaagccugguggccagcagcggcacccuggaguucaacaacgagagcuucaacuggaccggcgugacccagaacggcaccagcagcgccugcaagagaagaagcaacaacagcuucuucagcagacugaacuggcugacccaccugaaguucaaguaccccgcccugaacgugaccaugcccaacaacgagagauucgacaagcuguacaucuggggcgugcaccaccccggcaccgacaacgaccagaucuuccuguacgcccaggccagcggcagaaucaccgugagcaccaagagaagccagcagaccgugauccccaacaucggcagcagacccagagugagaaacauccccagcagaaucagcaucuacuggaccaucgugaagcccggcgacauccugcugaucaacagcaccggcaaccugaucgcccccagaggcuacuucaagaucagaagcggcaagagcagcaucaugagaagcgacgcccccaucggcaagugcaacagcgagugcaucacccccaacggcagcauccccaacgacaagcccuuccagaacgugaacagaaucaccuacggcgccugccccagauacgugaagcagaacacccugaagcuggccaccggcaugagaaacgugcccgagaagcagaccagaggcaucuucggcgccaucgccggcuucaucgagaacggcugggagggcaugguggacggcugguacggcuucagacaccagaacagcgagggcaucggccaggccgccgaccugaagagcacccaggccgccaucgaccagaucaacggcaagcugaacagacugaucggcaagaccaacgagaaguuccaccagaucgagaaggaguucagcgagguggagggcagaauccaggaccuggagaaguacguggaggacaccaagaucgaccuguggagcuacaacgccgagcugcugguggcccuggagaaccagcacaccaucgaccugaccgacagcgagaugaacaagcuguucgagaagaccaagaagcagcugagagagaacgccgaggacaugggcaacggcugcuucaagaucuaccacaagugcgacaacgccugcaucggcagcaucagaaacggcaccuacgaccacgacguguacagagacgaggcccugaacaacagauuccagaucaagggcguggagcugaagagcggcuacaaggacuggauccuguggaucagcuucgccaucagcugcuuccugcugugcguggcccugcugggcuucaucaugugggccugccagaagggcaacaucagaugcaacaucugcaucuga

SEQ ID NO: 161908 - RNA, 1701 nt, Artificial Sequence
  derived and/or modified CDS sequence (opt4) from hemagglutinin__InfluenzaA__ABU92701
augaagaccaucaucgcccugagcuacauccugugccugguguucgcccagaagcugcccgagaacgacaacagcaccgccacccugugccugggccaccacgccgugcccaacggcaccaucgugaagaccaucaccaacgaccagaucgaggugaccaacgccaccgagcuggugcagagcagcagcaccggcggcaucugcgacagcccccaccagauccuggacggcgagaacugcacccugaucgacgcccugcugggcgacccccagugcgacggcuuccagaacaagaagugggaccuguucguggagagaagcaaggccuacagcaacugcuaccccuacgacgugcccgacuacgccagccugagaagccugguggccagcagcggcacccuggaguucaacaacgagagcuucaacuggaccggcgugacccagaacggcaccagcagcgccugcaagagaagaagcaacaacagcuucuucagcagacugaacuggcugacccaccugaaguucaaguaccccgcccugaacgugaccaugcccaacaacgagagauucgacaagcuguacaucuggggcgugcaccaccccggcaccgacaacgaccagaucuuccuguacgcccaggccagcggcagaaucaccgugagcaccaagagaagccagcagaccgugauccccaacaucggcagcagacccagagugagaaacauccccagcagaaucagcaucuacuggaccaucgugaagcccggcgacauccugcugaucaacagcaccggcaaccugaucgcccccagaggcuacuucaagaucagaagcggcaagagcagcaucaugagaagcgacgcccccaucggcaagugcaacagcgagugcaucacccccaacggcagcauccccaacgacaagcccuuccagaacgugaacagaaucaccuacggcgccugccccagauacgugaagcagaacacccugaagcuggccaccggcaugagaaacgugcccgagaagcagaccagaggcaucuucggcgccaucgccggcuucaucgagaacggcugggagggcaugguggacggcugguacggcuucagacaccagaacagcgagggcaucggccaggccgccgaccugaagagcacccaggccgccaucgaccagaucaacggcaagcugaacagacugaucggcaagaccaacgagaaguuccaccagaucgagaaggaguucagcgagguggagggcagaauccaggaccuggagaaguacguggaggacaccaagaucgaccuguggagcuacaacgccgagcugcugguggcccuggagaaccagcacaccaucgaccugaccgacagcgagaugaacaagcuguucgagaagaccaagaagcagcugagagagaacgccgaggacaugggcaacggcugcuucaagaucuaccacaagugcgacaacgccugcaucggcagcaucagaaacggcaccuacgaccacgacguguacagagacgaggcccugaacaacagacugcagaucaagggcguggagcugaagagcggcuacaaggacuggauccuguggaucagcuucgccaucagcugcuuccugcugugcguggcccugcugggcuucaucaugugggccugccagaagggcaacaucagaugcaacaucugcaucuga

SEQ ID NO: 161909 - RNA, 1701 nt, Artificial Sequence; identical to SEQ ID NO: 160672
  derived and/or modified CDS sequence (opt4) from hemagglutinin__InfluenzaA__ABU92702

SEQ ID NO: 161910 - RNA, 1701 nt, Artificial Sequence; identical to SEQ ID NO: 161888
  derived and/or modified CDS sequence (opt4) from hemagglutinin__InfluenzaA__ABU92703

SEQ ID NO: 161911 - RNA, 1701 nt, Artificial Sequence
  derived and/or modified CDS sequence (opt4) from hemagglutinin__InfluenzaA__ABU92704
augaagaccaucaucgcccugagcuacauccugugccugguguucgcccagaagcugcccggcaacgacaacagcaccgccacccugugccugggccaccacgccgugcccaacggcaccaucgugaagaccaucaccaacgaccagaucgaggugaccaacgccaccgagcuggugcagagcagcagcaccggcggcaucugcgacagcccccaccagauccuggacggcgagaacugcacccugaucgacgcccugcugggcgacccccagugcgacggcuuccagaacaagaagugggaccuguucguggagagaaacaaggccuacagcaacugcuaccccuacgacgugcccgacuacgccagccugagaagccugguggccagcagcggcacccuggaguucaacaacgagagcuucaacuggaccggcgugacccagaacggcaccagcagcgccugcaagagaagaagcaacaacagcuucuucagcagacugaacuggcugacccaccugaaguucaaguaccccgcccugaacgugaccaugcccaacaacgagaaguucgacaagcuguacaucuggggcgugcaccaccccggcaccgacaacgaccagaucuuccuguacgcccaggccagcggcagaaucaccgugagcaccaagagaagccagcagaccgugauccccaacaucggcagcagacccagagugagaaacauccccagcagaaucagcaucuacuggaccaucgugaagcccggcgacauccugcugaucaacagcaccggcaaccugaucgcccccagaggcuacuucaagaucagaagcggcaagagcagcaucaugagaagcgacgcccccaucggcaagugcaacagcgagugcaucacccccaacggcagcauccccaacgacaagcccuuccagaacgugaacagaaucaccuacggcgccugccccagauacgugaagcagaacacccugaagcuggccaccggcaugagaaacgugcccgagaagcagaccagaggcaucuucggcgccaucgccggcuucaucgagaacggcugggagggcaugguggacggcugguacggcuucagacaccagaacagcgagggcaucggccaggccgccgaccugaagagcacccaggccgccaucgaccagaucaacggcaagcugaacagacugaucggcaagaccaacgagaaguuccaccagaucgagaaggaguucagcgagguggagggcagaauccaggaccuggagaaguacguggaggacaccaagaucgaccuguggagcuacaacgccgagcugcugguggcccuggagaaccagcacaccaucgaccugaccgacagcgagaugaacaagcuguucgagaagaccaagaagcagcugagagagaacgccgaggacaugggcaacggcugcuucaagaucuaccacaagugcgacaacgccugcaucggcagcaucagaaacggcaccuacgaccacgacguguacagagacgaggcccugaacaacagauuccagaucaagggcguggagcugaagagcggcuacaaggacuggauccuguggaucagcuucgccaucagcugcuuccugcugugcguggcccugcugggcuucaucaugugggccugccagaagggcaacaucagaugcaacaucugcaucuga

SEQ ID NO: 161912 - RNA, 1701 nt, Artificial Sequence
  derived and/or modified CDS sequence (opt4) from hemagglutinin__InfluenzaA__ABU92705
augaagaccaucaucgcccugagcuacauccugugccugguguucgcccagaagcugcccggcaacgacaacagcaccgccacccugugccugggccaccacgccgugcccaacggcaccaucgugaagaccaucaccaacgaccagaucgaggugaccaacgccaccgagcuggugcagagcagcagcaccggcggcaucugcgacagcccccaccagauccuggacggcgagaacugcacccugaucgacgcccugcugggcgacccccagugcgacggcuuccagaacaagaagugggaccuguucguggagagaagcaaggccuacagcaacugcuaccccuacgacgugcccgacuacgccagccugagaagccugaucgccagcagcggcacccuggaguucaacaacgagagcuucaacuggaccggcgugacccagaacggcaccagcagcgccugcaagagaagaagcaacaacagcuucuucagcagacugaacuggcugacccaccugaaguucaaguaccccgcccugaacgugaccaugcccaacaacgaggaguucgacaagcuguacaucuggggcgugcaccaccccggcaccgacaacgaccagaucagccuguacgcccaggcccccggcagaaucaccgugagcaccaagagaagccagcagaccgugauccccaacaucggcagcagacccagagugagagacauccccagcagaaucagcaucuacuggaccaucgugaagcccggcgacauccugcugaucaacagcaccggcaaccugaucgcccccagaggcuacuucaagaucagaagcggcaagagcagcaucaugagaagcgacgcccccaucggcaagugcaagagcgagugcaucacccccaacggcagcauccccaacgacaagcccuuccagaacgugaacagaaucaccuacggcgccugccccagauacgugaagcagaacacccugaagcuggccaccggcaugagaaacgugcccgagaagcagaccagaggcaucuucggcgccaucgccggcuucaucgagaacggcugggagggcaugguggacggcugguacggcuucagacaccagaacagcgagggcaucggccaggccgccgaccugaagagcacccaggccgccaucgaccagaucaacggcaagcugaacagacugaucggcaagaccaacgagaaguuccaccagaucgagaaggaguucagcgagguggagggcagaauccaggaccuggagaaguacguggaggacaccaagaucgaccuguggagcuacaacgccgagcugcugguggcccuggagaaccagcacaccaucgaccugaccgacagcgagaugaacaagcuguucgagagaaccaagaagcagcugagagagaacgccgaggacaugggcaacggcugcuucaagaucuaccacaagugcgacaacgccugcaucggcagcaucagaaacggcaccuacgaccacgacguguacagagacgaggcccugaacaacagauucagaaucaagagcguggagcugaagagcggcuacaaggacuggauccuguggaucagcuucgccaucagcugcuuccugcugugcguggcccugcugggcuucaucaugugggccugccagaagggcaacaucagaugcaacaucugcaucuga

SEQ ID NO: 161913 - RNA, 1701 nt, Artificial Sequence; identical to SEQ ID NO: 160133
  derived and/or modified CDS sequence (opt4) from hemagglutinin__InfluenzaA__ABU92706

SEQ ID NO: 161914 - RNA, 1701 nt, Artificial Sequence; identical to SEQ ID NO: 161822
  derived and/or modified CDS sequence (opt4) from hemagglutinin__InfluenzaA__ABU92707

SEQ ID NO: 161915 - RNA, 1701 nt, Artificial Sequence; identical to SEQ ID NO: 161822
  derived and/or modified CDS sequence (opt4) from hemagglutinin__InfluenzaA__ABU92708

SEQ ID NO: 161916 - RNA, 1701 nt, Artificial Sequence
  derived and/or modified CDS sequence (opt4) from hemagglutinin__InfluenzaA__ABU92709
augaagaccaucaucgcccugagcuacauccugugccugguguucgcccagaagcugcccggcaacgacaacagcaccgccacccugugccugggccaccacgccgugcccaacggcaccaucgugaagaccaucaccaacgaccagaucgaggugaccaacgccaccgagcuggugcagagcagcagcaccggcggcaucugcgacagcccccaccagauccuggacggcgagaacugcacccugaucgacgcccugcugggcgacccccagugcgacggcuuccagaacaagaagugggaccuguucguggagagaagcaaggccuacagcaacugcuaccccuacgacgugcccgacuacgccagccugagaagccugguggccagcagcggcacccuggaguucaacaacgagagcuucaacugggccggcgugacccagaacggcaccagcagcgccugcaagagaagaagcaacaagagcuucuucagcagacugaacuggcugacccaccugaaguacaaguaccccgcccugaacgugaccaugcccaacaacgagaaguucgacaagcuguacaucuggggcgugcaccaccccggcaccgacagcgaccagaucagccuguacgcccaggccagcggcagaaucaccgugagcaccaagagaagccagcagaccgugauccccaacaucggcagcagacccagagugagagacgugagcagcagaaucagcaucuacuggaccaucgugaagcccggcgacauccugcugaucaacagcaccggcaaccugaucgcccccagaggcuacuucaagaucagaagcggcaagagcagcaucaugagaagcgacgcccccaucggcaagugcaacagcgagugcaucacccccaacggcagcauccccaacgacaagcccuuccagaacgugaacagaaucaccuacggcgccugccccagauacgugaagcagaacacccugaagcuggccaccggcaugagaaacgugcccgagaagcagaccagaggcaucuucggcgccaucgccggcuucaucgagaacggcugggagggcaugguggacggcugguacggcuucagacaccagaacagcgagggcaccggccaggccgccgaccugaagagcacccaggccgccaucaaccagaucaacggcaagcugaacagacugaucggcaagaccaacgagaaguuccaccagaucgagaaggaguucagcgagguggagggcagaauccaggaccuggagaaguacguggaggacaccaagaucgaccuguggagcuacaacgccgagcugcugguggcccuggagaaccagcacaccaucgaccugaccgacagcgagaugaacaagcuguucgagagaaccaagaagcagcugagagagaacgccgaggacaugggcaacggcugcuucaagaucuaccacaagugcgacaacgccugcaucgagagcaucagaaacggcaccuacgaccacgacguguacagagacgaggcccugaacaacagauuccagaucaagggcguggagcugaagagcggcuacaaggacuggauccuguggaucagcuucgccaucagcugcuuccugcugugcguggcccugcugggcuucaucaugugggccugccagaagggcaacaucagaugcaacaucugcaucuga

SEQ ID NO: 161917 - RNA, 1701 nt, Artificial Sequence; identical to SEQ ID NO: 160111
  derived and/or modified CDS sequence (opt4) from hemagglutinin__InfluenzaA__ABU92710

SEQ ID NO: 161918 - RNA, 1701 nt, Artificial Sequence; identical to SEQ ID NO: 160133
  derived and/or modified CDS sequence (opt4) from hemagglutinin__InfluenzaA__ABU92711

SEQ ID NO: 161919 - RNA, 1701 nt, Artificial Sequence; identical to SEQ ID NO: 160133
  derived and/or modified CDS sequence (opt4) from hemagglutinin__InfluenzaA__ABU92712

SEQ ID NO: 161920 - RNA, 1701 nt, Artificial Sequence; identical to SEQ ID NO: 161822
  derived and/or modified CDS sequence (opt4) from hemagglutinin__InfluenzaA__ABU92713

SEQ ID NO: 161921 - RNA, 1701 nt, Artificial Sequence; identical to SEQ ID NO: 161822
  derived and/or modified CDS sequence (opt4) from hemagglutinin__InfluenzaA__ABU92714

SEQ ID NO: 161922 - RNA, 1701 nt, Artificial Sequence
  derived and/or modified CDS sequence (opt4) from hemagglutinin__InfluenzaA__ABU92715
augaagaccaucaucgcccugagcuacauccugugccugguguucgcccagaagcugcccggcaacgacaacagcaccgccacccugugccugggccaccacgccgugcccaacggcaccaucgugaagaccaucaccaacgaccagaucgaggugaccaacgccaccgagcuggugcagaucagcagcaccggcgagaucugcgacagcccccaccagauccuggacggcgagaacugcacccugaucgacgcccugcugggcgacccccagugcgacggcuuccagaacaagaagugggaccuguucguggagagaagcaaggccuacagcaacugcuaccccuacgacgugcccgacuacgccagccugagaagccugguggccagcagcggcacccuggaguucaacaacgagagcuucgacuggaccggcgugacccagaacggcaccagcagcgccugcaagagaagaagcaacaagagcuucuucagcagacugaacuggcugacccaccugaaguacaaguaccccgcccugaacgugaccaugcccaacaacgagaaguucgagaagcuguacaucuggggcgugcaccaccccggcaccgacagcgaccagaucaaccuguacgcccaggccagcggcagaaucaccgugagcaccaagagaagccagcagaccgugauccccaacaucggcagcagacccagagugagagacgugagcagcagaaucagcaucuacuggaccaucgugaagcccggcgacauccugcugaucaacagcaccggcaaccugaucgcccccagaggcuacuucaagaucagaagcggcaagagcagcaucaugagaagcgacgcccccaucggcaagugcaacagcgagugcaucacccccaacggcagcauccccaacgacaagcccuuccagaacgugaacagaaucaccuacggcgccugccccagauacgugaagcagaacacccugaagcuggccaccggcaugagaaacgugcccgagaagcagaccagaggcaucuucggcgccaucgccggcuucaucgagaacggcugggagggcaugguggacggcugguacggcuucagacaccagaacagcgagggcaccggccaggccgccgaccugaagagcacccaggccgccaucaaccagaucaacggcaagcugaacagacugaucggcaagaccaacgagaaguuccaccagaucgagaaggaguucagcgagguggagggcagaauccaggaccuggagaaguacguggaggacaccaagaucgaccuguggagcuacaacgccgagcugcugguggcccuggagaaccagcacaccaucgaccugaccgacagcgagaugaacaagcuguucgagagaaccaagaagcagcugagagagaacgccgaggacaugggcaacggcugcuucaagaucuaccacaagugcgacaacgccugcaucggcagcaucagaaacggcaccuacgaccacgacguguacagagacgaggcccugaacaacagauuccagaucaagggcguggagcugaagagcggcuacaaggacuggauccuguggaucagcuucgccaucagcugcuuccugcugugcguggcccugcugggcuucaucaugugggccugccagaagggcaacaucagaugcaacaucugcaucuga

SEQ ID NO: 161923 - RNA, 1701 nt, Artificial Sequence; identical to SEQ ID NO: 161822
  derived and/or modified CDS sequence (opt4) from hemagglutinin__InfluenzaA__ABU92716

SEQ ID NO: 161924 - RNA, 1701 nt, Artificial Sequence; identical to SEQ ID NO: 161822
  derived and/or modified CDS sequence (opt4) from hemagglutinin__InfluenzaA__ABU92717

SEQ ID NO: 161925 - RNA, 1701 nt, Artificial Sequence; identical to SEQ ID NO: 160133
  derived and/or modified CDS sequence (opt4) from hemagglutinin__InfluenzaA__ABU92718

SEQ ID NO: 161926 - RNA, 1701 nt, Artificial Sequence; identical to SEQ ID NO: 160133
  derived and/or modified CDS sequence (opt4) from hemagglutinin__InfluenzaA__ABU92719

SEQ ID NO: 161927 - RNA, 1701 nt, Artificial Sequence
  derived and/or modified CDS sequence (opt4) from hemagglutinin__InfluenzaA__ABU92720
augaagaccaucaucgcccugagcuacauccugugccugguguucgcccagaagcugcccggcaacgacaacagcaccgccacccugugccugggccaccacgccgugcccaacggcaccaucgugaagaccaucaccaacgaccagaucgaggugaccaacgccaccgagcuggugcagaucagcagcaccggcgagaucugcgacagcccccaccagauccuggacggcgagaacugcacccugaucgacgcccugcugggcgacccccagugcgacggcuuccagaacaagaagugggaccuguucguggagagaagcaaggccuacagcaacugcuaccccuacgacgugcccgacuacagcagccugagaagccugguggccagcagcggcacccuggaguucaacaacgagagcuucgacuggaccggcgugacccagaacggcaccagcagcgccugcaagagaagaagcgacaagagcuucuucagcagacugaacuggcugacccaccugaaguacaaguaccccgcccugaacgugaccaugcccaacaacgagaaguucgacaagcuguacaucuggggcgugcaccaccccggcaccgacagcgaccagaucagccuguacgcccaggccagcggcagaaucaccgugagcaccaagagaagccagcagaccgugauccccaacaucggcagcagacccagagugagagacgugagcagcagaaucagcaucuacuggaccaucgugaagcccggcgacauccugcugaucaacagcaccggcaaccugaucgcccccagaggcuacuucaagaucagaagcggcaagagcagcaucaugagaagcgacgcccccaucggcaagugcaacagcgagugcaucacccccaacggcagcauccccaacgacaagcccuuccagaacgugaacagaaucaccuacggcgccugccccagauacgugaagcagaacacccugaagcuggccaccggcaugagaaacgugcccgagaagcagaccagaggcaucuucggcgccaucgccggcuucaucgagaacggcugggagggcaugguggacggcugguacggcuucagacaccagaacagcgagggcaccggccaggccgccgaccugaagagcacccaggccgccaucaaccagaucaacggcaagcugaacagacugaucggcaagaccaacgagaaguuccaccagaucgagaaggaguucagcgagguggagggcagaauccaggaccuggagaaguacguggaggacaccaagaucgaccuguggagcuacaacgccgagcugcugguggcccuggagaaccagcacaccaucgaccugaccgacagcgagaugaacaagcuguucgagagaaccaagaagcagcugagagagaacgccgaggacaugggcaacggcugcuucaagaucuaccacaagugcgacaacgccugcaucggcagcaucagaaacggcaccuacgaccacgacguguacagagacgaggcccugaacaacagauuccagaucaagggcguggagcugaagagcggcuacaaggacuggauccuguggaucagcuucgccaucagcugcuuccugcugugcguggcccugcugggcuucaucaugugggccugccagaagggcaacaucagaugcaacaucugcaucuga

SEQ ID NO: 161928 - RNA, 1701 nt, Artificial Sequence
  derived and/or modified CDS sequence (opt4) from hemagglutinin__InfluenzaA__ABU92721
augaagaccaucaucgcccugagcuacauccugugccugguguucgcccagaagcugcccggcaacgacaacagcaccgccacccugugccugggccaccacgccgugcccaacggcaccaucgugaagaccaucaccaacgaccagaucgaggugaccaacgccaccgagcuggugcagaucagcagcaccggcgagaucugcgacagcccccaccagauccuggacggcgagaacugcacccugaucgacgcccugcugggcgacccccagugcgacggcuuccagaacaagaagugggaccuguucguggagagaagcaaggccuacagcaacugcuaccccuacgacgugcccgacuacgccagccugagaagccugguggccagcagcggcacccuggaguucaacaacgagagcuucgacuggaccggcgugacccagaacggcaccagcagcgccugcaagagaagaagcgacaagagcuucuucagcagacugaacuggcugacccaccugaaguacaaguaccccgcccugaacgugaccaugcccaacaacgagaaguucgacaagcuguacaucuggggcgugcaccaccccggcaccgacagcgaccagaucagccuguacgcccaggccagcggcagaaucaccgugagcaccaagagaagccagcagaccgugacccccaacaucggcagcagacccagagugagagacgugagcagcagaaucagcaucuacuggaccaucgugaagcccggcgacauccugcugaucaacagcaccggcaaccugaucgcccccagaggcuacuucaagaucagaagcggcaagagcagcaucaugagaagcgacgcccccaucggcaagugcaacagcgagugcaucacccccaacggcagcauccccaacgacaagcccuuccagaacgugaacagaaucaccuacggcgccugccccagauacgugaagcagaacacccugaagcuggccaccggcaugagaaacgugcccgagaagcagaccagaggcaucuucggcgccaucgccggcuucaucgagaacggcugggagggcaugguggacggcugguacggcuucagacaccagaacagcgagggcaccggccaggccgccgaccugaagagcacccaggccgccaucaaccagaucaacggcaagcugaacagacugaucggcaagaccaacgagaaguuccaccagaucgagaaggaguucagcgagguggagggcagaauccaggaccuggagaaguacguggaggacaccaagaucgaccuguggagcuacaacgccgagcugcugguggcccuggagaaccagcacaccaucgaccugaccgacagcgagaugaacaagcuguucgagagaaccaagaagcagcugagagagaacgccgaggacaugggcaacggcugcuucaagaucuaccacaagugcgacaacgccugcaucggcagcaucagaaacggcaccuacgaccacgacguguacagagacgaggcccugaacaacagauuccagaucaagggcguggagcugaagagcggcuacaaggacuggauccuguggaucagcuucgccaucagcugcuuccugcugugcguggcccugcugggcuucaucaugugggccugccagaagggcaacaucagaugcaacaucugcaucuga

SEQ ID NO: 161929 - RNA, 1701 nt, Artificial Sequence; identical to SEQ ID NO: 161813
  derived and/or modified CDS sequence (opt4) from hemagglutinin__InfluenzaA__ABU92722

SEQ ID NO: 161930 - RNA, 1701 nt, Artificial Sequence; identical to SEQ ID NO: 160133
  derived and/or modified CDS sequence (opt4) from hemagglutinin__InfluenzaA__ABU92723

SEQ ID NO: 161931 - RNA, 1701 nt, Artificial Sequence; identical to SEQ ID NO: 161916
  derived and/or modified CDS sequence (opt4) from hemagglutinin__InfluenzaA__ABU92724

SEQ ID NO: 161932 - RNA, 1701 nt, Artificial Sequence
  derived and/or modified CDS sequence (opt4) from hemagglutinin__InfluenzaA__ABU92725
augaagaccaucaucgcccugagcuacauccugugccugguguucgcccagaagcugcccggcaacgacaacagcaccgccacccugugccugggccaccacgccgugcccaacggcaccaucgugaagaccaucaccaacgaccagaucgaggugaccaacgccaccgagcuggugcagagcagcagcaccggcggcaucugcgacagcccccaccagauccuggacggcgagaacugcacccugaucgacgcccugcugggcgacccccagugcgacggcuuccagaacaagaagugggaccuguucguggagagaagcaaggccuacagcaacugcuaccccuacgacgugcccgacuacgccagccugagaagccugguggccagcagcggcacccuggaguucaacaacgagagcuucaacuggaccggcgugacccagaacggcaccagcagcgccugcaagagaagaagcaacaagagcuucuucagcagacugaacuggcugacccaccugaaguacaaguaccccgcccugaacgugaccaugcccaacaacgagaaguucgacaagcuguacaucuggggcgugcaccaccccggcaccgacagcgaccagaucaaccuguacgcccaggccagcggcagaaucaccgugagcaccaagagaagccagcagaccgugauccccaacaucggcagcagacccagagugagagacgugcccagcagaaucagcaucuacuggaccaucgugaagcccggcgaccugcugcugaucaacagcaccggcaaccugaucgcccccagaggcuacuucaagaucagaagcggcaagagcagcaucaugagaagcgacgcccccaucggcaagugcaacagcgagugcaucacccccaacggcagcauccccaacgacaagcccuuccagaacgugaacagaaucaccuacggcgccugccccagauacgugaagcagaacacccugaagcuggccaccggcaugagaaacgugcccgagaagcagaccagaggcaucuucggcgccaucgccggcuucaucgagaacggcugggagggcaugguggacggcugguacggcuucagacaccagaacagcgagggcaccggccaggccgccgaccugaagagcacccaggccgccaucaaccagaucaacggcaagcugaacagacugaucggcaagaccaacgagaaguuccaccagaucgagaaggaguucagcgagguggagggcagaauccaggaccuggagaaguacguggaggacaccaagaucgaccuguggagcuacaacgccgagcugcugguggcccuggagaaccagcacaccaucgaccugaccgacagcgagaugaacaagcuguucgagagaaccaagaagcagcugagagagaacgccgaggacaugggcaacggcugcuucaagaucuaccacaagugcgacaacgccugcaucggcagcaucagaaacggcaccuacgaccacgacguguacagagacgaggcccugaacaacagauuccagaucaagggcguggagcugaagagcggcuacaaggacuggauccuguggaucagcuucgccaucagcugcuuccugcugugcguggcccugcugggcuucaucaugugggccugccagaagggcaacaucagaugcaacaucugcaucuga

SEQ ID NO: 161933 - RNA, 1701 nt, Artificial Sequence; identical to SEQ ID NO: 161916
  derived and/or modified CDS sequence (opt4) from hemagglutinin__InfluenzaA__ABU92726

SEQ ID NO: 161934 - RNA, 1701 nt, Artificial Sequence
  derived and/or modified CDS sequence (opt4) from hemagglutinin__InfluenzaA__ABU92727
augaagaccaucaucgcccugagcuacauccugugccugguguucgcccagaagcugcccggcaacgacaacagcaccgccacccugugccugggccaccacgccgugcccaacggcaccaucgugaagaccaucaccaacgaccagaucgaggugaccaacgccaccgagcuggugcagagcagcagcaccggcggcaucugcgacagcccccaccagauccuggacggcgagaacugcacccugaucgacgcccugcugggcgacccccagugcgacggcuuccagaacaagaagugggaccuguucguggagagaagcaaggccuacagcaacugcuaccccuacgacgugcccgacuacgccagccugagaagccugaucgccagcagcggcacccuggaguucaacaacgagagcuucaacuggaccggcgugacccagaacggcaccagcagcgccugcaagagaagaagcaacagcagcuucuucagcagacugaacuggcugacccaccugaaguucaaguaccccgcccugaacgugaccaugcccaacaacgaggacuucgacaagcuguacaucuggggcgugcaccaccccggcaccgacaacgaccagaucagccuguacgcccaggccagcggcagaaucaccgugagcaccaagagaagccagcagaccgugauccccaacaucggcagcagacccagagugagagacauccccagcagaaucagcaucuacuggaccaucgugaagcccggcgacauccugcugaucaacagcaccggcaaccugaucgcccccagaggcuacuucaagaucagaagcggcaagagcagcaucaugagaagcgacgcccccaucggcaagugcaacagcgagugcaucacccccaacggcagcauccccaacgacaagcccuuccagaacgugaacagaaucaccuacggcgccugccccagauacgugaagcagaacacccugaagcuggccaccggcaugagaaacgugcccgagaagcagaccagaggcaucuucggcgccaucgccggcuucaucgagaacggcugggagggcaugguggacggcugguacggcuucagacaccagaacagcgagggcaucggccaggccgccgaccugaagagcacccaggccgccaucgaccagaucaacggcaagcugaacagacugaucggcaagaccaacgagaaguuccaccagaucgagaaggaguucagcgagguggagggcagaauccaggaccuggagaaguacguggaggacaccaagaucgaccuguggagcuacaacgccgagcugcugguggcccuggagaaccagcacaccaucgaccugaccgacagcgagaugaacaagcuguucgagagaaccaagaagcagcugagagagaacgccgaggacaugggcaacggcugcuucaagaucuaccacaagugcgacaacgccugcaucggcagcaucagaaacggcaccuacgaccacgacguguacagagacgaggcccugaacaacagauuccagaucaagggcguggagcugaagagcggcuacaaggacuggauccuguggaucagcuucgccaucagcugcuuccugcugugcguggcccugcugggcuucaucaugugggccugccagaagggcaacaucagaugcaacaucugcaucuga

SEQ ID NO: 161935 - RNA, 1701 nt, Artificial Sequence
  derived and/or modified CDS sequence (opt4) from hemagglutinin__InfluenzaA__ABU92728
augaagaccaucaucgcccugagcuacauccugugccagguguucgcccagaagcugcccggcaacgacaacagcaccgccacccugugccugggccaccacgccgugcccaacggcaccaucgugaagaccaucaccaacgaccagaucgaggugaccaacgccaccgagcuggugcagaucagcagcaccggcgagaucugcgacagcccccaccagauccuggacggcgagaacugcacccugaucgacgcccugcugggcgacccccagugcgacggcuuccagaacaagaagugggaccuguucguggagagaagcaaggccuacagcaacugcuaccccuacgacgugcccgacuacgccagccugagaagccugguggccagcagcggcacccuggaguucaacaacgagagcuucgacuggaccggcgugacccagaacggcaccagcagcgccugcaagagaagaagcgacaagagcuucuucagcagacugaacuggcugacccaccugaaguacaaguaccccgcccugaacgugaccaugcccaacaacgagaaguucgacaagcuguacaucuggggcgugcaccaccccggcaccgacaacgaccagaucagccuguacgcccaggccagcggcagaaucaccgugagcaccaagagaagccagcagaccgugauccccaacaucggcagcagacccagagugagagacgugagcagcagaaucagcaucuacuggaccaucgugaagcccggcgacauccugcugaucaacagcaccggcaaccugaucgcccccagaggcuacuucaagaucagaagcggcaagagcagcaucaugagaagcgacgcccccaucggcaagugcaacagcgagugcaucacccccaacggcagcauccccaacgacaagcccuuccagaacgugaacagaaucaccuacggcgccugccccagauacgugaagcagaacacccugaagcuggccaccggcaugagaaacgugcccgagaagcagaccagaggcaucuucggcgccaucgccggcuucaucgagaacggcugggagggcaugguggacggcugguacggcuucagacaccagaacagcgagggcaccggccaggccgccgaccugaagagcacccaggccgccaucaaccagaucaacggcaagcugaacagacugaucggcaagaccaacgagaaguuccaccagaucgagaaggaguucagcgagguggagggcagaauccaggaccuggagaaguacguggaggacaccaagaucgaccuguggagcuacaacgccgagcugcugguggcccuggagaaccagcacaccaucgaccugaccgacagcgagaugaacaagcuguucgagagaaccaagaagcagcugagagagaacgccgaggacaugggcaacggcugcuucaagaucuaccacaagugcgacaacgccugcaucggcagcaucagaaacggcaccuacgaccacgacguguacagagacgaggcccugaacaacagauuccagaucaagggcguggagcugaagagcggcuacaaggacuggauccuguggaucagcuucgccaucagcugcuuccugcugugcguggcccugcugggcuucaucaugugggccugccagaagggcaacaucagaugcaacaucugcaucuga

SEQ ID NO: 161936 - RNA, 1701 nt, Artificial Sequence; identical to SEQ ID NO: 161935
  derived and/or modified CDS sequence (opt4) from hemagglutinin__InfluenzaA__ABU92729

SEQ ID NO: 161937 - RNA, 1701 nt, Artificial Sequence; identical to SEQ ID NO: 161813
  derived and/or modified CDS sequence (opt4) from hemagglutinin__InfluenzaA__ABU92730

SEQ ID NO: 161938 - RNA, 1701 nt, Artificial Sequence
  derived and/or modified CDS sequence (opt4) from hemagglutinin__InfluenzaA__ABU92731
augaagaccaucaucgcccugagcuacauccugugccugguguucgcccagaagcugcccggcaacgacaacagcaccgccacccugugccugggccaccacgccgugcccaacggcaccaucgugaagaccaucaccaacgaccagaucgaggugaccaacgccaccgagcuggugcagagcagcagcaccggcggcaucugcgacagcccccaccagauccuggacggcgagaacugcacccugaucgacgcccugcugggcgacccccagugcgacggcuuccagaacaagaagugggaccuguucguggagagaagcaaggccuacagcaacugcuaccccuacgacgugcccgacuacgccagccugagaagccugaucgccagcagcggcacccuggaguucaacaacgagagcuucaacuggaccggcgugacccagaacggcaccagcagcgccugcaagagaagaagcaacagcagcuucuucagcagacugaacuggcugacccaccugaaguucaaguaccccgcccugaacgugaccaugcccaacaacgaggaguucgacaagcuguacguguggggcgugcaccaccccggcaccuacaacgaccagaucagccuguacgcccaggccagcggcagaaucaccgugagcaccaagagaagccagcagaccgugauccccaacaucggcagcagacccagagugagagacauccccagcagaaucagcaucuacuggaccaucgugaagcccggcgacauccugcugaucaacagcaccggcaaccugaucgcccccagaggcuacuucaagaucagaagcggcaagagcagcaucaugagaagcgacgcccccaucggcaagugcaacagcgagugcaucacccccaacggcagcauccccaacgacaagcccuuccagaacgugaacagaaucaccuacggcgccugccccagauacgugaagcagaacacccugaagcuggccaccggcaugagaaacgugcccgagaagcagaccagaggcaucuucggcgccaucgccggcuucaucgagaacggcugggagggcaugguggacggcugguacggcuucagacaccagaacagcgagggcaucggccaggccgccgaccugaagagcacccaggccgccaucgaccagaucaacggcaagcugaacagacugaucggcaagaccaacgagaaguuccaccagaucgagaaggaguucagcgagguggagggcagaauccaggaccuggagaaguacguggaggacaccaagaucgaccuguggagcuacaacgccgagcugcugguggcccuggagaaccagcacaccaucgaccugaccgacagcgagaugaacaagcuguucgagagaaccaagaagcagcugagagagaacgccgaggacaugggcaacggcugcuucaagaucuaccacaagugcgacaacgccugcaucggcagcaucagaaacggcaccuacgaccacgacguguacagagacgaggcccugaacaacagauuccagaucaagggcguggagcugaagagcggcuacaaggacuggauccuguggaucagcuucgccaucagcugcuuccugcugugcguggcccugcugggcuucaucaugugggccugccagaagggcaacaucagaugcaacaucugcaucuga

SEQ ID NO: 161939 - RNA, 1701 nt, Artificial Sequence
  derived and/or modified CDS sequence (opt4) from hemagglutinin__InfluenzaA__ABU92732
augaagaccaucaucgcccugagcuacauccugugccugguguucgcccagaagcugcccggcaacgacaacagcaccgccacccugugccugggccaccacgccgugcccaacggcaccaucgugaagaccaucaccaacgaccagaucgaggugaccaacgccaccgagcuggugcagagcagcagcaccggcggcaucugcgacagcccccaccagauccuggacggcgagaacugcacccugaucgacgcccugcugggcgacccccagugcgacggcuuccagaacaagaagugggaccuguucguggagagaagcaaggccuacagcaacugcuaccccuacgacgugcccgacuacgccagccugagaagccugaucgccagcagcggcacccuggaguucaacaacgagagcuucaacuggaccggcgugacccagaacggcaccagcagcgccugcaagagaagaagcaacagcagcuucuucagcagacugaacuggcugacccaccugaaguucaaguaccccgcccugaacgugaccaugcccaacaacgaggaguucgacaagcuguacaucuggggcgugcaccaccccggcaccuacaacgaccagaucagccuguacgcccaggccagcggcagaaucaccgugagcaccaagagaagccagcagaccgugauccccaacaucggcagcagacccagagugagagacauccccagcagaaucagcaucuacuggaccaucgugaagcccggcgacauccugcugaucaacagcaccggcaaccugaucgcccccagaggcuacuucaagaucagaagcggcaagagcagcaucaugagaagcgacgcccccaucggcaagugcaacagcgagugcaucacccccaacggcagcauccccaacgacaagcccuuccagaacgugaacagaaucaccuacggcgccugccccagauacgugaagcagaacacccugaagcuggccaccggcaugagaaacgugcccgagaagcagaccagaggcaucuucggcgccaucgccggcuucaucgagaacggcugggagggcaugguggacggcugguacggcuucagacaccagaacagcgagggcaucggccaggccgccgaccugaagagcacccaggccgccaucgaccagaucaacggcaagcugaacagacugaucggcaagaccaacgagaaguuccaccagaucgagaaggaguucagcgagguggagggcagaauccaggaccuggagaaguacguggaggacaccaagaucgaccuguggagcuacaacgccgagcugcugguggcccuggagaaccagcacaccaucgaccugaccgacagcgagaugaacaagcuguucgagagaaccaagaagcagcugagagagaacgccgaggacaugggcaacggcugcuucaagaucuaccacaagugcgacaacgccugcaucggcagcaucagaaacggcaccuacgaccacgacguguacagagacgaggcccugaacaacagauuccagaucaagggcguggagcugaagagcggcuacaaggacuggauccuguggaucagcuucgccaucagcugcuuccugcugugcguggugcugcugggcuucaucaugugggccugccagaagggcaacaucagaugcaacaucugcaucuga

SEQ ID NO: 161940 - RNA, 1701 nt, Artificial Sequence
  derived and/or modified CDS sequence (opt4) from hemagglutinin__InfluenzaA__ABU92733
augaagaccaucaucgcccugagcuacauccugugccugguguucgcccagaagcugcccggcaacgacaacagcaccgccacccugugccugggccaccacgccgugcccaacggcaccaucgugaagaccaucaccaacgaccagaucgaggugaccaacgccaccgagcuggugcagagcagcagcaccggcggcaucugcgacagcccccaccagauccuggacggcgagaacugcacccugaucgacgcccugcugggcgacccccagugcgacggcuuccagaacaagaagugggaccuguucaucgagagaagcaaggccuacagcaacugcuaccccuacgacgugcccgacuacgccagccugagaagccugguggccagcagcggcacccuggaguucaacaacgagagcuucaacuggaccggcgugacccagaacggcaccagcagcgccugcaagagaagaagcaacaacagcuucuucagcagacugaacuggcugacccaccugaaguucaaguaccccgcccugaacgugaccaugcccaacaacgagaaguucgacaagcuguacaucuggggcgugcaccaccccggcaccgacaacgaccagaucagccuguacgcccaggccagcggcagaaucaccgugagcaccaagagaagccagcagaccgugauccccaacaucggcagcagacccagagugagagacauccccagcagaaucagcaucuacuggaccaucgugaagcccggcgacauccugcugaucaacagcaccggcaaccugaucgcccccagaggcuacuucaagaucagaagcggcaagagcagcaucaugagaagcgacgcccccaucggcaagugcaacagcgagugcaucacccccaacggcagcauccccaacgacaagcccuuccagaacgugaacagaaucaccuacggcgccugccccagauacgugaagcagaacacccugaagcuggccaccggcaugagaaacgugcccgagaagcagaccagaggcaucuucggcgccaucgccggcuucaucgagaacggcugggagggcaugguggacggcugguacggcuucagacaccagaacagcgagggcaucggccaggccgccgaccugaagagcacccaggccgccaucaaccagaucaacggcaagcugaacagacugaucggcaagaccaacgagaaguuccaccagaucgagaaggaguucagcgagguggagggcagaauccaggaccuggagaaguacguggaggacaccaagguggaccuguggagcuacaacgccgagcugcugguggcccuggagaaccagcacaccaucgaccugaccgacagcgagaugaacaagcuguucgagagaaccaagaagcagcugagagagaacgccgaggacaugggcaacggcugcuucaagaucuaccacaagugcgacaacgccugcaucggcagcaucagaaacggcaccuacaaccacgacguguacagagacgaggcccugaacaacagauuccagaucaagggcguggagcugaagagcggcuacaaggacuggauccuguggaucagcuucgccaucagcugcuuccugcugugcguggcccugcugggcuucaucaugugggccugccagaagggcaacaucagaugcaacaucugcaucuga

SEQ ID NO: 161941 - RNA, 1701 nt, Artificial Sequence; identical to SEQ ID NO: 161813
  derived and/or modified CDS sequence (opt4) from hemagglutinin__InfluenzaA__ABU92734

SEQ ID NO: 161942 - RNA, 1701 nt, Artificial Sequence
  derived and/or modified CDS sequence (opt4) from hemagglutinin__InfluenzaA__ABU92735
augaagaccaucaucgcccugagcuacauccugugccugguguucgcccagaagcugcccggcaacgacaacagcaccgccacccugugccugggccaccacgccgugcccaacggcaccaucgugaagaccaucaccaacgaccagaucgaggugaccaacgccaccgagcuggugcagagcagcagcaccggcggcaucugcggcagcccccaccagauccuggacggcgagaacugcacccugaucgacgcccugcugggcgacccccagugcgacggcuuccagaacaagaagugggaccuguucguggagagaagcaaggccuacagcaacugcuaccccuacgacgugcccgacuacgccagccugagaagccugguggccagcagcggcacccuggaguucaacaacgagagcuucaacuggaccggcgugacccagaacggcaccagcagcgccugcaagagaagaagcaacaacagcuucuucagcagacugaacuggcugacccaccugaaguucaaguaccccgcccugaacgugaccaugcccaacaacgagaaguucgacaagcuguacaucuggggcgugcaccaccccggcaccgacaacgaccagaucagccuguacgcccaggcccccgccagaaucaccgugagcaccaagagaagccagcagaccgugauccccaacaucggcagcagacccagagugagagacauccccagcagaaucagcaucuacuggaccaucgugaagcccggcgacauccugcugaucaacagcaccggcaaccugaucgcccccagaggcuacuucaagauccugagcggcaagagcagcaucaugagaagcgacgcccccaucggcaagugcaacagcgagugcaucacccccaacggcagcauccccaacgacaagcccuuccagaacgugaacagaaucaccuacggcgccugccccagauacgugaagcagaacacccugaagcuggccaccggcaugagaaacgugcccgagaagcagaccagaggcaucuucggcgccaucgccggcuucaucgagaacggcugggagggcaugguggacggcugguacggcuucagacaccagaacagcgagggcaucggccaggccgccgaccugaagagcacccaggccgccaucaaccagaucaacggcaagcugaacagacugaucggcaagaccaacgagaaguuccaccagaucgagaaggaguucagcgagguggagggcagaauccaggaccuggagaaguacguggaggacaccaagaucgaccuguggagcuacaacgccgagcugcugguggcccuggagaaccagcacaccaucgaccugaccgacagcgagaugaacaagcuguucgagagaaccaagaagcagcugagagagaacgccgaggacaugggcaacggcugcuucaagaucuaccacaagugcgacaacgccugcaucggcagcaucagaaacggcaccuacgaccacgacguguacagagacgaggcccugaacaacagauuccagaucaagggcguggagcugaagagcggcuacaaggacuggauccuguggaucagcuucgccaugagcugcuuccugcugugcguggcccugcugggcuucaucaugugggccugccagaagggcaacaucagaugcaacaucugcaucuga

SEQ ID NO: 161943 - RNA, 1701 nt, Artificial Sequence; identical to SEQ ID NO: 161888
  derived and/or modified CDS sequence (opt4) from hemagglutinin__InfluenzaA__ABU92737

SEQ ID NO: 161944 - RNA, 1701 nt, Artificial Sequence
  derived and/or modified CDS sequence (opt4) from hemagglutinin__InfluenzaA__ABU92738
augaagaccaucaucgcccugagcuacauccugugccugguguucgcccagaagcugcccggcaacgacaacagcaccgccacccugugccugggccaccacgccgugcccaacggcaccaucgugaagaccaucaccaacgaccagaucgaggugaccaacgccaccgagcuggugcagagcagcagcaccggcggcaucugcgacagcccccaccagauccuggacggcgagaacugcacccugaucgacgcccugcugggcgacccccagugcgacggcuuccagaacaagaagugggaccuguucguggagagaagcaaggccuacagcaacugcuaccccuacgacgugcccgacuacgccagccugagaagccugaucgccagcagcggcacccuggaguucaacaacgagagcuucaacuggaccggcgugacccagaacggcaccagcagcgccugcaagagaagaagcaacaacagcuucuucagcagacugaacuggcugacccaccugaaguucaaguaccccgcccugaacgugaccaugcccaacaacgagaaguucgacaagcuguacaucuggggcgugcaccaccccggcaccgacaacgaccagaucagccuguacgcccaggcccccggcagaaucaccgugagcaccaagagaagccagcagaccgugauccccaacaucggcagcagacccagagugagagacauccccagcagaaucagcaucuacuggaccaucgugaagcccggcgacauccugcugaucaacagcaccggcaaccugaucgcccccagaggcuacuucaagaucagaagcggcaagagcagcaucaugagaagcgacgcccccaucggcaagugcaacagcgagugcaucacccccaacggcagcauccccaacgacaagcccuuccagaacgugaacagaaucaccuacggcgccugccccagauacgugaagcagaacacccugaagcuggccaccggcaugagaaacgugcccgagaagcagaccagaggcaucuucggcgccaucgccggcuucaucgagaacggcugggagggcaugguggacggcugguacggcuucagacaccagaacagcgagggcaucggccaggccgccgaccugaagagcacccaggccgccaucgaccagaucaacggcaagcugaacagacugaucggcaagaccaacgagaaguuccaccagaucgagaaggaguucagcgagguggagggcagaauccaggaccuggagaaguacguggaggacaccaagaucgaccuguggagcuacaacgccgagcugcugguggcccuggagaaccagcacaccaucgaccugaccgacagcgagaugaacaagcuguucgagagaaccaagaagcagcugagagagaacgccgaggacaugggcaacggcugcuucaagaucuaccacaagugcgacaacgccugcaucggcagcaucagaaacggcaccuacgaccacgacguguacagagacgaggcccugaacaacagauuccagaucaagggcguggagcugaagagcggcuacaaggacuggauccuguggaucagcuucgccaucagcugcuuccugcugugcguggugcugcugggcuucaucaugugggccugccagaagggcaacaucagaugcaacaucugcaucuga

SEQ ID NO: 161945 - RNA, 1701 nt, Artificial Sequence; identical to SEQ ID NO: 161822
  derived and/or modified CDS sequence (opt4) from hemagglutinin__InfluenzaA__ABU92739

SEQ ID NO: 161946 - RNA, 1701 nt, Artificial Sequence
  derived and/or modified CDS sequence (opt4) from hemagglutinin__InfluenzaA__ABU92740
augaagaccaucaucgcccugagcuacauccugugccugguguucgcccagaagcugcccggcaacgacaacagcaccgccacccugugccugggccaccacgccgugcccaacggcaccaucgugaagaccaucaccaacgaccagaucgaggugaccaacgccaccgagcuggugcagagcagcagcaccggcgagaucugcgacagcccccaccagauccuggacggcgagaacugcacccugaucgacacccugcugggcgacccccagugcgacggcuuccagaacaagaagugggaccuguucguggagagaagcaaggccuacagcaacugcuaccccuacgacgugcccgacuacgccagccugagaagccugguggccagcagcggcacccuggaguucaacaacgagagcuucaacuggaccggcgugacccagaacggcaccagcagcgccugcaagagaagaagcaacaacagcuucuucagcagacugaacuggcugacccaccugaaguucaaguaccccgcccugaacgugaccaugcccaacaacgagaaguucgacaagcuguacaucuggggcgugcaccaccccggcaccgacaacgaccagaucuuccuguacgcccaggccagcggcagaaucaccgugagcaccaagagaagccagcagaccgugauccccaacaucggcagcagacccagagugagaaacauccccagcagaaucagcaucuacuggaccaucgugaagcccggcgacauccugcugaucaacagcaccggcaaccugaucgcccccagaggcuacuucaagaucagaagcggcaagagcagcaucaugagaagcgacgcccccaucggcaagugcaacagcgagugcaucacccccaacggcagcauccccaacgacaagcccuuccagaacgugaacagaaucaccuacggcgccugccccagauacgugaagcagaacacccugaagcuggccaccggcaugagaaacgugcccgagaagcagaccagaggcaucuucggcgccaucgccggcuucaucgagaacggcugggagggcaugguggacggcugguacggcuucagacaccagaacagcgagggcaucggccaggccgccgaccugaagagcacccaggccgccaucaaccagaucaacggcaagcugaacagacugaucggcaagaccaacgagaaguuccaccagaucgagaaggaguucagcgagguggagggcagaauccaggaccuggagaaguacguggaggacaccaagaucgaccuguggagcuacaacgccgagcugcugguggcccuggagaaccagcacaccaucgaccugaccgacagcgagaugaacaagcuguucgagagaaccaagaagcagcugagagagaacgccgaggacaugggcaacggcugcuucaagaucuaccacaagugcgacaacgccugcaucggcagcaucagaaacggcaccuacgaccacgacguguacagagacgaggcccugaacaacagauuccagaucaagggcguggagcugaagagcggcuacaaggacuggauccuguggaucagcuucgccaucagcugcuuccugcugugcguggcccugcugggcuucaucaugugggccugccagaagggcaacaucagaugcaacaucugcaucuga

SEQ ID NO: 161947 - RNA, 1701 nt, Artificial Sequence
  derived and/or modified CDS sequence (opt4) from hemagglutinin__InfluenzaA__ABU92741
augaagaccaucaucgcccugagcuacauccugugccugguguucgcccagaagcugcccggcaacgacaacagcaccgccacccugugccugggccaccacgccgugcccaacggcaccaucgugaagaccaucaccaacgaccagaucgaggugaccaacgccaccgagcuggugcagagcagcagcaccggcggcaucugcgacagcccccaccagauccuggacggcgagaacugcacccugaucgacgcccugcugggcgacccccagugcgacggcuuccagaacaagaagugggaccuguucguggagagaagcaaggccuacagcaacugcuaccccuacgacgugcccgacuacgccagccugagaagccugaucgccagcagcggcacccuggaguucaacaacgagagcuucaacuggaccggcgugacccagaacggcaccagcagcgccugcaagagaagaagcaacaacagcuucuucagcagacugaacuggcugacccaccugaaguucaaguaccccgcccugaacgugaccaugcccaacaacgaggaguucgacaagcuguacaucuggggcgugcaccaccccggcaccgacaacgaccagaucagccuguacgcccaggcccccggcagaaucaccgugagcaccaagagaagccagcagaccgugauccccaacaucggcagcagacccagagugagagacauccccagcagaaucagcaucuacuggaccaucgugaagcccggcgacauccugcugaucaacagcaccggcaaccugaucgcccccagaggcuacuucaagaucagaagcggcaagagcagcaucaugagaagcgacgcccccaucggcaagugcaacagcgagugcaucacccccaacggcagcauccccaacgacaagcccuuccagaacgugaacagaaucaccuacggcgccugccccagauacgugaagcagaacacccugaagcuggccaccggcaugagaaacgugcccgagaagcagaccagaggcaucuucggcgccaucgccggcuucaucgagaacggcugggagggcaugguggacggcugguacggcuucagacaccagaacagcgagggcaucggccaggccgccgaccugaagagcacccaggccgccaucgaccagaucaacggcaagcugaacagacugaucggcaagaccaacgagaaguuccaccagaucgagaaggaguucagcgagguggagggcagaauccaggaccuggagaaguacguggaggacaccaagaucgaccuguggagcuacaacgccgagcugcugguggcccuggagaaccagcacaccaucgaccugaccgacagcgagaugaacaagcuguucgagagaaccaagaagcagcugagagagaacgccgaggacaugggcaacggcugcuucaagaucuaccacaagugcgacaacgccugcaucggcagcaucagaaacggcaccuacgaccacgacaucuacagagacgaggcccugaacaacagauuccagaucaagggcguggagcugaagagcggcuacaaggacuggauccuguggaucagcuucgccaucagcugcuuccugcugugcguggugcugcugggcuucaucaugugggccugccagaagggcaacaucagaugcaacaucugcaucuga

SEQ ID NO: 161948 - RNA, 1701 nt, Artificial Sequence; identical to SEQ ID NO: 161888
  derived and/or modified CDS sequence (opt4) from hemagglutinin__InfluenzaA__ABU92742

SEQ ID NO: 161949 - RNA, 1701 nt, Artificial Sequence
  derived and/or modified CDS sequence (opt4) from hemagglutinin__InfluenzaA__ABU92743
augaagaccaucaucgcccugagcuacauccuguaccugguguucgcccagaagcugcccgagaacgacaacagcaccgccacccugugccugggccaccacgccgugcccaacggcaccaucgugaagaccaucaccaacgaccagaucgaggugaccaacgccaccgagcuggugcagagcagcagcaccggcggcaucugcgacagcccccaccagauccuggacggcgagaacugcacccugaucgacgcccugcugggcgacccccagugcgacggcuuccagaacaagaagugggaccuguucguggagagaagcaaggccuacagcaacugcuaccccuacgacgugcccgacuacgccagccugagaagccugguggccagcagcggcacccuggaguucaacaacgagagcuucaacuggaccggcgugacccagaacggcaccagcagcgccugcaagagaagaagcaacaacagcuucuucagcagacugaacuggcugacccaccugaaguucaaguaccccgcccugaacgugaccaugcccaacaacgagaaguucgacaagcuguacaucuggggcgugcaccaccccggcaccgacaacgaccagaucuuccuguacgcccaggccagcggcagaaucaccgugagcaccaagagaagccagcagaccgugauccccaacaucggcagcagacccagagugagaaacauccccagcagaaucagcaucuacuggaccaucgugaagcccggcgacauccugcugaucaacagcaccggcaaccugaucgcccccagaggcuacuucaagaucagaagcggcaagagcagcaucaugagaagcgacgcccccaucggcaagugcaacagcgagugcaucacccccaacggcagcauccccaacgacaagcccuuccagaacgugaacagaaucaccuacggcgccugccccagauacgugaagcagaacacccugaagcuggccaccggcaugagaaacgugcccgagaagcagaccagaggcaucuucggcgccaucgccggcuucaucgagaacggcugggagggcaugguggacggcugguacggcuucagacaccagaacagcgagggcaucggccaggccgccgaccugaagagcacccaggccgccaucgaccagaucaacggcaagcugaacagacugaucggcaagaccaacgagaaguuccaccagaucgagaaggaguucagcgagguggagggcagaauccaggaccuggagaaguacguggaggacaccaagaucgaccuguggagcuacaacgccgagcugcugguggcccuggagaaccagcacaccaucgaccugaccgacagcgagaugaacaagcuguucgagaagaccaagaagcagcugagagagaacgccgaggacaugggcaacggcugcuucaagaucuaccacaagugcgacaacgccugcaucggcagcaucagaaacggcaccuacgaccacgacguguacagagacgaggcccugaacaacagauuccagaucaagggcguggagcugaagagcggcuacaaggacuggauccuguggaucagcuucgccaucagcugcuuccugcugugcguggcccugcugggcuucaucaugugggccugccagaagggcaacaucagaugcaacaucugcaucuga

SEQ ID NO: 161950 - RNA, 1701 nt, Artificial Sequence; identical to SEQ ID NO: 161888
  derived and/or modified CDS sequence (opt4) from hemagglutinin__InfluenzaA__ABU92744

SEQ ID NO: 161951 - RNA, 1701 nt, Artificial Sequence
  derived and/or modified CDS sequence (opt4) from hemagglutinin__InfluenzaA__ABU92745
augaagaccaucaucgcccugagcuacauccugugccugguguucgcccagaagcugcccggcaacgacaacagcaccgccacccugugccugggccaccacgccgugcccaacggcaccaucgugaagaccaucaccaacgaccagaucgaggugaccaacgccaccgagcuggugcagagcagcagcaccggcggcaucugcgacagcccccaccagauccuggacggcgagaacugcacccugaucgacgcccugcugggcgacccccagugcgacggcuuccagaacaagaagugggaccuguucguggagagaagcaaggccuacagcaacugcuaccccuacgacgugcccgacuacgccagccugagaagccugaucgccagcagcggcacccuggaguucaacaacgagagcuucaacuggaccggcgugacccagaacggcaccagcagcgccugcaagagaagaagcaacaacagcuucuucagcagacugaacuggcugacccaccugaaguucaaguaccccgcccugaacgugaccaugcccaacaacgaggaguucgacaagcuguacaucuggggcgugcaccaccccggcaccgacaacgaccagaucagccuguacgcccaggcccccggcagaaucaccgugagcaccaagagaagccagcagaccgugauccccaacaucggcagcagacccagagugagagacauccccagcagaaucagcaucuacuggaccaucgugaagcccggcgacauccugcugaucaacagcaccggcaaccugaucgcccccagaggcuacuucaagaucagaaucggcaagagcagcaucaugagaagcgacgcccccaucggcaagugcaacagcgagugcaucacccccaacggcagcauccccaacgacaagcccuuccagaacgugaacagaaucaccuacggcgccugccccagauacgugaagcagaacacccugaagcuggccaccggcaugagaaacgugcccgagaagcagaccagaggcaucuucggcgccaucgccggcuucaucgagaacggcugggagggcaugguggacggcugguacggcuucagacaccagaacagcgagggcaucggccaggccgccgaccugaagagcacccaggccgccaucgaccagaucaacggcaagcugaacagacugaucggcaagaccaacgagaaguuccaccagaucgagaaggaguucagcgagguggagggcagaauccaggaccuggagaaguacguggaggacaccaagaucgaccuguggagcuacaacgccgagcugcugguggcccuggagaaccagcacaccaucgaccugaccgacagcgagaugaacaagcuguucgagagaaccaagaagcagcugagagagaacgccgaggacaugggcaacggcugcuucaagaucuaccacaagugcgacaacgccugcaucggcagcaucagaaacggcaccuacgaccacgacguguacagagacgaggcccugaacaacagauuccagaucaagggcguggagcugaagagcggcuacaaggacuggauccuguggaucagcuucgccaucagcugcuuccugcugugcguggugcugcugggcuucaucaugugggccugccagaagggcaacaucagaugcaacaucugcaucuga

SEQ ID NO: 161952 - RNA, 1701 nt, Artificial Sequence; identical to SEQ ID NO: 161888
  derived and/or modified CDS sequence (opt4) from hemagglutinin__InfluenzaA__ABU92746

SEQ ID NO: 161953 - RNA, 1701 nt, Artificial Sequence; identical to SEQ ID NO: 160133
  derived and/or modified CDS sequence (opt4) from hemagglutinin__InfluenzaA__ABU92747

SEQ ID NO: 161954 - RNA, 1701 nt, Artificial Sequence
  derived and/or modified CDS sequence (opt4) from hemagglutinin__InfluenzaA__ABU92748
augaagaccaucaucgcccugagcuacauccugugccugguguucgcccagaagcugcccggcaacgacaacagcaccgccacccugugccugggccaccacgccgugcccaacggcaccaucgugaagaccaucaccaacgaccagaucgaggugaccaacgccaccgagcuggugcagagcagcagcaccggcgagaucugcgacagcccccaccagauccuggacggcgagaacugcacccugaucgacgcccugcugggcgacccccagugcgacggcuuccagaacaagaagugggaccuguucguggagagaagcaaggccuacagcaacugcuaccccuacgacgugcccgacuacgccagccugagaagccugguggccagcagcggcacccuggaguucaacaacgagagcuucaacuggaccggcgugacccagaacggcaccagcagcgccugcaagagaagaagcaacaacagcuucuucagcagacugaacuggcugacccacagcaaguucaaguaccccgcccugaacgugaccaugcccaacaacgagaaguucgacaagcuguacaucuggggcgugcaccaccccggcaccgacaacgaccagaccuuccuguacgcccaggccagcggcagaaucaccgugagcaccaagagaagccagcagaccgugauccccaacaucggcagcagacccagagugagaaacauccccagcagaaucagcaucuacuggaccaucgugaagcccggcgacauccugcugaucaacagcaccggcaaccugaucgcccccagaggcuacuucaagaucagaagcggcaagagcagcaucaugagaagcgacgcccccaucggcaagugcaacagcgagugcaucacccccaacggcagcauccccaacgacaagcccuuccagaacgugaacagaaucaccuacggcgccugccccagauacgugaagcagaacacccugaagcuggccaccggcaugagaaacgugcccgagaagcagaccagaggcaucuucggcgccaucgccggcuucaucgagaacggcugggagggcaugguggacggcugguacggcuucagacaccagaacagcgagggcaucggccaggccgccgaccugaagagcacccaggccgccaucaaccagaucaacggcaagcugaacagacugaucggcaagaccaacgagaaguuccaccagaucgagaaggaguucagcgagguggagggcagaauccaggaccuggagaaguacguggaggacaccaagaucgaccuguggagcuacaacgccgagcugcugguggcccuggagaaccagcacaccaucgaccugaccgacagcgagaugaacaagcuguucgagagaaccaagaagcagcugagagagaacgccgaggacaugggcaacggcugcuucaagaucuaccacaagugcgacaacgccugcaucggcagcaucagaaacggcaccuacgaccacgacguguacagagacgaggcccugaacaacagauuccagaucaagggcguggagcugaagagcggcuacaaggacuggauccuguggaucagcuucgccaucagcugcuuccugcugugcguggugcugcugggcuucaucaugugggccugccagaagggcaacaucagaugcaacaucugcaucuga

SEQ ID NO: 161955 - RNA, 1701 nt, Artificial Sequence; identical to SEQ ID NO: 160133
  derived and/or modified CDS sequence (opt4) from hemagglutinin__InfluenzaA__ABU92749

SEQ ID NO: 161956 - RNA, 1701 nt, Artificial Sequence
  derived and/or modified CDS sequence (opt4) from hemagglutinin__InfluenzaA__ABU92750
augaagaccaucaucgcccugagcuacauccugugccugguguucgcccagaagcugcccggcaacgacaacagaaccgccacccugugccugggccaccacgccgugcccaacggcaccaucgugaagaccaucaccaacgaccagaucgaggugaccaacgccaccgagcuggugcagaucagcagcaccggcggcaucugcgacagcccccaccagauccuggacggcgagaacugcacccugaucgacgcccugcugggcgacccccagugcgacggcuuccagaacaagaagugggaccuguucguggagagaagcaaggccuacagcaacugcuaccccuacgacgugcccgacuacgccagccugagaagccugguggccagcagcggcacccuggaguucaacaacgagagcuucgacuggaccggcgugacccagaacggcaccagcagcgccugcaagagaagaagcaacaagagcuucuucagcagacugaacuggcugacccaccugaaguacaaguaccccgcccugaacgugaccaugcccaacaacgagaaguucgacaagcuguacaucuggggcgugcaccaccccggcaccgacagcgaccagaucagccuguacgcccaggccagcggcagaaucaccgugagcaccaagagaagccagcagaccgugauccccaacaucggcagcagacccagagugagagacgugagcagcagaaucagcaucuacuggaccaucgugaagcccggcgacauccugcugaucaacagcaccggcaaccugaucgcccccagaggcuacuucaagaucagaagcggcaagagcagcaucaugagaagcgacgcccccaucggcaagugcaacagcgagugcaucacccccaacggcagcauccccaacgacaagcccuuccagaacgugaacagaaucaccuacggcgccugccccagauacgugaagcagaacacccugaagcuggccaccggcaugagaaacgugcccgagaagcagaccagaggcaucuucggcgccaucgccggcuucaucgagaacggcugggagggcaugguggacggcugguacggcuucagacaccagaacagcgagggcaccggccaggccgccgaccugaagagcacccaggccgccaucaaccagaucaacggcaagcugaacagacugaucggcaagaccaacgagaaguuccaccagaucgagaaggaguucagcgagguggagggcagaauccaggaccuggagaaguacguggaggacaccaagaucgaccuguggagcuacaacgccgagcugcugguggcccuggagaaccagcacaccaucgaccugaccgacagcgagaugaacaagcuguucgagagaaccaagaagcagcugagagagaacgccgaggacaugggcaacggcugcuucaagaucuaccacaagugcgacaacgccugcaucggcagcaucagaaacggcaccuacgaccacgacguguacagagacgaggcccugaacaacagauuccagaucaagggcguggagcugaagagcggcuacaaggacuggauccuguggaucagcuucgccaucagcugcuuccugcugugcguggcccugcugggcuucaucaugugggccugccagaagggcaacaucagaugcaacaucugcaucuga

SEQ ID NO: 161957 - RNA, 1701 nt, Artificial Sequence
  derived and/or modified CDS sequence (opt4) from hemagglutinin__InfluenzaA__ABU92751
augaagaccaucaucgcccugagcuacauccugugccugguguucgcccagaagcugcccggcaacgacaacagcaccgccacccugugccugggccaccacgccgugcccaacggcaccaucgugaagaccaucaccaacgaccagaucgaggugaccaacgccaccgagcuggugcagagcagcagcaccggcggcaucugcgacagcccccaccagauccuggacggcgagaacugcacccugaucgacgcccugcugggcgacccccagugcgacggcuuccagaacaagaagugggaccuguucguggagagaagcaaggccuacagcaacugcuaccccuacgacgugcccgacuacgccagccugagaagccugguggccagcagcggcacccuggaguucaacaacgagagcuucaacuggaccggcgugacccagaacggcaccagcagcgccugcaagagaagaagcaacaagagcuucuucagcagacugaacuggcugacccaccugaaguacaaguaccccgcccugaacgugaccaugcccaacaacgagaaguucgacaagcuguacaucuggggcgugcaccaccccggcaccgacagcgaccagaucagccuguacgcccaggccagcggcagaaucaccgugagcaccaagagaagccagcagaccgugauccccaacaucggcagcagacccagagugagagacgugagcagcagaaucagcaucuacuggaccaucgugaagcccggcgacauccugcugaucaacagcaccggcaaccugaucgcccccagaggcuacuucaagaucagaagcggcaagagcagcaucaugagaagcgacgcccccaucggcaagugcaacagcgagugcaucacccccaacggcagcauccccaacgacaagcccuuccagaacgugaacagaaucaccuacggcgccugccccagauacgugaagcagaacacccugaagcuggccaccggcaugagaaacgugcccgagaagcagaccagaggcaucuucggcgccaucgccggcuucaucgagaacggcugggagggcaugguggacggcugguacggcuucagacaccagaacagcgagggcaccggccaggccgccgaccugaagagcacccaggccgccaucaaccagaucaacggcaagcugaacagacugaucggcaagaccaacgagaaguuccaccagaucgagaaggaguucagcgagguggagggcagaauccaggaccuggagaaguacguggaggacaccaagaucgaccuguggagcuacaacgccgagcugcugguggcccuggagaaccagcacaccaucgaccugaccgacagcgagaugaacaagcuguucgagagaaccaagaagcagcugagagagaacgccgaggacaugggcaacggcugcuucaagaucuaccacaagugcgacaacgccugcaucggcagcaucagaaacggcaccuacgaccacgacguguacagagacgaggcccugaacaacagauuccagaucaagggcguggagcugaagagcggcuacaaggacuggauccuguggaucagcuucgccaucagcugcuuccugcugugcguggcccugcugggcuucaucaugugggccugccagaagggcaacaucagaugcaacaucugcaucuga

SEQ ID NO: 161958 - RNA, 1701 nt, Artificial Sequence; identical to SEQ ID NO: 161822
  derived and/or modified CDS sequence (opt4) from hemagglutinin__InfluenzaA__ABU92752

SEQ ID NO: 161959 - RNA, 1701 nt, Artificial Sequence; identical to SEQ ID NO: 160133
  derived and/or modified CDS sequence (opt4) from hemagglutinin__InfluenzaA__ABU92753

SEQ ID NO: 161960 - RNA, 1701 nt, Artificial Sequence; identical to SEQ ID NO: 161822
  derived and/or modified CDS sequence (opt4) from hemagglutinin__InfluenzaA__ABU92754

SEQ ID NO: 161961 - RNA, 1701 nt, Artificial Sequence
  derived and/or modified CDS sequence (opt4) from hemagglutinin__InfluenzaA__ABU92755
augaagaccaucaucgcccugagcuacauccugugccugguguucgcccagaagcugcccggcaacgacaacggcaccgccacccugugccugggccaccacgccgugcccaacggcaccaucgugaagaccaucaccaacgaccagaucgaggugaccaacgccaccgagcuggugcagagcagcagcaccggcggcaucugcgacagcccccaccagauccuggacggcgagaacugcacccugaucgacgcccugcugggcgacccccagugcgacggcuuccagaacaagaagugggaccuguucguggagagaagcaaggccuacagcaacugcuaccccuacgacgugcccgacuacgccagccugagaagccugguggccagcagcggcacccuggaguucaacaacgagagcuucaacuggaccggcgugacccagaacggcaccagcagcgccugcaagagaagaagcaacaagagcuucuucagcagacugaacuggcugacccaccugaaguucaaguaccccgcccugaacgugaccaugcccaacaacgagaaguucgacaagcuguacaucuggggcgugcaccaccccggcaccgacaacgaccagaucagccuguacgcccaggccagcggcagaaucaccgugagcaccaagagaagccagcagaccgugauccccaacaucggcagcagacccagagugagagacgugcccagcagaaucagcaucuacuggaccaucgugaagcccggcgacauccugcugaucaacagcaccggcaaccugaucgcccccagaggcuacuucaagaucagaagcggcaagagcagcaucaugagaagcgacgcccccaucggcaagugcaacagcgagugcaucacccccaacggcagcauccccaacgacaagcccuuccagaacgugaacagaaucaccuacggcgccugccccagauacgugaagcagaacacccugaagcuggccaccggcaugagaaacgugcccgagaagcagaccagaggcaucuucggcgccaucgccggcuucaucgagaacggcugggagggcaugguggacggcugguacggcuucagacaccagaacgccgagggcaccggccaggccgccgaccugaagagcacccaggccgccaucaaccagaucaacggcaagcugaacagacugaucggcaagaccaacgagaaguuccaccagaucgagaaggaguucagcgagguggagggcagaauccaggaccuggagaaguacguggaggacaccaagaucgaccuguggagcuacaacgccgagcugcugguggcccuggagaaccagcacaccaucgaccugaccgacagcgagaugaacaagcuguucgagagaaccaagaagcagcugagagagaacgccgaggacaugggcaacggcugcuucaagaucuaccacaagugcgacaacgccugcaucggcagcaucagaaacggcaccuacgaccacaacguguacagagacgaggcccugaacaacagauuccagaucaagggcguggagcugaagagcggcuacaaggacuggauccuguggaucagcuucgccaucagcugcuuccugcugugcguggugcugcugggcuucaucaugugggccugccagaagggcaacaucagaugcaacaucugcaucuga

SEQ ID NO: 161962 - RNA, 1701 nt, Artificial Sequence
  derived and/or modified CDS sequence (opt4) from hemagglutinin__InfluenzaA__ABU92756
augaagaccaucaucgcccugagcuacauccugugccugguguucgcccagaagcugcccggcaacgacaacagcaccgccacccugugccugggccaccacgccgugcccaacggcaccaucgugaagaccaucaccaacgaccagaucgaggugaccaacgccaccgagcuggugcagaucagcagcaccggcggcaucugcgacagcccccaccagauccuggacggcgagaacugcacccugaucgacgcccugcugggcgacccccagugcgacggcuuccagaacaagaagugggaccuguucguggagagaagcaaggcccacagcaacugcuaccccuacgacgugcccgacuacgccagccugagaagccugguggccagcagcggcacccuggaguucaacaacgagagcuucgacuggaccggcgugacccagaacggcaccagcagcgccugcaagagaagaagcaacaagagcuucuucagcagacugaacuggcugacccaccugaaguacaaguaccccgcccugaacgugaccaugcccaacaacgagaaguucgacaagcuguacaucuggggcgugcaccaccccggcaccgacagcgaccagaucagccuguacgcccaggccagcggcagaaucaccgugagcaccaagagaagccagcagaccgugauccccaacaucggcagcagacccagagugagagacgugagcagcagaaucagcaucuacuggaccaucgugaagcccggcgacauccugcugaucaacagcaccggcaaccugaucgcccccagaggcuacuucaagaucagaagcggcaagagcagcaucaugagaagcgacgcccccaucggcaagugcaacagcgagugcaucacccccaacggcagcauccccaacgacaagcccuuccagaacgugaacagaaucaccuacggcgccugccccagauacgugaagcagaacacccugaagcuggccaccggcaugagaaacgugcccgagaagcagaccagaggcaucuucggcgccaucgccggcuucaucgagaacggcugggagggcaugguggacggcugguacggcuucagacaccagaacagcgagggcaccggccaggccgccgaccugaagagcacccaggccgccaucaaccagaucaacggcaagcugaacagacugaucggcaagaccaacgagaaguuccaccagaucgagaaggaguucagcgagguggagggcagaauccaggaccuggagaaguacguggaggacaccaagaucgaccuguggagcuacaacgccgagcugcugguggcccuggagaaccagcacaccaucgaccugaccgacagcgagaugaacaagcuguucgagagaaccaagaagcagcugagagagaacgccgaggacaugggcaacggcugcuucaagaucuaccacaagugcgacaacgccugcaucggcagcaucagaaacggcaccuacgaccacgacguguacagagacgaggcccugaacaacagauuccagaucaagggcguggagcugaagagcggcuacaaggacuggauccuguggaucagcuucgccaucagcugcuuccugcugugcguggcccugcugggcuucaucaugugggccugccagaagggcaacaucagaugcaacaucugcaucuga

SEQ ID NO: 161963 - RNA, 1701 nt, Artificial Sequence
  derived and/or modified CDS sequence (opt4) from hemagglutinin__InfluenzaA__ABU92757
augaagaccaucaucgcccugagcuacauccugugccugguguucgcccagaagcugcccggcaacgacaacagcaccgccacccugugccugggccaccacgccgugcccaacggcaccaucgugaagaccaucaccaacgaccagaucgaggugaccaacgccaccgagcuggugcagaucagcagcaccggcgagaucugcgacagcccccaccagauccuggacggcgagaacugcacccugaucgacgcccugcugggcgacccccagugcgacggcuuccagaacaagaagugggaccuguucguggagagaagcaaggccuacagcaacugcuaccccuacgacgugcccgacuacgccagccugagaagccugguggccagcagcggcacccuggaguucaacaacgagagcuucgacuggaccggcgugacccagaacggcaccagcagcgccugcaagagaagaagcgacaagagcuucuucagcagacugaacuggcugacccaccugaaguacaaguaccccgcccugaacgugaccaugcccaacaacgagaaguucgacaagcuguacaucuggggcgugcaccaccccggcaccgacagcgaccagaucagccuguacgcccaggccagcggcagaaucaccgugagcaccaagagaagccagcagaccgugauccccaacaucggcagcagacccagagugagagacgugagcagcagaaucagcaucuacuggaccaucgugaagcccggcgacauccugcugaucaacagcaccggcaaccugaucgcccccagaggcuacuucaagaucagaagaggcaagagcagcaucaugagaagcgacgcccccaucggcaagugcaacagcgagugcaucacccccaacggcagcauccccaacgacaagcccuuccagaacgugaacagaaucaccuacggcgccugccccagauacgugaagcagaacacccugaagcuggccaccggcaugagaaacgugcccgagaagcagaccagaggcaucuucggcgccaucgccggcuucaucgagaacggcugggagggcaugguggacggcugguacggcuucagacaccagaacagcgagggcaccggccaggccgccgaccugaagagcacccaggccgccaucaaccagaucaacggcaagcugaacagacugaucggcaagaccaacgagaaguuccaccagaucgagaaggaguucagcgagguggagggcagaauccaggaccuggagaaguacguggaggacaccaagaucgaccuguggagcuacaacgccgagcugcugguggcccuggagaaccagcacaccaucgaccugaccgacagcgagaugaacaagcuguucgagagaaccaagaagcagcugagagagaacgccgaggacaugggcaacggcugcuucaagaucuaccacaagugcgacaacgccugcaucggcagcaucagaaacggcaccuacgaccacgacguguacagagacgaggcccugaacaacagauuccagaucaagggcguggagcugaagagcggcuacaaggacuggauccuguggaucagcuucgccaucagcugcuuccugcugugcguggcccugcugggcuucaucaugugggccugccagaagggcaacaucagaugcaacaucugcaucuga

SEQ ID NO: 161964 - RNA, 1701 nt, Artificial Sequence; identical to SEQ ID NO: 161822
  derived and/or modified CDS sequence (opt4) from hemagglutinin__InfluenzaA__ABU92758

SEQ ID NO: 161965 - RNA, 1701 nt, Artificial Sequence; identical to SEQ ID NO: 161822
  derived and/or modified CDS sequence (opt4) from hemagglutinin__InfluenzaA__ABU92759

SEQ ID NO: 161966 - RNA, 1701 nt, Artificial Sequence
  derived and/or modified CDS sequence (opt4) from hemagglutinin__InfluenzaA__ABU92760
augaagaccaucaucgcccugagcuacauccugugccugguguucgcccagaagcugcccggcaacgacaacagcaccgccacccugugccugggccaccacgccgugcccaacggcaccaucgugaagaccaucaccaacgaccagaucgaggugaccaacgccaccgagcuggugcagaucagcagcaccggcgagaucugcaacagcccccaccagauccuggacggcgagaacugcacccugaucgacgcccugcugggcgacccccagugcgacggcuuccagaacaagaagugggaccuguucguggagagaagcaaggccuacagcaacugcuaccccuacgacgugcccgacuacgccagccugagaagccugguggccagcagcggcacccuggaguucaacaacgagagcuucgacuggaccggcgugacccagaacggcaccagcagcgccugcaagagaagaagcgacaagagcuucuucagcagacugaacuggcugacccaccugaaguacaaguaccccgcccugaacgugaccaugcccaacaacgagaaguucgacaagcuguacaucuggggcgugcaccaccccggcaccgacagcgaccagaucagccuguacgcccaggccagcggcagaaucaccgugagcaccaagagaagccagcagaccgugauccccaacaucggcagcagacccagagugagagacgugagcagcagaaucagcaucuacuggaccaucgugaagcccggcgacauccugcugaucaacagcaccggcaaccugaucgcccccagaggcuacuucaagaucagaagcggcaagagcagcaucaugagaagcgacgcccccaucggcaagugcaacagcgagugcaucacccccaacggcagcauccccaacgacaagcccuuccagaacgugaacagaaucaccuacggcgccugccccagauacgugaagcagaacacccugaagcuggccaccggcaugagaaacgugcccgagaagcagaccagaggcaucuucggcgccaucgccggcuucaucgagaacggcugggagggcaugguggacggcugguacggcuucagacaccagaacagcgagggcaccggccaggccgccgaccugaagagcacccaggccgccaucaaccagaucaacggcaagcugaacagacugaucggcaagaccaacgagaaguuccaccagaucgagaaggaguucagcgagguggagggcagaauccaggaccuggagaaguacguggaggacaccaagaucgaccuguggagcuacaacgccgagcugcugguggcccuggagaaccagcacaccaucgaccugaccgacagcgagaugaacaagcuguucgagagaaccaagaagcagcugagagagaacgccgaggacaugggcaacggcugcuucaagaucuaccacaagugcgacaacgccugcaucggcagcaucagaaacggcaccuacgaccacgacguguacagagacgaggcccugaacaacagauuccagaucaagggcguggagcugaagagcggcuacaaggacuggauccuguggaucagcuucgccaucagcugcuuccugcugugcguggcccugcugggcuucaucaugugggccugccagaagggcaacaucagaugcaacaucugcaucuga

SEQ ID NO: 161967 - RNA, 1698 nt, Artificial Sequence
  derived and/or modified CDS sequence (opt4) from hemagglutinin__InfluenzaA__ABV29579
augaaggugaagcugcuggugcugcugugcaccuucaccgccaccuacgccgacaccaucugcaucggcuaccacgccaacaacagcaccgacaccguggacaccgugcuggagaagaacgugaccgugacccacagcgugaaccugcuggaggacagccacaacggcaagcugugccugcugaagggcaucgccccccugcagcugggcaacugcagcguggccggcuggauccugggcaaccccgagugcgagcugcugaucagcaaggagagcuggagcuacaucguggagacccccaaccccgagaacggcaccugcuaccccggcuacuucgccgacuacgaggagcugagagagcagcugagcagcgugagcagcuucgagagauucgagaucuuccccaaggagagcagcuggcccaaccacaccgugaccggcgugagcgccagcugcagccacaacggcaagagcagcuucuacagaaaccugcuguggcugaccggcaagaacggccuguaccccaaccugagcaagagcuacgccaacaacaaggagaaggaggugcuggugcuguggggcgugcaccacccccccaacaucggcgaccagagagcccuguaccacaccgagaacgccuacgugagcguggugagcagccacuacagcagaagauucacccccgagaucgccaagagacccaaggugagagaccaggagggcagaaucaacuacuacuggacccugcuggagcccggcgacaccaucaucuucgaggccaacggcaaccugaucgcccccagauucgccuucgcccugagcagaggcuucggcagcggcaucaucaccagcaacgcccccauggacgagugcgacgccaagugccagaccccccagggcgccaucaacagcagccugcccuuccagaacgugcaccccgugaccaucggcgagugccccaaguacgugagaagcaccaagcugagaauggugaccggccugagaaacauccccagcauccagagcagaggccuguucggcgccaucgccggcuucaucgagggcggcuggaccggcaugguggacggcugguacggcuaccaccaccagaacgagcagggcagcggcuacgccgccgaccagaagagcacccagaacgccaucaacggcaucaccaacaaggugaacagcgugaucgagaagaugaacacccaguucaccgccgugggcaaggaguucaacaagcuggagaagagaauggagaaccugaacaagaagguggacgacggcuuccuggacaucuggaccuacaacgccgagcugcuggugcugcuggagaacgagagaacccuggacuuccacgacagcaacgugaagaaccuguacgagaaggugaagagccagcugaagaacaacgccaaggagaucggcaacggcugcuucgaguucuaccacaagugcaacgacgagugcauggagagcgugaagaacggcaccuacgacuaccccaaguacagcgaggagagcaagcugaacagagagaagaucgacggcgugaagcuggagagcaugggcguguaccagauccuggccaucuacagcaccguggccagcagccuggugcugcuggugagccugggcgccaucagcuucuggaugugcagcaacggcagccugcagugcagaaucugcaucuga

SEQ ID NO: 161968 - RNA, 1698 nt, Artificial Sequence
  derived and/or modified CDS sequence (opt4) from hemagglutinin__InfluenzaA__ABV29612
augaaggugaagcugcugauccugcugugcaccuucaccgccaccuacgccgacaccaucugcaucggcuaccacgccaacaacagcaccgacaccguggacaccgugcuggagaagaacgugaccgugacccacagcgugaaccugcuggaggacagccacaacggcaagcugugccugcugaagggcaucgccccccugcagcugggcaacugcagcguggccggcuggauccugggcaaccccgagugcgagcugcugaucagcaaggagagcuggagcuacaucguggagacccccaaccccgagaacggcaccugcuaccccggcuacuucgccgacuacgaggagcugagagagcagcugagcagcgugagcagcuucgagagauucgagaucuuccccaaggagagcagcuggcccaaccacaccgugaccggcgugagcgccagcugcagccacaacggcaagagcagcuucuacagaaaccugcuguggcugaccggcaagaacggccuguaccccaaccugagcaagagcuacgccaacaacaaggagaaggaggugcuggugcuguggggcgugcaccacccccccaacaucggcgaccagagagcccuguaccacaccgagaacgccuacgugagcguggugagcagccacuacagcagaagauucacccccgagguggccaagagacccaaggugagagaccaggagggcagaaucaacuacuacuggacccugcuggagcccggcgacaccaucaucuucgaggccaacggcaaccugaucgcccccagauucgccuucgcccugagcagaggcuucggcagcggcaucaucaccagcaacgcccccauggacgagugcgacgccaagugccagaccccccagggcgccaucaacagcagccugcccuuccagaacgugcaccccgugaccaucggcgagugccccaaguacgugagaagcaccaagcugagaauggugaccggccugagaaacauccccagcauccagagcagaggccuguucggcgccaucgccggcuucaucgagggcggcuggaccggcaugguggacggcugguacggcuaccaccaccagaacgagcagggcagcggcuacgccgccgaccagaagagcacccagaacgccaucaacggcaucaccaacaaggugaacagcgugaucgagaagaugaacacccaguucaccgccgugggcaaggaguucaacaagcuggagagaagaauggagaaccugaacaagaagguggacgacggcuuccuggacaucuggaccuacaacgccgagcugcuggugcugcuggagaacgagagaacccuggacuuccacgacagcaacgugaagaaccuguacgagaaggugaagagccagcugaagaacaacgccaaggagaucggcaacggcugcuucgaguucuaccacaagugcaacgacgagugcauggagagcgugaagaacggcaccuacgacuaccccaaguacagcgaggagagcaagcugaacagagagaagaucgacggcgugaagcuggagagcaugggcguguaccagauccuggccaucuacagcaccguggccagcagccuggugcugcuggugagccugggcgccaucagcuucuggaugugcagcaacggcagccugcagugcagaaucugcaucuga

SEQ ID NO: 161969 - RNA, 1698 nt, Artificial Sequence
  derived and/or modified CDS sequence (opt4) from hemagglutinin__InfluenzaA__ABV29634
augaaggugaagcugcuggugcugcugugcaccuucaccgccaccuacgccgacaccaucugcaucggcuaccacgccaacaacagcaccgacaccguggacaccgugcuggagaagaacgugaccgugacccacagcgugaaccugcuggaggacagccacaacggcaagcugugccugcugaagggcaucgccccccugcagcugggcaacugcagcguggccggcuggauccugggcaaccccgagugcgagcugcugaucagcaaggagagcuggagcuacaucguggaggcccccagccccgagaacggcaccugcuaccccggcuacuucgccgacuacgaggagcugagagagcagcugagcagcgugagcagcuucgagagauucgagaucuuccccaaggagagcagcuggcccaaccacaccgugaccggcgugagcgccagcugcagccacaacggcaagagcagcuucuacagaaaccugcuguggcugaccggcaagaacggccuguaccccaaccugagcaagagcuacgccaacaacaaggagaaggaggugcuggugcuguggggcgugcaccacccccccaacaucggcgaccagagagcccuguaccacaccgagaacgccuacgugagcguggugagcagccacuacagcagaagauucacccccgagaucgccaagagacccaaggugagagaccaggagggcagaaucaacuacuacuggacccugcuggagcccggcgacaccaucaucuucgaggccaacggcaaccugaucgcccccagauucgccuucgcccugagcagaggcuucggcagcggcaucaucaccagcaacgcccccaugggcgagugcgacgccaagugccagaccccccagggcgccaucaacagcagccugcccuuccagaacgugcaccccgugaccaucggcgagugccccaaguacgugagaagcgccaagcugagaauggugaccggccugagaaacauccccagcauccagagcagaggccuguucggcgccaucgccggcuucaucgagggcggcuggaccggcaugguggacggcugguacggcuaccaccaccagaacgagcagggcagcggcuacgccgccgaccagaagagcacccagaacgccaucaacggcaucaccaacaaggugaacagcgugaucgagaagaugaacacccaguucaccgccgugggcaaggaguucaacaagcuggagagaagaauggagaaccugaacaagaagguggacgacggcuuccuggacaucuggaccuacaacgccgagcugcuggugcugcuggagaacgagagaacccuggacuuccacgacagcaacgugaagaaccuguacgagaaggugaagagccagcugaagaacaacgccaaggagaucggcaacggcugcuucgaguucuaccacaagugcaacgacgagugcauggagagcgugaagaacggcaccuacgacuaccccaaguacagcgaggagagcaagcugaacagagagaagaucgacggcgugaagcuggagagcaugggcguguaccagauccuggccaucuacagcaccguggccagcagccuggugcugcuggugagccugggcgccaucagcuucuggaugugcagcaacggcagccugcagugcagaaucugcaucuga

SEQ ID NO: 161970 - RNA, 1698 nt, Artificial Sequence
  derived and/or modified CDS sequence (opt4) from hemagglutinin__InfluenzaA__ABV29645
augaaggugaagcugcugauccugcugugcaccuucaccgccaccuacgccgacaccaucugcaucggcuaccacgccaacaacagcaccgacaccguggacaccgugcuggagaagaacgugaccgugacccacagcgugaaccugcuggaggacagccacaacggcaagcugugccugcugaagggcaucgccccccugcagcugggcaacugcagcguggccggcuggauccugggcaaccccgagugcgagcugcugaucagcaaggagagcuggagcuacaucguggagacccccaaccccgagaacggcaccugcuaccccggcuacuucgccgacuacgaggagcugagagagcagcugagcagcgugagcagcuucgagagauucgagaucuuccccaaggagagcagcuggcccaaccacaccgugaccggcgugagcgccagcugcagccacaacggcaagagcagcuucuacagaaaccugcuguggcugaccggcaagaacggccuguaccccaaccugagcaagagcuacgccaacaacaaggagaaggaggugcuggugcuguggggcgugcaccacccccccaacaucggcgaccagagagcccuguaccacaccgagaacgccuacgugagcguggugagcagccacuacagcagaagauucacccccgagaucgccaagagacccaaggugagagaccaggagggcagaaucaacuacuacuggacccugcuggagcccggcgacaccaucaucuucgaggccaacggcaaccugaucgcccccagauucgccuucgcccugagcagaggcuucggcagcggcaucaucaccagcaacgcccccauggacgagugcgacgccaagugccagaccccccagggcgccaucaacagcagccugcccuuccagaacgugcaccccgugaccaucggcgagugccccaaguacgugagaagcaccaagcugagaauggugaccggccugagaaacauccccagcauccagagcagaggccuguucggcgccaucgccggcuucaucgagggcggcuggaccggcaugguggacggcugguacggcuaccaccaccagaacgagcagggcagcggcuacgccgccgaccagaagagcacccagaacgccaucaacggcaucaccaacaaggugaacagcgugaucgagaagaugaacacccaguucaccgccgugggcaaggaguucaacaagcuggagagaagaauggagaaccugaacaagaagguggacgacggcuuccuggacaucuggaccuacaacgccgagcugcuggugcugcuggagaacgagagaacccuggacuuccacgacagcaacgugaagaaccuguacgagaaggugaagagccagcugaagaacaacgccaaggagaucggcaacggcugcuucgaguucuaccacaagugcaacgacgagugcauggagagcgugaagaacggcaccuacgacuaccccaaguacagcgaggagagcaagcugaacagagagaagaucgacggcgugaagcuggagagcaugggcguguaccagauccuggccaucuacagcaccguggccagcagccuggugcugcuggugagccugggcgccaucagcuucuggaugugcagcaacggcagccugcagugcagaaucugcaucuga

SEQ ID NO: 161971 - RNA, 1698 nt, Artificial Sequence; identical to SEQ ID NO: 161970
  derived and/or modified CDS sequence (opt4) from hemagglutinin__InfluenzaA__ABV29667

SEQ ID NO: 161972 - RNA, 1698 nt, Artificial Sequence
  derived and/or modified CDS sequence (opt4) from hemagglutinin__InfluenzaA__ABV29678
augaaggugaagcugcugauccugcugugcaccuucaccgccaccuacgccgacaccaucugcaucggcuaccacgccaacaacagcaccgacaccguggacaccgugcuggagaagaacgugaccgugacccacagcgugaaccugcuggaggacagccacaacggcaagcugugccugcugaagggcaucgccccccugcagcugggcaacugcagcguggccggcuggauccugggcaaccccgagugcgagcugcugaucagcaaggagagcuggagcuacaucguggagacccccaaccccgagaacggcaccugcuaccccggcuacuucgccgacuacgaggagcugagagagcagcugagcagcgugagcagcuucgagagauucgagaucuuccccaaggagagcagcuggcccaaccacaccgugaccggcgugagcgccagcugcagccacaacggcaagagcagcuucuacagaaaccugcuguggcugaccggcaagaacggccuguaccccaaccugagcaagagcuacgccaacaacaaggagaaggaggugcuggugcuguggggcgugcaccacccccccaacaucggcgaccagagagcccuguaccacaccgagaacgccuacgugagcguggugagcagccacuacagcagaagauucacccccgagaucgccaagagacccaaggugagagaccaggagggcagaaucaacuacuacuggacccugcuggagcccggcgacaccaucaucuucgaggccaacggcaaccugaucgcccccagauucgccuucgcccugagcagaggcuucggcagcggcaucaucaccagcaacgcccccguggacgagugcgacgccaagugccagaccccccagggcgccaucaacagcagccugcccuuccagaacgugcaccccgugaccaucggcgagugccccaaguacgugagaagcaccaagcugagaauggugaccggccugagaaacauccccagcauccagagcagaggccuguucggcgccaucgccggcuucaucgagggcggcuggaccggcaugguggacggcugguacggcuaccaccaccagaacgagcagggcagcggcuacgccgccgaccagaagagcacccagaacgccaucaacggcaucaccaacaaggugaacagcgugaucgagaagaugaacacccaguucaccgccgugggcaaggaguucaacaagcuggagagaagaauggagaaccugaacaagaagguggacgacggcuuccuggacaucuggaccuacaacgccgagcugcuggugcugcuggagaacgagagaacccuggacuuccacgacagcaacgugaagaaccuguacgagaaggugaagagccagcugaagaacaacgccaaggagaucggcaacggcugcuucgaguucuaccacaagugcaacgacgagugcauggagagcgugaagaacggcaccuacgacuaccccaaguacagcgaggagagcaagcugaacagagagaagaucgacggcgugaagcuggagagcaugggcguguaccagauccuggccaucuacagcaccguggccagcagccuggugcugcuggugagccugggcgccaucagcuucuggaugugcagcaacggcagccugcagugcagaaucugcaucuga

SEQ ID NO: 161973 - RNA, 1698 nt, Artificial Sequence
  derived and/or modified CDS sequence (opt4) from hemagglutinin__InfluenzaA__ABV29689
augaaggugaagcugcuggugcugcugugcaccuucaccgccaccuacgccgacaccaucugcaucggcuaccacgccaacaacagcaccgacaccguggacaccgugcuggagaagaacgugaccgugacccacagcgugaaccugcuggaggacagccacaacggcaagcugugccugcugaagggcaucgccccccugcagcugggcaacugcagcguggccggcuggauccugggcaaccccgagugcgagcugcugaucagcaaggagagcuggagcuacaucguggagacccccaaccccgagaacggcaccugcuaccccggcuacuucgccgacuacgaggagcugagagagcagcugagcagcgugagcagcuucgagagauucgagaucuuccccaaggagagcagcuggcccaaccacaccgugaccggcgugagcgccagcugcagccacaacggcaagagcagcuucuacagaaaccugcuguggcugaccggcaagaacggccuguaccccaaccugagcaagagcuacgccaacaacaaggagaaggaggugcuggugcuguggggcgugcaccacccccccaacaucggcgaccagagagcccuguaccacaccgagaacgccuacgugagcguggugagcagccacuacagcagaagauucacccccgagaucgccaagagacccaaggugagagaccaggagggcagaaucaacuacuacuggacccugcuggagcccggcgacaccaucaucuucgaggccaacggcaaccugaucgcccccagauucgccuucgcccugagcagaggcuucggcagcggcaucaucaccagcaacgcccccauggacgagugcgacgccaagugccagaccccccagggcgccaucaacagcagccugcccuuccagaacgugcaccccgugaccaucggcgagugccccaaguacgugagaagcaccaagcugagaauggugaccggccugagaaacauccccagcauccagagcagaggccuguucggcgccaucgccggcuucaucgagggcggcuggaucggcaugguggacggcugguacggcuaccaccaccagaacgagcagggcagcggcuacgccgccgaccagaagagcacccagaacgccaucaacggcaucaccaacaaggugaacagcgugaucgagaagaugaacacccaguucaccgccgugggcaaggaguucaacaagcuggagagaagaauggagaaccugaacaagaagguggacgacggcuuccuggacaucuggaccuacaacgccgagcugcuggugcugcuggagaacgagagaacccuggacuuccacgacagcaacgugaagaaccuguacgagaaggugaagagccagcugaagaacaacgccaaggagaucggcaacggcugcuucgaguucuaccacaagugcaacgacgagugcauggagagcgugaagaacggcaccuacgacuaccccaaguacagcgaggagagcaagcugaacagagagaagaucgacggcgugaagcuggagagcaugggcguguaccagauccuggccaucuacagcaccguggccagcagccuggugcugcuggugagccugggcgccaucagcuucuggaugugcagcaacggcagccugcagugcagaaucugcaucuga

SEQ ID NO: 161974 - RNA, 1698 nt, Artificial Sequence
  derived and/or modified CDS sequence (opt4) from hemagglutinin__InfluenzaA__ABV29700
augaaggugaagcugcuggugcugcugugcaccuucaccgccaccuacgccgacaccaucugcaucggcuaccacgccaacaacagcaccgacaccguggacaccgugcuggagaagaacgugaccgugacccacagcgugaaccugcuggaggacagccacaacggcaagcugugccugcugaagggcaucgccccccugcagcugggcaacugcagcguggccggcuggauccugggcaaccccgagugcgagcugcugaucagcaaggagagcuggagcuacaucguggagacccccaaccccgagaacggcaccugcuaccccggcuacuucgccgacuacgaggagcugagagagcagcugagcagcgugagcagcuucgagagauucgagaucuuccccaaggagagcagcuggcccaaccacaccgugaccggcgugagcgccagcugcagccacaacggcaagagcagcuucuacagaaaccugcuguggcugaccggcaagaacggccuguaccccaaccugagcaagagcuacgccaacaacaaggagaaggaggugcuggugcuguggggcgugcaccacccccccaacaucggcgaccagagagcccuguaccacaccgagaacgccuacgugagcguggugagcagccacuacagcagaagauucacccccgagaucgccaagagacccaaggugagagaccaggagggcagaaucaacuacuacuggacccugcuggagcccggcgacaccaucaucuucgaggccaacggcaaccugaucgcccccagauucgccuucgcccugagcagaggcuucggcagcggcaucaucaccagcaacgcccccauggacgagugcgacgccaagugccagaccccccagggcgccaucaacagcagccugcccuuccagaacgugcaccccgugaccaucggcgagugccccaaguacgugagaagcaccaagcugagaauggugaccggccugagaaacauccccagcauccagagcagaggccuguucggcgccaucgccggcuucaucgagggcggcuggaccggcaugguggacggcugguacggcuaccaccaccagaacgagcagggcagcggcuacgccgccgaccagaagagcacccagaacgccaucaacggcaucaccaacaaggugaacagcgugaucgagaagaugaacacccaguucaccgccgugggcaaggaguucaacaagcuggagagaagaauggagaaccugaacaagaagguggacgacggcuuccuggacaucuggaccuacaacgccgagcugcuggugcugcuggagaacgagagaacccuggacuuccacgacagcaacgugaagaaccuguacgagaaggugaagagccagcugaagaacaacgccaaggagaucggcaacggcugcuucgaguucuaccacaagugcaacgacgagugcauggagagcgugaagaacggcaccuacgacuaccccaaguacagcgaggagagcaagcugaacagagagaagaucgacggcgugaagcuggagagcaugggcguguaccagauccuggccaucuacagcaccguggccagcagccuggugcugcuggugagccugggcgccaucagcuucuggaugugcagcaacggcagccugcagugcagaaucugcaucuga

SEQ ID NO: 161975 - RNA, 1701 nt, Artificial Sequence
  derived and/or modified CDS sequence (opt4) from hemagglutinin__InfluenzaA__ABV29711
augaagaccaucaucgcccugagcuacauccugugccugguguucgcccagaagcugcccggcaacgacaacagcaccgccacccugugccugggccaccacgccgugcccaacggcaccaucgugaagaccaucaccaacgaccagaucgaggugaccaacgccaccgagcuggugcagagcagcagcaccggcgagaucugcgacagcccccaccagauccuggacggcgagaacugcacccugaucgacgcccugcugggcgacccccagugcgacggcuuccagaacaagaagugggaccuguucguggagagaagcaaggccuacagcaacugcuaccccuacgacgugcccgacuacgccagccugagaagccugguggccagcagcggcacccuggaguucaacaacgagagcuucaacuggaccggcgugacccagaacggcaccagcagcgccugcaucagaagaagcaacaacagcuucuucagcagacugaacuggcugacccaccugaaguucaaguaccccgcccugaacgugaccaugcccaacaacgagaaguucgacaagcuguacaucuggggcgugcaccaccccggcaccgacaacgaccagaucuuccuguacgcccaggccagcggcagaaucaccgugagcaccaagagaagccagcagaccgugauccccaacaucggcagcagacccagagugagaaacauccccagcagaaucagcaucuacuggaccaucgugaagcccggcgacauccugcugaucaacagcaccggcaaccugaucgcccccagaggcuacuucaagauccagagcggcaagagcagcaucaugagaagcgacgcccccaucggcaagugcaacagcgagugcaucacccccaacggcagcauccccaacgacaagcccuuccagaacgugaacagaaucaccuacggcgccugccccagauacgugaagcagaacacccugaagcuggccaccggcaugagaaacgugcccgagaagcagaccagaggcaucuucggcgccaucgccggcuucaucgagaacggcugggagggcaugguggacggcugguacggcuucagacaccagaacagcgagggcaucggccaggccgccgaccugaagagcacccaggccgccaucgaccagaucaacggcaagcugaacagacugaucggcaagaccaacgagaaguuccaccagaucgagaaggaguucagcgagguggagggcagaauccaggaccuggagaaguacguggaggacaccaagaucgaccuguggagcuacaacgccgagcugcugguggcccuggagaaccagcacaccaucgaccugaccgacagcgagaugaacaagcuguucgagaagaccaagaagcagcugagagagaacgccgaggacaugggcaacggcugcuucaagaucuaccacaagugcgacaacgccugcaucggcagcaucagaaacggcaccuacgaccacgacguguacagagacgaggcccugaacaacagauuccagaucaagggcguggagcugaagagcggcuacaaggacuggauccuguggaucagcuucgccaucagcugcuuccugcugugcguggcccugcugggcuucaucaugugggccugccagaagggcaacaucagaugcaacaucugcaucuga

SEQ ID NO: 161976 - RNA, 1701 nt, Artificial Sequence
  derived and/or modified CDS sequence (opt4) from hemagglutinin__InfluenzaA__ABV29722
augaagaccaucaucgcccugagcuacauccugugccugguguucgcccagaagcugcccggcaacgacaacagcaccgccacccugugccugggccaccacgccgugcccaacggcaccaucgugaagaccaucaccaacgaccagaucgaggugaccaacgccaccgagcuggugcagagcagcagcaccggcgagaucugcgacagcccccaccagauccuggacggcgagaacugcacccugaucgacgcccugcugggcgacccccagugcgacggcuuccagaacaagaagugggaccuguucguggagagaagcaaggccuacagcaacugcuaccccuacgacgugcccgacuacgccagccugagaagccugguggccagcagcggcacccuggaguucaacaacgagagcuucaacuggaccggcgugacccagaacggcaccagcagcgccugcaucagaagaagcaacaacagcuucuucagcagacugaacuggcugacccaccugaaguucaaguaccccgcccugaacgugaccaugcccaacaacgagaaguucgacaagcuguacaucuggggcgugcaccaccccggcaccgacaacgaccagaucuuccuguacgcccaggccagcggcagaaucaccgugagcaccaagagaagccagcagaccgugauccccaacaucggcagcagacccagagugagaaacauccccagcagaaucagcaucuacuggaccaucgugaagcccggcgacauccugcugaucaacagcaccggcaaccugaucgcccccagaggcuacuucaagaucagaagcggcaagagcagcaucaugagaagcgacgcccccaucggcaagugcaacagcgagugcaucacccccaacggcagcauccccaacgacaagcccuuccagaacgugaacagaaucaccuacggcgccugccccagauacgugaagcagaacacccugaagcuggccaccggcaugagaaacgugcccgagaagcagaccagaggcaucuucggcgccaucgccggcuucaucgagaacggcugggagggcaugguggacggcugguacggcuucagacaccagaacagcgagggcaucggccaggccgccgaccugaagagcacccaggccgccaucgaccagaucaacggcaagcugaacagacugaucggcaagaccaacgagaaguuccaccagaucgagaaggaguuccuggagguggagggcagaauccaggaccuggagaaguacguggaggacaccaagaucgaccuguggagcuacaacgccgagcugcugguggcccuggagaaccagcacaccaucgaccugaccgacagcgagaugaacaagcuguucgagaagaccaagaagcagcugagagagaacgccgaggacaugggcaacggcugcuucaagaucuaccacaagugcgacaacgccugcaucggcagcaucagaaacggcaccuacgaccacgacguguacagagacgaggcccugaacaacagauuccagaucaagggcguggagcugaagagcggcuacaaggacuggauccuguggaucagcuucgccaucagcugcuuccugcugugcguggcccugcugggcuucaucaugugggccugccagaagggcaacaucagaugcaacaucugcaucuga

SEQ ID NO: 161977 - RNA, 1698 nt, Artificial Sequence
  derived and/or modified CDS sequence (opt4) from hemagglutinin__InfluenzaA__ABV29733
augaaggugaagcugcuggugcugcugugcaccuucaccgccaccuacgccgacaccaucugcaucggcuaccacgccaacaacagcaccgacaccguggacaccgugcuggagaagaacgugaccgugacccacagcgugaaccugcuggaggacagccacaacggcaagcugugccugcugaagggcaucgccccccugcagcugggcaacugcagcguggccggcuggauccugggcaaccccgagugcgagcugcugaucagcaaggagagcuggagcuacaucguggagacccccaaccccgagaacggcaccugcuaccccggcuacuucgccgacuacgaggagcugagagagcagcugagcagcgugagcagcuucgagagauucgagaucuuccccaaggagagcagcuggcccaaccacaccgugaccggcgugagcgccagcugcagccacaacggcgagagcagcuucuacagaaaccugcuguggcugaccggcaagaacggccuguaccccaaccugagcaagagcuacgccaacaacaaggagaaggaggugcuggugcuguggggcgugcaccacccccccaacaucggcgaccagagagcccuguaccacaccgagaacgccuacgugagcguggugagcagccacuacagcagaagauucacccccgagaucgccaagagacccaaggugagagaccaggagggcagaaucaacuacuacuggacccugcuggagcccggcgacaccaucaucuucgaggccaacggcaaccugaucgcccccagauucgccuucgcccugagcagaggcuucggcagcggcaucaucaccagcaacgcccccauggacaagugcgacgccaagugccagaccccccagggcgccaucaacagcagccugcccuuccagaacgugcaccccgugaccaucggcgagugccccaaguacgugagaagcaccaagcugagaauggugaccggccugagaaacauccccagcauccagagcagaggccuguucggcgccaucgccggcuucaucgagggcggcuggaccggcaugguggacggcugguacggcuaccaccaccagaacgagcagggcagcggcuacgccgccgaccagaagagcacccagaacgccaucaacggcaucaccaacaaggugaacagcgugaucgagaagaugaacacccaguucaccgccgugggcaaggaguucaacaagcuggagagaagaauggagaaccugaacaagaagguggacgacggcuuccuggacaucuggaccuacaacgccgagcugcuggugcugcuggagaacgagagaacccuggacuuccacgacagcaacgugaagaaccuguacgagaaggugaagagccagcugaagaacaacgccaaggagaucggcaacggcugcuucgaguucuaccacaagugcgacgacgagugcauggagagcgugaagaacggcaccuacgacuaccccaaguacagcgaggagagcaagcugaacagagagaagaucgacggcgugaagcuggagagcaugggcguguaccagauccuggccaucuacagcaccguggccagcagccuggugcugcuggugagccugggcgccaucagcuucuggaugugcagcaacggcagccugcagugcagaaucugcaucuga

SEQ ID NO: 161978 - RNA, 1698 nt, Artificial Sequence; identical to SEQ ID NO: 161970
  derived and/or modified CDS sequence (opt4) from hemagglutinin__InfluenzaA__ABV29744

SEQ ID NO: 161979 - RNA, 1698 nt, Artificial Sequence
  derived and/or modified CDS sequence (opt4) from hemagglutinin__InfluenzaA__ABV29755
augaaggugaagcugcuggugcugcugugcaccuucaccgccaccuacgccgacaccaucugcaucggcuaccacgccaacaacagcaccgacaccguggacaccgugcuggagaagaacgugaccgugacccacagcgugaaccugcuggaggacagccacaacggcaagcugugccugcugaagggcaucgccccccugcagcugggcaacugcagcguggccggcuggauccugggcaaccccgagugcgagcugcugaucagcaaggagagcuggagcuacaucguggagacccccagccccgagaacggcaccugcuaccccggcuacuucgccgacuacgaggagcugagagagcagcugagcagcgugagcagcuucgagagauucgagaucuuccccaaggagagcagcuggcccaaccacaccgugaccggcgugagcgccagcugcagccacaacggcaagagcagcuucuacagaaaccugcuguggcugaccggcaagaacggccuguaccccaaccugagcaagagcuacgccaacaacaaggagaaggaggugcuggugcuguggggcgugcaccacccccccaacaucggcgaccagagagcccuguaccacaccgagaacgccuacgugagcguggugagcagccacuacagcagaagauucacccccgagaucgccaagagacccaaggugagagaccaggagggcagaaucaacuacuacuggacccugcuggagcccggcgacaccaucaucuucgaggccaacggcaaccugaucgcccccagauucgccuucgcccugagcagaggcuucggcagcggcaucaucaccagcaacgcccccaugggcaagugcgacgccaagugccagaccccccagggcgccaucaacagcagccugcccuuccagaacgugcaccccgugaccaucggcgagugccccaaguacgugagaagcgccaagcugagaauggugaccggccugagaaacauccccagcauccagagcagaggccuguucggcgccaucgccggcuucaucgagggcggcuggaccggcaugguggacggcugguacggcuaccaccaccagaacgagcagggcagcggcuacgccgccgaccagaagagcacccagaacgccaucaacggcaucaccaacaaggugaacagcgugaucgagaagaugaacacccaguucaccgccgugggcaaggaguucaacaagcuggagagaagaauggagaaccugaacaagaagguggacgacggcuuccuggacaucuggaccuacaacgccgagcugcuggugcugcuggagaacgagagaacccuggacuuccacgacagcaacgugaagaaccuguacgagaaggugaagagccagcugaagaacaacgccaaggagaucggcaacggcugcuucgaguucuaccacaagugcaacgacgagugcauggagagcgugaagaacggcaccuacgacuaccccaaguacagcgaggagagcaagcugaacagagagaagaucgacggcgugaagcuggagagcaugggcguguaccagauccuggccaucuacagcaccguggccagcagccuggugcugcuggugagccugggcgccaucagcuucuggaugugcagcaacggcagccugcagugcagaaucugcaucuga

SEQ ID NO: 161980 - RNA, 1698 nt, Artificial Sequence; identical to SEQ ID NO: 161970
  derived and/or modified CDS sequence (opt4) from hemagglutinin__InfluenzaA__ABV29766

SEQ ID NO: 161981 - RNA, 1698 nt, Artificial Sequence
  derived and/or modified CDS sequence (opt4) from hemagglutinin__InfluenzaA__ABV29777
augaaggugaagcugcuggugcugcugugcaccuucaccgccaccuacgccgacaccaucugcaucggcuaccacgccaacaacagcaccgacaccguggacaccgugcuggagaagaacgugaccgugacccacagcgugaaccugcuggaggacagccacaacggcaagcugugccugcugaagggcaucgccccccugcagcugggcaacugcagcguggccggcuggauccugggcaaccccgagugcgagcugcugaucagcaaggagagcuggagcuacaucguggagacccccaaccccgagaacggcaccugcuaccccggcuacuucgccgacuacgaggagcugagagagcagcugagcagcgugagcagcuucgagagauucgagaucuuccccaaggagagcagcuggcccaaccacaccgugaccggcgugagcgccagcugcagccacaacggcgagagcagcuucuacagaaaccugcuguggcugaccggcaagaacggccuguaccccaaccugagcaagagcuacgccaacaacaaggagaaggaggugcuggugcuguggggcgugcaccacccccccaacaucggcgaccagagagcccuguaccacaccgagaacgccuacgugagcguggugagcagccacuacagcagaagauucacccccgagaucgccaagagacccaaggugagagaccaggagggcagaaucaacuacuacuggacccugcuggagcccggcgacaccaucaucuucgaggccaacggcaaccugaucgcccccagauucgccuucgcccugagcagaggcuucggcagcggcaucaucaccagcaacgcccccauggacaagugcgacgccaagugccagaccccccagggcgccaucaacagcagccugcccuuccagaacgugcaccccgugaccaucggcgagugccccaaguacgugagaagcaccaagcugagaauggugaccggccugagaaacauccccagcauccagagcagaggccuguucggcgccaucgccggcuucaucgagggcggcuggaccggcaugguggacggcugguacggcuaccaccaccagaacgagcagggcagcggcuacgccgccgaccagaagagcacccagaacgccaucaacggcaucaccaacaaggugaacagcgugaucgagaagaugaacacccaguucaccgccgugggcaaggaguucaacaagcuggagagaagaauggagaaccugaacaagaagguggacgacggcuuccuggacaucuggaccuacaacgccgagcugcuggugcugcuggagaacgagagaacccuggacuuccacgacagcaacgugaagaaccuguacgagaaggugaagagccagcugaagaacaacgccaaggagaucggcaacggcugcuucgaguucuaccacaagugcaacgacgagugcauggagagcgugaagaacggcaccuacgacuaccccaaguacagcgaggagagcaagcugaacagagagaagaucgacggcgugaagcuggagagcaugggcguguaccagauccuggccaucuacagcaccguggccagcagccuggugcugcuggugagccugggcgccaucagcuucuggaugugcagcaacggcagccugcagugcagaaucugcaucuga

SEQ ID NO: 161982 - RNA, 1698 nt, Artificial Sequence; identical to SEQ ID NO: 161970
  derived and/or modified CDS sequence (opt4) from hemagglutinin__InfluenzaA__ABV29788

SEQ ID NO: 161983 - RNA, 1698 nt, Artificial Sequence; identical to SEQ ID NO: 161974
  derived and/or modified CDS sequence (opt4) from hemagglutinin__InfluenzaA__ABV29799

SEQ ID NO: 161984 - RNA, 1701 nt, Artificial Sequence
  derived and/or modified CDS sequence (opt4) from hemagglutinin__InfluenzaA__ABV29821
augaagaccaucaucgcccugagcuacauccugugccugguguucgcccagaagcugcccggcaacgacaacagcaccgccacccugugccugggccaccacgccgugcccaacggcaccaucgugaagaccaucaccaacgaccagaucgaggugaccaacgccaccgagcuggugcagagcagcagcaccggcgagaucugcgacagcccccaccagauccuggacggcgagaacugcacccugaucgacgcccugcugggcgacccccagugcgacggcuuccagaacaagaagugggaccuguucguggagagaagcaaggccuacagcaacugcuaccccuacgacgugcccgacuacgccagccugagaagccugguggccagcagcggcacccuggaguucaacaacgagagcuucaacuggaccggcgugacccagaacggcaccagcagcgccugcaucagaagaagcaacaacagcuucuucagcagacugaacuggcugacccaccugaaguucaaguaccccgcccugaacgugaccaugcccaacaacgagaaguucgacaagcuguacaucuggggcgugcaccaccccggcaccgacaacgaccagguguuccuguacgcccaggccagcggcagaaucaccgugagcaccaagagaagccagcagaccgugauccccaacaucggcagcagacccagagugagaaacauccccagcagaaucagcaucuacuggaccaucgugaagcccggcgacauccugcugaucaacagcaccggcaaccugaucgcccccagaggcuacuucaagaucagaagcggcaagagcagcaucaugagaagcgacgcccccaucggcaagugcaacagcgagugcaucacccccaacggcagcauccccaacgacaagcccuuccagaacgugaacagaaucaccuacggcgccugccccagauacgugaagcagaacacccugaagcuggccaccggcaugagaaacgugcccgagaagcagaccagaggcaucuucggcgccaucgccggcuucaucgagaacggcugggagggcaugguggacggcugguacggcuucagacaccagaacagcgagggcaucggccaggccgccgaccugaagagcacccaggccgccaucgaccagaucaacggcaagcugaacagacugaucggcaagaccaacgagaaguuccaccagaucgagaaggaguucagcgagguggagggcagaauccaggaccuggagaaguacguggaggacaccaagaucgaccuguggagcuacaacgccgagcugcugguggcccuggagaaccagcacaccaucgaccugaccgacagcgagaugaacaagcuguucgagaagaccaagaagcagcugagagagaacgccgaggacaugggcaacggcugcuucaagaucuaccacaagugcgacaacgccugcaucggcagcaucagaaacggcaccuacgaccacgacguguacagagacgaggcccugaacaacagauuccagaucaagggcguggagcugaagagcggcuacaaggacuggauccuguggaucagcuucgccaucagcugcuuccugcugugcguggcccugcugggcuucaucaugugggccugccagaagggcaacaucaagugcaacaucugcaucuga

SEQ ID NO: 161985 - RNA, 1698 nt, Artificial Sequence; identical to SEQ ID NO: 161974
  derived and/or modified CDS sequence (opt4) from hemagglutinin__InfluenzaA__ABV29832

SEQ ID NO: 161986 - RNA, 1698 nt, Artificial Sequence; identical to SEQ ID NO: 161970
  derived and/or modified CDS sequence (opt4) from hemagglutinin__InfluenzaA__ABV29865

SEQ ID NO: 161987 - RNA, 1698 nt, Artificial Sequence; identical to SEQ ID NO: 161970
  derived and/or modified CDS sequence (opt4) from hemagglutinin__InfluenzaA__ABV29876

SEQ ID NO: 161988 - RNA, 1701 nt, Artificial Sequence
  derived and/or modified CDS sequence (opt4) from hemagglutinin__InfluenzaA__ABV29898
augaagaccaucaucgcccugagcuacauccugugccugguguucgcccagaagcugcccggcaacgacaacagcaccgccacccugugccugggccaccacgccgugcccaacggcaccaucgugaagaccaucaccaacgaccagaucgaggugaccaacgccaccgagcuggugcagagcagcagcaccggcgagaucugcgacagcccccaccagauccuggacggcgagaacugcacccugaucgacgcccugcugggcgacccccagugcgacggcuuccagaacaagaagugggaccuguucguggagagaagcaaggccuacagcaacugcuaccccuacgacgugcccgacuacgccagccugagaagccugguggccagcagcggcacccuggaguucaacaacgagagcuucaacuggaccggcgugacccagaacggcaccagcagcgccugcaucagaagaagcaacaacagcuucuucagcagacugaacuggcugacccaccugaaguucaaguaccccgcccugaacgugaccaugcccaacaacgagaaguucgacaagcuguacaucuggggcgugcaccaccccggcaccgacaacgaccagaucuuccuguacgcccaggccagcggcagaaucaccgugagcaccaagagaagccagcagaccgugauccccaacaucggcagcagacccagagugagaaacauccccagcagaaucagcaucuacuggaccaucgugaagcccggcgacauccugcugaucaacagcaccggcaaccugaucgcccccagaggcuacuucaagaucagaagcggcaagagcagcaucaugagaagcgacgcccccaucggcaagugcaacagcgagugcaucacccccaacggcagcauccccaacgacaagcccuuccagaacgugaacagaaucaccuacggcgccugccccagauacgugaagcagaacacccugaagcuggccaccggcaugagaaacgugcccgagaagcagaccagaggcaucuucggcgccaucgccggcuucaucgagaacggcugggagggcaugguggacggcugguacggcuucagacaccagaacagcgagggcaucggccaggccgccgaccugaagagcacccaggccgccaucgaccagaucaacggcaagcugaacagacugaucggcaagaccaacgagaaguuccaccagaucgagaaggaguucagcgagguggagggcagaauccaggaccuggagaaguacguggaggacaccaagaucgaccuguggagcuacaacgccgagcugcugguggcccuggagaaccagcacaccaucgaccugaccgacagcgagaugaacaagcuguucgagaagaccaagaagcagcugagagagaacgccgaggacaugggcaacggcugcuucaagaucuaccacaagugcgacaacgccugcaucggcagcaucagaaacggcaccuacgaccacgacguguacagagacgaggcccugaacaacagauuccagaucaagggcguggagcugaagagcggcuacaaggacuggauccuguggaucagcuucgccaucagcugcuuccugcugugcguggcccugcugggcuucaucaugugggccugccagaagggcaacaucagaugcaacaucugcaucuga

SEQ ID NO: 161989 - RNA, 1701 nt, Artificial Sequence
  derived and/or modified CDS sequence (opt4) from hemagglutinin__InfluenzaA__ABV29909
augaagaccaucaucgcccugagcuacauccugugccugguguucgcccagaagcugcccggcaacgacaacagcaccgccacccugugccugggccaccacgccgugcccaacggcaccaucgugaagaccaucaccagcgaccagaucgaggugaccaacgccaccgagcuggugcagaacagcagcaucggcggcaucugcaacagcccccaccagauccuggacggcgagaacugcacccugaucgacgcccugcugggcgacccccagugcgacggcuuccagaacaagaagugggaccuguucguggagagaagcaaggccuacagcaacugcuaccccuacgacgugcccgacuacgccagccugagaagccugaucgccagcagcggcacccuggaguucaacaacgagagcuucaacuggaccggcgugacccagaacggcaccagcagcgccugcaagagaagaagcaacaacagcuucuucagcagacugaacuggcugacccaccugaaguucaaguaccccgcccugaacgugaccaugcccaacaacgaggaguucgacaagcuguacaucuggggcgugcaccaccccggcaccgacaacgaccagaucagccuguacgcccaggcccccggcagaaucaccgugagcaccaagagaagccagcagaccgugauccccaacaucggcagcagacccagagugagagacauccccagcagaaucagcaucuacuggaccaucgugaagcccggcgacauccugcugaucaacagcaccggcaaccugaucgcccccagaggcuacuucaagaucagaagcggcaagagcagcaucaugagaagcgacgcccccaucgacaagugcaacagcgagugcaucacccccaacggcagcauccccaacgacaagcccuuccagaacgugaacagaaucaccuacggcgccugccccagauacgugaagcagaacacccugaagcuggccaccggcaugagaaacgugcccgagaagcagaccagaggcaucuucggcgccaucgccggcuucaucgagaacggcugggagggcaugguggacggcugguacggcuucagacaccagaacagcgagggcaucggccaggccgccgaccugaagagcacccaggccgccaucgaccagaucaacggcaagcugaacagacugaucggcaagaccaacgagaaguuccaccagaucgagaaggaguucagcgagguggagggcagaauccaggaccuggagaaguacguggaggacaccaagaucgaccuguggagcuacaacgccgagcugcugguggcccuggagaaccagcacaccaucgaccugaccgacagcgagaugaacaagcuguucgagagaaccaagaagcagcugagagagaacgccgaggacaugggcaacggcugcuucaagaucuaccacaagugcgacaacgccugcaucggcagcaucagaaacggcaccuacgaccacgacguguacagagacgaggcccugaacaacagauuccagaucaagggcguggagcugaagagcggcuacaaggacuggauccuguggaucagcuucgccaucagcugcuuccugcugugcguggcccugcugggcuucaucaugugggccugccagaagggcaacaucagaugcaacaucugcaucuga

SEQ ID NO: 161990 - RNA, 1698 nt, Artificial Sequence
  derived and/or modified CDS sequence (opt4) from hemagglutinin__InfluenzaA__ABV29920
augaaggugaagcugcuggugcugcugugcaccuucaccgccaccuacgccgacaccaucugcaucggcuaccacgccaacaacagcaccgacaccguggacaccgugcuggagaagaacgugaccgugacccacagcgugaaccugcuggaggacagccacaacggcaagcugugccugcugaagggcaucgccccccugcagcugggcaacugcagcguggccggcuggauccugggcaaccccgagugcgagcugcugaucagcaaggagagcuggagcuacaucguggagacccccaaccccgagaacggcaccugcuaccccggcuacuucgccgacuacgaggagcugagagagcagcugagcagcgugagcagcuucgagagauucgagaucuuccccaaggagagcagcuggcccaaccacaccgugaccggcgugagcgccagcugcagccacaacggcaagagcagcuucuacagaaaccugcuguggcugaccggcaagaacggccuguaccccaaccugagcaagagcuacgccaacaacaaggagaaggaggugcuggugcuguggggcgugcaccacccccccaacaucggcgaccagagagcccuguaccacaccgagaacgccuacgugagcguggugagcagccacuacagcagaagauucacccccgagaucgccaagagacccaaggugagagaccaggagggcagaaucaacuacuacuggacccugcuggagcccggcgacaccaucaucuucgaggccaacggcaaccugaucgcccccagauucgccuucgcccugagcagaggcuucggcagcggcaucaucaccagcaacgcccccaugggcgagugcgacgccaagugccagaccccccagggcgccaucaacagcagccugcccuuccagaacgugcaccccgugaccaucggcgagugccccaaguacgugagaagcgccaagcugagaauggugaccggccugagaaacauccccagcauccagagcagaggccuguucggcgccaucgccggcuucaucgagggcggcuggaccggcaugguggacggcugguacggcuaccaccaccagaacgagcagggcagcggcuacgccgccgaccagaagagcacccagaacgccaucaacggcaucaccaacaaggugaacagcgugaucgagaagaugaacacccaguucaccgccgugggcaaggaguucaacaagcuggagagaagaauggagaaccugaacaagaagguggacgacggcuuccuggacaucuggaccuacaacgccgagcugcuggugcugcuggagaacgagagaacccuggacuuccacgacagcaacgugaagaaccuguacgagaaggugaagagccagcugaagaacaacgccaaggagaucggcaacggcugcuucgaguucuaccacaagugcaacgacgagugcauggagagcgugaagaacggcaccuacgacuaccccaaguacagcgaggagagcaagcugaacagagagaagaucgacggcgugaagcuggagagcaugggcguguaccagauccuggccaucuacagcaccguggccagcagccuggugcugcuggugagccugggcgccaucagcuucuggaugugcagcaacggcagccugcagugcagaaucugcaucuga

SEQ ID NO: 161991 - RNA, 1698 nt, Artificial Sequence; identical to SEQ ID NO: 161981
  derived and/or modified CDS sequence (opt4) from hemagglutinin__InfluenzaA__ABV29942

SEQ ID NO: 161992 - RNA, 1698 nt, Artificial Sequence; identical to SEQ ID NO: 161974
  derived and/or modified CDS sequence (opt4) from hemagglutinin__InfluenzaA__ABV29953

SEQ ID NO: 161993 - RNA, 1698 nt, Artificial Sequence; identical to SEQ ID NO: 161974
  derived and/or modified CDS sequence (opt4) from hemagglutinin__InfluenzaA__ABV29964

SEQ ID NO: 161994 - RNA, 1698 nt, Artificial Sequence; identical to SEQ ID NO: 161970
  derived and/or modified CDS sequence (opt4) from hemagglutinin__InfluenzaA__ABV29986

SEQ ID NO: 161995 - RNA, 1698 nt, Artificial Sequence; identical to SEQ ID NO: 161974
  derived and/or modified CDS sequence (opt4) from hemagglutinin__InfluenzaA__ABV29997

SEQ ID NO: 161996 - RNA, 1698 nt, Artificial Sequence; identical to SEQ ID NO: 161970
  derived and/or modified CDS sequence (opt4) from hemagglutinin__InfluenzaA__ABV30008

SEQ ID NO: 161997 - RNA, 1698 nt, Artificial Sequence; identical to SEQ ID NO: 161974
  derived and/or modified CDS sequence (opt4) from hemagglutinin__InfluenzaA__ABV30019

SEQ ID NO: 161998 - RNA, 1698 nt, Artificial Sequence; identical to SEQ ID NO: 161974
  derived and/or modified CDS sequence (opt4) from hemagglutinin__InfluenzaA__ABV30030

SEQ ID NO: 161999 - RNA, 1698 nt, Artificial Sequence
  derived and/or modified CDS sequence (opt4) from hemagglutinin__InfluenzaA__ABV30041
augaaggugaagcugcuggugcugcugugcaccuucaccgccaccuacgccgacaccaucugcaucggcuaccacgccaacaacagcaccgacaccguggacaccgugcuggagaagaacgugaccgugacccacagcgugaaccugcuggaggacagccacaacggcaagcugugccugcugaagggcaccgccccccugcagcugggcaacugcagcguggccggcuggauccugggcaaccccgagugcgagcugcugaucagcaaggagagcuggagcuacaucguggagacccccaaccccgagaacggcaccugcuaccccggcuacuucgccgacuacgaggagcugagagagcagcugagcagcgugagcagcuucgagagauucgagaucuuccccaaggagagcagcuggcccaaccacaccgugaccggcgugagcgccagcugcagccacaacggcaagagcagcuucuacagaaaccugcuguggcugaccggcaagaacggccuguaccccaaccugagcaagagcuacgccaacaacaaggagaaggaggugcuggugcuguggggcgugcaccacccccccaacaucggcgaccagagagcccuguaccacaccgagaacgccuacgugagcguggugagcagccacuacagcagaagauucacccccgagaucgccaagagacccaaggugagagaccaggagggcagaaucaacuacuacuggacccugcuggagcccggcgacaccaucaucuucgaggccaacggcaaccugaucgcccccagauucgccuucgcccugagcagaggcuucggcagcggcaucaucaccagcaacgcccccaugggcgagugcgacgccaagugccagaccccccagggcgccaucaacagcagccugcccuuccagaacgugcaccccgugaccaucggcgagugccccaaguacgugagaagcgccaagcugagaauggugaccggccugagaaacauccccagcauccagagcagaggccuguucggcgccaucgccggcuucaucgagggcggcuggaccggcaugguggacggcugguacggcuaccaccaccagaacgagcagggcagcggcuacgccgccgaccagaagagcacccagaacgccaucaacggcaucaccaacaaggugaacagcgugaucgagaagaugaacacccaguucaccgccgugggcaaggaguucaacaagcuggagagaagaauggagaaccugaacaagaagguggacgacggcuuccuggacaucuggaccuacaacgccgagcugcuggugcugcuggagaacgagagaacccuggacuuccacgacagcaacgugaagaaccuguacgagaaggugaagaaccagcugaagaacaacgccaaggagaucggcaacggcugcuucgaguucuaccacaagugcaacgacgagugcauggagagcgugaagaacggcaccuacgacuaccccaaguacagcgaggagagcaagcugaacagagagaagaucgacggcgugaagcuggagagcaugggcguguaccagauccuggccaucuacagcaccguggccagcagccuggugcugcugaucagccugggcgccaucagcuucuggaugugcagcaacggcagccugcagugcagaaucugcaucuga

SEQ ID NO: 162000 - RNA, 1701 nt, Artificial Sequence; identical to SEQ ID NO: 161988
  derived and/or modified CDS sequence (opt4) from hemagglutinin__InfluenzaA__ABV30063

SEQ ID NO: 162001 - RNA, 1701 nt, Artificial Sequence; identical to SEQ ID NO: 161988
  derived and/or modified CDS sequence (opt4) from hemagglutinin__InfluenzaA__ABV30074

SEQ ID NO: 162002 - RNA, 1698 nt, Artificial Sequence; identical to SEQ ID NO: 161974
  derived and/or modified CDS sequence (opt4) from hemagglutinin__InfluenzaA__ABV30085

SEQ ID NO: 162003 - RNA, 1698 nt, Artificial Sequence; identical to SEQ ID NO: 161974
  derived and/or modified CDS sequence (opt4) from hemagglutinin__InfluenzaA__ABV30096

SEQ ID NO: 162004 - RNA, 1698 nt, Artificial Sequence; identical to SEQ ID NO: 161970
  derived and/or modified CDS sequence (opt4) from hemagglutinin__InfluenzaA__ABV30107

SEQ ID NO: 162005 - RNA, 1698 nt, Artificial Sequence
  derived and/or modified CDS sequence (opt4) from hemagglutinin__InfluenzaA__ABV30129
augaaggugaagcugcuggugcugcugugcaccuucaccgccaccuacgccgacaccaucugcaucggcuaccacgccaacaacagcaccgacaccguggacaccgugcuggagaagaacgugaccgugacccacagcgugaaccugcuggaggacagccacaacggcaagcugugccugcugaagggcaucgccccccugcagcugggcaacugcagcguggccggcuggauccugggcaaccccgagugcgagcugcugaucagcaaggagagcuggagcuacaucguggagacccccaaccccgagaacggcaccugcuaccccggcaacuucgccgacuacgaggagcugagagagcagcugagcagcgugagcagcuucgagagauucgagaucuuccccaaggagagcagcuggcccaaccacaccgugaccggcgugagcgccagcugcagccacaacggcaagagcagcuucuacagaaaccugcuguggcugaccggcaagaacggccuguaccccaaccugagcaagagcuacgccaacaacaaggagaaggaggugcuggugcuguggggcgugcaccacccccccaacaucggcgaccagagagcccuguaccacaccgagaacgccuacgugagcguggugagcagccacuacagcagaagauucacccccgagaucgccaagagacccaaggugagagaccaggagggcagaaucaacuacuacuggacccugcuggagcccggcgacaccaucaucuucgaggccaacggcaaccugaucgcccccagauucgccuucgcccugagcagaggcuucggcagcggcaucaucaccagcaacgcccccauggacgagugcgacgccaagugccagaccccccagggcgccaucaacagcagccugcccuuccagaacgugcaccccgugaccaucggcgagugccccaaguacgugagaagcgccaagcugagaauggugaccggccugagaaacauccccagcauccagagcagaggccuguucggcgccaucgccggcuucaucgagggcggcuggaccggcaugguggacggcugguacggcuaccaccaccagaacgagcagggcagcggcuacgccgccgaccagaagagcacccagaacgccaucaacggcaucaccaacaaggugaacagcgugaucgagaagaugaacacccaguucaccgccgugggcaaggaguucaacaagcuggagagaagaauggagaaccugaacaagaagguggacgacggcuuccuggacaucuggaccuacaacgccgagcugcuggugcugcuggagaacgagagaacccuggacuuccacgacagcaacgugaagaaccuguacgagaaggugaagagccagcugaagaacaacgccaaggagaucggcaacggcugcuucgaguucuaccacaagugcaacgacgagugcauggagagcgugaagaacggcaccuacgacuaccccaaguacagcgaggagagcaagcugaacagagagaagaucgacggcgugaagcuggagagcaugggcguguaccagauccuggccaucuacagcaccguggccagcagccuggugcugcuggugagccugggcgccaucagcuucuggaugugcagcaacggcagccugcagugcagaaucugcaucuga

SEQ ID NO: 162006 - RNA, 1698 nt, Artificial Sequence
  derived and/or modified CDS sequence (opt4) from hemagglutinin__InfluenzaA__ABV30140
augaaggugaagcugcuggugcugcugugcaccuucaccgccaccuacgccgacaccaucugcaucggcuaccacgccaacaacagcaccgacaccguggacaccgugcuggagaagaacgugaccgugacccacagcgugaaccugcuggaggacagacacaacggcaagcugugccugcugaagggcaucgccccccugaagcugggcaacugcagcguggccggcuggauccugggcaaccccgagugcgagcugcugaucagcaaggagagcuggagcuacaucguggagacccccaaccccgagaacggcaccugcuaccccggcuacuucgccgacuacgaggagcugagagagcagcugagcagcgugagcagcuucgagagauucgagaucuuccccaaggagagcagcuggcccaaccacaccgugaccggcgugagcgccagcugcagccacaacggcaagagcagcuucuacagaaaccugcuguggcugaccggcaagaacggccuguaccccaaccugagcagaagcuacgccaacaacaaggagaaggaggugcuggugcuguggggcgugcaccacccccccaacaucggcgaccagagagcccuguaccacaccgagaacgccuacgugagcguggugagcagccacuacagcagaagauucacccccgagaucgccaagagacccaaggugagagaccaggagggcagaaucaacuacuacuggacccugcuggagcccggcgacaccaucaucuucgaggccaacggcaaccugaucgcccccagauucgccuucgcccugagcagaggcuucggcagcggcaucaucaccagcaacgcccccauggacgagugcgacgccaagugccagaccccccagggcgccaucaacagcagccugcccuuccagaacgugcaccccgugaccaucggcgagugccccaaguacgugagaagcgccaagcugagaauggugaccggccugagaaacauccccagcauccagagcagaggccuguucggcgccaucgccggcuucaucgagggcggcuggaccggcaugguggacggcugguacggcuaccaccaccagaacgagcagggcagcggcuacgccgccgaccagaagagcacccagaacgccaucaacggcaucaccaacaaggugaacagcgugaucgagaagaugaacacccaguucaccgccgugggcaaggaguucaacaagcuggagagaagaauggagaaccugaacaagaagguggacgacggcuuccuggacaucuggaccuacaacgccgagcugcuggugcugcuggagaacgagagaacccuggacuuccacgacagcaacgugaagaaccuguacgagaaggugaagagccagcugaagaacaacgccaaggagaucggcaacggcugcuucgaguucuaccacaagugcaacgacgagugcauggagagcgugaagaacggcaccuacgacuaccccaaguacagcgaggagagcaagcugaacagagagaagaucgacggcgugaagcuggagagcaugggcguguaccagauccuggccaucuacagcaccguggccagcagccuggugcugcuggugagccugggcgccaucagcuucuggaugugcagcaacggcagccugcagugcagaaucugcaucuga

SEQ ID NO: 162007 - RNA, 1698 nt, Artificial Sequence
  derived and/or modified CDS sequence (opt4) from hemagglutinin__InfluenzaA__ABV30151
augaaggugaagcugcuggugcugcugugcaccuucaccgccaccuacgccgacaccaucugcaucggcuaccacgccaacaacagcaccgacaccguggacaccgugcuggagaagaacgugaccgugacccacagcgugaaccugcuggaggacagccacaacggcaagcugugccugcugaagggcaucgccccccugcagcugggcaacugcagcguggccggcuggauccugggcaaccccgagugcgagcugcugaucagcaaggagagcuggagcuacaucguggagacccccaaccccgagaacggcaccugcuaccccggcuacuucgccgacuacgaggagcugagagagcagcugagcagcgugagcagcuucgagagauucgagaucuuccccaaggagagcagcuggcccaaccacaccgugaccggcgugagcgccagcugcagccacagcggcaagagcagcuucuacagaaaccugcuguggcugaccggcaagaacggccuguaccccaaccugagcaagagcuacgccaacaacaaggagaaggaggugcuggugcuguggggcgugcaccacccccccaacaucggcgaccagagagcccuguaccacaccgagaacgccuacgugagcguggugagcagccacuacagcagaagauucacccccgagaucgccaagagacccaaggugagagaccaggagggcagaaucaacuacuacuggacccugcuggagcccggcgacaccaucaucuucgaggccaacggcaaccugaucgcccccagauucgccuucgcccugagcagaggcuucggcagcggcaucaucaccagcaacgcccccaugggcgagugcgacgccaagugccagaccccccagggcgccaucaacagcagccugcccuuccagaacgugcaccccgugaccaucggcgagugccccaaguacgugagaagcgccaagcugagaauggugaccggccugagaaacauccccagcauccagagcagaggccuguucggcgccaucgccggcuucaucgagggcggcuggaccggcaugguggacggcugguacggcuaccaccaccagaacgagcagggcagcggcuacgccgccgaccagaagagcacccagaacgccaucaacggcaucaccaacaaggugaacagcgugaucgagaagaugaacacccaguucaccgccgugggcaaggaguucaacaagcuggagagaagaauggagaaccugaacaagaagguggacgacggcuuccuggacaucuggaccuacaacgccgagcugcuggugcugcuggagaacgagagaacccuggacuuccacgacagcaacgugaagaaccuguacgagaaggugaagagccagcugaagaacaacgccaaggagaucggcaacggcugcuucgaguucuaccacaagugcaacgacgagugcauggagagcgugaagaacggcaccuacgacuaccccaaguacagcgaggagagcaagcugaacagagagaagaucgacggcgugaagcuggagagcaugggcguguaccagauccuggccaucuacagcaccguggccagcagccuggugcugcuggugagccugggcgccaucagcuucuggaugugcagcaacggcagccugcagugcagaaucugcaucuga

SEQ ID NO: 162008 - RNA, 1698 nt, Artificial Sequence
  derived and/or modified CDS sequence (opt4) from hemagglutinin__InfluenzaA__ABV30162
augaaggugaagcugcuggugcugcugugcaccuucaccgccaccuacgccgacaccaucugcaucggcuaccacgccaacaacagcaccgacaccguggacaccgugcuggagaagaacgugaccgugacccacagcgugaaccugcuggaggacagccacaacggcaagcugugccugcugaagggcaucgccccccugcagcugggcaacugcagcguggccggcuggauccugggcaaccccgagugcgagcugcugaucagcagagagagcuggagcuacaucguggagacccccaaccccgagaacggcaccugcuaccccggcuacuucgccgacuacgaggagcugagagagcagcugagcagcgugagcagcuucgagagauucgagaucuuccccaaggagagcagcuggcccaaccacaccgugaccggcgugagcgccagcugcagccacaacggcaagagcagcuucuacagaaaccugcuguggcugaccggcaagaacggccuguaccccaaccugagcaagagcuacgccaacaacaaggagaaggaggugcuggugcuguggggcgugcaccacccccccaacaucggcgaccagagagcccuguaccacaccgagaacgccuacgugagcguggugagcagccacuacagcagaagauucacccccgagaucgccaagagacccaaggugagagaccaggagggcagaaucaacuacuacuggacccugcuggagcccggcgacaccaucaucuucgaggccaacggcaaccugaucgcccccagauucgccuucgcccugagcagaggcuucggcagcggcaucaucaccagcaacgcccccauggacgagugcgacgccaagugccagaccccccagggcgccaucaacagcagccugcccuuccagaacgugcaccccgugaccaucggcgagugccccaaguacgugagaagcaccaagcugagaauggugaccggccugagaaacauccccagcauccagagcagaggccuguucggcgccaucgccggcuucaucgagggcggcuggaccggcaugguggacggcugguacggcuaccaccaccagaacgagcagggcagcggcuacgccgccgaccagaagagcacccagaacgccaucaacggcaucaccaacaaggugaacagcgugaucgagaagaugaacacccaguucaccgccgugggcaaggaguucaacaagcuggagagaagaauggagaaccugaacaagaagguggacgacggcuuccuggacaucuggaccuacaacgccgagcugcuggugcugcuggagaacgagagaacccuggacuuccacgacagcaacgugaagaaccuguacgagaaggugaagagccagcugaagaacaacgccaaggagaucggcaacggcugcuucgaguucuaccacaagugcaacgacgagugcauggagagcgugaagaacggcaccuacgacuaccccaaguacagcgaggagagcaagcugaacagagagaagaucgacggcgugaagcuggagagcaugggcguguaccagauccuggccaucuacagcaccguggccagcagccuggugcugcuggugagccugggcgccaucagcuucuggaugugcagcaacggcagccugcagugcagaaucugcaucuga

SEQ ID NO: 162009 - RNA, 1698 nt, Artificial Sequence; identical to SEQ ID NO: 161974
  derived and/or modified CDS sequence (opt4) from hemagglutinin__InfluenzaA__ABV30173

SEQ ID NO: 162010 - RNA, 1698 nt, Artificial Sequence; identical to SEQ ID NO: 161974
  derived and/or modified CDS sequence (opt4) from hemagglutinin__InfluenzaA__ABV30184

SEQ ID NO: 162011 - RNA, 1701 nt, Artificial Sequence; identical to SEQ ID NO: 161988
  derived and/or modified CDS sequence (opt4) from hemagglutinin__InfluenzaA__ABV30217

SEQ ID NO: 162012 - RNA, 1701 nt, Artificial Sequence; identical to SEQ ID NO: 161988
  derived and/or modified CDS sequence (opt4) from hemagglutinin__InfluenzaA__ABV30228

SEQ ID NO: 162013 - RNA, 1701 nt, Artificial Sequence
  derived and/or modified CDS sequence (opt4) from hemagglutinin__InfluenzaA__ABV30261
augaagaccaucaucgcccugagcuacauccugugccugguguucgcccagaagcugcccggcaucgacaacagcaccgccacccugugccugggccaccacgccgugcccaacggcaccaucgugaagaccaucaccaacgaccagguggaggugaccaacgccaccgagcuggugcagagcagcagcaccggcggcaucugcgacagcccccaccagauccuggacggcgagaacugcacccugaucgacgcccugcugggcgacccccagugcgacggcuuccagaacaagaagugggaccuguucguggagagaagcaaggccuacagcaacugcuaccccuacgacgugcccgacuacgccagccugagaagccugguggccagcagcggcacccuggaguucaacaacgagagcuucaacugggccggcgugacccagaacggcaccagcagcgccugcaagagaggcagcaacaacagcuucuucagcagacugaacuggcugacccacagcaaguucaaguaccccgcccugaacgugaccaugcccaacaacgaggaguucgacaagcuguacaucuggggcgugcaccaccccggcaccgacaacgaccagaucuuccuguacgcccaggccagcggcagaaucaccgugagcaccaagagaagccagcagaccgugauccccaacaucggcagcagacccagagugagaaacauccccagcagaaucagcaucuacuggaccaucgugaagcccggcgacauccugcugaucaacagcaccggcaaccugaucgcccccagaggcuacuucaagaucagaagcggcaagagcagcaucaugagaagcgacgcccccaucggcaagugcaacagcgagugcaucacccccaacggcagcauccccaacgacaagcccuuccagaacgugaacagaaucaccuacggcgccugccccagauacgugaagcagaacacccugaagcuggccaccggcaugagaaacgugcccgagaagcagaccagaggcaucuucggcgccaucgccggcuucaucgagaacggcugggagggcaugguggacggcugguacggcuucagacaccagaacagcgagggcaugggccaggccgccgaccugaagagcacccaggccgccaucgaccagaucaacggcaagcugaacagacugaucggcaagaccaacgagaaguuccaccagaucgagaaggaguucagcgagguggagggcagaauccaggaccuggagaaguacguggaggacaccaagaucgaccuguggagcuacaacgccgagcugcugguggcccuggagaaccagcacaccaucgaccugaccgacagcgagaugaacaagcuguucgagaagaccaagaagcagcugagagagaacgccgaggacaugggcaacggcugcuucaagaucuaccacaagugcgacaacgccugcaucggcagcaucagaaacggcaccuacgaccacgacguguacagagccgaggcccugaacaacagauuccagaucaagggcguggagcugaagagcggcuacaaggacuggauccuguggaucagcuucgccaucagcugcuuccugcugugcguggcccugcugggcuucaucaugugggccugccagaagggcaacaucagaugcaacaucugcaucuga

SEQ ID NO: 162014 - RNA, 1701 nt, Artificial Sequence
  derived and/or modified CDS sequence (opt4) from hemagglutinin__InfluenzaA__ABV30272
augaagaccaucaucgcccugagcuacauccugugccugguguucgcccagaagcugcccggcaacgacaacagcaccgccacccugugccugggccaccacgccgugcccaacggcaccaucgugaagaccaucaccaacgaccagaucgaggugaccaacgccaccgagcuggugcagagcagcagcaccggcgagaucugcgacagcccccaccagauccuggacggcgagaacugcacccugaucgacgcccugcugggcgacccccagugcgacggcuuccagaacaagaagugggaccuguucguggagagaagcaaggccuacagcaacugcuaccccuacgacgugcccgacuacgccagccugagaagccugguggccagcagcggcacccuggaguucaacaacgagagcuucaacuggaccggcgugacccagaacggcaccagcagcgccugcaucagaagaagcaacaacagcuucuucagcaagcugaacuggcugacccaccugaaguucaaguaccccgcccugaacgugaccaugcccaacaacgagaaguucgacaagcuguacaucuggggcgugcaccaccccggcaccgacaacgaccagaucuuccuguacgcccaggccagcggcagaaucaccgugagcaccaagagaagccagcagaccgugauccccaacaucggcagcagacccagagugagaaacauccccagcagaaucagcaucuacuggaccaucgugaagcccggcgacauccugcugaucaacagcaccggcaaccugaucgcccccagaggcuacuucaagaucagaagcggcaagagcagcaucaugagaagcgacgcccccaucggcaagugcaacagcgagugcaucacccccaacggcagcauccccaacgacaagcccuuccagaacgugaacagaaucaccuacggcgccugccccagauacgugaagcagaacacccugaagcuggccaccggcaugagaaacgugcccgagaagcagaccagaggcaucuucggcgccaucgccggcuucaucgagaacggcugggagggcaugguggacggcugguacggcuucagacaccagaacagcgagggcaucggccaggccgccgaccugaagagcacccaggccgccaucgaccagaucaacggcaagcugaacagacugaucggcaagaccaacgagaaguuccaccagaucgagaaggaguucagcgagguggagggcagaauccaggaccuggagaaguacguggaggacaccaagaucgaccuguggagcuacaacgccgagcugcugguggcccuggagaaccagcacaccaucgaccugaccgacagcgagaugaacaagcuguucgagaagaccaagaagcagcugagagagaacgccgaggacaugggcaacggcugcuucaagaucuaccacaagugcgacaacgccugcaucggcagcaucagaaacggcaccuacgaccacgacguguacagagacgaggcccugaacaacagauuccagaucaagggcguggagcugaagagcggcuacaaggacuggauccuguggaucagcuucgccaucagcugcuuccugcugugcguggcccugcugggcuucaucaugugggccugccagaagggcaacaucagaugcaacaucugcaucuga

SEQ ID NO: 162015 - RNA, 1698 nt, Artificial Sequence
  derived and/or modified CDS sequence (opt4) from hemagglutinin__InfluenzaA__ABV30283
augaaggugaagcugcuggugcugcugugcaccuucaccgccaccuacgccgacaccaucugcaucggcuaccacgccaacaacagcaccgacaccguggacaccgugcuggagaagaacgugaccgugacccacagcgugaaccugcuggaggacagccacaacggcaagcugugccugcugaagggcaucgccccccugcagcugggcaacugcagcguggccggcuggauccugggcaaccccgagugcgagcugcugaucagcaaggagagcuggagcuacaucguggagacccccaaccccgagaacggcaccugcuaccccggcaacuucgccgacuacgaggagcugagagagcagcugagcagcgugagcagcuucgagagauucgagaucuuccccaaggagagcagcuggcccaaccacaccgugaccggcgugagcgccagcugcagccacaacggcaagagcagcuucuacagaaaccugcuguggcugaccggcaagaacggccuguaccccaaccugagcaagagcuacgccaacaacaaggagaaggaggugcuggugcuguggggcgugcaccacccccccaacaucggcgaccagagagcccuguaccacaccgagaacgccuacgugagcguggugagcagccacuacagcagaagauucacccccgagaucgccaagagacccaaggugagagaccaggagggcagaaucaacuacuacuggacccugcuggagcccggcgacaccaucaucuucgaggccaacggcaaccugaucgcccccagauucgccuucgcccugagcagaggcuucggcagcggcaucaucaccagcaacgcccccauggacgagugcgacgccaagugccagaccccccagggcgccaucaacagcagccugcccuuccagaacgugcaccccgugaccaucggcgagugccccaaguacgugagaagcgccaagcugagaauggugaccggccugagaaacauccccagcauccagagcagaggccuguucggcgccaucgccggcuucaucgagggcggcuggaccggcaugguggacggcugguacggcuaccaccaccagaacgagcagggcagcggcuacgccgccgaccagaagagcacccagaacgccaucgacggcaucaccaacaaggugaacagcgugaucgagaagaugaacacccaguucaccgccgugggcaaggaguucaacaagcuggagagaagaauggagaaccugaacaagaagguggacgacggcuuccuggacaucuggaccuacaacgccgagcugcuggugcugcuggagaacgagagaacccuggacuuccacgacagcaacgugaagaaccuguacgagaaggugaagagccagcugaagaacaacgccaaggagaucggcaacggcugcuucgaguucuaccacaagugcaacgacgagugcauggagagcgugaagaacggcaccuacgacuaccccaaguacagcgaggagagcaagcugaacagagagaagaucgacggcgugaagcuggagagcaugggcguguaccagauccuggccaucuacagcaccguggccagcagccuggugcugcuggugagccugggcgccaucagcuucuggaugugcagcaacggcagccugcagugcagaaucugcaucuga

SEQ ID NO: 162016 - RNA, 1698 nt, Artificial Sequence
  derived and/or modified CDS sequence (opt4) from hemagglutinin__InfluenzaA__ABV30294
augaaggugaagcugcuggugcugcugugcaccuucaccgccaccuacgccgacaccaucugcaucggcuaccacgccaacaacagcaccgacaccguggacaccgugcuggagaagaacgugaccgugacccacagcgugaaccugcuggaggacagacacaacggcaagcugugccugcugaagggcaucgccccccugcagcugggcaacugcagcguggccggcuggauccugggcaaccccgagugcgagcugcugaucagcaaggagagcuggagcuacaucguggagacccccaaccccgagaacggcaccugcuaccccggcuacuucgccgacuacgaggagcugagagagcagcugagcagcgugagcagcuucgagagauucgagaucuuccccaaggagagcagcuggcccaaccacaccgugaccggcgugagcgccagcugcagccacaacggcaagagcagcuucuacagaaaccugcuguggcugaccggcaagaacggccuguaccccaaccugagcagaagcuacgccaacaacaaggagaaggaggugcuggugcuguggggcgugcaccacccccccaacaucggcgaccagagagcccuguaccacaccgagaacgccuacgugagcguggugagcagccacuacagcagaagauucacccccgagaucgccaagagacccaaggugagagaccaggagggcagaaucaacuacuacuggacccugcuggagcccggcgacaccaucaucuucgaggccaacggcaaccugaucgcccccagauucgccuucgcccugagcagaggcuucggcagcggcaucaucaccagcaacgcccccauggacgagugcgacgccaagugccagaccccccagggcgccaucaacagcagccugcccuuccagaacgugcaccccgugaccaucggcgagugccccaaguacgugagaagcgccaagcugagaauggugaccggccugagaaacauccccagcauccagagcagaggccuguucggcgccaucgccggcuucaucgagggcggcuggaccggcaugguggacggcugguacggcuaccaccaccagaacgagcagggcagcggcuacgccgccgaccagaagagcacccagaacgccaucaacggcaucaccaacaaggugaacagcgugaucgagaagaugaacacccaguucaccgccgugggcaaggaguucaacaagcuggagagaagaauggagaaccugaacaagaagguggacgacggcuuccuggacaucuggaccuacaacgccgagcugcuggugcugcuggagaacgagagaacccuggacuuccacgacagcaacgugaagaaccuguacgagaaggugaagagccagcugaagaacaacgccaaggagaucggcaacggcugcuucgaguucuaccacaagugcaacgacgagugcauggagagcgugaagaacggcaccuacgacuaccccaaguacagcgaggagagcaagcugaacagagagaagaucgacggcgugaagcuggagagcaugggcguguaccagauccuggccaucuacagcaccguggccagcagccuggugcugcuggugagccugggcgccaucagcuucuggaugugcagcaacggcagccugcagugcagaaucugcaucuga

SEQ ID NO: 162017 - RNA, 1698 nt, Artificial Sequence
  derived and/or modified CDS sequence (opt4) from hemagglutinin__InfluenzaA__ABV30305
augaaggugaagcugcuggugcugcugugcaccuucaccgccaccuacgccgacaccaucugcaucggcuaccacgccaacaacagcaccgacaccguggacaccgugcuggagaagaacgugaccgugacccacagcgugaaccugcuggaggacagccacaacggcaagcugugccugcugaagggcaucgccccccugcagcugggcaacugcagcguggccggcuggauccugggcaaccccgagugcgagcugcugaucagcaaggagagcuggagcuacaucguggagacccccaaccccgagaacggcaccugcuaccccggcuacuucgccgacuacgaggagcugagagagcagcugagcagcgugagcagcuucgagagauucgagaucuuccccaaggagagcagcuggcccaaccacaccgugaccggcggcagcgccagcugcagccacaacggcaagagcagcuucuacagaaaccugcuguggcugaccggcaagaacggccuguaccccaaccugagcaagagcuacgccaacaacaaggagaaggaggugcuggugcuguggggcgugcaccacccccccaacaucggcgaccagagagcccuguaccacaccgagaacgccuacgugagcguggugagcagccacuacagcagaagauucacccccgagaucgccaagagacccaaggugagagaccaggagggcagaaucaacuacuacuggacccugcuggagcccggcgacaccaucaucuucgaggccaacggcaaccugaucgcccccagauucgccuucgcccugagcagaggcuucggcagcggcaucaucaccagcaacgcccccauggacgagugcgacgccaagugccagaccccccagggcgccaucaacagcagccugcccuuccagaacgugcaccccgugaccaucggcgagugccccaaguacgugagaagcaccaagcugagaauggugaccggccugagaaacauccccagcauccagagcagaggccuguucggcgccaucgccggcuucaucgagggcggcuggaccggcaugguggacggcugguacggcuaccaccaccagaacgagcagggcagcggcuacgccgccgaccagaagagcacccagaacgccaucaacggcaucaccaacaaggugaacagcgugaucgagaagaugaacacccaguucaccgccgugggcaaggaguucaacaagcuggagagaagaauggagaaccugaacaagaagguggacgacggcuuccuggacaucuggaccuacaacgccgagcugcuggugcugcuggagaacgagagaacccuggacuuccacgacagcaacgugaagaaccuguacgagaaggugaagagccagcugaagaacaacgccaaggagaucggcaacggcugcuucgaguucuaccacaagugcaacaacgagugcauggagagcgugaagaacggcaccuacgacuaccccaaguacagcgaggagagcaagcugaacagagagaagaucgacggcgugaagcuggagagcaugggcguguaccagauccuggccaucuacagcaccguggccagcagccuggugcugcuggugagccugggcgccaucagcuucuggaugugcagcaacggcagccugcagugcagaaucugcaucuga

SEQ ID NO: 162018 - RNA, 1698 nt, Artificial Sequence; identical to SEQ ID NO: 161970
  derived and/or modified CDS sequence (opt4) from hemagglutinin__InfluenzaA__ABV30316

SEQ ID NO: 162019 - RNA, 1698 nt, Artificial Sequence; identical to SEQ ID NO: 162016
  derived and/or modified CDS sequence (opt4) from hemagglutinin__InfluenzaA__ABV30327

SEQ ID NO: 162020 - RNA, 1698 nt, Artificial Sequence; identical to SEQ ID NO: 161970
  derived and/or modified CDS sequence (opt4) from hemagglutinin__InfluenzaA__ABV30338

SEQ ID NO: 162021 - RNA, 1698 nt, Artificial Sequence; identical to SEQ ID NO: 161974
  derived and/or modified CDS sequence (opt4) from hemagglutinin__InfluenzaA__ABV30349

SEQ ID NO: 162022 - RNA, 1698 nt, Artificial Sequence
  derived and/or modified CDS sequence (opt4) from hemagglutinin__InfluenzaA__ABV30360
augaaggugaagcugcuggugcugcugugcaccuucaccgccaccuacgccgacaccaucugcaucggcuaccacgccaacaacagcaccgacaccguggacaccgugcuggagaagaacgugaccgugacccacagcgugaaccugcuggaggacagccacaacggcaagcugugccugcugaagggcaucgccccccugcagcugggcaacugcagcguggccggcuggauccugggcaaccccgagugcgagcugcugaucagcaaggagagcuggagcuacaucguggagacccccaaccccgagaacggcaccugcuaccccggcaacuucgccgacuacgaggagcugagagagcagcugagcagcgugagcagcuucgagagauucgagaucuuccccaaggagagcagcuggcccaaccacaccgugaccggcgugagcgccagcugcagccacaacggcaagagcagcuucuacagaaaccugcuguggcugaccggcaagaacggccuguaccccaaccugagcaagagcuacgccaacaacaaggagaaggaggugcuggugcuguggggcgugcaccacccccccaacaucggcgaccagagagcccuguaccacaccgagaacgccuacgugagcguggugagcagccacuacagcagaagauucacccccgagaucgccaagagacccaaggugagagaccaggagggcagaaucaacuacuacuggacccugcuggagcccggcgacaccaucaucuucgaggccaacggcaaccugaucgcccccagauucgccuucgcccugagcagaggcuucggcagcggcaucaucaccagcaacgcccccauggacgagugcgacgccaagugccagaccccccagggcgccaucaacagcagccugcccuuccagaacgugcaccccgugaccaucggcgagugccccaaguacgugagaagcgccaagcugagaauggugaccggccugagaaacauccccagcauccagagcagaggccuguucggcgccaucgccggcuucaucgagggcggcuggaccggcaugguggacggcugguacggcuaccaccaccagaacgagcagggcagcggcuacgccgccgaccagaagagcacccagaacgccaucgacggcaucaccaacaaggugaacagcgugaucgagaagaugaacacccaguucaccgccgugggcaaggaguucaacaagcuggagagaagaauggagaaccugaacaagaagguggacgacggcuuccuggacaucuggaccuacaacgccgagcugcuggugcugcuggagaacgagagaacccuggacuuccacgacagcaacgugaagaaccuguacgagaaggugaagagccagcugaagaacaacgccaaggagaucggcaacggcugcuucgaguucuaccacaagugcaacgacgagugcauggagagcgugaagaacggcaccuacgacuaccccaaguacagcgaggagagcaagcugaacagagagaagaucgacggcaucaagcuggagagcaugggcguguaccagauccuggccaucuacagcaccguggccagcagccuggugcugcuggugagccugggcgccaucagcuucuggaugugcagcaacggcagccugcagugcagaaucugcaucuga

SEQ ID NO: 162023 - RNA, 1698 nt, Artificial Sequence; identical to SEQ ID NO: 161974
  derived and/or modified CDS sequence (opt4) from hemagglutinin__InfluenzaA__ABV30371

SEQ ID NO: 162024 - RNA, 1701 nt, Artificial Sequence; identical to SEQ ID NO: 161789
  derived and/or modified CDS sequence (opt4) from hemagglutinin__InfluenzaA__ABV30382

SEQ ID NO: 162025 - RNA, 1701 nt, Artificial Sequence; identical to SEQ ID NO: 160690
  derived and/or modified CDS sequence (opt4) from hemagglutinin__InfluenzaA__ABV30393

SEQ ID NO: 162026 - RNA, 1701 nt, Artificial Sequence
  derived and/or modified CDS sequence (opt4) from hemagglutinin__InfluenzaA__ABV30404
augaagaccaucaucgcccugagcuacauccugugccugguguucgcccagaagcugcccggcaacgacaacagcaccgccacccugugccugggccaccacgccgugcccaacggcaccaucgugaagaccaucaccaacgaccagaucgaggugaccaacgccaccgagcuggugcagagcagcagcaccggcgagaucugcgacagcccccaccagauccuggacggcgagaacugcacccugaucgacgcccugcugggcgacccccagugcgacggcuuccagaacaagaagugggaccuguucguggagagaagcaaggccuacagcaagugcuaccccuacgacgugcccgacuacgccagccugagaagccugguggccagcagcggcacccuggaguucaacaacgagagcuucaacuggaccggcgugacccagaacggcaccagcagcgccugcaucagaagaagcaacaacagcuucuucagcagacugaacuggcugacccaccugaaguucaaguaccccgcccugaacgugaccaugcccaacaacgagaaguucgacaagcuguacaucuggggcgugcaccaccccggcaccgacaacgaccagaucuuccuguacgcccaggccagcggcagaaucaccgugagcaccaagagaagccagcagaccgugauccccaacaucggcagcagacccagagugagaaacauccccagcagaaucagcaucuacuggaccaucgugaagcccggcgacauccugcugaucaacagcaccggcaaccugaucgcccccagaggcuacuucaagaucagaagcggcaagagcagcaucaugagaagcgacgcccccaucggcaagugcaacagcgagugcaucacccccaacggcagcauccccaacgacaagcccuuccagaacgugaacagaaucaccuacggcgccugccccagauacgugaagcagaacacccugaagcuggccaccggcaugagaaacgugcccgagaagcagaccagaggcaucuucggcgccaucgccggcuucaucgagaacggcugggagggcaugguggacggcugguacggcuucagacaccagaacagcgagggcaucggccaggccgccgaccugaagagcacccaggccgccaucgaccagaucaacggcaagcugaacagacugaucggcaagaccaacgagaaguuccaccagaucgagaaggaguucagcgagguggagggcagaauccaggaccuggagaaguacguggaggacaccaagaucgaccuguggagcuacaacgccgaccugcugguggcccuggagaaccagcacaccaucgaccugaccgacagcgagaugaacaagcuguucgagaagaccaagaagcagcugagagagaacgccgaggacaugggcaacggcugcuucaagaucuaccacaagugcgacaacgccugcaucggcagcaucagaaacggcaccuacgaccacgacguguacagagacgaggcccugaacaacagauuccagaucaagggcguggagcugaagagcggcuacaaggacuggauccuguggaucagcuucgccaucagcugcuuccugcugugcguggcccugcugggcuucaucaugugggccugccagaagggcaacaucagaugcaacaucugcaucuga

SEQ ID NO: 162027 - RNA, 1701 nt, Artificial Sequence
  derived and/or modified CDS sequence (opt4) from hemagglutinin__InfluenzaA__ABV30415
augaagaccaucaucgcccugagcuacauccugugccugguguucgcccagaagcugcccggcaucgacaacagcaccgccacccugugccugggccaccacgccgugcccaacggcaccaucgugaagaccaucaccaacgaccagaucgaggugaccaacgccaccgagcuggugcagagcagcagcaccggcggcaucugcgacagcccccaccagauccuggacggcgagaacugcacccugaucgacgcccugcugggcgacccccagugcgacggcuuccagaacaagaagugggaccuguucguggagagaagcaaggccuacagcaacugcuaccccuacgacgugcccgacuacgccagccugagaagccugguggccagcagcggcacccuggaguucaacaacgagagcuucaacugggccggcgugacccagaacggcaccagcagcgccugcaagagaggcagcaacaacagcuucuucagcagacugaacuggcugacccacagcaaguucaaguaccccgcccugaacgugaccaugcccaacaacgaggaguucgacaagcuguacaucuggggcgugcaccaccccggcaccgacaacgaccagaucuuccuguacgcccaggccagcggcagaaucaccgugagcaccaagagaagccagcagaccgugauccccaacaucggcagcagacccagagugagaaacauccccagcagaaucagcaucuacuggaccaucgugaagcccggcgacauccugcugaucaacagcaccggcaaccugaucgcccccagaggcuacuucaagaucagaagcggcaagagcagcaucaugagaagcgacgcccccaucggcaagugcaacagcgagugcaucacccccaacggcagcauccccaacgacaagcccuuccagaacgugaacagaaucaccuacggcgccugccccagauacgugaagcagaacacccugaagcuggccaccggcaugagaaacgugcccgagaagcagaccagaggcaucuucggcgccaucgccggcuucaucgagaacggcugggagggcaugguggacggcugguacggcuucagacaccagaacagcgagggcaucggccaggccgccgaccugaagagcacccaggccgccaucgaccagaucaacggcaagcugaacagacugaucggcaagaccaacgagaaguuccaccagaucgagaaggaguucagcgagguggagggcagaauccaggaccuggagaaguacguggaggacaccaagaucgaccuguggagcuacaacgccgagcugcugguggcccuggagaaccagcacaccaucgaccugaccgacagcgagaugaacaagcuguucgagaagaccaagaagcagcugagagagaacgccgaggacaugggcaacggcugcuucaagaucuaccacaagugcgacaacgccugcaucggcagcaucagaaacggcaccuacgaccacgacguguacagagacgaggcccugaacaacagauuccagaucaagagcguggagcugaagagcggcuacaaggacuggauccuguggaucagcuucgccaucagcugcuuccugcugugcguggcccugcugggcuucaucaugugggccugccagaagggcaacaucagaugcaacaucugcaucuga

SEQ ID NO: 162028 - RNA, 1701 nt, Artificial Sequence; identical to SEQ ID NO: 161988
  derived and/or modified CDS sequence (opt4) from hemagglutinin__InfluenzaA__ABV30426

SEQ ID NO: 162029 - RNA, 1701 nt, Artificial Sequence
  derived and/or modified CDS sequence (opt4) from hemagglutinin__InfluenzaA__ABV30437
augaagaccaucaucgcccugagcuacauccugugccugguguucgcccagaagcugcccggcaacgacaacagcaccgccacccugugccugggccaccacgccgugcccaacggcaccaucgugaagaccaucaccaacgaccagaucgaggugaccaacgccaccgagcuggugcagagcagcagcaccggcgagaucugcgacagcccccaccagauccuggacggcgagaacugcacccugaucgacgcccugcugggcgacccccagugcgacggcuuccagaacaagaagugggaccuguucguggagagaagcaaggccuacagcaacugcuaccccuacgacgugcccgacuacgccagccugagaagccugguggccagcagcggcacccuggaguucaacaacgagagcuucaacuggaccggcgugacccagaacggcaccagcagcgccugcaucagaagaagcaaccacagcuucuucagcagacugaacuggcugacccaccugaaguucaaguaccccgcccugaacgugaccaugcccaacaacgagaaguucgacaagcuguacaucuggggcgugcaccaccccggcaccgacaacgaccagaucuuccuguacgcccaggccagcggcagaaucaccgugagcaccaagagaagccagcagaccgugauccccaacaucggcagcagacccagagugagaaacauccccagcagaaucagcaucuacuggaccaucgugaagcccggcgacauccugcugaucaacagcaccggcaaccugaucgcccccagaggcuacuucaagaucagaagcggcaagagcagcaucaugagaagcgacgcccccaucggcaagugcaacagcgagugcaucacccccaacggcagcauccccaacgacaagcccuuccagaacgugaacagaaucaccuacggcgccugccccagauacgugaagcagaacacccugaagcuggccaccggcaugagaaacgugcccgagaagcagaccagaggcaucuucggcgccaucgccggcuucaucgagaacggcugggagggcaugguggacggcugguacggcuucagacaccagaacagcgagggcaucggccaggccgccgaccugaagagcacccaggccgccaucgaccagaucaacggcaagcugaacagacugaucggcaagaccaacgagaaguuccaccagaucgagaaggaguucagcgagguggagggcagaauccaggaccuggagaaguacguggaggacaccaagaucgaccuguggagcuacaacgccgagcugcugguggcccuggagaaccagcacaccaucgaccugaccgacagcgagaugaacaagcuguucgagaagaccaagaagcagcugagagagaacgccgaggacaugggcaacggcugcuucaagaucuaccacaagugcgacaacgccugcaucggcagcaucagaaacggcaccuacgaccacgacguguacagagacgaggcccugaacaacagauuccagaucaagggcguggagcugaagagcggcuacaaggacuggauccuguggaucagcuucgccaucagcugcuuccugcugugcguggcccugcugggcuucaucaugugggccugccagaagggcaacaucagaugcaacaucugcaucuga

SEQ ID NO: 162030 - RNA, 1701 nt, Artificial Sequence; identical to SEQ ID NO: 161988
  derived and/or modified CDS sequence (opt4) from hemagglutinin__InfluenzaA__ABV30448

SEQ ID NO: 162031 - RNA, 1698 nt, Artificial Sequence
  derived and/or modified CDS sequence (opt4) from hemagglutinin__InfluenzaA__ABV30459
augaaggugaagcugcugauccugcugugcaccuucaccgccaccuacgccgacaccaucugcaucggcuaccacgccaacaacagcaccgacaccguggacaccgugcuggagaagaacgugaccgugacccacagcgugaaccugcuggaggacagccacaacggcaagcugugccugcugaagggcaucgccccccugcagcugggcaacugcagcguggccggcuggauccugggcaaccccgagugcgagcugcugaucagcaaggagagcuggagcuacaucguggaggcccccaaccccgagaacggcaccugcuaccccggcuacuucgccgacuacgaggagcugagagagcagcugagcagcgugagcagcuucgagagauucgagaucuuccccaaggagagcagcuggcccaaccacaccgugaccggcgugagcgccagcugcagccacaacggcaagagcagcuucuacagaaaccugcuguggcugaccggcaagaacggccuguaccccaaccugagcaagagcuacgccaacaacaaggagaaggaggugcuggugcuguggggcgugcaccacccccccaacaucggcgaccagagagcccuguaccacaccgagaacgccuacgugagcguggugagcagccacuacagcagaagauucacccccgagaucgccaagagacccaaggugagagaccaggagggcagaaucaacuacuacuggacccugcuggagcccggcgacaccaucaucuucgaggccaacggcaaccugaucgcccccagauucgccuucgcccugagcagaggcuucggcagcggcaucaucaccagcaacgcccccauggacgagugcgacgccaagugccagaccccccagggcgccaucaacagcagccugcccuuccagaacgugcaccccgugaccaucggcgagugccccaaguacgugagaagcaccaagcugagaauggugaccggccugagaaacauccccagcauccagagcagaggccuguucggcgccaucgccggcuucaucgagggcggcuggaccggcaugguggacggcugguacggcuaccaccaccagaacgagcagggcagcggcuacgccgccgaccagaagagcacccagaacgccaucaacggcaucaccaacaaggugaacagcgugaucgagaagaugaacacccaguucaccgccgugggcaaggaguucaacaagcuggagagaagaauggagaaccugaacaagaagguggacgacggcuuccuggacaucuggaccuacaacgccgagcugcuggugcugcuggagaacgagagaacccuggacuuccacgacagcaacgugaagaaccuguacgagaaggugaagagccagcugaagaacaacgccaaggagaucggcaacggcugcuucgaguucuaccacaagugcaacgacgagugcauggagagcgugaagaacggcaccuacgacuaccccaaguacagcgaggagagcaagcugaacagagagaagaucgacggcgugaagcuggagagcaugggcguguaccagauccuggccaucuacagcaccguggccagcagccuggugcugcuggugagccugggcgccaucagcuucuggaugugcagcaacggcagccugcagugcagaaucugcaucuga

SEQ ID NO: 162032 - RNA, 1701 nt, Artificial Sequence; identical to SEQ ID NO: 161988
  derived and/or modified CDS sequence (opt4) from hemagglutinin__InfluenzaA__ABV30470

SEQ ID NO: 162033 - RNA, 1698 nt, Artificial Sequence; identical to SEQ ID NO: 161970
  derived and/or modified CDS sequence (opt4) from hemagglutinin__InfluenzaA__ABV30492

SEQ ID NO: 162034 - RNA, 1698 nt, Artificial Sequence
  derived and/or modified CDS sequence (opt4) from hemagglutinin__InfluenzaA__ABV30503
augaaggugaagcugcugauccugcugugcaccuucaccgccaccuacgccgacaccaucugcaucggcuaccacgccaacaacagcaccgacaccguggacaccgugcuggagaagaacgugaccgugacccacagcgugaaccugcuggaggacagccacaacggcaagcugugccugcugaagggcaucgccccccugcagcugggcaacugcagcguggccggcuggauccugggcaaccccgagugcgagcugcugaucagcaaggagagcuggagcuacaucguggagacccccaaccccgagaacggcaccugcuaccccggcuacuucgccgacuacgaggagcugagagagcagcugagcagcgugagcagcuucgagagauucgagaucuuccccaaggagagcagcuggcccaaccacaccaucaccggcgugagcgccagcugcagccacaacggcaagagcagcuucuacagaaaccugcuguggcugaccggcaagaacggccuguaccccaaccugagcaagagcuacgccaacaacaaggagaaggaggugcuggugcuguggggcgugcaccacccccccaacaucggcgaccagagagcccuguaccacaccgagaacgccuacgugagcguggugagcagccacuacagcagaagauucacccccgagaucgccaagagacccaaggugagagaccaggagggcagaaucaacuacuacuggacccugcuggagcccggcgacaccaucaucuucgaggccaacggcaaccugaucgcccccagauucgccuucgcccugagcagaggcuucggcagcggcaucaucaccagcaacgcccccauggacgagugcgacgccaagugccagaccccccagggcgccaucaacagcagccugcccuuccagaacgugcaccccgugaccaucggcgagugccccaaguacgugagaagcaccaagcugagaauggugaccggccugagaaacauccccagcauccagagcagaggccuguucggcgccaucgccggcuucaucgagggcggcuggaccggcaugguggacggcugguacggcuaccaccaccagaacgagcagggcagcggcuacgccgccgaccagaagagcacccagaacgccaucaacggcaucaccaacaaggugaacagcgugaucgagaagaugaacacccaguucaccgccgugggcaaggaguucaacaagcuggagagaagaauggagaaccugaacaagaagguggacgacggcuuccuggacaucuggaccuacaacgccgagcugcuggugcugcuggagaacgagagaacccuggacuuccacgacagcaacgugaagaaccuguacgagaaggugaagagccagcugaagaacaacgccaaggagaucggcaacggcugcuucgaguucuaccacaagugcaacgacgagugcauggagagcgugaagaacggcaccuacgacuaccccaaguacagcgaggagagcaagcugaacagagagaagaucgacggcgugaagcuggagagcaugggcguguaccagauccuggccaucuacagcaccguggccagcagccuggugcugcuggugagccugggcgccaucagcuucuggaugugcagcaacggcagccugcagugcagaaucugcaucuga

SEQ ID NO: 162035 - RNA, 1701 nt, Artificial Sequence; identical to SEQ ID NO: 161988
  derived and/or modified CDS sequence (opt4) from hemagglutinin__InfluenzaA__ABV30514

SEQ ID NO: 162036 - RNA, 1698 nt, Artificial Sequence
  derived and/or modified CDS sequence (opt4) from hemagglutinin__InfluenzaA__ABV30525
augaaggugaagcugcuggugcugcugugcaccuucaccgccaccuacgccgacaccaucugcaucggcuaccacgccaacaacagcaccgacaccguggacaccgugcuggagaagaacgugaccgugacccacagcgugaaccugcuggaggacagccacaacggcaagcugugccugcugaagggcaucgccccccugcagcugggcaacugcagcguggccggcuggauccugggcaaccccgagugcgagcugcugaucagcaaggagagcuggagcuacaucguggagacccccaaccccgagaacggcaccugcuaccccggcuacuucgccgacuacgaggagcugagagagcagcugagcagcgugagcagcuucgagagauucgagaucuuccccaaggagagcagcuggcccaaccacaccgugaccggcgugagcgccagcugcagccacagcggcaagagcagcuucuacagaaaccugcuguggcugaccggcaagaacggccuguaccccaaccugagcaagagcuacgccaacaacaaggagaaggaggugcuggugcuguggggcgugcaccacccccccaacaucggcgaccagagagcccuguaccacaccgagaacgccuacgugagcguggugagcagccacuacagcagaagauucacccccgagaucgccaagagacccaaggugagagaccaggagggcagaaucaacuacuacuggacccugcuggagcccggcgacaccaucaucuucgaggccaacggcaaccugaucgcccccagauucgccuucgcccugagcagaggcuucggcagcggcaucaucaccagcaacacccccaugggcgagugcgacgccaagugccagaccccccagggcgccaucaacagcagccugcccuuccagaacgugcaccccgugaccaucggcgagugccccaaguacgugagaagcgccaagcugagaauggugaccggccugagaaacauccccagcauccagagcagaggccuguucggcgccaucgccggcuucaucgagggcggcuggaccggcaugguggacggcugguacggcuaccaccaccagaacgagcagggcagcggcuacgccgccgaccagaagagcacccagaacgccaucaacggcaucaccaacaaggugaacagcgugaucgagaagaugaacacccaguucaccgccgugggcaaggaguucaacaagcuggagagaagaauggagaaccugaacaagaagguggacgacggcuuccuggacaucuggaccuacaacgccgagcugcuggugcugcuggagaacgagagaacccuggacuuccacgacagcaacgugaagaaccuguacgagaaggugaagagccagcugaagaacaacgccaaggagaucggcaacggcugcuucgaguucuaccacaagugcaacgacgagugcauggagagcgugaagaacggcaccuacgacuaccccaaguacagcgaggagagcaagcugaacagagagaagaucgacggcgugaagcuggagagcaugggcguguaccagauccuggccaucuacagcaccguggccagcagccuggugcugcuggugagccugggcgccaucagcuucuggaugugcagcaacggcagccugcagugcagaaucugcaucuga

SEQ ID NO: 162037 - RNA, 1698 nt, Artificial Sequence; identical to SEQ ID NO: 161974
  derived and/or modified CDS sequence (opt4) from hemagglutinin__InfluenzaA__ABV30536

SEQ ID NO: 162038 - RNA, 1698 nt, Artificial Sequence; identical to SEQ ID NO: 161981
  derived and/or modified CDS sequence (opt4) from hemagglutinin__InfluenzaA__ABV30547

SEQ ID NO: 162039 - RNA, 1698 nt, Artificial Sequence; identical to SEQ ID NO: 161974
  derived and/or modified CDS sequence (opt4) from hemagglutinin__InfluenzaA__ABV30558

SEQ ID NO: 162040 - RNA, 1698 nt, Artificial Sequence
  derived and/or modified CDS sequence (opt4) from hemagglutinin__InfluenzaA__ABV30569
augaaggugaagcugcugauccugcugugcaccuucaccgccaccuacgccgacaccaucugcaucggcuaccacgccaacaacagcaccgacaccguggacaccgugcuggagaagaacgugaccgugacccacagcgugaaccugcuggaggacaaccacaacggcaagcugugccugcugaagggcaucgccccccugcagcugggcaacugcagcguggccggcuggauccugggcaaccccgagugcgagcugcugaucagcaaggagagcuggagcuacaucguggagacccccaaccccgagaacggcaccugcuaccccggcuacuucgccgacuacgaggagcugagagagcagcugagcagcgugagcagcuucgagagauucgagaucuuccccaaggagagcagcuggcccaaccacaccgugaccggcgugagcgccagcugcagccacaacggcaagagcagcuucuacagaaaccugcuguggcugaccggcaagaacggccuguaccccaaccugagcaagagcuacgccaacaacaaggagaaggaggugcuggugcuguggggcgugcaccacccccccaacaucggcgaccagagagcccuguaccacaccgagaacgccuacgugagcguggugagcagccacuacagcagaagauucacccccgagaucgccaagagacccaaggugagagaccaggagggcagaaucaacuacuacuggacccugcuggagcccggcgacaccaucaucuucgaggccaacggcaaccugaucgcccccagauucgccuucgcccugagcagaggcuucggcagcggcaucaucaccagcaacgcccccauggacgagugcgacgccaagugccagaccccccagggcgccaucaacagcagccugcccuuccagaacgugcaccccgugaccaucggcgagugccccaaguacgugagaagcaccaagcugagaauggugaccggccugagaaacauccccagcauccagagcagaggccuguucggcgccaucgccggcuucaucgagggcggcuggaccggcaugguggacggcugguacggcuaccaccaccagaacgagcagggcagcggcuacgccgccgaccagaagagcacccagaacgccaucaacggcaucaccaacaaggugaacagcgugaucgagaagaugaacacccaguucaccgccgugggcaaggaguucaacaagcuggagagaagaauggagaaccugaacaagaagguggacgacggcuuccuggacaucuggaccuacaacgccgagcugcuggugcugcuggagaacgagagaacccuggacuuccacgacagcaacgugaagaaccuguacgagaaggugaagagccagcugaagaacaacgccaaggagaucggcaacggcugcuucgaguucuaccacaagugcaacgacgagugcauggagagcgugaagaacggcaccuacgacuaccccaaguacagcgaggagagcaagcugaacagagagaagaucgacggcgugaagcuggagagcaugggcguguaccagauccuggccaucuacagcaccguggccagcagccuggugcugcuggugagccugggcgccaucagcuucuggaugugcagcaacggcagccugcagugcagaaucugcaucuga

SEQ ID NO: 162041 - RNA, 1698 nt, Artificial Sequence; identical to SEQ ID NO: 161974
  derived and/or modified CDS sequence (opt4) from hemagglutinin__InfluenzaA__ABV30580

SEQ ID NO: 162042 - RNA, 1698 nt, Artificial Sequence; identical to SEQ ID NO: 161970
  derived and/or modified CDS sequence (opt4) from hemagglutinin__InfluenzaA__ABV30591

SEQ ID NO: 162043 - RNA, 1698 nt, Artificial Sequence; identical to SEQ ID NO: 161970
  derived and/or modified CDS sequence (opt4) from hemagglutinin__InfluenzaA__ABV30602

SEQ ID NO: 162044 - RNA, 1698 nt, Artificial Sequence
  derived and/or modified CDS sequence (opt4) from hemagglutinin__InfluenzaA__ABV30613
augaaggugaagcugcugauccugcugugcaccuucaccgccaccuacgccgacaccaucugcaucggcuaccacgccaacaacagcaccgacaccguggacaccgugcuggagaagaacgugaccgugacccacagcgugaaccugcuggaggacagccacaacggcaagcugugccugcugaagggcaucgccccccugcagcugggcaacugcagcguggccggcuggauccugggcaaccccgagugcgagcugcugaucagcaaggagagcuggagcuacaucguggagacccccaaccccgagaacggcaccugcuaccccggcuacuucgccgacuacgaggagcugagagagcagcugagcagcgugagcagcuucgagagauucgagaucuuccccaaggagagcagcuggcccaaccacaccgugaccggcgugagcgccagcugcagccacaacggcaagagcagcuucuacagaaaccugcuguggcugaccggcaagaacggccuguaccccaaccugagcaagagcuacgccaacaacaaggagaaggaggugcuggugcuguggggcgugcaccacccccccaacaucggcgaccagagagcccuguaccacaccgagaacgccuacgugagcguggugagcagccacuacagcagaagauucacccccgagaucgccaagagacccaaggugagagaccaggagggcagaaucaacuacuacuggacccugcuggagcccggcgacaccaucaucuucgaggccaacggcaaccugaucgcccccagauucgccuucgcccugagcagaggcuucggcagcggcaucaucaccagcaacgcccccauggacgagugcgacgccaagugccagaccccccagggcgccaucaacagcagccugcccuuccagaacgugcaccccgugaccaucggcgagugccccaaguacgugagaagcaccaagcugagaauggugaccggccugagaaacauccccagcauccagagcagaggccuguucggcgccaucgccggcuucaucgagggcggcuggaccggcaugguggacggcugguacggcuaccaccaccagaacgagcagggcagcggcuacgccgccgaccagaagagcacccagaacgccaucaacggcaucaccaacaaggugaacagcgugaucgagaagaugaacacccaguucaccgccgugggcaaggaguucaacaagcuggagagaagaaugaagaaccugaacaagaagguggacgacggcuuccuggacaucuggaccuacaacgccgagcugcuggugcugcuggagaacgagagaacccuggacuuccacgacagcaacgugaagaaccuguacgagaaggugaagagccagcugaagaacaacgccaaggagaucggcaacggcugcuucgaguucuaccacaagugcaacgacgagugcauggagagcgugaagaacggcaccuacgacuaccccaaguacagcgaggagagcaagcugaacagagagaagaucgacggcgugaagcuggagagcaugggcguguaccagauccuggccaucuacagcaccguggccagcagccuggugcugcuggugagccugggcgccaucagcuucuggaugugcagcaacggcagccugcagugcagaaucugcaucuga

SEQ ID NO: 162045 - RNA, 1698 nt, Artificial Sequence; identical to SEQ ID NO: 161970
  derived and/or modified CDS sequence (opt4) from hemagglutinin__InfluenzaA__ABV30624

SEQ ID NO: 162046 - RNA, 1701 nt, Artificial Sequence
  derived and/or modified CDS sequence (opt4) from hemagglutinin__InfluenzaA__ABV30646
augaagaccaucaucgcccugagcuacauccugugccugguguucgcccagaagcugcccggcaacgacaacagcaccgccacccugugccugggccaccacgccgugcccaacggcaccaucgugaagaccaucaccaacgaccagaucgaggugaccaacgccaccgagcuggugcagagcagcagcaccggcgagaucugcgacagcccccaccagauccuggacggcgagaacugcacccugaucgacgcccugcugggcgacccccagugcgacggcuuccagaacaagaagugggaccuguucguggagagaagcaaggccuacagcaacugcuaccccuacgacgugcccgacuacgccagccugagaagccugguggccagcagcggcacccuggaguucaacaacgagagcuucaacuggaccggcgugacccagaacggcaccagcagcgccugcaucagaagaagcaacaacagcuucuucagcagacugaacuggcugacccaccugaaguucaaguaccccgcccugaacgugaccaugcccaacaacgagaaguucgacaagcuguacaucuggggcgugcaccaccccggcaccuacaacgaccagaucuuccuguacgcccaggccagcggcagaaucaccgugagcaccaagagaagccagcagaccgugauccccaacaucggcagcagacccagagugagaaacauccccagcagaaucagcaucuacuggaccaucgugaagcccggcgacauccugcugaucaacagcaccggcaaccugaucgcccccagaggcuacuucaagaucagaagcggcaagagcagcaucaugagaagcgacgcccccaucggcaagugcaacagcgagugcaucacccccaacggcagcauccccaacgacaagcccuuccagaacgugaacagaaucaccuacggcgccugccccagauacgugaagcagaacacccugaagcuggccaccggcaugagaaacgugcccgagaagcagaccagaggcaucuucggcgccaucgccggcuucaucgagaacggcugggagggcaugguggacggcugguacggcuucagacaccagaacagcgagggcaucggccaggccgccgaccugaagagcacccaggccgccaucgaccagaucaacggcaagcugaacagacugaucggcaagaccaacgagaaguuccaccagaucgagaaggaguucagcgagguggagggcagaauccaggaccuggagaaguacguggaggacaccaagaucgaccuguggagcuacaacgccgagcugcugguggcccuggagaaccagcacaccaucgaccugaccgacagcgagaugaacaagcuguucgagaagaccaagaagcagcugagagagaacgccgaggacaugggcaacggcugcuucaagaucuaccacaagugcgacaacgccugcaucggcagcaucagaaacggcaccuacgaccacgacguguacagagacgaggcccugaacaacagauuccagaucaagggcguggagcugaagagcggcuacaaggacuggauccuguggaucagcuucgccaucagcugcuuccugcugugcguggcccugcugggcuucaucaugugggccugccagaagggcaacaucagaugcaacaucugcaucuga

SEQ ID NO: 162047 - RNA, 1701 nt, Artificial Sequence
  derived and/or modified CDS sequence (opt4) from hemagglutinin__InfluenzaA__ABV30657
augaagaccaucaucgcccugagcuacauccugugccugguguucgcccagaagcugcccggcaacgacaacagcaccgccacccugugccugggccaccacgccgugcccaacggcaccaucgugaagaccaucaccaacgaccagaucgaggugaccaacgccaccgagcuggugcagagcagcagcaccggcgagaucugcgacagcccccaccagauccuggacggcgagaacugcacccugaucgacgcccugcugggcgacccccagugcgacggcuuccagaacaagaagugggaccuguucguggagagaagcaaggccuacagcaacugcuaccccuacgacgugcccgacuacgccagccugagaagccugguggccagcagcggcacccuggaguucaacaacgagagcuucaacuggaccggcgugacccagaacggcaccagcagcgccugcaucagaagaagcaacaacagcuucuucagcagacugaacuggcugacccaccugaaguucaaguaccccgcccugaacgugaccaugcccaacaacgagaaguucgacaagcuguacaucuggggcgugcaccaccccggcaccgacaacgaccagguguuccuguacgcccaggccagcggcagaaucaccgugagcaccaagagaagccagcagaccgugauccccaacaucggcagcagacccagagugagaaacauccccagcagaaucagcaucuacuggaccaucgugaagcccggcgacauccugcugaucaacagcaccggcaaccugaucgcccccagaggcuacuucaagaucagaagcggcaagagcagcaucaugagaagcgacgcccccaucggcaagugcaacagcgagugcaucacccccaacggcagcauccccaacgacaagcccuuccagaacgugaacagaaucaccuacggcgccugccccagauacgugaagcagaacacccugaagcuggccaccggcaugagaaacgugcccgagaagcagaccagaggcaucuucggcgccaucgccggcuucaucgagaacggcugggagggcaugguggacggcugguacggcuucagacaccagaacagcgagggcaucggccaggccgccgaccugaagagcacccaggccgccaucgaccagaucaacggcaagcugaacagacugaucggcaagaccaacgagaaguuccaccagaucgagaaggaguucagcgagguggagggcagaauccaggaccuggagaaguacguggaggacaccaagaucgaccuguggagcuacaacgccgagcugcugguggcccuggagaaccagcacaccaucgaccugaccgacagcgagaugaacaagcuguucgagaagaccaagaagcagcugagagagaacgccgaggacaugggcaacggcugcuucaagaucuaccacaagugcgacaacgccugcaucggcagcaucagaaacggcaccuacgaccacgacguguacagagacgaggcccugaacaacagauuccagaucaagggcguggagcugaagagcggcuacaaggacuggauccuguggaucagcuucgccaucagcugcuuccugcugugcguggcccugcugggcuucaucaugugggccugccagaagggcaacaucagaugcaacaucugcaucuga

SEQ ID NO: 162048 - RNA, 1701 nt, Artificial Sequence; identical to SEQ ID NO: 162047
  derived and/or modified CDS sequence (opt4) from hemagglutinin__InfluenzaA__ABV45860

SEQ ID NO: 162049 - RNA, 1698 nt, Artificial Sequence; identical to SEQ ID NO: 162015
  derived and/or modified CDS sequence (opt4) from hemagglutinin__InfluenzaA__ABV45871

SEQ ID NO: 162050 - RNA, 1698 nt, Artificial Sequence; identical to SEQ ID NO: 161974
  derived and/or modified CDS sequence (opt4) from hemagglutinin__InfluenzaA__ABV45882

SEQ ID NO: 162051 - RNA, 1698 nt, Artificial Sequence; identical to SEQ ID NO: 161981
  derived and/or modified CDS sequence (opt4) from hemagglutinin__InfluenzaA__ABV45893

SEQ ID NO: 162052 - RNA, 1701 nt, Artificial Sequence; identical to SEQ ID NO: 161789
  derived and/or modified CDS sequence (opt4) from hemagglutinin__InfluenzaA__ABV45904

SEQ ID NO: 162053 - RNA, 1698 nt, Artificial Sequence; identical to SEQ ID NO: 161981
  derived and/or modified CDS sequence (opt4) from hemagglutinin__InfluenzaA__ABV45926

SEQ ID NO: 162054 - RNA, 1698 nt, Artificial Sequence
  derived and/or modified CDS sequence (opt4) from hemagglutinin__InfluenzaA__ABV45937
augaaggugaagcugcuggugcugcugugcaccuucaccgccaccuacgccgacaccaucugcaucggcuaccacgccaacaacagcaccgacaccguggacaccgugcuggagaagaacgugaccgugacccacagcgugaaccugcuggaggacagccacaacggcaagcugugccugcugaagggcaucgccccccugcagcugggcaacugcagcguggccggcuggauccugggcaaccccgagugcgagcugcugaucagcaaggagagcuggagcuacaucguggagacccccaaccccgagaacggcaccugcuaccccggcuacuucgccgacuacgaggagcugagagagcagcugagcagcgugagcagcuucgagagauucgagaucuuccccaaggagagcagcuggcccaaccacaccgugaccggcgugagcgccagcugcagccacaacggcaagagcagcuucuacagaaaccugcuguggcugaccggcaagaacggccuguaccccaaccugagcaagagcuacgccaacaacaaggagaaggaggugcuggugcuguggggcgugcaccacccccccaacaucggcgaccagagagcccuguaccacaccgagaacgccuacgugagcguggugagcagccacuacagcagaagauucacccccgagaucgccaagagacccaaggugagagaccaggagggcagaaucaacuacuacuggacccugcuggagcccggcgacaccaucaucuucgagaccaacggcaaccugaucgcccccagauucgccuucgcccugagcagaggcuucggcagcggcaucaucaccagcaacgcccccaugggcgagugcgacgccaagugccagaccccccagggcgccaucaacagcagccugcccuuccagaacgugcaccccgugaccaucggcgagugccccaaguacgugagaagcgccaagcugagaauggugaccggccugagaaacauccccagcauccagagcagaggccuguucggcgccaucgccggcuucaucgagggcggcuggaccggcaugguggacggcugguacggcuaccaccaccagaacgagcagggcagcggcuacgccgccgaccagaagagcacccagaacgccaucaacggcaucaccaacaaggugaacagcgugaucgagaagaugaacacccaguucaccgccgugggcaaggaguucaacaagcuggagagaagaauggagaaccugaacaagaagguggacgacggcuuccuggacaucuggaccuacaacgccgagcugcuggugcugcuggagaacgagagaacccuggacuuccacgacagcaacgugaagaaccuguacgagaaggugaagagccagcugaagaacaacgccaaggagaucggcaacggcugcuucgaguucuaccacaagugcaacgacgagugcauggagagcgugaagaacggcaccuacgacuaccccaaguacagcgaggagagcaagcugaacagagagaagaucgacggcgugaagcuggagagcaugggcguguaccagauccuggccaucuacagcaccguggccagcagccuggugcugcuggugagccugggcgccaucagcuucuggaugugcagcaacggcagccugcagugcagaaucugcaucuga

SEQ ID NO: 162055 - RNA, 1698 nt, Artificial Sequence; identical to SEQ ID NO: 162007
  derived and/or modified CDS sequence (opt4) from hemagglutinin__InfluenzaA__ABV45948

SEQ ID NO: 162056 - RNA, 1698 nt, Artificial Sequence; identical to SEQ ID NO: 161974
  derived and/or modified CDS sequence (opt4) from hemagglutinin__InfluenzaA__ABV45959

SEQ ID NO: 162057 - RNA, 1701 nt, Artificial Sequence
  derived and/or modified CDS sequence (opt4) from hemagglutinin__InfluenzaA__ABV45970
augaagaccaucaucgcccugagcuacauccugugccugguguucgcccagaagcugcccggcaacgacaacagcaccgccacccugugccugggccaccacgccgugcccaacggcaccaucgugaagaccaucaccaacgaccagaucgaggugaccaacgccaccgagcuggugcagagcagcagcaccggcgagaucugcgacagcccccaccagauccuggacggcgagaacugcacccugaucgacgcccugcugggcgacccccagugcgacggcuuccagaacaagaagugggaccuguucguggagagaagcaaggccuacagcaacugcuaccccuacgacgugcccgaccacgccagccugagaagccugguggccagcagcggcacccuggaguucaacaacgagagcuucaacuggaccggcgugacccagaacggcaccagcagcgccugcaucagaagaagcaacaacagcuucuucagcagacugaacuggcugacccaccugaaguucaaguaccccgcccugaacgugaccaugcccaacaacgagaaguucgacaagcuguacaucuggggcgugcaccaccccggcaccgacaacgaccagaucuuccuguacgcccaggccagcggcagaaucaccgugagcaccaagagaagccagcagaccgugauccccaacaucggcagcagacccagagugagaaacauccccagcagaaucagcaucuacuggaccaucgugaagcccggcgacauccugcugaucaacagcaccggcaaccugaucgcccccagaggcuacuucaagauccagagcggcaagagcagcaucaugagaagcgacgcccccaucggcaagugcaacagcgagugcaucacccccaacggcagcauccccaacgacaagcccuuccagaacgugaacagaaucaccuacggcgccugccccagauacgugaagcagaacacccugaagcuggccaccggcaugagaaacgugcccgagaagcagaccagaggcaucuucggcgccaucgccggcuucaucgagaacggcugggagggcaugguggacggcugguacggcuucagacaccagaacagcgagggcaucggccaggccgccgaccugaagagcacccaggccgccaucgaccagaucaacggcaagcugaacagacugaucggcaagaccaacgagaaguuccaccagaucgagaaggaguucagcgagguggagggcagaauccaggaccuggagaaguacguggaggacaccaagaucgaccuguggagcuacaacgccgagcugcugguggcccuggagaaccagcacaccaucgaccugaccgacagcgagaugaacaagcuguucgagaagaccaagaagcagcugagagagaacgccgaggacaugggcaacggcugcuucaagaucuaccacaagugcgacaacgccugcaucggcagcaucagaaacggcaccuacgaccacgacguguacagagacgaggcccugaacaacagauuccagaucaagggcguggagcugaagagcggcuacaaggacuggauccuguggaucagcuucgccaucagcugcuuccugcugugcguggcccugcugggcuucaucaugugggccugccagaagggcaacaucagaugcaacaucugcaucuga

SEQ ID NO: 162058 - RNA, 1701 nt, Artificial Sequence
  derived and/or modified CDS sequence (opt4) from hemagglutinin__InfluenzaA__ABV45981
augaagaccaucaucgcccugagcuacauccugugccugguguucgcccagaagcugcccggcaacgacaacagcaccgccacccugugccugggccaccacgccgugcccaacggcaccaucgugaagaccaucaccaacgaccagaucgaggugaccaacgccaccgagcuggugcagagcagcagcaccggcgagaucugcgacagcccccaccagauccuggacggcgagaacugcacccugaucgacgcccugcugggcgacccccagugcgacggcuuccagaacaagaagugggaccuguucguggagagaagcaaggccuacagcaacugcuaccccuacgacgugcccgacuacgccagccugagaagccugguggccagcagcggcacccuggaguucaacaacgagagcuucaacuggaccggcgugacccagaacggcaccagcagcgccugcaucagaagaagcaacaacagcuucuucagcagacugaacuggcugacccaccugaaguucaaguaccccgcccugaacgugaccaugcccaacaacgagaaguucgacaagcuguacaucuggggcgugcaccaccccggcaccgacaacgaccagaucuuccuguacgcccaggccagcggcagaaucaccgugagcaccaagagaagccagcagaccgugauccccaacaucggcagcagacccagagugagaaacauccccagcagaaucagcaucuacuggaccaucgugaagcccggcgacauccugcugaucaacagcaccggcaaccugaucgcccccagaggcuacuucaagaucagaagcggcaagagcagcaucaugagaagcgacgcccccaucggcaagugcaacagcgagugcaucacccccaacggcagcauccccaacgacaagcccuuccagaacgugaacagaaucaccuacggcgccugccccagauacgugaagcagaacacccugaagcuggccaccggcaugagaaacgugcccgagaagcagaccagaggcaucuucggcgccaucgccggcuucaucgagaacggcugggagggcaugguggacggcugguacggcuucagacaccagaacagcgagggcaucggccaggccgccgaccugaagagcacccaggccgccaucgaccagaucaacggcaagcugaacagacugaucggcaagaccaacgagaaguuccaccagaucgagaaggaguucagcgagguggagggcagaauccaggaccuggagaaguacguggaggacaccaagaucgaccuguggagcuacaacgccgagcugcugguggcccuggagaaccagcacaccaucgaccugaccgacagcgagaugaacaagcuguucgagaagaccaagaagcagcugagagagaacgccgaggacaugggcaacggcugcuucaagaucuaccacaagugcgacaacgccugcaucggcagcaucagaaacggcaccuacgaccacgacguguacagagacgaggcccugaacaacagauuccagaucaagggcguggagcugaagagcggcuacaaggacuggaucaucuggaucagcuucgccaucagcugcuuccugcugugcguggcccugcugggcuucaucaugugggccugccagaagggcaacaucagaugcaacaucugcaucuga

SEQ ID NO: 162059 - RNA, 1698 nt, Artificial Sequence
  derived and/or modified CDS sequence (opt4) from hemagglutinin__InfluenzaA__ABV82551
augaaggugaagcugcuggugcugcugugcaccuucaccgccaccuacgccgacaccaucugcaucggcuaccacgccaacaacagcaccgacaccguggacaccgugcuggagaagaacgugaccgugacccacagcgugaaccugcuggaggacagccacaacggcaagcugugccugcugaagggcaucgccccccugcagcugggcaacugcagcguggccggcuggauccugggcaaccccgagugcgagcugcugaucagcaaggagagcuggagcuacaucguggagacccccaaccccgagaacggcaccugcuaccccggcuacuucgccgacuacgaggagcugagagagcagcugagcagcgugagcagcuucgagagauucgagaucuuccccaaggagagcagcuggcccaaccacaccgugaccggcgugagcgccagcugcagccacaacggcgagagcagcuucuacagaaaccugcuguggcugaccgagaagaacggccuguaccccaaccugagcaagagcuacgccaacaacaaggagaaggaggugcuggugcuguggggcgugcaccacccccccaacaucggcgaccagagagcccuguaccacaccgagaacgccuacgugagcguggugagcagccacuacagcagaagauucacccccgagaucgccaagagacccaaggugagagaccaggagggcagaaucaacuacuacuggacccugcuggagcccggcgacaccaucaucuucgaggccaacggcaaccugaucgcccccagauucgccuucgcccugagcagaggcuucggcagcggcaucaucaccagcaacgcccccauggacaagugcgacgccaagugccagaccccccagggcgccaucaacagcagccugcccuuccagaacgugcaccccgugaccaucggcgagugccccaaguacgugagaagcaccaagcugagaauggugaccggccugagaaacauccccagcauccagagcagaggccuguucggcgccaucgccggcuucaucgagggcggcuggaccggcaugguggacggcugguacggcuaccaccaccagaacgagcagggcagcggcuacgccgccgaccagaagagcacccagaacgccaucaacggcaucaccaacaaggugaacagcgugaucgagaagaugaacacccaguucaccgccgugggcaaggaguucaacaagcuggagagaagaauggagaaccugaacaagaagguggacgacggcuuccuggacaucuggaccuacaacgccgagcugcuggugcugcuggagaacgagagaacccuggacuuccacgacagcaacgugaagaaccuguacgagaaggugaagagccagcugaagaacaacgccaaggagaucggcaacggcugcuucgaguucuaccacaagugcaacgacgagugcauggagagcgugaagaacggcaccuacgacuaccccaaguacagcgaggagagcaagcugaacagagagaagaucgacggcgugaagcuggagagcaugggcguguaccagauccuggccaucuacagcaccguggccagcagccuggugcugcuggugagccugggcgccaucagcuucuggaugugcagcaacggcagccugcagugcagaaucugcaucuga

SEQ ID NO: 162060 - RNA, 1701 nt, Artificial Sequence; identical to SEQ ID NO: 161988
  derived and/or modified CDS sequence (opt4) from hemagglutinin__InfluenzaA__ABV82562

SEQ ID NO: 162061 - RNA, 1701 nt, Artificial Sequence; identical to SEQ ID NO: 161988
  derived and/or modified CDS sequence (opt4) from hemagglutinin__InfluenzaA__ABW36168

SEQ ID NO: 162062 - RNA, 1698 nt, Artificial Sequence; identical to SEQ ID NO: 161974
  derived and/or modified CDS sequence (opt4) from hemagglutinin__InfluenzaA__ABW36179

SEQ ID NO: 162063 - RNA, 1698 nt, Artificial Sequence; identical to SEQ ID NO: 162017
  derived and/or modified CDS sequence (opt4) from hemagglutinin__InfluenzaA__ABW36190

SEQ ID NO: 162064 - RNA, 1698 nt, Artificial Sequence; identical to SEQ ID NO: 161974
  derived and/or modified CDS sequence (opt4) from hemagglutinin__InfluenzaA__ABW36201

SEQ ID NO: 162065 - RNA, 1698 nt, Artificial Sequence
  derived and/or modified CDS sequence (opt4) from hemagglutinin__InfluenzaA__ABW36212
augaaggugaagcugcuggugcugcugugcaccuucaccgccaccuacgccgacaccaucugcaucggcuaccacgccaacaacagcaccgacaccguggacaccgugcuggagaagaacgugaccgugacccacagcgugaaccugcuggaggacagccacaacggcaagcugugccugcugaagggcaucgccccccugcagcugggcaacugcagcguggccggcuggauccugggcaaccccgagugcgagcugcugaucagcaaggagagcuggagcuacaucguggagacccccaaccccgagaacggcaccugcuaccccggcuacuucgccgacuacgaggagcugagagagcagcugagcagcgugagcagcuucgagagauucgagaucuuccccaaggagaacagcuggcccaaccacaccgugaccggcgugagcgccagcugcagccacaacggcaagagcagcuucuacagaaaccugcuguggcugaccggcaagaacggccuguaccccaaccugagcaagagcuacgccaacaacaaggagaaggaggugcuggugcuguggggcgugcaccacccccccaacaucggcgaccagagagcccuguaccacaccgagaacgccuacgugagcguggugagcagccacuacagcagaagauucacccccgagaucgccaagagacccaaggugagagaccaggagggcagaaucaacuacuacuggacccugcuggagcccggcgacaccaucaucuucgaggccaacggcaaccugaucgcccccagauucgccuucgcccugagcagaggccugggcagcggcaucaucaccagcaacgcccccauggacgagugcgacgccaagugccagaccccccagggcgccaucaacagcagccugcccuuccagaacgugcaccccgugaccaucggcgagugccccaaguacgugagaagcgccaagcugagaauggugaccggccugagaaacauccccagcauccagagcagaggccuguucggcgccaucgccggcuucaucgagggcggcuggaccggcaugguggacggcugguacggcuaccaccaccagaacgagcagggcagcggcuacgccgccgaccagaagagcacccagaacgccaucaacggcaucaccaacaaggugaacagcgugaucgagaagaugaacacccaguucaccgccgugggcaaggaguucaacaagcuggagagaagaauggagaaccugaacaagaagguggacgacggcuuccuggacaucuggaccuacaacgccgagcugcuggugcugcuggagaacgagagaacccuggacuuccacgacagcaacgugaagaaccuguacgagaaggugaagggccagcugaagaacaacgccaaggagaucggcaacggcugcuucgaguucuaccacaagugcaacgacgagugcauggagagcgugaagaacggcaccuacgacuaccccaaguacagcgaggagagcaagcugaacagagagaagaucgacggcgugaagcuggagagcaugggcguguaccagauccuggccaucuacagcaccguggccagcagccuggugcugcuggugagccugggcgccaucagcuucuggaugugcagcaacggcagccugcagugcagaaucugcaucuga

SEQ ID NO: 162066 - RNA, 1698 nt, Artificial Sequence; identical to SEQ ID NO: 161970
  derived and/or modified CDS sequence (opt4) from hemagglutinin__InfluenzaA__ABW36223

SEQ ID NO: 162067 - RNA, 1698 nt, Artificial Sequence; identical to SEQ ID NO: 161970
  derived and/or modified CDS sequence (opt4) from hemagglutinin__InfluenzaA__ABW36245

SEQ ID NO: 162068 - RNA, 1698 nt, Artificial Sequence; identical to SEQ ID NO: 161970
  derived and/or modified CDS sequence (opt4) from hemagglutinin__InfluenzaA__ABW36267

SEQ ID NO: 162069 - RNA, 1698 nt, Artificial Sequence; identical to SEQ ID NO: 161974
  derived and/or modified CDS sequence (opt4) from hemagglutinin__InfluenzaA__ABW36278

SEQ ID NO: 162070 - RNA, 1698 nt, Artificial Sequence
  derived and/or modified CDS sequence (opt4) from hemagglutinin__InfluenzaA__ABW36289
augaagcugaagcugcuggugcugcugugcaccuucaccgccaccuacgccgacaccaucugcaucggcuaccacgccaacaacagcaccgacaccguggacaccgugcuggagaagaacgugaccgugacccacagcgugaaccugcuggaggacagccacaacggcaagcugugccugcugaagggcaucgccccccugcagcugggcaacugcagcguggccggcuggauccugggcaaccccgagugcgagcugcugaucagcaaggagagcuggagcuacaucguggagacccccaaccccgagaacggcaccugcuaccccggcuacuucgccgacuacgaggagcugagagagcagcugagcagcgugagcagcuucgagagauucgagaucuuccccaaggagagcagcuggcccaaccacaccgugaccggcgugagcgccagcugcagccacaacggcaagagcagcuucuacagaaaccugcuguggcugaccggcaagaacggccuguaccccaaccugagcaagagcuacgccaacaacaaggagaaggaggugcuggugcuguggggcgugcaccacccccccaacaucggcgaccagagagcccuguaccacaccgagaacgccuacgugagcguggugagcagccacuacagcagaagauucacccccgagaucgccaagagacccaaggugagagaccaggagggcagaaucaacuacuacuggacccugcuggagcccggcgacaccaucaucuucgaggccaacggcaaccugaucgcccccagauucgccuucgcccugagcagaggcuucggcagcggcaucaucaccagcaacgcccccauggacgagugcgacgccaagugccagaccccccagggcgccaucaacagcagccugcccuuccagaacgugcaccccgugaccaucggcgagugccccaaguacgugagaagcaccaagcugagaauggugaccggccugagaaacauccccagcauccagagcagaggccuguucggcgccaucgccggcuucaucgagggcggcuggaccggcaugguggacggcugguacggcuaccaccaccagaacgagcagggcagcggcuacgccgccgaccagaagagcacccagaacgccaucaacggcaucaccaacaaggugaacagcgugaucgagaagaugaacacccaguucaccgccgugggcaaggaguucaacaagcuggagagaagaauggagaaccugaacaagaagguggacgacggcuuccuggacaucuggaccuacaacgccgagcugcuggugcugcuggagaacgagagaacccuggacuuccacgacagcaacgugaagaaccuguacgagaaggugaagagccagcugaagaacaacgccaaggagaucggcaacggcugcuucgaguucuaccacaagugcaacgacgagugcauggagagcgugaagaacggcaccuacgacuaccccaaguacagcgaggagagcaagcugaacagagagaagaucgacggcgugaagcuggagagcaugggcguguaccagauccuggccaucuacagcaccguggccagcagccuggugcugcuggugagccugggcgccaucagcuucuggaugugcagcaacggcagccugcagugcagaaucugcaucuga

SEQ ID NO: 162071 - RNA, 1698 nt, Artificial Sequence; identical to SEQ ID NO: 161981
  derived and/or modified CDS sequence (opt4) from hemagglutinin__InfluenzaA__ABW36300

SEQ ID NO: 162072 - RNA, 1701 nt, Artificial Sequence
  derived and/or modified CDS sequence (opt4) from hemagglutinin__InfluenzaA__ABW36311
augaaggccaagcugcuggugcugcugugcgcccugagcgccaccgacgccgacaccaucugcaucggcuaccacgccaacaacagcaccgacaccguggacaccgugcuggagaagaacgugaccgugacccacagcgugaaccugcuggaggacagccacaacggcaagcugugcagacugaagggcaucgccccccugcagcugggcaagugcagcaucgccggcuggauccugggcaaccccgagugcgagagccuguucagcaagaagagcuggagcuacaucgccgagacccccaacagcgagaacggcaccugcuaccccggcuacuucgccgacuacgaggagcugagagagcagcugagcagcgugagcagcuucgagagauucgagaucuuccccaaggagagaagcuggcccaagcacaacgugaccagaggcgugaccgccagcugcagccacaagggcaagagcagcuucuacagaaaccugcuguggcugaccgagaagaacggcagcuaccccaaccugagcaagagcuacgugaacaacaaggagaaggaggugcuggugcuguggggcgugcaccaccccagcaacaucgaggaccagaagaccaucuacagaaaggagaacgccuacgugagcguggugagcagcaacuacaacagaagauucacccccgagaucgccaagagacccaaggugagagaccaggagggcagaaucaacuacuacuggacccugcuggagcccggcgacaccaucaucuucgaggccaacggcaaccugaucgcccccugguacgccuucgcccugagcagaggcuucggcagcggcaucaucaccagcaacgccagcauggacgagugcgacaccaagugccagaccccccagggcgccaucaacagcagccugcccuuccagaacgugcaccccgugaccaucggcgagugccccaaguacgugagaagcaccaagcugagaauggugaccggccugagaaacauccccagcauccagagcagaggccuguucggcgccaucgccggcuucaucgagggcggcuggaccggcaugaucgacggcugguacggcuaccaccaccagaacgagcagggcagcggcuacgccgccgaccagaagagcacccagaacgccaucaacggcaucaccaacaaggugaacagcgugaucgagaagaugaacacccaguucaccgccgugggcaaggaguucaacaagcuggagaagagaauggagaaccugaacaagaagguggacgacggcuuccuggacaucuggaccuacaacgccgagcugcuggugcugcuggagaacgagagaacccuggacagccacgacagcaacgugaagaaccuguacgagaaggugaagagccagcugaagaacaacgccaaggagaucggcaacggcugcuucgaguucuaccacaagugcaacaacgagugcauggagagcgugaagaacggcaccuacgacuaccccaaguacagcgaggagagcaagcugaacagagagaagaucgacggcgugaagcuggagagcaugggcguguaccagauccuggccaucuacagcaccguggccagcagccuggugcugcuggugagccugggcgccaucagcuucuggaugugcagcaacggcagccugcagugcagaaucugcaucuga

SEQ ID NO: 162073 - RNA, 1701 nt, Artificial Sequence
  derived and/or modified CDS sequence (opt4) from hemagglutinin__InfluenzaA__ABW38363
augaagaccaucaucgcccugagcuacauccugugccugguguucgcccagaagcugcccggcaacgacaacagcaccgccacccugugccugggccaccacgccgugcccaacggcaccaucgugaagaccaucaccaacgaccagaucgaggugaccaacgccaccgagcuggugcagagcagcagcaccggcgagaucugcgacagcccccaccagauccuggacggcgagaacugcacccugaucgacgcccugcugggcgacccccagugcgacggcuuccagaacaagaagugggaccuguucguggagagaagcaaggccuacagcaacugcuaccccuacgacgugcccgacuacgccagccugagaagccugguggccagcagcggcacccuggaguucaacaacgagagcuucaacuggaccggcgugacccagaacggcaccagcagcgccugcaagagaagaagcaacaacagcuucuucagcagacugaacuggcugacccaccugaaguucaaguaccccgcccugaacgugaccaugcccaacaacgagaaguucgacaagcuguacaucuggggcgugcaccaccccggcaccgacaacgaccagaucuuccuguacgcccaggccagcggcagaaucaccgugagcaccaagagaagccagcagaccgugauccccaacaucggcagcagacccagagugagaaacauccccagcagaaucagcaucuacuggaccaucgugaagcccggcgacauccugcugaucaacagcaccggcaaccugaucgcccccagaggcuacuucaagaucagaagcggcaagagcagcaucaugagaagcgacgcccccaucggcaagugcaacagcgagugcaucacccccaacggcagcauccccaacgacaagcccuuccagaacgugaacagaaucaccuacggcgccugccccagauacgugaagcagaacacccugaagcuggccaccggcaugagaaacgugcccgagaagcagaccagaggcaucuucggcgccaucgccggcuucaucgagaacggcugggagggcaugguggacggcugguacggcuucagacaccagaacagcgagggcaucggccaggccgccgaccugaagagcacccaggccgccaucgaccagaucaacggcaagcugaacagacugaucggcaagaccaacgagaaguuccaccagaucgagaaggaguucagcgagguggagggcagaauccaggaccuggagaaguacguggaggacaccaagaucgaccuguggagcuacaacgccgagcugaucguggcccuggagaaccagcacaccaucgaccugaccgacagcgagaugaacaagcuguucgagagaaccaagaagcagcugagagagaacgccgaggacaugggcaacggcugcuucaagaucuaccacaagugcgacaacgccugcaucggcagcaucagaaacggcaccuacgaccacgacguguacagagacgaggcccugaacaacagauuccagaucaagggcguggagcugaagagcggcuacaaggacuggauccuguggaucagcuucgccaucagcugcuuccugcugugcguggcccugcugggcuucaucaugugggccugccagaagggcaacaucagaugcaacaucugcaucuga

SEQ ID NO: 162074 - RNA, 1698 nt, Artificial Sequence
  derived and/or modified CDS sequence (opt4) from hemagglutinin__InfluenzaA__ABW39777
augaaggugaagcugcuggugcugcugugcaccuucaccgccaccuacgccgacaccaucugcaucggcuaccacgccaacaacagcaccgacaccguggacaccgugcuggagaagaacgugaccgugacccacagcgugaaccugcuggaggacagccacaacggcaagcugugccugcugaagggcaucgccccccugcagcugggcaacugcagcguggccggcuggauccugggcaaccccgagugcgagcugcugaucagcaaggagagcuggagcuacaucguggagacccccaaccccgagaacggcaccugcuaccccggcuacuucgccgacuacgaggagcugagagagcagcugagcagcgugagcagcuucgagagauucgagaucuuccccaaggagaacagcuggcccaaccacaccgugaccggcgugagcgccagcugcagccacaacggcaagagcagcuucuacagaaaccugcuguggcugaccggcaagaacggccuguaccccaaccugagcaagagcuacgccaacaacaaggagaaggaggugcuggugcuguggggcgugcaccacccccccaacaucggcgaccagagagcccuguaccacaccgagaacgccuacgugagcguggugagcagccacuacagcagaagauucacccccgagaucgccaagagacccaaggugagagaccaggagggcagaaucaacuacuacuggacccugcuggagcccggcgacaccaucaucuucgaggccaacggcaaccugaucgcccccagauucgccuucgcccugagcagaggccugggcagcggcaucaucaccagcaacgcccccauggacgagugcgacgccaagugccagaccccccagggcgccaucaacagcagccugcccuuccagaacgugcaccccgugaccaucggcgagugccccaaguacgugagaagcgccaagcugagaauggugaccggccugagaaacauccccagcauccagagcagaggccuguucggcgccaucgccggcuucaucgagggcggcuggaccggcaugguggacggcugguacggcuaccaccaccagaacgagcagggcagcggcuacgccgccgaccagaagagcacccagaacgccaucaacggcaucaccaacaaggugaacagcgugaucgagaagaugaacacccaguucaccgccgugggcaaggaguucaacaagcuggagagaagaauggagaaccugaacaagaagguggacgacggcuuccuggacaucuggaccuacaacgccgagcugcuggugcugcuggagaacgagagaacccuggacuuccacgacagcaacgugaagaaccuguacgagaaggugaagagccagcugaagaacaacgccaaggagaucggcaacggcugcuucgaguucuaccacaagugcaacgacgagugcauggagagcgugaagaacggcaccuacgacuaccccaaguacagcgaggagagcaagcugaacagagagaagaucgacggcgugaagcuggagagcaugggcguguaccagauccuggccaucuacagcaccguggccagcagccuggugcugcuggugagccugggcgccaucagcuucuggaugugcagcaacggcagccugcagugcagaaucugcaucuga

SEQ ID NO: 162075 - RNA, 1698 nt, Artificial Sequence; identical to SEQ ID NO: 161974
  derived and/or modified CDS sequence (opt4) from hemagglutinin__InfluenzaA__ABW39806

SEQ ID NO: 162076 - RNA, 1698 nt, Artificial Sequence; identical to SEQ ID NO: 161981
  derived and/or modified CDS sequence (opt4) from hemagglutinin__InfluenzaA__ABW39817

SEQ ID NO: 162077 - RNA, 1698 nt, Artificial Sequence
  derived and/or modified CDS sequence (opt4) from hemagglutinin__InfluenzaA__ABW39828
augaaggugaagcugcuggugcugcugugcaccuucaccgccaccuacgccgacaccaucugcaucggcuaccacgccaacaacagcaccgacaccguggacaccgugcuggagaagaacgugaccgugacccacagcgugaaccugcuggaggacaaccacaacggcaagcugugccugcugaagggcaucgccccccugcagcugggcaacugcagcguggccggcuggauccugggcaaccccgagugcgagcugcugaucagcaaggagagcuggagcuacaucguggagaagcccaaccccgagaacggcaccugcuaccccggccacuucgccgacuacgaggagcugagagagcagcugagcagcgugagcagcuucgagagauucgagaucuuccccaaggagagcagcuggcccaaccacaccgugaccggcgugagcgccagcugcagccacaacggcgagagcagcuucuacaagaaccugcuguggcugaccggcaagaacggccuguaccccaaccugagcaagagcuacgccaacaacaaggagaaggaggugcuggugcuguggggcgugcaccacccccccaacaucggcgaccagaugacccuguaccacaaggagaacgccuacgugagcguggugagcagccacuacagcagaaaguucacccccgagaucgccaagagacccaaggugagagaccaggagggcagaaucaacuacuacuggacccugcuggagcccggcgacaccaucaucuucgaggccaacggcaaccugaucgcccccagauacgccuucgcccugagcagaggcuucggcagcggcaucaucaacagcaacgcccccauggacgagugcgacgccaagugccagaccccccagggcgccaucaacagcagccugcccuuccagaacgugcaccccgugaccaucggcgagugccccaaguacgugagaagcgccaagcugagaauggugaccggccugagaaacauccccagcauccagagcagaggccuguucggcgccaucgccggcuucaucgagggcggcuggaccggcaugguggacggcugguacggcuaccaccaccagaacgagcagggcagcggcuacgccgccgaccagaagagcacccagaacgccaucaacggcaucaccaacaaggugaacagcgugaucgagaagaugaacacccaguucaccgccgugggcaaggaguucaacaagcuggagagaagaauggagaaccugaacaagaagguggacgacggcuucaucgacguguggaccuacaacgccgagcugcuggugcugcuggagaacgagagaacccuggacuuccacgacagcaacgugaagaaccuguacgagaaggugaagaaccagcugaagaacaacgccaaggagaucggcaacggcugcuucgaguucuaccacaagugcaacgacgagugcauggagagcgugaagaacggcaccuacgacuaccccaaguacagcgaggagagcaagcugagcagagagaagaucgacggcgugaagcuggagagcaugggcguguaccagauccuggccaucuacagcaccguggccagcagccuggugcugcuggugagccugggcgccaucagcuucuggaugugcagcaacggcagccugcagugcagaaucugcaucuga

SEQ ID NO: 162078 - RNA, 1698 nt, Artificial Sequence
  derived and/or modified CDS sequence (opt4) from hemagglutinin__InfluenzaA__ABW39839
augaaggugaagcugcuggugcugcugugcaccuucaccgccaccuacgccgacaccaucugcaucggcuaccacgccaacaacagcaccgacaccguggacaccgugcuggagaagaacgugaccgugacccacagcgugaaccugcuggaggacagccacaacggcaagcugugccugcugaagggcaucgccccccugcagcugggcaacugcagcguggccggcuggauccugggcaaccccgagugcgagcugcugaucagcaaggagagcuggagcuacaucguggagacccccaaccccgagaacggcaccugcuaccccggcuacuucgccgacuacgaggagcugagagagcagcugagcagcgugagcagcuucgagagauucgagaucuuccccaaggagagcagcuggcccaaccacaccgugaccggcgugagcgccagcugcagccacaacggcaagagcagcuucuacagaaaccugcuguggcugaccggcaagaacggccuguaccccaaccugagcaagagcuacagcaacaacaaggagaaggaggugcuggugcuguggggcgugcaccacccccccaacaucggcgaccagagagcccuguaccacaccgagaacgccuacgugagcguggugagcagccacuacagcagaagauucacccccgagaucgccaagagacccaaggugagagaccaggagggcagaaucaacuacuacuggacccugcuggagcccggcgacaccaucaucuucgaggccaacggcaaccugaucgcccccagauucgccuucgcccugagcagaggcuucggcagcggcaucaucaccagcaacgcccccaugggcgagugcgacgccaagugccagaccccccagggcgccaucaacagcagccugcccuuccagaacgugcaccccgugaccaucggcgagugccccaaguacgugagaagcgccaagcugagaauggugaccggccugagaaacauccccagcauccagagcagaggccuguucggcgccaucgccggcuucaucgagggcggcuggaccggcaugguggacggcugguacggcuaccaccaccagaacgagcagggcagcggcuacgccgccgaccagaagagcacccagaacgccaucaacggcaucaccaacaaggugaacagcgugaucgagaagaugaacacccaguucaccgccgugggcaaggaguucaacaagcuggagagaagaauggagaaccugaacaagaagguggacgacggcuuccuggacaucuggaccuacaacgccgagcugcuggugcugcuggagaacgagagaacccuggacuuccacgacagcaacgugaagaaccuguacgagaaggugaagagccagcugaagaacaacgccaaggagaucggcaacggcugcuucgaguucuaccacaagugcaacgacgagugcauggagagcgugagaaacggcaccuacgacuaccccaaguacagcgaggagagcaagcugaacagagagaagaucgacggcgugaagcuggagagcaugggcguguaccagauccuggccaucuacagcaccguggccagcagccuggugcugcuggugagccugggcgccaucagcuucuggaugugcagcaacggcagccugcagugcagaaucugcaucuga

SEQ ID NO: 162079 - RNA, 1698 nt, Artificial Sequence
  derived and/or modified CDS sequence (opt4) from hemagglutinin__InfluenzaA__ABW39850
augaaggugaagcugcuggugcugcugugcaccuucaccgccaccaacgccgacaccaucugcaucggcuaccacgccaacaacagcaccgacaccguggacaccgugcuggagaagaacgugaccgugacccacagcgugaaccugcuggagaacagccacaacggcaagcugugccugcugaagggcaucgccccccugcagcugggcaacugcagcguggccggcuggauccugggcaaccccgagugcgagcugcugaucagcaaggagagcuggagcuacaucguggagaagcccaaccccgagaacggcaccugcuaccccggccacuucgccgacuacgaggagcugagagagcagcugagcagcgugagcagcuucgagagauucgagaucuuccccaaggagagcagcuggcccaaccacaccgugaccggcgugagcgccagcugcagccacaacggcgagagcagcuucuacagaaaccugcuguggcugaccggcaagaacggccuguaccccaaccugagcaagagcuacgccaacaacaaggagaaggaggugcuggugcuguggggcgugcaccacccccccaacaucggcgaccagaaggcccuguaccacaccgagaacgccuacgugagcguggugagcagccacuacagcagaaaguucacccccgagaucgccaagagacccaaggugagagaccaggagggcagaaucaacuacuacuggacccugcuggagcccggcgacaccaucaucuucgaggccaacggcaaccugaucgcccccagauacgccuucgcccugagcagaggcuucggcagcggcaucaucaacagcaacgcccccauggacaagugcgacgccaagugccagaccccccagggcgccaucaacagcagccugcccuuccagaacgugcaccccgugaccaucggcgagugccccaaguacgugagaagcgccaagcugagaauggugaccggccugagaaacauccccagcauccagagcagaggccuguucggcgccaucgccggcuucaucgagggcggcuggaccggcaugguggacggcugguacggcuaccaccaccagaacgagcagggcagcggcuacgccgccgaccagaagagcacccagaacgccaucaacggcaucaccaacaaggugaacagcgugaucgagaagaugaacacccaguucaccgccgugggcaaggaguucaacaagcuggagagaagaauggagaaccugaacaagaagguggacgacggcuucaucgacaucuggaccuacaacgccgagcugcuggugcugcuggagaacgagagaacccuggacuuccacgacagcaacgugaagaaccuguacgagaaggugaagggccagcugaagaacaacgccaaggagaucggcaacggcugcuucgaguucuaccacaagugcaacgacgagugcauggagagcgugaagaacggcaccuacgacuaccccaaguacagcgaggagagcaagcugaacagagagaagaucgacggcgugaagcuggagagcaugggcguguaccagauccuggccaucuacagcaccguggccagcagccuggugcugcuggugagccugggcgccaucagcuucuggaugugcagcaacggcagccugcagugcagaaucugcaucuga

SEQ ID NO: 162080 - RNA, 1698 nt, Artificial Sequence; identical to SEQ ID NO: 162005
  derived and/or modified CDS sequence (opt4) from hemagglutinin__InfluenzaA__ABW39861

SEQ ID NO: 162081 - RNA, 1701 nt, Artificial Sequence; identical to SEQ ID NO: 161988
  derived and/or modified CDS sequence (opt4) from hemagglutinin__InfluenzaA__ABW39872

SEQ ID NO: 162082 - RNA, 1698 nt, Artificial Sequence
  derived and/or modified CDS sequence (opt4) from hemagglutinin__InfluenzaA__ABW39883
augaaggugaagcugcuggugcugcugugcaccuucaccgccaccuacgccgacaccaucugcaucggcuaccacgccaacaacagcaccgacaccguggacaccgugcuggagaagaacgugaccgugacccacagcgugaaccugcuggaggacagccacaacggcaagcugugccugcugaagggcaucgccccccugcagcugggcaacugcagcguggccggcuggauccugggcaaccccgagugcgagcugcugaucagcaaggagagcuggagcuacaucguggagacccccaaccccgagaacggcaccugcuaccccggcuacuucgccgacuacgaggagcugagagagcagcugagcagcgugagcagcuucgagagauucgagaucuuccccaaggagagcagcuggcccaaccacaccgugaccggcgugagcgccagcugcagccacaacggcaagagcagcuucuacagaaaccugcuguggcugaccggcaagaacggccuguaccccaaccugagcaagagcuacgccaacaacaaggagaaggaggugcuggugcuguggggcgugcaccacccccacaacaucggcgaccagagagcccuguaccacaccgagaacgccuacgugagcguggugagcagccacuacagcagaagauucacccccgagaucgccaagagacccaaggugagagaccaggagggcagaaucaacuacuacuggacccugcuggagcccggcgacaccaucaucuucgaggccaacggcaaccugaucgcccccagauucgccuucgcccugagcagaggcuucggcagcggcaucaucaccagcaacgcccccauggacgagugcgacgccaagugccagaccccccagggcgccaucaacagcagccugcccuuccagaacgugcaccccgugaccaucggcgagugccccaaguacgugagaagcaccaagcugagaauggugaccggccugagaaacauccccagcauccagagcagaggccuguucggcgccaucgccggcuucaucgagggcggcuggaccggcaugguggacggcugguacggcuaccaccaccagaacgagcagggcagcggcuacgccgccgaccagaagagcacccagaacgccaucaacggcaucaccaacaaggugaacagcgugaucgagaagaugaacacccaguucaccgccgugggcaaggaguucaacaagcuggagagaagaauggagaaccugaacaagaagguggacgacggcuuccuggacaucuggaccuacaacgccgagcugcuggugcugcuggagaacgagagaacccuggacuuccacgacagcaacgugaagaaccuguacgagaaggugaagagccagcugaagaacaacgccaaggagaucggcaacggcugcuucgaguucuaccacaagugcaacgacgagugcauggagagcgugaagaacggcaccuacgacuaccccaaguacagcgaggagagcaagcugaacagagagaagaucgacggcgugaagcuggagagcaugggcguguaccagauccuggccaucuacagcaccguggccagcagccuggugcugcuggugagccugggcgccaucagcuucuggaugugcagcaacggcagccugcagugcagaaucugcaucuga

SEQ ID NO: 162083 - RNA, 1698 nt, Artificial Sequence; identical to SEQ ID NO: 162015
  derived and/or modified CDS sequence (opt4) from hemagglutinin__InfluenzaA__ABW39894

SEQ ID NO: 162084 - RNA, 1698 nt, Artificial Sequence; identical to SEQ ID NO: 161970
  derived and/or modified CDS sequence (opt4) from hemagglutinin__InfluenzaA__ABW39905

SEQ ID NO: 162085 - RNA, 1698 nt, Artificial Sequence; identical to SEQ ID NO: 161974
  derived and/or modified CDS sequence (opt4) from hemagglutinin__InfluenzaA__ABW39927

SEQ ID NO: 162086 - RNA, 1701 nt, Artificial Sequence
  derived and/or modified CDS sequence (opt4) from hemagglutinin__InfluenzaA__ABW39938
augaagaccaucaucgcccugagcuacauccugugccugguguucgcccagaagauccccggcaacgacaacagcaccgccacccugugccugggccaccacgccgugcccaacggcaccaucgugaagaccaucaccaacgaccagaucgaggugaccaacgccaccgagcuggugcagagcagcagcaccggcgagaucugcgacagcccccaccagauccuggacggcgagaacugcacccugaucgacgcccugcugggcgacccccagugcgacggcuuccagaacaagaagugggaccuguucguggagagaagcaaggccuacagcaacugcuaccccuacgacgugcccgacuacgccagccugagaagccugguggccagcagcggcacccuggaguucaacaacgagagcuucaacuggaccggcgugacccagaacggcaccagcagcgccugcaucagaagaagcaacaacagcuucuucagcagacugaacuggcugacccaccugaaguucaaguaccccgcccugaacgugaccaugcccaacaacgagaaguucgacaagcuguacaucuggggcgugcaccaccccggcaccgacaacgaccagaucuuccuguacgcccaggccagcggcagaaucaccgugagcaccaagagaagccagcagaccgugauccccaacaucggcagcagacccagagugagaaacauccccagcagaaucagcaucuacuggaccaucgugaagcccggcgacauccugcugaucaacagcaccggcaaccugaucgcccccagaggcuacuucaagaucagaagcggcaagagcagcaucaugagaagcgacgcccccaucggcaagugcaacagcgagugcaucacccccaacggcagcauccccaacgacaagcccuuccagaacgugaacagaaucaccuacggcgccugccccagauacgugaagcagaacacccugaagcuggccaccggcaugagaaacgugcccgagaagcagaccagaggcaucuucggcgccaucgccggcuucaucgagaacggcugggagggcaugguggacggcugguacggcuucagacaccagaacagcgagggcaucggccaggccgccgaccugaagagcacccaggccgccaucgaccagaucaacggcaagcugaacagacugaucggcaagaccaacgagaaguuccaccagaucgagaaggaguucagcgagguggagggcagaauccaggaccuggagaaguacguggaggacaccaagaucgaccuguggagcuacaacgccgagcugcugguggcccuggagaaccagcacaccaucgaccugaccgacagcgagaugaacaagcuguucgagaagaccaagaagcagcugagagagaacgccgaggacaugggcaacggcugcuucaagaucuaccacaagugcgacaacgccugcaucggcagcaucagaaacggcaccuacgaccacgacgccuacagagacgaggcccugaacaacagauuccagaucaagggcguggagcugaagagcggcuacaaggacuggauccuguggaucagcuucgccaucagcugcuuccugcugugcguggcccugcugggcuucaucaugugggccugccagaagggcaacaucagaugcaacaucugcaucuga

SEQ ID NO: 162087 - RNA, 1698 nt, Artificial Sequence; identical to SEQ ID NO: 161974
  derived and/or modified CDS sequence (opt4) from hemagglutinin__InfluenzaA__ABW39949

SEQ ID NO: 162088 - RNA, 1698 nt, Artificial Sequence; identical to SEQ ID NO: 162015
  derived and/or modified CDS sequence (opt4) from hemagglutinin__InfluenzaA__ABW39960

SEQ ID NO: 162089 - RNA, 1698 nt, Artificial Sequence; identical to SEQ ID NO: 161970
  derived and/or modified CDS sequence (opt4) from hemagglutinin__InfluenzaA__ABW39982

SEQ ID NO: 162090 - RNA, 1698 nt, Artificial Sequence; identical to SEQ ID NO: 161990
  derived and/or modified CDS sequence (opt4) from hemagglutinin__InfluenzaA__ABW39993

SEQ ID NO: 162091 - RNA, 1698 nt, Artificial Sequence; identical to SEQ ID NO: 161970
  derived and/or modified CDS sequence (opt4) from hemagglutinin__InfluenzaA__ABW40004

SEQ ID NO: 162092 - RNA, 1698 nt, Artificial Sequence; identical to SEQ ID NO: 162016
  derived and/or modified CDS sequence (opt4) from hemagglutinin__InfluenzaA__ABW40015

SEQ ID NO: 162093 - RNA, 1701 nt, Artificial Sequence; identical to SEQ ID NO: 162047
  derived and/or modified CDS sequence (opt4) from hemagglutinin__InfluenzaA__ABW40026

SEQ ID NO: 162094 - RNA, 1698 nt, Artificial Sequence; identical to SEQ ID NO: 161970
  derived and/or modified CDS sequence (opt4) from hemagglutinin__InfluenzaA__ABW40037

SEQ ID NO: 162095 - RNA, 1698 nt, Artificial Sequence
  derived and/or modified CDS sequence (opt4) from hemagglutinin__InfluenzaA__ABW40048
augaaggugaagcugcuggugcugcugugcaccuucaccgccaccuacgccgacaccaucugcaucggcuaccacgccaacaacagcaccgacaccguggacaccgugcuggagaagaacgugaccgugacccacagcgugaaccugcuggaggacagccacaacggcaagcugugccugcugaagggcaucgccccccugcagcugggcaacugcagcguggccggcuggauccugggcaaccccgagugcgagcugcugaucagcaaggagagcuggagcuacaucguggagacccccaaccccgagaacggcaccugcuaccccggcuacuucgccgacuacgaggagcugagagagcagcugagcagcgugagcagcuucgagagauucgagaucuuccccaaggagagcagcuggcccaaccacaccgugaccggcgugagcgccagcugcagccacaacggcaagagcagcuucuacagaaaccugcuguggcugaccggcaagaacggccuguaccccaaccugagcaagagcuacgccaacaacaaggagaaggaggugcuggugcuguggggcgugcaccacccccccaacaucggcgaccagaaggcccuguaccacaccgagaacgccuacgugagcguggugagcagccacuacagcagaagauucacccccgagaucgccaagagacccaaggugagagaccaggagggcagaaucaacuacuacuggacccugcuggagcccggcgacaccaucaucuucgaggccaacggcaaccugaucgcccccagauucgccuucgcccugagcagaggcuucggcagcggcaucaucaccagcaacgcccccauggacgagugcgacgccaagugccagaccccccagggcgccaucaacagcagccugcccuuccagaacgugcaccccgugaccaucggcgagugccccaaguacgugagaagcaccaagcugagaauggugaccggccugagaaacauccccagcauccagagcagaggccuguucggcgccaucgccggcuucaucgagggcggcuggaccggcaugguggacggcugguacggcuaccaccaccagaacgagaagggcagcggcuacgccgccgaccagaagagcacccagaacgccaucaacggcaucaccaacaaggugaacagcgugaucgagaagaugaacacccaguucaccgccgugggcaaggaguucaacaagcuggagagaagaauggagaaccugaacaagaagguggacgacggcuuccuggacaucuggaccuacaacgccgagcugcuggugcugcuggagaacgagagaacccuggacuuccacgacagcaacgugaagaaccuguacgagaaggugaagagccagcugaagaacaacgccaaggagaucggcaacggcugcuucgaguucuaccacaagugcaacgacgagugcauggagagcgugaagaacggcaccuacgacuaccccaaguacagcgaggagagcaagcugaacagagagaagaucgacggcgugaagcuggagagcaugggcguguaccagauccuggccaucuacagcaccguggccagcagccuggugcugcuggugagccugggcgccaucagcuucuggaugugcagcaacggcagccugcagugcagaaucugcaucuga

SEQ ID NO: 162096 - RNA, 1698 nt, Artificial Sequence; identical to SEQ ID NO: 161974
  derived and/or modified CDS sequence (opt4) from hemagglutinin__InfluenzaA__ABW40059

SEQ ID NO: 162097 - RNA, 1698 nt, Artificial Sequence
  derived and/or modified CDS sequence (opt4) from hemagglutinin__InfluenzaA__ABW40070
augaaggugaagcugcuggugcugcugugcaccuucaccgccaccuacgccgacaccaucugcaucggcuaccacgccaacaacagcaccgacaccguggacaccgugcuggagaagaacgugaccgugacccacagcgugaaccugcuggagaacagccacaacggcaagcugugccugcugaagggcaucgccccccugcagcugggcaacugcagcguggccggcuggauccugggcaaccccgagugcgagcugcugaucagcaaggagagcuggagcuacaucguggagaagcccaaccccgagaacggcaccugcuaccccggccacuucgccgacuacgaggagcugagagagcagcugagcagcgugagcagcuucaagagauucgagaucuuccccaaggagagcagcuggcccaaccacaccgugaccggcgugagcgccagcugcagccacaacggcgagagcagcuucuacagaaaccugcuguggcugaccggcaagaacggccuguaccccaaccugagcaagagcuacgccaacaacaaggagaaggaggugcuggugcuguggggcgugcaccacccccccaacaucggcgaccagaaggcccuguaccacaccgagaacgccuacgugagcguggugagcagccacuacagcagaaaguucacccccgagaucgccaagagacccaaggugagagaccaggagggcagaaucaacuacuacuggacccugcuggagcccggcgacaccaucaucuucgaggccaacggcaaccugaucgcccccagauacgccuucgcccugagcagaggcuucggcagcggcaucaucaacagcaacgcccccauggacaagugcgacagcaagugccagaccccccagggcgccaucaacagcagccugcccuuccagaacgugcaccccgugaccaucggcgagugccccaaguacgugagaagcgccaagcugagaauggugaccggccugagaaacauccccagcauccagagcagaggccuguucggcgccaucgccggcuucaucgagggcggcuggaccggcaugguggacggcugguacggcuaccaccaccagaacgagcagggcagcggcuacgccgccgaccagaagagcacccagaacgccaucaacggcaucaccaacaaggugaacagcgugaucgagaagaugaacacccaguucaccgccgugggcaaggaguucaacaagcuggagagaagaauggagaaccugaacaagaagguggacgacggcuucaucgacaucuggaccuacaacgccgagcugcuggugcugcuggagaacgagagaacccuggacuuccacgacagcaacgugaagaaccuguacgagaaggugaagagccagcugaagaacaacgccaaggagaucggcaacggcugcuucgaguucuaccacaagugcaacgacgagugcauggagagcgugaagaacggcaccuacgacuaccccaaguacagcgaggagagcaagcugaacagagagaagaucgacggcgugaagcuggagagcaugggcguguaccagauccuggccaucuacagcaccguggccagcagccuggugcugcuggugagccugggcgccaucagcuucuggaugugcagcaacggcagccugcagugcagaaucugcaucuga

SEQ ID NO: 162098 - RNA, 1701 nt, Artificial Sequence; identical to SEQ ID NO: 161988
  derived and/or modified CDS sequence (opt4) from hemagglutinin__InfluenzaA__ABW40081

SEQ ID NO: 162099 - RNA, 1698 nt, Artificial Sequence
  derived and/or modified CDS sequence (opt4) from hemagglutinin__InfluenzaA__ABW40092
augaaggugaagcugcugauccugcugugcaccuucaccgccaccuacgccgacaccaucugcaucggcuaccacgccaacaacagcaccgacaccguggacaccgugcuggagaagaacgugaccgugacccacagcgugaaccugcuggaggacagccacaacggcaagcugugccugcugaagggcaucgccccccugcagcugggcaacugcagcguggccggcuggauccugggcaaccccgagugcgagcugcugaucagcaaggagagcuggagcuacaucguggagacccccaaccccgagaacggcaccugcuaccccggcuacuucgccgacuacgaggagcugagagagcagcugagcagcgugagcagcuucaagagauucgagaucuuccccaaggagagcagcuggcccaaccacaccgugaccggcgugagcgccagcugcagccacaacggcaagagcagcuucuacagaaaccugcuguggcugaccggcaagaacggccuguaccccaaccugagcaagagcuacgccaacaacaaggagaaggaggugcuggugcuguggggcgugcaccacccccccaacaucggcgaccagagagcccuguaccacaccgagaacgccuacgugagcguggugagcagccacuacagcagaagauucacccccgagaucgccaagagacccaaggugagagaccaggagggcagaaucaacuacuacuggacccugcuggagcccggcgacaccaucaucuucgaggccaacggcaaccugaucgcccccagauucgccuucgcccugagcagaggcuucggcagcggcaucaucaccagcaacgcccccauggacgagugcgacgccaagugccagaccccccagggcgccaucaacagcagccugcccuuccagaacgugcaccccgugaccaucggcgagugccccaaguacgugagaagcaccaagcugagaauggugaccggccugagaaacauccccagcauccagagcagaggccuguucggcgccaucgccggcuucaucgagggcggcuggaccggcaugguggacggcugguacggcuaccaccaccagaacgagcagggcagcggcuacgccgccgaccagaagagcacccagaacgccaucaacggcaucaccaacaaggugaacagcgugaucgagaagaugaacacccaguucaccgccgugggcaaggaguucaacaagcuggagagaagaauggagaaccugaacaagaagguggacgacggcuuccuggacaucuggaccuacaacgccgagcugcuggugcugcuggagaacgagagaacccuggacuuccacgacagcaacgugaagaaccuguacgagaaggugaagagccagcugaagaacaacgccaaggagaucggcaacggcugcuucgaguucuaccacaagugcaacgacgagugcauggagagcgugaagaacggcaccuacgacuaccccaaguacagcgaggagagcaagcugaacagagagaagaucgacggcgugaagcuggagagcaugggcguguaccagauccuggccaucuacagcaccguggccagcagccuggugcugcuggugagccugggcgccaucagcuucuggaugugcagcaacggcagccugcagugcagaaucugcaucuga

SEQ ID NO: 162100 - RNA, 1698 nt, Artificial Sequence; identical to SEQ ID NO: 162017
  derived and/or modified CDS sequence (opt4) from hemagglutinin__InfluenzaA__ABW40103

SEQ ID NO: 162101 - RNA, 1698 nt, Artificial Sequence
  derived and/or modified CDS sequence (opt4) from hemagglutinin__InfluenzaA__ABW40114
augaaggugaagcugcugauccugcugugcaccuucaccgccaccuacgccgacaccaucugcaucggcuaccacgccaacaacagcaccgacaccguggacaccgugcuggagaagaacgugaccgugacccacagcgugaaccugcuggaggacagccacaacggcaagcugugccugcugaagggcaucgccccccugcagcugggcaacugcagcguggccggcuggauccugggcaaccccgagugcgagcugcugaucagcaaggagagcuggagcuacaucguggagacccccaaccccgagaacggcaccugcuaccccggcuacuucgccgacuacgaggagcugagagagcagcugagcagcgugagcagcuucgagagauucgagaucuuccccaaggagagcagcuggcccaaccacaccgugaccggcgugagcaccagcugcagccacaacggcaagagcagcuucuacagaaaccugcuguggcugaccggcaagaacggccuguaccccaaccugagcaagagcuacgccaacaacaaggagaaggaggugcuggugcuguggggcgugcaccacccccccaacaucggcaaccagagagcccuguaccacaccgagaacgccuacgugagcguggugagcagccacuacagcagaagauucacccccgagaucgccaagagacccaaggugagagaccaggagggcagaaucaacuacuacuggacccugcuggagcccggcgacaccaucaucuucgaggccaacggcaaccugaucgcccccagauucgccuucgcccugagcagaggcuucggcagcggcaucaucaccagcaacgcccccauggacgagugcgacgccaagugccagaccccccagggcgccaucaacagcagccugcccuuccagaacgugcaccccgugaccaucggcgagugccccaaguacgugagaagcaccaagcugagaauggugaccggccugagaaacauccccagcauccagagcagaggccuguucggcgccaucgccggcuucaucgagggcggcuggaccggcaugguggacggcugguacggcuaccaccaccagaacgagcagggcagcggcuacgccgccgaccagaagagcacccagaacgccaucaacggcaucaccaacaaggugaacagcgugaucgagaagaugaacacccaguucaccgccgugggcaaggaguucaacaagcuggagagaagaauggagaaccugaacaagaagguggacgacggcuuccuggacaucuggaccuacaacgccgagcugcuggugcugcuggagaacgagagaacccuggacuuccacgacagcaacgugaagaaccuguacgagaaggugaagagccagcugaagaacaacgccaaggagaucggcaacggcugcuucgaguucuaccacaagugcaacgacgagugcauggagagcgugaagaacggcaccuacgacuaccccaaguacagcgaggagagcaagcugaacagagagaagaucgacggcgugaagcuggagagcaugggcguguaccagauccuggccaucuacagcaccguggccagcagccuggugcugcuggugagccugggcgccaucagcuucuggaugugcagcaacggcagccugcagugcagaaucugcaucuga

SEQ ID NO: 162102 - RNA, 1698 nt, Artificial Sequence; identical to SEQ ID NO: 161970
  derived and/or modified CDS sequence (opt4) from hemagglutinin__InfluenzaA__ABW40125

SEQ ID NO: 162103 - RNA, 1701 nt, Artificial Sequence; identical to SEQ ID NO: 161988
  derived and/or modified CDS sequence (opt4) from hemagglutinin__InfluenzaA__ABW40136

SEQ ID NO: 162104 - RNA, 1698 nt, Artificial Sequence; identical to SEQ ID NO: 162005
  derived and/or modified CDS sequence (opt4) from hemagglutinin__InfluenzaA__ABW40147

SEQ ID NO: 162105 - RNA, 1698 nt, Artificial Sequence; identical to SEQ ID NO: 161974
  derived and/or modified CDS sequence (opt4) from hemagglutinin__InfluenzaA__ABW40158

SEQ ID NO: 162106 - RNA, 1698 nt, Artificial Sequence; identical to SEQ ID NO: 161974
  derived and/or modified CDS sequence (opt4) from hemagglutinin__InfluenzaA__ABW40180

SEQ ID NO: 162107 - RNA, 1701 nt, Artificial Sequence; identical to SEQ ID NO: 161988
  derived and/or modified CDS sequence (opt4) from hemagglutinin__InfluenzaA__ABW40191

SEQ ID NO: 162108 - RNA, 1698 nt, Artificial Sequence; identical to SEQ ID NO: 161990
  derived and/or modified CDS sequence (opt4) from hemagglutinin__InfluenzaA__ABW40202

SEQ ID NO: 162109 - RNA, 1698 nt, Artificial Sequence; identical to SEQ ID NO: 161970
  derived and/or modified CDS sequence (opt4) from hemagglutinin__InfluenzaA__ABW40213

SEQ ID NO: 162110 - RNA, 1698 nt, Artificial Sequence; identical to SEQ ID NO: 161970
  derived and/or modified CDS sequence (opt4) from hemagglutinin__InfluenzaA__ABW40224

SEQ ID NO: 162111 - RNA, 1698 nt, Artificial Sequence; identical to SEQ ID NO: 161974
  derived and/or modified CDS sequence (opt4) from hemagglutinin__InfluenzaA__ABW40235

SEQ ID NO: 162112 - RNA, 1701 nt, Artificial Sequence
  derived and/or modified CDS sequence (opt4) from hemagglutinin__InfluenzaA__ABW40246
augaagaccaucaucgcccugagcuacauccugugccugguguucgcccagaagcugcccggcaacgacaacagcaccgccacccugugccugggccaccacgccgugcccaacggcaccaucgugaagaccaucaccaacgaccagaucgaggugaccaacgccaccgagcuggugcagagcagcagcaccggcgagaucugcgacagcccccaccagauccuggacggcgagaacugcacccugaucgacgcccugcugggcgacccccagugcgacggcuuccagaacaagaagugggaccuguucguggagagaagcaaggccuacagcaacugcuaccccuacgacgugcccgacuacgccagccugagaagccugguggccagcagcggcacccuggaguucaacaacgagagcuucaacuggaccggcgugacccagaacggcaccagcagcgccugcaucagaagaagcaacaacagcuucuucagcagacugaacuggcugacccaccugaaguucaaguaccccgcccugaacgugaccaugcccaacaacgagaaguucgacaagcuguacaucuggggcgugcaccaccccggcaccgacaacgaccagguguuccuguacgcccaggccagcggcagaaucaccgugagcaccaagagaagccagcagaccgugauccccaacaucggcagcagacccagagugagaaacauccccagcagaaucagcaucuacuggaccaucgugaagcccggcgacauccugcugaucaacagcaccggcaaccugaucgcccccagaggcuacuucagaaucagaagcggcaagagcagcaucaugagaagcgacgcccccaucggcaagugcaacagcgagugcaucacccccaacggcagcauccccaacgacaagcccuuccagaacgugaacagaaucaccuacggcgccugccccagauacgugaagcagaacacccugaagcuggccaccggcaugagaaacgugcccgagaagcagaccagaggcaucuucggcgccaucgccggcuucaucgagaacggcugggagggcaugguggacggcugguacggcuucagacaccagaacagcgagggcaucggccaggccgccgaccugaagagcacccaggccgccaucgaccagaucaacggcaagcugaacagacugaucggcaagaccaacgagaaguuccaccagaucgagaaggaguucagcgagguggagggcagaauccaggaccuggagaaguacguggaggacaccaagaucgaccuguggagcuacaacgccgagcugcugguggcccuggagaaccagcacaccaucgaccugaccgacagcgagaugaacaagcuguucgagaagaccaagaagcagcugagagagaacgccgaggacaugggcaacggcugcuucaagaucuaccacaagugcgacaacgccugcaucggcagcaucagaaacggcaccuacgaccacgacguguacagagacgaggcccugaacaacagauuccagaucaagggcguggagcugaagagcggcuacaaggacuggauccuguggaucagcuucgccaucagcugcuuccugcugugcguggcccugcugggcuucaucaugugggccugccagaagggcaacaucagaugcaacaucugcaucuga

SEQ ID NO: 162113 - RNA, 1698 nt, Artificial Sequence
  derived and/or modified CDS sequence (opt4) from hemagglutinin__InfluenzaA__ABW40257
augaaggugaagcugcugauccugcugugcaccuucaccgccaccuacgccgacaccaucugcaucggcuaccacgccaacaacagcaccgacaccguggacaccgugcuggagaagaacgugaccgugacccacagcgugaaccugcuggaggacagccacaacggcaagcugugccugcugaagggcaucgccccccugcagcugggcaacugcagcguggccggcuggauccugggcaaccccgagugcgagcugcugaucagcaaggagagcuggagcuacaucguggagacccccaaccccgagaacggcaccugcuaccccggcuacuucgccgacuacgaggagcugagagagcagcugagcagcgugagcagcuucgagagauucgagaucuuccccaaggagagcagcuggcccaaccacaccgugaccggcgugagcgccagcugcagccacaacggcaagagcagcuucuacagaaaccugcuguggcugaccggcaagaacggccuguaccccaaccugagcaagagcuacgccaacaacaaggagaaggaggugcuggugcuguggggcgugcaccacccccccaacaucggcgaccagagagcccuguaccacaccgagaacgccuacgugagcguggugagcagccacuacagcagaagauucacccccgagaucgccaagagacccaaggugagagaccaggagggcagaaucaacuacuacuggacccugcuggagcccggcgacaccaucaucuucgaggccaacggcaaccugaucgcccccagauucgccuucgcccugagcagaggcuucggcagcggcaucaucaccagcaacgcccccauggacgagugcgacgccaagugccagaccccccagggcgccaucaacagcagccugcccuuccagaacgugcaccccgugaccaucggcgagugccccaaguacgugagaagcaccaagcugagaauggugaccggccugagaaacauccccagcauccagagcagaggccuguucggcgccaucgccggcuucaucgagggcggcuggaccggcaugguggacggcugguacggcuaccaccaccagaacgagcagggcagcggcuacgccgccgaccagaagagcacccagaacgccaucaacggcaucaccaacaaggugaacagcaucaucgagaagaugaacacccaguucaccgccgugggcaaggaguucaacaagcuggagagaagaauggagaaccugaacaagaagguggacgacggcuuccuggacaucuggaccuacaacgccgagcugcuggugcugcuggagaacgagagaacccuggacuuccacgacagcaacgugaagaaccuguacgagaaggugaagagccagcugaagaacaacgccaaggagaucggcaacggcugcuucgaguucuaccacaagugcaacgacgagugcauggagagcgugaagaacggcaccuacgacuaccccaaguacagcgaggagagcaagcugaacagagagaagaucgacggcgugaagcuggagagcaugggcguguaccagauccuggccaucuacagcaccguggccagcagccuggugcugcuggugagccugggcgccaucagcuucuggaugugcagcaacggcagccugcagugcagaaucugcaucuga

SEQ ID NO: 162114 - RNA, 1701 nt, Artificial Sequence; identical to SEQ ID NO: 162047
  derived and/or modified CDS sequence (opt4) from hemagglutinin__InfluenzaA__ABW40268

SEQ ID NO: 162115 - RNA, 1698 nt, Artificial Sequence
  derived and/or modified CDS sequence (opt4) from hemagglutinin__InfluenzaA__ABW40312
augaaggugaagcugcuggugcugcugugcaccuucaccgccaccuacgccgacaccaucugcaucggcuaccacgccaacaacagcaccgacaccguggacaccgugcuggagaagaacgugaccgugacccacagcgugaaccugcuggaggacagccacaacggcaagcugugccugcugaagggcaucgccccccugcagcugggcaacugcagcguggccggcuggauccugggcaaccccgagugcgagcugcugaucagcaaggagagcuggagcuacaucguggagacccccaaccccgagaacggcaccugcuaccccggcuacuucgccgacuacgaggagcugagagagcagcugagcagcgugagcagcuucgagagauucgagaucuuccccaaggagagcagcuggcccaaccacaccgugaccggcgugagcgccagcugcagccacaacggcagaagcagcuucuacagaaaccugcuguggcugaccggcaagaacggccuguaccccaaccugagcaagagcuacgccaacaacaaggagaaggaggugcuggugcuguggggcgugcaccacccccccaacaucggcgaccagagagcccuguaccacaccgagaacgccuacgugagcguggugagcagccacuacagcagaagauucacccccgagaucgccaagagacccaaggugagagaccaggagggcagaaucaacuacuacuggacccugcuggagcccggcgacaccaucaucuucgaggccaacggcaaccugaucgcccccagauucgccuucgcccugagcagaggcuucggcagcggcaucaucaccagcaacgcccccauggacgagugcgacgccaagugccagaccccccagggcgccaucaacagcagccugcccuuccagaacgugcaccccgugaccaucggcgagugccccaaguacgugagaagcaccaagcugagaauggugaccggccugagaaacauccccagcauccagagcagaggccuguucggcgccaucgccggcuucaucgagggcggcuggaccggcaugguggacggcugguacggcuaccaccaccagaacgagcagggcagcggcuacgccgccgaccagaagagcacccagaacgccaucaacggcaucaccaacaaggugaacagcgugaucgagaagaugaacacccaguucaccgccgugggcaaggaguucaacaagcuggagagaagaauggagaaccugaacaagaagguggacgacggcuuccuggacaucuggaccuacaacgccgagcugcuggugcugcuggagaacgagagaacccuggacuuccacgacagcaacgugaagaaccuguacgagaaggugaagagccagcugaagaacaacgccaaggagaucggcaacggcugcuucgaguucuaccacaagugcaacgacgagugcauggagagcgugaagaacggcaccuacgacuaccccaaguacagcgaggagagcaagcugaacagagagaagaucgacggcgugaagcuggagagcaugggcguguaccagauccuggccaucuacagcaccguggccagcagccuggugcugcuggugagccugggcgccaucagcuucuggaugugcagcaacggcagccugcagugcagaaucugcaucuga

SEQ ID NO: 162116 - RNA, 1701 nt, Artificial Sequence; identical to SEQ ID NO: 161988
  derived and/or modified CDS sequence (opt4) from hemagglutinin__InfluenzaA__ABW40323

SEQ ID NO: 162117 - RNA, 1698 nt, Artificial Sequence; identical to SEQ ID NO: 162016
  derived and/or modified CDS sequence (opt4) from hemagglutinin__InfluenzaA__ABW40334

SEQ ID NO: 162118 - RNA, 1698 nt, Artificial Sequence; identical to SEQ ID NO: 162016
  derived and/or modified CDS sequence (opt4) from hemagglutinin__InfluenzaA__ABW40345

SEQ ID NO: 162119 - RNA, 1698 nt, Artificial Sequence
  derived and/or modified CDS sequence (opt4) from hemagglutinin__InfluenzaA__ABW40356
augaaggugaagcugcuggugcugcugugcaccuucaccgccaccuacgccgacaccaucugcaucggcuaccacgccaacaacagcaccgacaccguggacaccgugcuggagaagaacgugaccgugacccacagcgugaaccugcuggaggacagccacaacggcaagcugugccugcugaagggcaucgccccccugcagcugggcaacugcagcguggccggcuggauccugggcaaccccgagugcgagcugcugaucagcaaggagagcuggagcuacaucguggagacccccaaccccgagaacggcaccugcuaccccggcuacuucgccgacuacgaggagcugagagagcagcugagcagcgugagcagcuucgagagauucgagaucuuccccaaggagagcagcuggcccaaccacaccgugaccggcgugagcgccagcugcagccacaacggcaagagcagcuucuacagaaaccugcuguggcugaccggcaagaacggccuguaccccaaccugagcaagagcuacgccaacaacaaggagaaggaggugcuggugauguggggcgugcaccacccccccaacaucggcgaccagagagcccuguaccacaccgagaacgccuacgugagcguggugagcagccacuacagcagaagauucacccccgagaucgccaagagacccaaggugagagaccaggagggcagaaucaacuacuacuggacccugcuggagcccggcgacaccaucaucuucgaggccaacggcaaccugaucgcccccagauucgccuucgcccugagcagaggcuucggcagcggcaucaucaccagcaacgcccccaugggcgagugcgacgccaagugccagaccccccagggcgccaucaacagcagccugcccuuccagaacgugcaccccgugaccaucggcgagugccccaaguacgugagaagcgccaagcugagaauggugaccggccugagaaacauccccagcauccagagcagaggccuguucggcgccaucgccggcuucaucgagggcggcuggaccggcaugguggacggcugguacggcuaccaccaccagaacgagcagggcagcggcuacgccgccgaccagaagagcacccagaacgccaucaacggcaucaccaacaaggugaacagcgugaucgagaagaugaacacccaguucaccgccgugggcaaggaguucaacaagcuggagagaagaauggagaaccugaacaagaagguggacgacggcuuccuggacaucuggaccuacaacgccgagcugcuggugcugcuggagaacgagagaacccuggacuuccacgacagcaacgugaagaaccuguacgagaaggugaagagccagcugaagaacaacgccaaggagaucggcaacggcugcuucgaguucuaccacaagugcaacgacgagugcauggagagcgugaagaacggcaccuacgacuaccccaaguacagcgaggagagcaagcugaacagagagaagaucgacggcgugaagcuggagagcaugggcguguaccagauccuggccaucuacagcaccguggccagcagccuggugcugcuggugagccugggcgccaucagcuucuggaugugcagcaacggcagccugcagugcagaaucugcaucuga

SEQ ID NO: 162120 - RNA, 1698 nt, Artificial Sequence; identical to SEQ ID NO: 161974
  derived and/or modified CDS sequence (opt4) from hemagglutinin__InfluenzaA__ABW40367

SEQ ID NO: 162121 - RNA, 1701 nt, Artificial Sequence; identical to SEQ ID NO: 161988
  derived and/or modified CDS sequence (opt4) from hemagglutinin__InfluenzaA__ABW40378

SEQ ID NO: 162122 - RNA, 1698 nt, Artificial Sequence; identical to SEQ ID NO: 161974
  derived and/or modified CDS sequence (opt4) from hemagglutinin__InfluenzaA__ABW40389

SEQ ID NO: 162123 - RNA, 1698 nt, Artificial Sequence; identical to SEQ ID NO: 161970
  derived and/or modified CDS sequence (opt4) from hemagglutinin__InfluenzaA__ABW40400

SEQ ID NO: 162124 - RNA, 1698 nt, Artificial Sequence; identical to SEQ ID NO: 161970
  derived and/or modified CDS sequence (opt4) from hemagglutinin__InfluenzaA__ABW40411

SEQ ID NO: 162125 - RNA, 1698 nt, Artificial Sequence; identical to SEQ ID NO: 161970
  derived and/or modified CDS sequence (opt4) from hemagglutinin__InfluenzaA__ABW40422

SEQ ID NO: 162126 - RNA, 1698 nt, Artificial Sequence; identical to SEQ ID NO: 162016
  derived and/or modified CDS sequence (opt4) from hemagglutinin__InfluenzaA__ABW40433

SEQ ID NO: 162127 - RNA, 1698 nt, Artificial Sequence; identical to SEQ ID NO: 161990
  derived and/or modified CDS sequence (opt4) from hemagglutinin__InfluenzaA__ABW40444

SEQ ID NO: 162128 - RNA, 1698 nt, Artificial Sequence; identical to SEQ ID NO: 162007
  derived and/or modified CDS sequence (opt4) from hemagglutinin__InfluenzaA__ABW40455

SEQ ID NO: 162129 - RNA, 1698 nt, Artificial Sequence; identical to SEQ ID NO: 161974
  derived and/or modified CDS sequence (opt4) from hemagglutinin__InfluenzaA__ABW40466

SEQ ID NO: 162130 - RNA, 1698 nt, Artificial Sequence; identical to SEQ ID NO: 161974
  derived and/or modified CDS sequence (opt4) from hemagglutinin__InfluenzaA__ABW40477

SEQ ID NO: 162131 - RNA, 1698 nt, Artificial Sequence; identical to SEQ ID NO: 161970
  derived and/or modified CDS sequence (opt4) from hemagglutinin__InfluenzaA__ABW40488

SEQ ID NO: 162132 - RNA, 1698 nt, Artificial Sequence; identical to SEQ ID NO: 161974
  derived and/or modified CDS sequence (opt4) from hemagglutinin__InfluenzaA__ABW40499

SEQ ID NO: 162133 - RNA, 1698 nt, Artificial Sequence; identical to SEQ ID NO: 162016
  derived and/or modified CDS sequence (opt4) from hemagglutinin__InfluenzaA__ABW40510

SEQ ID NO: 162134 - RNA, 1698 nt, Artificial Sequence; identical to SEQ ID NO: 161970
  derived and/or modified CDS sequence (opt4) from hemagglutinin__InfluenzaA__ABW40521

SEQ ID NO: 162135 - RNA, 1698 nt, Artificial Sequence; identical to SEQ ID NO: 161974
  derived and/or modified CDS sequence (opt4) from hemagglutinin__InfluenzaA__ABW40532

SEQ ID NO: 162136 - RNA, 1698 nt, Artificial Sequence
  derived and/or modified CDS sequence (opt4) from hemagglutinin__InfluenzaA__ABW40543
augaaggugaagcugcuggugcugcugugcaccuucaccgccaccuacgccgacaccaucugcaucggcuaccacgccaacaacagcaccgacaccguggacaccgugcuggagaagaacgugaccgugacccacagcgugaaccugcuggaggacagacacaacggcaagcugugccugcugaagggcaucgccccccugcagcugggcaacugcagcguggccggcuggauccugggcaaccccgagugcgagcugcugaccagcaaggagagcuggagcuacaucguggagacccccaaccccgagaacggcaccugcuaccccggcuacuucgccgacuacgaggagcugagagagcagcugagcagcgugagcagcuucgagagauucgagaucuuccccaaggagagcagcuggcccaaccacaccgugaccggcgugagcgccagcugcagccacaacggcaagagcagcuucuacagaaaccugcuguggcugaccggcaagaacggccuguaccccaaccugagcaagagcuacgccaacaacaaggagaaggaggugcuggugcuguggggcgugcaccacccccccaacaucggcgaccagagagcccuguaccacaccgagaacgccuacgugagcguggugagcagccacuacagcagaagauucacccccgagaucgccaagagacccaaggugagagaccaggagggcagaaucaacuacuacuggacccugcuggagcccggcgacaccaucaucuucgaggccaacggcaaccugaucgcccccagauucgccuucgcccugagcagaggcuucggcagcggcaucaucaccagcaacgcccccauggacgagugcgacgccaagugccagaccccccagggcgccaucaacagcagccugcccuuccagaacgugcaccccgugaccaucggcgagugccccaaguacgugagaagcgccaagcugagaauggugaccggccugagaaacauccccagcauccagagcagaggccuguucggcgccaucgccggcuucaucgagggcggcuggaccggcaugguggacggcugguacggcuaccaccaccagaacgagcagggcagcggcuacgccgccgaccagaagagcacccagaacgccaucaacggcaucaccaacaaggugaacagcgugaucgagaagaugaacacccaguucaccgccgugggcaaggaguucaacaagcuggagagaagaauggagaaccugaacaagaagguggacgacggcuuccuggacaucuggaccuacaacgccgagcugcuggugcugcuggagaacgagagaacccuggacuuccacgacagcaacgugaagaaccuguacgagaaggugaagagccagcugaagaacaacgccaaggagaucggcaacggcugcuucgaguucuaccacaagugcaacgacgagugcauggagagcgugaagaacggcaccuacgacuaccccaaguacagcgaggagagcaagcugaacagagagaagaucgacggcgugaagcuggagagcaugggcguguaccagauccuggccaucuacagcaccguggccagcagccuggugcugcuggugagccugggcgccaucagcuucuggaugugcagcaacggcagccugcagugcagaaucugcaucuga

SEQ ID NO: 162137 - RNA, 1698 nt, Artificial Sequence; identical to SEQ ID NO: 162115
  derived and/or modified CDS sequence (opt4) from hemagglutinin__InfluenzaA__ABW40554

SEQ ID NO: 162138 - RNA, 1698 nt, Artificial Sequence; identical to SEQ ID NO: 161974
  derived and/or modified CDS sequence (opt4) from hemagglutinin__InfluenzaA__ABW40565

SEQ ID NO: 162139 - RNA, 1698 nt, Artificial Sequence
  derived and/or modified CDS sequence (opt4) from hemagglutinin__InfluenzaA__ABW40576
augaaggugaagcugcugauccugcugugcaccuucaccgccaccuacgccgacaccaucugcaucggcuaccacgccaacaacagcaccgacaccguggacaccgugcuggagaagaacgugaccgugacccacagcgugaaccugcuggaggacagccacaacggcaagcugugccugcugaagggcaucgccccccugcagcugggcaacugcagcguggccggcuggauccugggcaaccccgagugcgagcugcugaucagcaaggagagcuggagcuacaucguggagacccccaaccccgagaacggcaccugcuaccccggcuacuucgccgacuacgaggagcugagagagcagcugagcagcgugagcagcuucgagagauucgagaucuuccccaaggagagcagcuggcccaaccacaccgugaccggcgugagcgccagcugcagccacaacggcaagagcagcuucuacagaaaccugcuguggcugaccggcaagaacggccuguaccccaaccugagcaagagcuacgccaacaacaaggagaaggaggugcuggugcuguggggcgugcaccacccccccaacaucggcgaccagagagcccuguaccacaccgagaacaccuacgugagcguggugagcagccacuacagcagaagauucacccccgagaucgccaagagacccaaggugagagaccaggagggcagaaucaacuacuacuggacccugcuggagcccggcgacaccaucauccuggaggccaacggcaaccugaucgcccccagauucgccuucgcccugagcagaggcuucggcagcggcaucaucaccagcaacgcccccauggacgagugcgacgccaagugccagaccccccagggcgccaucaacagcagccugcccuuccagaacgugcaccccgugaccaucggcgagugccccaaguacgugagaagcaccaagcugagaauggugaccggccugagaaacauccccagcauccagagcagaggccuguucggcgccaucgccggcuucaucgagggcggcuggaccggcaugguggacggcugguacggcuaccaccaccagaacgagcagggcagcggcuacgccgccgaccagaagagcacccagaacgccaucaacggcaucaccaacaaggugaacagcgugaucgagaagaugaacacccaguucaccgccgugggcaaggaguucaacaagcuggagagaagaauggagaaccugaacaagaagguggacgacggcuuccuggacaucuggaccuacaacgccgagcugcuggugcugcuggagaacgagagaacccuggacuuccacgacagcaacgugaagaaccuguacgagaaggugaagagccagcugaagaacaacgccaaggagaucggcaacggcugcuucgaguucuaccacaagugcaacgacgagugcauggagagcgugaagaacggcaccuacgacuaccccaaguacagcgaggagagcaagcugaacagagagaagaucgacggcgugaagcuggagagcaugggcguguaccagauccuggccaucuacagcaccguggccagcagccuggugcugcuggugagccugggcgccaucagcuucuggaugugcagcaacggcagccugcagugcagaaucugcaucuga

SEQ ID NO: 162140 - RNA, 1701 nt, Artificial Sequence; identical to SEQ ID NO: 162047
  derived and/or modified CDS sequence (opt4) from hemagglutinin__InfluenzaA__ABW40587

SEQ ID NO: 162141 - RNA, 1698 nt, Artificial Sequence; identical to SEQ ID NO: 162016
  derived and/or modified CDS sequence (opt4) from hemagglutinin__InfluenzaA__ABW40598

SEQ ID NO: 162142 - RNA, 1698 nt, Artificial Sequence; identical to SEQ ID NO: 161990
  derived and/or modified CDS sequence (opt4) from hemagglutinin__InfluenzaA__ABW40609

SEQ ID NO: 162143 - RNA, 1698 nt, Artificial Sequence; identical to SEQ ID NO: 162005
  derived and/or modified CDS sequence (opt4) from hemagglutinin__InfluenzaA__ABW40620

SEQ ID NO: 162144 - RNA, 1701 nt, Artificial Sequence; identical to SEQ ID NO: 162047
  derived and/or modified CDS sequence (opt4) from hemagglutinin__InfluenzaA__ABW40631

SEQ ID NO: 162145 - RNA, 1698 nt, Artificial Sequence; identical to SEQ ID NO: 161970
  derived and/or modified CDS sequence (opt4) from hemagglutinin__InfluenzaA__ABW40642

SEQ ID NO: 162146 - RNA, 1701 nt, Artificial Sequence; identical to SEQ ID NO: 162047
  derived and/or modified CDS sequence (opt4) from hemagglutinin__InfluenzaA__ABW40653

SEQ ID NO: 162147 - RNA, 1698 nt, Artificial Sequence; identical to SEQ ID NO: 162016
  derived and/or modified CDS sequence (opt4) from hemagglutinin__InfluenzaA__ABW40664

SEQ ID NO: 162148 - RNA, 1698 nt, Artificial Sequence; identical to SEQ ID NO: 161990
  derived and/or modified CDS sequence (opt4) from hemagglutinin__InfluenzaA__ABW40675

SEQ ID NO: 162149 - RNA, 1698 nt, Artificial Sequence; identical to SEQ ID NO: 162119
  derived and/or modified CDS sequence (opt4) from hemagglutinin__InfluenzaA__ABW71294

SEQ ID NO: 162150 - RNA, 1698 nt, Artificial Sequence; identical to SEQ ID NO: 162016
  derived and/or modified CDS sequence (opt4) from hemagglutinin__InfluenzaA__ABW71305

SEQ ID NO: 162151 - RNA, 1698 nt, Artificial Sequence
  derived and/or modified CDS sequence (opt4) from hemagglutinin__InfluenzaA__ABW71316
augaaggugaagcugcugauccugcugugcaccuucaccgccaccuacgccgacaccaucugcaucggcuaccacgccaacaacagcaccgacaccguggacaccgugcuggagaagaacgugaccgugacccacagcgugaaccugcuggaggacagccacaacggcaagcugugccugcugaagggcaucgccccccugcagcugggcaacugcagcguggccggcuggauccugggcaaccccgagugcgagcugcugaucagcaaggagagcuggagcuacaucguggagacccccaaccccgagaacggcaccugcuaccccggcuacuucgccgacuacgaggagcugagagagcagcugagcagcgugagcagcuucgagagauucgagaucuuccccaaggagagcagcuggcccaaccacaccgugaccggcgugagcgccagcugcagccacaacggcaagagcagcuucuacagaaaccugcuguggcugaccggcaagaacggccuguaccccaaccugagcaagagcuacgccaacaacaaggagaaggaggugcuggugcuguggggcgugcaccacccccccaacaucggcgaccagagagcccuguaccacaccgagaacgccuacgugagcguggugagcagccacuacagcagaagauucacccccgagaucgccaagagacccaaggugagagaccaggagggcagaaucaacuacuacuggacccugcuggagcccagagacaccaucaucuucgaggccaacggcaaccugaucgcccccagauucgccuucgcccugagcagaggcuucggcagcggcaucaucaccagcaacgcccccauggacgagugcgacgccaagugccagaccccccagggcgccaucaacagcagccugcccuuccagaacgugcaccccgugaccaucggcgagugccccaaguacgugagaagcaccaagcugagaauggugaccggccugagaaacauccccagcauccagagcagaggccuguucggcgccaucgccggcuucaucgagggcggcuggaccggcaugguggacggcugguacggcuaccaccaccagaacgagcagggcagcggcuacgccgccgaccagaagagcacccagaacgccaucaacggcaucaccaacaaggugaacagcgugaucgagaagaugaacacccaguucaccgccgugggcaaggaguucaacaagcuggagagaagaauggagaaccugaacaagaagguggacgacggcuuccuggacaucuggaccuacaacgccgagcugcuggugcugcuggagaacgagagaacccuggacuuccacgacagcaacgugaagaaccuguacgagaaggugaagagccagcugaagaacaacgccaaggagaucggcaacggcugcuucgaguucuaccacaagugcaacgacgagugcauggagagcgugaagaacggcaccuacgacuaccccaaguacagcgaggagagcaagcugaacagagagaagaucgacggcgugaagcuggagagcaugggcguguaccagauccuggccaucuacagcaccguggccagcagccuggugcugcuggugagccugggcgccaucagcuucuggaugugcagcaacggcagccugcagugcagaaucugcaucuga

SEQ ID NO: 162152 - RNA, 1698 nt, Artificial Sequence; identical to SEQ ID NO: 161970
  derived and/or modified CDS sequence (opt4) from hemagglutinin__InfluenzaA__ABW71327

SEQ ID NO: 162153 - RNA, 1698 nt, Artificial Sequence; identical to SEQ ID NO: 161974
  derived and/or modified CDS sequence (opt4) from hemagglutinin__InfluenzaA__ABW71338

SEQ ID NO: 162154 - RNA, 1701 nt, Artificial Sequence; identical to SEQ ID NO: 161988
  derived and/or modified CDS sequence (opt4) from hemagglutinin__InfluenzaA__ABW71349

SEQ ID NO: 162155 - RNA, 1698 nt, Artificial Sequence
  derived and/or modified CDS sequence (opt4) from hemagglutinin__InfluenzaA__ABW71360
augaaggugaagcugcuggugcugcugugcaccuucaccgccaccuacgccgacaccaucugcaucggcuaccacgccaacaacagcaccgacaccguggacaccgugcuggagaagaacgugaccgugacccacagcgugaaccugcuggaggacagacacaacggcaagcugugccugcugaagggcaucgccccccugcagcugggcaacugcagcguggccggcuggauccugggcaaccccgagugcgagcugcugaucagcaaggagagcuggagcuacaucguggagacccccaaccccgagaacggcaccugcuaccccggcuacuucgccgacuacgaggagcugagagagcagcugagcagcgugagcagcuucgagagauucgagaucuuccccaaggagagcagcuggcccaaccacaccgugaccggcgugagcgccagcugcagccacaacggcaagagcagcuucuacagaaaccugcuguggcugaccggcaagaacggccuguaccccaaccugagcagaagcuacgccaacaacaaggagaaggaggugcuggugcuguggggcgugcaccacccccccaacaucggcgaccagagagcccuguaccacaccgagaacgccuacgugagcguggugagcagccacuacagcagaagauucacccccgagaucgccaagagacccaaggugagagaccaggagggcagaaucaacuacuacuggacccugcuggagcccggcgacaccaucaucuucgaggccaacggcaaccugaucgcccccagauucgccuucgcccugagcagaggcuucggcagcggcaucaucaccagcaacgcccccauggacgagugcgacgccaagugccagaccccccagggcgccaucaacagcagccugcccuuccagaacgugcaccccgugaccaucggcgagugccccaaguacgugagaagcgccaagcugagaauggugaccggccugagaaacauccccagcauccagagcagaggccuguucggcgccaucgccggcuucaucgagggcggcuggaccggcaugguggacggcugguacggcuaccaccaccagaacgagcagggcagcggcuacgccgccgaccagaagagcacccagaacgccaucaacggcaucaccaacaaggugaacagcgugaucgagaagaugaacacccaguucaccgccgugggcaaggaguucaacaagcuggagagaagaauggagaaccugaacaagaagguggacgacggcuuccuggacaucuggaccuacaacgccgagcugcuggugcugcuggagaacgagagaacccuggacuuccacgacagcaacgugaagaaccuguacgagaaggugaagagccagcugaagaacaacgccaaggagaucggcaacggcugcuucgaguucuaccacaagugcgacgacgagugcauggagagcgugaagaacggcaccuacgacuaccccaaguacagcgaggagagcaagcugaacagagagaagaucgacggcgugaagcuggagagcaugggcguguaccagauccuggccaucuacagcaccguggccagcagccuggugcugcuggugagccugggcgccaucagcuucuggaugugcagcaacggcagccugcagugcagaaucugcaucuga

SEQ ID NO: 162156 - RNA, 1698 nt, Artificial Sequence; identical to SEQ ID NO: 161990
  derived and/or modified CDS sequence (opt4) from hemagglutinin__InfluenzaA__ABW71371

SEQ ID NO: 162157 - RNA, 1698 nt, Artificial Sequence
  derived and/or modified CDS sequence (opt4) from hemagglutinin__InfluenzaA__ABW71382
augaaggugaagcugcugauccugcugugcaccuucaccgccaccuacgccgacaccaucugcaucggcuaccacgccaacaacagcaccgacaccguggacaccgugcuggagaagaacgugaccgugacccacagcgugaaccugcuggaggacagccacaacggcaagcugugccugcugaagggcaucgccccccugcagcugggcaacugcagcguggccggcuggauccugggcaaccccgagugcgagcugcugaucagcaaggagagcuggagcuacaucguggagacccccaaccccgagaacggcaccugcuaccccggcuacuucgccgacuacgaggagcugagagagcagcugagcagcgugagcagcuucgagagauucgagaucuuccccaaggagagcagcuggagcaaccacaccaucaccggcgugagcgccagcugcagccacaacggcaagagcagcuucuacagaaaccugcuguggcugaccggcaagaacggccuguaccccaaccugagcaagagcuacgccaacaacaaggagaaggaggugcuggugcuguggggcgugcaccacccccccaacaucggcgaccagagagcccuguaccacaccgagaacgccuacgugagcguggugagcagccacuacagcagaagauucacccccgagaucgccaagagacccaaggugagagaccaggagggcagaaucaacuacuacuggacccugcuggagcccggcgacaccaucaucuucgaggccaacggcaaccugaucgcccccagauucgccuucgcccugagcagaggcuucggcagcggcaucaucaccagcaacgcccccauggacgagugcgacgccaagugccagaccccccagggcgccaucaacagcagccugcccuuccagaacgugcaccccgugaccaucggcgagugccccaaguacgugagaagcaccaagcugagaauggugaccggccugagaaacauccccagcauccagagcagaggccuguucggcgccaucgccggcuucaucgagggcggcuggaccggcaugguggacggcugguacggcuaccaccaccagaacgagcagggcagcggcuacgccgccgaccagaagagcacccagaacgccaucaacggcaucaccaacaaggugaacagcgugaucgagaagaugaacacccaguucaccgccgugggcaaggaguucaacaagcuggagagaagaauggagaaccugaacaagaagguggacgacggcuuccuggacaucuggaccuacaacgccgagcugcuggugcugcuggagaacgagagaacccuggacuuccacgacagcaacgugaagaaccuguacgagaaggugaagagccagcugaagaacaacgccaaggagaucggcaacggcugcuucgaguucuaccacaagugcaacgacgagugcauggagagcgugaagaacggcaccuacgacuaccccaaguacagcgaggagagcaagcugaacagagagaagaucgacggcgugaagcuggagagcaugggcguguaccagauccuggccaucuacagcaccguggccagcagccuggugcugcuggugagccugggcgccaucagcuucuggaugugcagcaacggcagccugcagugcagaaucugcaucuga

SEQ ID NO: 162158 - RNA, 1698 nt, Artificial Sequence
  derived and/or modified CDS sequence (opt4) from hemagglutinin__InfluenzaA__ABW71393
augaaggugaagcugcuggugcugcugugcaccuucaccgccaccuacgccgacaccaucugcaucggcuaccacgccaacaacagcaccgacaccguggacaccgugcuggagaagaacgugaccgugacccacagcgugaaccugcuggaggacagccacaacggcaagcugugccugcugaagggcaucgccccccugcagcugggcaacugcagcguggccggcuggauccugggcaaccccgagugcgagcugcugaucagcaaggagagcuggagcuacaucguggagacccccaaccccgagaacggcaccugcuaccccggcuacuucaccgacuacgaggagcugagagagcagcugagcagcgugagcagcuucgagagauucgagaucuuccccaaggagagcagcuggcccaaccacaccgugaccggcgugagcgccagcugcagccacaacggcaagagcagcuucuacagaaaccugcuguggcugaccggcaagaacggccuguaccccaaccugagcaagagcuacgccaacaacaaggagaaggaggugcuggugcuguggggcgugcaccacccccccaacaucggcgaccagagagcccuguaccacaccgagaacgccuacgugagcguggugagcagccacuacagcagaagauucacccccgagaucgccaagagacccaaggugagagaccaggagggcagaaucaacuacuacuggacccugcuggagcccggcgacaccaucaucuucgaggccaacggcaaccugaucgcccccagauucgccuucgcccugagcagaggcuucggcagcggcaucaucaccagcaacgcccccaugggcgagugcgacgccaagugccagaccccccagggcgccaucaacagcagccugcccuuccagaacgugcaccccgugaccaucggcgagugccccaaguacgugagaagcgccaagcugagaauggugaccggccugagaaacauccccagcauccagagcagaggccuguucggcgccaucgccggcuucaucgagggcggcuggaccggcaugguggacggcugguacggcuaccaccaccagaacgagcagggcagcggcuacgccgccgaccagaagagcacccagaacgccaucaacggcaucaccaacaaggugaacagcgugaucgagaagaugaacacccaguucaccgccgugggcaaggaguucaacaagcuggagagaagaauggagaaccugaacaagaagguggacgacggcuuccuggacaucuggaccuacaacgccgagcugcuggugcugcuggagaacgagagaacccuggacuuccacgacagcaacgugaagaaccuguacgagaaggugaagagccagcugaagaacaacgccaaggagaucggcaacggcugcuucgaguucuaccacaagugcaacgacgagugcauggagagcgugaagaacggcaccuacgacuaccccaaguacagcgaggagagcaagcugaacagagagaagaucgacggcgugaagcuggagagcaugggcguguaccagauccuggccaucuacagcaccguggccagcagccuggugcugcuggugagccugggcgccaucagcuucuggaugugcagcaacggcagccugcagugcagaaucugcaucuga

SEQ ID NO: 162159 - RNA, 1698 nt, Artificial Sequence; identical to SEQ ID NO: 162119
  derived and/or modified CDS sequence (opt4) from hemagglutinin__InfluenzaA__ABW71404

SEQ ID NO: 162160 - RNA, 1698 nt, Artificial Sequence; identical to SEQ ID NO: 162007
  derived and/or modified CDS sequence (opt4) from hemagglutinin__InfluenzaA__ABW71415

SEQ ID NO: 162161 - RNA, 1698 nt, Artificial Sequence
  derived and/or modified CDS sequence (opt4) from hemagglutinin__InfluenzaA__ABW71426
augaaggccaagcugcugauccugcugugcaccuucaccgccaccuacgccgacaccaucugcaucggcuaccacgccaacaacagcaccgacaccguggacaccgugcuggagaagaacgugaccgugacccacagcgugaaccugcuggaggacagccacaacggcaagcugugccugcugaagggcaucgccccccugcagcugggcaacugcagcguggccggcuggauccugggcaaccccgagugcgagcugcugaucagcaaggagagcuggagcuacaucguggagacccccaaccccgagaacggcaccugcuaccccggcuacuucgccgacuacgaggagcugagagagcagcugagcagcgugagcagcuucgagagauucgagaucuuccccaaggagagcagcuggcccaaccacaccgugaccggcgugagcgccagcugcagccacaacggcaagagcagcuucuacagaaaccugcuguggcugaccggcaagaacggccuguaccccaaccugagcaagagcuacgccaacaacaaggagaaggaggugcuggugcuguggggcgugcaccacccccccaacaucggcgaccagagagcccuguaccacaccgagaacgccuacgugagcguggugagcagccacuacagcagaagauucacccccgagaucgccaagagacccaaggugagagaccaggagggcagaaucaacuacuacuggacccugcuggagcccggcgacaccaucaucuucgaggccaacggcaaccugaucgcccccagauucgccuucgcccugagcagaggcuucggcagcggcaucaucaccagcaacgcccccauggacgagugcgacgccaagugccagaccccccagggcgccaucaacagcagccugcccuuccagaacgugcaccccgugaccaucggcgagugccccaaguacgugagaagcaccaagcugagaauggugaccggccugagaaacauccccagcauccagagcagaggccuguucggcgccaucgccggcuucaucgagggcggcuggaccggcaugguggacggcugguacggcuaccaccaccagaacgagcagggcagcggcuacgccgccgaccagaagagcacccagaacgccaucaacggcaucaccaacaaggugaacagcgugaucgagaagaugaacacccaguucaccgccgugggcaaggaguucaacaagcuggagagaagaauggagaaccugaacaagaagguggacgacggcuuccuggacaucuggaccuacaacgccgagcugcuggugcugcuggagaacgagagaacccuggacuuccacgacagcaacgugaagaaccuguacgagaaggugaagagccagcugaagaacaacgccaaggagaucggcaacggcugcuucgaguucuaccacaagugcaacgacgagugcauggagagcgugaagaacggcaccuacgacuaccccaaguacagcgaggagagcaagcugaacagagagaagaucgacggcgugaagcuggagagcaugggcguguaccagauccuggccaucuacagcaccguggccagcagccuggugcugcuggugagccugggcgccaucagcuucuggaugugcagcaacggcagccugcagugcagaaucugcaucuga

SEQ ID NO: 162162 - RNA, 1698 nt, Artificial Sequence
  derived and/or modified CDS sequence (opt4) from hemagglutinin__InfluenzaA__ABW71448
augaaggugaagcugcuggugcugcugugcaccuucaccgccaccuacgccgacaccaucugcaucggcuaccacgccaacaacagcaccgacaccguggacaccgugcuggagaagaacgugaccgugacccacagcgugaaccugcuggaggacagccacaacggcaagcugugccugcugaagggcaucgccccccugcagcugggcaacugcagcguggccggcuggauccugggcaaccccgagugcgagcugcugaucagcaaggagagcuggagcuacaucguggagacccccaaccccgagaacggcaccugcuaccccggcuacuucgccgacuacgaggagcugagagagcagcugagcagcgugagcagcuucgagagauucgagaucuuccccaaggagagcagcuggcccaaccacaccgugaccggcgugagcgccagcugcagccacaacggcaagagcagcuucuacagaaaccugcuguggcugaccggcaagaacggccuguaccccaaccugagcaagagcuacgccaacaacaaggagaaggaggugcuggugcuguggggcgugcaccacccccccaacaucggcgaccagagagcccuguaccacaccgagaacgccuacgugagcguggugagcagccacuacagcagaagauucacccccgagaucgccaagagacccaaggugagagaccaggagggcagaaucaacuacuacuggacccugcuggagcccggcgacaccaucaucuucgaggccaacggcaaccugaucgcccccagauucgccuucgcccugagcagaggcuucggcagcggcaucaucaccagcaacgcccccauggacgagugcgacgccaagugccagaccccccagggcgccaucaacagcagccugcccuuccagaacgugcaccccgugaccaucggcgagugccccaaguacgugagaagcaccaagcugagaauggugaccggccugagaaacauccccagcauccagagcagaggccuguucggcgccaucgccggcuucaucgagggcggcuggaccggcaugguggacggcugguacggcuaccaccaccagaacgagcagggcagcggcuacgccgccgaccagaagagcacccagaacgccaucaacggcaucaccaacaaggugaacagcgugaucgagaagaugaacacccaguucaccgccgugggcaaggaguucaacaagcuggagagaagaauggagaaccugaacaagaagguggacgacggcuuccuggacaucuggaccuacaacgccgagcugcuggugcugcuggagaacgagagaacccuggacuuccacgacagcaacgugaagaaccuguacgagaaggugaagagccagcugaagaacaacgccaaggagaucggcaacggcugcuucgaguucuaccacaagugcaacgacgagugcauggagagcgugaagaacggcaccuacgacuaccccaaguacagcgaggagagcaagcugaacagagagaagaucgacggcgugaagcuggagagcaugggcguguaccagauccuggccaucuacagcaccaucgccagcagccuggugcugcuggugagccugggcgccaucagcuucuggaugugcagcaacggcagccugcagugcagaaucugcaucuga

SEQ ID NO: 162163 - RNA, 1698 nt, Artificial Sequence; identical to SEQ ID NO: 161990
  derived and/or modified CDS sequence (opt4) from hemagglutinin__InfluenzaA__ABW71459

SEQ ID NO: 162164 - RNA, 1698 nt, Artificial Sequence; identical to SEQ ID NO: 161974
  derived and/or modified CDS sequence (opt4) from hemagglutinin__InfluenzaA__ABW71470

SEQ ID NO: 162165 - RNA, 1707 nt, Artificial Sequence
  derived and/or modified CDS sequence (opt4) from hemagglutinin__InfluenzaA__ABW74702
auggagaagaucgugcugcugcuggccaucgugagccuggugaagagcgaccagaucugcaucggcuaccacgccaacaacagcaccgagcagguggacaccaucauggagaagaacgugaccgugacccacgcccaggacauccuggagaagacccacaacggcaagcugugcgaccuggacggcgugaagccccugauccugagagacugcagcguggccggcuggcugcugggcaaccccaugugcgacgaguucaucaacgugcccgaguggagcuacaucguggagaaggccaaccccaccaacgaccugugcuaccccggcagcuucaacgacuacgaggagcugaagcaccugcugagcagaaucaaccacuucgagaagauccagaucauccccaagagcagcuggagcgaccacgaggccagcagcggcgugagcagcgccugccccuaccugggcagcagcagcuucuucagaaacgugguguggcugaucaagaagaacagcaccuaccccaccaucaagaagagcuacaacaacaccaaccaggaggaccugcuggugcuguggggcauccaccaccccaacgacgccgccgagcagaccagacuguaccagaaccccaccaccuacaucagcaucggcaccagcacccugaaccagagacuggugcccaagaucgccaccagaagcaaggugaacggccagagcggcagaauggaguucuucuggaccauccugaagcccaacgacgccaucaacuucgagagcaacggcaacuucaucgcccccgaguacgccuacaagaucgugaagaagggcgacagcgccaucaugaagagcgagcuggaguacggcaacugcaacaccaagugccagacccccaugggcgccaucaacagcagcaugcccuuccacaacauccacccccugaccaucggcgagugccccaaguacgugaagagcaacagacuggugcuggccaccggccugagaaacagcccccagagagagagcagaagaaagaagagaggccuguucggcgccaucgccggcuucaucgagggcggcuggcagggcaugguggacggcugguacggcuaccaccacagcaacgagcagggcagcggcuacgccgccgacaaggagagcacccagaaggccaucgacggcgugaccaacaaggugaacagcaucaucgacaagaugaacacccaguucgaggccgugggcagagaguucaacaaccuggagagaagaaucgagaaccugaacaagaagauggaggacggcuuccuggacguguggaccuacaacgccgagcugcuggugcugauggagaacgagagaacccuggacuuccacgacagcaacgugaagaaccuguacgacaaggugagacugcagcugagagacaacgccaaggagcugggcaacggcugcuucgaguucuaccacaagugcgacaacgagugcaucgagagcaucagaaacggcaccuacaacuacccccaguacagcgaggaggccagacugaagagagaggagaucagcggcgugaagcuggagagcaucggcaccuaccagauccugagcaucuacagcaccguggccagcagccuggcccuggccaucaugauggccggccugagccuguggaugugcagcaacggcagccugcagugcagaaucugcaucuga

SEQ ID NO: 162166 - RNA, 1707 nt, Artificial Sequence
  derived and/or modified CDS sequence (opt4) from hemagglutinin__InfluenzaA__ABW74703
auggagaagaucgugcugcugcuggccaucgugagccuggugaagagcgaccagaucugcaucggcuaccacgccaacaacagcaccgagcagguggacaccaucauggagaagaacgugaccgugacccacgcccaggacauccuggagaagacccacaacggcaagcugugcgaccuggacggcgugaagccccugauccugaaggacugcagcguggccggcuggcugcugggcaaccccaugugcgacgaguucaucaacgugcccgaguggagcuacaucguggagaaggccaaccccaccaacgaccugugcuaccccggcagcuucaacgacuacgaggagcugaagcaccugcugagcagaaucaaccacuucgagaagauccagaucauccccaagagcagcuggagcgaccacgaggccagcagcggcgugagcagcgccugccccuaccugggcagccccagcuucuucagaaacgugguguggcugaucaagaagaacagcaccuaccccaccaucaagaagagcuacaacaacaccaaccaggaggaccugcuggugcuguggggcauccaccaccccaacgacgccgccgagcagaccagacuguaccagaaccccaccaccuacaucagcaucggcaccagcacccugaaccagagacuggugcccaagaucgccaccagaagcaaggugaacggccagagcggcagaauggaguucuucuggaccauccugaagcccaacgacgccgugaacuucgagagcaacggcaacuucaucgcccccgaguacgccuacaagaucgugaagaagggcgacagcgccaucaugaagagcgagcuggaguacggcaacugcaacaccaagugccagacccccaugggcgccaucaacagcagcaugcccuuccacaacauccacccccugaccaucggcgagugccccaaguacgugaagagcaacagacuggugcuggccaccggccugagaaacagcccccagagagagagcagaagaaagaagagaggccuguucggcgccaucgccggcuucaucgagggcggcuggcagggcaugguggacggcugguacggcuaccaccacagcaacgagcagggcagcggcuacgccgccgacaaggagagcacccagaaggccaucgacggcgugaccaacaaggugaacagcaucaucgacaagaugaacacccaguucgaggccgugggcagagaguucaacagccuggagagaagaaucgagaaccugaacaagaagauggaggacggcuuccuggacguguggaccuacaacgccgagcugcuggugcugauggagaacgagagaacccuggacuuccacgacagcaacgugaagaaccuguacgacaaggugagacugcagcugagagacaacgccaaggagcugggcaacggcugcuucgaguucuaccacaagugcgacaacgagugcauggagagcaucagaaacggcaccuacaacuacccccaguacagcgaggaggccagacugaagagagaggagaucagcggcgugaagcuggagagcaucggcaccuaccagauccugagcaucuacagcaccguggccagcagccuggcccuggccaucaugaucgccggccugagccuguggaugugcagcaacggcagccugcagugcagaaucugcaucuga

SEQ ID NO: 162167 - RNA, 1707 nt, Artificial Sequence
  derived and/or modified CDS sequence (opt4) from hemagglutinin__InfluenzaA__ABW74705
auggagaagaucgugcugcugcuggccaucgugagccuggugaagagcgaccagaucugcaucggcuaccacgccaacaacagcaccgagcagguggacaccaucauggagaagaacgugaccgugacccacgcccaggacauccuggagaagacccacaacggcaagcugugcgaccuggacggcgugaagccccugauccugagagacugcagcguggccggcuggcugcugggcaaccccaugugcgacgaguucaucaacgugcccgaguggagcuacaucguggagaaggccaaccccaccaacgaccugugcuaccccggcagcuucaacgacuacgaggagcugaagcaccugcugagcagaaucaaccacuucgagaagauccagaucauccccaagagcagcuggagcgaccacgaggccagcagcggcgugagcagcgccugccccuaccugggcagccccagcuucuucagaaacgugguguggcugaucaagaagaacagcaccuaccccaccaucaagaagagcuacaacaacaccaaccaggaggaccugcuggugcuguggggcauccaccaccccaacgacgccgccgagcagaccagacuguaccagaaccccaccaccuacaucagcaucggcaccagcacccugaaccagagacuggugcccaagaucgccaccagaagcaaggugaacggccagagcggcagaauggaguucuucuggaccauccugaagcccaacgacgccaucaacuucgagagcaacggcaacuucaucgcccccgaguacgccuacaagaucgugaagaagggcgacagcgccaucaugaagagcgagcuggaguacggcaacugcaacaccaagugccagacccccaugggcgccaucaacagcagcaugcccuuccacaacauccacccccugaccaucggcgagugccccaaguacgugaagagcaacagacuggugcuggccaccggccugagaaacagcccccagagagagagcagaagaaagaagagaggccuguucggcgccaucgccggcuucaucgagggcggcuggcagggcaugguggacggcugguacggcuaccaccacagcaacgagcagggcagcggcuacgccgccgacaaggagagcacccagaaggccaucgacggcgugaccaacaaggugaacagcaucaucgacaagaugaacacccaguucgaggccgugggcagagaguucaacaaccuggagagaagaaucgagaaccugaacaagaagauggaggacggcuuccuggacguguggaccuacaacgccgagcugcuggugcugauggagaacgagagaacccuggacuuccacgacagcaacgugaagaaccuguacgacaaggugagacugcagcugagagacaacgccaaggagcugggcaacggcugcuucgaguucuaccacaagugcgacaacgagugcauggagagcaucagaaacggcaccuacaacuacccccaguacagcgaggaggccagacugaagagagaggagaucagcggcgugaagcuggagagcaucggcaccuaccagauccugagcaucuacagcaccguggccagcagccuggcccuggccaucaugaucgccggccugagccuguggaugugcagcaacggcagccugcagugcagaaucugcaucuga

SEQ ID NO: 162168 - RNA, 1707 nt, Artificial Sequence
  derived and/or modified CDS sequence (opt4) from hemagglutinin__InfluenzaA__ABW74707
auggagaagaucgugcugcugcuggccaucgugagccuggugaagagcgaccagaucugcaucggcuaccacgccaacaacagcaccgagcagguggacaccaucauggagaagaacgugaccgugacccacgcccaggacauccuggagaagacccacaacggcaagcugugcgaccuggacggcgugaagccccugauccugagagacugcagcguggccggcuggcugcugggcaaccccaugugcgacgaguucaucaacgugcccgaguggagcuacaucguggagaaggccaaccccaccaacgaccugugcuaccccggcagcuucaacgacuacgaggagcugaagcaccugcugagcagaaucaaccacuucgagaagauccagaucauccccaagagcagcuggagcgaccacgaggccagcagcggcgugagcagcgccugccccuaccugggcagccccagcuucuucagaaacgugguguggcugaucaagaagaacagcaccuaccccaccaucaagaagagcuacaacaacaccaaccaggaggaccugcuggugcuguggggcauccaccaccccaacgacgccgccgagcagaccagacuguaccagaaccccaccaccuacaucagcaucggcaccagcacccugaaccagagacuggugcccaagauggccaccagaagcaaggugaacggccagagcggcagaauggaguucuucuggaccauccugaagcccaacgacgccaucaacuucgagagcaacggcaacuucaucgcccccgaguacgccuacaagaucgugaagaagggcgacagcgccaucaugaagagcgagcuggaguacggcaacugcaacaccaagugccagacccccaugggcgccaucaacagcagcaugcccuuccacaacauccacccccugaccaucggcgagugccccaaguacgugaagagcaacagacuggugcuggccaccggccugagaaacagcccccagagagagagcagaagaaagaagagaggccuguucggcgccaucgccggcuucaucgagggcggcuggcagggcaugguggacggcugguacggcuaccaccacagcaacgagcagggcagcggcuacgccgccgacaaggagagcacccagaaggccaucgacggcgugaccaacaaggugaacagcaucaucgacaagaugaacacccaguucgaggccgugggcagagaguucaacaaccuggagagaagaaucgagaaccugaacaagaagauggaggacggcuuccuggacguguggaccuacaacgccgagcugcuggugcugauggagaacgagagaacccuggacuuccacgacagcaacgugaagaaccuguacgacaaggugagacugcagcugagagacaacgccaaggagcugggcaacggcugcuucgaguucuaccacaagugcgacaacgagugcauggagagcaucagaaacggcaccuacaacuacccccaguacagcgaggaggccagacugaagagagaggagaucagcggcgugaagcuggagagcaucggcaccuaccagauccugagcaucuacagcaccguggccagcagccuggcccuggccaucaugaucgccggccugagccuguggaugugcagcaacggcagccugcagugcagaaucugcaucuga

SEQ ID NO: 162169 - RNA, 1707 nt, Artificial Sequence
  derived and/or modified CDS sequence (opt4) from hemagglutinin__InfluenzaA__ABW74708
auggagaagaucgugcugcugcuggccaucgugagccuggugaagagcgaccagaucugcaucggcuaccacgccaacaacagcaccgagcagguggacaccaucauggagaagaacgugaccgugacccacgcccaggacauccuggagaagacccacaacggcaagcugugcgaccuggacggcgugaagccccugauccugagagacugcagcguggccggcuggcugcugggcaaccccaugugcgacgaguucaucaacgugcccgaguggagcuacaucguggagaaggccaaccccaccaacgaccugugcuaccccggcagcuucaacgacuacgaggagcugaagcaccugcugagcagaaucaaccacuucgagaagauccagaucauccccaagagcagcuggagcgaccacgaggccagcagcggcgugagcagcgccugccccuaccugggcagccccagcuucuucagaaacgugguguggcugaucaagaagaacagcaccuaccccaccaucaagaagagcuacaacaacaccaaccaggaggaccugcuggugcuguggggcauccaccaccccaacgacgccgccgagcagaccagacuguaccagaaccccaccaccuacaucagcaucggcaccagcacccugaaccagagacuggugcccaagaucgccaccagaagcaaggugaacggccagagcggcagaauggaguucuucuggaccauccugaagcccaacgacgccaucaacuucgagagcaacggcaacuucaucgcccccgaguacgccuacaagaucgugaagaagggcgacagcgccaucaugaagagcgagcuggaguacggcaacugcaacaccaagugccagacccccaugggcgccaucaacagcagcaugcccuuccacaacauccacccccugaccaucggcgagugccccaaguacgugaagagcaacagaagcgugcuggccaccggccugagaaacagcccccagagagagagcagaagaaagaagagaggccuguucggcgccaucgccggcuucaucgagggcggcuggcagggcaugguggacggcugguacggcuaccaccacagcaacgagcagggcagcggcuacgccgccgacaaggagagcacccagaaggccaucgacggcgugaccaacaaggugaacagcaucaucgacaagaugaacacccaguucgaggccgugggcagagaguucaacaaccuggagagaagaaucgagaaccugaacaagaagauggaggacggcuuccuggacguguggaccuacaacgccgagcugcuggugcugauggagaacgagagaacccuggacuuccacgacagcaacgugaagaaccuguacgacaaggugagacugcagcugagagacaacgccaaggagcugggcaacggcugcuucgaguucuaccacaagugcgacaacgagugcauggagagcaucagaaacggcaccuacaacuacccccaguacagcgaggaggccagacugaagagagaggagaucagcggcgugaagcuggagagcaucggcaccuaccagauccugagcaucuacagcaccguggccagcagccuggcccuggccaucaugauggccggccugagccuguggaugugcagcaacggcagccugcagugcagaaucugcaucuga

SEQ ID NO: 162170 - RNA, 1707 nt, Artificial Sequence; identical to SEQ ID NO: 162167
  derived and/or modified CDS sequence (opt4) from hemagglutinin__InfluenzaA__ABW74710

SEQ ID NO: 162171 - RNA, 1707 nt, Artificial Sequence; identical to SEQ ID NO: 162167
  derived and/or modified CDS sequence (opt4) from hemagglutinin__InfluenzaA__ABW74711

SEQ ID NO: 162172 - RNA, 1707 nt, Artificial Sequence
  derived and/or modified CDS sequence (opt4) from hemagglutinin__InfluenzaA__ABW74712
auggagaagaucgugcugcugcugagcaucgugagccuggugaagagcgaccagaucugcaucggcuaccacgccaacaacagcaccgagcagguggacaccaucauggagaagaacgugaccgugacccacgcccaggacauccuggagaagacccacaacggcaagcugugcgaccuggacggcgugaagccccugauccugagagacugcagcguggccggcuggcugcugggcaaccccaugugcgacgaguucaucaacgugcccgaguggagcuacaucguggagaaggccaaccccaccaacgaccugugcuaccccggcagcuucaacgacuacgaggagcugaagcaccugcugagcagaaucaaccacuucgagaagauccagaucauccccaagagcagcuggagcgaccacgaggccagcagcggcgugagcagcgccugccccuaccugggcagccccagcuucuucagaaacgugguguggcugaucaagaagaacagcaccuaccccaccaucaagaagagcuacaacaacaccaaccaggaggaccugcuggugcuguggggcauccaccaccccaacaacgaggaggagcagaccagacuguaccagaaccccaccaccuacaucagcaucggcaccagcacccugaaccagagacuggugcccaagaucgccaccagaagcaaggugaacggccagagcggcagaauggaguucuucuggaccauccugaagcccaacgacgccaucaacuucgagagcaacggcaacuucaucgcccccgaguacgccuacaagaucgugaagaagggcgacagcgccaucaugaagagcgagcuggaguacagcaacugcaacaccaagugccagacccccaugggcgccaucaacagcagcaugcccuuccacaacauccacccccugaccaucggcgagugccccaaguacgugaagagcagcagacuggugcuggccaccggccugagaaacagcccccagagagagagcagaagaaagaagagaggccuguucggcgccaucgccggcuucaucgagggcggcuggcagggcaugguggacggcugguacggcuaccaccacagcaacgagcagggcagcggcuacgccgccgacaaggagagcacccagaaggccaucgacggcgugaccaacaaggugaacagcaucaucgacaagaugaacacccaguucgaggccgugggcagagaguucaacaaccuggagagaagaaucgagaaccugaacaagaagauggaggacggcuuccuggacguguggaccuacaacgccgagcugcuggugcugauggagaacgagagaacccuggacuuccacgacagcaacgugaagaaccuguacgacaaggugagacugcagcugagagacaacgccaaggagcugggcaacggcugcuucgaguucuaccacaagugcgacaacgagugcauggagagcaucagaaacggcaccuacaacuacccccaguacagcgaggaggccagacugaagagagaggagaucagcggcgugaagcuggagagcaucggcaccuaccagauccugagcaucuacagcaccguggccagcagccuggcccuggccaucaugaucgccggccugagccuguggaugugcagcaacggcagccugcagugcagaaucugcaucuga

SEQ ID NO: 162173 - RNA, 1701 nt, Artificial Sequence
  derived and/or modified CDS sequence (opt4) from hemagglutinin__InfluenzaA__ABW80976
augaagaccaucaucgcccugagcuacauccugugccugguguucgcccagaagcugcccggcaacgacaacagcaccgccacccugugccugggccaccacgccgugcccaacggcacccuggugaagaccaucaccaacgaccagaucgaggugaccaacgccaccgagcuggugcagagcagcagcaccagcagaaucugcgacagcccccaccagauccuggacggcgagaacugcacccugaucgacgcccugcugggcgacccccacugcgacggcuuccagaacaaggagugggaccuguucguggagagaagcaaggccuacagcaacugcuaccccuacgacgugcccgacuacgugagccugagaagccugguggccagcagcggcacccuggaguucaacaacgagagcuucaacuggaccggcguggcccagaacggcaccagcagcgccugcaagagaagaagcgacaagagcuucuucagcagacugaacuggcugcaccagcugaaguacaaguaccccgcccugaacgugaccaugcccaacaacgagaaguucgacaagcuguacaucuggggcgugcaccaccccggcaccgacagcgaccagaucagcaucuacgcccaggccagcggcagagugaccgugagcaccaagagaagccagcagaccgugauccccaacaucggcagcagacccugggugagaggcgugagcagcggcaucagcaucuacuggaccaucgugaagcccggcgacauccugcugaucaacagcaccggcaaccugaucgcccccagaggcuacuucaagaucagaagcggcaagagcagcaucaugagaagcgacgcccccaucggcaagugcaacagcgagugcaucacccccaacggcagcauccccaacgacaagcccuuccagaacgugaacagaaucaccuacggcgccugccccagauacgugaagcagaacacccugaagcuggccaccggcaugagaaacgugcccgagaagcagaccagaggcaucuucggcgccaucgccggcuucaucgagaacggcugggagggcaugauggacggcugguacggcuucagacaccagaacagcgagggcaccggccaggccgccgaccugaagagcacccaggccgccaucaaccagaucaacggcaagcugaacagacugaucgagaagaccaacgagaaguuccaccagaucgagaaggaguucagcgagguggagggcagaauccaggaccuggagaaguacguggaggacaccaagaucgaccuguggagcuacaacgccgagcugcugguggcccuggagaaccagcacaccaucgaccugaccgacagcgagaugaacaagcuguucgagagaaccaagaagcagcugagagagaacgccgaggacaugggcaacggcugcuucaagaucuaccacaagugcgacaacgccugcaucggcagcaucagaaacggcaccuacgaccacgacguguacagagacgaggcccugaacaacagauuccagaucaagggcguggagcugaagagcggcuacaaggacuggauccuguggaucagcuucgccaucagcugcuuccugcugugcaucgugcugcugggcuucaucaugugggccugccagaagggcaacaucagaugcaacaucugcaucuga

SEQ ID NO: 162174 - RNA, 1701 nt, Artificial Sequence
  derived and/or modified CDS sequence (opt4) from hemagglutinin__InfluenzaA__ABW80977
augaagaccaucaucgcccugagcuacauccugugccugguguucgcccagaagcugcccggcaacgacaacagcaccgccacccugugccugggccaccacgccgugcccaacggcaccaucgugaagaccaucaccaacgaccagaucgaggugaccaacgccaccgagcuggugcagagcagcagcaccggcggcaucugcgacagcccccaccagauccuggacggcgagaacugcacccugaucgacgcccugcugggcgacccccagugcgacggcuuccagaacaagaagugggaccuguucguggagagaagcaaggccuacagcaacugcuaccccuacgacgugcccgacuacgccagccugagaagccugguggccagcagcggcacccuggaguucaacaacgagagcuucaacuggaccggcgugacccagaacggcaccagcagcgccugcaagagaagaagcaacaagagcuucuucagcagacugaacuggcugacccaccugaaguucaaguaccccgcccugaacgugaccaugcccaacaacgagaaguucgacaagcuguacaucuggggcgugcaccaccccggcaccgacaacgaccagaucaaccuguacgcccaggccagcggcagaaucaccgugagcaccaagagaagccagcagaccgugauccccaacaucggcagcagacccagagugagagacgugcccagcagaaucagcaucuacuggaccaucgugaagcccggcgacauccugcugaucagcagcaccggcaaccugaucgcccccagaggcuacuucaagaucagaagcggcaagagcagcaucaugagaagcgacgcccccaucggcaagugcaacagcgagugcaucacccccaacggcagcauccccaacgacaagcccuuccagaacgugaacagaaucaccuacggcgccugccccagauacgugaagcagaacacccugaagcuggccaccggcaugagaaacgugcccgagaagcagaccagaggcaucuucggcgccaucgccggcuucaucgagaacggcugggagggcaugguggacggcugguacggcuucagacaccagaacagcgagggcaccggccaggccgccgaccugaagagcacccaggccgccaucaaccagaucaacggcaagcugaacagacugaucggcaagaccaacgagaaguuccaccagaucgagaaggaguucagcgagguggagggcagaauccaggaccuggagaaguacguggaggacaccaagaucgaccuguggagcuacaacgccgagcugcugguggcccuggagaaccagcacaccaucgaccugaccgacagcgagaugaacaagcuguucgagagaaccaagaagcagcugagagagaacgccgaggacaugggcaacggcugcuucaagaucuaccacaagugcgacaacgccugcaucggcagcaucagaaacggcaccuacgaccacgacguguacagagacgaggcccugaacaacagauuccagaucaagggcguggagcugaagagcggcuacaaggacuggauccuguggaucagcuucgccaucagcugcuuccugcugugcguggcccugcugggcuucaucaugugggccugccagaagggcaacaucagaugcaacaucugcaucuga

SEQ ID NO: 162175 - RNA, 1698 nt, Artificial Sequence
  derived and/or modified CDS sequence (opt4) from hemagglutinin__InfluenzaA__ABW80979
augaaggccaagcugcuggugcugcugugcaccuucaccgccaccuacgccgacaccaucugcaucggcuaccacgccaacaacagcaccgacaccguggacaccgugcuggagaagaacgugaccgugacccacagcgugaaccugcuggaggacagccacaacggcaagcugugccugcugaagggcaucgccccccugcagcugggcaacugcagcguggccggcuggauccugggcaaccccgagugcgagcugcugaucagcaaggagagcuggagcuacaucguggagacccccaaccccgagaacggcaccugcuaccccggcuacuucgccgacuacgaggagcugagagagcagcugagcagcgugagcagcuucgagagauucgagaucuuccccaaggagagcagcuggcccaaccacaccgugaccggcgugagcgccagcugcagccacaacggcaagagcagcuucuacagaaaccugcuguggcugaccggcaagaacggccuguaccccaaccugagcaagagcuacgugaacaacaaggagaaggaggugcuggugcuguggggcgugcaccacccccccaacaucggcaaccagagagcccuguaccacaccgagaacgccuacgugagcguggugagcagccacuacagcagaagauucacccccgagaucgccaagagacccaaggugagagaccaggagggcagaaucaacuacuacuggacccugcuggagcccggcgacaccaucaucuucgaggccaacggcaaccugaucgcccccugguacgccuucgcccugagcagaggcuucggcagcggcaucaucaccagcaacgcccccauggacgagugcgacgccaagugccagaccccccagggcgccaucaacagcagccugcccuuccagaacgugcaccccgugaccaucggcgagugccccaaguacgugagaagcgccaagcugagaauggugaccggccugagaaacauccccagcauccagagcagaggccuguucggcgccaucgccggcuucaucgagggcggcuggaccggcaugguggacggcugguacggcuaccaccaccagaacgagcagggcagcggcuacgccgccgaccagaagagcacccagaacgccaucaacggcaucaccaacaaggugaacagcgugaucgagaagaugaacacccaguucaccgccgugggcaaggaguucaacaagcuggagagaagaauggagaaccugaacaagaagguggacgacggcuuccuggacaucuggaccuacaacgccgagcugcuggugcugcuggagaacgagagaacccuggacuuccacgacagcaacgugaagaaccuguacgagaaggugaagagccagcugaagaacaacgccaaggagaucggcaacggcugcuucgaguucuaccacaagugcaacaacgagugcauggagagcgugaagaacggcaccuacgacuaccccaaguacagcgaggagagcaagcugaacagagagaagaucgacggcgugaagcuggagagcaugggcguguaccagauccuggccaucuacagcaccguggccagcagccuggugcugcuggugagccugggcgccaucagcuucuggaugugcagcaacggcagccugcagugcagaaucugcaucuga

SEQ ID NO: 162176 - RNA, 1701 nt, Artificial Sequence
  derived and/or modified CDS sequence (opt4) from hemagglutinin__InfluenzaA__ABW81505
augaaggccaagcugcuggugcugcugugcaccuucaccgccaccuacgccgacaccaucugcaucggcuaccacgccaacaacagcaccgacaccguggacaccgugcuggagaagaacgugaccgugacccacagcgugaaccugcuggaggacagccacaacggcaagcugugcagacugaagggcaccgccccccugcagcugggcaacugcagcaucgccggcuggauccugggcaaccccgagugcgagagccuguucagcaaggagagcuggagcuacaucgccgagacccccaaccccaagaacggcaccugcuaccccggcuacuucgccgacuacgaggagcugagagagcagcugagcagcgugagcagcuucgagagauucgagaucuuccccaaggacagcagcuggcccaaccacaccgugaccaagggcgugaccgccagcugcagccacaacggcaagagcagcuucuacaagaaccugcuguggcugaccgagaagaacggccuguaccccaaccugagcaagagcuacgugaacaagaagggcaaggaggugcuggugcuguggggcgugcaccaccccagcaacaugggcgaccagagagccaucuaccacaaggagaacgccuacgugagcgugcugagcagccacuacagcagaagauucacccccgagaucgccaagagacccaaggugagagaccaggagggcagaaucaacuacuacuggacccugcuggagcccggcgacaccaucaucuucgaggccaacggcaaccugaucgcccccugguacgccuucgcccugagcagaggcuucggcagcggcaucaucaucagcaacgccagcaugggcgagugcgacgccaagugccagaccccccagggcgccaucaacagcagccugcccuuccagaacgugcaccccgugaccaucggcgagugccccaaguacgugagaagcaccaagcugagaauggugaccggccugagaaacgugcccagcauccagagcagaggccuguucggcgccaucgccggcuucaucgagggcggcuggaccggcaugaucgacggcugguacggcuaccaccaccagaacgagcagggcagcggcuacgccgccgaccagaagagcacccagaacgccaucaacggcaucaccaacaaggugaacagcaucaucgagaagaugaacacccaguucaccgccgugggcaaggaguucaacaagcuggagagaagaauggagaaccugaacaagaagguggacgacggcuuccuggacaucuggaccuacaacgccgagcugcuggugcugcuggagaacgagagaacccuggacuuccacgacagcaacgugaagaaccuguacgagaaggugaagacccagcugaagaacaacgccaaggagaucggcaacggcugcuucgaguucuaccacaagugcaacaacgagugcauggagagcgugaagaacggcaccuacgacuaccccaaguacagcaaggagagcaagcugaacagagagaagaucgacggcgugaagcuggagagcaugggcguguaccagauccuggccaucuacagcaccguggccagcagccuggugcugcuggugagccugggcgccaucagcuucuggaugugcagcaacggcagccugcagugcagaaucugcaucuga

SEQ ID NO: 162177 - RNA, 1698 nt, Artificial Sequence
  derived and/or modified CDS sequence (opt4) from hemagglutinin__InfluenzaA__ABW81506
augaaggugaagcugcuggugcugcugugcaccuucaccgccaccuacgccgacaccaucugcaucggcuaccacgccaacaacagcaccgacaccguggacaccgugcuggagaagaacgugaccgugacccacagcgugaaccugcuggaggacagccacaacggcaagcugugccugcugaagggcaucgccccccugcagcugggcaacugcagcguggccggcuggauccugggcaaccccgagugcgagcugcugaucagcaaggagagcuggagcuacaucguggagacccccaaccccgagaacggcaccugcuaccccggcuacuucgccgacuacgaggagcugagagagcagcugagcagcgugagcagcuucgagagauucgagaucuuccccaaggagagcagcuggcccaaccacaccgugaccggcgugagcgccagcugcagccacaacggcaagagcagcuucuacagaaaccugcuguggcugaccggcaagaacggccuguaccccaaccugagcaagagcuacgccaacaacaaggagaaggaggugcuggugcuguggggcgugcaccacccccccaacaucggcaaccagagagcccuguaccacaccgagaacgccuacgugagcguggugagcagccacuacagcagaagauucacccccgagaucgccaagagacccaaggugagagaccaggagggcagaaucaacuacuacuggacccugcuggagcccggcgacaccaucaucuucgaggccaacggcaaccugaucgcccccugguacgccuucgcccugagcagaggcuucggcagcggcaucaucaccagcaacgcccccauggacgagugcgacgccaagugccagaccccccagggcgccaucaacagcagccugcccuuccagaacgugcaccccgugaccaucggcgagugccccaaguacgugagaagcgccaagcugagaauggugaccggccugagaaacauccccagcauccagagcagaggccuguucggcgccaucgccggcuucaucgagggcggcuggaccggcaugguggacggcugguacggcuaccaccaccagaacgagcagggcagcggcuacgccgccgaccagaagagcacccagaacgccaucaacggcaucaccaacaaggugaacagcgugaucgagaagaugaacacccaguucaccgccgugggcaaggaguucaacaagcuggagagaagaauggagaaccugaacaagaagguggacgacggcuuccuggacaucuggaccuacaacgccgagcugcuggugcugcuggagaacgagagaacccuggacuuccacgacagcaacgugaagaaccuguacgagaaggugaagagccagcugaagaacaacgccaaggagaucggcaacggcugcuucgaguucuaccacaagugcaacaacgagugcauggagagcgugaagaacggcaccuacgacuaccccaaguacagcgaggagagcaagcugaacagagagaagaucgacggcgugaagcuggagagcaugggcaucuaccagauccuggccaucuacagcaccguggccagcagccuggugcugcuggugagccugggcgccaucagcuucuggaugugcagcaacggcagccugcagugcagaaucugcaucuga

SEQ ID NO: 162178 - RNA, 1701 nt, Artificial Sequence
  derived and/or modified CDS sequence (opt4) from hemagglutinin__InfluenzaA__ABW81507
augaaggccaagcugcuggugcugcugugcaccuucaccgccaccuacgccgacaccaucugcaucggcuaccacgccaacaacagcaccgacaccguggacaccgugcuggagaagaacgugaccgugacccacagcgugaaccugcuggaggacagccacaacggcaagcugugcagacugaagggcaccgugccccugcagcugggcaacugcagcaucgccggcuggauccugggcaaccccgagugcgagagccuguucagcaaggagagcuggagcuacaucgccgagacccccaaccccaagaacggcaccugcuaccccggcuacuucgccgacuacgaggagcugagagagcagcugagcagcgugagcagcuucgagagauucgagaucuuccccaaggacagcagcuggcccaaccacaccgugaccaagggcgugaccgccagcugcagccacaacggcaagagcagcuucuacaagaaccugcuguggcugaccgagaagaacggccuguaccccaaccugagcaagagcuacgugaacaagaagggcaaggaggugcuggugcuguggggcgugcaccaccccagcaacaugggcgaccagagagccaucuaccacaaggagaacgccuacgugagcgugcugagcagccacuacagcagaagauucacccccgagaucgccaagagacccaaggugagagaccaggagggcagaaucaacuacuacuggacccugcuggagcccggcgacaccaucaucuucgaggccaacggcaaccugaucgcccccugguacgccuucgcccugagcagaggcuucggcagcggcaucaucaucagcaacgccagcaugggcgagugcgacgccaagugccagaccccccagggcgccaucaacagcagccugcccuuccagaacgugcaccccgugaccaucggcgagugccccaaguacgugagaagcaccaagcugagaauggugaccggccugagaaacgugcccagcauccagagcagaggccuguucggcgccaucgccggcuucaucgagggcggcuggaccggcaugaucgacggcugguacggcuaccaccaccagaacgagcagggcagcggcuacgccgccgaccagaagagcacccagaacgccaucaacggcaucaccaacaaggugaacagcaucaucgagaagaugaacacccaguucaccgccgugggcaaggaguucaacaagcuggagagaagaauggagaaccugaacaagaagguggacgacggcuuccuggacaucuggaccuacaacgccgagcugcuggugcugcuggagaacgagagaacccuggacuuccacgacagcaacgugaagaaccuguacgagaaggugaagacccagcugaagaacaacgccaaggagaucggcaacggcugcuucgaguucuaccacaagugcaacaacgagugcauggagagcgugaagaacggcaccuacgacuaccccaaguacagcaaggagagcaagcugaacagagagaagaucgacggcgugaagcuggagagcaugggcguguaccagauccuggccaucuacagcaccguggccagcagccuggugcugcuggugagccugggcgccaucagcuucuggaugugcagcaacggcagccugcagugcagaaucugcaucuga

SEQ ID NO: 162179 - RNA, 1698 nt, Artificial Sequence
  derived and/or modified CDS sequence (opt4) from hemagglutinin__InfluenzaA__ABW81508
augaaggugaagcugcuggugcugcugugcaccuucaccgccaccuacgccgacaccaucugcaucggcuaccacgccaacaacagcaccgacaccguggacaccgugcuggagaagaacgugaccgugacccacagcgugaaccugcuggaggacagccacaacggcaagcugugccugcugaagggcaucgccccccugcagcugggcaacugcagcguggccggcuggauccugggcaaccccgagugcgagcugcugaucagcaaggagagcuggagcuacaucguggagacccccaaccccgagaacggcaccugcuaccccggcuacuucgccgacuacgaggagcugagagagcagcugagcagcgugagcagcuucgagagauucgagaucuuccccaaggagagcagcuggcccaaccacaccgugaccggcgugagcgccagcugcagccacaacggcaagagcagcuucuacagaaaccugcuguggcugaccagaaagaacggccuguaccccaaccugagcaagagcuacgccaacaacaaggagaaggaggugcuggugcuguggggcgugcaccacccccccaacaucggcgaccagagagcccuguaccacaccgagaacgccuacgugagcguggugagcagccacuacagcagaagauucacccccgagaucgccaagagacccaaggugagagaccaggagggcagaaucaacuacuacuggacccugcuggagcccggcgacaccaucaucuucgaggccaacggcaaccugaucgcccccagauacgccuucgcccugagcagaggcuucggcagcggcaucaucaccagcaacgcccccauggacgagugcgacgccaagugccagaccccccagggcgccaucaacagcagccugcccuuccagaacgugcaccccgugaccaucggcgagugccccaaguacgugagaagcgccaagcugagaauggugaccggccugagaaacauccccagcauccagagcagaggccuguucggcgccaucgccggcuucaucgagggcggcuggaccggcaugguggacggcugguacggcuaccaccaccagaacgagcagggcagcggcuacgccgccgaccagaagagcacccagaacgccaucaacggcaucaccaacaaggugaacagcgugaucgagaagaugaacacccaguucaccgccgugggcaaggaguucaacaagcuggagagaagaauggagaaccugaacaagaagguggacgacggcuuccuggacaucuggaccuacaacgccgagcugcuggugcugcuggagaacgagagaacccuggacuuccacgacagcaacgugaagaaccuguacgagaaggugaagagccagcugaagaacaacgccaaggagaucggcaacggcugcuucgaguucuaccacaagugcaacgacgagugcauggagagcgugaagaacggcaccuacgacuaccccaaguacagcgaggagagcaagcugaacagagagaagaucgacggcgugaagcuggagagcaugggcguguaccagauccuggccaucuacagcaccguggccagcagccuggugcugcuggugagccugggcgccaucagcuucuggaugugcagcaacggcagccugcagugcagaaucugcaucuga

SEQ ID NO: 162180 - RNA, 1701 nt, Artificial Sequence; identical to SEQ ID NO: 162176
  derived and/or modified CDS sequence (opt4) from hemagglutinin__InfluenzaA__ABW81509

SEQ ID NO: 162181 - RNA, 1698 nt, Artificial Sequence
  derived and/or modified CDS sequence (opt4) from hemagglutinin__InfluenzaA__ABW81511
augaaggccaagcugcuggugcugcugugcaccuucaccgccaccuacgccgacaccaucugcaucggcuaccacgccaacaacagcaccgacaccguggacaccgugcuggagaagaacgugaccgugacccacagcgugaaccugcuggaggacagccacaacggcaagcugugccugcugaagggcaucgccccccugcagcugggcaacugcagcguggccggcuggauccugggcaaccccgagugcgagcugcugaucagcaaggagagcuggagcuacaucguggagacccccaaccccgagaacggcaccugcuaccccggcuacuucgccgacuacgaggagcugagagagcagcugagcagcgugagcagcuucgagagauucgagaucuuccccaagggcagcagcuggcccaaccacaccgugaccggcgugagcgccagcugcagccacaacggcaagagcagcuucuacagaaaccugcuguggcugaccggcaagaacggccuguaccccaaccugagcaugagcuacgugaacaacaaggagaaggaggugcuggugcuguggggcgugcaccacccccccaacaucggcaaccagagagcccuguaccacaccgagaacgccuacgugagcguggugagcagccacuacagcagaagauucacccccgagaucgccaagagacccaaggugagagaccaggagggcagaaucaacuacuacuggacccugcuggagcccggcgacagcaucaucuucgaggccaacggcaaccugaucgcccccugguacgccuucgcccugagcagaggcuucggcagcggcaucaucaccagcaacgcccccauggacgagugcgacgccaagugccagaccccccagggcgccaucaacagcagccugcccuuccagaacgugcaccccgugaccaucggcgagugccccaaguacgugagaagcgccaagcugagaauggugaccggccugagaaacauccccagcauccagagcagaggccuguucggcgccaucgccggcuucaucgagggcggcuggaccggcaugguggacggcugguacggcuaccaccaccagaacgagcagggcagcggcuacgccgccgaccagaagagcacccagaacgccaucaacggcaucaccaacaaggugaacagcgugaucgagaagaugaacacccaguucaccgccgugggcaaggaguucaacaagcuggagagaagaauggagaaccugaacaagaagguggacgacggcuuccuggacaucuggaccuacaacgccgagcugcuggugcugcuggagaacgagagaacccuggacuuccacgacagcaacgugaagaaccuguacgagaaggugaagagccagcugaagaacaacgccaaggagaucggcaacggcugcuucgaguucuaccacaagugcaacaacgagugcauggagagcgugaagaacggcaccuacgacuaccccaaguacagcgaggagagcaagcugaacagagagaagaucgacggcgugaagcuggagagcaugggcguguaccagauccuggccaucuacagcaccguggccagcagccuggugcugcuggugagccugggcgccaucagcuucuggaugugcagcaacggcagccugcagugcagaaucugcaucuga

SEQ ID NO: 162182 - RNA, 1698 nt, Artificial Sequence; identical to SEQ ID NO: 160356
  derived and/or modified CDS sequence (opt4) from hemagglutinin__InfluenzaA__ABW81512

SEQ ID NO: 162183 - RNA, 1698 nt, Artificial Sequence; identical to SEQ ID NO: 161445
  derived and/or modified CDS sequence (opt4) from hemagglutinin__InfluenzaA__ABW81513

SEQ ID NO: 162184 - RNA, 1698 nt, Artificial Sequence
  derived and/or modified CDS sequence (opt4) from hemagglutinin__InfluenzaA__ABW81514
augaaggugaagcugcuggugcugcugugcaccuucaccgccaccuacgccgacaccaucugcaucagcuaccacgccaacaacagcaccgacaccguggacaccgugcuggagaagaacgugaccgugacccacagcgugaaccugcuggaggacagccacaacggcaagcugugccugcugaagggcaucgccccccugcagcugggcaacugcagcguggccggcuggauccugggcaaccccgagugcgagcugcugaucagcaaggagagcuggagcuacaucguggagacccccaaccccgagaacggcaccugcuaccccggcuacuucgccgacuacgaggagcugagagagcagcugagcagcgugagcagcuucgagagauucgagaucuuccccaaggagagcagcuggcccaaccacaccgugaccggcgugagcgccagcugcagccacaacggcaagagcagcuucuacagaaaccugcuguggcugaccggcaagaacggccuguaccccaaccugagcaagagcuacgccaacaacaaggagaaggaggugcuggugcuguggggcgugcaccacccccccaacaucggcgaccagagagcccuguaccacaccgagaacgccuacgugagcguggugagcagccacuacagcagaagauucacccccgagaucgccaagagacccaaggugagagaccaggagggcagaaucaacuacuacuggacccugcuggagcccggcgacaccaucaucuucgaggccaacggcaaccugaucgcccccagauucgccuucgcccugagcagaggcuucggcagcggcaucaucaccagcaacgcccccauggacgagugcgacgccaagugccagaccccccagggcgccaucaacagcagccugcccuuccagaacgugcaccccgugaccaucggcgagugccccaaguacgugagaagcgccaagcugagaauggccaccggccugagaaacauccccagcauccagagcagaggccuguucggcgccaucgccggcuucaucgagggcggcuggaccggcaugguggacggcugguacggcuaccaccaccagaacgagcagggcagcggcuacgccgccgaccagaagagcacccagaacgccaucaacggcaucaccaacaaggugaacagcgugaucgagaagaugaacacccaguucaccgccgugggcaaggaguucagcaagcuggagagaagaauggagaaccugaacaagaagguggacgacggcuuccuggacaucuggaccuacaacgccgagcugcuggugcugcuggagaacgagagaacccuggacuuccacgacagcaacgugaagaaccuguacgagaaggugaagagccagcugaagaacaacgccaaggagaucggcaacggcugcuucgaguucuaccacaagugcaacgacgagugcauggagagcgugaagaacggcaccuacgacuaccccaaguacagcgaggagagcaagcugaacagagagaagaucgacggcgugaagcuggagagcaugggcguguaccagauccuggccaucuacagcaccguggccagcagccuggugcugcuggugagccugggcgccaucagcuucuggaugugcagcaacggcagccugcagugcagaaucugcaucuga

SEQ ID NO: 162185 - RNA, 1698 nt, Artificial Sequence; identical to SEQ ID NO: 161445
  derived and/or modified CDS sequence (opt4) from hemagglutinin__InfluenzaA__ABW81515

SEQ ID NO: 162186 - RNA, 1698 nt, Artificial Sequence; identical to SEQ ID NO: 161445
  derived and/or modified CDS sequence (opt4) from hemagglutinin__InfluenzaA__ABW81516

SEQ ID NO: 162187 - RNA, 1698 nt, Artificial Sequence
  derived and/or modified CDS sequence (opt4) from hemagglutinin__InfluenzaA__ABW81517
augaaggugaagcugcuggugcugcugugcaccuucaccgccaccuacgccgacaccaucugcaucggcuaccacgccaacaacagcaccgacaccguggacaccgugcuggagaagaacgugaccgugacccacagcgugaaccugcuggaggacagccacaacggcaagcugugccugcugaagggcaucgccccccugcagcugggcaacugcagcguggccggcuggauccugggcaaccccgagugcgagcugcugaucagcaaggagagcuggagcuacaucguggagacccccaaccccgagaacggcaccugcuaccccggcuacuucgccgacuacgaggagcugagagagcagcugagcagcaucagcagcuucgagagauucgagaucuuccccaaggagagcagcuggcccaaccacaccgugaccggcgugagcgccagcugcagccacaacggcaagagcagcuucuacagaaaccugcuguggcugaccggcaagaacggccuguaccccaaccugagcaagagcuacgccaacaacaaggagaaggaggugcuggugcuguggggcgugcaccacccccccaacaucggcgaccagagagcccuguaccacaccgagaacgccuacgugagcguggugagcagccacuacagcagaagauucacccccgagaucgccaagagacccaaggugagagaccaggagggcagaaucaacuacuacuggacccugcuggagcccggcgacaccaucaucuucgaggccaacggcaaccugaucgcccccagauucgccuucgcccugagcagaggcuucggcagcggcaucaucaccagcaacgcccccauggacgagugcgacgccaagugccagaccccccagggcgccaucaacagcagccugcccuuccagaacgugcaccccgugaccaucggcgagugccccaaguacgugagaagcgccaagcugagaauggccaccggccugagaaacauccccagcauccagagcagaggccuguucggcgccaucgccggcuucaucgagggcggcuggaccggcaugguggacggcugguacggcuaccaccaccagaacgagcagggcagcggcuacgccgccgaccagaagagcacccagaacgccaucaacggcaucaccaacaaggugaacagcgugaucgagaagaugaacacccaguucaccgccgugggcaaggaguucagcaagcuggagagaagaauggagaaccugaacaagaagguggacgacggcuuccuggacaucuggaccuacaacgccgagcugcuggugcugcuggagaacgagagaacccuggacuuccacgacagcaacgugaagaaccuguacgagaaggugaagagccagcugaagaacaacgccaaggagaucggcaacggcugcuucgaguucuaccacaagugcaacgacgagugcauggagagcgugaagaacggcaccuacgacuaccccaaguacagcgaggagagcaagcugaacagagagaagaucgacggcgugaagcuggagagcaugggcguguaccagauccuggccaucuacagcaccguggccagcagccuggugcugcuggugagccugggcgccaucagcuucuggaugugcagcaacggcagccugcagugcagaaucugcaucuga

SEQ ID NO: 162188 - RNA, 1698 nt, Artificial Sequence
  derived and/or modified CDS sequence (opt4) from hemagglutinin__InfluenzaA__ABW81518
augaaggugaagcugcuggugcugcugugcaccuacaccgccaccuacgccgacaccaucugcaucggcuaccacgccaacaacagcaccgacaccguggacaccgugcuggagaagaacgugaccgugacccacagcgugaaccugcuggaggacagccacaacggcaagcugugccugcugaagggcaucgccccccugcagcugggcaacugcagcguggccggcuggauccugggcaaccccgagugcgagcugcugaucagcaaggagagcuggagcuacaucguggagacccccaaccccgagaacggcaccugcuaccccggcuacuucgccgacuacgaggagcugagagagcagcugagcagcgugagcagcuucgagagauucgagaucuuccccaaggagagcagcuggcccaaccacaccgugaccggcgugagcgccagcugcagccacaacggcaagagcagcuucuacagaaaccugcuguggcugaccggcaagaacggccuguaccccaaccugagcaagagcuacgccaacaacaaggagaaggaggugcuggugcuguggggcgugcaccacccccccaacaucggcgaccagagagcccuguaccacaccgagaacgccuacgugagcguggugagcagccacuacagcagaagauucacccccgagaucgccaagagacccaaggugagagaccaggagggcagaaucaacuacuacuggacccugcuggagcccggcgacaccaucaucuucgaggccaacggcaaccugaucgcccccagauucgccuucgcccugagcagaggcuucggcagcggcaucaucaccagcaacgcccccauggacgagugcgacgccaagugccagaccccccagggcgccaucaacagcagccugcccuuccagaacgugcaccccgugaccaucggcgagugccccaaguacgugagaagcgccaagcugagaauggccaccggccugagaaacauccccagcauccagagcagaggccuguucggcgccaucgccggcuucaucgagggcggcuggaccggcaugguggacggcugguacggcuaccaccaccagaacgagcagggcagcggcuacgccgccgaccagaagagcacccagaacgccaucaacggcaucaccaacaaggugaacagcgugaucgagaagaugaacacccaguucaccgccgugggcaaggaguucagcaagcuggagagaagaauggagaaccugaacaagaagguggacgacggcuuccuggacaucuggaccuacaacgccgagcugcuggugcugcuggagaacgagagaacccuggacuuccacgacagcaacgugaagaaccuguacgagaaggugaagagccagcugaagaacaacgccaaggagaucggcaacggcugcuucgaguucuaccacaagugcaacgacgagugcauggagagcgugaagaacggcaccuacgacuaccccaaguacagcgaggagagcaagcugaacagagagaagaucgacggcgugaagcuggagagcaugggcguguaccagauccuggccaucuacagcaccguggccagcagccuggugcugcuggugagccugggcgccaucagcuucuggaugugcagcaacggcagccugcagugcagaaucugcaucuga

SEQ ID NO: 162189 - RNA, 1698 nt, Artificial Sequence
  derived and/or modified CDS sequence (opt4) from hemagglutinin__InfluenzaA__ABW81519
augaaggugaagcugcuggugcugcugugcaccuucaccgccaccuacgccgacaccaucugcaucggcuaccacgccaacaacagcaccgacaccguggacaccgugcuggagaagaacgugaccgugacccacagcgugaaccugcuggaggacagccacaacggcaagcugugccugcugaagggcaucgccccccugcagcugggcaacugcagcguggccggcuggauccugggcaaccccgagugcgagcugcugaucagcaaggagagcuggagcuacaucguggagacccccaaccccgagaacggcaccugcuaccccggcuacuucgccgacuacgaggagcugagagagcagcugagcagcgugagcagcuucgagagauucgagaucuuccccaaggagagcagcuggcccaaccacaccgugaccggcgugagcgccagcugcagccacaacggcaagagcagcuucuacagaaaccugcuguggcugaccggcaagaacggccuguaccccaaccugagcaagagcuacgccaacaacaaggagaaggaggugcuggugcuguggggcgugcaccacccccccaacaucggcgaccagagagcccuguaccacaccgagaacgcccacgugagcguggugagcagccacuacagcagaagauucacccccgagaucgccaagagacccaaggugagagaccaggagggcagaaucaacuacuacuggacccugcuggagcccggcgacaccaucaucuucgaggccaacggcaaccugaucgcccccagauucgccuucgcccugagcagaggcuucggcagcggcaucaucaccagcaacgcccccauggacgagugcgacgccaagugccagaccccccagggcgccaucaacagcagccugcccuuccagaacgugcaccccgugaccaucggcgagugccccaaguacgugagaagcgccaagcugagaauggccaccggccugagaaacauccccagcauccagagcagaggccuguucggcgccaucgccggcuucaucgagggcggcuggaccggcaugguggacggcugguacggcuaccaccaccagaacgagcagggcagcggcuacgccgccgaccagaagagcacccagaacgccaucaacggcaucaccaacaaggugaacagcgugaucgagaagaugaacacccaguucaccgccgugggcaaggaguucagcaagcuggagagaagaauggagaaccugaacaagaagguggacgacggcuuccuggacaucuggaccuacaacgccgagcugcuggugcugcuggagaacgagagaacccuggacuuccacgacagcaacgugaagaaccuguacgagaaggugaagagccagcugaagaacaacgccaaggagaucggcaacggcugcuucgaguucuaccacaagugcaacgacgagugcauggagagcgugaagaacggcaccuacgacuaccccaaguacagcgaggagagcaagcugaacagagagaagaucgacggcgugaagcuggagagcaugggcguguaccagauccuggccaucuacagcaccguggccagcagccuggugcugcuggugagccugggcgccaucagcuucuggaugugcagcaacggcagccugcagugcagaaucugcaucuga

SEQ ID NO: 162190 - RNA, 1698 nt, Artificial Sequence
  derived and/or modified CDS sequence (opt4) from hemagglutinin__InfluenzaA__ABW81520
augaaggugaagcugcuggugcugcugugcaccuucaccgccaccuacgccgacaccaucugcaucggcuaccacgccaacaacagcaccgacaccguggacaccgugcuggagaagaacgugaccgugacccacagcgugaaccugcuggaggacagccacaacggcaagcugugccugcugaagggcaucgccccccugcagcugggcagcugcagcguggccggcuggauccugggcaaccccgagugcgagcugcugaucagcaaggagagcuggagcuacaucguggagacccccaaccccgagaacggcaccugcuaccccggcuacuucgccgacuacgaggagcugagagagcagcugagcagcgugagcagcuucgagagauucgagaucuuccccaaggagagcagcuggcccaaccacaccgugaccggcgugagcgccagcugcagccacaacggcaagagcagcuucuacagaaaccugcuguggcugaccggcaagaacggccuguaccccaaccugagcaagagcuacgccaacaacaaggagaaggaggugcuggugcuguggggcgugcaccacccccccaacaucggcgaccagagagcccuguaccacaccgagaacgccuacgugagcguggugagcagccacuacagcagaagauucacccccgagaucgccaagagacccaaggugagagaccaggagggcagaaucaacuacuacuggacccugcuggagcccggcgacaccaucaucuucgaggccaacggcaaccugaucgcccccagauucgccuucgcccugagcagaggcuucggcagcggcaucaucaccagcaacgcccccauggacgagugcgacgccaagugccagaccccccagggcgccaucaacagcagccugcccuuccagaacgugcaccccgugaccaucggcgagugccccaaguacgugagaagcgccaagcugagaauggccaccggccugagaaacauccccagcauccagagcagaggccuguucggcgccaucgccggcuucaucgagggcggcuggaccggcaugguggacggcugguacggcuaccaccaccagaacgagcagggcagcggcuacgccgccgaccagaagagcacccagaacgccaucaacggcaucaccaacaaggugaacagcgugaucgagaagaugaacacccaguucaccgccgugggcaaggaguucagcaagcuggagagaagaauggagaaccugaacaagaagguggacgacggcuuccuggacaucuggaccuacaacgccgagcugcuggugcugcuggagaacgagagaacccuggacuuccacgacagcaacgugaagaaccuguacgagaaggugaagagccagcugaagaacaacgccaaggagaucggcaacggcugcuucgaguucuaccacaagugcaacgacgagugcauggagagcgugaagaacggcaccuacgacuaccccaaguacagcgaggagagcaagcugaacagagagaagaucgacggcgugaagcuggagagcaugggcguguaccagauccuggccaucuacagcaccguggccagcagccuggugcugcuggugagccugggcgccaucagcuucuggaugugcagcaacggcagccugcagugcagaaucugcaucuga

SEQ ID NO: 162191 - RNA, 1698 nt, Artificial Sequence
  derived and/or modified CDS sequence (opt4) from hemagglutinin__InfluenzaA__ABW81521
augaaggugaagcugcuggugcugcugugcaccuucaccgccaccuacgccgacaccaucugcaucggcuaccacgccaacaacagcaccgacaccguggacaccgugcuggagaagaacgugaccgugacccacagcgugaaccugcuggaggacagccacaacggcaagcugugccugcugaagggcaucgccccccugcagcugggcaacugcagcguggccggcuggauccugggcaaccccgagugcgagcugcugaucagcaaggagagcuggagcuacaucguggagacccccaaccccgagaacggcaccugcuaccccggcuacuucgccgacuacgaggagcugagagagcagcugagcagcgugagcagcuucgagagauucgagaucuuccccaaggagagcagcuggcccaaccacaccgugaccggcgugagcgccagcugcagccacaacggcaagagcagcuucuacagaaaccugcuguggcugaccggcaagaacggccuguaccccaaccugagcaagagcuacgccaacaacaaggagaaggaggugcuggugcuguggggcgugcaccacccccccaacaucggcgaccagagagcccuguaccacaccgagaacgccuacgugagcguggugagcagccacuacagcagaagauucacccccgagaucgccaagagacccaaggugagagaccaggagggcagaaucaacuacuacuggacccugcuggagcccggcgacaccaucaucuucgaggccaacggcaaccugaucgcccccagauucgccuucgcccugagcagaggcuucggcagcggcaucaucagcagcaacgcccccauggacgagugcgacgccaagugccagaccccccagggcgccaucaacagcagccugcccuuccagaacgugcaccccgugaccaucggcgagugccccaaguacgugagaagcgccaagcugagaauggccaccggccugagaaacauccccagcauccagagcagaggccuguucggcgccaucgccggcuucaucgagggcggcuggaccggcaugguggacggcugguacggcuaccaccaccagaacgagcagggcagcggcuacgccgccgaccagaagagcacccagaacgccaucaacggcaucaccaacaaggugaacagcgugaucgagaagaugaacacccaguucaccgccgugggcaaggaguucagcaagcuggagagaagaauggagaaccugaacaagaagguggacgacggcuuccuggacaucuggaccuacaacgccgagcugcuggugcugcuggagaacgagagaacccuggacuuccacgacagcaacgugaagaaccuguacgagaaggugaagagccagcugaagaacaacgccaaggagaucggcaacggcugcuucgaguucuaccacaagugcaacgacgagugcauggagagcgugaagaacggcaccuacgacuaccccaaguacagcgaggagagcaagcugaacagagagaagaucgacggcgugaagcuggagagcaugggcguguaccagauccuggccaucuacagcaccguggccagcagccuggugcugcuggugagccugggcgccaucagcuucuggaugugcagcaacggcagccugcagugcagaaucugcaucuga

SEQ ID NO: 162192 - RNA, 1698 nt, Artificial Sequence; identical to SEQ ID NO: 161445
  derived and/or modified CDS sequence (opt4) from hemagglutinin__InfluenzaA__ABW81522

SEQ ID NO: 162193 - RNA, 1698 nt, Artificial Sequence; identical to SEQ ID NO: 161445
  derived and/or modified CDS sequence (opt4) from hemagglutinin__InfluenzaA__ABW81523

SEQ ID NO: 162194 - RNA, 1698 nt, Artificial Sequence
  derived and/or modified CDS sequence (opt4) from hemagglutinin__InfluenzaA__ABW81524
augaaggugaagcugcuggugcugcugugcaccuucaccgccaccuacgccgacaccaucugcaucggcuaccacgccaacaacagcaccgacaccaucgacaccgugcuggagaagaacgugaccgugacccacagcgugaaccugcuggaggacagccacaacggcaagcugugccugcugaagggcaucgccccccugcagcugggcaacugcagcguggccggcuggauccugggcaaccccgagugcgagcugcugaucagcaaggagagcuggagcuacaucguggagacccccaaccccgagaacggcaccugcuaccccggcuacuucgccgacuacgaggagcugagagagcagcugagcagcgugagcagcuucgagagauucgagaucuuccccaaggagagcagcuggcccaaccacaccgugaccggcgugagcgccagcugcagccacaacggcaagagcagcuucuacagaaaccugcuguggcugaccggcaagaacggccuguaccccaaccugagcaagagcuacgccaacaacaaggagaaggaggugcuggugcuguggggcgugcaccacccccccaacaucggcgaccagagagcccuguaccacaccgagaacgccuacgugagcguggugagcagccacuacagcagaagauucacccccgagaucgccaagagacccaaggugagagaccaggagggcagaaucaacuacuacuggacccugcuggagcccggcgacaccaucaucuucgaggccaacggcaaccugaucgcccccagauucgccuucgcccugagcagaggcuucggcagcggcaucaucaccagcaacgcccccauggacgagugcgacgccaagugccagaccccccagggcgccaucaacagcagccugcccuuccagaacgugcaccccgugaccaucggcgagugccccaaguacgugagaagcgccaagcugagaauggccaccggccugagaaacauccccagcauccagagcagaggccuguucggcgccaucgccggcuucaucgagggcggcuggaccggcaugguggacggcugguacggcuaccaccaccagaacgagcagggcagcggcuacgccgccgaccagaagagcacccagaacgccaucaacggcaucaccaacaaggugaacagcgugaucgagaagaugaacacccaguucaccgccgugggcaaggaguucagcaagcuggagagaagaauggagaaccugaacaagaagguggacgacggcuuccuggacaucuggaccuacaacgccgagcugcuggugcugcuggagaacgagagaacccuggacuuccacgacagcaacgugaagaaccuguacgagaaggugaagagccagcugaagaacaacgccaaggagaucggcaacggcugcuucgaguucuaccacaagugcaacgacgagugcauggagagcgugaagaacggcaccuacgacuaccccaaguacagcgaggagagcaagcugaacagagagaagaucgacggcgugaagcuggagagcaugggcguguaccagauccuggccaucuacagcaccguggccagcagccuggugcugcuggugagccugggcgccaucagcuucuggaugugcagcaacggcagccugcagugcagaaucugcaucuga

SEQ ID NO: 162195 - RNA, 1698 nt, Artificial Sequence
  derived and/or modified CDS sequence (opt4) from hemagglutinin__InfluenzaA__ABW81526
augaaggugaagcugcuggugcugcugugcaccuucaccgccaccuacgccgacaccaucugcaucggcuaccacgccaacaacagcaccgacaccguggacaccgugcuggagaagaacgugaccgugacccacagcgugaaccugcuggaggacagccacaacggcaagcugugccugcugaagggcaucgccccccugcagcugggcaacugcagcguggccggcuggauccugggcaaccccgagugcgagcugcugaucagcaaggagagcuggagcuacaucguggagaagcccaaccccgagaacggcaccugcuaccccggccacuucgccgacuacgaggagcugagagagcagcugagcagcgugagcagcuucgagagauucgagaucuuccccaaggagagcagcuggcccaaccacaccgugaccggcgugagcgccagcugcagccacaacggcaagagcagcuucuacaagaaccugcuguggcugaccggcaagaacggccuguaccccaaccugagcaagagcuacgccaacaacaaggagaaggaggugcuggugcuguggggcgugcaccacccccccaacaucggcgaccagaaggcccuguaccacaccgagaacgccuacgugagcguggugagcagccacuacagcagaaaguucacccccgagaucgccaagagacccaaggugagagaccaggagggcagaaucaacuacuacuggacccugcuggagcccggcgacaccaucaucuucgaggccaacggcaaccugaucgcccccagauacgccuucgcccugagcagaggcuucggcagcggcaucaucaacagcaacgcccccaugggcaagugcgacgccaagugccagaccccccagggcgccaucaacagcagccugcccuuccagaacgugcaccccgugaccaucggcgagugccccaaguacgugagaagcgccaagcugagaauggugaccggccugagaaacauccccagcauccagagcagaggccuguucggcgccaucgccggcuucaucgagggcggcuggaccggcaugguggacggcugguacggcuaccaccaccagaacgagcagggcagcggcuacgccgccgaccagaagagcacccagaacgccaucaacggcaucaccaacaaggugaacagcgugaucgagaagaugaacacccaguucaccgccgugggcaaggaguucaacaagcuggagagaagaauggagaaccugaacaagaagguggacgacggcuucaucgacaucuggaccuacaacgccgagcugcuggugcugcuggagaacgagagaacccuggaccugcacgacagcaacgugaagaaccuguacgagaaggugaagagccagcugaagaacaacgccaaggagaucggcaacggcugcuucgaguucuaccacaagugcaacgacgagugcauggagagcgugaagaacggcaccuacgacuaccccaaguacagcgaggagagcaagcugaacagagagaagaucgacggcgugaagcuggagagcaugggcguguaccagauccuggccaucuacagcaccguggccagcagccuggugcugcuggugagccugggcgccaucagcuucuggaugugcagcaacggcagccugcagugcagaaucugcaucuga

SEQ ID NO: 162196 - RNA, 1698 nt, Artificial Sequence
  derived and/or modified CDS sequence (opt4) from hemagglutinin__InfluenzaA__ABW81527
augaaggugaagcugcuggugcugcugugcaccuucaccgccaccuacgccgacaccaucugcaucggcuaccacgccaacaacagcaccgacaccguggacaccgugcuggagaagaacgugaccgugacccacagcgugaaccugcuggaggacagccacaacggcaagcugugccugcugaagggcaucgccccccugcagcugggcaacugcagcguggccggcuggauccugggcaaccccgagugcgagcugcugaucagcaaggagagcuggagcuacaucguggagacccccaaccccgagaacggcaccugcuaccccggcuacuucgccgacuacgaggagcugagagagcagcugagcagcgugagcagcuucgagagauucgagaucuuccccaaggagagcagcuggcccaaccacaccgugaccggcgugagcgccagcugcagccacaacggcaagagcagcuucuacagaaaccugcuguggcugaccggcaagaacggccuguaccccaaccugagcaagagcuacgccaacaacaaggagaaggaggugcuggugcuguggggcgugcaccacccccccaacaucggcgaccagagagcccuguaccacaccgagaacgccuacgugagcguggugagcagccacuacagcagaagauucacccccgagaucgccaagagacccaaggugagaaaccaggagggcagaaucaacuacuacuggacccugcuggagcccggcgacaccaucaucuucgaggccaacggcaaccugaucgcccccagauucgccuucgcccugagcagaggcuucggcagcggcaucaucaccagcaacgcccccauggacgagugcgacgccaagugccagaccccccagggcgccaucaacagcagccugcccuuccagaacgugcaccccgugaccaucggcgagugccccaaguacgugagaagcgccaagcugagaauggccaccggccugagaaacauccccagcauccagagcagaggccuguucggcgccaucgccggcuucaucgagggcggcuggaccggcaugguggacggcugguacggcuaccaccaccagaacgagcagggcagcggcuacgccgccgaccagaagagcacccagaacgccaucaacggcaucaccaacaaggugaacagcgugaucgagaagaugaacacccaguucaccgccgugggcaaggaguucagcaagcuggagagaagaauggagaaccugaacaagaagguggacgacggcuuccuggacaucuggaccuacaacgccgagcugcuggugcugcuggagaacgagagaacccuggacuuccacgacagcaacgugaagaaccuguacgagaaggugaagagccagcugaagaacaacgccaaggagaucggcaacggcugcuucgaguucuaccacaagugcaacgacgagugcauggagagcgugaagaacggcaccuacgacuaccccaaguacagcgaggagagcaagcugaacagagagaagaucgacggcgugaagcuggagagcaugggcguguaccagauccuggccaucuacagcaccguggccagcagccuggugcugcuggugagccugggcgccaucagcuucuggaugugcagcaacggcagccugcagugcagaaucugcaucuga

SEQ ID NO: 162197 - RNA, 1698 nt, Artificial Sequence
  derived and/or modified CDS sequence (opt4) from hemagglutinin__InfluenzaA__ABW81528
augaaggugaagcugcuggugcugcugugcaccuucaccgccaccuacgccgacaccaucugcaucggcuaccacgccaacaacagcaccgacaccguggacaccgugcuggagaagaacgugaccgugacccacagcgugaaccugcuggaggacagccacaacggcaagcugugccugcugaagggcaucgccccccugcagcugggcaacugcagcguggccggcuggauccugggcaaccccgagugcgagcugcugaucagcaaggagagcuggagcuacaucguggagacccccaaccccgagaacggcaccugcuaccccggccacuucgccgacuacgaggagcugagagagcagcugagcagcgugagcagcuucgagagauucgagaucuuccccaaggagagcagcuggcccaaccacaccgugaccggcgugagcgccagcugcagccacaacggcaagagcagcuucuacagaaaccugcuguggcugaccggcaagaacggccuguaccccaaccugagcaagagcuacgccaacaacaaggagaaggaggugcuggugcuguggggcauccaccacccccccaacaucggcgaccagagagcccuguaccacaccgagaacgccuacgugagcguggugagcagccacuacagcagaagauucacccccgagaucgccaagagacccaaggugagagaccaggagggcagaaucaacuacuacuggacccugcuggagcccagagacaccaucaucuucgaggccaacggcaaccugaucgcccccagauucgccuucgcccugagcagaggcuucggcagcggcaucaucaccagcaacgcccccauggacgagugcgacgccaagugccagaccccccagggcgccaucaacagcagccugcccuuccagaacgugcaccccgugaccaucggcgagugccccaaguacgugagaagcgccaagcugagaauggugaccggccugagaaacauccccagcauccagagcagaggccuguucggcgccaucgccggcuucaucgagggcggcuggaccggcaugguggacggcugguacggcuaccaccaccagaacgagcagggcagcggcuacgccgccgaccagaagagcacccagaacgccaucaacggcaucaccaacaaggugaacagcgugaucgagaagaugaacacccaguucaccgccgugggcaaggaguucaacaagcuggagagaagaauggagaaccugaacaagaagguggacgacggcuuccuggacaucuggaccuacaacgccgagcugcuggugcugcuggagaacgagagaacccuggacuuccacgacagcaacgugaagaaccuguacgagaaggugaagagccagcugaagaacaacgccaaggagaucggcaacggcugcuucgaguucuaccacaagugcaacgacgagugcauggagagcgugaagaacggcaccuacgacuaccccaaguacagcgaggagagcaagcugaacagagagaagaucgacggcgugaagcuggagagcaugggcguguaccagauccuggccaucuacagcaccguggccagcagccuggugcugcuggugagccugggcgccaucagcuucuggaugugcagcaacggcagccugcagugcagaaucugcaucuga

SEQ ID NO: 162198 - RNA, 1698 nt, Artificial Sequence
  derived and/or modified CDS sequence (opt4) from hemagglutinin__InfluenzaA__ABW81529
augaaggugaagcugcugauccugcugugcaccuucaccgccaccuacgccgacaccaucugcaucggcuaccacgccaacaacagcaccgacaccguggacaccgugcuggagaagaacgugaccgugacccacagcgugaaccugcuggaggacagccacaacggcaagcugugccugcugaagggcaucgccccccugcagcugggcaacugcagcguggccggcuggauccugggcaaccccgagugcgagcugcugaucagcagagagagcuggagcuacaucguggagacccccaaccccgagaacggcaccugcuaccccggcuacuucgccgacuacgaggagcugagagagcagcugagcagcgugagcagcuucgagagauucgagaucuuccccaaggagagcagcuggcccaaccacaccgugaccggcgugagcgccagcugcagccacaacggcaagagcagcuucuacagaaaccugcuguggcugaccggcaagaacggccuguaccccaaccugagcaagagcuacgccaacaacaaggagaaggaggugcugauccuguggggcgugcaccacccccccaacaucagagaccagaugacccuguaccacaccgagaacgccuacgugagcguggugagcagccacuacagcagaagauucacccccgagaucaccaagagacccaaggugagagaccaggagggcagaaucaacuacuacuggacccugcuggagcccggcgacaccaucaucuucgaggccaacggcaaccugaucgcccccugguacgccuucgcccugagcagaggcuucggcagcggcaucaucaccagcaacgcccccauggacgagugcgacgccaagugccagacccccaagggcgccaucaacagcagccugcccuuccagaacgugcaccccgugaccaucggcgagugccccaaguacgugagaagcgccaagcugagaauggugaccggccugagaaacauccccagcauccagagcagaggccuguucggcgccaucgccggcuucaucgagggcggcuggaccggcaugguggacggcugguacggcuaccaccaccagaacgagcagggcagcggcuacgccgccgaccagaagagcacccagaacgccaucaacggcaucaccaacaaggugaacagcgugaucgagaagaugaacacccaguucaccgccgugggcaaggaguucaacaagcuggagagaagaauggagaaccugaacaagaagguggacgacggcuuccuggacaucuggaccuacaacgccgagcugcuggugcugcuggagaacgagagaacccuggacuuccacgacagcaacgugaagaaccuguacgagaaggugaagagccagcugaagaacaacgccaaggagaucggcaacggcugcuucgaguucuaccacaagugcaacaacgagugcauggagagcgugaagaacggcaccuacgacuaccccaaguacagcgaggagagcaagcugaacagagagaagaucgacggcgugaagcuggagagcaugggcguguaccagauccuggccaucuacagcaccguggccagcagccuggugcugcuggugagccugggcgccaucagcuucuggaugugcagcaacggcagccugcagugcagaaucugcaucuga

SEQ ID NO: 162199 - RNA, 1698 nt, Artificial Sequence
  derived and/or modified CDS sequence (opt4) from hemagglutinin__InfluenzaA__ABW81530
augaaggugaagcugcugauccugcugugcaccuucaccgccaccuacgccgacaccaucugcaucggcuaccacgccaacaacagcaccgacaccguggacaccgugcuggagaagaacgugaccgugacccacagcgugaaccugcuggaggacagccacaacggcaagcugugccugcugaagggcaucgccccccugcagcugggcaacugcagcguggccggcuggauccugggcaaccccgagugcgagcugcugaucagcaaggagagcuggagcuacaucguggagacccccaaccccgagaacggcgccugcuaccccggcuacuucgccgacuacgaggagcugagagagcagcugagcagcgugagcagcuucgagagauucgagaucuuccccaaggagagcagcuggcccaaccacaccgugaccggcgugagcgccagcugcagccacaacggcaagagcagcuucuacagaaaccugcuguggcugaccggcaagaacggccuguaccccaaccugagcaagagcuacgccaacaacaaggagaaggaggugcugauccuguggggcgugcaccacccccccaacaucggcgaccagagaacccuguaccacaccgagaacgccuacgugagcguggugagcagccacuacagcagaagauucacccccgagaucaccaagagacccaaggugagagaccaggagggcagaaucaacuacuacuggacccugcuggagcccggcgacaccaucaucuucgaggccaacggcaaccugaucgcccccugguacgccuucgcccugagcagaggcuucggcagcggcaucaucaccagcaacgcccccauggacgagugcgacgccaagugccagaccccccagggcgccaucaacagcagccugcccuuccagaacgugcaccccgugaccaucggcgagugccccaaguacgugagaagcgccaagcugagaauggugaccggccugagaaacauccccagcauccagagcagaggccuguucggcgccaucgccggcuucaucgagggcggcuggaccggcaugguggacggcugguacggcuaccaccaccagaacgagcagggcagcggcuacgccgccgaccagaagagcacccagaacgccaucaacagaaucaccaacaaggugaacagcgugaucgagaagaugaacacccaguucaccgccgugggcaaggaguucaacaagcuggagagaagaauggagaaccugaacaagaagguggacgacggcuuccuggacaucuggaccuacaacgccgagcugcuggugcugcuggagaacgagagaacccuggacuuccacgacagcaacgugaagaaccuguacgagaaggugaagagccagcugaagaacaacgccaaggagaucggcaacggcugcuucgaguucuaccacaagugcaacaacgagugcauggagagcgugaagaacggcaccuacgacuaccccaaguacagcgaggagagcaagcugaacagagagaagaucgacggcgugaagcuggacagcaugggcguguaccagauccuggccaucuacagcaccguggccagcagccuggugcugcuggugagccugggcgccaucagcuucuggaugugcagcaacggcagccugcagugcagaaucugcaucuga

SEQ ID NO: 162200 - RNA, 1698 nt, Artificial Sequence; identical to SEQ ID NO: 160386
  derived and/or modified CDS sequence (opt4) from hemagglutinin__InfluenzaA__ABW81531

SEQ ID NO: 162201 - RNA, 1698 nt, Artificial Sequence
  derived and/or modified CDS sequence (opt4) from hemagglutinin__InfluenzaA__ABW81532
augaaggugaagcugcugauccugcugugcaccuucaccgccaccuacgccgacaccaucugcaucggcuaccacgccaacaacagcaccgacaccguggacaccgugcuggagaagaacgugaccgugacccacagcgugaaccugcuggaggacagccacaacggcaagcugugccugcugaagggcaucgccccccugcagcugggcaacugcagcguggccggcuggauccugggcaaccccgagugcgagcugcugaucagcaaggagagcuggagcuacaucguggagacccccaaccccgagaacggcgccugcuaccccugguacuucgccgacuacgaggagcugagagagcagcugagcagcgugagcagcuucgagagauucgagaucuuccccaaggagagcagcuggcccaaccacaccgugaccggcgugagcgccagcugcagccacaacggcaagagcagcuucuacagaaaccugcuguggcugaccggcaagaacggccuguaccccaaccugagcaagagcuacgccaacaacaaggagaaggaggugcugauccuguggggcgugcaccacccccccaacaucggcaaccagagaacccuguaccacaccgagaacgccuacgugagcguggugagcagccacuacagcagaagauucacccccgagaucaccaagagacccaaggugagagaccaggagggcagaaucaacuacuacuggacccugcuggagcccggcgacaccaucaucuucgaggccaacggcaaccugaucgcccccugguacgccuucgcccugagcagaggcuucggcagcggcaucaucaccagcaacgcccccauggacgagugcgacgccaagugccagaccccccagggcgccaucaacagcagccugcccuuccagaacgugcaccccgugaccaucggcgagugccccaaguacgugagaagcgccaagcugagaauggugaccggccugagaaacauccccagcauccagagcagaggccuguucggcgccaucgccggcuucaucgagggcggcuggaccggcaugguggacggcugguacggcuaccaccaccagaacgagcagggcagcggcuacgccgccgaccagaagagcacccagaacgccaucaacggcaucaccaacaaggugaacagcgugaucgagaagaugaacacccaguucaccgccgugggcaaggaguucaacaagcuggagagaagaauggagaaccugaacaagaagguggacgacggcuuccuggacaucuggaccuacaacgccgagcugcuggugcugcuggagaacgagagaacccuggacuuccacgacagcaacgugaagaaccuguacgagaaggugaagagccagcugaagaacaacgccaaggagaucggcaacggcugcuucgaguucuaccacaagugcaacaacgagugcauggagagcgugaagaacggcaccuacgacuaccccaaguacagcgaggagagcaagcugaacagagagaagaucgacggcgugaagcuggacagcaugggcguguaccagauccuggccaucuacagcaccguggccagcagccuggugcugcuggugagccugggcgccaucagcuucuggaugugcagcaacggcagccugcagugcagaaucugcaucuga

SEQ ID NO: 162202 - RNA, 1698 nt, Artificial Sequence; identical to SEQ ID NO: 162016
  derived and/or modified CDS sequence (opt4) from hemagglutinin__InfluenzaA__ABW86321

SEQ ID NO: 162203 - RNA, 1698 nt, Artificial Sequence; identical to SEQ ID NO: 161981
  derived and/or modified CDS sequence (opt4) from hemagglutinin__InfluenzaA__ABW86332

SEQ ID NO: 162204 - RNA, 1698 nt, Artificial Sequence; identical to SEQ ID NO: 161970
  derived and/or modified CDS sequence (opt4) from hemagglutinin__InfluenzaA__ABW86343

SEQ ID NO: 162205 - RNA, 1698 nt, Artificial Sequence; identical to SEQ ID NO: 161974
  derived and/or modified CDS sequence (opt4) from hemagglutinin__InfluenzaA__ABW86354

SEQ ID NO: 162206 - RNA, 1698 nt, Artificial Sequence; identical to SEQ ID NO: 161974
  derived and/or modified CDS sequence (opt4) from hemagglutinin__InfluenzaA__ABW86365

SEQ ID NO: 162207 - RNA, 1698 nt, Artificial Sequence; identical to SEQ ID NO: 161990
  derived and/or modified CDS sequence (opt4) from hemagglutinin__InfluenzaA__ABW86376

SEQ ID NO: 162208 - RNA, 1698 nt, Artificial Sequence; identical to SEQ ID NO: 161974
  derived and/or modified CDS sequence (opt4) from hemagglutinin__InfluenzaA__ABW86387

SEQ ID NO: 162209 - RNA, 1698 nt, Artificial Sequence; identical to SEQ ID NO: 161970
  derived and/or modified CDS sequence (opt4) from hemagglutinin__InfluenzaA__ABW86409

SEQ ID NO: 162210 - RNA, 1698 nt, Artificial Sequence; identical to SEQ ID NO: 161970
  derived and/or modified CDS sequence (opt4) from hemagglutinin__InfluenzaA__ABW86431

SEQ ID NO: 162211 - RNA, 1698 nt, Artificial Sequence; identical to SEQ ID NO: 161974
  derived and/or modified CDS sequence (opt4) from hemagglutinin__InfluenzaA__ABW86442

SEQ ID NO: 162212 - RNA, 1698 nt, Artificial Sequence; identical to SEQ ID NO: 161990
  derived and/or modified CDS sequence (opt4) from hemagglutinin__InfluenzaA__ABW86453

SEQ ID NO: 162213 - RNA, 1698 nt, Artificial Sequence; identical to SEQ ID NO: 161974
  derived and/or modified CDS sequence (opt4) from hemagglutinin__InfluenzaA__ABW86464

SEQ ID NO: 162214 - RNA, 1698 nt, Artificial Sequence; identical to SEQ ID NO: 161990
  derived and/or modified CDS sequence (opt4) from hemagglutinin__InfluenzaA__ABW86475

SEQ ID NO: 162215 - RNA, 1698 nt, Artificial Sequence; identical to SEQ ID NO: 161970
  derived and/or modified CDS sequence (opt4) from hemagglutinin__InfluenzaA__ABW86486

SEQ ID NO: 162216 - RNA, 1698 nt, Artificial Sequence; identical to SEQ ID NO: 162016
  derived and/or modified CDS sequence (opt4) from hemagglutinin__InfluenzaA__ABW86497

SEQ ID NO: 162217 - RNA, 1698 nt, Artificial Sequence; identical to SEQ ID NO: 161974
  derived and/or modified CDS sequence (opt4) from hemagglutinin__InfluenzaA__ABW86508

SEQ ID NO: 162218 - RNA, 1698 nt, Artificial Sequence
  derived and/or modified CDS sequence (opt4) from hemagglutinin__InfluenzaA__ABW86519
augaaggugaagcugcuggugcugcugugcaccuucaccgccaccuacgccgacaccaucugcaucggcuaccacgccaacaacagcaccgacaccguggacaccgugcuggagaagaacgugaccgugacccacagcgugaaccugcuggaggacagccacaacggcaagcugugccugcugaagggcaucgccccccugcagcugggcaacugcagcguggccggcuggauccugggcaaccccgagugcgagcugcugaucagcaaggagagcuggagcuacaucguggagacccccaaccccgagaacggcaccugcuaccccggcuacuucgccgacuacgaggagcugagagagcagcugagcagcgugagcagcuucgagagauucgagaucuuccccaaggagagcagcuggcccaaccacaccgugaccggcgugagcgccagcugcagccacaacggcaagagcagcuucuacagaaaccugcuguggcugaccggcaagaacggccuguaccccaaccugagcaagagcuacgccaacaacaaggagaaggaggugcuggugcuguggggcgugcaccacccccccaacaucggcgaccagagagcccuguaccacaccgagaacgccuacgugagcguggugagcagccacuacagcagaagauucacccccgagaucgccaagagacccaaggugagaaaccaggagggcagaaucaacuacuacuggacccugcuggagcccggcgacaccaucaucuucgaggccaacggcaaccugaucgcccccagauucgccuucgcccugagcagaggcuucggcagcggcaucaucaccagcaacgcccccaugggcgagugcgacgccaagugccagaccccccagggcgccaucaacagcagccugcccuuccagaacgugcaccccgugaccaucggcgagugccccaaguacgugagaagcgccaagcugagaauggugaccggccugagaaacauccccagcauccagagcagaggccuguucggcgccaucgccggcuucaucgagggcggcuggaccggcaugguggacggcugguacggcuaccaccaccagaacgagcagggcagcggcuacgccgccgaccagaagagcacccagaacgccaucaacggcaucaccaacaaggugaacagcgugaucgagaagaugaacacccaguucaccgccgugggcaaggaguucaacaagcuggagagaagaauggagaaccugaacaagaagguggacgacggcuuccuggacaucuggaccuacaacgccgagcugcuggugcugcuggagaacgagagaacccuggacuuccacgacagcaacgugaagaaccuguacgagaaggugaagagccagcugaagaacaacgccaaggagaucggcaacggcugcuucgaguucuaccacaagugcaacgacgagugcauggagagcgugaagaacggcaccuacgacuaccccaaguacagcgaggagagcaagcugaacagagagaagaucgacggcgugaagcuggagagcaugggcguguaccagauccuggccaucuacagcaccguggccagcagccuggugcugcuggugagccugggcgccaucagcuucuggaugugcagcaacggcagccugcagugcagaaucugcaucuga

SEQ ID NO: 162219 - RNA, 1698 nt, Artificial Sequence; identical to SEQ ID NO: 161970
  derived and/or modified CDS sequence (opt4) from hemagglutinin__InfluenzaA__ABW86530

SEQ ID NO: 162220 - RNA, 1698 nt, Artificial Sequence
  derived and/or modified CDS sequence (opt4) from hemagglutinin__InfluenzaA__ABW86541
augaaggugaagcugcuggugcugcugugcaccuucaccgccaccuacgccgacaccaucugcaucggcuaccacgccaacaacagcaccgacaccguggacaccgugcuggagaagaacgugaccgugacccacagcgugaaccugcuggaggacagccacaacggcaagcugugccugcugaagggcaucgccccccugcagcugggcaacugcagcguggccggcuggauccugggcaaccccgagugcgagcugcugaucagcaaggagagcuggagcuacaucguggagacccccaaccccgagaacggcaccugcuaccccggcuacuucgccgacuacgaggagcugagagagcagcugagcagcgugagcagcuucgagagauucgagaucuuccccaaggagagcagcuggcugaaccacaccgugaccggcgugagcgccagcugcagccacaacggcaagagcagcuucuacagaaaccugcuguggcugaccggcaagaacggccuguaccccaaccugagcaagagcuacgccaacaacaaggagaaggaggugcuggugcuguggggcgugcaccacccccccaacaucggcgaccagagagcccuguaccacaccgagaacgccuacgugagcguggugagcagccacuacagcagaagauucacccccgagaucgccaagagacccaaggugagagaccaggagggcagaaucaacuacuacuggacccugcuggagcccggcgacaccaucaucuucgaggccaacggcaaccugaucgcccccagauucgccuucgcccugagcagaggcuucggcagcggcaucaucaccagcaacgcccccaugggcgagugcgacgccaagugccagaccccccagggcgccaucaacagcagccugcccuuccagaacgugcaccccgugaccaucggcgagugccccaaguacgugagaagcgccaagcugagaauggugaccggccugagaaacauccccagcauccagagcagaggccuguucggcgccaucgccggcuucaucgagggcggcuggaccggcaugguggacggcugguacggcuaccaccaccagaacgagcagggcagcggcuacgccgccgaccagaagagcacccagaacgccaucaacggcaucaccaacaaggugaacagcgugaucgagaagaugaacacccaguucaccgccgugggcaaggaguucaacaagcuggagagaagaauggagaaccugaacaagaagguggacgacggcuuccuggacaucuggaccuacaacgccgagcugcuggugcugcuggagaacgagagaacccuggacuuccacgacagcaacgugaagaaccuguacgagaaggugaagagccagcugaagaacaacgccaaggagaucggcaacggcugcuucgaguucuaccacaagugcaacgacgagugcauggagagcgugaagaacggcaccuacgacuaccccaaguacagcgaggagagcaagcugaacagagagaagaucgacggcgugaagcuggagagcaugggcguguaccagauccuggccaucuacagcaccguggccagcagccuggugcugcuggugagccugggcgccaucagcuucuggaugugcagcaacggcagccugcagugcagaaucugcaucuga

SEQ ID NO: 162221 - RNA, 1698 nt, Artificial Sequence; identical to SEQ ID NO: 161970
  derived and/or modified CDS sequence (opt4) from hemagglutinin__InfluenzaA__ABW86552

SEQ ID NO: 162222 - RNA, 1701 nt, Artificial Sequence
  derived and/or modified CDS sequence (opt4) from hemagglutinin__InfluenzaA__ABW86563
augaagaccaucaucgcccugagcuacauccugugccugguguucgcccagaagcugcccggcaacgacaacagcaccgccacccugugccugggccaccacgccgugcccaacggcaccaucgugaagaccaucaccaacgaccagaucgaggugaccaacgccaccgagcuggugcagagcagcagcaccggcgagaucugcgacagcccccaccagauccuggacggcgagaacugcacccugaucgacgcccugcugggcgacccccagugcgacggcuuccagaacaagaagugggaccuguucguggagagaagcaaggccuacagcaacugcuaccccuacgacgugcccgacuacgccagccugagaagccugguggccagcagcggcacccuggaguucaacaacgagagcuucaacuggaccggcgugacccagaacggcaccagcagcgccugcaucagaagaagcaacaacagcuucuucagcagacugaacuggcugacccaccugaaguucaaguaccccgcccugaacgugaccaugcccaacaacgagaaguucgacaagcuguacaucuggggcgugcaccaccccggcaccgacaacgaccagaucuuccuguacgcccaggccagcggcagaaucaccgugagcaccaagagaagccagcagaccgugauccccaacaucggcagcagacccagagugagaaacauccccagcagaaucagcaucuacuggaccaucgugaagcccggcgacauccugcugaucaacagcaccggcaaccugaucgcccccagaggcuacuucaagaucagaagcggcaagagcagcaucaugagaagcgacgcccccaucggcaagugcaacagcgagugcaucacccccaacggcagcauccccaacgacaagcccuuccagaacgugaacagaaucaccuacggcgccugccccagauacgugaagcagaacacccugaagcuggccaccggcaugagaaacgugcccgagaagcagaccagaggcaucuucggcgccaucgccggcuucaucgagaacggcugggagggcaugguggacggcugguacggcuucagacaccagaacagcgagggcaucggccaggccgccgaccugaagagcacccaggccgccaucgaccagaucaacggcaagcugaacagacugaucggcaagaccaacgagaaguuccaccagaucgagaaggaguucagcgagguggagggcagaauccaggaccuggagaaguacguggaggacaccaagaucgaccuguggagcuacaacgccgagcugcugguggcccuggagaaccagcacaccaucgaccugaccgacagcgagaugaacaagcuguucgagaagaccaagaagcagcugagagagaacgccgaggacaugggcaacggcugcuucaagaucuaccacaagugcgacaacgccugcaucggcagcaucagaaacggcaccuacgaccacgacguguacagagacgaggcccugaacaacagauuccagaucaagggcguggagcugaagagcggccacaaggacuggauccuguggaucagcuucgccaucagcugcuuccugcugugcguggcccugcugggcuucaucaugugggccugccagaagggcaacaucagaugcaacaucugcaucuga

SEQ ID NO: 162223 - RNA, 1698 nt, Artificial Sequence; identical to SEQ ID NO: 162007
  derived and/or modified CDS sequence (opt4) from hemagglutinin__InfluenzaA__ABW86606

SEQ ID NO: 162224 - RNA, 1701 nt, Artificial Sequence; identical to SEQ ID NO: 160981
  derived and/or modified CDS sequence (opt4) from hemagglutinin__InfluenzaA__ABW91185

SEQ ID NO: 162225 - RNA, 1701 nt, Artificial Sequence
  derived and/or modified CDS sequence (opt4) from hemagglutinin__InfluenzaA__ABW91196
augaagaccaucaucgcccugagcuacauccugugccugguguucgcccagaagcugcccggcaacgacaacagcaccgccacccugugccugggccaccacgccgugcccaacggcaccaucgugaagaccaucaccaacgaccagaucgaggugaccaacgccaccgagcuggugcagagcagcagcaccggcgagaucugcaacagcccccaccagauccuggacggcgagaacugcacccugaucgacgcccugcugggcgacccccagugcgacggcuuccagaacaagaagugggaccuguucguggagagaagcaaggccuacagcaacugcuaccccuacgacgugcccgacuacgccagccugagaagccugguggccagcagcggcacccuggaguucaacaacgagagcuucaacuggaccggcgugacccagaacggcaccagcagcgccugcaucagaagaagcaacaacagcuucuucagcagacugaacuggcugacccaccugaaguucaaguaccccgcccugaacgugaccaugcccaacaacgagaaguucgacaagcuguacaucuggggcgugcaccaccccggcaccgacaacgaccagaucuuccuguacgcccaggccagcggcagaaucaccgugagcaccaagagaagccagcagaccgugauccccaacaucggcagcagacccagagugagaaacauccccagcagaaucagcaucuacuggaccaucgugaagcccggcgacauccugcugaucaacagcaccggcaaccugaucgcccccagaggcuacuucaagaucagaagcggcaagagcagcaucaugagaagcgacgcccccaucggcaagugcaacagcgagugcaucacccccaacggcagcauccccaacgacaagcccuuccagaacgugaacagaaucaccuacggcgccugccccagauacgugaagcagaacacccugaagcuggccaccggcaugagaaacgugcccgagaagcagaccagaggcaucuucggcgccaucgccggcuucaucgagaacggcugggagggcaugguggacggcugguacggcuucagacaccagaacagcgagggcaucggccaggccgccgaccugaagagcacccaggccgccaucgaccagaucaacggcaagcugaacagacugaucggcaagaccaacgagaaguuccaccagaucgagaaggaguucagcgagguggagggcagaauccaggaccuggagaaguacguggaggacaccaagaucgaccuguggagcuacaacgccgagcugcugguggcccuggagaaccagcacaccaucgaccugaccgacagcgagaugaacaagcuguucgagaagaccaagaagcagcugagagagaacgccgaggacaugggcaacggcugcuucaagaucuaccacaagugcgacaacgccugcaucggcagcaucagaaacggcaccuacgaccacgacguguacagagacgaggcccugaacaacagauuccagaucaagggcguggagcugaagagcggcuacaaggacuggauccuguggaucagcuucgccaucagcugcuuccugcugugcguggcccugcugggcuucaucaugugggccugccagaagggcaacaucagaugcaacaucugcaucuga

SEQ ID NO: 162226 - RNA, 1701 nt, Artificial Sequence; identical to SEQ ID NO: 162225
  derived and/or modified CDS sequence (opt4) from hemagglutinin__InfluenzaA__ABW91207

SEQ ID NO: 162227 - RNA, 1698 nt, Artificial Sequence; identical to SEQ ID NO: 161970
  derived and/or modified CDS sequence (opt4) from hemagglutinin__InfluenzaA__ABW91218

SEQ ID NO: 162228 - RNA, 1701 nt, Artificial Sequence; identical to SEQ ID NO: 161988
  derived and/or modified CDS sequence (opt4) from hemagglutinin__InfluenzaA__ABW91240

SEQ ID NO: 162229 - RNA, 1701 nt, Artificial Sequence
  derived and/or modified CDS sequence (opt4) from hemagglutinin__InfluenzaA__ABW91251
augaagaccaucaucgcccugagcuacauccugugccugguguucgcccagaagcugcccggcaacgacaacagcaccgccacccugugccugggccaccacgccgugcccaacggcaccaucgugaagaccaucaccaacgaccagaucgaggugaccaacgccaccgagcuggugcagagcagcagcaccggcgagaucugcgacagcccccaccagauccuggacggcgagaacugcacccugaucgacgcccugcugggcgacccccagugcgacggcuuccagaacaagaagugggaccuguucguggagagaagcaaggccuacagcaacugcuaccccuacgacgugcccgacuacgccagccugagaagccugguggccagcagcggcacccuggaguucaacaacgagagcuucaacuggaccggcgugacccagaacggcaccagcagcgccugcaucagaagaagcaacaacagcuucuucagcagacugaacuggcugacccaccugaaguucaaguaccccgcccugaacgugaccaugcccaacaacgagaaguucgacaagcuguacaucuggggcgugcaccaccccggcaccgacaacgaccagaucuuccuguacgcccaggccagcggcagaaucaccgugagcaccaagagaagccagcagaccgugauccccaacaucggcagcagacccagagugagaaacauccccagcagaaucagcaucuacuggaccaucgugaagagcggcgacauccugcugaucaacagcaccggcaaccugaucgcccccagaggcuacuucaagaucagaagcggcaagagcagcaucaugagaagcgacgcccccaucggcaagugcaacagcgagugcaucacccccaacggcagcauccccaacgacaagcccuuccagaacgugaacagaaucaccuacggcgccugccccagauacgugaagcagaacacccugaagcuggccaccggcaugagaaacgugcccgagaagcagaccagaggcaucuucggcgccaucgccggcuucaucgagaacggcugggagggcaugguggacggcugguacggcuucagacaccagaacagcgagggcaucggccaggccgccgaccugaagagcacccaggccgccaucgaccagaucaacggcaagcugaacagacugaucggcaagaccaacgagaaguuccaccagaucgagaaggaguucagcgagguggagggcagaauccaggaccuggagaaguacguggaggacaccaagaucgaccuguggagcuacaacgccgagcugcugguggcccuggagaaccagcacaccaucgaccugaccgacagcgagaugaacaagcuguucgagaagaccaagaagcagcugagagagaacgccgaggacaugggcaacggcugcuucaagaucuaccacaagugcgacaacgccugcaucggcagcaucagaaacggcaccuacgaccacgacguguacagagacgaggcccugaacaacagauuccagaucaagggcguggagcugaagagcggcuacaaggacuggauccuguggaucagcuucgccaucagcugcuuccugcugugcguggcccugcugggcuucaucaugugggccugccagaagggcaacaucagaugcaacaucugcaucuga

SEQ ID NO: 162230 - RNA, 1701 nt, Artificial Sequence; identical to SEQ ID NO: 161988
  derived and/or modified CDS sequence (opt4) from hemagglutinin__InfluenzaA__ABW91262

SEQ ID NO: 162231 - RNA, 1698 nt, Artificial Sequence; identical to SEQ ID NO: 162005
  derived and/or modified CDS sequence (opt4) from hemagglutinin__InfluenzaA__ABW91273

SEQ ID NO: 162232 - RNA, 1698 nt, Artificial Sequence
  derived and/or modified CDS sequence (opt4) from hemagglutinin__InfluenzaA__ABW91284
augaaggugaagcugcuggugcugcugugcaccuucaccgccaccuacgccgacaccaucugcaucggcuaccacgccaacaacagcaccgacaccguggacaccgugcuggagaagaacgugaccgugacccacagcgugaaccugcuggaggacagccacaacggcaagcugugccugcugaagggcaucgccccccugcagcugggcaacugcagcguggccggcuggauccugggcaaccccgagugcgagcugcugaucagcagagagagcuggagcuacaucguggagaagcccaaccccgagaacggcaccugcuaccccggccacuucgccgacuacgaggagcugagagagcagcugagcagcgugagcagcuucgagagauucgagaucuuccccaaggagagcagcuggcccaaccacaccaccaccggcgugagcgccagcugcagccacaacggcgagagcagcuucuacaagaaccugcuguggcugaccggcaagaacggccuguaccccaaccugagcaagagcuacgccaacaacaaggagaaggaggugcuggugcuguggggcgugcaccacccccccaacaucggcgaccagagagcccuguaccacaccgagaacgccuacgugagcguggugagcagccacuacagcagaaaguucacccccgagaucgccaagagacccaaggugagagaccaggagggcagaaucaacuacuacuggacccugcuggagcccggcgacaccaucaucuucgaggccaacggcaaccugaucgcccccagauacgccuucgcccugagcagaggcuucggcagcggcaucaucaacagcaacgccagcaugggcgagugcgacgccaagugccagaccccccagggcgccaucaacagcagccugcccuuccagaacgugcaccccgugaccaucggcgagugccccaaguacgugagaagcgccaagcugagaauggugaccggccugagaaacauccccagcauccagagcagaggccuguucggcgccaucgccggcuucaucgagggcggcuggaccggcaugguggacggcugguacggcuaccaccaccagaacgagcagggcagcggcuacgccgccgaccagaagagcacccagaacgccaucaacggcaucaccaacaaggugaacagcgugaucgagaagaugaacacccaguucaccgccgugggcaaggaguucaacaagcuggagagaagaauggagaaccugaacaagaagguggacgacggcuucaucgacaucuggaccuacaacgccgagcugcuggugcugcuggagaacgagagaacccuggacuuccacgacagcaacgugaagaaccuguacgagaaggugaagagccagcugaagaacaacgccaaggagaucggcaacggcugcuucgaguucuaccacaagugcaacgacgagugcauggagagcgugaagaacggcaccuacgacuaccccaaguacagcgaggagagcaagcugaacagagagaagaucgacggcgugaagcuggagagcaugggcguguaccagauccuggccaucuacagcaccguggccagcagccuggugcugcuggugagccugggcgccaucagcuucuggaugugcagcaacggcagccugcagugcagaaucugcaucuga

SEQ ID NO: 162233 - RNA, 1698 nt, Artificial Sequence; identical to SEQ ID NO: 162005
  derived and/or modified CDS sequence (opt4) from hemagglutinin__InfluenzaA__ABW91295

SEQ ID NO: 162234 - RNA, 1698 nt, Artificial Sequence; identical to SEQ ID NO: 161974
  derived and/or modified CDS sequence (opt4) from hemagglutinin__InfluenzaA__ABW91306

SEQ ID NO: 162235 - RNA, 1698 nt, Artificial Sequence; identical to SEQ ID NO: 161974
  derived and/or modified CDS sequence (opt4) from hemagglutinin__InfluenzaA__ABW91317

SEQ ID NO: 162236 - RNA, 1698 nt, Artificial Sequence
  derived and/or modified CDS sequence (opt4) from hemagglutinin__InfluenzaA__ABW91328
augaaggugaagcugcugauccugcugugcaccuucaccgccaccuacgccgacaccaucugcaucggcuaccacgccaacaacagcaccgacaccguggacaccgugcuggagaagaacgugaccgugacccacagcgugaaccugcuggaggacagccacaacggcaagcugugccugcugaagggcaucgccccccugcagcugggcaacugcagcguggccggcuggauccugggcaaccccgagugcgagcugcugaucagcaaggagagcuggagcuacaucguggagacccccaaccccgagaacggcaccugcuaccccggcuacuucgccgacuacgaggagcugagagagcagcugagcagcgugagcagcuucgagagauucgagaucuuccccaaggagagcagcuggcccaaccacaccgugaccggcgugagcgccagcugcagccacaacggcaagagcagcuucuacagaaaccugcuguggcugaccggcaagaacggccuguaccccaaccugagcaagagcuacgccaacaacaaggagaaggaggugcuggugcuguggggcgugcaccacccccccaacaucggcgaccagagagcccuguaccacaccgagaacgccuacgugagcguggugagcagccacuacagcagaagauucacccccgagaucgccaagagacccaaggugagagaccaggagggcagaaucaacuacuacuggacccugcuggagcccggcgacaccaucaucuucgaggccaacggcaaccugaucgcccccagauucgccuucgcccugagcagaggcuucggcagcggcaucaucaccagcaacgcccccauggacgagugcgacgccaagugccagaccccccagggcgccaucaacagcagccugcccuuccagaacgugcaccccgugaccaucggcgagugccccaaguacgugagaagcaccaagcugagaauggugaccggccugagaaacauccccagcauccagagcagaggccuguucggcgccaucgccggcuucaucgagggcggcuggaccggcaugguggacggcugguacggcuaccaccaccagaacgagcagggcagcggcuacgccgccgaccagaagagcacccagaacgccaucaacggcaucaccaacaaggugaacagcgugaucgagaagaugaacacccaguucaccgccgugggcaaggaguucaacaagcuggagagaagaauggagaaccugaacaagaagguggacgacggcuuccuggacaucuggaccuacaacgccgagcugcuggugcugcuggagaacgagagaacccuggacuuccacgacagcaacgugaagaaccuguacgagaaggugagaagccagcugaagaacaacgccaaggagaucggcaacggcugcuucgaguucuaccacaagugcaacgacgagugcauggagagcgugaagaacggcaccuacgacuaccccaaguacagcgaggagagcaagcugaacagagagaagaucgacggcgugaagcuggagagcaugggcguguaccagauccuggccaucuacagcaccguggccagcagccuggugcugcuggugagccugggcgccaucagcuucuggaugugcagcaacggcagccugcagugcagaaucugcaucuga

SEQ ID NO: 162237 - RNA, 1698 nt, Artificial Sequence; identical to SEQ ID NO: 161974
  derived and/or modified CDS sequence (opt4) from hemagglutinin__InfluenzaA__ABW91339

SEQ ID NO: 162238 - RNA, 1698 nt, Artificial Sequence; identical to SEQ ID NO: 161974
  derived and/or modified CDS sequence (opt4) from hemagglutinin__InfluenzaA__ABW91350

SEQ ID NO: 162239 - RNA, 1698 nt, Artificial Sequence
  derived and/or modified CDS sequence (opt4) from hemagglutinin__InfluenzaA__ABW91361
augaaggugaagcugcuggugcugcugugcaccuucaccgccaccuacgccgacaccaucugcaucggcuaccacgccaacaacagcaccgacaccguggacaccgugcuggagaagaacgugaccgugacccacagcgugaaccugcuggaggacagccacaacggcaagcugugccugcugaagggcaucgccccccugcagcugggcaacugcagcguggccggcuggauccugggcaaccccgagugcgagcugcugaucagcaaggagagcuggagcuacaucguggagacccccaaccccgagaacggcaccugcuaccccggcuacuucgccgacuacgaggagcugagagagcagcugagcagcgugagcagcuucgagagauucgagaucuuccccaaggagagcagcuggcccaaccacaccgugaccggcgugagcgccagcugcagccacaacggcgagagcagcuucuacagaaaccugcuguggcugaccggcaagaacggccuguaccccaaccugagcaagagcuacgccaacaacaaggagaaggaggugcuggugcuguggggcgugcaccacccccccaacaucggcgaccagagagcccuguaccacaccgagaacgccuacgugagcguggugagcagccacuacagcagaagauucacccccgagaucgccaagagacccaaggugagagaccaggagggcagaaucaacuacuacuggacccugcuggagcccggcgacaccaucaucuucgaggccaacggcaaccugaucgcccccagauucgccuucgcccugagcagaggcuucggcagcggcaucaucaccagcaacgcccccauggacaagugcgacgccaagugccagaccccccagggcgccaucaacagcagccugcccuuccagaacgugcaccccgugaccaucggcgagugccccaaguacgugagaagcaccaagcugagaauggugaccggccugagaaacauccccagcauccagaccagaggccuguucggcgccaucgccggcuucaucgagggcggcuggaccggcaugguggacggcugguacggcuaccaccaccagaacgagcagggcagcggcuacgccgccgaccagaagagcacccagaacgccaucaacggcaucaccaacaaggugaacagcgugaucgagaagaugaacacccaguucaccgccgugggcaaggaguucaacaagcuggagagaagaauggagaaccugaacaagaagguggacgacggcuuccuggacaucuggaccuacaacgccgagcugcuggugcugcuggagaacgagagaacccuggacuuccacgacagcaacgugaagaaccuguacgagaaggugaagagccagcugaagaacaacgccaaggagaucggcaacggcugcuucgaguucuaccacaagugcaacgacgagugcauggagagcgugaagaacggcaccuacgacuaccccaaguacagcgaggagagcaagcugaacagagagaagaucgacggcgugaagcuggagagcaugggcguguaccagauccuggccaucuacagcaccguggccagcagccuggugcugcuggugagccugggcgccaucagcuucuggaugugcagcaacggcagccugcagugcagaaucugcaucuga

SEQ ID NO: 162240 - RNA, 1698 nt, Artificial Sequence; identical to SEQ ID NO: 161974
  derived and/or modified CDS sequence (opt4) from hemagglutinin__InfluenzaA__ABW91372

SEQ ID NO: 162241 - RNA, 1698 nt, Artificial Sequence; identical to SEQ ID NO: 162007
  derived and/or modified CDS sequence (opt4) from hemagglutinin__InfluenzaA__ABW91383

SEQ ID NO: 162242 - RNA, 1701 nt, Artificial Sequence; identical to SEQ ID NO: 162047
  derived and/or modified CDS sequence (opt4) from hemagglutinin__InfluenzaA__ABW91394

SEQ ID NO: 162243 - RNA, 1698 nt, Artificial Sequence; identical to SEQ ID NO: 162016
  derived and/or modified CDS sequence (opt4) from hemagglutinin__InfluenzaA__ABW91405

SEQ ID NO: 162244 - RNA, 1698 nt, Artificial Sequence
  derived and/or modified CDS sequence (opt4) from hemagglutinin__InfluenzaA__ABW91416
augaaggugaagcugcuggugcugcugugcaccuucaccgccaccuacgccgacaccaucugcaucggcuaccacgccaacaacagcaccgacaccguggacaccgugcuggagaagaacgugaccgugacccacagcgugaaccugcuggaggacagccacaacggcaagcugugccugcugaagggcaucgccccccugcagcugggcaacugcagcguggccggcuggauccugggcaaccccgagugcgagcugcugaucagcaaggagagcuggagcuacaucguggagacccccaaccccgagaacggcaccugcuaccccggcuacuucgccgacuacgaggagcugagagagcagcugagcagcgugagcagcuucgagagauucgagaucuuccccaaggagagcagcuggcccaaccacaccgugaccggcgugagcgccagcugcagccacaacggcaagagcagcuucuacagaaaccugcuguggcugaccggcaagaacggccuguaccccaaccugagcaagagcuacgccaacaacaaggagaaggaggugcuggugcuguggggcgugcaccacccccccaacaucggcgaccagaaggcccuguaccacaccgagaacgccuacgugagcguggugagcagccacuacagcagaagauucacccccgagaucgccaagagacccaaggugagagaccaggagggcagaaucaacuacuacuggacccugcuggagcccggcgacaccaucaucuucgaggccaacggcaaccugaucgcccccagauucgccuucgcccugagcagaggcuucggcagcggcaucaucaccagcaacgcccccaugggcgagugcgacgccaagugccagaccccccagggcgccaucaacagcagccugcccuuccagaacgugcaccccgugaccaucggcgagugccccaaguacgugagaagcgccaagcugagaauggugaccggccugagaaacauccccagcauccagagcagaggccuguucggcgccaucgccggcuucaucgagggcggcuggaccggcaugguggacggcugguacggcuaccaccaccagaacgagcagggcagcggcuacgccgccgaccagaagagcacccagaacgccaucaacggcaucaccaacaaggugaacagcgugaucgagaagaugaacacccaguucaccgccgugggcaaggaguucaacaagcuggagagaagaauggagaaccugaacaagaagguggacgacggcuuccuggacaucuggaccuacaacgccgagcugcuggugcugcuggagaacgagagaacccuggacuuccacgacagcaacgugaagaaccuguacgagaaggugaagagccagcugaagaacaacgccaaggagaucggcaacggcugcuucgaguucuaccacaagugcaacgacgagugcauggagagcgugaagaacggcaccuacgacuaccccaaguacagcgaggagagcaagcugaacagagagaagaucgacggcgugaagcuggagagcaugggcguguaccagauccuggccaucuacagcaccguggccagcagccuggugcugcuggugagccugggcgccaucagcuucuggaugugcagcaacggcagccugcagugcagaaucugcaucuga

SEQ ID NO: 162245 - RNA, 1698 nt, Artificial Sequence; identical to SEQ ID NO: 162119
  derived and/or modified CDS sequence (opt4) from hemagglutinin__InfluenzaA__ABW91427

SEQ ID NO: 162246 - RNA, 1701 nt, Artificial Sequence; identical to SEQ ID NO: 161988
  derived and/or modified CDS sequence (opt4) from hemagglutinin__InfluenzaA__ABW91438

SEQ ID NO: 162247 - RNA, 1698 nt, Artificial Sequence; identical to SEQ ID NO: 162016
  derived and/or modified CDS sequence (opt4) from hemagglutinin__InfluenzaA__ABW91449

SEQ ID NO: 162248 - RNA, 1698 nt, Artificial Sequence; identical to SEQ ID NO: 162016
  derived and/or modified CDS sequence (opt4) from hemagglutinin__InfluenzaA__ABW91460

SEQ ID NO: 162249 - RNA, 1698 nt, Artificial Sequence
  derived and/or modified CDS sequence (opt4) from hemagglutinin__InfluenzaA__ABW91471
augaaggugaagcugcuggugcugcugugcaccuucaccgccaccuacgccgacaccaucugcaucggcuaccacgccaacaacagcaccgacaccguggacaccgugcuggagaagaacgugaccgugacccacagcgugaaccugcuggaggacagccacaacggcaagcugugccugcugaagggcguggccccccugcagcugggcaacugcagcguggccggcuggauccugggcaaccccgagugcgagcugcugaucagcaaggagagcuggagcuacaucguggagacccccaaccccgagaacggcaccugcuaccccggcuacuucgccgacuacgaggagcugagagagcagcugagcagcgugagcagcuucgagagauucgagaucuuccccaaggagagcagcuggcccaaccacaccgugaccggcgugagcgccagcugcagccacaacggcaagagcagcuucuacagaaaccugcuguggcugaccggcaagaacggccuguaccccaaccugagcaagagcuacgccaacaacaaggagaaggaggugcuggugcuguggggcgugcaccacccccccaacaucggcgaccagagagcccuguaccacaccgagaacgccuacgugagcguggugagcagccacuacagcagaagauucacccccgagaucgccaagagacccaaggugagagaccaggagggcagaaucaacuacuacuggacccugcuggagcccggcgacaccaucaucuucgaggccaacggcaaccugaucgcccccagauucgccuucgcccugagcagaggcuucggcagcggcaucaucaccagcaacgcccccauggacgagugcgacgccaagugccagaccccccagggcgccaucaacagcagccugcccuuccagaacgugcaccccgugaccaucggcgagugccccaaguacgugagaagcaccaagcugagaauggugaccggccugagaaacauccccagcauccagagcagaggccuguucggcgccaucgccggcuucaucgagggcggcuggaccggcaugguggacggcugguacggcuaccaccaccagaacgagcagggcagcggcuacgccgccgaccagaagagcacccagaacgccaucaacggcaucaccaacaaggugaacagcgugaucgagaagaugaacacccaguucaccgccgugggcaaggaguucaacaagcuggagagaagaauggagaaccugaacaagaagguggacgacggcuuccuggacaucuggaccuacaacgccgagcugcuggugcugcuggagaacgagagaacccuggacuuccacgacagcaacgugaagaaccuguacgagaaggugaagagccagcugaagaacaacgccaaggagaucggcaacggcugcuucgaguucuaccacaagugcaacgacgagugcauggagagcgugaagaacggcaccuacgacuaccccaaguacagcgaggagagcaagcugaacagagagaagaucgacggcgugaagcuggagagcaugggcguguaccagauccuggccaucuacagcaccguggccagcagccuggugcugcuggugagccugggcgccaucagcuucuggaugugcagcaacggcagccugcagugcagaaucugcaucuga

SEQ ID NO: 162250 - RNA, 1698 nt, Artificial Sequence
  derived and/or modified CDS sequence (opt4) from hemagglutinin__InfluenzaA__ABW91482
augaaggugaagcugcuggugcugcugugcaccuucaccgccaccuacgccgacaccaucugcaucggcuaccacgccaacaacagcaccgacaccguggacaccgugcuggagaagaacgugaccgugacccacagcgugaaccugcuggaggacagacacaacggcaagcugugccugcugaagggcaucgccccccugcagcugggcaacugcagcguggccggcuggauccugggcaaccccgagugcgagcugcugaucagcaaggagagcuggagcuacaucguggagacccccaaccccgagaacggcaccugcuaccccggcuacuucgccgacuacgaggagcugagagagcagcugagcagcgugagcagcuucgagagauucgagaucuuccccaaggagagcagcuggcccaaccacaccgugaccggcgugagcgccagcugcagccacaacggcagaagcagcuucuacagaaaccugcuguggcugaccggcaagaacggccuguaccccaaccugagcagaagcuacgccaacaacaaggagaaggaggugcuggugcuguggggcgugcaccacccccccaacaucggcgaccagagagcccuguaccacaccgagaacgccuacgugagcguggugagcagccacuacagcagaagauucacccccgagaucgccaagagacccaaggugagagaccaggagggcagaaucaacuacuacuggacccugcuggagcccggcgacaccaucaucuucgaggccaacggcaaccugaucgcccccagauucgccuucgcccugagcagaggcuucggcagcggcaucaucaccagcaacgcccccauggacgagugcgacgccaagugccagaccccccagggcgccaucaacagcagccugcccuuccagaacgugcaccccgugaccaucggcgagugccccaaguacgugagaagcgccaagcugagaauggugaccggccugagaaacauccccagcauccagagcagaggccuguucggcgccaucgccggcuucaucgagggcggcuggaccggcaugguggacggcugguacggcuaccaccaccagaacgagcagggcagcggcuacgccgccgaccagaagagcacccagaacgccaucaacggcaucaccaacaaggugaacagcgugaucgagaagaugaacacccaguucaccgccgugggcaaggaguucaacaagcuggagagaagaauggagaaccugaacaagaagguggacgacggcuuccuggacaucuggaccuacaacgccgagcugcuggugcugcuggagaacgagagaacccuggacuuccacgacagcaacgugaagaaccuguacgagaaggugaagagccagcugaagaacaacgccaaggagaucggcaacggcugcuucgaguucuaccacaagugcaacgacgagugcauggagagcgugaagaacggcaccuacgacuaccccaaguacagcgaggagagcaagcugaacagagagaagaucgacggcgugaagcuggagagcaugggcguguaccagauccuggccaucuacagcaccguggccagcagccuggugcugcuggugagccugggcgccaucagcuucuggaugugcagcaacggcagccugcagugcagaaucugcaucuga

SEQ ID NO: 162251 - RNA, 1698 nt, Artificial Sequence
  derived and/or modified CDS sequence (opt4) from hemagglutinin__InfluenzaA__ABW91493
augaaggugaagcugcugauccugcugugcaccuucaccgccaccuacgccgacaccaucugcaucggcuaccacgccaacaacagcaccgacaccguggacaccgugcuggagaagaacgugaccgugacccacagcgugaaccugcuggaggacagccacaacggcaagcugugccugcugaagggcaucgccccccugcagcugggcaacugcagcguggccggcuggauccugggcaaccccgagugcgagcugcugaucagcaaggagagcuggagcuacaucguggagacccccaaccccgagaacggcaccugcuaccccggcuacuucgccgacuacgaggagcugagagagcagcugagcagcgugagcagcuucgagagauucgagaucuuccccaaggagagcagcuggcccaaccacaccgugaccggcgugagcgccagcugcagccacaacggcaagagcagcuucuacagaaaccugcuguggcugaccggcaagaacggccuguaccccaaccugagcaagagcuacgccaacaacaaggagaaggaggugcuggugcuguggggcgugcaccacccccccaacaucggcgaccagagagcccuguaccacaccgagaacgccuacgugagcguggugagcagccacuacagcagaagauucacccccgagaucgccaagagacccaaggugagagaccaggagggcagaaucaacuacuacuggacccugcuggagcccggcgacaccaucaucuucgaggccaacggcaaccugaucgcccccagauucgccuucgcccugagcagaggcuucggcagcggcaucaucaccagcaacgcccccauggacgagugcgacgccaagugccagaccccccagggcgccaucaacagcagccugcccuuccagaacgugcaccccgugaccaucggcgagugccccaaguacgugagaagcaccaagcugagaauggugaccggccugagaaacauccccagcauccagagcagaggccuguucggcgccaucgccggcuucaucgagggcggcuggaccggcaugguggacggcugguacggcuaccaccaccagaacgagcagggcagcggcuacgccgccgaccagaagagcacccagaacgccaucaacggcaucaccaacaaggugaacagcgugaucgagaagaugaacacccaguucaccgccgugggcaaggaguucaacaagcuggagaagagaauggagaaccugaacaagaagguggacgacggcuuccuggacaucuggaccuacaacgccgagcugcuggugcugcuggagaacgagagaacccuggacuuccacgacagcaacgugaagaaccuguacgagaaggugaagagccagcugaagaacaacgccaaggagaucggcaacggcugcuucgaguucuaccacaagugcaacgacgagugcauggagagcgugaagaacggcaccuacgacuaccccaaguacagcgaggagagcaagcugaacagagagaagaucgacggcgugaagcuggagagcaugggcguguaccagauccuggccaucuacagcaccguggccagcagccuggugcugcuggugagccugggcgccaucagcuucuggaugugcagcaacggcagccugcagugcagaaucugcaucuga

SEQ ID NO: 162252 - RNA, 1698 nt, Artificial Sequence; identical to SEQ ID NO: 161990
  derived and/or modified CDS sequence (opt4) from hemagglutinin__InfluenzaA__ABW91504

SEQ ID NO: 162253 - RNA, 1698 nt, Artificial Sequence
  derived and/or modified CDS sequence (opt4) from hemagglutinin__InfluenzaA__ABW91515
augaaggugaagcugcuggugcugcugugcaccuucaccgccaccuacgccgacaccaucugcaucggcuaccacgccaacaacagcaccgacaccguggacaccgugcuggagaagaacgugaccgugacccacagcgugaaccugcuggaggacagacacaacggcaagcugugccugcugaagggcaucgccccccugcagcugggcaacugcagcguggccggcuggauccugggcaaccccgagugcgagcugcugaucagcaaggagagcuggagcuacgugguggagacccccaaccccgagaacggcaccugcuaccccggcuacuucgccgacuacgaggagcugagagagcagcugagcagcgugagcagcuucgagagauucgagaucuuccccaaggagagcagcuggcccaaccacaccgugaccggcgugagcgccagcugcagccacaacggcaagagcagcuucuacagaaaccugcuguggcugaccggcaagaacggccuguaccccaaccugagcaagagcuacgccaacaacaaggagaaggaggugcuggugcuguggggcgugcaccacccccccaacaucggcgaccagagagcccuguaccacaccgagaacgccuacgugagcguggugagcagccacuacagcagaagauucacccccgagaucgccaagagacccaaggugagagaccaggagggcagaaucaacuacuacuggacccugcuggagcccggcgacaccaucaucuucgaggccaacggcaaccugaucgcccccagauucgccuucgcccugagcagaggcuucggcagcggcaucaucaccagcaacgcccccauggacgagugcgacgccaagugccagaccccccagggcgccaucaacagcagccugcccuuccagaacgugcaccccgugaccaucggcgagugccccaaguacgugagaagcgccaagcugagaauggugaccggccugagaaacauccccagcauccagagcagaggccuguucggcgccaucgccggcuucaucgagggcggcuggaccggcaugguggacggcugguacggcuaccaccaccagaacgagcagggcagcggcuacgccgccgaccagaagagcacccagaacgccaucaacggcaucaccaacaaggugaacagcgugaucgagaagaugaacacccaguucaccgccgugggcaaggaguucaacaagcuggagagaagaauggagaaccugaacaagaagguggacgacggcuuccuggacaucuggaccuacaacgccgagcugcuggugcugcuggagaacgagagaacccuggacuuccacgacagcaacgugaagaaccuguacgagaaggugaagagccagcugaagaacaacgccaaggagaucggcaacggcugcuucgaguucuaccacaagugcaacgacgagugcauggagagcgugaagaacggcaccuacgacuaccccaaguacagcgaggagagcaagcugaacagagagaagaucgacggcgugaagcuggagagcaugggcguguaccagauccuggccaucuacagcaccguggccagcagccuggugcugcuggugagccugggcgccaucagcuucuggaugugcagcaacggcagccugcagugcagaaucugcaucuga

SEQ ID NO: 162254 - RNA, 1698 nt, Artificial Sequence
  derived and/or modified CDS sequence (opt4) from hemagglutinin__InfluenzaA__ABW91526
augaaggugaagcugcuggugcugcugugcaccuucaccgccaccuacgccgacaccaucugcaucggcuaccacgccaacaacagcaccgacaccguggacaccgugcuggagaagaacgugaccgugacccacagcgugaaccugcuggaggacagccacaacggcaagcugugccugcugaagggcaucgccccccugcagcugggcaacugcagcguggccggcuggauccugggcaaccccgagugcgagcugcugaucagcaaggagagcuggagcuacaucguggagacccccaaccccgagaacggcaccugcuaccccggcuacuucgccgacuacgaggagcugagagagcagcugagcagcgugagcagcuucgagagauucgagaucuuccccaaggagagcagcuggcccaaccacaccgugaccggcgugagcgccagcugcagccacaacggcaagagcagcuucuacagaaaccugcuguggcugaccggcaagaacggccuguaccccaaccugagcaagagcuacgccaacaacaaggagaaggaggugcuggugcuguggggcgugcaccacccccccaacaucggcgaccagagagcccuguaccacaccgagaacgccuacgugagcguggugagcagccacuacagcagaagauucacccccgagaucgccaagagacccaaggugagagagcaggagggcagaaucaacuacuacuggacccugcuggagcccggcgacaccaucaucuucgaggccaacggcaaccugaucgcccccagauucgccuucgcccugagcagaggcuucggcagcggcaucaucaccagcaacgcccccauggacgagugcgacgccaagugccagaccccccagggcgccaucaacagcagccugcccuuccagaacgugcaccccgugaccaucggcgagugccccaaguacgugagaagcaccagacugagaauggugaccggccugagaaacauccccagcauccagagcagaggccuguucggcgccaucgccggcuucaucgagggcggcuggaccggcaugguggacggcugguacggcuaccaccaccagaacgagcagggcagcggcuacgccgccgaccagaagagcacccagaacgccaucaacggcaucaccaacaaggugaacagcgugaucgagaagaugaacacccaguucaccgccgugggcaaggaguucaacaagcuggagagaagaauggagaaccugaacaagaagguggacgacggcuuccuggacaucuggaccuacaacgccgagcugcuggugcugcuggagaacgagagaacccuggacuuccacgacagcaacgugaagaaccuguacgagaaggugaagagccagcugaagaacaacgccaaggagaucggcaacggcugcuucgaguucuaccacaagugcaacgacgagugcauggagagcgugaagaacggcaccuacgacuaccccaaguacagcgaggagagcaagcugaacagagagaagaucgacggcgugaagcuggagagcaugggcguguaccagauccuggccaucuacagcaccguggccagcagccuggugcugcuggugagccugggcgccaucagcuucuggaugugcagcaacggcagccugcagugcagaaucugcaucuga

SEQ ID NO: 162255 - RNA, 1698 nt, Artificial Sequence; identical to SEQ ID NO: 161974
  derived and/or modified CDS sequence (opt4) from hemagglutinin__InfluenzaA__ABW91537

SEQ ID NO: 162256 - RNA, 1701 nt, Artificial Sequence; identical to SEQ ID NO: 162047
  derived and/or modified CDS sequence (opt4) from hemagglutinin__InfluenzaA__ABW91548

SEQ ID NO: 162257 - RNA, 1698 nt, Artificial Sequence
  derived and/or modified CDS sequence (opt4) from hemagglutinin__InfluenzaA__ABW91559
augaaggugaagcugcugauccugcugugcaccuucaccgccaccuacgccgacaccaucugcaucggcuaccacgccaacaacagcaccgacaccguggacaccgugcuggagaagaacgugaccgugacccacagcgugaaccugcuggaggacagccacaacggcaagcugugccugcugaagggcaucgccccccugcagcugggcaacugcagcguggccggcuggauccugggcaaccccgagugcgagcugcugaucagcaaggagagcuggagcuacaucguggagacccccaaccccgagaacggcaccugcuaccccggcuacuucgccgacuacgaggagcugagagagcagcugagcagcgugagcagcuucgagagauucgagaucuuccccaaggagagcagcuggcccaaccacaccgugaccggcgugagcgccagcugcagccacaacggcaagagcagcuucuacagaaaccugcuguggcugaccggcaagaacggccuguaccccaaccugagcaagagcuacgccaacaacaaggagaaggaggugcuggugcuguggggcgugcaccacccccccaacaucggcgaccagagagcccuguaccacaccgagaacgccuacgugagcguggugagcagccacuacagcagaagauucacccccgagaucgccaagagacccaaggugagagaccaggagggcagaaucaacuacuacuggacccugcuggagcccggcgacaccaucaucuucgaggccaacggcaaccugaucgcccccagauucgccuucgcccugagcagaggcuucggcagcggcaucaucaccagcaacgcccccauggacgagugcgacgccaagugccagaccccccagggcgccaucaacagcagccugcccuuccagaacgugcaccccgugaccaucggcgagugccccaaguacgugagaagcaccaagcugagaauggugaccggccugagaaacauccccagcauccagagcagaggccuguucggcgccaucgccggcuucaucgagggcggcuggaccggcaugguggacggcugguacggcuaccaccaccagaacgagcagggcagcggcuacgccgccgaccagaagagcacccagaacgccaucaacggcaucaccaacaaggugaacagcgugaucgagaagaugaacacccaguucaccgccgugggcaaggaguucaacaagcuggagagaagaauggagaaccugaacaagaagguggacgacggcuuccuggacaucuggaccuacaacgccgagcugcuggugcugcuggagaacgagagaacccuggacuuccacgacagcaacgugaagaaccuguacgagaaggugaagagccagcugaagaacaacgccaaggagaucggcaacggcugcuucgaguucuaccacaagugcaacgacgagugcauggagagcgugaagaacggcaccuacgacuaccccaaguacagcgaggagagcaagcuguacagagagaagaucgacggcgugaagcuggagagcaugggcguguaccagauccuggccaucuacagcaccguggccagcagccuggugcugcuggugagccugggcgccaucagcuucuggaugugcagcaacggcagccugcagugcagaaucugcaucuga

SEQ ID NO: 162258 - RNA, 1698 nt, Artificial Sequence; identical to SEQ ID NO: 162115
  derived and/or modified CDS sequence (opt4) from hemagglutinin__InfluenzaA__ABW91570

SEQ ID NO: 162259 - RNA, 1698 nt, Artificial Sequence; identical to SEQ ID NO: 161990
  derived and/or modified CDS sequence (opt4) from hemagglutinin__InfluenzaA__ABW91581

SEQ ID NO: 162260 - RNA, 1698 nt, Artificial Sequence; identical to SEQ ID NO: 161970
  derived and/or modified CDS sequence (opt4) from hemagglutinin__InfluenzaA__ABW91592

SEQ ID NO: 162261 - RNA, 1698 nt, Artificial Sequence; identical to SEQ ID NO: 162016
  derived and/or modified CDS sequence (opt4) from hemagglutinin__InfluenzaA__ABW91603

SEQ ID NO: 162262 - RNA, 1698 nt, Artificial Sequence
  derived and/or modified CDS sequence (opt4) from hemagglutinin__InfluenzaA__ABW91614
augaaggugaagcugcuggugcugcugugcaccuucaccgccaccuacgccgacaccaucugcaucggcuaccacgccaacaacagcaccgacaccguggacaccgugcuggagaagaacgugaccgugacccacagcgugaaccugcuggaggacagccacaacggcaagcugugccugcugaagggcaucgccccccugcagcugggcaacugcagcguggccggcuggauccugggcaaccccgagugcgagcugcugaucagcaaggagagcuggagcuacaucguggagacccccagccccgagaacggcaccugcuaccccggcuacuucgccgacuacgaggagcugagagagcagcugagcagcgugagcagcuucgagagauucgagaucuuccccaaggagagcagcuggcccaaccacaccgugaccggcgugagcgccagcugcagccacaacggcaagagcagcuucuacagaaaccugcuguggcugaccggcaagaacggccuguaccccaaccugagcaagagcuacgccaacaacaaggagaaggaggugcuggugcuguggggcgugcaccacccccccaacaucggcgaccagagagcccuguaccacaccgagaacgccuacgugagcguggugagcagccacuacagcagaagauucacccccgagaucgccaagagacccaaggugagagaccaggagggcagaaucaacuacuacuggacccugcuggagcccggcgacaccaucaucuucgaggccaacggcaaccugaucgcccccagauucgccuucgcccugagcagaggcuucggcagcggcaucaucagcagcaacgcccccaugggcgagugcgacgccaagugccagaccccccagggcgccaucaacagcagccugcccuuccagaacgugcaccccgugaccaucggcgagugccccaaguacgugagaagcgccaagcugagaauggugaccggccugagaaacauccccagcauccagagcagaggccuguucggcgccaucgccggcuucaucgagggcggcuggaccggcaugguggacggcugguacggcuaccaccaccagaacgagcagggcagcggcuacgccgccgaccagaagagcacccagaacgccaucaacggcaucaccaacaaggugaacagcgugaucgagaagaugaacacccaguucaccgccgugggcaaggaguucaacaagcuggagagaagaauggagaaccugaacaagaagguggacgacggcuuccuggacaucuggaccuacaacgccgagcugcuggugcugcuggagaacgagagaacccuggacuuccacgacagcaacgugaagaaccuguacgagaaggugaagagccagcugaagaacaacgccaaggagaucggcaacggcugcuucgaguucuaccacaagugcaacgacgagugcauggagagcgugaagaacggcaccuacgacuaccccaaguacagcgaggagagcaagcugaacagagagaagaucgacggcgugaagcuggagagcaugggcguguaccagauccuggccaucuacagcaccguggccagcagccuggugcugcuggugagccugggcgccaucagcuucuggaugugcagcaacggcagccugcagugcagaaucugcaucuga

SEQ ID NO: 162263 - RNA, 1698 nt, Artificial Sequence; identical to SEQ ID NO: 162005
  derived and/or modified CDS sequence (opt4) from hemagglutinin__InfluenzaA__ABW91625

SEQ ID NO: 162264 - RNA, 1698 nt, Artificial Sequence; identical to SEQ ID NO: 161974
  derived and/or modified CDS sequence (opt4) from hemagglutinin__InfluenzaA__ABW91636

SEQ ID NO: 162265 - RNA, 1701 nt, Artificial Sequence; identical to SEQ ID NO: 162047
  derived and/or modified CDS sequence (opt4) from hemagglutinin__InfluenzaA__ABW91647

SEQ ID NO: 162266 - RNA, 1707 nt, Artificial Sequence
  derived and/or modified CDS sequence (opt4) from hemagglutinin__InfluenzaA__ABX10515
auggagaagaucgugcugcuguucgccaucgugagccuggugaagagcgaccagaucugcaucggcuaccacgccaacaacagcaccgagcagguggacaccaucauggagaagaacgugaccgugacccacgcccaggacauccuggagaagacccacaacggcaagcugugcgaccuggacggcgugaagccccugauccugagagacugcagcguggccggcuggcugcugggcaaccccaugugcgacgaguucaucaacgugcccgaguggagcuacaucguggagaaggccaaccccgugaacgaccugugcuaccccggcgacuucaacgacuacgaggagcugaagcaccugcugagcagaaucaaccacuucgagaagauccagaucauccccaagagcagcuggagcagccacgaggugagccugggcgugagcagcgccugccccuaccagggcaagagcagcuucuucagaaacgugguguggcugaucaagaagaacagcaccuaccccaccaucaagagaagcuacaacaacaccaaccaggaggaccugcuggugcuguggggcauccaccaccccaacgacgccgccgagcagaccaagcuguaccagaaccccaccaccuacaucagcgugggcaccagcacccugaaccagagacuggugcccagaaucgccaccagaagcaaggugaacggccagagcggcagaauggaguucuucuggaccauccugaagcccaacgacgccaucaacuucgagagcaacggcaacuucaucgcccccgaguacgccuacaagaucgugaagaagggcgacagcaccaucaugaagagcgagcuggaguacggcaacugcaacaccaagugccagacccccaugggcgccaucaacagcagcaugcccuuccacaacauccacccccugaccaucggcgagugccccaaguacgugaagagcaacagacuggugcuggccaccggccugagaaacagcccccagagagagagaagaagaaagaagagaggccuguucggcgccaucgccggcuucaucgagggcggcuggcagggcaugguggacggcugguacggcuaccaccacagcaacgagcagggcagcggcuacgccgccgacaaggagagcacccagaaggccaucgacggcgugaccaacaaggugaacagcaucaucgacaagaugaacacccaguucgaggccgugggcagagaguucaacaaccuggagagaagaaucgagaaccugaacaagaagauggaggacggcuuccuggacguguggaccuacaacgccgagcugcuggugcugauggagaacgagagaacccuggacuuccacgacagcaacgugaagaaccuguacgacaaggugagacugcagcugaaggacaacgccaaggagcugggcaacggcugcuucgaguucuaccacaagugcgacaacgagugcauggagagcgugagaaacggcaccuacgacuacccccaguacagcgaggaggccagacugaagagagaggagaucagcggcgugaagcuggagagcaucggcaucuaccagauccugagcaucuacagcaccguggccagcagccuggcccuggccaucaugguggccggccugagccuguggaugugcagcaacggcagccugcagugcagaaucugcaucuga

SEQ ID NO: 162267 - RNA, 1701 nt, Artificial Sequence; identical to SEQ ID NO: 161916
  derived and/or modified CDS sequence (opt4) from hemagglutinin__InfluenzaA__ABX10525

SEQ ID NO: 162268 - RNA, 1698 nt, Artificial Sequence; identical to SEQ ID NO: 161974
  derived and/or modified CDS sequence (opt4) from hemagglutinin__InfluenzaA__ABX58239

SEQ ID NO: 162269 - RNA, 1698 nt, Artificial Sequence; identical to SEQ ID NO: 162074
  derived and/or modified CDS sequence (opt4) from hemagglutinin__InfluenzaA__ABX58250

SEQ ID NO: 162270 - RNA, 1698 nt, Artificial Sequence
  derived and/or modified CDS sequence (opt4) from hemagglutinin__InfluenzaA__ABX58261
augaaggugaagcugcugauccugcugugcaccuucaccgccaccuacgccgacaccaucugcaucggcuaccacgccaacaacagcaccgacaccguggacaccgugcuggagaagaacgugaccgugacccacagcgugaaccugcuggaggacagccacaacggcaagcugugccugcugaagggcaucgccccccugcagcugggcaacugcagcguggccggcuggauccugggcaaccccgagugcgagcugcugaucagcaaggagagcuggagcuacaucguggagacccccaaccccgagaacggcaccugcuaccccggcuacuucgccgacuacgaggagcugagagagcagcugagcagcgugagcagcuucgagagauucgagaucuuccccaaggagagcagcuggcccaaccacaccgugaccggcgugagcgccagcugcagccacaacggcaagagcagcuucuacagaaaccugcuguggcugaccggcaagaacggccuguaccccaaccugagcaagagcuacgccaacaacaaggagaaggaggugcuggugcuguggggcgugcaccacccccccaacaucggcgaccagagagcccuguaccacaccgagaacgccuacgugagcguggugagcagccacuacagcagaagauucacccccgagaucgccaagagacccaaggugagagaccaggagggcagaaucaacuacuacuggagccugcuggagcccggcgacaccaucaucuucgaggccaacggcaaccugaucgcccccagauucgccuucgcccugagcagaggcuucggcagcggcaucaucaccagcaacgcccccauggacgagugcgacgccaagugccagaccccccagggcgccaucaacagcagccugcccuuccagaacgugcaccccgugaccaucggcgagugccccaaguacgugagaagcaccaagcugagaauggugaccggccugagaaacauccccagcauccagagcagaggccuguucggcgccaucgccggcuucaucgagggcggcuggaccggcaugguggacggcugguacggcuaccaccaccagaacgagcagggcagcggcuacgccgccgaccagaagagcacccagaacgccaucaacggcaucaccaacaaggugaacagcgugaucgagaagaugaacacccaguucaccgccgugggcaaggaguucaacaagcuggagagaagaauggagaaccugaacaagaagguggacgacggcuuccuggacaucuggaccuacaacgccgagcugcuggugcugcuggagaacgagagaacccuggacuuccacgacagcaacgugaagaaccuguacgagaaggugaagagccagcugaagaacaacgccaaggagaucggcaacggcugcuucgaguucuaccacaagugcaacgacgagugcauggagagcgugaagaacggcaccuacgacuaccccaaguacagcgaggagagcaagcugaacagagagaagaucgacggcgugaagcuggagagcaugggcguguaccagauccuggccaucuacagcaccguggccagcagccuggugcugcuggugagccugggcgccaucagcuucuggaugugcagcaacggcagccugcagugcagaaucugcaucuga

SEQ ID NO: 162271 - RNA, 1698 nt, Artificial Sequence
  derived and/or modified CDS sequence (opt4) from hemagglutinin__InfluenzaA__ABX58272
augaaggugaagcugcugauccugcugugcaccuucaccgccaccuacgccgacaccaucugcaucggcuaccacgccaacaacagcaccgacaccguggacaccgugcuggagaagaacgugaccgugacccacagcgugaaccugcuggaggacagccacaacggcaagcugugccugcugaagggcaucgccccccugcagcugggcaacugcagcguggccggcuggauccugggcaaccccgagugcgagcugcugaucagcaaggagagcuggagcuacaucguggagacccccaaccccgagaacggcaccugcuaccccggcuacuucgccgacuacgaggagcugagagagcagcugagcagcgugagcagcuucgagagauucgagaucuuccccaagaagagcagcuggcccaaccacaccgugaccggcgugagcgccagcugcagccacaacggcaagagcagcuucuacagaaaccugcuguggcugaccggcaagaacggccuguaccccaaccugagcaagagcuacgccaacaacaaggagaaggaggugcuggugcuguggggcgugcaccacccccccaacaucggcgaccagagagcccuguaccacaccgagaacgccuacgugagcguggugagcagccacuacagcagaagauucacccccgagaucgccaagagacccaaggugagagaccaggagggcagaaucaacuacuacuggacccugcuggagcccggcgacaccaucaucuucgaggccaacggcaaccugaucgcccccagauucgccuucgcccugagcagaggcuucggcagcggcaucaucaccagcaacgcccccauggacgagugcgacgccaagugccagaccccccagggcgccaucaacagcagccugcccuuccagaacgugcaccccgugaccaucggcgagugccccaaguacgugagaagcaccaagcugagaauggugaccggccugagaaacauccccagcauccagagcagaggccuguucggcgccaucgccggcuucaucgagggcggcuggaccggcaugguggacggcugguacggcuaccaccaccagaacgagcagggcagcggcuacgccgccgaccagaagagcacccagaacgccaucaacggcaucaccaacaaggugaacagcgugaucgagaagaugaacacccaguucaccgccgugggcaaggaguucaacaagcuggagagaagaauggagaaccugaacaagaagguggacgacggcuuccuggacaucuggaccuacaacgccgagcugcuggugcugcuggagaacgagagaacccuggacuuccacgacagcaacgugaagaaccuguacgagaaggugaagagccagcugaagaacaacgccaaggagaucggcaacggcugcuucgaguucuaccacaagugcaacgacgagugcauggagagcgugaagaacggcaccuacgacuaccccaaguacagcgaggagagcaagcugaacagagagaagaucgacggcgugaagcuggagagcaugggcguguaccagauccuggccaucuacagcaccguggccagcagccuggugcugcuggugagccugggcgccaucagcuucuggaugugcagcaacggcagccugcagugcagaaucugcaucuga

SEQ ID NO: 162272 - RNA, 1698 nt, Artificial Sequence; identical to SEQ ID NO: 161974
  derived and/or modified CDS sequence (opt4) from hemagglutinin__InfluenzaA__ABX58283

SEQ ID NO: 162273 - RNA, 1698 nt, Artificial Sequence; identical to SEQ ID NO: 162115
  derived and/or modified CDS sequence (opt4) from hemagglutinin__InfluenzaA__ABX58294

SEQ ID NO: 162274 - RNA, 1698 nt, Artificial Sequence; identical to SEQ ID NO: 161970
  derived and/or modified CDS sequence (opt4) from hemagglutinin__InfluenzaA__ABX58316

SEQ ID NO: 162275 - RNA, 1698 nt, Artificial Sequence; identical to SEQ ID NO: 162119
  derived and/or modified CDS sequence (opt4) from hemagglutinin__InfluenzaA__ABX58327

SEQ ID NO: 162276 - RNA, 1698 nt, Artificial Sequence; identical to SEQ ID NO: 161970
  derived and/or modified CDS sequence (opt4) from hemagglutinin__InfluenzaA__ABX58338

SEQ ID NO: 162277 - RNA, 1698 nt, Artificial Sequence
  derived and/or modified CDS sequence (opt4) from hemagglutinin__InfluenzaA__ABX58360
augaaggugaagcugcuggugcugcugugcaccuucaccgccaccuacgccgacaccaucugcaucggcuaccacgccaacaacagcaccgacaccguggacaccgugcuggagaagaacgugaccgugacccacagcgugaaccugcuggaggacagccacaacggcaagcugugccugcugaagggcaucgcccccauccagcugggcaacugcagcguggccggcuggauccugggcaaccccgagugcgagcugcugaucagcaaggagagcuggagcuacaucguggagacccccaaccccgagaacggcaccugcuaccccggcuacuucgccgacuacgaggagcugagagagcagcugagcagcgugagcagcuucgagagauucgagaucuuccccaaggagagcagcuggcccaaccacaccgugaccggcgugagcgccagcugcagccacaacggcaagagcagcuucuacagaaaccugcuguggcugaccggcaagaacggccuguaccccaaccugagcaagagcuacgccaacaacaaggagaaggaggugcuggugcuguggggcgugcaccacccccccaacaucggcgaccagagagcccuguaccacaccgagaacgccuacgugagcguggugagcagccacuacagcagaagauucacccccgagaucgccaagagacccaaggugagagaccaggagggcagaaucaacuacuacuggacccugcuggagcccggcgacaccaucaucuucgaggccaacggcaaccugaucgcccccagauucgccuucgcccugagcagaggcuucggcagcggcaucaucaccagcaacgcccccauggacgagugcgacgccaagugccagaccccccagggcgccaucaacagcagccugcccuuccagaacgugcaccccgugaccaucggcgagugccccaaguacgugagaagcaccaagcugagaauggugaccggccugagaaacauccccagcauccagagcagaggccuguucggcgccaucgccggcuucaucgagggcggcuggaccggcaugguggacggcugguacggcuaccaccaccagaacgagcagggcagcggcuacgccgccgaccagaagagcacccagaacgccaucaacggcaucaccaacaaggugaacagcgugaucgagaagaugaacacccaguucaccgccgugggcaaggaguucaacaagcuggagagaagaauggagaaccugaacaagaagguggacgacggcuuccuggacaucuggaccuacaacgccgagcugcuggugcugcuggagaacgagagaacccuggacuuccacgacagcaacgugaagaaccuguacgagaaggugaagagccagcugaagaacaacgccaaggagaucggcaacggcugcuucgaguucuaccacaagugcaacgacggcugcauggagagcgugaagaacggcaccuacgacuaccccaaguacagcgaggagagcaagcugaacagagagaagaucgacggcgugaagcuggagagcaugggcguguaccagauccuggccaucuacagcaccguggccagcagccuggugcugcuggugagccugggcgccaucagcuucuggaugugcagcaacggcagccugcagugcagaaucugcaucuga

SEQ ID NO: 162278 - RNA, 1698 nt, Artificial Sequence; identical to SEQ ID NO: 161974
  derived and/or modified CDS sequence (opt4) from hemagglutinin__InfluenzaA__ABX58371

SEQ ID NO: 162279 - RNA, 1698 nt, Artificial Sequence; identical to SEQ ID NO: 161974
  derived and/or modified CDS sequence (opt4) from hemagglutinin__InfluenzaA__ABX58382

SEQ ID NO: 162280 - RNA, 1698 nt, Artificial Sequence; identical to SEQ ID NO: 162115
  derived and/or modified CDS sequence (opt4) from hemagglutinin__InfluenzaA__ABX58393

SEQ ID NO: 162281 - RNA, 1698 nt, Artificial Sequence; identical to SEQ ID NO: 161974
  derived and/or modified CDS sequence (opt4) from hemagglutinin__InfluenzaA__ABX58404

SEQ ID NO: 162282 - RNA, 1698 nt, Artificial Sequence
  derived and/or modified CDS sequence (opt4) from hemagglutinin__InfluenzaA__ABX58415
augaaggugaagcugcuggugcugcugugcaccuucaccgccaccuacgccgacaccaucugcaucggcuaccacgccaacaacagcaccgacaccguggacaccgugcuggagaagaacgugaccgugacccacagcgugaaccugcuggaggacagacacaacggcaagcugugccugcugaagggcaucgccccccugcagcugggcaacugcagcguggccggcuggauccugggcaaccccgagugcgagcugcugaucagcaagaagagcuggagcuacaucguggagacccccaaccccgagaacggcaccugcuaccccggcuacuucgccgacuacgaggagcugagagagcagcugagcagcgugagcagcuucgagagauucgagaucuuccccaaggagagcagcuggcccaaccacaccgugaccggcgugagcgccagcugcagccacaacggcaagagcagcuucuacagaaaccugcuguggcugaccggcaagaacggccuguaccccaaccugagcagaagcuacgccaacaacaaggagaaggaggugcuggugcuguggggcgugcaccacccccccaacaucggcgaccagagagcccuguaccacaccgagaacgccuacgugagcguggugagcagccacuacagcagaagauucacccccgagaucgccaagagacccaaggugagagaccaggagggcagaaucaacuacuacuggacccugcuggagcccggcgacaccaucaucuucgaggccaacggcaaccugaucgcccccagauucgccuucgcccugagcagaggcuucggcagcggcaucaucaccagcaacgcccccauggacgagugcgacgccaagugccagaccccccagggcgccaucaacagcagccugcccuuccagaacgugcaccccgugaccaucggcgagugccccaaguacgugagaagcgccaagcugagaauggugaccggccugagaaacauccccagcauccagagcagaggccuguucggcgccaucgccggcuucaucgagggcggcuggaccggcaugguggacggcugguacggcuaccaccaccagaacgagcagggcagcggcuacgccgccgaccagaagagcacccagaacgccaucaacggcaucaccaacaaggugaacagcgugaucgagaagaugaacacccaguucaccgccgugggcaaggaguucaacaagcuggagagaagaauggagaaccugaacaagaagguggacgacggcuuccuggacaucuggaccuacaacgccgagcugcuggugcugcuggagaacgagagaacccuggacuuccacgacagcaacgugaagaaccuguacgagaaggugaagagccagcugaagaacaacgccaaggagaucggcaacggcugcuucgaguucuaccacaagugcaacgacgagugcauggagagcgugaagaacggcaccuacgacuaccccaaguacagcgaggagagcaagcugaacagagagaagaucgacggcgugaagcuggagagcaugggcguguaccagauccuggccaucuacagcaccguggccagcagccuggugcugcuggugagccugggcgccaucagcuucuggaugugcagcaacggcagccugcagugcagaaucugcaucuga

SEQ ID NO: 162283 - RNA, 1698 nt, Artificial Sequence; identical to SEQ ID NO: 161974
  derived and/or modified CDS sequence (opt4) from hemagglutinin__InfluenzaA__ABX58426

SEQ ID NO: 162284 - RNA, 1698 nt, Artificial Sequence; identical to SEQ ID NO: 161974
  derived and/or modified CDS sequence (opt4) from hemagglutinin__InfluenzaA__ABX58437

SEQ ID NO: 162285 - RNA, 1698 nt, Artificial Sequence; identical to SEQ ID NO: 161970
  derived and/or modified CDS sequence (opt4) from hemagglutinin__InfluenzaA__ABX58448

SEQ ID NO: 162286 - RNA, 1698 nt, Artificial Sequence; identical to SEQ ID NO: 162016
  derived and/or modified CDS sequence (opt4) from hemagglutinin__InfluenzaA__ABX58459

SEQ ID NO: 162287 - RNA, 1698 nt, Artificial Sequence; identical to SEQ ID NO: 162115
  derived and/or modified CDS sequence (opt4) from hemagglutinin__InfluenzaA__ABX58470

SEQ ID NO: 162288 - RNA, 1698 nt, Artificial Sequence; identical to SEQ ID NO: 162016
  derived and/or modified CDS sequence (opt4) from hemagglutinin__InfluenzaA__ABX58481

SEQ ID NO: 162289 - RNA, 1698 nt, Artificial Sequence; identical to SEQ ID NO: 161974
  derived and/or modified CDS sequence (opt4) from hemagglutinin__InfluenzaA__ABX58492

SEQ ID NO: 162290 - RNA, 1698 nt, Artificial Sequence; identical to SEQ ID NO: 161990
  derived and/or modified CDS sequence (opt4) from hemagglutinin__InfluenzaA__ABX58503

SEQ ID NO: 162291 - RNA, 1698 nt, Artificial Sequence; identical to SEQ ID NO: 162016
  derived and/or modified CDS sequence (opt4) from hemagglutinin__InfluenzaA__ABX58525

SEQ ID NO: 162292 - RNA, 1698 nt, Artificial Sequence
  derived and/or modified CDS sequence (opt4) from hemagglutinin__InfluenzaA__ABX58536
augaaggugaagcugcuggugcugcugugcaccuucaccgccaccuacgccgacaccaucugcaucggcuaccacgccaacaacagcaccgacaccguggacaccgugcuggagaagaacgugaccgugacccacagcgugaaccugcuggaggacagacacaacggcaagcugugccugcugaagggcaucgccccccugcagcugggcaacugcagcguggccggcuggauccugggcaaccccgagugcgagcugcugaucagcaaggagcccuggagcuacaucguggagacccccaaccccgagaacggcaccugcuaccccggcuacuucgccgacuacgaggagcugagagagcagcugagcagcgugagcagcuucgagagauucgagaucuuccccaaggagagcagcuggcccaaccacaccgugaccggcgugagcgccagcugcagccacaacggcaagagcagcuucuacagaaaccugcuguggcugaccggcaagaacggccuguaccccaaccugagcagaagcuacgccaacaacaaggagaaggaggugcuggugcuguggggcgugcaccacccccccaacaucggcgaccagagagcccuguaccacaccgagaacgccuacgugagcguggugagcagccacuacagcagaagauucacccccgagaucgccaagagacccaaggugagagaccaggagggcagaaucaacuacuacuggacccugcuggagcccggcgacaccaucaucuucgaggccaacggcaaccugaucgcccccagauucgccuucgcccugagcagaggcuucggcagcggcaucaucaccagcaacgcccccauggacgagugcgacgccaagugccagaccccccagggcgccaucaacagcagccugcccuuccagaacgugcaccccgugaccaucggcgagugccccaaguacgugagaagcgccaagcugagaauggugaccggccugagaaacauccccagcauccagagcagaggccuguucggcgccaucgccggcuucaucgagggcggcuggaccggcaugguggacggcugguacggcuaccaccaccagaacgagcagggcagcggcuacgccgccgaccagaagagcacccagaacgccaucaacggcaucaccaacaaggugaacagcgugaucgagaagaugaacacccaguucaccgccgugggcaaggaguucaacaagcuggagagaagaauggagaaccugaacaagaagguggacgacggcuuccuggacaucuggaccuacaacgccgagcugcuggugcugcuggagaacgagagaacccuggacuuccacgacagcaacgugaagaaccuguacgagaaggugaagagccagcugaagaacaacgccaaggagaucggcaacggcugcuucgaguucuaccacaagugcaacgacgagugcauggagagcgugaagaacggcaccuacgacuaccccaaguacagcgaggagagcaagcugaacagagagaagaucgacggcgugaagcuggagagcaugggcguguaccagauccuggccaucuacagcaccguggccagcagccuggugcugcuggugagccugggcgccaucagcuucuggaugugcagcaacggcagccugcagugcagaaucugcaucuga

SEQ ID NO: 162293 - RNA, 1698 nt, Artificial Sequence
  derived and/or modified CDS sequence (opt4) from hemagglutinin__InfluenzaA__ABX58547
augaaggugaagcugcugauccugcugugcaccuucaccgccaccuacgccgacaccaucugcaucggcuaccacgccaacaacagcaccgacaccguggacaccgugcuggagaagaacgugaccgugacccacagcgugaaccugcuggaggacagccacaacggcaagcugugccugcugaagggcaucgccccccugcagcugggcaacugcagcguggccggcuggauccugggcaaccccgagugcgagcugcugaucagcaaggagagcuggagcuacaucguggagacccccaaccccgagaacggcaccugcuaccccggcuacuucgccgacuacgaggagcugagagagcagcugagcagcgugagcagcuucgagagauucgagaucuuccccaaggagagcagcuggcccaaccacaccgugaccggcgugagcgccagcugcagccacaacggcaagagcagcuucuacagaaaccugcuguggcugaccggcaagaacggccuguaccccaaccugagcaagagcuacgccaacaacaaggagaaggaggugcuggugcuguggggcgugcaccacccccccaacaucggcgaccagagagcccuguaccacaccgagaacgccuacgugagcguggugagcagccacuacagcagaagauucacccccgagaucgccaagagacccaaggugagagaccaggagggcagaaucaacuacuacuggacccugcuggagcccggcgacaccaucaucuucgaggccaacggcaaccugaucgcccccagauucgccuucgcccugagcagaggcuucggcagcggcaucaucaccagcaacgcccccauggacgagugcgacgccaagugccagaccccccagggcgccaucaacagcagccugcccuuccagaacgugcaccccgugaccaucggcgagugccccaaguacgugagaagcaccaagcugagaauggugaccggccugagaaacauccccagcauccagaccagaggccuguucggcgccaucgccggcuucaucgagggcggcuggaccggcaugguggacggcugguacggcuaccaccaccagaacgagcagggcagcggcuacgccgccgaccagaagagcacccagaacgccaucaacggcaucaccaacaaggugaacagcgugaucgagaagaugaacacccaguucaccgccgugggcaaggaguucaacaagcuggagagaagaauggagaaccugaacaagaagguggacgacggcuuccuggacaucuggaccuacaacgccgagcugcuggugcugcuggagaacgagagaacccuggacuuccacgacagcaacgugaagaaccuguacgagaaggugaagagccagcugaagaacaacgccaaggagaucggcaacggcugcuucgaguucuaccacaagugcaacgacgagugcauggagagcgugaagaacggcaccuacgacuaccccaaguacagcgaggagagcaagcugaacagagagaagaucgacggcgugaagcuggagagcaugggcguguaccagauccuggccaucuacagcaccguggccagcagccuggugcugcuggugagccugggcgccaucagcuucuggaugugcagcaacggcagccugcagugcagaaucugcaucuga

SEQ ID NO: 162294 - RNA, 1698 nt, Artificial Sequence
  derived and/or modified CDS sequence (opt4) from hemagglutinin__InfluenzaA__ABX58558
augaaggugaagcugcuggugcugcugugcaccuucaccgccaccuacgccgacaccaucugcaucggcuaccacgccaacaacagcaccgacaccguggacaccgugcuggagaagaacgugaccgugacccacagcgugaaccugcuggaggacagccacaacggcaagcugugccugcugaagggcaucgccccccugcagcugggcaacugcagcguggccggcuggauccugggcaaccccgagugcgagcugcugaucagcaaggagagcuggagcuacaucguggagacccccaaccccgagaacggcaccugcuaccccggcuacuucgccgacuacgaggagcugagagagcagcugagcagcgugagcagcuucgagagauucgagaucuuccccaaggagagcagcuggcccaaccacaccgugaccggcgugagcgccagcugcagccacaacggcagaagcagcuucuacagaaaccugcuguggcugaccggcaagaacggccuguaccccaaccugagcaagagcuacgccaacaacaaggagaaggaggugcuggugcuguggggcgugcaccacccccccaacaucggcgaccagagagcccuguaccacaccgagaacgccuacgugagcguggugagcagccacuacagcagaagauucacccccgagaucgccaagagacccaaggugagagaccaggagggcagaaucaacuacuacuggacccugcuggagcccggcgacaccaucaucuucgaggccaacggcaaccugaucgcccccagauucgccuucgcccugagcagaggcuucggcagcggcaucaucaccagcaacgcccccauggacaagugcgacgccaagugccagaccccccagggcgccaucaacagcagccugcccuuccagaacgugcaccccgugaccaucggcgagugccccaaguacgugagaagcaccaagcugagaauggugaccggccugagaaacauccccagcauccagagcagaggccuguucggcgccaucgccggcuucaucgagggcggcuggaccggcaugguggacggcugguacggcuaccaccaccagaacgagcagggcagcggcuacgccgccgaccagaagagcacccagaacgccaucaacggcaucaccaacaaggugaacagcgugaucgagaagaugaacacccaguucaccgccgugggcaaggaguucaacaagcuggagagaagaauggagaaccugaacaagaagguggacgacggcuuccuggacaucuggaccuacaacgccgagcugcuggugcugcuggagaacgagagaacccuggacuuccacgacagcaacgugaagaaccuguacgagaaggugaagagccagcugaagaacaacgccaaggagaucggcaacggcugcuucgaguucuaccacaagugcaacgacgagugcauggagagcgugaagaacggcaccuacgacuaccccaaguacagcgaggagagcaagcugaacagagagaagaucgacggcgugaagcuggagagcaugggcguguaccagauccuggccaucuacagcaccguggccagcagccuggugcugcuggugagccugggcgccaucagcuucuggaugugcagcaacggcagccugcagugcagaaucugcaucuga

SEQ ID NO: 162295 - RNA, 1698 nt, Artificial Sequence
  derived and/or modified CDS sequence (opt4) from hemagglutinin__InfluenzaA__ABX58569
augaaggugaagcugcugauccugcugugcaccuucaccgccaccuacgccgacaccaucugcaucggcuaccacgccaacaacagcaccgacaccguggacaccgugcuggagaagaacgugaccgugacccacagcgugaaccugcuggaggacagccacaacggcaagcugugccugcugaagggcaucgccccccugcagcugggcaacugcagcguggccggcuggauccugggcaaccccgagugcgagcugcugaucagcaaggagagcuggagcuacaucguggagacccccaaccccgagaacggcaccugcuaccccggcuacuucgccgacuacgaggagcugagagagcagcugagcagcgugagcagcuucgagagauucgagaucuuccccaaggagagcagcuggcccaaccacaccgccaccggcgugagcgccagcugcagccacaacggcaagagcagcuucuacagaaaccugcuguggcugaccggcaagaacggccuguaccccaaccugagcaagagcuacgccaacaacaaggagaaggaggugcuggugcuguggggcgugcaccacccccccaacaucggcgaccagagagcccuguaccacaccgagaacgccuacgugagcguggugagcagccacuacagcagaagauucacccccgagaucgccaagagacccaaggugagagaccaggagggcagaaucaacuacuacuggacccugcuggagcccggcgacaccaucaucuucgaggccaacggcaaccugaucgcccccagauucgccuucgcccugagcagaggcuucggcagcggcaucaucaccagcaacgcccccauggacgagugcgacgccaagugccagaccccccagggcgccaucaacagcagccugcccuuccagaacgugcaccccgugaccaucggcgagugccccaaguacgugagaagcaccaagcugagaauggugaccggccugagaaacauccccagcauccagagcagaggccuguucggcgccaucgccggcuucaucgagggcggcuggaccggcaugguggacggcugguacggcuaccaccaccagaacgagcagggcagcggcuacgccgccgaccagaagagcacccagaacgccaucaacggcaucaccaacaaggugaacagcgugaucgagaagaugaacacccaguucaccgccgugggcaaggaguucaacaagcuggagagaagaauggagaaccugaacaagaagguggacgacggcuuccuggacaucuggaccuacaacgccgagcugcuggugcugcuggagaacgagagaacccuggacuuccacgacagcaacgugaagaaccuguacgagaaggugaagagccagcugaagaacaacgccaaggagaucggcaacggcugcuucgaguucuaccacaagugcaacgacgagugcauggagagcgugaagaacggcaccuacgacuaccccaaguacagcgaggagagcaagcugaacagagagaagaucgacggcgugaagcuggagagcaugggcguguaccagauccuggccaucuacagcaccguggccagcagccuggugcugcuggugagccugggcgccaucagcuucuggaugugcagcaacggcagccugcagugcagaaucugcaucuga

SEQ ID NO: 162296 - RNA, 1698 nt, Artificial Sequence; identical to SEQ ID NO: 161970
  derived and/or modified CDS sequence (opt4) from hemagglutinin__InfluenzaA__ABX58580

SEQ ID NO: 162297 - RNA, 1698 nt, Artificial Sequence; identical to SEQ ID NO: 161974
  derived and/or modified CDS sequence (opt4) from hemagglutinin__InfluenzaA__ABX58591

SEQ ID NO: 162298 - RNA, 1698 nt, Artificial Sequence
  derived and/or modified CDS sequence (opt4) from hemagglutinin__InfluenzaA__ABX58602
augaaggugaagcugcuggugcugcugugcaccuucaccgccaccuacgccgacaccaucugcaucggcuaccacgccaacaacagcaccgacaccguggacaccgugcuggagaagaacgugaccgugacccacagcgugaaccugcuggaggacagccacaacggcaagcugugccugcuggagggcaucgccccccugcagcugggcaacugcagcguggccggcuggauccugggcaaccccgagugcgagcugcugaucagcaaggagagcuggagcuacaucguggagacccccaaccccgagaacggcaccugcuaccccggcuacuucgccgacuacgaggagcugagagagcagcugagcagcgugagcagcuucgagagauucgagaucuuccccaaggagagcagcuggcccaaccacaccgugaccggcgugagcgccagcugcagccacaacggcaagagcagcuucuacagaaaccugcuguggcugaccggcaagaacggccuguaccccaaccugagcaagagcuacgccaacaacaaggagaaggaggugcuggugcuguggggcgugcaccacccccccaacaucggcgaccagagagcccuguaccacaccgagaacgccuacgugagcguggugagcagccacuacagcagaagauucacccccgagaucgccaagagacccaaggugagagaccaggagggcagaaucaacuacuacuggacccugcuggagcccagagacaccaucaucuucgaggccaacggcaaccugaucgcccccagauucgccuucgcccugagcagaggcuucggcagcggcaucaucaccagcaacgcccccaugggcgagugcgacgccaagugccagaccccccagggcgccaucaacagcagccugcccuuccagaacgugcaccccgugaccaucggcgagugccccaaguacgugagaagcgccaagcugagaauggugaccggccugagaaacauccccagcauccagagcagaggccuguucggcgccaucgccggcuucaucgagggcggcuggaccggcaugguggacggcugguacggcuaccaccaccagaacgagcagggcagcggcuacgccgccgaccagaagagcacccagaacgccaucaacggcaucaccaacaaggugaacagcgugaucgagaagaugaacacccaguucaccgccgugggcaaggaguucaacaagcuggagagaagaauggagaaccugaacaagaagguggacgacggcuuccuggacaucuggaccuacaacgccgagcugcuggugcugcuggagaacgagagaacccuggacuuccacgacagcaacgugaagaaccuguacgagaaggugaagagccagcugaagaacaacgccaaggagaucggcaacggcugcuucgaguucuaccacaagugcaacgacgagugcauggagagcgugaagaacggcaccuacgacuaccccaaguacagcgaggagagcaagcugaacagagagaagaucgacggcgugaagcuggagagcaugggcguguaccagauccuggccaucuacagcaccguggccagcagccuggugcugcuggugagccugggcgccaucagcuucuggaugugcagcaacggcagccugcagugcagaaucugcaucuga

SEQ ID NO: 162299 - RNA, 1698 nt, Artificial Sequence; identical to SEQ ID NO: 162007
  derived and/or modified CDS sequence (opt4) from hemagglutinin__InfluenzaA__ABX58613

SEQ ID NO: 162300 - RNA, 1698 nt, Artificial Sequence; identical to SEQ ID NO: 161974
  derived and/or modified CDS sequence (opt4) from hemagglutinin__InfluenzaA__ABX58624

SEQ ID NO: 162301 - RNA, 1698 nt, Artificial Sequence
  derived and/or modified CDS sequence (opt4) from hemagglutinin__InfluenzaA__ABX58635
augaaggugaagcugcuggugcugcugugcaccuucaccgccaccuacgccgacaccaucugcaucggcuaccacgccaacaacagcaccgacaccguggacaccgugcuggagaagaacgugaccgugacccacagcgugaaccugcuggaggacagccacaacggcaagcugugccugcugaagggcaucgccccccugcagcugggcaacugcagcguggccggcuggauccugggcaaccccgagugcgagcugcugaucagcaaggagagcuggagcuacaucguggagacccccaaccccgagaacggcaccugcuaccccggcuacuucgccgacuacgaggagcugagagagcagcugagcagcgugagcagcuucgagagauucgagaucuuccccaaggagagcagcuggcccaaccacaccgugaccggcgugagcgccagcugcagccacaacggcagaagcagcuucuacagaaaccugcuguggcugaccggcaagaacggccuguaccccagccugagcaagagcuacgccaacaacaaggagaaggaggugcuggugcuguggggcgugcaccacccccccaacaucggcgaccagagagcccuguaccacaccgagaacgccuacgugagcguggugagcagccacuacagcagaagauucacccccgagaucgccaagagacccaaggugagagaccaggagggcagaaucaacuacuacuggacccugcuggagcccggcgacaccaucaucuucgaggccaacggcaaccugaucgcccccagauucgccuucgcccugagcagaggcuucggcagcggcaucaucaccagcaacgcccccauggacgagugcgacgccaagugccagaccccccagggcgccaucaacagcagccugcccuuccagaacgugcaccccgugaccaucggcgagugccccaaguacgugagaagcaccaagcugagaauggugaccggccugagaaacauccccagcauccagagcagaggccuguucggcgccaucgccggcuucaucgagggcggcuggaccggcaugguggacggcugguacggcuaccaccaccagaacgagcagggcagcggcuacgccgccgaccagaagagcacccagaacgccaucaacggcaucaccaacaaggugaacagcgugaucgagaagaugaacacccaguucaccgccgugggcaaggaguucaacaagcuggagagaagaauggagaaccugaacaagaagguggacgacggcuuccuggacaucuggaccuacaacgccgagcugcuggugcugcuggagaacgagagaacccuggacuuccacgacagcaacgugaagaaccuguacgagaaggugaagagccagcugaagaacaacgccaaggagaucggcaacggcugcuucgaguucuaccacaagugcaacgacgagugcauggagagcgugaagaacggcaccuacgacuaccccaaguacagcgaggagagcaagcugaacagagagaagaucgacggcgugaagcuggagagcaugggcguguaccagauccuggccaucuacagcaccguggccagcagccuggugcugcuggugagccugggcgccaucagcuucuggaugugcagcaacggcagccugcagugcagaaucugcaucuga

SEQ ID NO: 162302 - RNA, 1698 nt, Artificial Sequence; identical to SEQ ID NO: 161970
  derived and/or modified CDS sequence (opt4) from hemagglutinin__InfluenzaA__ABX58679

SEQ ID NO: 162303 - RNA, 1698 nt, Artificial Sequence; identical to SEQ ID NO: 162016
  derived and/or modified CDS sequence (opt4) from hemagglutinin__InfluenzaA__ABX58701

SEQ ID NO: 162304 - RNA, 1698 nt, Artificial Sequence; identical to SEQ ID NO: 162074
  derived and/or modified CDS sequence (opt4) from hemagglutinin__InfluenzaA__ABX58712

SEQ ID NO: 162305 - RNA, 1704 nt, Artificial Sequence
  derived and/or modified CDS sequence (opt4) from hemagglutinin__InfluenzaA__ABY19417
auggagaagaucgugcugcugcuggccaucaucagccuggugaagagcgaccagaucugcaucggcuaccacgccaacaacagcaccgagcagguggacaccaucauggagaagaacgugaccgugacccacgcccaggacauccuggagaagacccacaacggcaagcugugcgaccuggacggcgugaagccccugauccugagagacugcagcguggccggcuggcugcugggcaaccccaugugcgacgaguucaucaacgugcccgaguggagcuacaucguggagaaggccaaccccgccaacgaccugugcuaccccggcaacuucaacgacuacgaggagcugaagcaccugcugagcagaaucaaccacuucgagaagauccagaucauccccaagagcagcuggagcgaccacgaggccagcagcggcgugagcagcgccugccccuaccagggcgugcccagcuucuucagaaacgugguguggcugaucaagaagaacaacaccuaccccaccaucaagagaagcuacaacaacaccaaccaggaggaccugcugauccuguggggcauccaccacagcaacgacgccgccgagcagaccaagcuguaccagaaccccaccaccuacaucagcgugggcaccagcacccugaaccagagacuggugcccaagaucgccaccagaagcaaggugaacggccagagcggcagaauggacuucuucuggaccauccugaagcccaacgacgccaucaacuucgagagcaacggcaacuucaucgcccccgaguacgccuacaagaucgugaagaagggcgacagcgccaucaugaagagcgagguggaguacggcaacugcaacaccaagugccagacccccaucggcgccaucaacagcagcaugcccuuccacaacauccacccccugaccaucggcgagugccccaaguacgugaagagcaacaagcuggugcuggccaccggccugagaaacagcccccugagagagagaagaagaaagagaggccuguucggcgccaucgccggcuucaucgagggcggcuggcagggcaugguggacggcugguacggcuaccaccacagcaacgagcagggcagcggcuacgccgccgacaaggagagcacccagaaggccaucgacggcgugaccaacaaggugaacagcaucaucgacaagaugaacacccaguucgaggccgugggcagagaguucaacaaccuggagagaagaaucgagaaccugaacaagaagauggaggacggcuuccuggacguguggaccuacaacgccgagcugcuggugcugauggagaacgagagaacccuggacuuccacgacagcaacgugaagaaccuguacgacaaggugagacugcagcugagagacaacgccaaggagcugggcaacggcugcuucaaguucuaccacaagugcgacaacgagugcauggagagcgugagaaacggcaccuacgacuacccccaguacagcgaggaggccagacugaagagagaggagaucagcggcgugaagcuggagagcaucggcaccuaccagauccugagcaucuacagcaccguggccagcagccuggcccuggccaucaugguggccggccugagccuguggaugugcagcaacggcagccugcagugcagaaucagaaucuga

SEQ ID NO: 162306 - RNA, 1704 nt, Artificial Sequence
  derived and/or modified CDS sequence (opt4) from hemagglutinin__InfluenzaA__ABY19418
auggagaagaucgugcugcugcuggccaucaucagccuggugaagagcgaccagaucugcaucggcuaccacgccaacaacagcaccgagcagguggacaccaucauggagaagaacgugaccgugacccacgcccaggacauccuggagaagacccacaacggcaagcugugcgaccuggacggcgugaagccccugauccugagagacugcagcguggccggcuggcugcugggcaaccccaugugcgacgaguucaucaacgugcccgaguggagcuacaucguggagaaggccaaccccgccaacgaccugugcuaccccggcgacuucaacgacuacgaggagcugaagcaccugcugagcagaaucaaccacuucgagaagauccagaucauccccaagagcagcuggagcgaccacgaggccagcagcggcgugagcagcgccugccccuaccagggcgugcccagcuucuucagaaacgugguguggcugaucaagaagaacaacaccuaccccaccaucaagagaagcuacaacaacaccaaccaggaggaccugcugauccuguggggcauccaccacagcaacgacgccgccgagcagaccaagcuguaccagaaccccaccaccuacaucagcgugggcaccagcacccugaaccagagacuggugcccaagaucgccaccagaagcaaggugaacggccagagcggcagaauggacuucuucuggaccauccugaagcccaacgacgccaucaacuucgagagcaacggcaacuucaucgcccccgaguacgccuacaagaucgugaagaagggcgacagcgccaucaugaagagcgagguggaguacggcaacugcaacaccaagugccagacccccaucggcgccaucaacagcagcaugcccuuccacaacauccacccccugaccaucggcgagugccccaaguacgugaagagcaacaagcuggugcuggccaccggccugagaaacagcccccugagagagagaagaagaaagagaggccuguucggcgccaucgccggcuucaucgagggcggcuggcagggcaugguggacggcugguacggcuuccaccacagcaacgagcagggcagcggcuacgccgccgacaaggagagcacccagaaggccaucgacggcgugaccaacaaggugaacagcaucaucgacaagaugaacacccaguucgaggccgugggcagagaguucaacaaccuggagagaagaaucgagaaccugaacaagaagauggaggacggcuuccuggacguguggaccuacaacgccgagcugcuggugcugauggagaacgagagaacccuggacuuccacgacagcaacgugaagaaccuguacgacaaggugagacugcagcugagagacaacgccaaggagcugggcaacggcugcuucgaguucuaccacaagugcgacaacgagugcauggagagcgugagaaacggcaccuacgacuacccccaguacagcgaggaggccagacugaagagagaggagaucagcggcgugaagcuggagagcaucggcaccuaccagauccugagcaucuacagcaccguggccagcagccuggcccuggccaucaugguggccggccugagccuguggaugugcagcaacggcagccugcagugcagaaucugcaucuga

SEQ ID NO: 162307 - RNA, 1704 nt, Artificial Sequence
  derived and/or modified CDS sequence (opt4) from hemagglutinin__InfluenzaA__ABY19419
auggagaagaucgugcugcugcuggccaucaucagccuggugaagagcgaccagaucugcaucggcuaccacgccaacaacagcaccgagcagguggacaccaucauggagaagaacgugaccgugacccacgcccaggacauccuggagaagacccacaacggcaagcugugcgaccuggacggcgugaagccccugauccugagagacugcagcguggccggcuggcugcugggcaaccccaugugcgacgaguucaucaacgugcccgaguggagcuacaucguggagaaggccaaccccgccaacgaccugugcuaccccggcaacuucaacgacuacgaggagcugaagcaccugcugagcagaaucaaccacuucgagaagauccagaucauccccaagagcagcuggagcgaccacgaggccagcagcggcgugagcagcgccugccccuaccagggcgugcccagcuucuucagaaacgugguguggcugaucaagaagaacaacaccuaccccaccaucaagagaagcuacaacaacaccaaccaggaggaccugcugauccuguggggcauccaccacagcaacgacgccgccgagcagaccaagcuguaccagaaccccaccaccuacaucagcgugggcaccagcacccugaaccagagacuggugcccaagaucgccaccagaagcaaggugaacggccagagcggcagaauggacuucuucuggaccauccugaagcccaacgacgccaucaacuucgagagcaacggcaacuucaucgcccccgaguacgccuacaagaucgugaagaagggcgacagcgccaucaugaagagcgagguggaguacggcaacugcaacaccaagugccagacccccaucggcgccaucaacagcagcaugcccuuccacaacauccacccccugaccaucggcgagugccccaaguacgugaagagcaacaagcuggugcuggccaccggccugagaaacagcccccugagagagagaagaagaaagagaggccuguucggcgccaucgccggcuucaucgagggcggcuggcagggcaugguggacggcugguacggcuaccaccacagcaacgagcagggcagcggcuacgccgccgacaaggagagcacccagaaggccaucgacggcgugaccaacaaggugaacagcaucaucgacaagaugaacacccaguucgaggccgugggcagagaguucaacaaccuggagagaagaaucgagaaccugaacaagaagauggaggacggcuuccuggacguguggaccuacaacgccgagcugcuggugcugauggagaacgagagaacccuggacuuccacgacagcaacgugaagaaccuguacgacaaggugagacugcagcugagagacaacgccaaggagcugggcaacggcugcuucgaguucuaccacaagugcgacaacgagugcauggagagcgugagaaacggcaccuacgacuacccccaguacagcgaggaggccagacugaagagagaggagaucagcggcgugaagcuggagagcaucggcaccuaccagauccugagcaucuacagcaccguggccagcagccuggcccuggccaucaugguggccggccugagccuguggaugugcagcaacggcagccugcagugcagaaucugcaucuga

SEQ ID NO: 162308 - RNA, 1698 nt, Artificial Sequence; identical to SEQ ID NO: 162115
  derived and/or modified CDS sequence (opt4) from hemagglutinin__InfluenzaA__ABY51017

SEQ ID NO: 162309 - RNA, 1701 nt, Artificial Sequence; identical to SEQ ID NO: 161988
  derived and/or modified CDS sequence (opt4) from hemagglutinin__InfluenzaA__ABY51028

SEQ ID NO: 162310 - RNA, 1698 nt, Artificial Sequence
  derived and/or modified CDS sequence (opt4) from hemagglutinin__InfluenzaA__ABY51039
augaaggugaagcugcuggugcugcugugcaccuucaccgccaccaacgccgacaccaucugcaucggcuaccacgccaacaacagcaccgacaccguggacaccgugcuggagaagaacgugaccgugacccacagcgugaaccugcuggagaacagccacaacggcaagcugugccugcugaagggcaucgccccccugcagcugggcaacugcagcguggccggcuggauccugggcaaccccgagugcgagcugcugaucagcaaggagagcuggagcuacaucguggagacccccaaccccgagaacggcaccugcuaccccggccacuucgccgacuacgaggagcugagagagcagcugagcagcgugagcagcuucgagagauucgagaucuuccccaaggagagcagcuggcccaaccacaccgugaccggcgugagcgccagcugcagccacaacggcgagagcagcuucuacagaaaccugcuguggcugaccggcaagaacggccuguaccccaaccugagcaagagcuacgccaacaacaaggagaaggaggugcuggugcuguggggcgugcaccacccccccaacaucggcgaccagaaggcccuguaccacaccgagaacgccuacgugagcguggugagcagccacuacagcagaaaguucacccccgagaucgccaagagacccaaggugagagaccaggagggcagaaucaacuacuacuggacccugcuggagcccggcgacaccaucaucuucgaggccaacggcaaccugaucgcccccagauacgccuucgcccugagcagaggcuucggcagcggcaucaucaacagcaacgcccccauggacaagugcgacgccaagugccagaccccccagggcgccaucaacagcagccugcccuuccagaacgugcaccccgugaccaucggcgagugccccaaguacgugagaagcgccaagcugagaauggugaccggccugagaaacauccccagcauccagagcagaggccuguucggcgccaucgccggcuucaucgagggcggcuggaccggcaugguggacggcugguacggcuaccaccaccagaacgagcagggcagcggcuacgccgccgaccagaagagcacccagaacgccaucaacggcaucaccaacaaggugaacagcgugaucgagaagaugaacacccaguucaccgccgugggcaaggaguucaacaagcuggagagaagaauggagaaccugaacaagaagguggacgacggcuucaucgacaucuggaccuacaacgccgagcugcuggugcugcuggagaacgagagaacccuggacuuccacgacagcaacgugaagaaccuguacgagaaggugaagggccagcugaagaacaacgccaaggagaucggcaacggcugcuucgaguucuaccacaagugcaacgacgagugcauggagagcgugaagaacggcaccuacgacuaccccaaguacagcgaggagagcaagcugaacagagagaagaucgacggcgugaagcuggagagcaugggcguguaccagauccuggccaucuacagcaccguggccagcagccuggugcugcuggugagccugggcgccaucagcuucuggaugugcagcaacggcagccugcagugcagaaucugcaucuga

SEQ ID NO: 162311 - RNA, 1698 nt, Artificial Sequence
  derived and/or modified CDS sequence (opt4) from hemagglutinin__InfluenzaA__ABY51050
augaaggugaagcugcuggugcugcugugcaccuucaccgccaccuacgccgacaccaucugcaucggcuaccacgccaacaacagcaccgacaccguggacaccgugcuggagaagaacgugaccgugacccacagcgugaaccugcuggagaacagccacaacggcaagcugugccugcugaagggcaucgccccccugcagcugggcaacugcagcguggccggcuggauccugggcaaccccgagugcgagcugcugaucagcaaggagagcuggagcuacaucguggagaagcccaaccccgagaacggcaccugcuaccccggccacuucgccgacuacgaggagcugagagagcagcugagcagcgugagcagcuucgagagauucgagaucuuccccaaggagagcagcuggcccaaccacaccgugaccggcgugagcgccagcugcagccacaacggcgagagcagcuucuacagaaaccugcuguggcugaccggcaagaacggccuguaccccaaccugagcaagagcuacgccaacaacaaggagaaggaggugcuggugcuguggggcgugcaccacccccccaacaucggcgaccagaaggcccuguaccacaccgagaacgccuacgugagcguggugagcagccacuacagcagaaaguucacccccgagaucgccaagagacccaaggugagagaccaggagggcagaaucaacuacuacuggacccugcuggagcccggcgacaccaucaucuucgaggccaacggcaaccugaucgcccccagauacgccuucgcccugagcagaggcuucggcagcggcaucaucaacagcaacgcccccauggacaagugcgacagcaagugccagaccccccagggcgccaucaacagcagccugcccuuccagaacgugcaccccgugaccaucggcgagugccccaaguacgugagaagcgccaagcugagaauggugaccggccugagaaacauccccagcauccagagcagaggccuguucggcgccaucgccggcuucaucgagggcggcuggaccggcaugguggacggcugguacggcuaccaccaccagaacgagcagggcagcggcuacgccgccgaccagaagagcacccagaacgccaucaacggcaucaccaacaaggugaacagcgugaucgagaagaugaacacccaguucaccgccgugggcaaggaguucaacaagcuggagagaagaauggagaaccugaacaagaagguggacgacggcuucaucgacaucuggaccuacaacgccgagcugcuggugcugcuggagaacgagagaacccuggacuuccacgacagcaacgugaagaaccuguacgagaaggugaagagccagcugaagaacaacgccaaggagaucggcaacggcugcuucgaguucuaccacaagugcaacgacgagugcauggagagcgugaagaacggcaccuacgacuaccccaaguacagcgaggagagcaagcugaacagagagaagaucgacggcgugaagcuggagagcaugggcguguaccagauccuggccaucuacagcaccguggccagcagccuggugcugcuggugagccugggcgccaucagcuucuggaugugcagcaacggcagccugcagugcagaaucugcaucuga

SEQ ID NO: 162312 - RNA, 1698 nt, Artificial Sequence; identical to SEQ ID NO: 162074
  derived and/or modified CDS sequence (opt4) from hemagglutinin__InfluenzaA__ABY51061

SEQ ID NO: 162313 - RNA, 1698 nt, Artificial Sequence
  derived and/or modified CDS sequence (opt4) from hemagglutinin__InfluenzaA__ABY51072
augaaggugaagcugcugauccugcugugcaccuucaccgccaccuacgccgacaccaucugcaucggcuaccacgccaacaacagcaccgacaccguggacaccgugcuggagaagaacgugaccgugacccacagcgugaaccugcuggaggacagccacaacggcaagcugugccugcugaagggcaucgccccccugcagcugggcaacugcagcguggccggcuggauccugggcaaccccgagugcgagcugcugaucagcaaggagagcuggagcuacaucguggagacccccaaccccgagaacggcaccugcuaccccggcuacuucgccgacuacgaggagcugagagagcagcugagcagcgugagcagcuucgagagauucgagaucuuccccaaggagagcagcuggcccaaccacaccgugaccggcgugagcgccagcugcagccacaacggcaagagcagcuucuacagaaaccugcuguggcugaccggcaagaacggccuguaccccaaccugagcaagagcuacgccaacaacaaggagaaggaggugcuggugcuguggggcgugcaccacccccccaacaucggcgaccagagagcccuguaccacaccgagaacgccuacgugagcguggugagcagccacuacagcagaagauucacccccgagaucgccaagagacccaaggugagagaccaggagggcagaaucaacuacuacuggacccugcuggagcccggcgacaccaucaucuucgaggccaacggcaaccugaucgcccccagauucgccuucgcccugagcagaggcuucggcagcggcaucaucaccagcaacgcccccauggacgagugcgacgccaagugccagaccccccagggcgccaucaacagcagccugcccuuccagaacgugcaccccgugaccaucggcgagugccccaaguacgugagaagcaccaagcugagaauggugaccggccugagaaacauccccagcauccagagcagaggccuguucggcgccaucgccggcuucaucgagggcggcuggaccggcaugguggacggcugguacggcuaccaccaccagaacgagcagggcagcggcuacgccgccgaccagaagagcacccagaacgccaucaacggcaucaccaacaaggugaacagcgugaucgagaagaugaacacccaguucaccgccgugggcaaggccuucaacaagcuggagagaagaauggagaaccugaacaagaagguggacgacggcuuccuggacaucuggaccuacaacgccgagcugcuggugcugcuggagaacgagagaacccuggacuuccacgacagcaacgugaagaaccuguacgagaaggugaagagccagcugaagaacaacgccaaggagaucggcaacggcugcuucgaguucuaccacaagugcaacgacgagugcauggagagcgugaagaacggcaccuacgacuaccccaaguacagcgaggagagcaagcugaacagagagaagaucgacggcgugaagcuggagagcaugggcguguaccagauccuggccaucuacagcaccguggccagcagccuggugcugcuggugagccugggcgccaucagcuucuggaugugcagcaacggcagccugcagugcagaaucugcaucuga

SEQ ID NO: 162314 - RNA, 1698 nt, Artificial Sequence; identical to SEQ ID NO: 162016
  derived and/or modified CDS sequence (opt4) from hemagglutinin__InfluenzaA__ABY51083

SEQ ID NO: 162315 - RNA, 1698 nt, Artificial Sequence; identical to SEQ ID NO: 161974
  derived and/or modified CDS sequence (opt4) from hemagglutinin__InfluenzaA__ABY51094

SEQ ID NO: 162316 - RNA, 1698 nt, Artificial Sequence; identical to SEQ ID NO: 162115
  derived and/or modified CDS sequence (opt4) from hemagglutinin__InfluenzaA__ABY51105

SEQ ID NO: 162317 - RNA, 1698 nt, Artificial Sequence; identical to SEQ ID NO: 161974
  derived and/or modified CDS sequence (opt4) from hemagglutinin__InfluenzaA__ABY51116

SEQ ID NO: 162318 - RNA, 1701 nt, Artificial Sequence
  derived and/or modified CDS sequence (opt4) from hemagglutinin__InfluenzaA__ABY51127
augaagaccaucaucgcccugagcuacauccugugcaugguguucgcccagaagcugcccggcaacgacaacagcaccgccacccugugccugggccaccacgccgugcccaacggcaccaucgugaagaccaucaccaacgaccagaucgaggugaccaacgccaccgagcuggugcagagcagcagcaccggcgagaucugcgacagcccccaccagauccuggacggcgagaacugcacccugaucgacgcccugcugggcgacccccagugcgacggcuuccagaacaagaagugggaccuguucguggagagaagcaaggccuacagcaacugcuaccccuacgacgugcccgacuacgccagccugagaagccugguggccagcagcggcacccuggaguucaacaacgagagcuucaacuggaccggcgugacccagaacggcaccagcagcgccugcaucagaagaagcaacaacagcuucuucagcagacugaacuggcugacccaccugaaguucaaguaccccgcccugaacgugaccaugcccaacaacgagaaguucgacaagcuguacaucuggggcgugcaccaccccggcaccgacaacgaccagguguuccuguacgcccaggccagcggcagaaucaccgugagcaccaagagaagccagcagaccgugauccccaacaucggcagcagacccagagugagaaacauccccagcagaaucagcaucuacuggaccaucgugaagcccggcgacauccugcugaucaacagcaccggcaaccugaucgcccccagaggcuacuucaagaucagaagcggcaagagcagcaucaugagaagcgacgcccccaucggcaagugcaacagcgagugcaucacccccaacggcagcauccccaacgacaagcccuuccagaacgugaacagaaucaccuacggcgccugccccagauacgugaagcagaacacccugaagcuggccaccggcaugagaaacgugcccgagaagcagaccagaggcaucuucggcgccaucgccggcuucaucgagaacggcugggagggcaugguggacggcugguacggcuucagacaccagaacagcgagggcaucggccaggccgccgaccugaagagcacccaggccgccaucgaccagaucaacggcaagcugaacagacugaucggcaagaccaacgagaaguuccaccagaucgagaaggaguucagcgagguggagggcagaauccaggaccuggagaaguacguggaggacaccaagaucgaccuguggagcuacaacgccgagcugcugguggcccuggagaaccagcacaccaucgaccugaccgacagcgagaugaacaagcuguucgagaagaccaagaagcagcugagagagaacgccgaggacaugggcaacggcugcuucaagaucuaccacaagugcgacaacgccugcaucggcagcaucagaaacggcaccuacgaccacgacguguacagagacgaggcccugaacaacagauuccagaucaagggcguggagcugaagagcggcuacaaggacuggauccuguggaucagcuucgccaucagcugcuuccugcugugcguggcccugcugggcuucaucaugugggccugccagaagggcaacaucagaugcaacaucugcaucuga

SEQ ID NO: 162319 - RNA, 1698 nt, Artificial Sequence
  derived and/or modified CDS sequence (opt4) from hemagglutinin__InfluenzaA__ABY51138
augaaggugaagcugcuggugcugcugugcaccuucaccgccaccuacgccgacaccaucugcaucggcuaccacgccaacaacagcaccgacaccguggacaccgugcuggagaagaacgugaccgugacccacagcgugaaccugcuggaggacagacacaacggcaagcugugccugcugaagggcaucgccccccugcagcugggcaacugcagcguggccggcuggauccugggcaaccccgagugcgagcugcugaucagcaaggagagcuggagcuacaucguggagacccccaaccccgagaacggcaccugcuaccccggcuacuucgccgacuacgaggagcugagagagcagcugagcagcgugagcagcuucgagagauucgagaucuuccccaaggagagcagcuggcccaaccacaccgugaccggcgugagcgccagcugcagccacaacggcaagagcagcuucuacagaaaccugcuguggcugaccggcaagaacggccuguaccccaaccugagcagaagcuacgccaacaacaaggagaaggaggugcuggugcuguggggcgugcaccacccccccaacaucggcgaccagagagcccuguaccacaccgagaacgccuacgugagcguggugagcagccacuacagcagaagauucacccccgagaucgccaagagacccaaggugagagaccaggagggcagaaucaacuacuacuggacccugcuggagcccggcgacaccaucaucuucgaggccaacggcaaccugaucgcccccagauucgccuucgcccugagcagaggcuucggcagcggcaucaucaccagcaacgcccccauggacgagugcgacgccaagugccagaccccccagggcgccaucaacagcagccugcccuuccagaacgugcaccccgugaccaucggcgagugccccaaguacgugagaagcgccaagcugagaauggugaccggccugagaaacauccccagcauccagagcagaggccuguucggcgccaucgccggcuucaucgagggcggcuggaccggcaugguggacggcugguacggcuaccaccaccagaacgagcagggcagcggcuacgccgccgaccagaagagcacccagaacgccaucaacggcaucaccaacaaggugaacagcgugaucgagaagaugaacacccaguucaccgccgugggcaaggaguucaacaagcuggagagaagaauggagaaccugaacaagaagguggacgacggcuuccuggacaucuggaccuacaacgccgagcugcuggugcugcuggagaacgagagaacccuggacuuccacgacagcaacgugaagaaccuguacgagaaggugaagauccagcugaagaacaacgccaaggagaucggcaacggcugcuucgaguucuaccacaagugcaacgacgagugcauggagagcgugaagaacggcaccuacgacuaccccaaguacagcgaggagagcaagcugaacagagagaagaucgacggcgugaagcuggagagcaugggcguguaccagauccuggccaucuacagcaccguggccagcagccuggugcugcuggugagccugggcgccaucagcuucuggaugugcagcaacggcagccugcagugcagaaucugcaucuga

SEQ ID NO: 162320 - RNA, 1698 nt, Artificial Sequence; identical to SEQ ID NO: 161974
  derived and/or modified CDS sequence (opt4) from hemagglutinin__InfluenzaA__ABY51149

SEQ ID NO: 162321 - RNA, 1698 nt, Artificial Sequence
  derived and/or modified CDS sequence (opt4) from hemagglutinin__InfluenzaA__ABY51160
augaaggugaagcugcuggugcugcugugcaccuucaccgccaccuacgccgacaccaucugcaucggcuaccacgccaacaacagcaccgacaccguggacaccgugcuggagaagaacgugaccgugacccacagcgugaaccugcuggaggacagacacaacggcaagcugugccugcugaagggcaucgccccccugcagcugggcaacugcagcguggccggcuggauccugggcaaccccgagugcgagcugcugaucagcaaggagagcuggagcuacaucguggagacccccaaccccgagaacggcaccugcuaccccggcuacuucgccgacuacgaggagcugagagagcagcugagcagcgugagcagcuucgagagauucgagaucuuccccaaggagagcagcuggcccaaccacaccgugaccggcgugagcgccagcugcagccacaacggcaagagcagcuucuacagaaaccugcuguggcugaccggcaagaacggccuguaccccaaccugagcaagagcuacgccaacaacaaggagaaggaggugcuggugcuguggggcgugcaccacccccccaacaucggcgaccagagagcccuguaccacaccgagaacgccuacgugagcguggugagcagccacuacagcagaagauucacccccgagaucgccaagagacccaaggugagagaccaggagggcagaaucaacuacuacuggacccugcuggagcccggcgacaccaucaucuucgaggccaacggcaaccugaucgcccccagauucgccuucgcccugagcagaggcuucggcagcggcaucaucaccagcaacgcccccauggacaagugcgacgccaagugccagaccccccagggcgccaucaacagcagccugcccuuccagaacgugcaccccgugaccaucggcgagugccccaaguacgugagaagcgccaagcugagaauggugaccggccugagaaacauccccagcauccagagcagaggccuguucggcgccaucgccggcuucaucgagggcggcuggaccggcaugaucgacggcugguacggcuaccaccaccagaacgagcagggcagcggcuacgccgccgaccagaagagcacccagaacgccaucaacggcaucaccaacaaggugaacagcgugaucgagaagaugaacacccaguucaccgccgugggcaaggaguucaacaagcuggagagaagaauggagaaccugaacaagaagguggacgacggcuuccuggacaucuggaccuacaacgccgagcugcuggugcugcuggagaacgagagaacccuggacuuccacgacagcaacgugaagaaccuguacgagaaggugaagagccagcugaagaacaacgccaaggagaucggcaacggcugcuucgaguucuaccacaagugcaacgacgagugcauggagagcgugaagaacggcaccuacgacuaccccaaguacagcgaggagagcaagcugaacagagagaagaucgacggcgugaagcuggagagcaugggcguguaccagauccuggccaucuacagcaccguggccagcagccuggugcugcuggugagccugggcgccaucagcuucuggaugugcagcaacggcagccugcagugcagaaucugcaucuga

SEQ ID NO: 162322 - RNA, 1698 nt, Artificial Sequence
  derived and/or modified CDS sequence (opt4) from hemagglutinin__InfluenzaA__ABY51171
augaaggugaagcugcuggugcugcugugcaccuucaccgccaccuacgccgacaccaucugcaucggcuaccacgccaacaacagcaccgacaccguggacaccgugcuggagaagaacgugaccgugacccacagcgugaaccugcuggaggacagccacaacggcaagcugugccugcugaagggcaucgccccccugcagcugggcaacugcagcguggccggcuggauccugggcaaccccgagugcgagcugcugaucagcaaggagagcuggagcuacaucguggagacccccaaccccgagaacggcaccugcuaccccggcuacuucgccgacuacgaggagcugagagagcagcugagcagcgugagcagcuucgagagauucgagaucuuccccaaggagagcagcuggcccaaccacaccgugaccggcgugagcgccagcugcagccacaacggcaagagcagcuucuacagaaaccugcuguggcugaccggcaagaacggccuguaccccaaccugagcaagagcuacgccaacaacaaggagaaggaggugcuggugcuguggggcgugcaccacccccccaacaucggcgaccagagagcccuguaccacaccgagaacgccuacgugagcguggugagcagccacuacagcagaagauucacccccgagaucgccaagagacccaaggugagagaccaggagggcagaaucaacuacuacuggacccugcuggagcccggcgacaccaucaucuucgaggccaacggcaaccugaucgcccccagauucgccuucgcccugagcagaggcuucggcagcggcaucaucaccagcaacgcccccaugggcgagugcgacgccaagugccagaccccccagggcgccaucaacagcagccugcccuuccagaacgugcaccccgugaccaucggcgagugccccaaguacgugagaagcgccaagcugagaauggugaccggccugagaaacauccccagcauccagagcagaggccuguucggcgccaucgccggcuucaucgagggcggcuggaccggcaugguggacggcugguacggcuaccaccaccagaacgagcagggcagcggcuacgccgccgaccagaagagcacccagaacgccaucaacggcaucaccaacaaggugaacagcgugaucgagaagaugaacacccaguucaccgccgugggcaaggaguucaacaagcuggagagaagaauggagaaccugaacaagaagguggacgacggcuuccuggacaucuggaccuacaacgccgagcugcuggugcugcuggagaacgagagaacccuggacuuccacgacagcaacgugaagaaccuguacgagaaggugaagagccagcugaagaacaacgccaaggagaucggcaacggcugcuucgaguucuaccacaagugcaacgacgagugcauggagagcgugaagaacggcaccuacgacuaccagaaguacagcgaggagagcaagcugaacagagagaagaucgacggcgugaagcuggagagcaugggcguguaccagauccuggccaucuacagcaccguggccagcagccuggugcugcuggugagccugggcgccaucagcuucuggaugugcagcaacggcagccugcagugcagaaucugcaucuga

SEQ ID NO: 162323 - RNA, 1698 nt, Artificial Sequence; identical to SEQ ID NO: 161970
  derived and/or modified CDS sequence (opt4) from hemagglutinin__InfluenzaA__ABY51182

SEQ ID NO: 162324 - RNA, 1698 nt, Artificial Sequence; identical to SEQ ID NO: 161990
  derived and/or modified CDS sequence (opt4) from hemagglutinin__InfluenzaA__ABY51193

SEQ ID NO: 162325 - RNA, 1698 nt, Artificial Sequence; identical to SEQ ID NO: 161974
  derived and/or modified CDS sequence (opt4) from hemagglutinin__InfluenzaA__ABY51237

SEQ ID NO: 162326 - RNA, 1698 nt, Artificial Sequence; identical to SEQ ID NO: 161990
  derived and/or modified CDS sequence (opt4) from hemagglutinin__InfluenzaA__ABY51248

SEQ ID NO: 162327 - RNA, 1698 nt, Artificial Sequence; identical to SEQ ID NO: 161970
  derived and/or modified CDS sequence (opt4) from hemagglutinin__InfluenzaA__ABY51259

SEQ ID NO: 162328 - RNA, 1701 nt, Artificial Sequence; identical to SEQ ID NO: 162047
  derived and/or modified CDS sequence (opt4) from hemagglutinin__InfluenzaA__ABY51270

SEQ ID NO: 162329 - RNA, 1707 nt, Artificial Sequence
  derived and/or modified CDS sequence (opt4) from hemagglutinin__InfluenzaA__ABY76282
auggagaagaucgugcugcugcuggccaucgugagccuggugaagagcgaccagaucugcaucggcuaccacgccaacaacagcaccgagcacguggacaccaucauggagaagaacgugaccgugacccacgcccaggacauccuggagaaggcccacaacggcagacugugcgaccuggacggcgugaagccccugauccugagagacugcagcguggccggcuggcugcugggcaaccccaugugcgacgaguuccugaacgugcccgaguggagcuacaucguggagaagaacaaccccgccaacgaccugugcuaccccggcaacuucaacgacuacgaggagcugaagcaccugcugagcagaaucaaccacuucgagaagauccagaucauccccaagagcagcuggagcgaccacgaggccagcagcggcgugagcagcgccugccccuaccagggcagaagcagcuucuucagaaacgugguguggcugaucaagaagaacgacgccuaccccaccaucaagagaagcuacaacaacaccaaccaggaggaccugcuggugcuguggggcauccaccaccccaacgacgccgccgagcagaccagacuguaccagaaccccaccaccuacaucagcgugggcaccagcacccugaaccagagacuggugcccaagaucgccaccagaagcaaggugaacggccagagcggcagaauggaguucuucuggaccauccugaagcccaacgacgccaucaacuucgagagcaacggcaacuucaucgcccccgagaacgccuacaagaucgugaagaagggcgacagcaccaucaugaagagcgagcuggaguacggcaacugcaacaccaagugccagacccccaucggcgccaucaacagcagcaugcccuuccacaacauccacccccugaccaucggcgagugccccaaguacgugaagagcaacagacuggugcuggccaccggccugagaaacagcccccagggcgagagaagaagaaagaagagaggccuguucggcgccaucgccggcuucaucgagggcggcuggcagggcaugguggacggcugguacggcuaccaccacagcaacgagcagggcagcggcuacgccgccgacaaggagagcacccagaaggccaucgacggcgugaccaacaaggugaacagcaucaucgacaagaugaacacccaguucgaggccgugggcagagaguucaacaaccuggagagaagaaucgagaaccugaacaagaagauggaggacggcuuccuggacguguggaccuacaacgccgagcugcuggugcugauggagaacgagagaacccuggacuuccacgacagcaacgugaagaaccuguacgacaaggugagacugcagcugagagacaacgccaaggagcugggcaacggcugcuucgaguucuaccacagaugcgacaacgagugcauggagagcgugagaaacggcaccuacgacuacccccaguacagcgaggaggccagacugaagagagaggagaucagcggcgugaagcuggagagcaucggcaccuaccagauccugagcaucuacagcaccguggccagcagccuggcccuggccaucaugguggccggccugagccuguggaugugcagcaacggcagccugcagugcagaaucugcaucuga

SEQ ID NO: 162330 - RNA, 1701 nt, Artificial Sequence
  derived and/or modified CDS sequence (opt4) from hemagglutinin__InfluenzaA__ABY81349
augaaggccaagcugcuggugcugcugugcgcccugagcgccaccgacgccgacaccaucugcaucggcuaccacgccaacaacagcaccgacaccguggacaccgugcuggagaagaacgugaccgugacccacagcgugaaccugcuggaggacagccacaacggcaagcugugcagacugaagggcaucgccccccugcagcugggcaagugcagcaucgccggcuggauccugggcaaccccgagugcgagagccuguucagcaagaagagcuggagcuacaucgccgagacccccaacagcgagaacggcaccugcuaccccggcuacuucgccgacuacgaggagcugagagagcagcugagcagcgugagcagcuucgagagauucgagaucuuccccaaggagagaagcuggcccaagcacaacgugaccagaggcgugaccgccgccugcagccacaagggcaagagcagcuucuacagaaaccugcuguggcugaccgagaagaacggcagcuaccccaaccugagcaagagcuacgugaacaacaaggagaaggaggugcuggugcuguggggcgugcaccaccccagcaacaucaaggaccagaagaccaucuaccagaaggagaacgccuacgugagcguggugagcagcaacuacaacagaagauucacccccgagaucgccaagagacccaaggugagagaccaggagggcagaaucaacuacuacuggacccugcuggagcccggcgacaccaucaucuucgaggccaacggcaaccugaucgcccccugguacgccuucgcccugagcagaggcuucggcagcggcaucaucaccagcaacgccagcauggacgagugcgacaccaagugccagaccccccagggcgccaucaacagcagccugcccuuccagaacgugcaccccgugaccaucggcgagugccccaaguacgugagaagcaccaagcugagaauggugaccggccugagaaacauccccagcauccagagcagaggccuguucggcgccaucgccggcuucaucgagggcggcuggaccggcaugaucgacggcugguacggcuaccaccaccagaacgagcagggcagcggcuacgccgccgaccagaagagcacccagaacgccaucaacggcaucaccaacaaggugaacagcgugaucgagaagaugaacacccaguucaccgccgugggcaaggaguucaacaagcuggagaagagaauggagaaccugaacaagaagguggacgacggcuuccuggacaucuggaccuacaacgccgagcugcuggugcugcuggagaacgagagaacccuggacuuccacgacagcaacgugaagaaccuguacgagaaggugaagagccagcugaagaacaacgccaaggaggugggcaacggcugcuucgaguucuaccacaagugcaacaacgagugcauggagagcgugaagaacggcaccuacgacuaccccaaguacagcgaggagagcaagcugaacagagagaagaucgacggcgugaagcuggagagcaugggcguguaccagauccuggccaucuacagcaccguggccagcagccuggugcugcuggugagccugggcgccaucagcuucuggaugugcagcaacggcagccugcagugcagaaucugcaucuga

SEQ ID NO: 162331 - RNA, 1701 nt, Artificial Sequence; identical to SEQ ID NO: 161988
  derived and/or modified CDS sequence (opt4) from hemagglutinin__InfluenzaA__ABY81371

SEQ ID NO: 162332 - RNA, 1698 nt, Artificial Sequence; identical to SEQ ID NO: 161974
  derived and/or modified CDS sequence (opt4) from hemagglutinin__InfluenzaA__ABY81382

SEQ ID NO: 162333 - RNA, 1698 nt, Artificial Sequence; identical to SEQ ID NO: 162016
  derived and/or modified CDS sequence (opt4) from hemagglutinin__InfluenzaA__ABY81393

SEQ ID NO: 162334 - RNA, 1698 nt, Artificial Sequence
  derived and/or modified CDS sequence (opt4) from hemagglutinin__InfluenzaA__ABY81415
augaaggugaagcugcuggugcugcugugcaccuucaccgccaccuacgccgacaccaucugcaucggcuaccacgccaacaacagcaccgacaccguggacaccgugcuggagaagaacgugaccgugacccacagcgugaaccugcuggaggacagccacaacggcaagcugugccugcugaagggcaucgccccccugcagcugggcaacugcagcguggccggcuggauccugggcaaccccgagugcgagcugcugaucagcaaggagagcuggagcuacaucguggagacccccagccccgagaacggcaccugcuaccccggcuacuucgccgacuacgaggagcugagagagcagcugagcagcgugagcagcuucgagagauucgagaucuuccccaaggagagcagcuggcccaaccacaccgugaccggcgugagcgccagcugcagccacaacggcaagagcagcuucuacagaaaccugcuguggcugaccggcaagaacggccuguaccccaaccugagcaagagcuacgccaacaacaaggagaaggaggugcuggugcuguggggcgugcaccacccccccaacaucggcgaccagagagcccuguaccacaccgagaacgccuacgugagcguggugagcagccacuacagcagaagauucacccccgagaucgccaagagacccaaggugagagaccaggagggcagaaucaacuacuacuggacccugcuggagcccggcgacaccaucaucuucgaggccaacggcaaccugaucgcccccagauucgccuucgcccugagcagaggcuucggcagcggcaucaucaccagcaacgcccccaugggcgagugcgacgccaagugccagaccccccagggcgccaucaacagcagccugcccuuccagaacgugcaccccgugaccaucggcgagugccccaaguacgugagaagcgccaagcugagaauggugaccggccugagaaacauccccagcauccagagcagaggccuguucggcgccaucgccggcuucaucgagggcggcuggaccggcaugguggacggcugguacggcuaccaccaccagaacgagcagggcagcggcuacgccgccgaccagaagagcacccagaacgccaucaacggcaucaccaacaaggugaacagcgugaucgagaagaugaacacccaguucaccgccgugggcaaggaguucaacaagcuggagagaagaauggagaaccugaacaagaagguggacgacggcuuccuggacaucuggaccuacaacgccgagcugcuggugcugcuggagaacgagagaacccuggacuuccacgacagcaacgugaagaaccuguacgagaaggugaagagccagcugaagaacaacgccaaggagaucggcaacggcugcuucgaguucuaccacaagugcaacgacgagugcauggagagcgugaagaacggcaccuacgacuaccccaaguacagcgaggagagcaagcugaacagagagaagaucgacggcgugaagcuggagagcaugggcguguaccagauccuggccaucuacagcaccguggccagcagccuggugcugcuggugagccugggcgccaucagcuucuggaugugcagcaacggcagccugcagugcagaaucugcaucuga

SEQ ID NO: 162335 - RNA, 1701 nt, Artificial Sequence; identical to SEQ ID NO: 161988
  derived and/or modified CDS sequence (opt4) from hemagglutinin__InfluenzaA__ACA24502

SEQ ID NO: 162336 - RNA, 1698 nt, Artificial Sequence
  derived and/or modified CDS sequence (opt4) from hemagglutinin__InfluenzaA__ACA24513
augaaggugaagcugcugauccugcugugcaccuucaccgccaccuacgccgacaccaucugcaucggcuaccacgccaacaacagcaccgacaccguggacaccgugcuggagaagaacgugaccgugacccacagcgugaaccugcuggaggacagccacaacggcaagcugugccugcugaagggcaucgccccccugcagcugggcaacugcagcguggccggcuggauccugggcaaccccgagugcgagcugcugaucagcaaggagagcuggagcuacaucguggagacccccaaccccgagaacggcaccugcuaccccggcuacuucgccgacuacgaggagcugagagagcagcugaacagcgugagcagcuucgagagauucgagaucuuccccaaggagagcagcuggcccaaccacaccgugaccggcgugagcgccagcugcagccacaacggcaagagcagcuucuacagaaaccugcuguggcugaccggcaagaacggccuguaccccaaccugagcaagagcuacgccaacaacaaggagaaggaggugcuggugcuguggggcgugcaccacccccccaacaucggcgaccagagagcccuguaccacaccgagaacgccuacgugagcguggugagcagccacuacagcagaagauucacccccgagaucgccaagagacccaaggugagagaccaggagggcagaaucaacuacuacuggacccugcuggagcccagagacaccaucaucuucgaggccaacggcaaccugaucgcccccagauucgccuucgcccugagcagaggcuucggcagcggcaucaucaccagcaacgcccccauggacgagugcgacgccaagugccagaccccccagggcgccaucaacagcagccugcccuuccagaacgugcaccccgugaccaucggcgagugccccaaguacgugagaagcaccaagcugagaauggugaccggccugagaaacauccccagcauccagagcagaggccuguucggcgccaucgccggcuucaucgagggcggcuggaccggcaugguggacggcugguacggcuaccaccaccagaacgagcagggcagcggcuacgccgccgaccagaagagcacccagaacgccaucaacggcaucaccaacaaggugaacagcgugaucgagaagaugaacacccaguucaccgccgugggcaaggaguucaacaagcuggagagaagaauggagaaccugaacaagaagguggacgacggcuuccuggacaucuggaccuacaacgccgagcugcuggugcugcuggagaacgagagaacccuggacuuccacgacagcaacgugaagaaccuguacgagaaggugaagagccagcugaagaacaacgccaaggagaucggcaacggcugcuucgaguucuaccacaagugcaacgacgagugcauggagagcgugaagaacggcaccuacgacuaccccaaguacagcgaggagagcaagcugaacagagagaagaucgacggcgugaagcuggagagcaugggcguguaccagauccuggccaucuacagcaccguggccagcagccuggugcugcuggugagccugggcgccaucagcuucuggaugugcagcaacggcagccugcagugcagaaucugcaucuga

SEQ ID NO: 162337 - RNA, 1698 nt, Artificial Sequence; identical to SEQ ID NO: 161974
  derived and/or modified CDS sequence (opt4) from hemagglutinin__InfluenzaA__ACA24524

SEQ ID NO: 162338 - RNA, 1701 nt, Artificial Sequence
  derived and/or modified CDS sequence (opt4) from hemagglutinin__InfluenzaA__ACA24689
augaagaccaucaucgcccugagcuacauccugugccugguguucgcccagaagcugcccggcaucgacaacagcaccgccacccugugccugggccaccacgccgugcccaacggcaccaucgugaagaccaucaccaacgaccagaucgaggugaccaacgccaccgagcuggugcagaacagcagcaccggcggcaucugcgacagcccccaccagaucaucgacggcgagaacugcacccugaucgacgcccugcugggcgacccccagugcgacggcuuccagaacaagaagugggaccuguucguggagagaagcaaggccuacagcaacugcuaccccuacgacgugcccgacuacgccagccugagaagccugguggccagcagcggcacccuggaguucaacaacgagagcuucaacuggaccggcgugacccagaacggcaccagcagcgccugcaagagaggcagcaacaacagcuucuucagcagacugaacuggcugacccacagcaaguucaaguaccccgcccugaacgugaccaugcccaacaacgaggaguucgacaagcuguacaucuggggcgugcaccaccccggcaccgacaacgaccagaucuuccuguacgcccaggccagcggcagaaucaccgugagcaccaagagaagccagcagaccgugauccccaacaucggcagcagacccagagugagaaacauccccagcagaaucagcaucuacuggaccaucgugaagcccggcgacauccugcugaucaacagcaccggcaaccugaucgcccccagaggcuacuucaagaucagaagcggcaagagcagcaucaugagaagcgacgcccccaucggcaagugcaacagcgagugcaucacccccaacggcagcauccccaacgacaagcccuuccagaacgugaacagaaucaccuacggcgccugccccagauacgugaagcagaacacccugaagcuggccaccggcaugagaaacgugcccgagaagcagaccagaggcaucuucggcgccaucgccggcuucaucgagaacggcugggagggcaugguggacggcugguacggcuucagacaccagaacagcgagggcaucggccaggccgccgaccugaagagcacccaggccgccaucgaccagaucaacggcaagcugaacagacugaucggcaagaccaacgagaaguuccaccagaucgagaaggaguucagcgagguggagggcagaauccaggaccuggagaaguacguggaggacaccaagaucgaccuguggagcuacaacgccgagcugcugguggcccuggagaaccagcacaccaucgaccugaccgacagcgagaugaacaagcuguucgagaagaccaagaagcagcugagagagaacgccgaggacaugggcaacggcugcuucaagaucuaccacaagugcgacaacgccugcaucggcagcaucagaaacggcaccuacgaccacuacguguacagagacgaggcccugaacaacagauuccagaucaagggcaucgagcugaagagcggcuacaaggacuggauccuguggaucagcuucgccaucagcugcuuccugcugugcguggcccugcugggcuucaucaugugggccugccagaagggcaacaucagaugcaacaucugcaucuga

SEQ ID NO: 162339 - RNA, 1701 nt, Artificial Sequence
  derived and/or modified CDS sequence (opt4) from hemagglutinin__InfluenzaA__ACA24700
augaagaccaucaucgcccugagcuacauccugugccugguguucgcccagaagcugcccggcaucgacaacagcaccgccacccugugccugggccaccacgccgugcccaacggcaccaucgugaagaccaucaccaacgaccagaucgaggugaccaacgccaccgagcuggugcagaacagcagcaccggcggcaucugcgacagcccccaccagauccuggacggcgagaacugcacccugaucgacgcccugcugggcgacccccagugcgacggcuuccagaacaagaagugggaccuguucguggagagaagccaggccuacagcaacugcuaccccuacgacgugcccgacuacgccagccugagaagccugguggccagcagcggcacccuggaguucaacaacgagagcuucaacuggaccggcgugacccagaacggcaccagcagcgccugcaagagaggcagcaacaacagcuucuucagcagacugaacuggcugacccacagcaaguucaaguaccccgcccugaacgugaccaugcccaacaacgaggaguucgacaagcuguacaucuggggcgugcaccaccccggcaccgacaacgaccagaucuuccuguacgcccaggccagcggcagaaucaccgugagcaccaagagaagccagcagaccgugauccccaacaucggcagcagacccagagugagaaacauccccagcagaaucagcaucuacuggaccaucgugaagcccggcgacauccugcugaucaacagcaccggcaaccugaucgcccccagaggcuacuucaagaucagaagcggcaagagcagcaucaugagaagcgacgcccccaucggcaagugcaacagcgagugcaucacccccaacggcagcauccccaacgacaagcccuuccagaacgugaacagaaucaccuacggcgccugccccagauacgugaagcagaacacccugaagcuggccaccggcaugagaaacgugcccgagaagcagaccagaggcaucuucggcgccaucgccggcuucaucgagaacggcugggagggcaugguggacggcugguacggcuucagacaccagaacagcgagggcaucggccaggccgccgaccugaagagcacccaggccgccaucgaccagaucaacggcaagcugaacagacugaucggcaagaccaacgagaaguuccaccagaucgagaaggaguucagcgagguggagggcagaauccaggaccuggagaaguacguggaggacaccaagaucgaccuguggagcuacaacgccgagcugcugguggcccuggagaaccagcacaccaucgaccugaccgacagcgagaugaacaagcuguucgagaagaccaagaagcagcugagagagaacgccgaggacaugggcaacggcugcuucaagaucuaccacaagugcgacaacgccugcaucggcagcaucagaaacggcaccuacgaccacgacguguacagagacgaggcccugaacaacagauuccagaucaagggcguggagcugaagagcggcuacaaggacuggauccuguggaucagcuucgccaucagcugcuuccugcugugcguggcccugcugggcuucaucaugugggccugccagaagggcaacaucagaugcaacaucugcaucuga

SEQ ID NO: 162340 - RNA, 1698 nt, Artificial Sequence
  derived and/or modified CDS sequence (opt4) from hemagglutinin__InfluenzaA__ACA28846
augaaggugaagcugcuggugcugcugugcaccuucaccgccaccuacgccgacaccaucugcaucggcuaccacgccaacaacagcaccgacaccguggacaccgugcuggagaagaacgugaccgugacccacagcgugaaccugcuggagaacagccacaacggcaagcugugccugcugaagggcaucgccccccugcagcugggcaacugcagcguggccggcuggauccugggcaaccccgagugcgagcugcugaucagcaaggagagcuggagcuacaucguggagaagcccaaccccgagaacggcaccugcuaccccggccacuucgccgacuacgaggagcugagagagcagcugagcagcgugagcagcuucgagagauucgagaucuuccccaaggagagcagcuggcccaaccacaccgugaccggcgugagcgccagcugcagccacaacggcgagagcagcuucuacagaaaccugcuguggcugaccggcaagaacggccuguaccccaaccugagcaagagcuacgccaacaacaaggagaaggaggugcuggugcuguggggcgugcaccacccccccaacaucggcauccagaaggcccuguaccacaccgagaacgccuacgugagcguggugagcagccacuacagcagaaaguucacccccgagaucgccaagagacccaaggugagagaccaggagggcagaaucaacuacuacuggacccugcuggagcccggcgacaccaucaucuucgaggccaacggcaaccugaucgcccccagauacgccuucgcccugagcagaggcuucggcagcggcaucaucaacagcaacgcccccauggacaagugcgacgccaagugccagaccccccagggcgccaucaacagcagccugcccuuccagaacgugcaccccgugaccaucggcgagugccccaaguacgugagaagcgccaagcugagaauggugaccggccugagaaacauccccagcauccagagcagaggccuguucggcgccaucgccggcuucaucgagggcggcuggaccggcaugguggacggcugguacggcuaccaccaccagaacgagcagggcagcggcuacgccgccgaccagaagagcacccagaacgccaucaacggcaucaccaacaaggugaacagcgugaucgagaagaugaacacccaguucaccgccgugggcaaggaguucaacaagcuggagagaagaauggagaaccugaacaagaagguggacgacggcuucaucgacaucuggaccuacaacgccgagcugcuggugcugcuggagaacgagagaacccuggacuuccacgacagcaacgugaagaaccuguacgagaaggugaagagccagcugaagaacaacgccaaggagaucggcaacggcugcuucgaguucuaccacaagugcaacgacgagugcauggagagcgugaagaacggcaccuacgacuaccccaaguacagcgaggagagcaagcugaacagagagaagaucgacggcgugaagcuggagagcaugggcguguaccagauccuggccaucuacagcaccguggccagcagccuggugcugcuggugagccugggcgccaucagcuucuggaugugcagcaacggcagccugcagugcagaaucugcaucuga

SEQ ID NO: 162341 - RNA, 1701 nt, Artificial Sequence
  derived and/or modified CDS sequence (opt4) from hemagglutinin__InfluenzaA__ACA33749
augaagaccaucaucgcccugagcuacauccugugccugguguucgcccagaagcugcccggcaacgacaacagcaccgccacccugugccugggccaccacgccgugcccaacggcaccaucgugaagaccaucaccaacgaccagaucgaggugaccaacgccaccgagcuggugcagagcagcagcaccggcgagaucugcgacagcccccaccagauccuggacggcgagaacugcacccugaucgacgcccugcugggcgacccccagugcgacggcuuccagaacaagaagugggaccuguucguggagagaagcaaggccuacagcaacugcuaccccuacgacgugcccgacuacgccagccugagaagccugguggccagcagcggcacccuggaguucaacaacgagagcuucaacuggaccggcgugacccagaacggcaccagcagcagcugcaucagaagaagcaacaacagcuucuucagcagacugaacuggcugacccaccugaaguucaaguaccccgcccugaacgugaccaugcccaacaacgagaaguucgacaagcuguacaucuggggcgugcaccaccccggcaccgacaacgaccagaucuuccuguacgcccaggccagcggcagaaucaccgugagcaccaagagaagccagcagaccgugauccccaacaucggcagcagacccagagugagaaacauccccagcagaaucagcaucuacuggaccaucgugaagcccggcgacauccugcugaucaacagcaccggcaaccugaucgcccccagaggcuacuucaagaucagaagcggcaagagcagcaucaugagaagcgacgcccccaucggcaagugcaacagcgagugcaucacccccaacggcagcauccccaacgacaagcccuuccagaacgugaacagaaucaccuacggcgccugccccagauacgugaagcagaacacccugaagcuggccaccggcaugagaaacgugcccgagaagcagaccagaggcaucuucggcgccaucgccggcuucaucgagaacggcugggagggcaugguggacggcugguacggcuucagacaccagaacagcgagggcaucggccaggccgccgaccugaagagcacccaggccgccaucgaccagaucaacggcaagcugaacagacugaucggcaagaccaacgagaaguuccaccagaucgagaaggaguucagcgagguggagggcagaauccaggaccuggagaaguacguggaggacaccaagaucgaccuguggagcuacaacgccgagcugcugguggcccuggagaaccagcacaccaucgaccugaccgacagcgagaugaacaagcuguucgagaagaccaagaagcagcugagagagaacgccgaggacaugggcaacggcugcuucaagaucuaccacaagugcgacaacgccugcaucggcagcaucagaaacggcaccuacgaccacgacguguacagagacgaggcccugaacaacagauuccagaucaagggcguggagcugaagagcggcuacaaggacuggauccuguggaucagcuucgccaucagcugcuuccugcugugcguggcccugcugggcuucaucaugugggccugccagaagggcaacaucagaugcaacaucugcaucuga

SEQ ID NO: 162342 - RNA, 1698 nt, Artificial Sequence; identical to SEQ ID NO: 161970
  derived and/or modified CDS sequence (opt4) from hemagglutinin__InfluenzaA__ACA96519

SEQ ID NO: 162343 - RNA, 1659 nt, Artificial Sequence
  derived and/or modified CDS sequence (opt4) from hemagglutinin__InfluenzaA__ACC55270
augaacacccagauccuggccuucaucgccugcgugcugaccggcgugaagggcgacaagaucugccugggccaccacgccguggccaacggcaccaaggugaacacccugaccgagagaggcaucgagguggugaacgccaccgagaccguggagaccaccaacaucaagaagaucugcacccagggcaagagacccaccgaccugggccagugcggccugcugggcacccugaucggccccccccagugcgaccaguuccuggaguucagcagcgaccugaucaucgagagaagagagggcaccgacaucugcuaccccggcagauucaccaacgaggagagccugagacagauccugagaagaagcggcggcaucggcaaggagagcaugggcuucaccuacagcggcaucagaaccaacggcgccaccagcgccugcaccagaagcggcagcagcuucuacgccgagaugaaguggcugcugagcaacagcgacaacgccgccuucccccagaugaccaaggccuacagaaaccccagaaacaagcccgcccugaucaucuggggcgugcaccacagcgagagcgugagcgagcagaccaagcuguacggcagcggcaacaagcugaucaccgugagaagcagcaaguaccagcagagcuucacccccaaccccggcgccagaagaaucgacuuccacuggcugcugcuggaccccaacgacaccgugaccuucaccuucaacggcgccuucaucgcccccgacagaaccagcuucuucagaggcgagagccugggcgugcagagcgacgccccccuggacagcagcugcagaggcgacugcuuccacagcggcggcaccaucgugagcagccugcccuuccagaacaucaacagcagaaccgugggcaagugccccagauacgugaagcagaagagccugcugcuggccaccggcaugagaaacgugcccgagaagcccaagcccagaggccuguucggcgccaucgccggcuucaucgagaacggcugggagggccugaucaacggcugguacggcuucagacaccagaacgcccagggcgagggcaccgccgccgacuacaagagcacccagagcgccaucgaccagaucaccggcaagcugaacagacugaucggcaagaccaaccagcaguucgagcugaucgacaacgaguucaacgagaucgagcagcagaucggcaacgugaucaacuggaccagagacgccaugaccgagaucuggagcuacaacgccgagcugcugguggccauggagaaccagcacaccaucgaccuggccgacagcgagaugagcaagcuguacgagagagugaagaagcagcugagagagaacgccgaggaggacggcaccggcugcuucgagaucuuccacaagugcgacgaccagugcauggagagcaucagaaacaacaccuacgaccacacccaguacagaaccgagagccugcagaacagaauccagaucgaccccgugaagcugagcagcggcuacaaggacaucauccugugguucagcuucggcgccagcugcuuccugcugcuggccaucgccaugggccugguguucaucugcaucaagaacggcaacaugcagugcaccaucugcaucuga

SEQ ID NO: 162344 - RNA, 1698 nt, Artificial Sequence; identical to SEQ ID NO: 161974
  derived and/or modified CDS sequence (opt4) from hemagglutinin__InfluenzaA__ACC61964

SEQ ID NO: 162345 - RNA, 1698 nt, Artificial Sequence
  derived and/or modified CDS sequence (opt4) from hemagglutinin__InfluenzaA__ACC61975
augaaggugaagcugcuggugcugcugugcaccuucaccgccagcuacgccgacaccaucugcaucggcuaccacgccaacaacagcaccgacaccguggacaccgugcuggagaagaacgugaccgugacccacagcgugaaccugcuggaggacagccacaacggcaagcugugccugcugaagggcaucgccccccugcagcugggcaacugcagcguggccggcuggauccugggcaaccccgagugcgagcugcugaucagcaaggagagcuggagcuacaucguggaggugcccaaccccgagaacggcaccugcuaccccggcuacuucgccgacuacgaggagcugagagagcagcugagcagcaucagcagcuucgagagauucgagaucuuccccaaggagagcagcuggcccaaccacaccgugaccggcgugagcgccagcugcagccacaacggcaagagcagcuucuacagaaaccugcuguggcugaccggcaagaacggccuguaccccaaccugagcaagagcuacgccaacaacaaggagaaggaggugcuggugcuguggggcgugcaccacccccccaacaucggcgaccagagagcccuguaccacaccgagaacgccuacgugagcguggugagcagccacuacagcagaagauucacccccgagaucgccaagagacccaaggugagagaccaggagggcagaaucaacuacuacuggacccugcuggagcccggcgacaccaucaucuucgaggccaacggcaaccugaucgcccccagauucgccuucgcccugagcagaggccugggcagcggcaucaucaccagcaacgcccccauggacgagugcgacgccaagugccagaccccccagggcgccaucaacagcagccugcccuuccagaacgugcaccccgugaccaucggcgagugccccaaguacgugagaagcgccaagcugagaauggugaccggccugagaaacauccccagcauccagagcagaggccuguucggcgccaucgccggcuucaucgagggcggcuggaccggcaugguggacggcugguacggcuaccaccaccagaacgagcagggcagcggcuacgccgccgaccagaagagcacccagaacgccaucaacggcaucaccaacaaggugaacagcgugaucgagaagaugaacacccaguucaccgccgugggcaaggaguucaacaagcuggagagaagaauggagaaccugaacaagaagguggacgacggcuuccuggacaucuggaccuacaacgccgagcugcuggugcugcuggagaacgagagaacccuggacuuccacgacagcaacgugaagaaccuguacgagaaggugaagagccagcugaagaacaacgccaaggagaucggcaacggcugcuucgaguucuaccacaagugcaacaacgagugcauggagagcgugaagaacggcaccuacgacuaccccaaguacagcgaggagagcaagcugaacagagagaagaucgacggcgugaagcuggagagcaugggcguguaccagauccuggccaucuacagcaccguggccagcagccuggugcugcuggugagccugggcgccaucagcuucuggaugugcagcaacggcagccugcagugcagaaucugcaucuga

SEQ ID NO: 162346 - RNA, 1698 nt, Artificial Sequence; identical to SEQ ID NO: 161970
  derived and/or modified CDS sequence (opt4) from hemagglutinin__InfluenzaA__ACC61986

SEQ ID NO: 162347 - RNA, 1698 nt, Artificial Sequence
  derived and/or modified CDS sequence (opt4) from hemagglutinin__InfluenzaA__ACD37430
augaaggccaagcugcuggugcugcugugcaccuucaccgccaccuacgccgacaccaucugcaucggcuaccacgccaacaacagcaccgacaccguggacaccgugcuggagaagaacgugaccgugacccacagcgugaaccugcuggaggacagccacaacggcaagcugugccugcugaagggcaucgccccccugcagcugggcaacugcagcguggccggcuggauccugggcaaccccgagugcgagcugcugaucagcaaggagagcuggagcuacaucguggagacccccaaccccgagaacggcaccugcuaccccggcuacuucgccgacuacgaggagcugagagagcagcugagcagcgugagcagcuucgagagauucgagaucuuccccaaggagagcagcuggcccacccacaccgugaccggcgugagcgccagcugcagccacaacggcaagagcagcuucuacagaaaccugcuguggcugaccggcaagaacggccuguaccccaaccugagcaagagcuacgugaacaacaaggagaaggaggugcuggugcuguggggcgugcaccacccccccaacaucggcgaccagagagcccuguaccacaccgagaacgccuacgugagcguggugagcagccacuacagcagaagauucacccccgagaucgccaagagacccaaggugagagaccaggagggcagaaucaacuacuacuggacccugcuggagcccggcgacaccaucaucuucgaggccaacggcaaccugaucgcccccugguacgccuucgcccugagcagaggcuucggcagcggcaucaucaccagcaacgcccccauggacgagugcgacgccaagugccagaccccccagggcgccaucaacagcagccugcccuuccagaacgugcaccccgugaccaucggcgagugccccaaguacgugagaagcgccaagcugagaauggugaccggccugagaaacauccccagcauccagagcagaggccuguucggcgccaucgccggcuucaucgagggcggcuggaccggcaugguggacggcugguacggcuaccaccaccagaacgagcagggcagcggcuacgccgccgaccagaagagcacccagaacgccaucaacggcaucaccaacaaggugaacagcgugaucgagaagaugaacacccaguucaccgccgugggcaaggaguucaacaagcuggagagaagaauggagaaccugaacaagaagguggacgacggcuuccuggacaucuggaccuacaacgccgagcugcuggugcugcuggagaacgagagaacccuggacuuccacgacagcaacgugaagaaccuguacgagaaggugaagagccagcugaagaacaacgccaaggagaucggcaacggcugcuucgaguucuaccacaagugcaacaacgagugcauggagagcgugaagaacggcaccuacgacuaccccaaguacagcgaggagagcaagcugaacagagagaagaucgacggcgugaagcuggagagcaugggcguguaccagauccuggccaucuacagcaccguggccagcagccuggugcugcuggugagccugggcgccaucagcuucuggaugugcagcaacggcagccugcagugcagaaucugcaucuga

SEQ ID NO: 162348 - RNA, 1698 nt, Artificial Sequence
  derived and/or modified CDS sequence (opt4) from hemagglutinin__InfluenzaA__ACD37507
augaaggccaagcugcuggugcugcugugcaccuucgccgccaccuacgccgacaccaucugcaucggcuaccacgccaacaacagcaccgacaccguggacaccgugcuggagaagaacgugaccgugacccacagcgugaaccugcuggagaacagccacaacggcaagcugugccugcugaagggcaucgccccccugcagcugggcaacugcagcguggccggcuggauccugggcaaccccgagugcgagcugcugaucagcaaggagagcuggagcuacaucguggagaagcccaaccccgagaacggcaccugcuaccccggccacuucgccgacuacgaggagcugagagagcagcugagcagcgugagcagcuucgagagauucgagaucuuccccaaggagagcagcuggcccaaccacaccgugaccggcgugagcgccagcugcagccacaacggcgagagcagcuucuacagaaaccugcuguggcugaccggcaagaacggccuguaccccaaccugagcaagagcuacgccaacaacaaggagaaggaggugcuggugcuguggggcgugcaccacccccccaacaucggcaaccagaaggcccuguaccacaccgagaacgccuacgugagcguggugagcagccacuacagcagaaaguucacccccgagaucgccaagagacccaaggugagagaccaggagggcagaaucaacuacuacuggacccugcuggagcccggcgacaccaucaucuucgaggccaacggcaaccugaucgcccccagauacgccuucgcccugagcagaggcuucggcagcggcaucaucaacagcaacgcccccauggacaagugcgacgccaagugccagaccccccagggcgccaucaacagcagccugcccuuccagaacgugcaccccgugaccaucggcgagugccccaaguacgugagaagcgccaagcugagaauggugaccggccugagaaacauccccagcauccagagcagaggccuguucggcgccaucgccggcuucaucgagggcggcuggaccggcaugguggacggcugguacggcuaccaccaccagaacgagcagggcagcggcuacgccgccgaccagaagagcacccagaacgccaucaacggcaucaccaacaaggugaacagcgugaucgagaagaugaacacccaguucaccgccgugggcaaggaguucaacaagcuggagagaagaauggagaaccugaacaagaagguggacgacggcuucaucgacaucuggaccuacaacgccgagcugcuggugcugcuggagaacgagagaacccuggacuuccacgacagcaacgugaagaaccuguacgagaaggugaagagccagcugaagaacaacgccaaggagaucggcaacggcugcuucgaguucuaccacaagugcaacgacgagugcauggagagcgugaagaacggcaccuacgacuaccccaaguacagcgaggagagcaagcugaacagagagaagaucgacggcgugaagcuggagagcaugggcguguaccagauccuggccaucuacagcaccguggccagcagccuggugcugcuggugagccugggcgccaucagcuucuggaugugcagcaacggcagccugcagugcagaaucugcaucuga

SEQ ID NO: 162349 - RNA, 1698 nt, Artificial Sequence; identical to SEQ ID NO: 162115
  derived and/or modified CDS sequence (opt4) from hemagglutinin__InfluenzaA__ACD56113

SEQ ID NO: 162350 - RNA, 1698 nt, Artificial Sequence; identical to SEQ ID NO: 161974
  derived and/or modified CDS sequence (opt4) from hemagglutinin__InfluenzaA__ACD56124

SEQ ID NO: 162351 - RNA, 1701 nt, Artificial Sequence; identical to SEQ ID NO: 162047
  derived and/or modified CDS sequence (opt4) from hemagglutinin__InfluenzaA__ACD56258

SEQ ID NO: 162352 - RNA, 1701 nt, Artificial Sequence; identical to SEQ ID NO: 161789
  derived and/or modified CDS sequence (opt4) from hemagglutinin__InfluenzaA__ACD56269

SEQ ID NO: 162353 - RNA, 1698 nt, Artificial Sequence
  derived and/or modified CDS sequence (opt4) from hemagglutinin__InfluenzaA__ACD56280
augaaggugaagcugcugauccugcugugcaccuucaccgccaccuacgccgacaccaucugcaucggcuaccacgccaacaacagcaccgacaccguggacaccgugcuggagaagaacgugaccgugacccacagcgugaaccugcuggaggacagccacaacggcaagcugugccugcugaagggcaucgccccccugcagcugggcaacugcagcguggccggcuggauccugggcaaccccgagugcgagcugcugaucagcaaggagagcuggagcuacaucguggagacccccaaccccggcaacggcaccugcuaccccggcuacuucgccgacuacgaggagcugagagagcagcugagcagcgugagcagcuucgagagauucgagaucuuccccaaggagagcagcuggcccaaccacaccgugaccggcgugagcgccagcugcagccacaacggcaagagcagcuucuacagaaaccugcuguggcugaccggcaagaacggccuguaccccaaccugagcaagagcuacgccaacaacaaggagaaggaggugcuggugcuguggggcgugcaccacccccccaacaucggcgaccagagagcccuguaccacaccgagaacgccuacgugagcguggugagcagccacuacagcagaagauucacccccgagaucgccaagagacccaaggugagagaccaggagggcagaaucaacuacuacuggacccugcuggagcccggcgacaccaucaucuucgaggccaacggcaaccugaucgcccccagauucgccuucgcccugagcagaggcuucggcagcggcaucaucaccagcaacgcccccauggacgagugcgaggccaagugccagaccccccagggcgccaucaacagcagccugcccuuccagaacgugcaccccgugaccaucggcgagugccccaaguacgugagaagcaccaagcugagaauggugaccggccugagaaacauccccagcauccagagcagaggccuguucggcgccaucgccggcuucaucgagggcggcuggaccggcaugguggacggcugguacggcuaccaccaccagaacgagcagggcagcggcuacgccgccgaccagaagagcacccagaacgccaucaacggcaucaccaacaaggugaacagcgugaucgagaagaugaacacccaguucaccgccgugggcaaggaguucaacaagcuggagagaagaauggagaaccugaacaagaagguggacgacggcuuccuggacaucuggaccuacaacgccgagcugcuggugcugcuggagaacgagagaacccuggacuuccacgacagcaacgugaagaaccuguacgagaaggugaagagccagcugaagaacaacgccaaggagaucggcaacggcugcuucgaguucuaccacaagugcaacgacgagugcauggagagcgugaagaacggcaccuacgacuaccccaaguacagcgaggagagcaagcugaacagagagaagaucgacggcgugaagcuggagagcaugggcguguaccagauccuggccaucuacagcaccguggccagcagccuggugcugcuggugagccugggcgccaucagcuucuggaugugcagcaacggcagccugcagugcagaaucugcaucuga

SEQ ID NO: 162354 - RNA, 1689 nt, Artificial Sequence
  derived and/or modified CDS sequence (opt4) from hemagglutinin__InfluenzaA__ACD56324
auggccaucaucuaccugauccugcuguucaccgccgugagaggcgaccagaucugcaucggcuaccacgccaacaacagcaccgagaagguggacaccauccuggagagaaacgugaccgugacccacgccaagaacauccuggagaagacccacaacggcagacugugcaagcugaacggcauccccccccuggagcugggcgacugcagcaucgccggcuggcugcugggcaaccccgagugcgacagacugcugagagugcccgaguggagcuacaucauggagaaggagaaccccagaaacggccugugcuaccccggcagcuucaacgacuacgaggagcugaagcaccugcugagcagcgugaagcacuucgagaaggugagaauccugcccaaggacagauggacccagcacaccaccaccggcagcagcagagccugcgccgugagcggcaaccccagcuucuucagaaacaugguguggcugaccaagaaggagagcaacuaccccguggccaagggcagcuacaacaacaccagcggcgagcagaugcugaucaucuggggcgugcaccaccccaucgacgagaccgagcagagaacccuguaccagaacgugggcaccuacgugagcgugggcaccagcacccugaacaagagaagcacccccgacaucgccaccagacccaaggugaacggccugggcagcagaauggaguucagcuggacccugcuggacaugugggacaccaucaacuucgagagcaccggcaaccugaucgcccccgaguacggcuucaagaucagcaagagaggcagcagcggcaucaugaagaccgagagaacccuggagaacugcgagaccaagugccagaccccccugggcgccaucaacaccacccugcccuuccacaacgugcacccccugaccaucggcgagugccccaaguacgugaagagcgagaagcuggugcuggccaccggccugagaaacgugccccagaucgagcccagaggccuguucggcgccaucgccggcuucaucgagggcggcuggcagggcaugguggacggcugguacggcuaccaccacagcaacgaccagggcagcggcuacgccgccgacaaggagagcacccagaaggccuucgacggcaucaccaacaaggugaacagcgugaucgagaagaugaacacccaguucgaggccgugggcaaggaguucagcaaccuggagagaagacuggagaaccugaacaagaagauggaggacggcuuccuggacguguggaccuacaacgccgagcugcuggugcugauggagaacgagagaacccuggacuuccacgacagcaacgugaagaaccuguacgacaaggugagaaugcagcugagagacaacgugaaggagcugggcaacggcugcuucgaguucuaccacaagugcgacgacgagugcaugaacagcgugaagaacggcaccuacgacuaccccaaguacgaggaggagagcaagcugaacagaaacgagaucaagggcgugaagcugagcagcaugggcguguaccagauccuggccaucuacgccaccguggccggcagccugagccuggccaucaugauggccggcaucagcuucuggaugugcagcaacggcagccugcagugcagaaucugcaucuga

SEQ ID NO: 162355 - RNA, 1689 nt, Artificial Sequence
  derived and/or modified CDS sequence (opt4) from hemagglutinin__InfluenzaA__ACD85187
auggccaucaucuaccugauccugcuguucaccgccgugagaggcgaccagaucugcaucggcuaccacgccaacaacagcaccgagaagguggacaccauccuggagagaaacgugaccgugacccacgccaaggacauccuggagaagacccacaacggcaagcugugcaagcugaacggcauccccccccuggagcugggcgacugcagcaucgccggcuggcugcugggcaaccccgagugcgacagacugcugagagugcccgaguggagcuacaucauggagaaggagaaccccagauacagccugugcuaccccggcagcuucaacgacuacgaggagcugaagcaccugcugagcagcgugaagcacuucgagaaggugaagauccugcccaaggacagauggacccagcacaccaccaccggcggcagcaaggccugcgccgugagcggcaagcccagcuucuucagaaacaugguguggcugaccaagaagggccccaacuaccccguggccaagggcagcuacaacaacaccagcggcgagcagaugcugaucaucuggggcgugcaccaccccaaggacgaggccgagcagagagcccuguaccaggaggugggcaccuacgugagcgccagcaccagcacccugaacaagagaagcacccccgagaucgccgccagacccgaggugaacggccugggcagcagaauggaguucagcuggacccugcuggacgugugggacaccaucaacuucgagagcaccggcaaccugguggcccccgaguacggcuucaagaucagcaagagaggcagcagcggcaucaugaagaccgagggcacccugggcaacugcgagaccaagugccagaccccccugggcgccaucaacaccacccugcccuuccacaacgugcacccccugaccaucggcgagugccccaaguacgugaagagcgagaagcuggugcuggccaccggccugagaaacgugccccagaucgagagcagaggccuguucggcgccaucgccggcuucaucgagggcggcuggcagggcaugguggacggcugguacggcuaccaccacagcaacgaccagggcagcggcuacgccgccgacaaggagagcacccagaaggccuucgacggcaucaccaacaaggugaacagcgugaucgagaagaugaacacccaguucgaggccgugggcaaggaguucaacaaccuggagaagagacuggagaaccugaacaagaagauggaggacggcuuccuggacguguggaccuacaacgccgagcugcuggugcugauggagaacgagagaacccuggacuuccacgacagcaacgugaagaaccuguacgacaaggugagaaugcagcugagagacaacgugaaggagcugggcaacggcugcuucgaguucuaccacaagugcgacgacgagugcaugaacagcgugaagaacggcaccuacgacuaccccaaguacgaggaggagagcaagcugaacagaaacgagaucaagggcgugaagcugagcagcaugggcguguaccagauccuggccaucuacgccaccguggccggcagccugagccuggccaucaugauggccggcaucagcuucuggaugugcagcaacggcagccugcagugcagaaucugcaucuga

SEQ ID NO: 162356 - RNA, 1689 nt, Artificial Sequence
  derived and/or modified CDS sequence (opt4) from hemagglutinin__InfluenzaA__ACD85198
auggccaucaucuaccugauccugcuguucaccgccgugagaggcgaccagaucugcaucggcuaccacgccaacaacagcaccgagaagguggacaccauccuggagagaaacgugaccgugacccacgccaaggacauccuggagaagacccacaacggcaagcugugcaagcugaacggcauccccccccuggagcugggcgacugcagcaucgccggcuggcugcugggcaaccccgagugcgacagacugcugagagugcccgaguggagcuacaucauggagaaggagaaccccagauacagccugugcuaccccggcagcuucaacgacuacgaggagcugaagcaccugcugagcagcgugaagcacuucgagaaggugaagauccugcccaaggacggcuggacccagcacaccaccaccggcggcagcaaggccugcgccgugagcggcaagcccagcuucuucagaaacaugguguggcugaccaagaagggccccaacuaccccguggccaagagaagcuacaacaacaccagcggcgagcagaugcugaucaucuggggcgugcaccaccccaccgacgaggccgagcagagagcccuguaccaggaggugggcaccuacgugagcgccagcaccagcacccugaacaagagaagcacccccgagaucgccgccagacccgaggugaacggccugagaagcagaauggaguucagcuggacccugcuggacgugugggacaccaucaacuucgagagcaccggcaaccugguggcccccgaguacggcuucaagaucagcaagagaggcagcagcggcaucaugaagaccgagggcacccugggcaacugcgagaccaagugccagaccccccugggcgccaucaacaccacccugcccuuccacaacgugcacccccugaccaucggcgagugccccaaguacgugaagagcgagaagcuggugcuggccaccggccugagaaacgugccccagaucgagagcagaggccuguucggcgccaucgccggcuucaucgagggcggcuggcagggcaugguggacggcugguacggcuaccaccacagcaacgaccagggcagcggcuacgccgccgacaaggagagcacccagaaggccuucgacagaaucaccaacaaggugaacagcgugaucgagaagaugaacacccaguucgaggccgugggcaaggaguucagcaaccuggagaagagacuggagaaccugaacaagaagauggaggacggcuuccuggacguguggaccuacaacgccgagcugcuggugcugauggagaacgagagaacccugggcuuccacgacagcaacgugaagaaccuguacgacaaggugagaaugcagcugagagacaacgugaaggagcugggcaacggcugcuucgaguucuaccacaagugcgacgacgagugcaugaacagcgugaagaacggcaccuacgacuaccccaaguacgaggaggagagcaagcugaagagaaacgagaucaagggcgugaagcugagcagcaugggcguguaccagauccuggccaucuacgccaccguggccggcagccugagccuggccaucaugauggccggcaucagcuucuggaugugcagcaacggcagccugcagugcagaaucugcaucuga

SEQ ID NO: 162357 - RNA, 1689 nt, Artificial Sequence
  derived and/or modified CDS sequence (opt4) from hemagglutinin__InfluenzaA__ACD85209
auggccaucaucuaccugauccugcuguucaccgccgugagaggcgaccagaucugcaucggcuaccacgccaacaacagcaccgagaagguggacaccauccuggagagaaacgugaccgugacccacgccaaggacauccuggagaagacccacaacggcaagcugugcaagcugaacggcauccccccccuggagcugggcgacugcagcaucgccggcuggcugcugggcaaccccgagugcgacagacugcugagcgugcccgaguggagcuacaucauggagaaggagaaccccagagacggccugugcuaccccggcagcuucaacgacuacgaggagcugaagcaccugcugagcagcgugaagcacuucgagaaggugaagauccugcccaaggacagauggacccagcacaccaccaccggcggcagcagagccugcgccgugagcggcaaccccagcuucuucagaaacaugguguggcugacccagaagggcagcaacuaccccguggccaagggcagcuacaacaacaccagcggcgagcagaugcugaucaucuggggcgugcaccaccccaacgacgagaccgagcagagaacccuguaccagaacgugggcaccuacgugagcgugggcaccagcacccugaacaagagaagcacccccgacaucgccaccagacccaaggugaacggccagggcggcagaauggaguucagcuggacccugcuggacaugugggacaccaucaacuucgagagcaccggcaaccugaucgcccccgaguacggcuucaagaucagcaagagaggcagcagcggcaucaugaagaccgagggcacccuggagaacugcgagaccaagugccagaccccccugggcgccaucaacaccacccugcccuuccacaacgugcacccccugaccaucggcgagugccccaaguacgugaagagcgagaagcuggugcuggccaccggccugagaaacgugccccagaucgagagcagaggccuguucggcgccaucgccggcuucaucgagggcggcuggcagggcaugguggacggcugguacggcuaccaccacagcaacgaccagggcagcggcuacgccgccgacaaggagagcacccagaaggccuucgacggcaucaccaacaaggugaacagcgugaucgagaagaugaacacccaguucgaggccgugggcaaggaguucagcaaccuggagagaagacuggagaaccugaacaagaagauggaggacggcuuccuggacguguggaccuacaacgccgagcugcuggugcugauggagaacgagagaacccuggacuuccacgacagcaacgugaagaaccuguacgacaaggugagaaugcagcugagagacaacgugaaggagcugggcaacggcugcuucgaguucuaccacaagugcgacgacgagugcaugaacagcgugaagaacggcaccuacgacuaccccaaguacgaggaggagagcaagcugaacagaaacgagaucaagggcgugaagcugagcagcaugggcguguaccagauccuggccaucuacgccaccguggccggcagccugagccuggccaucaugauggccggcaucagcuucuggaugugcagcaacggcagccugcagugcagaaucugcaucuga

SEQ ID NO: 162358 - RNA, 1689 nt, Artificial Sequence
  derived and/or modified CDS sequence (opt4) from hemagglutinin__InfluenzaA__ACD85220
auggccaucaucuaccugauccugcuguucaccgccgugagaggcgaccagaucugcaucggcuaccacgccaacaacagcaccgagaagguggacaccauccuggagagaaacgugaccgugacccacgccaaggacauccuggagaagacccacaacggcaagcugugcaagcugaacggcauccccccccuggagcugggcgacugcagcaucgccggcuggcugcugggcaaccccgagugcgacagacugcugagagugcccgaguggagcuacaucauggagaaggagaaccccaaguacagccugugcuaccccggcagcuucaacgacuacgaggagcugaagcaccugcugagcagcgugaagcacuucgagaaggugaagauccugcccaaggacagauggacccagcacaccaccaccggcggcagcaaggccugcgccgugagcggcgagcccagcuucuucagaaacaugguguggcugaccaagaagggccccaacuaccccguggccaagggcagcuacaacaacaccagcggcgagcagaugcugaucaucuggggcgugcaccaccccaaggacgaggccgagcagagagcccuguaccagaacgugggcaccuacgugagcgccagcaccagcacccugaacaagagaagcacccccgagaucgccgccagacccgaggugaacggccugggcagcagaauggaguucagcuggacccugcuggacgugugggacaccaucaacuucgagagcaccggcaaccugguggcccccgaguacggcuucaagaucagcaagagaggcagcagcggcaucaugaagaccgagggcacccugggcaacugcgagaccaagugccagaccccccugggcgccaucaacaccacccugcccuuccacaacgugcacccccugaccaucggcgagugccccaaguacgugaagagcgagaagcuggugcuggccaccggccugagaaacgugccccagaucgagagcagaggccuguucggcgccaucgccggcuucaucgagggcggcuggcagggcaugguggacggcugguacggcuaccaccacagcaacgaccagggcagcggcuacgccgccgacaaggagagcacccagaaggccuucgacggcaucaccaacaaggugaacagcgugaucgagaagaugaacacccaguucgaggccgugggcaaggaguucaacaaccuggagaagagacuggagaaccugaacaagaagauggaggacggcuuccuggacguguggaccuacaacgccgagcugcuggugcugauggagaacgagagaacccuggacuuccacgacagcaacgugaagaaccuguacgacaaggugagaaugcagcugagagacaacgugaaggagcugggcaacggcugcuucgaguucuaccacaagugcgacgacgagugcaugaacagcgugaagaacggcaccuacgacuaccccaaguacgagaaggagagcaagcugaacagaaacgagaucaagggcgugaagcugagcagcaugggcguguaccagauccuggccaucuacgccaccguggccggcagccugagccuggccaucaugauggccggcaucagcuucuggaugugcagcaacggcagccugcagugcagaaucugcaucuga

SEQ ID NO: 162359 - RNA, 1689 nt, Artificial Sequence
  derived and/or modified CDS sequence (opt4) from hemagglutinin__InfluenzaA__ACD85242
auggccaucaucuaccugauccugcuguucgccaccgugagaggcgaccagaucugcaucggcuaccacgccaacaacagcaccgagaagguggacaccauccuggagagaaacgugaccgugacccacgccaaggacauccuggagaagacccacaacggcaagcugugcaagcugaacggcauccccccccuggagcugggcgacugcagcaucgccggcuggcugcugggcaaccccgagugcgacagacugcugagagugcccgaguggagcuacaucauggagaaggagaaccccagauacagccugugcuaccccggcagccugaacgacuacgaggagcugaagcaccugcugagcagcgugaagcacuucgagaaggugagaauccugcccaaggacagauggacccagcacaccaccaccggcggcagcaaggccugcgccgugagcggcaagcccagcuucuucagaaacaugguguggcugaccaagaagggccccaacuaccccguggccaagggcagcuacaacaacaccagcggcgagcagaugcugaucaucuggggcgugcaccaccccaaggacgaggccgagcagagagcccuguaccaggaggugggcaccuacgugagcgccagcaccagcacccugaacaagagaagcauccccgagaucgccgccagacccgaggugaacggccugggcagcagaauggaguucagcuggacccugcuggacgugugggacaccaucaacuucgagagcaccggcaaccugguggcccccgaguacggcuucaagaucagcaagagaggcagcagcggcaucaugaagaccgagggcacccugggcaacugcgagaccaagugccagaccccccugggcgccaucaacaccacccugcccuuccacaacgugcacccccugaccaucggcgagugccccaaguacgugaagagcgagaagcuggugcuggccaccggccugagaaacgugccccagaucgagagcagaggccuguucggcgccaucgccggcuucaucgagggcggcuggcagggcaugguggacggcugguacggcuaccaccacagcaacgaccagggcagcggcuacgccgccgacaaggagagcacccagaaggccuucgacggcaucaccaacaaggugaacagcaugaucgagaagaugaacacccaguucgaggccgugggcaaggaguucaacaaccuggagaagagacuggagaaccuggacaagaagauggaggacggcuuccuggacguguggaccuacaacgccgagcugcuggugcugauggagaacgagagaacccuggacuuccacgacagcaacgugaagaaccuguacgagaaggugagaaugcagcugagagacaacgugaaggagcugggcaacggcugcuucgaguucuaccacaagugcgacaacgagugcaugaacagcgugaagaacggcaccuacgacuaccccaaguacgaggaggagagcaagcugaagagaaacgagaucaagggcgugaagcugagcagcaugggcguguaccagauccuggccaucuacgccaccguggccggcagccugagccuggccaucaugguggccggcaucagcuucuggaugugcagcaacggcagccugcagugcagaaucugcaucuga

SEQ ID NO: 162360 - RNA, 1689 nt, Artificial Sequence
  derived and/or modified CDS sequence (opt4) from hemagglutinin__InfluenzaA__ACD85253
auggccaucaucuaccugauccugcuguucgccaccgugagaggcgaccagaucugcaucggcuaccacgccaacaacagcaccgagaagguggacaccauccuggagagaaacgugaccgugacccacgccaaggacauccuggagaagacccacaacggcaagcugugcaagcugaacggcauccccccccuggagcugggcgacugcagcaucgccggcuggcugcugggcaaccccgagugcgacagacugcugagagugcccgaguggagcuacaucauggagaaggagaaccccagauacaaccugugcuaccccggcagccugaacgaguacgaggagcugaagcaccugcugagcagcgugaagcacuucgagaaggugagaauccugcccaaggacagauggacccagcacaccaccaccggcggcagcaaggccugcgccgugagcggcgagcccagcuucuucagaaacaugguguggcugaccaagaagggccccaacuaccccguggccaagggcagcuacaacaacaccagcggcgagcagaugcugaucaucuggggcgugcaccaccccaacgacgaggccgagcagagagcccuguaccagaaggugggcaccuacgugagcgccagcaccagcacccugaacaagagaagcauccccgagaucgccgccagacccaaggugaacggccugggcagcagaauggaguucuucuggacccugcuggacgugugggacaccaucaacuucgagagcaccggcaaccugguggugcccgaguacggcuucaagaucagcaagagaggcagcagcggcaucaugaagaccgagggcacccugggcaacugcgagaccaagugccagaccccccugggcgccaucaacaccacccugcccuuccacaacgugcacccccugaccaucggcgagugccccaaguacgugaagagcgagaagcuggugcuggccaccggccugagaaacgugccccagaucgagagcagaggccuguucggcgccaucgccggcuucaucgagggcggcuggcagggcaugguggacggcugguacggcuaccaccacagcaacgaccagggcagcggcuacgccgccgacaaggagagcacccagaaggccuucgacggcaucaccaacaaggugaacagcgugaucgagaagaugaacacccaguucgagaccgugggcaaggaguucaacaaccuggagaagagacuggagaaccugaacaagaagauggaggacggcuuccuggacguguggaccuacaacgccgagcugcuggugcugauggagaacgagagaacccuggacuuccacgacagcaacgugaagaaccuguacgagaaggugagaaugcagcugagagacaacgugaaggagcugggcaacggcugcuucgaguucuaccacaagugcgacgacgagugcaugaacagcgugaagaacggcaccuacgacuaccccaaguacgaggaggagagcaagcugaagagaaacgagaucaagggcgugaagcugagcagcaugggcguguaccagauccuggccaucuacgccaccguggccggcagccugagccuggccaucaugguggccggcaucagcuucuggaugugcagcaacggcagccugcagugcagaaucugcaucuga

SEQ ID NO: 162361 - RNA, 1701 nt, Artificial Sequence
  derived and/or modified CDS sequence (opt4) from hemagglutinin__InfluenzaA__ACD85440
augaagaccaucaucgcccugagcuacauccugugccugguguucgcccagaagcugcccggcaacgacaacagcaccgccacccugugccugggccaccacgccgugcccaacggcaccaucgugaagaccaucaccaacgaccagaucgaggugaccaacgccaccgagcuggugcagagcagcagcaccggcgagaucugcgacagcccccaccagauccuggacggcgagaacugcacccugaucgacgcccugcugggcgacccccagugcgacggcuuccagaacaagaagugggaccuguucguggagagaagcaaggccuacagcaacugcuaccccuacgacgugcccgacuacgccagccugagaagccugguggccagcagcggcacccuggaguucaacaacgagagcuucaacuggaccggcgugacccagaacggcaccagcagcgccugcaucagaagaagcaacaacagcuucuucagcagacugaacuggcugacccaccugaaguucaaguaccccgcccugaacgugaccaugcccaacaacgagaaguucgacaagcuguacaucuggggcgugcaccaccccggcaccgacaacgaccagaucuuccuguacgcccaggccagcggcagaaucaccgugagcaccaagagaagccagcagaccgugauccccaacaucggcagcagacccagagugagaaacauccccagcagaaucagcaucuacuggaccaucgugaagcccggcgacauccugcugaucaacagcaccggcaaccugaucgcccccagaggcuacuucaagaucagaagcggcaagagcagcaucaugagaagcgacgcccccaucggcaagugcaacagcgagugcaucacccccaacggcagcauccccaacgacaagcccuuccagaacgugaacagaaucaccuacggcgccugccccagauacgugaagcagaacacccugaagcuggccaccggcaugagaaacgugcccgagaagcagaccagaggcaucuucggcgccaucgccggcuucaucgagaacggcugggagggcaugguggacggcugguacggcuucagacaccagaacagcgagggcaucggccaggccgccgaccugaagagcacccaggccgccaucgaccagaucaacggcaagcugaacagacugaucggcaagaccaacgagaaguuccaccagaucgagaaggaguucagcgagguggagggcagaauccaggaccuggagaaguacguggaggacaccaagaucgaccuguggagcuacaacgccgagcugcugguggcccuggagaaccagcacaccaucgaccugaccgacagcgagaugaacaagcuguucgagaagaccaagaagcagcugagagagaacgccgaggaccugggcaacggcugcuucaagaucuaccacaagugcgacaacgccugcaucggcagcaucagaaacggcaccuacgaccacgacguguacagagacgaggcccugaacaacagauuccagaucaagggcguggagcugaagagcggcuacaaggacuggauccuguggaucagcuucgccaucagcugcuuccugcugugcguggcccugcugggcuucaucaugugggccugccagaagggcaacaucagaugcaacaucugcaucuga

SEQ ID NO: 162362 - RNA, 1701 nt, Artificial Sequence; identical to SEQ ID NO: 162361
  derived and/or modified CDS sequence (opt4) from hemagglutinin__InfluenzaA__ACD85451

SEQ ID NO: 162363 - RNA, 1701 nt, Artificial Sequence; identical to SEQ ID NO: 162361
  derived and/or modified CDS sequence (opt4) from hemagglutinin__InfluenzaA__ACD85462

SEQ ID NO: 162364 - RNA, 1701 nt, Artificial Sequence; identical to SEQ ID NO: 161988
  derived and/or modified CDS sequence (opt4) from hemagglutinin__InfluenzaA__ACD85473

SEQ ID NO: 162365 - RNA, 1701 nt, Artificial Sequence
  derived and/or modified CDS sequence (opt4) from hemagglutinin__InfluenzaA__ACD85484
augaagaccaucaucgcccugagcuacauccugugccugguguucgcccagaagcugcccggcaacgacaacagcaccgccacccugugccugggccaccacgccgugcccaacggcaccaucgugaagaccaucaccaacgaccagaucgaggugaccaacgccaccgagcuggugcagagcagcagcaccggcgagaucugcgacagcccccaccagauccuggacggcgagaacugcacccugaucgacgcccugcugggcgacccccagugcgacggcuuccagaacaagaagugggaccuguucguggagagaagcaaggccuacagcaacugcuaccccuacgacgugcccgacuacgccagccugagaagccugguggccagcagcggcacccuggaguucaacaacgagagcuucaacuggaccggcgugacccagaacggcaccagcagcgccugcaucagaagaagcaacaacagcuucuucagcagacugaacuggcugacccaccugaaguucaaguaccccgcccugaacgugaccaugcccaacaacgaggaguucgacaagcuguacaucuggggcgugcaccaccccggcaccgacaacgaccagaucuuccuguacgcccaggccagcggcagaaucaccgugagcaccaagagaagccagcagaccgugauccccaacaucggcagcagacccagagugagaaacauccccagcagaaucagcaucuacuggaccaucgugaagcccggcgacauccugcugaucaacagcaccggcaaccugaucgcccccagaggcuacuucaagaucagaagcggcaagagcagcaucaugagaagcgacgcccccaucggcaagugcaacagcgagugcaucacccccaacggcagcauccccaacgacaagcccuuccagaacgugaacagaaucaccuacggcgccugccccagauacgugaagcagaacacccugaagcuggccaccggcaugagaaacgugcccgagaagcagaccagaggcaucuucggcgccaucgccggcuucaucgagaacggcugggagggcaugguggacggcugguacggcuucagacaccagaacagcgagggcaucggccaggccgccgaccugaagagcacccaggccgccaucgaccagaucaacggcaagcugaacagacugaucggcaagaccaacgagaaguuccaccagaucgagaaggaguucagcgagguggagggcagaauccaggaccuggagaaguacguggaggacaccaagaucgaccuguggagcuacaacgccgagcugcugguggcccuggagaaccagcacaccaucgaccugaccgacagcgagaugaacaagcuguucgagaagaccaagaagcagcugagagagaacgccgaggacaugggcaacggcugcuucaagaucuaccacaagugcgacaacgccugcaucggcagcaucagaaacggcaccuacgaccacgacguguacagagacgaggcccugaacaacagauuccagaucaagggcguggagcugaagagcggcuacaaggacuggauccuguggaucagcuucgccaucagcugcuuccugcugugcguggcccugcugggcuucaucaugugggccugccagaagggcaacaucagaugcaacaucugcaucuga

SEQ ID NO: 162366 - RNA, 1701 nt, Artificial Sequence; identical to SEQ ID NO: 161988
  derived and/or modified CDS sequence (opt4) from hemagglutinin__InfluenzaA__ACD85495

SEQ ID NO: 162367 - RNA, 1701 nt, Artificial Sequence
  derived and/or modified CDS sequence (opt4) from hemagglutinin__InfluenzaA__ACD85528
augaagaccaucaucgcccugagcuacauccugugccugguguucgcccagaagcugcccggcaacgacaacagcaccgccacccugugccugggccaccacgccgugcccaacggcaccaucgugaagaccaucaccaacgaccagaucgaggugaccaacgccaccgagcuggugcagagcagcagcaccggcgagaucugcgacagcccccaccagauccuggacggcgagaacugcacccugaucgacgcccugcugggcgacccccagugcgacggcuuccagaacaagaagugggaccuguucguggagagaagcaaggccuacagcaacugcuaccccuacgacgugcccgacuacgugagccugagaagccugguggccagcagcggcacccuggaguucaacaacgagagcuucaacuggaccggcgugacccagaacggcaccagcagcgccugcaucagaagaagcaacaagagcuucuucagcagacugaacuggcugacccaccugaaguucaaguaccccgcccugaacgugaccaugcccaacaacgagaacuucgacaagcuguacaucuggggcgugcaccaccccggcaccgacaacgaccagaucuuccuguacgcccaggccagcggcagaaucaccgugagcaccaagagaagccagcagaccgugauccccaacaucggcagcagacccagagugagaaacauccccagcagaaucagcaucuacuggaccaucgugaagcccggcgacauccugcugaucaacagcaccggcaaccugaucgcccccagaggcuacuucaagaucagaagcggcaagagcagcaucaugagaagcgacgcccccaucggcaagugcaacagcgagugcaucacccccaacggcagcauccccaacgacaagcccuuccagaacgugaacagaaucaccuacggcgccugccccagauacgugaagcagaacacccugaagcuggccaccggcaugagaaacgugcccgagaagcagaccagaggcaucuucggcgccaucgccggcuucaucgagaacggcugggagggcaugguggacggcugguacggcuucagacaccagaacagcgagggcaucggccaggccgccgaccugaagagcacccaggccgccaucgaccagaucaacggcaagcugaacagacugaucggcaagaccaacgagaaguuccaccagaucgagaaggaguucagcgagguggagggcagaauccaggaccuggagaaguacguggaggacaccaagaucgaccuguggagcuacaacgccgagcugcugguggcccuggagaaccagcacaccaucgaccugaccgacagcgagaugaacaagcuguucgagaagaccaagaagcagcugagagagaacgccgaggaccugggcaacggcugcuucaagaucuaccacaagugcgacaacgccugcaucggcagcaucagaaacggcaccuacgaccacgacguguacagagacgaggcccugaacaacagauuccagaucaagggcguggagcugaagagcggcuacaaggacuggauccuguggaucagcuucgccaucagcugcuuccugcugugcguggcccugcugggcuucaucaugugggccugccagaagggcaacaucagaugcaacaucugcaucuga

SEQ ID NO: 162368 - RNA, 1701 nt, Artificial Sequence
  derived and/or modified CDS sequence (opt4) from hemagglutinin__InfluenzaA__ACD85539
augaagaccaucaucgcccugagcuacauccugugccugguguucgcccagaagcugcccggcaacgacaacagcaccgccacccugugccugggccaccacgccgugcccaacggcaccaucgugaagaccaucaccaacgaccagaucgaggugaccaacgccaccgagcuggugcagagcagcagcaccggcgagaucugcgacagcccccaccagauccuggacggcgagaacugcacccugaucgacgcccugcugggcgacccccagugcgacggcuuccagaacaagaagugggaccuguucguggagagaagcaaggccuacagcaacugcuaccccuacgacgugcccgacuacgccagccugagaagccugguggccagcagcggcacccuggaguucaacaacgagagcuucaacuggaccggcgugacccagaacggcaccagcagcgccugcaucagaagaaccaacaacagcuucuucagcagacugaacuggcugacccaccugaaguucaaguaccccgcccugaacgugaccaugcccaacaacgagaaguucgacaagcuguacaucuggggcgugcaccaccccggcaccgacaacgaccagaucuuccuguacgcccaggccagcggcagaaucaccgugagcaccaagagaagccagcagaccgugauccccaacaucggcagcagacccagagugagaaacauccccagcagaaucagcaucuacuggaccaucgugaagcccggcgacauccugcugaucaacagcaccggcaaccugaucgcccccagaggcuacuucaagaucagaagcggcaagagcagcaucaugagaagcgacgcccccaucggcaagugcaacagcgagugcaucacccccaacggcagcauccccaacgacaagcccuuccagaacgugaacagaaucaccuacggcgccugccccagauacgugaagcagaacacccugaagcuggccaccggcaugagaaacgugcccgagaagcagaccagaggcaucuucggcgccaucgccggcuucaucgagaacggcugggagggcaugguggacggcugguacggcuucagacaccagaacagcgagggcaucggccaggccgccgaccugaagagcacccaggccgccaucgaccagaucaacggcaagcugaacagacugaucggcaagaccaacgagaaguuccaccagaucgagaaggaguucagcgagguggagggcagaauccaggaccuggagaaguacguggaggacaccaagaucgaccuguggagcuacaacgccgagcugcugguggcccuggagaaccagcacaccaucgaccugaccgacagcgagaugaacaagcuguucgagaagaccaagaagcagcugagagagaacgccgaggacaugggcaacggcugcuucaagaucuaccacaagugcgacaacgccugcaucggcagcaucagaaacggcaccuacgaccacgacguguacagagacgaggcccugaacaacagauuccagaucaagggcguggagcugaagagcggcuacaaggacuggauccuguggaucagcuucgccaucagcugcuuccugcugugcguggcccugcugggcuucaucaugugggccugccagaagggcaacaucagaugcaacaucugcaucuga

SEQ ID NO: 162369 - RNA, 1701 nt, Artificial Sequence
  derived and/or modified CDS sequence (opt4) from hemagglutinin__InfluenzaA__ACD85550
augaagaccaucaucgcccugagcuacauccugugccugguguucgcccagaagcugcccggcaacgacaacagcaccgccacccugugccugggccaccacgccgugcccaacggcaccaucgugaagaccaucaccaacgaccagaucgaggugaccaacgccaccgagcuggugcagagcagcagcaccggcgagaucugcgacagcccccaccagauccuggacggcgagaacugcacccugaucgacgcccugcugggcgacccccagugcgacggcuuccagaacaagaagugggaccuguucguggagagaagcaaggccuacagcaacugcuaccccuacgacgugcccgacuacgccagccugagaagccugguggccagcagcggcacccuggaguucaacaacgagagcuucaacuggaccggcgugacccagaacggcaccagcagcgccugcaucagaagaagcaacaacagcuucuucagcagacugaacuggcugacccaccugaaguucaaguaccccgcccugaacgugaccaugcccaacaacgagaaguucgacaagcuguacaucuggggcgugcaccaccccggcaccgacaacgaccagaucuuccuguacgcccaggccagcggcagaaucaccgugagcaccaagagaagccagcagaccgugauccccaacaucggcagcagacccagagugagaaacauccccagcagaaucagcaucuacuggaccaucgugaagcccggcgacauccugcugaucaacagcaccggcaaccugaucgcccccagaggcuacuucaagaucagaagcggcaagagcagcaucaugagaagcgacgcccccaucggcaagugcaacagcgagugcaucacccccaacggcagcauccccaacgacaagcccuuccagaacgugaacagaaucaccuacggcgccugccccagauacgugaagcagaacacccugaagcuggccaccggcaugagaaacgugcccgagaagcagaccagaggcaucuucggcgccaucgccggcuucaucgagaacggcugggagggcaugguggacggcugguacggcuucagacaccagaacagcgagggcaucggccaggccgccgaccugaagagcacccaggccgccaucgaccagaucaacggcaagcugaacagacugaucggcaagaccaacgagaaguuccaccagaucgagaaggaguucagcgagguggagggcagaauccaggaccuggagaaguacguggaggacaccaagaucgaccuguggagcuacaacgccgagcugcugguggcccuggagaaccagcacaccaucgaccugaccgacagcgagaugaacaagcuguucgagaagaccaagaagcagcugagagagaacgccgaggaccugggcaacggcugcuucaagaucuaccacaagugcgacaacgccugcaucggcagcaucagaaacggcaccuacgaccacgacguguacagagacgaggcccugaacaacagauuccagaucaagggcguggagcugaagagcggcuacaaggacuggauccuguggaucagcuucgccaugagcugcuuccugcugugcguggcccugcugggcuucaucaugugggccugccagaagggcaacaucagaugcaacaucugcaucuga

SEQ ID NO: 162370 - RNA, 1701 nt, Artificial Sequence; identical to SEQ ID NO: 161988
  derived and/or modified CDS sequence (opt4) from hemagglutinin__InfluenzaA__ACD85561

SEQ ID NO: 162371 - RNA, 1701 nt, Artificial Sequence
  derived and/or modified CDS sequence (opt4) from hemagglutinin__InfluenzaA__ACD85572
augaagaccaucaucgcccugagcuacauccugugccugguguucgcccagaagcugcccggcaacgacaacagcaccgccacccugugccugggccaccacgccgugcccaacggcaccaucgugaagaccaucaccaacgaccagaucgaggugaccaacgccaccgagcuggugcagagcagcagcaccggcgagaucugcgacagcccccaccagauccuggacggcgagaacugcacccugaucgacgcccugcugggcgacccccagugcgacggcuuccagaacaagaagugggaccuguucguggagagaagcaaggccuacagcaacugcuaccccuacgacgugcccgacuacgccagccugagaagccugguggccagcagcggcacccuggaguucaacaacgagagcuucaacuggaccggcgugacccagaacggcaccagcagcgccugcaucagaagaagcaacaacagcuucuucagcagacugaacuggcugacccaccugaaguucaaguaccccgcccugaacgugaccaugcccaacaacgagaaguucgacaagcuguacaucuggggcgugcaccaccccggcaccgacaacgaccagaucuuccuguacgcccaggccagcggcagaaucaccgugagcaccaagagaagccagcagaccgugauccccaacaccggcagcagacccagagugagaaacauccccagcagaaucagcaucuacuggaccaucgugaagcccggcgacauccugcugaucaacagcaccggcaaccugaucgcccccagaggcuacuucaagaucagaagcggcaagagcagcaucaugagaagcgacgcccccaucggcaagugcaacagcgagugcaucacccccaacggcagcauccccaacgacaagcccuuccagaacgugaacagaaucaccuacggcgccugccccagauacgugaagcagaacacccugaagcuggccaccggcaugagaaacgugcccgagaagcagaccagaggcaucuucggcgccaucgccggcuucaucgagaacggcugggagggcaugguggacggcugguacggcuucagacaccagaacagcgagggcaucggccaggccgccgaccugaagagcacccaggccgccaucgaccagaucaacggcaagcugaacagacugaucggcaagaccaacgagaaguuccaccagaucgagaaggaguucagcgagguggagggcagaauccaggaccuggagaaguacguggaggacaccaagaucgaccuguggagcuacaacgccgagcugcugguggcccuggagaaccagcacaccaucgaccugaccgacagcgagaugaacaagcuguucgagaagaccaagaagcagcugagagagaacgccgaggacaugggcaacggcugcuucaagaucuaccacaagugcgacaacgccugcaucggcagcaucagaaacggcaccuacgaccacgacguguacagagacgaggcccugaacaacagauuccagaucaagggcguggagcugaagagcggcuacaaggacuggauccuguggaucagcuucgccaucagcugcuuccugcugugcguggcccugcugggcuucaucaugugggccugccagaagggcaacaucagaugcaacaucugcaucuga

SEQ ID NO: 162372 - RNA, 1701 nt, Artificial Sequence; identical to SEQ ID NO: 162368
  derived and/or modified CDS sequence (opt4) from hemagglutinin__InfluenzaA__ACD85583

SEQ ID NO: 162373 - RNA, 1701 nt, Artificial Sequence
  derived and/or modified CDS sequence (opt4) from hemagglutinin__InfluenzaA__ACD93579
augaagaccaucaucgcccugagcuacauccugugccugguguucgcccagaagcugcccggcaacgacaacagcaccgccacccugugccugggccaccacgccgugcccaacggcaccaucgugaagaccaucaccaacgaccagaucgaggugaccaacgccaccgagcuggugcagagcagcagcaccggcgagaucugcgacagcccccaccagauccuggacggcgagaacugcacccugaucgacgcccugcugggcgacccccagugcgacggcuuccagaacaagaagugggaccuguucguggagagaagcaaggccuacagcaacugcuaccccuacgacgugcccgacuacgccagccugagaagccugguggccagcagcggcacccuggaguucaacaacgagagcuucaacuggaccggcgugacccagaacggcaccagcagcgccugcaucagaagaagcaacaacagcuucuucagcagacugaacuggcugacccaccugaaguucaaguaccccgcccugaacgugaccaugcccaacaacgagaaguucgacaagcuguacaucuggggcgugcaccaccccggcaccgacaacgaccagaucuuccuguacgcccaggccagcggcagaaucaccgugagcaccaagagaagccagcagaccgugauccccaacaucggcagcagacccagagugagaaacauccccagcagaaucagcaucuacuggaccaucgugaagcccggcgacauccugcugaucaacagcaccggcaaccugaucgcccccagaggcuacuucaagaucagaagcggcaagagcagcaucaugagaagcgacgcccccaucggcaagugcaacagcgagugcaucacccccaacggcagcauccccaacgacaagcccuuccagaacgugaacagaaucaccuacggcgccugccccagauacgugaagcagaacacccugaagcuggccaccggcaugagaaacgugcccgagaagcagaccagaggcaucuucggcgccaucgccggcuucaucgagaacggcugggagggcaugguggacggcugguacggcuucagacaccagaacagcgagggcaucggccaggccgccgaccugaagagcacccaggccgccaucgaccagaucaacggcaagcugaacagacugaucggcaagaccaacgagaaguuccaccagaucgagaaggaguucagcgagguggagggcagaauccaggaccuggagaaguacguggaggacaccaagaucgaccuguggagcuacaacgccgagcugcugguggcccuggagaaccagcacaccaucgaccugaccgacagcgagaugaacaagcuguucgagaagaccaagaagcagcugagagagaacgccgaggacaugggcaacggcugcuucaagaucuaccacaagugcgacaacaccugcaucggcagcaucagaaacggcaccuacgaccacgacguguacagagacgaggcccugaacaacagauuccagaucaagggcguggagcugaagagcggcuacaaggacuggauccuguggaucagcuucgccaucagcugcuuccugcugugcguggcccugcugggcuucaucaugugggccugccagaagggcaacaucagaugcaacaucugcaucuga

SEQ ID NO: 162374 - RNA, 1701 nt, Artificial Sequence; identical to SEQ ID NO: 160690
  derived and/or modified CDS sequence (opt4) from hemagglutinin__InfluenzaA__ACF09402

SEQ ID NO: 162375 - RNA, 1701 nt, Artificial Sequence
  derived and/or modified CDS sequence (opt4) from hemagglutinin__InfluenzaA__ACF22159
augaagaccaucaucgcccugagcuacauccugugccugguguucgcccagaagcugcccggcaacgacaacagcaccgccacccugugccugggccaccacgccgugcccaacggcaccaucgugaagaccaucaccaacgaccagaucgaggugaccaacgccaccgagcuggugcagaacagcagcaccggcggcaucugcgacagcccccaccagauccuggacggcgagaacugcacccugaucgacgcccugcugggcgacccccagugcgacggcuuccagaacaagaagugggaccuguucguggagagaagcaaggccuacagcaacugcuaccccuacgacgugcccgacuacgccagccugagaagccugguggccagcagcggcacccuggaguucaacaacgagagcuucaacuggaccggcgugacccagaacggcaccagcagcgccugcaagagaagaagcaacaagagcuucuucagcagacugaacuggcugacccaccugaaguacaaguaccccgcccugaacgugaccaugcccaacaacgagaaguucgacaagcuguacaucuggggcgugcaccaccccggcaccgacagcgaccagaucagccuguacgcccaggccagcggcagaaucaccgugagcaccaagagaagccagcagaccgugauccccaacaucggcuucagacccagagugagagacgugagcagcagaaucagcaucuacuggaccaucgugaagcccggcgacauccugcugaucaacagcaccggcaaccugaucgcccccagaggcuacuucaagaucagaagcggcaagagcagcaucaugagaagcgacgcccccaucggcaagugcaacagcgagugcaucacccccaacggcagcauccccaacgacaagcccuuccagaacgugaacagaaucaccuacggcgccugccccagauacgugaagcagaacacccugaagcuggccaccggcaugagaaacgugcccgagaagcagaccagaggcaucuucggcgccaucgccggcuucaucgagaacggcugggagggcaugguggacggcugguacggcuucagacaccagaacagcgagggcaccggccaggccgccgaccugaagagcacccaggccgccaucaaccagaucaacggcaagcugaacagacugaucggcaagaccaacgagaaguuccaccagaucgagaaggaguucagcgagguggagggcagaauccaggaccuggagaaguacguggaggacaccaagaucgaccuguggagcuacaacgccgagcugcugguggcccuggagaaccagcacaccaucgaccugaccgacagcgagaugaacaagcuguucgagagaaccaagaagcagcugagagagaacgccgaggacaugggcaacggcugcuucaagaucuaccacaagugcgacaacgccugcaucgagagcaucagaaacggcaccuacgaccacgacguguacagagacgaggcccugaacaacagauuccagaucaagggcguggagcugaagagcggcuacaaggacuggauccuguggaucagcuucgccaucagcugcuuccugcugugcguggcccugcugggcuucaucaugugggccugccagaagggcaacaucagaugcaacaucugcaucuga

SEQ ID NO: 162376 - RNA, 1701 nt, Artificial Sequence
  derived and/or modified CDS sequence (opt4) from hemagglutinin__InfluenzaA__ACF22188
augaagaccaucaucgcccugagcuacaucuucugccuggcccugggccaggaccugcccggcaacgacaacagcaccgccacccugugccugggccaccacgccgugcccaacggcacccuggugaagaccaucaccgacgaccagaucgaggugaccaacgccaccgagcuggugcagagcagcagcaccggcaagaucugcaacaacccccacagaauccuggacggcaucgacugcacccugaucgacgcccugcugggcgacccccacugcgacguguuccagaacgagaccugggaccuguucguggagagaagcaaggccuucagcaacugcuaccccuacgacgugcccgacuacgccagccugagaagccugguggccagcagcggcacccuggaguucaucaccgagggcuucaccuggaccggcgugacccagaacggcggcagcaacgccugcaagagaggccccggcagcggcuucuucagcagacugaacuggcugaccaagagcggcagcaccuaccccgugcugaacgugaccaugcccaacaacgacaacuucgacaagcuguacaucuggggcgugcaccaccccagcaccaaccaggagcagaccagccuguacgugcaggccagcggcagagugaccgugagcaccagaagaagccagcagaccaucauccccaacaucuggagcagacccugggugagaggccugagcagcagaaucagcaucuacuggaccaucgugaagcccggcgacgugcuggugaucaacagcaacggcaaccugaucgcccccagaggcuacuucaagaugagaaccggcaagagcagcaucaugagaagcgacgcccccaucgacaccugcaucagcgagugcaucacccccaacggcagcauccccaacgacaagcccuuccagaacgugaacaagaucaccuacggcgccugccccaaguacgugaagcagaacacccugaagcuggccaccggcaugagaaacgugcccgagaagcagaccagaggccuguucggcgccaucgccggcuucaucgagaacggcugggagggcaugaucgacggcugguacggcuucagacaccagaacagcgagggcaccggccaggccgccgaccugaagagcacccaggccgccaucgaccagaucaacggcaagcugaacagagugaucgagaagaccaacgagaaguuccaccagaucgagaaggaguucagcgagguggagggcagaauccaggaccuggagaaguacguggaggacaccaagaucgaccuguggagcuacaacgccgagcugcugguggcccuggagaaccagcacaccaucgaccugaccgacagcgagaugaacaagcuguucgagaagaccagaagacagcugagagagaacgccgaggacaugggcaacggcugcuucaagaucuaccacaagugcgacaacgccugcaucgagagcaucagaaacggcaacuacgaccacgacguguacagagacgaggcccugaacaacagauuccagaucaagggcguggagcugaagagcggcuacaaggacuggauccuguggaucagcuucgccaucagcugcuuccugcugugcguggugcugcugggcuucaucaugugggccugccagagaggcaacaucagaugcaacaucugcaucuga

SEQ ID NO: 162377 - RNA, 1701 nt, Artificial Sequence; identical to SEQ ID NO: 162376
  derived and/or modified CDS sequence (opt4) from hemagglutinin__InfluenzaA__ACF22199

SEQ ID NO: 162378 - RNA, 1701 nt, Artificial Sequence
  derived and/or modified CDS sequence (opt4) from hemagglutinin__InfluenzaA__ACF22210
augaagaccaucaucgcccugagcuacaucuucugccuggcccugggccaggaccugcccggcaacgacaacagcaccgccacccugugccugggccaccacgccgugcccaacggcacccuggugaagaccaucaccgacgaccagaucgaggugaccaacgccaccgagcuggugcagagcagcagcaccggcaagaucugcaacaacccccacagaauccuggacggcaucgacugcacccugaucgacgcccugcugggcgacccccacugcgacguguuccagaacgagaccugggaccuguucguggagagaagcaaggccuucagcaacugcuaccccuacgacgugcccgacuacgccagccugagaagccugguggccagcagcggcacccuggaguucaucaccgagggcuucaccuggaccggcgugacccagaacggcggcagcaacgccugcaagagaggccccggcagcggcuucuucagcagacugaacuggcugaccaagagcggcagcaccuaccccgugcugaacgugaccaugcccaacaacgacaacuucgacaagcuguacaucuggggcgugcaccaccccagcaccaaccaggagcagaccagccuguacgugcaggccagcggcagagugaccgugagcaccagaagaagccagcagaccaucauccccaacaucggcagcagacccugggugagaggccugagcagcagaaucagcaucuacuggaccaucgugaagcccggcgacgugcuggugaucaacagcaacggcaaccugaucgcccccagaggcuacuucaagaugagaaccggcaagagcagcaucaugagaagcgacgcccccaucgacaccugcaucagcgagugcaucacccccaacggcagcauccccaacgacaagcccuuccagaacgugaacaagaucaccuacggcgccugccccaaguacgugaagcagaacacccugaagcuggccaccggcaugagaaacgugcccgagaagcagaccagaggccuguucggcgccaucgccggcuucaucgagaacggcugggagggcaugaucgacggcugguacggcuucagacaccagaacagcgagggcaccggccaggccgccgaccugaagagcacccaggccgccaucgaccagaucaacggcaagcugaacagagugaucgagaagaccaacgagaaguuccaccagaucgagaaggaguucagcgagguggagggcagaauccaggaccuggagaaguacguggaggacaccaagaucgaccuguggagcuacaacgccgagcugcugguggcccuggagaaccagcacaccaucgaccugaccgacagcgagaugaacaagcuguucgagaagaccagaagacagcugagagagaacgccgaggacaugggcaacggcugcuucaagaucuaccacaagugcgacaacgccugcaucgagagcaucagaaacggcaccuacgaccacgacguguacagagacgaggcccugaacaacagauuccagaucaagggcguggagcugaagagcggcuacaaggacuggauccuguggaucagcuucgccaucagcugcuuccugcugugcguggugcugcugggcuucaucaugugggccugccagagaggcaacaucagaugcaacaucugcaucuga

SEQ ID NO: 162379 - RNA, 1701 nt, Artificial Sequence; identical to SEQ ID NO: 162378
  derived and/or modified CDS sequence (opt4) from hemagglutinin__InfluenzaA__ACF22221

SEQ ID NO: 162380 - RNA, 1701 nt, Artificial Sequence; identical to SEQ ID NO: 162378
  derived and/or modified CDS sequence (opt4) from hemagglutinin__InfluenzaA__ACF22232

SEQ ID NO: 162381 - RNA, 1701 nt, Artificial Sequence; identical to SEQ ID NO: 162378
  derived and/or modified CDS sequence (opt4) from hemagglutinin__InfluenzaA__ACF22243

SEQ ID NO: 162382 - RNA, 1701 nt, Artificial Sequence; identical to SEQ ID NO: 162378
  derived and/or modified CDS sequence (opt4) from hemagglutinin__InfluenzaA__ACF22254

SEQ ID NO: 162383 - RNA, 1701 nt, Artificial Sequence; identical to SEQ ID NO: 162378
  derived and/or modified CDS sequence (opt4) from hemagglutinin__InfluenzaA__ACF22265

SEQ ID NO: 162384 - RNA, 1701 nt, Artificial Sequence; identical to SEQ ID NO: 162378
  derived and/or modified CDS sequence (opt4) from hemagglutinin__InfluenzaA__ACF22276

SEQ ID NO: 162385 - RNA, 1701 nt, Artificial Sequence; identical to SEQ ID NO: 162378
  derived and/or modified CDS sequence (opt4) from hemagglutinin__InfluenzaA__ACF22287

SEQ ID NO: 162386 - RNA, 1701 nt, Artificial Sequence; identical to SEQ ID NO: 162378
  derived and/or modified CDS sequence (opt4) from hemagglutinin__InfluenzaA__ACF22298

SEQ ID NO: 162387 - RNA, 1701 nt, Artificial Sequence; identical to SEQ ID NO: 162378
  derived and/or modified CDS sequence (opt4) from hemagglutinin__InfluenzaA__ACF22320

SEQ ID NO: 162388 - RNA, 1701 nt, Artificial Sequence; identical to SEQ ID NO: 162378
  derived and/or modified CDS sequence (opt4) from hemagglutinin__InfluenzaA__ACF22342

SEQ ID NO: 162389 - RNA, 1701 nt, Artificial Sequence
  derived and/or modified CDS sequence (opt4) from hemagglutinin__InfluenzaA__ACF22364
augaagaccaucaucgcccugagcuacaucuucugccuggcccugggccaggaccugcccggcaacgacaacagcaccgccacccugugccugggccaccacgccgugcccaacggcacccuggugaagaccaucaccgacgaccagaucgaggugaccaacgccaccgagcuggugcagagcagcagcaccggcaagaucugcaacaacccccacagaauccuggacggcaucgacugcacccugaucgacgcccugcugggcgacccccacugcgacguguuccagaacgagaccugggaccuguucguggagagaagcaaggccuucagcaacugcuaccccuacgacgugcccgacuacgccagccugagaagccugguggccagcagcggcacccuggaguucaucaccgagggcuucaccuggaccggcgugacccagaacggcggcagcaacgccugcaagagaggccccggcagcggcuucuucagcagacugaacuggcugaccaagagcggcagcaccuaccccgugcugaacgugaccaugcccaacaacgacaacuucgacaagcuguacaucuggggcgugcaccaccccagcaccaaccaggagcagaccagccuguacgugcaggccagcggcagagugaccgugagcaccagaagaagccagcagaccaucauccccaacaucgagagcagacccugggugagaggccugagcagcagaaucagcaucuacuggaccaucgugaagcccggcgacgugcuggugaucaacagcaacggcaaccugaucgcccccagaggcuacuucaagaugagaaccggcaagagcagcaucaugagaagcgacgcccccaucgacaccugcaucagcgagugcaucacccccaacggcagcauccccaacgacaagcccuuccagaacgugaacaagaucaccuacggcgccugccccaaguacgugaagcagaacacccugaagcuggccaccggcaugagaaacgugcccgagaagcagaccagaggccuguucggcgccaucgccggcuucaucgagaacggcugggagggcaugaucgacggcugguacggcuucagacaccagaacagcgagggcaccggccaggccgccgaccugaagagcacccaggccgccaucgaccagaucaacggcaagcugaacagagugaucgagaagaccaacgagaaguuccaccagaucgagaaggaguucagcgagguggagggcagaauccaggaccuggagaaguacguggaggacaccaagaucgaccuguggagcuacaacgccgagcugcugguggcccuggagaaccagcacaccaucgaccugaccgacagcgagaugaacaagcuguucgagaagaccagaagacagcugagagagaacgccgaggacaugggcaacggcugcuucaagaucuaccacaagugcgacaacgccugcaucgagagcaucagaaacggcaccuacgaccacgacguguacagagacgaggcccugaacaacagauuccagaucaagggcguggagcugaagagcggcuacaaggacuggauccuguggaucagcuucgccaucagcugcuuccugcugugcguggugcugcugggcuucaucaugugggccugccagagaggcaacaucagaugcaacaucugcaucuga

SEQ ID NO: 162390 - RNA, 1701 nt, Artificial Sequence; identical to SEQ ID NO: 162368
  derived and/or modified CDS sequence (opt4) from hemagglutinin__InfluenzaA__ACF22408

SEQ ID NO: 162391 - RNA, 1701 nt, Artificial Sequence; identical to SEQ ID NO: 161988
  derived and/or modified CDS sequence (opt4) from hemagglutinin__InfluenzaA__ACF41669

SEQ ID NO: 162392 - RNA, 1698 nt, Artificial Sequence; identical to SEQ ID NO: 161974
  derived and/or modified CDS sequence (opt4) from hemagglutinin__InfluenzaA__ACF41680

SEQ ID NO: 162393 - RNA, 1689 nt, Artificial Sequence
  derived and/or modified CDS sequence (opt4) from hemagglutinin__InfluenzaA__ACF41691
auggccaucaucuaccugauccugcuguucaccgccgugagaggcgaccagaucugcaucggcuaccacgccaacaacagcaccgagaagguggacaccauccuggagagaaacgugaccgugacccacgccaaggacauccuggagaagacccacaacggcaagcugugcaagcugaacggcauccccccccuggagcugggcgacugcagcaucgccggcuggcugcugggcaaccccgagugcgacagacugcugagagugcccgaguggagcuacaucauggagaaggagaaccccagauacagccugugcuaccccggcagcuucaacgacuacgaggagcugaagcaccugcugagcagcgugaagcacuucgagaaggugaagauccugcccaaggacggcuggacccagcacgagaccgacggcggcagcaaggccugcgccgugagcggcaagcccagcuucuucagaaacaugguguggcugaccaagaagggccccaacuaccccguggccaagagaagcuacaacaacaccagcggcgagcagaugcugaucaucuggggcgugcaccaccccaacgacgaggccgagcagagagcccuguaccaggaggugggcaccuacgugagcgccagcaccagcacccugaacaagagaagcacccccgagaucgccgccagacccaaggugagcggccugggcagcagaauggaguucagcuggacccugcuggacgugugggacaccaucagcuucgagagcaccggcaaccugguggcccccgaguacggcuucaagaucagcaagagaggcagcagcggcaucaugaagaccgagggcacccugggcaacugcgagaccaagugccagaccccccugggcgccaucaacaccacccugcccuuccacaacgugcacccccugaccaucggcgagugccccaaguacgugaagagcgagaagcuggugcuggccaccggccugagaaacgugccccagaucgagagcagaggccuguucggcgccaucgccggcuucaucgagggcggcuggcagggcaugguggacggcugguacggcuaccaccacagcaacgaccagggcagcggcuacgccgccgacaaggagagcacccagaaggccuucgacagaaucaccaacaaggugaacagcgugaucgagaagaugaacacccaguucgaggccgugggcaaggaguucagcaaccuggagaagagacuggagaaccugaacaagaagauggaggacggcuuccuggacguguggaccuacaacgccgagcugcuggugcugauggagaacgagagaacccuggacuuccacgacagcaacgugaagaaccuguacgacaaggugagaaugcagcugagagacaacgugaaggagcugggcaacggcugcuucgaguucuaccacaagugcgacgacgagugcaugaacagcgugaagaacggcaccuacgacuaccccaaguacgaggaggagagcaagcugaagagaaacgagaucaagggcguggagcugagcagcaugggcguguaccagauccuggccaucuacgccaccguggccggcagccugagccuggccaucaugaucgccggcaucagcuucuggaugugcagcaacggcagccugcagugcagaaucugcaucuga

SEQ ID NO: 162394 - RNA, 1701 nt, Artificial Sequence; identical to SEQ ID NO: 162376
  derived and/or modified CDS sequence (opt4) from hemagglutinin__InfluenzaA__ACF41735

SEQ ID NO: 162395 - RNA, 1701 nt, Artificial Sequence
  derived and/or modified CDS sequence (opt4) from hemagglutinin__InfluenzaA__ACF41790
augaagaccaucaucgcccugagcuacaucuucugccuggcccugggccaggaccugcccggcaacgacaacagcaccgccacccugugccugggccaccacgccgugcccaacggcacccuggugaagaccaucaccgacgaccagaucgaggugaccaacgccaccgagcuggugcagagcagcagcaccggcaagaucugcaacaacccccacagaauccuggacggcaucgacugcacccugaucgacgcccugcugggcgacccccacugcgacguguuccagaacgagaccugggaccuguucguggagagaagcaaggccuucagcaacugcuaccccuacgacgugcccgacuacgccagccugagaagccugguggccagcagcggcacccuggaguucaucaccgaggacuucaccuggaccggcgugacccagaacggcggcagcaacgccugcaagagaggccccggcagcggcuucuucagcagacugaacuggcugaccaagagcggcagcaccuaccccgugcuggacgugaccaugcccaacaacgacaacuucgacaagcuguacaucuggggcgugcaccaccccagcaccaaccaggagcagaccagccuguacgugcaggccagcggcagagugaccgugagcaccagaagaagccagcagaccaucauccccaacaucggcagcagacccugggugagaggccugagcagcagaaucagcaucuacuggaccaucgugaagcccggcgacgugcuggugaucaacagcaacggcaaccugaucgcccccagaggcuacuucaagaugagaaccggcaagagcagcaucaugagaagcgacgcccccaucgacaccugcaucagcgagugcaucacccccaacggcagcauccccaacgacaagcccuuccagaacgugaacaagaucaccuacggcgccugccccaaguacgugaagcagaacacccugaagcuggccaccggcaugagaaacgugcccgagaagcagaccagaggccuguucggcgccaucgccggcuucaucgagaacggcugggagggcaugaucgacggcugguacggcuucagacaccagaacagcgagggcaccggccaggccgccgaccugaagagcacccaggccgccaucgaccagaucaacggcaagcugaacagagugaucgagaagaccaacgagaaguuccaccagaucgagaaggaguucagcgagguggagggcagaauccaggaccuggagaaguacguggaggacaccaagaucgaccuguggagcuacaacgccgagcugcugguggcccuggagaaccagcacaccaucgaccugaccgacagcgagaugaacaagcuguucgagaagaccagaagacagcugagagagaacgccgaggacaugggcaacggcugcuucaagaucuaccacaagugcgacaacgccugcaucgagagcaucagaaacggcaccuacgaccacgacguguacagagacgaggcccugaacaacagauuccagaucaagggcguggagcugaagagcggcuacaaggacuggauccuguggaucagcuucgccaucagcugcuuccugcugugcguggugcugcugggcuucaucaugugggccugccagagaggcaacaucagaugcaacaucugcaucuga

SEQ ID NO: 162396 - RNA, 1701 nt, Artificial Sequence
  derived and/or modified CDS sequence (opt4) from hemagglutinin__InfluenzaA__ACF41823
augaagaccaucaucgcccugagcuacaucuucugccuggcccugggccaggaccugcccggcaacgacaacagcaccgccacccugugccugggccaccacgccgugcccaacggcacccuggugaagaccaucaccgacgaccagaucgaggugaccaacgccaccgagcuggugcagagcagcagcaccggcaagaucugcaacaacccccacagaauccuggacggcaucgacugcacccugaucgacgcccugcugggcgacccccacugcgacguguuccagaacgagaccugggaccuguucguggagagaagcaaggccuucagcaacugcuaccccuacgacgugcccgacuacgccagccugagaagccugguggccagcagcggcacccuggaguucaucaccgagggcuucaccuggaccggcgugacccagaacggcggcagcaacgccugcaagagaggccccggcagcggcuucuucagcagacugaacuggcugaccaagagcggcagcaccuaccccgugcugaacgugaccaugcccaacaacgacaacuucgacaagcuguacaucuggggcgugcaccaccccagcaccaaccaggagcagaccagccuguacgugcaggccagcggcagagugaccgugagcaccagaagaagcagacagaccaucauccccaacaucggcagcagacccugggugagaggccugagcagcagaaucagcaucuacuggaccaucgugaagcccggcgacgugcuggugaucaacagcaacggcaaccugaucgcccccagaggcuacuucaagaugagaaccggcaagagcagcaucaugagaagcgacgcccccaucgacaccugcaucagcgagugcaucacccccaacggcagcauccccaacgacaagcccuuccagaacgugaacaagaucaccuacggcgccugccccaaguacgugaagcagaacacccugaagcuggccaccggcaugagaaacgugcccgagaagcagaccagaggccuguucggcgccaucgccggcuucaucgagaacggcugggagggcaugaucgacggcugguacggcuucagacaccagaacagcgagggcaccggccaggccgccgaccugaagagcacccaggccgccaucgaccagaucaacggcaagcugaacagagugaucgagaagaccaacgagaaguuccaccagaucgagaaggaguucagcgagguggagggcagaauccaggaccuggagaaguacguggaggacaccaagaucgaccuguggagcuacaacgccgagcugcugguggcccuggagaaccagcacaccaucgaccugaccgacagcgagaugaacaagcuguucgagaagaccagaagacagcugagagagaacgccgaggacaugggcaacggcugcuucaagaucuaccacaagugcgacaacgccugcaucgagagcaucagaaacggcaccuacgaccacaacguguacagagacgaggcccugaacaacagauuccagaucaagggcguggagcugaagagcggcuacaaggacuggauccuguggaucagcuucgccaucagcugcuuccugcugugcguggugcugcugggcuucaucaugugggccugccagagaggcaacaucagaugcaacaucugcaucuga

SEQ ID NO: 162397 - RNA, 1698 nt, Artificial Sequence
  derived and/or modified CDS sequence (opt4) from hemagglutinin__InfluenzaA__ACF41834
augaaggccaaccugcuggugcugcugugcgcccuggccgccgccgacgccgacaccaucugcaucggcuaccacgccaacaacagcaccgacaccguggacaccgugcuggagaagaacgugaccgugacccacagcgugaaccugcuggaggacagccacaacggcaagcugugcagacugaagggcaucgccccccugcagcugggcaagugcaacaucgccggcuggcugcugggcaaccccgagugcgacccccugcugcccgugagaagcuggagcuacaucguggagacccccaacagcgagaacggcaucugcuaccccggcgacuucaucgacuacgaggagcugagagagcagcugagcagcgugagcagcuucgagagauucgagaucuuccccaaggagagcagcuggcccaaccacaacaccaacggcgugaccgccgccugcagccacgagggcaagagcagcuucuacagaaaccugcuguggcugaccgagaaggagggcagcuaccccaaccugaagaacagcuacgugaacaagaagggcaaggaggugcuggugcuguggggcauccaccaccccagcaacagcaaggagcagcagaaccuguaccagaacgagaacgccuacgugagcguggugaccagcaacuacaacagaagauucacccccgagaucgccgagagacccaaggugagagaccaggccggcagaaugaacuacuacuggacccugcugaagcccggcgacaccaucaucuucgaggccaacggcaaccugaucgcccccauguacgccuucgcccugagcagaggcuucggcagcggcaucaucaccagcaacgccagcaugcacgagugcaacaccaagugccagaccccccugggcgccaucaacagcagccugcccuaccagaacauccaccccgugaccaucggcgagugccccaaguacgugagaagcgccaagcugagaauggugaccggccugagaaacauccccagcauccagagcagaggccuguucggcgccaucgccggcuucaucgagggcggcuggaccggcaugaucgacggcugguacggcuaccaccaccagaacgagcagggcagcggcuacgccgccgaccagaagagcacccagaacgccaucaacggcaucaccaacaaggugaacaccgugaucgagaagaugaacauccaguucaccgccgugggcaaggaguucaacaagcuggagaagagaauggagaaccugaacaagaagguggacgacggcuuccuggacaucuggaccuacaacgccgagcugcuggugcugcuggagaacgagagaacccuggacuuccacgacagcaacgugaagaaccuguacgagaaggugaagagccagcugaagaacaacgccaaggagaucggcaacggcugcuucgaguucuaccacaagugcgacaacgagugcauggagagcgugagaaacggcaccuacgacuaccccaaguacagcgaggagagcaagcugaacagagagaagguggacggcgugaagcuggagagcaugggcaucuaccagauccuggccaucuacagcaccguggccagcagccuggugcugcuggugagccugggcgccaucagcuucuggaugugcagcaacggcagccugcagugcagaaucugcaucuga

SEQ ID NO: 162398 - RNA, 1701 nt, Artificial Sequence
  derived and/or modified CDS sequence (opt4) from hemagglutinin__InfluenzaA__ACF41856
augaagaccaucaucgcccugagcuacauccugugccugguguucgcccagaagcugcccggcaacgacaacagcaccgccacccugugccugggccaccacgccgugcccaacggcacccuggugaagaccaucaccaacgaccagaucgaggugaccaacgccaccgagcuggugcagagcagcagcaccggcagaaucugcgacagcccccacagaauccuggacggcaagaacugcacccugaucgacgcccugcugggcgacccccacugcgacggcuuccagaacaaggagugggaccuguucguggagagaagcaaggccuacagcaacugcuaccccuacgacgugcccgacuacgccagccugagaagccugguggccagcagcggcacccuggaguucaucaacgaggacuucaacuggaccggcguggcccaggacggcggcagcuacgccugcaagagaggcagcgugaacagcuucuucagcagacugaacuggcugcacaagagcgaguacaaguaccccgcccugaacgugaccaugcccaacaacggcaaguucgacaagcuguacaucuggggcgugcaccaccccagcaccgacagagaccagaccagccuguacgugagagccagcggcagagugaccgugagcaccaagagaagccagcagaccgugacccccaacaucggcagcagacccugggugagaggccagagcagcagaaucagcaucuacuggaccaucgugaagcccggcgacauccugcugaucaacagcaccggcaaccugaucgcccccagaggcuacuucaagaucagaaacggcaagagcagcaucaugagaagcgacgcccccaucggcaccugcagcagcgagugcaucacccccaacggcagcauccccaacgacaagcccuuccagaacgugaacagaaucaccuacggcgccugccccagauacgugaagcagaacacccugaagcuggccaccggcaugagaaacgugcccgagaagcagaccagaggcaucuucggcgccaucgccggcuucaucgagaacggcugggagggcaugguggacggcugguacggcuucagacaccagaacagcgagggcaccggccaggccgccgaccugaagagcacccaggccgccaucgaccagaucaacggcaagcugaacagacugaucgagaagaccaacgagaaguuccaccagaucgagaaggaguucagcgagguggagggcagaauccaggaccuggagaaguacguggaggacaccaagaucgaccuguggagcuacaacgccgagcugcugguggcccuggagaaccagcacaccaucgaccugaccgacagcgagaugaacaagcuguucgagaagaccagaaagcagcugagagagaacgccgaggacaugggcaacggcugcuucaagaucuaccacaagugcgacaacgccugcaucggcagcaucagaaacggcaccuacgaccacgacguguacagagacgaggcccugaacaacagauuccagaucaagggcguggagcugaagagcggcuacaaggacuggauccuguggaucagcuucgccaucagcugcuuccugcugugcguggugcugcugggcuucaucaugugggccugccagaagggcaacaucagaugcaacaucugcaucuga

SEQ ID NO: 162399 - RNA, 1698 nt, Artificial Sequence
  derived and/or modified CDS sequence (opt4) from hemagglutinin__InfluenzaA__ACF41867
augaaggccaagcugcuggugcugcugugcaccuucaccgccaccuacgccgacaccaucugcaucggcuaccacgccaacaacagcaccgacaccguggacaccgugcuggagaagaacgugaccgugacccacagcgugaaccugcuggaggacagccacaacggcaagcugugccugcugaagggcaucgccccccugcagcugggcaacugcagcguggccggcuggauccugggcaaccccgagugcgagagccugaucagcaaggagagcuggagcuacaucguggagacccccaaccccgagaacggcaccugcuaccccggcuacuucgccgacuacgaggagcugagagagcagcugagcagcgugagcagcuucgagagauucgagaucuuccccaaggagagcagcuggcccaaccacaccgugaccggcgugaccgccagcugcagccacaacggcaagagcagcuucuacagaaaccugcuguggcugaccgagaagaacggccuguaccccaaccugagcaacagcuacgugaacaacaaggagaaggaggugcuggugcuguggggcgugcaccaccccagcaacaucagagaccagagagccaucuaccacaccgagaacgccuacgugagcguggugagcagccacuacagcagaagauucacccccgagaucgccaagagacccaaggugagaggccaggagggcagaaucaacuacuacuggacccugcuggagcccggcgacaccaucaucuucgaggccaacggcaaccugaucgcccccugguacgccuucgcccugagcagaggcuucggcagcggcaucaucaccagcaacgcccccaugaacgagugcgacgccaagugccagaccccccagggcgccaucaacagcagccugcccuuccagaacgugcaccccgugaccaucggcgagugccccaaguacgugagaagcaccaagcugagaauggugaccggccugagaaacauccccagcauccagagcagaggccuguucggcgccaucgccggcuucaucgagggcggcuggaccggcaugauggacggcugguacggcuaccaccaccagaacgagcagggcagcggcuacgccgccgaccagaagagcacccagaacgccaucaacggcaucaccaacaaggugaacagcgugaucgagaagaugaacacccaguucaccgccgugggcaaggaguucaacaagcuggagagaagaauggagaaccugaacaagaagguggacgacggcuuccuggacaucuggaccuacaacgccgagcugcuggugcugcuggagaacgagagaacccuggacuuccacgacagcaacgugaagaaccuguacgagaaggugaagagccagcugaagaacaacgccaaggagaucggcaacggcugcuucgaguucuaccacaagugcaacaacgagugcauggagagcgugaagaacggcaccuacgacuaccccaaguacagcgaggagagcaagcugaacagagagaagaucgacggcgugaagcuggagagcaugggcguguaccagauccuggccaucuacagcaccguggccagcagccuggugcugcuggugagccugggcgccaucagcuucuggaugugcagcaacggcagccugcagugcagaaucugcaucuga

SEQ ID NO: 162400 - RNA, 1698 nt, Artificial Sequence; identical to SEQ ID NO: 162175
  derived and/or modified CDS sequence (opt4) from hemagglutinin__InfluenzaA__ACF41878

SEQ ID NO: 162401 - RNA, 1701 nt, Artificial Sequence
  derived and/or modified CDS sequence (opt4) from hemagglutinin__InfluenzaA__ACF41922
augaaggccaagcugcuggugcugcugugcgccuucaccgccaccuacgccgacaccaucugcaucggcuaccacgccaacaacagcaccgacaccguggacaccgugcuggagaagaacgugaccgugacccacagcgugaaccugcuggaggacagccacaacggcaagcugugcagacugaagggcaucgccccccugcagcugggcaacugcagcguggccggcuggauccugggcaaccccaagugcgagagccuguucagcaaggagagcuggagcuacaucgccgagacccccaaccccgagaacggcaccugcuaccccggcuacuucgccgacuacgaggagcugagagagcagcugagcagcgugagcagcuucgagagauucgagaucuuccccaaggagagcagcuggcccaaccacaccgugaccaagggcgugaccgccagcugcagccacaacggcaagagcagcuucuacagaaaccugcuguggcugaccgagaagaacggccuguaccccaaccugagcaagagcuacgugaacaacaaggagaaggaggugcuggugcuguggggcgugcaccaccccagcaacaucagagaccagagagccaucuaccacaccgagaacgccuacgugagcguggugagcagccacuacagcagaagauucacccccgagaucgccaagagacccaaggugagagaccaggagggcagaaucaacuacuacuggacccugcuggagcccggcgacaccaucaucuucgaggccaacggcaaccugaucgcccccugguacgccuucgcccugagcagaggcuucggcagcggcaucaucaccagcaacgccagcauggacgagugcgacgccaagugccagaccccccagggcgccaucaacagcagccugcccuuccagaacgugcaccccgugaccaucggcgagugccccaaguacgugagaagcaccaagcugagaauggugaccggccugagaaacauccccagcauccagagcagaggccuguucggcgccaucgccggcuucaucgagggcggcuggaccggcaugaucgacggcugguacggcuaccaccaccagaacgagcagggcagcggcuacgccgccgaccagaagagcacccagaacgccaucaacggcaucaccaacaaggugaacagcgugaucgagaagaugaacacccaguucaccgccgugggcaaggaguucaacaagcuggagagaagaauggagaaccugaacaagaagguggacgacggcuuccuggacaucuggaccuacaacgccgagcugcuggugcugcuggagaacggcagaacccuggacuuccacgacagcaacgugaagaaccuguacgagaaggugaagagccagcugaagaacaacgccaaggagaucggcaacggcugcuucgaguucuaccacaagugcaacaacgagugcauggagagcgugaagaacggcaccuacgacuaccccaaguacagcgaggagagcaagcugaacagaggcaagaucgacggcgugaagcuggagagcaugggcguguaccagauccuggccaucuacagcaccguggccagcagccuggugcugcuggugagccugggcgccaucagcuucuggaugugcagcaacggcagccugcagugcagaaucugcaucuga

SEQ ID NO: 162402 - RNA, 1689 nt, Artificial Sequence
  derived and/or modified CDS sequence (opt4) from hemagglutinin__InfluenzaA__ACF54389
auggccaucaucuaccugauccugcuguucgccaccgugagaggcgaccagaucugcaucggcuaccacgccaacaacagcaccgagaagguggacaccauccuggagagaaacgugaccgugacccacgccaaggacauccuggagaagacccacaacggcaagcugugcaagcugaacggcauccccccccuggagcugggcgacugcagcaucgccggcuggcugcugggcaaccccgagugcgacagacugcugagagugcccgaguggagcuacaucauggagaaggagaaccccagauacagccugugcuaccccggcagccugaacgacuacgaggagcugaagcaccugcugagcagcgugaagcacuucgagaaggugagaauccugcccaaggacagauggacccagcacaccaccaccggcggcagcaaggccugcgccgugagcggcaagcccagcuucuucagaaacaugguguggcugaccaagaagggcaccaacuaccccguggccaagggcagcuacaacaacaccagcggcgagcagaugcugaucaucuggggcgugcaccaccccaucgacgaggccgagcagagagcccuguaccaggaggugggcaccuacgugagcgccagcaccagcacccugaacaagagaagcauccccgagaucgccgccagacccgaggugaacggccugggcagcagaauggaguucagcuggacccugcuggacgugugggacaccaucaacuucgagagcaccggcaaccugguggcccccgaguacggcuucaagaucagcaagagaggcagcagcggcaucaugaagaccgagggcacccugggcaacugcgagaccaagugccagaccccccugggcgccaucaacaccacccugcccuuccacaacgugcacccccugaccaucggcgagugccccaaguacgugaagagcgagaagcuggugcuggccaccggccugagaaacgugccccagaucgagagcagaggccuguucggcgccaucgccggcuucaucgagggcggcuggcagggcaugguggacggcugguacggcuaccaccacagcaacgagcagggcagcggcuacgccgccgacaaggagagcacccagaaggccuucgacggcaucaccaacaaggugaacagcgugaucgagaagaugaacacccaguucgaggccgugggcaaggaguucaacaaccuggagaagagacuggagaaccugaacaagaagauggaggacggcuuccuggacguguggaccuacaacgccgagcugcuggugcugauggagaacgagagaacccuggacuuccacgacagcaacgugaagaaccuguacgagaaggugagaaugcagcugagagacaacgugaaggagcugggcaacggcugcuucgaguucuaccacaagugcgacgacgagugcaugaacagcgugaagaacggcaccuacgacuaccccaaguacgaggaggagagcaagcugaagagaaacgagaucaagggcgugaagcugagcagcaugggcguguaccagauccuggccaucuacgccaccguggccggcagccugagccuggccaucaugguggccggcaucagcuucuggaugugcagcaacggcagccugcagugcagaaucugcaucuga

SEQ ID NO: 162403 - RNA, 1701 nt, Artificial Sequence; identical to SEQ ID NO: 162376
  derived and/or modified CDS sequence (opt4) from hemagglutinin__InfluenzaA__ACF54400

SEQ ID NO: 162404 - RNA, 1701 nt, Artificial Sequence; identical to SEQ ID NO: 162378
  derived and/or modified CDS sequence (opt4) from hemagglutinin__InfluenzaA__ACF54411

SEQ ID NO: 162405 - RNA, 1701 nt, Artificial Sequence; identical to SEQ ID NO: 162378
  derived and/or modified CDS sequence (opt4) from hemagglutinin__InfluenzaA__ACF54422

SEQ ID NO: 162406 - RNA, 1701 nt, Artificial Sequence; identical to SEQ ID NO: 162389
  derived and/or modified CDS sequence (opt4) from hemagglutinin__InfluenzaA__ACF54433

SEQ ID NO: 162407 - RNA, 1701 nt, Artificial Sequence; identical to SEQ ID NO: 162378
  derived and/or modified CDS sequence (opt4) from hemagglutinin__InfluenzaA__ACF54444

SEQ ID NO: 162408 - RNA, 1701 nt, Artificial Sequence; identical to SEQ ID NO: 162396
  derived and/or modified CDS sequence (opt4) from hemagglutinin__InfluenzaA__ACF54466

SEQ ID NO: 162409 - RNA, 1689 nt, Artificial Sequence
  derived and/or modified CDS sequence (opt4) from hemagglutinin__InfluenzaA__ACF54477
auggccaucaucuaccugauccugcuguucaccgccgugagaggcgaccagaucugcaucggcuaccacgccaacaacagcaccgagaagguggacaccauccuggagagaaacgugaccgugacccacgccaaggacauccuggagaagacccacaacggcaagcugugcaagcugaacggcauccccccccuggagcugggcgacugcagcaucgccggcuggcugcugggcaaccccgagugcgacagacugcugagcgugcccgaguggagcuacaucauggagaaggagaaccccagagacggccugugcuaccccggcagcuucaacgacuacgaggagcugaagcaccugcugagcagcgugaagcacuucgagaaggugaagauccugcccaaggacagauggacccagcacaccaccaccggcggcagcagagccugcgccgugagcggcaaccccagcuucuucagaaacaugguguggcugaccaagaagggcagcaacuaccccguggccaagggcagcuacaacaacaccagcggcgagcagaugcugaucaucuggggcgugcaccaccccaacgacgagaccgagcagagaacccuguaccagaacgugggcaccuacgugagcgugggcaccagcacccugaacaagagaagcacccccgacaucgccaccagacccaaggugaacggccugggcagcagaauggaguucagcuggacccugcuggacaugugggacaccaucaacuucgagagcaccggcaaccugaucgcccccgaguacggcuucaagaucagcaagagaggcagcagcggcaucaugaagaccgagggcacccuggagaacugcgagaccaagugccagaccccccugggcgccaucaacaccacccugcccuuccacaacgugcacccccugaccaucggcgagugccccaaguacgugaagagcgagaagcuggugcuggccaccggccugagaaacgugccccagaucgagagcagaggccuguucggcgccaucgccggcuucaucgagggcggcuggcagggcaugguggacggcugguacggcuaccaccacagcaacgaccagggcagcggcuacgccgccgacaaggagagcacccagaaggccuucgacggcaucaccaacaaggugaacagcgugaucgagaagaugaacacccaguucgaggccgugggcaaggaguucagcaaccuggagagaagacuggagaaccugaacaagaagauggaggacggcuuccuggacguguggaccuacaacgccgagcugcuggugcugauggagaacgagagaacccuggacuuccacgacagcaacgugaagaaccuguacgacaaggugagaaugcagcugagagacaacgugaaggagcugggcaacggcugcuucgaguucuaccacaagugcgacgacgagugcaugaacagcgugaagaacggcaccuacgacuaccccaaguacgaggaggagagcaagcugaacagaaacgagaucaagggcgugaagcugagcagcaugggcguguaccagauccuggccaucuacgccaccguggccggcagccugagccuggccaucaugauggccggcaucagcuucuggaugugcagcaacggcagccugcagugcagaaucugcaucuga

SEQ ID NO: 162410 - RNA, 1689 nt, Artificial Sequence
  derived and/or modified CDS sequence (opt4) from hemagglutinin__InfluenzaA__ACF54499
auggccaucaucuaccugauccugcuguucaccgccgugagaggcgaccagaucugcaucggcuaccacgccaacaacagcaccgagaccguggacaccauccuggagagaaacgugaccgugacccacgccaaggacauccuggagaagacccacaacggcaagcugugcaagcugaacggcauccccccccuggagcugggcgacugcagcaucgccggcuggcugcugggcaaccccgagugcgacagacugcugagcgugcccgaguggagcuacaucauggagaaggagaaccccagagacggccugugcuaccccggcagcuucaacgacuacgaggagcugaagcaccugcugagcagcgugaagcacuucgagaaggugaagauccugcccaaggacagauggacccagcacaccaccaccggcggcagcagagccugcgccgugagcggcaaccccagcuucuucagaaacaugguguggcugaccaagaagggcagcaacuaccccguggccaagggcagcuacaacaacaccagcggcgagcagaugcugaucaucuggggcgugcaccaccccaacgacgagaccgagcagagaacccuguaccagaacgugggcaccuacgugagcgugggcaccagcacccugaacaagagaagcacccccgacaucgccaccagacccaaggugaacggccugggcagcagaauggaguucagcuggacccugcuggacaugugggacaccaucaacuucgagagcaccggcaaccugaucgcccccgaguacggcuucaagaucagcaagagaggcagcagcggcaucaugaagaccgagggcacccuggagaacugcgagaccaagugccagaccccccugggcgccaucaacaccacccugcccuuccacaacgugcacccccugaccaucggcgagugccccaaguacgugaagagcgagaagcuggugcuggccaccggccugagaaacgugccccagaucgagagcagaggccuguucggcgccaucgccggcuucaucgagggcggcuggcagggcaugguggacggcugguacggcuaccaccacagcaacgaccagggcagcggcuacgccgccgacaaggagagcacccagaaggccuucgacggcaucaccaacaaggugaacagcgugaucgagaagaugaacacccaguucgaggccgugggcaaggaguucagcaaccuggagagaagacuggagaaccugaacaagaagauggaggacggcuuccuggacguguggaccuacaacgccgagcugcuggugcugauggagaacgagagaacccuggacuuccacgacagcaacgugaagaaccuguacgacaaggugagaaugcagcugagagacaacgugaaggagcugggcaacggcugcuucgaguucuaccacaagugcgacgacgagugcaugaacagcgugaagaacggcaccuacgacuaccccaaguacgaggaggagagcaagcugaacagaaacgagaucaagggcgugaagcugagcagcaugggcguguaccagauccuggccaucuacgccaccguggccggcagccugagccuggccaucaugauggccggcaucagcuucuggaugugcagcaacggcagccugcagugcagaaucugcaucuga

SEQ ID NO: 162411 - RNA, 1689 nt, Artificial Sequence; identical to SEQ ID NO: 162410
  derived and/or modified CDS sequence (opt4) from hemagglutinin__InfluenzaA__ACF54510

SEQ ID NO: 162412 - RNA, 1689 nt, Artificial Sequence; identical to SEQ ID NO: 162410
  derived and/or modified CDS sequence (opt4) from hemagglutinin__InfluenzaA__ACF54521

SEQ ID NO: 162413 - RNA, 1701 nt, Artificial Sequence
  derived and/or modified CDS sequence (opt4) from hemagglutinin__InfluenzaA__ACF54532
augaagaccaucaucgcccugagcuacauccugugccugguguucgcccagaagcugcccggcaacgacaacagcaccgccacccugugccugggccaccacgccgugcccaacggcaccaucgugaagaccaucaccaacgaccagaucgaggugaccaacgccaccgagcuggugcagagcagcagcaccggcgagaucugcgacagcccccaccagauccuggacggcgagaacugcacccugaucgacgcccugcugggcgacccccagugcgacggcuuccagaacaagaagugggaccuguucguggagagaagcaaggccuacagcaacugcuaccccuacgacgugcccgacuacgccagccugagaagccugguggccagcagcggcacccuggaguucaacaacgagagcuucaacuggaccggcgugacccagaacggcaccagcagcgccugcaucagaagaagcaacaacagcuucuucagcagacugaacuggcugacccaccugaaguucaaguaccccgcccugaacgugaccaugcccaacaacgagaaguucgacaagcuguacaucuggggcgugcaccaccccggcaccgacaacgaccagaucuuccuguacgcccaggccagcggcagaaucaccgugagcaccaagagaagccagcagaccgugauccccaacaucggcagcagacccagagugagaaacauccccagcagaaucagcaucuacuggaccaucgugaagcccggcgacauccugcugaucaacagcaccggcaaccugaucgcccccagaggcuacuucaagaucagaagcggcaagagcagcaucaugagaagcgacgcccccaucggcaagugcaacagcgagugcaucacccccaacggcagcauccccaacgacaagcccuuccagaacgugaacagaaucaccuacggcgccugccccagauacgugaagcagaacacccugaagcuggccaccggcaugagaaacgugcccgagaagcagaccagaggcaucuucggcgccaucgccggcuucaucgagaacggcugggagggcaugguggacggcugguacggcuucagacaccagaacagcgagggcaucggccaggccgccgaccugaagagcacccaggccgccaucgaccagaucaacggcaagcugaacagacugaucggcaagaccaacgagaaguuccaccagaucgagaaggaguucagcgagguggagggcagaauccaggaccuggagaaguacguggaggacaccaagaucgaccuguggagcuacaacgccgagcugcugguggcccuggagaaccagcacaccaucgaccugaccgacagcgagaugaacaagcuguucgagaagaccaagaagcagcugagagagaacgccgaggacaugggcaacggcugcuucaagaucuaccacaagugcgacaacgccugcaucggcagcaucagaaacggcaccuacgaccacgacguguacagagacgaggcccugaacaacagauuccagaucaagggcguggagcugaccagcggcuacaaggacuggauccuguggaucagcuucgccaucagcugcuuccugcugugcguggcccugcugggcuucaucaugugggccugccagaagggcaacaucagaugcaacaucugcaucuga

SEQ ID NO: 162414 - RNA, 1701 nt, Artificial Sequence
  derived and/or modified CDS sequence (opt4) from hemagglutinin__InfluenzaA__ACF54543
augaagaccaucaucgcccugagcuacauccugugccugguguucgcccagaagcugcccggcaacgacaacagcaccgccacccugugccugggccaccacgccgugcccaacggcaccaucgugaagaccaucaccaacgaccagaucgaggugaccaacgccaccgagcuggugcagagcagcagcaccggcgagaucugcgacagcccccaccagauccuggacggcgagaacugcacccugaucgacgcccugcugggcgacccccagugcgacggcuuccagaacaagaagugggaccuguucguggagagaagcaaggccuacagcaacugcuaccccuacgacgugcccgacuacgugagccugagaagccugguggccagcagcggcacccuggaguucaacaacgagagcuucaacuggaccggcgugacccagaacggcaccagcagcgccugcaucagaagaagcaacaacagcuucuucagcagacugaacuggcugacccaccugaaguucaaguaccccgcccugaacgugaccaugcccaacaacgagaacuucgacaagcuguacaucuggggcgugcaccaccccggcaccgacaacgaccagaucuuccuguacgcccaggccagcggcagaaucaccgugagcaccaagagaagccagcagaccgugauccccaacaucggcagcagacccagagugagaaacauccccagcagaaucagcaucuacuggaccaucgugaagcccggcgacauccugcugaucaacagcaccggcaaccugaucgcccccagaggcuacuucaagaucagaagcggcaagagcagcaucaugagaagcgacgcccccaucggcaagugcaacagcgagugcaucacccccaacggcagcauccccaacgacaagcccuuccagaacgugaacagaaucaccuacggcgccugccccagauacgugaagcagaacacccugaagcuggccaccggcaugagaaacgugcccgagaagcagaccagaggcaucuucggcgccaucgccggcuucaucgagaacggcugggagggcaugguggacggcugguacggcuucagacaccagaacagcgagggcaucggccaggccgccgaccugaagagcacccaggccgccaucgaccagaucaacggcaagcugaacagacugaucggcaagaccaacgagaaguuccaccagaucgagaaggaguucagcgagguggagggcagaauccaggaccuggagaaguacguggaggacaccaagaucgaccuguggagcuacaacgccgagcugcugguggcccuggagaaccagcacaccaucgaccugaccgacagcgagaugaacaagcuguucgagaagaccaagaagcagcugagagagaacgccgaggaccugggcaacggcugcuucaagaucuaccacaagugcgacaacgccugcaucggcagcaucagaaacggcaccuacgaccacgacguguacagagacgaggcccugaacaacagauuccagaucaagggcguggagcugaagagcggcuacaaggacuggauccuguggaucagcuucgccaucagcugcuuccugcugugcguggcccugcugggcuucaucaugugggccugccagaagggcaacaucagaugcaacaucugcaucuga

SEQ ID NO: 162415 - RNA, 1701 nt, Artificial Sequence
  derived and/or modified CDS sequence (opt4) from hemagglutinin__InfluenzaA__ACF54565
augaagaccaucaucgcccugagcuacauccugugccugguguucagccagaagcugcccggcaacgacaacagcaccgccacccugugccugggccaccacgccgugcccaacggcaccaucgugaagaccaucaccaacgaccagaucgaggugaccaacgccaccgagcuggugcagagcagcagcaccggcggcaucugcgacagcccccaccagauccuggacggcgagaacugcacccugaucgacgcccugcugggcgacccccagugcgacggcuuccagaacaagaagugggaccuguucguggagagaagcaaggccuacagcaacugcuaccccuacgacgugcccgacuacgccagccugagaagccugguggccagcagcggcacccuggaguucaacaacgagagcuucaacugggccggcgugacccagaacggcaccagcagcgccugcaagagaagaagcaacaagagcuucuucagcagacugaacuggcugacccaccugaaguacaaguaccccgcccugaacgugaccaugcccaacaacgagaaguucgacaagcuguacaucuggggcgugcaccaccccgugaccgacagcgaccagaucagccuguacgcccaggccagcggcagaaucaccgugagcaccaagagaagccagcagaccgugauccccaacaucggcuacagacccagagugagagacaucagcagcagaaucagcaucuacuggaccaucgugaagcccggcgacauccugcugaucaacagcaccggcaaccugaucgcccccagaggcuacuucaagaucagaagcggcaagagcagcaucaugagaagcgacgcccccaucggcaagugcaacagcgagugcaucacccccaacggcagcauccccaacgacaagcccuuccagaacgugaacagaaucaccuacggcgccugccccagauacgugaagcagaacacccugaagcuggccaccggcaugagaaacgugcccgagaagcagaccagaggcaucuucggcgccaucgccggcuucaucgagaacggcugggagggcaugguggacggcugguacggcuucagacaccagaacagcgagggcaccggccaggccgccgaccugaagagcacccaggccgccaucaaccagaucaacggcaagcugaacagacugaucggcaagaccaacgagaaguuccaccagaucgagaaggaguucagcgagguggagggcagaauccaggaccuggagaaguacguggaggacaccaagaucgaccuguggagcuacaacgccgagcugcugguggcccuggagaaccagcacaccaucgaccugaccgacagcgagaugaacaagcuguucgagagaaccaagaagcagcugagagagaacgccgaggacaugggcaacggcugcuucaagaucuaccacaagugcgacaacgccugcaucgagagcaucagaaacggcaccuacgaccacgacguguacagagacgaggcccugaacaacagauuccagaucaagggcguggagcugaagagcggcuacaaggacuggauccuguggaucagcuucgccaucagcugcuuccugcugugcguggcccugcugggcuucaucaugugggccugccagaagggcaacaucagaugcaacaucugcaucuga

SEQ ID NO: 162416 - RNA, 1701 nt, Artificial Sequence
  derived and/or modified CDS sequence (opt4) from hemagglutinin__InfluenzaA__ACF54576
augaagaccaucaucgcccugagcuacauccugugccugguguucgcccagaagcugcccggcaacgacaacagcaccgccacccugugccugggccaccacgccgugcccaacggcaccaucgugaagaccaucaccaacgaccagaucgaggugaccaacgccaccgagcuggugcagagcagcagcaccggcggcaucugcgacagcccccaccagauccuggacggcgagaacugcacccugaucgacgcccugcugggcgacccccagugcgacggcuuccagaacaagaagugggaccuguucguggagagaagcaaggccuacagcaacugcuaccccuacgacgugcccgacuacgccagccugagaagccugguggccagcagcggcacccuggaguucaacgacgagagcuucaacuggaccggcgugacccagaacggcaccagcagcagcugcaagagaagaagcaacaacagcuucuucagcagacugaacuggcugacccagcugaaguucaaguaccccgcccugaacgugaccaugcccaacaacgagaaguucgacaagcuguacaucuggggcgugcaccaccccgugaccgacaacgaccagaucuuccuguacgcccaggccagcggcagaaucaccgugagcaccaagagaagccagcagaccgugauccccaacaucggcagcagacccagaaucagaaacauccccagcagaaucagcaucuacuggaccaucgugaagcccggcgacauccugcugaucaacagcaccggcaaccugaucgcccccagaggcuacuucaagaucagaagcggcaagagcagcaucaugagaagcgacgcccccaucggcaagugcaacagcgagugcaucacccccaacggcagcauccccaacgacaagcccuuccagaacgugaacagaaucaccuacggcgccugccccagauacgugaagcagaacacccugaagcuggccaccggcaugagaaacgugcccgagaagcagaccagaggcaucuucggcgccaucgccggcuucaucgagaacggcugggagggcaugguggacggcugguacggcuucagacaccagaacagcgagggcaucggccaggccgccgaccugaagagcacccaggccgccaucaaccagaucaacggcaagcugaacagacugaucggcaagaccaacgagaaguuccaccagaucgagaaggaguucagcgagguggagggcagaauccaggaccuggagaaguacguggaggacaccaagaucgaccuguggagcuacaacgccgagcugcugguggcccuggagaaccagcacaccaucgaccugaccgacagcgagaugaacaagcuguucgagagaaccaagaagcagcugagagagaacgccgaggacaugggcaacggcugcuucaagaucuaccacaagugcgacaacgccugcaucggcagcaucagaaacggcaccuacgaccacgacguguacagagacgaggcccugaacaacagauuccagaucaagggcguggagcugaagagcggcuacaaggacuggauccuguggaucagcuucgccaucagcugcuuccugcugugcguggcccugcugggcuucaucaugugggccugccagaagggcaacaucagaugcaacaucugcaucuga

SEQ ID NO: 162417 - RNA, 1698 nt, Artificial Sequence
  derived and/or modified CDS sequence (opt4) from hemagglutinin__InfluenzaA__ACF54598
augaaggccaagcugcuggugcugcuguacgccuucguggccaccgacgccgacaccaucugcaucggcuaccacgccaacaacagcaccgacaccguggacaccaucuucgagaagaacguggccgugacccacagcgugaaccugcuggaggacagacacaacggcaagcugugcaagcugaagggcaucgccccccugcagcugggcaagugcaacaucaucggcuggcugcugggcaaccccgagugcgacagccugcugcccgccagaagcuggagcuacaucguggagacccccaacagcgagaacggcgccugcuaccccggcgacuucaucgacuacgaggagcugagagagcagcugagcagcgugagcagccuggagagauucgagaucuuccccaaggagagcagcuggcccaaccacaccuucaacggcgugaccgccagcugcagccacagaggcaagagcagcuucuacagaaaccugcuguggcugaccaagaagggcgacagcuaccccaagcugaccaacagcuacgugaacaacaagggcaaggaggugcuggugcuguggggcgugcaccaccccagcagcagcgacgagcagcagagccuguacagcaacggcaacgccuacgugagcguggccagcagcaacuacaacagaagauucacccccgagaucgccgccagacccaaggugaaggaccagcacggcagaaugaacuacuacuggacccugcuggagcccggcgacaccaucaucuucgaggccaccggcaaccugaucgcccccugguacgccuucgcccugagcagaggcuucgagagcggcaucaucaccagcaacgccagcaugcacgagugcaacaccaagugccagaccccccagggcagcaucaacagcaaccugcccuuccagaacauccaccccgugaccaucggcgagugccccaaguacgugagaagcaccaagcugagaauggugaccggccugagaaacauccccagcauccaguacagaggccuguucggcgccaucgccggcuucaucgagggcggcuggaccggcaugaucgacggcugguacggcuaccaccaccagaacgagcagggcagcggcuacgccgccgaccagaagagcacccagaacgccaucaacggcaucaccaacaaggugaacagcaucaucgagaagaugaacacccaguucaccgccgugggcaaggaguucaacaaccuggagaagagaauggagaaccugaacaagaagguggacgacggcuuccuggacaucuggaccuacaacgccgagcugcuggugcugcuggagaacggcagaacccuggacuuccacgaccugaacgugaagaaccuguacgagaaggugaagagccagcugaagaacaacgccaaggagaucggcaacggcugcuucgaguucuaccacaagugcgacaacgagugcauggagagcgugagaaacggcaccuacgacuaccccaaguacagcgaggagagcaagcugaacagagagaagaucgacggcgugaagcuggagagcaugggcguguaccagauccuggccaucuacagcaccguggccagcagccuggugcugcuggugagccugggcgccaucagcuucuggaugugcagcaacggcagccugcagugcagaaucugcaucuga

SEQ ID NO: 162418 - RNA, 1704 nt, Artificial Sequence
  derived and/or modified CDS sequence (opt4) from hemagglutinin__InfluenzaA__ACG50699
auggagaagaucgugcugcugcuggccaucgugagccuggugaagagcgaccagaucugcaucggcuaccacgccaacaacagcaccgagcagguggacaccaucauggagaagaacgugaccgugacccacgcccaggacauccuggagaagacccacaacggcaagcugugcgaccuggacggcgugaagccccugauccugagagacugcagcguggccggcuggcugcugggcaaccccaugugcgacgaguucaucaacgugcccgaguggagcuacaugguggagaaggccaaccccgccaacgaccugugcuaccccggcaacuucaacgacuacgaggagcugaagcaccugcugagcagaaucaaccacuucgagaagauccagaucauccccaagagcagcuggagcgaccacgaggccagccugggcgugagcagcgccugccccuaccagggcagcagcagcuucuucagaaacgugguguggcugaucaagaagaacaacgccuaccccaccaucaagagaagcuacaacaacaccaaccaggaggaccugcuggugcuguggggcauccaccaccccaacgacgaggccgagcagaccagacuguaccagaaccccaccaccuacaucagcgugggcaccagcacccugaaccagagacugauccccaagaucgccaccagaagcaaggugaacggccagagcggcagaauggacuucuucuggaccauccugaagcccaacgacgccaucaacuucgagagcaacggcaacuucaucgcccccgaguacgccuacaagaucgugaagaagggcgacagcgccaucaugaagagcgagguggaguacggcaacugcaacaccaagugccagacccccaugggcgccaucaacagcagcaugcccuuccacaacauccacccccugaccaucggcgagugccccaaguacgugaagagcaacaagcuggugcuggccaccggccugagaaacagcccccagagagagagaagaagaaagagaggccuguucggcgccaucgccggcuucaucgagggcggcuggcagggcaugguggacggcugguacggcuaccaccacagcaacgagcagggcagcggcuacgccgccgacaaggagagcacccagaaggccaucgacggcgugaccaacaaggugaacagcaucaucgacaagaugaacacccaguucgaggccgugggcagagaguucaacaaccuggagagaagaaucgagaaccugaacaagaagauggaggacggcuuccuggacguguggaccuacaacgccgagcugcuggugcugauggagaacgagagaacccuggacuuccacgacagcaacgugaagaaccuguacgacaaggugagacugcagcugagagacaacgccaaggagcugggcaacggcugcuucgaguucuaccacaagugcgacaacgagugcauggagagcgugagaaacggcaccuacgacuacccccaguacagcgaggaggccagacugaagagagaggagaucagcggcgugaagcuggagagcaucggcaccuaccagauccugagcaucuacagcaccguggccagcagccuggcccuggccaucaugguggccggccugagccuguggaugugcagcaacggcagccugcagugcagaaucugcaucuga

SEQ ID NO: 162419 - RNA, 1701 nt, Artificial Sequence; identical to SEQ ID NO: 161988
  derived and/or modified CDS sequence (opt4) from hemagglutinin__InfluenzaA__ACG70142

SEQ ID NO: 162420 - RNA, 1701 nt, Artificial Sequence; identical to SEQ ID NO: 161988
  derived and/or modified CDS sequence (opt4) from hemagglutinin__InfluenzaA__ACG70153

SEQ ID NO: 162421 - RNA, 1701 nt, Artificial Sequence
  derived and/or modified CDS sequence (opt4) from hemagglutinin__InfluenzaA__ACG80410
augaagaccaucaucgcccugagcuacauccugugccugguguucgcccagaagcugcccggcaacgacaacagcaccgccacccugugccugggccaccacgccgugcccaacggcaccaucgugagaaccaucaccaacgaccagaucgaggugaccaacgccaccgagcuggugcagagcagcagcaccggcgagaucugcgacagcccccaccagauccuggacggcgagaacugcacccugaucgacgcccugcugggcgacccccagugcgacggcuuccagaacaagaagugggaccuguucguggagagaagcaaggccuacagcaacugcuaccccuacgacgugcccgacuacgccagccugagaagccugguggccagcagcggcacccuggaguucaacaacgagagcuucaacuggaccggcgugacccagaacggcaccagcagcgccugcaucagaagaagcaacaacagcuucuucagcagacugaacuggcugacccaccugagauucaaguaccccgcccugaacgugaccaugcccaacaacgagcaguucgacaagcuguacaucuggggcgugcaccaccccggcaccgacaacgaccagaucuuccuguacgcccaggccagcggcagaaucaccgugagcaccaagagaagccagcagaccgugauccccaacaucggcagcagacccagagugagaaacauccccagcagaaucagcaucuacuggaccaucgugaagcccggcgacauccugcugaucaacagcaccggcaaccugaucgcccccagaggcuacuucaagaucagaaacggcaagagcagcaucaugagaagcgacgcccccaucggcaagugcaacagcgagugcaucacccccaacggcagcauccccaacgacaagcccuuccagaacgugaacagaaucaccuacggcgccugccccagauacgugaagcagaacacccugaagcuggccaccggcaugagaaacgugcccgagaagcagaccagaggcaucuucggcgccaucgccggcuucaucgagaacggcugggagggcaugguggacggcugguacggcuucagacaccagaacagcgagggcagaggccaggccgccgaccugaagagcacccaggccgccaucgaccagaucaacggcaagcugaacagacugaucggcaagaccaacgagaaguuccaccagaucgagaaggaguucagcgagguggagggcagaauccaggaccuggagaaguacguggaggacaccaagaucgaccuguggagcuacaacgccgagcugcugguggcccuggagaaccagcacaccaucgaccugaccgacagcgagaugaacaagcuguucgagaagaccaagaagcagcugagagagaacgccgaggacaugggcaacggcugcuucaagaucuaccacaagugcgacaacgccugcaucggcagcaucagaaacggcaccuacgaccacgacguguacagagacgaggcccugaacaacagauuccagaucaagggcguggagcugaagagcggcuacaaggacuggauccuguggaucagcuucgccaucagcugcuuccugcugugcguggcccugcugggcuucaucaugugggccugccagaagggcaacaucagaugcaacaucugcaucuga

SEQ ID NO: 162422 - RNA, 1701 nt, Artificial Sequence
  derived and/or modified CDS sequence (opt4) from hemagglutinin__InfluenzaA__ACG80420
augcagaccaucaucgcccugagcuacauccugugccugguguucgcccagaagcugcccggcaacgacaacagcaccgccacccugugccugggccaccacgccgugcccaacggcaccaucgugagaaccaucaccaacgaccagaucgaggugaccaacgccaccgagcuggugcagagcagcagcaccggcgagaucugcgacagcccccaccagauccuggacggcgagaacugcacccugaucgacgcccugcugggcgacccccagugcgacggcuuccagaacaagaagugggaccuguucguggagagaagcaaggccuacagcaacugcuaccccuacgacgugcccgacuacgccagccugagaagccugguggccagcagcggcacccuggaguucaacaacgagagcuucaacuggaccggcgugacccagaacggcaccagcagcgccugcaucagaagaagcaacaacagcuucuucagcagacugaacuggcugacccaccugagauucaaguaccccgcccugaacgugaccaugcccaacaacgagcaguucgacaagcuguacaucuggggcgugcaccaccccggcaccgacaacgaccagaucuuccuguacgcccaggccagcggcagaaucaccgugagcaccaagagaagccagcagaccgugauccccaacaucggcagcagacccagagugagaaacauccccagcagaaucagcaucuacuggaccaucgugaagcccggcgacauccugcugaucaacagcaccggcaaccugaucgcccccagaggcuacuucaagaucagaaacggcaagagcagcaucaugagaagcgacgcccccaucggcaagugcaacagcgagugcaucacccccaacggcagcauccccaacgacaagcccuuccagaacgugaacagaaucaccuacggcgccugccccagauacgugaagcagaacacccugaagcuggccaccggcaugagaaacgugcccgagaagcagaccagaggcaucuucggcgccaucgccggcuucaucgagaacggcugggagggcaugguggacggcugguacggcuucagacaccagaacagcgagggcagaggccaggccgccgaccugaagagcacccaggccgccaucgaccagaucaacggcaagcugaacagacugaucggcaagaccaacgagaaguuccaccagaucgagaaggaguucagcgagguggagggcagaauccaggaccuggagaaguacguggaggacaccaagaucgaccuguggagcuacaacgccgagcugcugguggcccuggagaaccagcacaccaucgaccugaccgacagcgagaugaacaagcuguucgagaagaccaagaagcagcugagagagaacgccgaggacaugggcaacggcugcuucaagaucuaccacaagugcgacaacgccugcaucggcagcaucagaaacggcaccuacgaccacgacguguacagagacgaggcccugaacaacagauuccagaucaagggcguggagcugaagagcggcuacaaggacuggauccuguggaucagcuucgccaucagcugcuuccugcugugcguggcccugcugggcuucaucaugugggccugccagaagggcaacaucagaugcaacaucugcaucuga

SEQ ID NO: 162423 - RNA, 1701 nt, Artificial Sequence; identical to SEQ ID NO: 162421
  derived and/or modified CDS sequence (opt4) from hemagglutinin__InfluenzaA__ACG80426

SEQ ID NO: 162424 - RNA, 1701 nt, Artificial Sequence; identical to SEQ ID NO: 162421
  derived and/or modified CDS sequence (opt4) from hemagglutinin__InfluenzaA__ACG80430

SEQ ID NO: 162425 - RNA, 1701 nt, Artificial Sequence
  derived and/or modified CDS sequence (opt4) from hemagglutinin__InfluenzaA__ACG80436
augaagaccaucaucgcccugagcuacauccugugccugguguucgcccagaaguuccccggcaacgacaacagcaccgccacccugugccugggccaccacgccgugcccaacggcaccaucgugaagaccaucaccaacgaccagaucgaggugaccaacgccaccgagcuggugcagagcagcagcaccggcgagaucugcgacagcccccaccagauccuggacggcgagaacugcacccugaucgacgcccugcugggcgacccccagugcgacggcuuccagaacaagaagugggaccuguucguggagagaagcaaggccuacagcaacugcuaccccuacgacgugcccgacuacgccagccugagaagccugguggccagcagcggcacccuggaguucaacaacgagagcuucaacuggaccggcgugacccagaacggcaccagcagcgccugcaucagaagaagcaacaacagcuucuucagcagacugaacuggcugacccaccugagauucaaguaccccgcccugaacgugaccaugcccaacaacgagaacuucgacaagcuguacaucuggggcgugcaccaccccggcaccgacaacgaccagaucuuccuguacgcccaggccagcggcagaaucaccgugagcaccaagagaagccagcagaccgugauccccaacaucggcagcagacccagagugagaaacauccccagcagaaucagcaucuacuggaccaucgugaagcccggcgacauccugcugaucaacagcaccggcaaccugaucgcccccagaggcuacuucaagaucagaagcggcaagagcagcaucaugagaagcgacgcccccaucggcaagugcaacagcgagugcaucacccccaacggcagcauccccaacgacaagcccuuccagaacgugaacagaaucaccuacggcgccugccccagauacgugaagcagaacacccugaagcuggccaccggcaugagaaacgugcccgagaagcagaccagaggcaucuucggcgccaucgccggcuucaucgagaacggcugggagggcaugguggacggcugguacggcuucagacaccagaacagcgagggcaucggccaggccgccgaccugaagagcacccaggccgcccuggaccagaucaacggcaagcugaacagacugaucggcaagaccaacgagaaguuccaccagaucgagaaggaguucagcgagguggagggcagaauccaggaccuggagaaguacguggaggacaccaagaucgaccuguggagcuacaacgccgagcugcugguggcccuggagaaccagcacaccaucgaccugaccgacagcgagaugaacaagcuguucgagaagaccaagaagcagcugagagagaacgccgaggacaugggcaacggcugcuucaagaucuaccacaagugcgacaacgccugcaucggcagcaucagaaacggcaccuacgaccacaacguguacagagacgaggcccugaacaacagauuccagaucaagggcguggagcugaagagcggcuacaaggacuggauccuguggaucagcuucgccaucagcugcuuccugcugugcguggcccugcugggcuucaucaugugggccugccagaagggcaacaucagaugcaacaucugcaucuga

SEQ ID NO: 162426 - RNA, 1701 nt, Artificial Sequence
  derived and/or modified CDS sequence (opt4) from hemagglutinin__InfluenzaA__ACG80445
augaagaccaucaucgcccugagcuacauccugugccugguguucgcccagaagcugcccggcaacgacaacagcaccgccacccugugccugggccaccacgccgugcccaacggcaccaucgugagaaccaucaccaacgaccagaucgaggugaccaacgccaccgagcuggugcagagcagcagcaccggcgagaucugcgacagcccccaccagauccuggacggcgagaacugcacccugaucgacgcccugcugggcgacccccagugcgacggcuuccagaacaagaagugggaccuguucguggagagaagcaaggccuacagcaacugcuaccccuacgacgugcccgacuacgccagccugagaagccugguggccagcagcggcacccuggaguucaacaacgagagcuucaacuggaccggcgugacccagaacggcaccagcagcgccugcaucagaagaagcaacaacagcuucuucagcagacugaacuggcugacccaccugagauucaaguaccccgcccugaacgugaccaugcccaacaacgagcaguucgacaagcuguacaucuggggcgugcaccaccccggcaccgacaacgaccagaucuuccuguacgcccaggccagcggcagaaucaccgugagcaccaagagaagccagcagaccgugauccccaacaucggcagcagacccagagugagaaacauccccagcagaaucagcaucuacuggaccaucgugaagcccggcgacauccugcugaucaacagcaccggcaaccugaucgcccccagaggcuacuucaagaucagaaacggcaagagcagcaucaugagaagcgacgcccccaucggcaagugcaacagcgagugcaucacccccaacggcagcauccccaacgacaagcccuuccagaacgugaacagaaucaccuacggcgccugccccagauacgugaagcagaacacccugaagcuggccaccggcaugagaaacgugcccgagaagcagaccagaggcaucuucggcgccaucgccggcuucaucgagaacggcugggagggcaugguggacggcugguacggcuucagacaccagaacagcgagggcagaggccaggccgccgaccugaagagcacccaggccgccaucgaccagaucaacggcaagcugaacagacugaucggcaagaccaacgagaaguuccaccagaucgagaaggaguucagcgagguggagggcagaauccaggaccuggagaaguacguggaggacaccaagaucgaccuguggagcuacaacgccgagcugcugguggcccuggagaaccagcacaccaucgaccugaccgacagcgagaugaacaagcuguucgagaagaccaagaaccagcugagagagaacgccgaggacaugggcaacggcugcuucaagaucuaccacaagugcgacaacgccugcaucggcagcaucagaaacggcaccuacgaccacgacguguacagagacgaggcccugaacaacagauuccagaucaagggcguggagcugaagagcggcuacaaggacuggauccuguggaucagcuucgccaucagcugcuuccugcugugcguggcccugcugggcuucaucaugugggccugccagaagggcaacaucagaugcaacaucugcaucuga

SEQ ID NO: 162427 - RNA, 1701 nt, Artificial Sequence; identical to SEQ ID NO: 162421
  derived and/or modified CDS sequence (opt4) from hemagglutinin__InfluenzaA__ACG80454

SEQ ID NO: 162428 - RNA, 1701 nt, Artificial Sequence; identical to SEQ ID NO: 162421
  derived and/or modified CDS sequence (opt4) from hemagglutinin__InfluenzaA__ACG80463

SEQ ID NO: 162429 - RNA, 1701 nt, Artificial Sequence
  derived and/or modified CDS sequence (opt4) from hemagglutinin__InfluenzaA__ACG80472
augaagaccaucaucgcccugagcuacauccugugccugguguucgcccagaagcugcccggcaacgacaacagcaccgccacccugugccugggccaccacgccgugcccaacggcaccaucgugagaaccaucaccaacgaccagaucgaggugaccaacgccaccgagcuggugcagagcagcagcaccggcgagaucugcgacagcccccaccagauccuggacggcgagaacugcacccugaucgacgcccugcugggcgacccccagugcgacggcuuccagaacaagaagugggaccuguucguggagagaagcaaggccuacagcaacugcuaccccuacgacgugcccgacuacgccagccugagaagccugguggccagcagcggcacccuggaguucaacaacgagagcuucaacuggaccggcgugacccagaacggcaccagcagcgccugcaucagaagaagcaacaacagcuucuucagcagacugaacuggcugacccaccugagauucaaguaccccgcccugaacgugaccaugcccaacaacgagcaguucgacaagcuguacaucuggggcgugcaccaccccggcaccgacaacgaccagaucuuccuguacgcccaggccagcggcagaaucaccgugagcaccaagagaagccagcagaccgugauccccaacaucggcagcagacccagagugagaaacauccccagcagaaucagcaucuacuggaccaucgugaagcccggcgacauccugcugaucaacagcaccggcaaccugaucgcccccagaggcuacuucaagaucagaagcggcaagagcagcaucaugagaagcgacgcccccaucggcaagugcaacagcgagugcaucacccccaacggcagcauccccaacgacaagcccuuccagaacgugaacagaaucaccuacggcgccugccccagauacgugaagcagaacacccugaagcuggccaccggcaugagaaacgugcccgagaagcagaccagaggcaucuucggcgccaucgccggcuucaucgagaacggcugggagggcaugguggacggcugguacggcuucagacaccagaacagcgagggcaucggccaggccgccgaccugaagagcacccaggccgcccuggaccagaucaacggcaagcugaacagacugaucggcaagaccaacgagaaguuccaccagaucgagaaggaguucagcgagguggagggcagaauccaggaccuggagaaguacguggaggacaccaagaucgaccuguggagcuacaacgccgagcugcugguggcccuggagaaccagcacaccaucgaccugaccgacagcgagaugaacaagcuguucgagaagaccaagaagcagcugagagagaacgccgaggacaugggcaacggcugcuucaagaucuaccacaagugcgacaacgccugcaucggcagcaucagaaacggcaccuacgaccacaacguguacagagacgaggcccugaacaacagauuccagaucaagggcguggagcugaagagcggcuacaaggacuggauccuguggaucagcuucgccaucagcugcuuccugcugugcguggcccugcugggcuucaucaugugggccugccagaagggcaacaucagaugcaacaucugcaucuga

SEQ ID NO: 162430 - RNA, 1701 nt, Artificial Sequence
  derived and/or modified CDS sequence (opt4) from hemagglutinin__InfluenzaA__ACH69558
augaagaccaucaucgcccugagcuacauccugugccugguguucgcccagaagcugcccggcaacgacaacagcaccgccacccugugccugggccaccacgccgugcccaacggcaccaucgugaagaccaucaccaacgaccagaucgaggugaccaacgccaccgagcuggugcagagcagcagcaccggcggcaucugcaacagcccccaccagauccuggacggcgagaacugcacccugaucgacgcccugcugggcgacccccagugcgacggcuuccagaacaagaagugggaccuguucguggagagaagcaaggccuacagcaacugcuaccccuacgacgugcccgacuacgccagccugagaagccugguggccagcagcggcacccuggaguucaacaacgagagcuucaacuggaccggcgugacccagaacggcaccagcagcgccugcaagagaagaagcaacaacagcuucuucagcagacugaacuggcugacccaccugagauucaaguaccccgcccugaacgugaccaugcccaacaacgagaaguucgacaagcuguacaucuggggcgugcaccaccccggcaccgacaacgaccagaucuuccuguacgcccaggccagcggcagaaucaccgugagcaccaagagaagccagcagaccgugauccccaacaucggcagcagacccagagugagaaacauccccagcagaaucagcaucuacuggaccaucgugaagcccggcgacauccugcugaucaacagcaccggcaaccugaucgcccccagaggcuacuucaagaucagaagcggcaagagcagcaucaugagaagcgacgcccccaucggcaagugcaacagcgagugcaucacccccaacggcagcauccccaacgacaagcccuuccagaacgugaacagaaucaccuacggcgccugccccagauacgugaagcagaacacccugaagcuggccaccggcaugagaaacgugcccgagaagcagaccagaggcaucuucggcgccaucgccggcuucaucgagaacggcugggagggcaugguggacggcugguacggcuucagacaccagaacagcgagggcaucggccaggccgccgaccugaagagcacccaggccgccaucaaccagaucaacggcaagcugaacagacugaucggcaagaccaacgagaaguuccaccagaucgagaaggaguucagcgagguggagggcagaauccaggaccuggagaaguacguggaggacaccaagaucgaccuguggagcuacaacgccgagcugcugguggcccuggagaaccagcacaccaucgaccugaccgacagcgagaugaacaagcuguucgagagaaccaagaagcagcugagagagaacgccgaggacaugggcaacggcugcuucaagaucuaccacaagugcgacaacgccugcaucggcagcaucagaaacggcaccuacgaccacgacguguacagagacgaggcccugaacaacagauuccagaucaagggcguggagcugaagagcggcuacaaggacuggauccuguggaucagcuucgccaucagcugcuuccugcugugcguggcccugcugggcuucaucaugugggccugccagaagggcaacaucagaugcaacaucugcaucuga

SEQ ID NO: 162431 - RNA, 1701 nt, Artificial Sequence
  derived and/or modified CDS sequence (opt4) from hemagglutinin__InfluenzaA__ACH69569
augaagaccaucaucgcccugagcuacauccugugccugguguucgcccagaagcugcccggcaacgacaacagcaccgccacccugugccugggccaccacgccgugcccaacggcaccaucgugaagaccaucaccaacgaccagaucgaggugaccaacgccaccgagcuggugcagagcagcagcaccggcggcaucugcaacagcccccaccagauccuggacggcgagaacugcacccugaucgacgcccugcugggcgacccccagugcgacggcuuccagaacaagaagugggaccuguucguggagagaagcaaggccuacagcaacugcuaccccuacgacgugcccgacuacgccagccugagaagccugguggccagcagcggcacccuggaguucaacaacgagagcuucaacuggaccggcgugacccagaacggcaccagcagcgccugcaagagaagaagcaacaacagcuucuucagcagacugaacuggcugacccaccugaaguucaaguaccccgcccugaacgugaccaugcccaacaacgagaaguucgacaagcuguacaucuggggcgugcaccaccccggcaccgacaacgaccagaucuuccuguacgcccaggccagcggcagaaucaccgugagcaccaagagaagccagcagaccgugauccccaacaucggcagcagacccagagugagaaacauccccagcagaaucagcaucuacuggaccaucgugaagcccggcgacauccugcugaucaacagcaccggcaaccugaucgcccccagaggcuacuucaagaucagaagcggcaagagcagcaucaugagaagcgacgcccccaucggcaagugcaacagcgagugcaucacccccaacggcagcauccccaacgacaagcccuuccagaacgugaacagaaucaccuacggcgccugccccagauacgugaagcagaacagccugaagcuggccaccggcaugagaaacgugcccgagaagcagaccagaggcaucuucggcgccaucgccggcuucaucgagaacggcugggagggcaugguggacggcugguacggcuucagacaccagaacagcgagggcaucggccaggccgccgaccugaagagcacccaggccgccaucaaccagaucaacggcaagcugaacagacugaucggcaagaccaacgagaaguuccaccagaucgagaaggaguucagcgagguggagggcagaauccaggaccuggagaaguacguggaggacaccaagaucgaccuguggagcuacaacgccgagcugcugguggcccuggagaaccagcacaccaucgaccugaccgacagcgagaugaacaagcuguucgagagaaccaagaagcagcugagagagaacgccgaggacaugggcaacggcugcuucaagaucuaccacaagugcgacaacgccugcaucggcagcaucagaaacggcaccuacgaccacgacguguacagagacgaggcccugaacaacagauuccagaucaagggcguggagcugaagagcggcuacaaggacuggauccuguggaucagcuucgccaucagcugcuuccugcugugcguggcccugcugggcuucaucaugugggccugccagaagggcaacaucagaugcaacaucugcaucuga

SEQ ID NO: 162432 - RNA, 1701 nt, Artificial Sequence
  derived and/or modified CDS sequence (opt4) from hemagglutinin__InfluenzaA__ACH69580
augaagaccaucaucgcccugagcuacauccugugccugguguucgcccagaagcugcccggcaacgacaacagcaccgccacccugugccugggccaccacgccgugcccaacggcaccaucgugaagaccaucaccaacgaccagaucgaggugaccaacgccaccgagcuggugcagagcagcagcaccggcggcaucugcgacagcccccaccagauccuggacggcgagaacugcacccugaucgacgcccugcugggcgacccccagugcgacgacuuccagaacaagaagugggaccuguucguggagagaagcaaggccuacagcaacugcuaccccuacgacgugcccgacuacgccagccugagaagccugguggccagcagcggcacccuggaguucaacaacgagagcuucaacuggaccggcgugacccagaacggcaccagcagcgccugcaagagaagaagcaacaacagcuucuucagcagacugaacuggcugacccaccugaaguucaaguaccccgcccugaacgugaccaugcccaacaacgagaaguucgacaagcuguacaucuggggcgugcaccaccccggcaccgacaacgaccagaucuuccuguacgcccaggccagcggcagaaucaccgugagcaccaagagaagccagcagaccgugauccccaacaucggcagcagacccagagugagaaacauccccagcagaaucagcaucuacuggaccaucgugaagcccggcgacauccugcugaucaacagcaccggcaaccugaucgcccccagaggcuacuucaagaucagaagcggcaagagcagcaucaugagaagcgacgcccccaucggcaagugcaacagcgagugcaucacccccaacggcagcauccccaacgacaagcccuuccagaacgugaacagaaucaccuacggcgccugccccagauacgugaagcagaacacccugaagcuggccaccggcaugagaaacgugcccgagaagcagaccagaggcaucuucggcgccaucgccggcuucaucgagaacggcugggagggcaugguggacggcugguacggcuucagacaccagaacagcgagggcaucggccaggccgccgaccugaagagcacccaggccgccaucaaccagaucaacggcaagcugaacagacugaucggcaagaccaacgagaaguuccaccagaucgagaaggaguucagcgagguggagggcagaauccaggaccuggagaaguacguggaggacaccaagaucgaccuguggagcuacaacgccgagcugcugguggcccuggagaaccagcacaccaucgaccugaccgacagcgagaugaacaagcuguucgagagaaccaagaagcagcugagagagaacgccgaggacaugggcaacggcugcuucaagaucuaccacaagugcgacaacgccugcaucggcagcaucagaaacggcaccuacgaccacgacguguacagagacgaggcccugaacaacagauuccagaucaagggcguggagcugaagagcggcuacaaggacuggauccuguggaucagcuucgccaucagcugcuuccugcugugcguggcccugcugggcuucaucaugugggccugccagaagggcaacaucagaugcaacaucugcaucuga

SEQ ID NO: 162433 - RNA, 1701 nt, Artificial Sequence
  derived and/or modified CDS sequence (opt4) from hemagglutinin__InfluenzaA__ACH69591
augaagaccaucaucgcccugagcuacauccugugccuggccuucgcccagaagcugcccggcaacgacaacagcaccgccacccugugccugggccaccacgccgugcccaacggcacccuggugaagaccaucaccaacgaccagaucgaggugaccaacgccaccgagcuggugcagagcagcagcaccggcagaaucugcgacagcccccaccagauccuggacggcgagaacugcacccugaucgacgcccugcugggcgacccccacugcgacggcuuccagaacaaggagugggaccuguucguggagagaagcaaggccuacagcaacugcuaccccuacgacgugcccgacuacgccagccugagaagccugguggccagcagcggcacccuggaguucaacaacgagagcuucaacuggaccggcguggcccagaacggcaccagcagcgccugcaagagaagaagcaucaacagcuucuucagcagacugaacuggcugcaccagcugaaguacagauaccccgcccugaacgugaccaugcccaacaacgacaaguucgacaagcuguacaucuggggcgugcaccaccccagcaccgacagcgaccagaucagcguguacgcccaggccagcggcagagugaccgugagcaccaagagaagccagcagaccgugauccccaacaucggcagcagacccugggugagaggcaucagcagcagaaucagcaucuacuggaccaucgugaagcccggcgacauccugcugaucaacagcaccggcaaccugaucgcccccagaggcuacuucaagaucagaagcggcaagagcagcaucaugagaagcgacgcccccaucggcaagugcaacagcgagugcaucacccccaacggcagcauccccaacgacaagcccuuccagaacgugaacagaaucaccuacggcgccugccccagauacgugaagcagaacacccugaagcuggccaccggcaugagaaacgugcccgagaagcagaccagaggcaucuucggcgccaucgccggcuucaucgagaacggcugggagggcaugauggacggcugguacggcuucagacaccagaacagcgagggcaccggccaggccgccgaccugaagagcacccaggccgccaucaaccagaucaacggcaagcugaacaagcugaucgagaagaccaacgagaaguuccaccagaucgagaacgaguucagcgagguggagggcagaauccaggaccuggagaaguacguggaggacaccaagaucgaccuguggagcuacaacgccgagcugcugguggcccuggagaaccagcacaccaucgaccugaccgacagcgagaugaacaagcuguucgagagaaccagaaagcagcugagagagaacgccgaggacaugggcaacggcugcuucaagaucuaccacaagugcgacaacgccugcaucggcagcaucagaaacggcaccuacgaccacgacguguacagagacgaggcccugaacaacagauuccagaucaagggcguggagcugaagagcggcuacaaggacuggauccuguggaucagcuucgccaucagcugcuuccugcugugcguggugcugcugggcuucaucaugugggccugccagaagggcaacaucagaugcaacaucugcaucuga

SEQ ID NO: 162434 - RNA, 1701 nt, Artificial Sequence
  derived and/or modified CDS sequence (opt4) from hemagglutinin__InfluenzaA__ACH69602
augaagaccaucaucgcccugagcuacauccugugccuggccuucgcccagaagcugcccggcaacgacaacagcaccgccacccugugccugggccaccacgccgugcccaacggcacccuggugaagaccaucaccaacgaccagaucgaggugaccaacgccaccgagcuggugcagagcagcagcaccggcagaaucugcgacagcccccaccagauccuggacggcgagaacugcacccugaucgacgcccugcugggcgacccccacugcgacggcuuccagaacaaggagugggaccuguucguggagagaagcaaggccuacagcaacugcuaccccuacgacgugcccgacuacgccagccugagaagccugguggccagcagcggcacccuggaguucaacaacgagagcuucaacuggaccggcguggcccagaacggcaccagcagcgccugcaagagaagaagcaucaacagcuucuucagcagacugaacuggcugcaccagcugaaguacagauaccccgcccugaacgugaccaugcccaacaacgacaaguucgacaagcuguacaucuggggcgugcaccaccccagcaccgacagcgaccagaucagcguguacgcccaggccagcggcagagugaccgugagcaccaagagaagccagcagaccgugauccccaacaucggcagcagacccugggugagaggcaucagcagcagaaucagcaucuacuggaccaucgugaagcccggcgacauccugcugaucaacagcaccggcaaccugaucgcccccagaggcuacuucaagaucagaagcggcaagagcagcaucaugagaagcgacgcccccaucggcaagugcaacagcgagugcaucacccccaacggcagcauccccaacgacaagcccuuccagaacgugaacagaaucaccuacggcgccugccccagauacgugaagcagaacacccugaagcuggccaccggcaugagaaacgugcccgagaagcagaccagaggcaucuucggcgccaucgccggcuucaucgagaacggcugggagggcaugauggacggcugguacggcuucagacaccagaacagcgagggcaccggccaggccgccgaccugaagagcacccaggccgccaucaaccagaucaacggcaagcugaacaagcugaucgagaagaccaacgagaaguuccaccagaucgagaaggaguucagcgagguggagggcagaauccaggaccuggagaaguacguggaggacaccaagaucgaccuguggagcuacaacgccgagcugcugguggcccuggagaaccagcacaccaucgaccugaccgacagcgagaugaacaagcuguucgagagaaccagaaagcagcugagagagaacgccgaggacaugggcaacggcugcuucaagaucuaccacaagugcgacaacgccugcaucggcagcaucagaaacggcaccuacgaccacgacguguacagagacgaggcccugaacaacagauuccagaucaagggcguggagcugaagagcggcuacaaggacuggauccuguggaucagcuucgccaucagcugcuuccugcugugcguggugcugcugggcuucaucaugugggccugccagaagggcaacaucagaugcaacaucugcaucuga

SEQ ID NO: 162435 - RNA, 1701 nt, Artificial Sequence
  derived and/or modified CDS sequence (opt4) from hemagglutinin__InfluenzaA__ACH69613
augaagaccaucaucgcccugagcuacauccugugccuggccuucgcccagaagcugcccggcaacgacaacagcacccccacccugugccugggccaccacgccgugcccaacggcacccuggugaagaccaucaccaacgaccagaucgaggugaccaacgccaccgagcuggugcagagcagcagcaccggcggcaucugcgacagcccccaccagaucaucgacggcgagaacugcacccugaucgacgcccugcugggcgacccccacugcgacggcuuccagaacaaggagugggaccuguucguggagagaagcaaggccuacagcaacugcuaccccuacgacgugcccgacuacgccagccugagaagccugguggccagcagcggcacccuggaguucaacaacgagagcuucaacuggaccggcguggcccagaacggcaccagcagcgccugcaagagaagaagcaucaacagcuucuucagcagacugaacuggcugcaccagcugaaguacagauaccccgcccugaacgugaccaugcccaacaacgacaaguucgacaagcuguacaucuggggcgugcaccaccccagcaccgacagcgaccagaucagcguguacgcccaggccagcggcagagugaccgugagcaccaagagaagccagcagaccgugauccccaacaucggcagcagacccugggugagaggcaucagcagcagaaucagcaucuacuggaccaucgugaagcccggcgacauccugcugaucaacagcaccggcaaccccaucgcccccagaggcuacuucaagaucagaagcggcaagagcagcaucaugagaagcgacgcccccaucggcaagugcaacagcgagugcaucacccccaacggcagcauccccaacgacaagcccuuccagaacgugaacagaaucaccuacggcgccugccccagauacgugaagcagaacacccugaagcuggccaccggcaugagaaacgugcccgagaagcagaccagaggcaucuucggcgccaucgccggcuucaucgagaacggcugggagggcaugauggacggcugguacggccugagacaccagaacagcgagggcaccggccaggccgccgaccugaagagcacccaggccgccaucaaccagaucaacggcaagcugaacaagcugaucgagaagaccaacgagaaguuccaccagaucgagaacgaguucagcgagguggagggcagaauccaggaccuggagaaguacguggaggacaccaagaucgaccuguggagcuacaacgccgagcugcugguggcccuggagaaccagcacaccaucgaccugaccgacagcgagaugaacaagcuguucgagagaaccagaaagcagcugagagagaacgccgaggacaugggcaacggcugcuucaagaucuaccacaagugcgacaacgccugcaucggcagcaucagaaacggcaccuacgaccacgacguguacagagacgaggcccugaacaacagauuccagaucaagggcguggagcugaagagcggcuacaaggacuggauccuguggaucagcuucgccaucagcugcuuccugcugugcguggugcugcugggcuucaucaugugggccugccagaagggcaacaucagaugcaacaucugcaucuga

SEQ ID NO: 162436 - RNA, 1701 nt, Artificial Sequence; identical to SEQ ID NO: 160690
  derived and/or modified CDS sequence (opt4) from hemagglutinin__InfluenzaA__ACH82060

SEQ ID NO: 162437 - RNA, 1701 nt, Artificial Sequence; identical to SEQ ID NO: 162376
  derived and/or modified CDS sequence (opt4) from hemagglutinin__InfluenzaA__ACI06123

SEQ ID NO: 162438 - RNA, 1701 nt, Artificial Sequence; identical to SEQ ID NO: 162376
  derived and/or modified CDS sequence (opt4) from hemagglutinin__InfluenzaA__ACI06126

SEQ ID NO: 162439 - RNA, 1701 nt, Artificial Sequence; identical to SEQ ID NO: 162376
  derived and/or modified CDS sequence (opt4) from hemagglutinin__InfluenzaA__ACI06127

SEQ ID NO: 162440 - RNA, 1701 nt, Artificial Sequence; identical to SEQ ID NO: 162376
  derived and/or modified CDS sequence (opt4) from hemagglutinin__InfluenzaA__ACI06129

SEQ ID NO: 162441 - RNA, 1701 nt, Artificial Sequence; identical to SEQ ID NO: 162376
  derived and/or modified CDS sequence (opt4) from hemagglutinin__InfluenzaA__ACI06130

SEQ ID NO: 162442 - RNA, 1701 nt, Artificial Sequence; identical to SEQ ID NO: 162376
  derived and/or modified CDS sequence (opt4) from hemagglutinin__InfluenzaA__ACI06132

SEQ ID NO: 162443 - RNA, 1701 nt, Artificial Sequence; identical to SEQ ID NO: 162378
  derived and/or modified CDS sequence (opt4) from hemagglutinin__InfluenzaA__ACI06133

SEQ ID NO: 162444 - RNA, 1701 nt, Artificial Sequence; identical to SEQ ID NO: 162378
  derived and/or modified CDS sequence (opt4) from hemagglutinin__InfluenzaA__ACI06134

SEQ ID NO: 162445 - RNA, 1701 nt, Artificial Sequence; identical to SEQ ID NO: 162378
  derived and/or modified CDS sequence (opt4) from hemagglutinin__InfluenzaA__ACI06135

SEQ ID NO: 162446 - RNA, 1701 nt, Artificial Sequence; identical to SEQ ID NO: 162378
  derived and/or modified CDS sequence (opt4) from hemagglutinin__InfluenzaA__ACI06136

SEQ ID NO: 162447 - RNA, 1701 nt, Artificial Sequence; identical to SEQ ID NO: 162378
  derived and/or modified CDS sequence (opt4) from hemagglutinin__InfluenzaA__ACI06137

SEQ ID NO: 162448 - RNA, 1701 nt, Artificial Sequence; identical to SEQ ID NO: 162378
  derived and/or modified CDS sequence (opt4) from hemagglutinin__InfluenzaA__ACI06138

SEQ ID NO: 162449 - RNA, 1701 nt, Artificial Sequence; identical to SEQ ID NO: 162378
  derived and/or modified CDS sequence (opt4) from hemagglutinin__InfluenzaA__ACI06139

SEQ ID NO: 162450 - RNA, 1701 nt, Artificial Sequence; identical to SEQ ID NO: 162378
  derived and/or modified CDS sequence (opt4) from hemagglutinin__InfluenzaA__ACI06140

SEQ ID NO: 162451 - RNA, 1701 nt, Artificial Sequence; identical to SEQ ID NO: 162378
  derived and/or modified CDS sequence (opt4) from hemagglutinin__InfluenzaA__ACI06141

SEQ ID NO: 162452 - RNA, 1701 nt, Artificial Sequence; identical to SEQ ID NO: 162378
  derived and/or modified CDS sequence (opt4) from hemagglutinin__InfluenzaA__ACI06142

SEQ ID NO: 162453 - RNA, 1701 nt, Artificial Sequence; identical to SEQ ID NO: 162378
  derived and/or modified CDS sequence (opt4) from hemagglutinin__InfluenzaA__ACI06143

SEQ ID NO: 162454 - RNA, 1701 nt, Artificial Sequence
  derived and/or modified CDS sequence (opt4) from hemagglutinin__InfluenzaA__ACI06144
augaagaccaucaucgcccugagcuacaucuucugccuggcccugggccaggaccugcccggcaacgacaacagcaccgccacccugugccugggccaccacgccgugcccaacggcacccuggugaagaccaucaccgacgaccagaucgaggugaccaacgccaccgagcuggugcagagcagcagcaccggcaagaucugcaacaacccccacagaauccuggacggcaucgacugcacccugaucgacgcccugcugggcgacccccacugcgacguguuccagaacgagaccugggaccuguucguggagagaagcaaggccuucagcaacugcuaccccuacgacgugcccgacuacgccagccugagaagccugguggccagcagcggcacccuggaguucaucaccgagggcuucaccuggaccggcgugacccagaacggcggcagcaacgccugcaagagaggccccggcagcggcuucuucagcagacugaacuggcugaccaagagcggcagcaccuaccccgugcugaacgugaccaugcccaacaacgacaacuucgacaagcuguacaucuggggcgugcaccaccccagcaccaaccaggagcagaccagccuguacgugcaggccagcggcagagugaccgugagcaccagaagaagccagcagaccaucauccccaacaucggcagcagacccugggugagaggccugagcagcagaaucagcaucuacuggaccaucgugaagcccggcgacgugcuggugaucaacagcaacggcaaccugaucgcccccagaggcuacuucaagaugagaaccggcaagagcagcaucaugagaagcgacgcccccaucgacaccugcaucagcgagugcaucacccccaacggcagcauccccaacgacaagcccuuccagaacgugaacaagaucaccuacggcgccugccccaaguacgugaagcagaacacccugaagcuggccaccggcaugagaaacgugcccgagaagcagaccagaggccuguucggcgccaucgccggcuucaucgagaacggcugggagggcaugaucgacggcugguacggcuucagacaccagaacagcgagggcaccggccaggccgccgaccugaagagcacccaggccgccaucgaccagaucaacggcaagcugaacagagugaucgagaagaccaacgagaaguuccaccagaucgagaaggaguucagcgagguggagggcagaauccaggaccuggagaaguacguggaggacaccaagaucgaccuguggagcuacaacgccgagcugcugguggcccuggagaaccagcacaccaucgaccugaccgacagcgagaugaacagacuguucgagaagaccagaagacagcugagagagaacgccgaggacaugggcaacggcugcuucaagaucuaccacaagugcgacaacgccugcaucgagagcaucagaaacggcaccuacgaccacgacguguacagagacgaggcccugaacaacagauuccagaucaagggcguggagcugaagagcggcuacaaggacuggauccuguggaucagcuucgccaucagcugcuuccugcugugcguggugcugcugggcuucaucaugugggccugccagagaggcaacaucagaugcaacaucugcaucuga

SEQ ID NO: 162455 - RNA, 1701 nt, Artificial Sequence; identical to SEQ ID NO: 162378
  derived and/or modified CDS sequence (opt4) from hemagglutinin__InfluenzaA__ACI06145

SEQ ID NO: 162456 - RNA, 1701 nt, Artificial Sequence
  derived and/or modified CDS sequence (opt4) from hemagglutinin__InfluenzaA__ACI06146
augaagaccaucaucgcccugagcuacaucuucugccuggcccugggccaggaccugcccggcaacgacaacagcaccgccacccugugccugggccaccacgccgugcccaacggcacccuggugaagaccaucaccgacgaccagaucgaggugaccaacgccaccgagcuggugcagagcagcagcaccggcaagaucugcaacaacccccacagaauccuggacggcaucgacugcacccugaucgacgcccugcugggcgacccccacugcgacguguuccagaacgagaccugggaccuguucguggagagaagcaaggccuucagcaacugcuaccccuacgacgugcccgacuacgccagccugagaagccugguggccagcagcggcacccuggaguucaucaccgagggcuucaccuggaccggcgugacccagaacggcggcagcaacgccugcaagagaggccccggcagcggcuucuucagcagacugaacuggcugaccaagagcggcagcaccuaccccgugcugaacgugaccaugcccaacaacgacaacuucgacaagcuguacaucuggggcgugcaccaccccagcaccaaccaggagcagaccagccuguacgugcaggccagcggcagagugaccgugagcaccagaagaagccagcagaccaucauccccaacaucggcagcagccccugggugagaggccugagcagcagaaucagcaucuacuggaccaucgugaagcccggcgacgugcuggugaucaacagcaacggcaaccugaucgcccccagaggcuacuucaagaugagaaccggcaagagcagcaucaugagaagcgacgcccccaucgacaccugcaucagcgagugcaucacccccaacggcagcauccccaacgacaagcccuuccagaacgugaacaagaucaccuacggcgccugccccaaguacgugaagcagaacacccugaagcuggccaccggcaugagaaacgugcccgagaagcagaccagaggccuguucggcgccaucgccggcuucaucgagaacggcugggagggcaugaucgacggcugguacggcuucagacaccagaacuacgagggcaccggccaggccgccgaccugaagagcacccaggccgccaucgaccagaucaacggcaagcugaacagagugaucgagaagaccaacgagaaguuccaccagaucgagaaggaguucagcgagguggagggcagaauccaggaccuggagaaguacguggaggacaccaagaucgaccuguggagcuacaacgccgagcugcugguggcccuggagaaccagcacaccaucgaccugaccgacagcgagaugaacaagcuguucgagaagaccagaagacagcugagagagaacgccgaggacaugggcaacggcugcuucaagaucuaccacaagugcgacaacgccugcaucgagagcaucagaaacggcaccuacgaccacgacguguacagagacgaggcccugaacaacagauuccagaucaagggcguggagcugaagagcggcuacaaggacuggauccuguggaucagcuucgccaucagcugcuuccugcugugcguggugcugcugggcuucaucaugugggccugccagagaggcaacaucagaugcaacaucugcaucuga

SEQ ID NO: 162457 - RNA, 1701 nt, Artificial Sequence; identical to SEQ ID NO: 162378
  derived and/or modified CDS sequence (opt4) from hemagglutinin__InfluenzaA__ACI06147

SEQ ID NO: 162458 - RNA, 1701 nt, Artificial Sequence; identical to SEQ ID NO: 162378
  derived and/or modified CDS sequence (opt4) from hemagglutinin__InfluenzaA__ACI06148

SEQ ID NO: 162459 - RNA, 1701 nt, Artificial Sequence
  derived and/or modified CDS sequence (opt4) from hemagglutinin__InfluenzaA__ACI06149
augaagaccaucaucgcccugagcuacaucuucugccuggcccugggccaggaccugcccggcaacgacaacagcaccgccacccugugccugggccaccacgccgugcccaacggcacccuggugaagaccaucaccgacgaccagaucgaggugaccaacgccaccgagcuggugcagagcagcagcaccggcaagaucugcaacaacccccacagaauccuggacggcaucgacugcacccugaucgacgcccugcugggcgacccccacugcgacguguuccagaacgagaccugggaccuguucguggagagaagcaaggccuucagcaacugcuaccccuacgacgugcccgacuacgccagccugagaagccugguggccagcagcggcacccuggaguucaucaccgagggcuucaccuggaccggcgugacccagaacggcggcagcaacgccugcaagagaggccccggcagcggcuucuucagcagacugaacuggcugaccaagagcggcagcaccuaccccgugcugaacgugaccaugcccaacaacgacaacuucgacaagcuguacaucuggggcgugcaccaccccagcaccaaccaggagcagaccagccuguacgugcaggccagcggcagagugaccgugagcaccagaagaagcagacagaccaucauccccaacaucggcagcagacccugggugagaggccugagcagcagaaucagcaucuacuggaccaucgugaagcccggcgacgugcuggugaucaacagcaacggcaaccugaucgcccccagaggcuacuucaagaugagaaccggcaagagcagcaucaugagaagcgacgcccccaucgacaccugcaucagcgagugcaucacccccaacggcagcauccccaacgacaagcccuuccagaacgugaacaagaucaccuacggcgccugccccaaguacgugaagcagaacacccugaagcuggccaccggcaugagaaacgugcccgagaagcagaccagaggccuguucggcgccaucgccggcuucaucgagaacggcugggagggcaugaucgacggcugguacggcuucagacaccagaacagcgagggcaccggccaggccgccgaccugaagagcacccaggccgccaucgaccagaucaacggcaagcugaacagagugaucgagaagaccaacgagaaguuccaccagaucgagaaggaguucagcgagguggagggcagaauccaggaccuggagaaguacguggaggacaccaagaucgaccuguggagcuacaacgccgagcugcugguggcccuggagaaccagcacaccaucgaccugaccgacagcgagaugaacaagcuguucgagaagaccagaagacagcugagagagaacgccgaggacaugggcaacggcugcuucaagaucuaccacaagugcgacaacgccugcaucgagagcaucagaaacggcaccuacgaccacgacguguacagagacgaggcccugaacaacagauuccagaucaagggcguggagcugaagagcggcuacaaggacuggauccuguggaucagcuucgccaucagcugcuuccugcugugcguggugcugcugggcuucaucaugugggccugccagagaggcaacaucagaugcaacaucugcaucuga

SEQ ID NO: 162460 - RNA, 1701 nt, Artificial Sequence; identical to SEQ ID NO: 162389
  derived and/or modified CDS sequence (opt4) from hemagglutinin__InfluenzaA__ACI06151

SEQ ID NO: 162461 - RNA, 1701 nt, Artificial Sequence; identical to SEQ ID NO: 162389
  derived and/or modified CDS sequence (opt4) from hemagglutinin__InfluenzaA__ACI06152

SEQ ID NO: 162462 - RNA, 1701 nt, Artificial Sequence
  derived and/or modified CDS sequence (opt4) from hemagglutinin__InfluenzaA__ACI06153
augaagaccaucaucgcccugagcuacaucuucugccuggcccugggccaggaccugcccggcaacgacaacagcaccgccacccugugccugggccaccacgccgugcccaacggcacccuggugaagaccaucaccgacgaccagaucgaggugaccaacgccaccgagcuggugcagagcagcagcaccggcaagaucugcaacaacccccacagaauccuggacggcaucgacugcacccugaucgacgcccugcugggcgacccccacugcgacguguuccagaacgagaccugggaccuguucguggagagaagcaaggccuucagcaacugcuaccccuacgacgugcccgacuacgccagccugagaagccugguggccagcagcggcacccuggaguucaucaccgagggcuucaccuggaccggcgugacccagaacggcggcagcaacgccugcaagagaggccccggcagcggcuucuucagcagacugaacuggcugaccaagagcggcagcaccuaccccgugcugaacgugaccaugcccaacaacgacaacuucgacaagcuguacaucuggggcgugcaccaccccagcaccaaccaggagcagaccagccuguacgugcaggccagcggcagagugaccgugagcaccagaagaagccagcagaccaucauccccaacaucggcagcagacccugggugagaggccugagcagcagaaucagcaucuacuggaccaucgugaagcccggcgacgagcuggugaucaacagcaacggcaaccugaucgcccccagaggcuacuucaagaugagaaccggcaagagcagcaucaugagaagcgacgcccccaucgacaccugcaucagcgagugcaucacccccaacggcagcauccccaacgacaagcccuuccagaacgugaacaagaucaccuacggcgccugccccaaguacgugaagcagaacacccugaagcuggccaccggcaugagaaacgugcccgagaagcagaccagaggccuguucggcgccaucgccggcuucaucgagaacggcugggagggcaugaucgacggcugguacggcuucagacaccagaacagcgagggcaccggccaggccgccgaccugaagagcacccaggccgccaucgaccagaucaacggcaagcugaacagagugaucgagaagaccaacgagaaguuccaccagaucgagaaggaguucagcgagguggagggcagaauccaggaccuggagaaguacguggaggacaccaagaucgaccuguggagcuacaacgccgagcugcugguggcccuggagaaccagcacaccaucgaccugaccgacagcgagaugaacaagcuguucgagaagaccagaagacagcugagagagaacgccgaggacaugggcaacggcugcuucaagaucuaccacaagugcgacaacgccugcaucgagagcaucagaaacggcaccuacgaccacgacguguacagagacgaggcccugaacaacagauuccagaucaagggcguggagcugaagagcggcuacaaggacuggauccuguggaucagcuucgccaucagcugcuuccugcugugcguggugcugcugggcuucaucaugugggccugccagagaggcaacaucagaugcaacaucugcaucuga

SEQ ID NO: 162463 - RNA, 1701 nt, Artificial Sequence
  derived and/or modified CDS sequence (opt4) from hemagglutinin__InfluenzaA__ACI06155
augaagaccaucaucgcccugagcuacaucuucugccuggcccugggccaggaccugcccggcaacgacaacagcaccgccacccugugccugggccaccacgccgugcccaacggcacccuggugaagaccaucaccgacgaccagaucgaggugaccaacgccaccgagcuggugcagagcagcagcaccggcaagaucugcaacaacccccacagaauccuggacggcaucgacugcacccugaucgacgcccugcugggcgacccccacugcgacguguuccagaacgagaccugggaccuguucguggagagaagcaaggccuucagcaacugcuaccccuacgacgugcccgacuacgccagccugagaagccugguggccagcagcggcacccuggaguucaucaccgagggcuucaccuggaccggcgugacccagaacggcggcagcaacgccugcaagagaggccccggcagcggcuucuucagcagacugaacuggcugaccaagagcggcagcaccuaccccgugcugaacgugaccaugcccaacaacgacaacuucgacaagcuguacaucuggggcgugcaccaccccagcaccaaccaggagcagaccagccuguacgugcaggccagcggcagagugaccgugagcaccagaagaagccagcagaccaucauccccaacaucgagagcagacccugggugagaggccugagcagcagaaucagcaucuacuggaccaucgugaagcccggcgacgugcuggugaucaacagcaacggcaaccugaucgcccccagaggcuacuucaagaugagaaccggcaagagcagcaucgugagaagcgacgcccccaucgacaccugcaucagcgagugcaucacccccaacggcagcauccccaacgacaagcccuuccagaacgugaacaagaucaccuacggcgccugccccaaguacgugaagcagaacacccugaagcuggccaccggcaugagaaacgugcccgagaagcagaccagaggccuguucggcgccaucgccggcuucaucgagaacggcugggagggcaugaucgacggcugguacggcuucagacaccagaacagcgagggcaccggccaggccgccgaccugaagagcacccaggccgccaucgaccagaucaacggcaagcugaacagagugaucgagaagaccaacgagaaguuccaccagaucgagaaggaguucagcgagguggagggcagaauccaggaccuggagaaguacguggaggacaccaagaucgaccuguggagcuacaacgccgagcugcugguggcccuggagaaccagcacaccaucgaccugaccgacagcgagaugaacaagcuguucgagaagaccagaagacagcugagagagaacgccgaggacaugggcaacggcugcuucaagaucuaccacaagugcgacaacgccugcaucgagagcaucagaaacggcaccuacgaccacgacguguacagagacgaggcccugaacaacagauuccagaucaagggcguggagcugaagagcggcuacaaggacuggauccuguggaucagcuucgccaucagcugcuuccugcugugcguggugcugcugggcuucaucaugugggccugccagagaggcaacaucagaugcaacaucugcaucuga

SEQ ID NO: 162464 - RNA, 1701 nt, Artificial Sequence; identical to SEQ ID NO: 162389
  derived and/or modified CDS sequence (opt4) from hemagglutinin__InfluenzaA__ACI06156

SEQ ID NO: 162465 - RNA, 1701 nt, Artificial Sequence; identical to SEQ ID NO: 162389
  derived and/or modified CDS sequence (opt4) from hemagglutinin__InfluenzaA__ACI06157

SEQ ID NO: 162466 - RNA, 1701 nt, Artificial Sequence; identical to SEQ ID NO: 162389
  derived and/or modified CDS sequence (opt4) from hemagglutinin__InfluenzaA__ACI06158

SEQ ID NO: 162467 - RNA, 1701 nt, Artificial Sequence; identical to SEQ ID NO: 162389
  derived and/or modified CDS sequence (opt4) from hemagglutinin__InfluenzaA__ACI06159

SEQ ID NO: 162468 - RNA, 1701 nt, Artificial Sequence; identical to SEQ ID NO: 162378
  derived and/or modified CDS sequence (opt4) from hemagglutinin__InfluenzaA__ACI06160

SEQ ID NO: 162469 - RNA, 1701 nt, Artificial Sequence
  derived and/or modified CDS sequence (opt4) from hemagglutinin__InfluenzaA__ACI06161
augaagaccaucaucgcccugagcuacaucuucugccuggcccugggccaggaccugcccggcaacgacaacagcaccgccacccugugccugggccaccacgccgugcccaacggcacccuggugaagaccaucaccgacgaccagaucgaggugaccaacgccaccgagcuggugcagagcagcagcaccggcaagaucugcaacaacccccacagaauccuggacggcaucgacugcacccugaucgacgcccugcugggcgacccccacugcgacguguuccagaacgagaccugggaccuguucguggagagaagcaaggccuucagcaacugcuaccccuacgacgugcccgacuacgccagccugagaagccugguggccagcagcggcacccuggaguucaucaccgagggcuucaccuggaccggcgugacccagaacggcggcagcaacgccugcaagagaggccccggcagcggcuucuucagcagacugaacuggcugaccaagagcggcagcaccuaccccgugcugaacgugaccaugcccaacaacgacaacuucgacaagcuguacaucuggggcgugcaccaccccagcaccaaccaggagcagaccagccuguacgugcaggccagcggcagagugaccgugagcaccagaagaagccagcagaccaucauccccaacaucgagagcagacccugggugagaggccugagcagcagaaucagcaucuacuggaccaucgugaagcccggcgacgugcuggugaucaacagcaacggcaaccugaucgcccccagaggcuacuucaagaugagaaccggcaagagcagcaucaugagaagcgacgcccccaucgacaccugcaucagcgagugcaucacccccaacggcagcauccccaacgacaagcccuuccagaacgugaacaagaucaccuacggcgccugccccaaguacgugaagcagaacacccugaagcuggccaccggcaugagaaacgugcccgagaagcagaccagaggccuguucggcgccaucgccggcuucaucgagaacggcugggagggcaugaucgacggcugguacggcuucagacaccagaacagcgagggcaccggccaggccgccgaccugaagagcacccaggccgccaucgaccagaucaacggcaagcugaacagagugaucgagaagaccaacgagaaguuccaccagaucgagaaggaguucagcgagguggagggcagaauccaggaccuggagaaguacguggaggacaccaagaucgaccuguggagcuacaacgccgagcugcugguggcccuggagaaccagcacaccaucgaccugaccgacagcgagaugaacaagcuguucgagaagaccagaagacagcugagagagaacgccgaggacaugggcaacggcugcuucaagaucuaccacaagugcgacaacgccugcaucgagagcaucagaaagggcaccuacgaccacgacguguacagagacgaggcccugaacaacagauuccagaucaagggcguggagcugaagagcggcuacaaggacuggauccuguggaucagcuucgccaucagcugcuuccugcugugcguggugcugcugggcuucaucaugugggccugccagagaggcaacaucagaugcaacaucugcaucuga

SEQ ID NO: 162470 - RNA, 1701 nt, Artificial Sequence
  derived and/or modified CDS sequence (opt4) from hemagglutinin__InfluenzaA__ACI06162
augaagaccaucaucgcccugagcuacaucuucugccuggcccugggccaggaccugcccggcaacgacaacagcaccgccacccugugccugggccaccacgccgugcccaacggcacccuggugaagaccaucaccgacgaccagaucgaggugaccaacgccaccgagcuggugcagagcagcagcaccggcaagaucugcaacaacccccacagaauccuggacggcaucgacugcacccugaucgacgcccugcugggcgacccccacugcgacguguuccagaacgagaccugggaccuguucguggagagaagcaaggccuucagcaacugcuaccccuacgacgugcccgacuacgccagccugagaagccugguggccagcagcggcacccuggaguucaucaccgagggcuucaccuggaccggcgugacccagaacggcggcagcaacgccugcaagagaggccccggcagcggcuucuucagcagacugaacuggcugaccaagagcggcagcaccuaccccgugcugaacgugaccaugcccaacaacgacaacuucgacaagcuguacaucuggggcgugcaccaccccagcaccaaccaggagcagaccagccuguacgugcaggccagcggcagagugaccgugagcaccagaagaagccagcagaccaucauccccaacaucgagagcagacccugggugagaggccugagcagcagaaucagcaucuacuggaccaucgugaaccccggcgacgugcuggugaucaacagcaacggcaaccugaucgcccccagaggcuacuucaagaugagaaccggcaagagcagcaucaugagaagcgacgcccccaucgacaccugcaucagcgagugcaucacccccaacggcagcauccccaacgacaagcccuuccagaacgugaacaagaucaccuacggcgccugccccaaguacgugaagcagaacacccugaagcuggccaccggcaugagaaacgugcccgagaagcagaccagaggccuguucggcgccaucgccggcuucaucgagaacggcugggagggcaugaucgacggcugguacggcuucagacaccagaacagcgagggcaccggccaggccgccgaccugaagagcacccaggccgccaucgaccagaucaacggcaagcugaacagagugaucgagaagaccaacgagaaguuccaccagaucgagaaggaguucagcgagguggagggcagaauccaggaccuggagaaguacguggaggacaccaagaucgaccuguggagcuacaacgccgagcugcugguggcccuggagaaccagcacaccaucgaccugaccgacagcgagaugaacaagcuguucgagaagaccagaagacagcugagagagaacgccgaggacaugggcaacggcugcuucaagaucuaccacaagugcgacaacgccugcaucgagagcaucagaaacggcaccuacgaccacgacguguacagagacgaggcccugaacaacagauuccagaucaagggcguggagcugaagagcggcuacaaggacuggauccuguggaucagcuucgccaucagcugcuuccugcugugcguggugcugcugggcuucaucaugugggccugccagagaggcaacaucagaugcaacaucugcaucuga

SEQ ID NO: 162471 - RNA, 1701 nt, Artificial Sequence
  derived and/or modified CDS sequence (opt4) from hemagglutinin__InfluenzaA__ACI06163
augaagaccaucaucgcccugagcuacaucuucugccuggcccugggccaggaccugcccggcaacgacaacagcaccgccacccugugccugggccaccacgccgugcccaacggcacccuggugaagaccaucaccgacgaccagaucgaggugaccaacgccaccgagcuggugcagagcagcagcaccggcaagaucugcaacaacccccacagaauccuggacggcaucgacugcacccugaucgacgcccugcugggcgacccccacugcgacguguuccagaacgagaccugggaccuguucguggagagaagcaaggccuucagcaacugcuaccccuacgacgugcccgacuacgccagccugagaagccugguggccagcagcggcacccuggaguucaucaccgagggcuucaccuggaccggcgugacccagaacggcggcagcaacgccugcaagagaggccccggcagcggcuucuucagcagacugaacuggcugaccaagagcggcagcaccuaccccgugcugaacgugaccaugcccaacaacgacaacuucgacaagcuguacaucuggggcgugcaccaccccagcaccaaccaggagcagaccagccuguacgugcaggccagcggcagagugaccgugagcaccagaagaagccagcagaccaucauccccaacaucggcagcagacccugggugagaggccugagcagcagaaucagcaucuacuggaccaucgugaagcccggcgacgugcuggugaucaacagcaacggcaaccugaucgcccccagaggcuacuucaagaugagaaccggcaagagcagcaucaugagaagcgacgcccccaucgacaccugcaucagcgagugcaucacccccaacggcagcauccccaacgacaagcccuuccagaacgugaacaagaucaccuacggcgccugccccaaguacgugaagcagaacacccugaagcuggccaccggcaugagaaacgugcccgagaagcagaccagaggccuguucggcgccaucgccggcuucaucgagaacggcugggagggcaugaucgacggcugguacggcuucagacaccagaacagcgagggcaccggccaggccgccgaccugaagagcacccaggccgccaucgaccagaucaacggcaagcugaacagagugaucgagaagaccaacgagaaguuccaccagaucgagaaggaguucagcgagguggagggcagaauccaggaccuggagaaguacguggaggacaccaagaucgaccuguggagcuacaacgccgagcugcugguggcccuggagaaccagcacaccaucgaccugaccgacagcgagaugaacaagcuguucgagaagaccagaagacagcugagagagaacgccgaggacaugggcaacggcugcuucaagaucuaccacaagugcgacaacgccugcaucgagagcaucagaaagggcaccuacgaccacgacguguacagagacgaggcccugaacaacagauuccagaucaagggcguggagcugaagagcggcuacaaggacuggauccuguggaucagcuucgccaucagcugcuuccugcugugcguggugcugcugggcuucaucaugugggccugccagagaggcaacaucagaugcaacaucugcaucuga

SEQ ID NO: 162472 - RNA, 1701 nt, Artificial Sequence
  derived and/or modified CDS sequence (opt4) from hemagglutinin__InfluenzaA__ACI06164
augaagaccaucaucgcccugagcuacaucuucugccuggcccugggccaggaccugcccggcaacgacaacagcaccgccacccugugccugggccaccacgccgugcccaacggcacccuggugaagaccaucaccgacgaccagaucgaggugaccaacgccaccgagcuggugcagagcagcagcaccggcaagaucugcaacaacccccacagaauccuggacggcaucgacugcacccugaucgacgcccugcugggcgacccccacugcgacguguuccagaacgagaccugggaccuguucguggagagaagcaaggccuucagcaacugcuaccccuacgacgugcccgacuacgccagccugagaagccugguggccagcagcggcacccuggaguucaucaccgagggcuucaccuggaccggcgugacccagaacggcggcagcaacgccugcaagagaggccccggcagcggcuucuucagcagacugaacuggcugaccaagagcggcagcaccuaccccgugcugaacgugaccaugcccaacaacgacaacuucgacaagcuguacaucuggggcgugcaccaccccagcaccaaccaggagcagaccagccuguacgugcaggccagcggcagagugaccgugagcaccagaagaagccagcagaccaucauccccaacaucggcagcagacccugggugagaggccugagcagcagaaucaacaucuacuggaccaucgugaagcccggcgacgugcuggugaucaacagcaacggcaaccugaucgcccccagaggcuacuucaagaugagaaacggcaagagcagcaucaugagaagcgacgcccccaucgacaccugcaucagcgagugcaucacccccaacggcagcauccccaacgacaagcccuuccagaacgugaacaagaucaccuacggcgccugccccaaguacgugaagcagaacacccugaagcuggccaccggcaugagaaacgugcccgagaagcagaccagaggccuguucggcgccaucgccggcuucaucgagaacggcugggagggcaugaucgacggcugguacggcuucagacaccagaacagcgagggcaccggccaggccgccgaccugaagagcacccaggccgccaucgaccagaucaacggcaagcugaacagagugaucgagaagaccaacgagaaguuccaccagaucgagaaggaguucagcgagguggagggcagaauccaggaccuggagaaguacguggaggacaccaagaucgaccuguggagcuacaacgccgagcugcugguggcccuggagaaccagcacaccaucgaccugaccgacagcgagaugaacaagcuguucgagaagaccagaagacagcugagagagaacgccgaggacaugggcaacggcugcuucaagaucuaccacaagugcgacaacgccugcaucgagagcaucagaaacggcaccuacgaccacgacguguacagagacgaggcccugaacaacagauuccagaucaagggcguggagcugaagagcggcuacaaggacuggauccuguggaucagcuucgccaucagcugcuuccugcugugcguggugcugcugggcuucaucaugugggccugccagagaggcaacaucagaugcaacaucugcaucuga

SEQ ID NO: 162473 - RNA, 1701 nt, Artificial Sequence
  derived and/or modified CDS sequence (opt4) from hemagglutinin__InfluenzaA__ACI06165
augaagaccaucaucgcccugagcuacaucuucugccuggcccugggccaggaccugcccggcaacgacaacagcaccgccacccugugccugggccaccacgccgugcccaacggcacccuggugaagaccaucaccgacgaccagaucgaggugaccaacgccaccgagcuggugcagagcagcagcaccggcaagaucugcaacaacccccacagaauccuggacggcaucgacugcacccugaucgacgcccugcugggcgacccccacugcgacguguuccagaacgagaccugggaccuguucguggagagaagcaaggccuucagcaacugcuaccccuacgacgugcccgacuacgccagccugagaagccugguggccagcagcggcacccuggaguucaucaccgagggcuucaccuggaccggcgugacccagaacggcggcagcaacgccugcaagagaggccccggcagcggcuucuucagcagacugaacuggcugaccaagagcggcagcaccuaccccgugcugaacgugaccaugcccaacaacgacaacuucgacaagcuguacaucuggggcgugcaccaccccagcaccaaccaggagcagaccagccuguacgugcaggccagcggcagagugaccgugagcaccagaagaagccagcagaccaucauccccaacaucggcagcagacccugggugagaggccugagcagcagaaucagcaucuacuggaccaucgugaagcccggcgacgugcuggugaucaacagcaacggcaaccugaucgcccccagaggcuacuucaagaugagaaacggcaagagcagcaucaugagaagcgacgcccccaucgacaccugcaucagcgagugcaucacccccaacggcagcauccccaacgacaagcccuuccagaacgugaacaagaucaccuacggcgccugccccaaguacgugaagcagaacacccugaagcuggccaccggcaugagaaacgugcccgagaagcagaccagaggccuguucggcgccaucgccggcuucaucgagaacggcugggagggcaugaucgacggcugguacggcuucagacaccagaacagcgagggcaccggccaggccgccgaccugaagagcacccaggccgccaucgaccagaucaacggcaagcugaacagagugaucgagaagaccaacgagaaguuccaccagaucgagaaggaguucagcgagguggagggcagaauccaggaccuggagaaguacguggaggacaccaagaucgaccuguggagcuacaacgccgagcugcugguggcccuggagaaccagcacaccaucgaccugaccgacagcgagaugaacaagcuguucgagaagaccagaagacagcugagagagaacgccgaggacaugggcaacggcugcuucaagaucuaccacaagugcgacaacgccugcaucgagagcaucagaaacggcaccuacgaccacgacguguacagagacgaggcccugaacaacagauuccagaucaagggcguggagcugaagagcggcuacaaggacuggauccuguggaucagcuucgccaucagcugcuuccugcugugcguggugcugcugggcuucaucaugugggccugccagagaggcaacaucagaugcaacaucugcaucuga

SEQ ID NO: 162474 - RNA, 1701 nt, Artificial Sequence
  derived and/or modified CDS sequence (opt4) from hemagglutinin__InfluenzaA__ACI06166
augaagaccaucaucgcccugagcuacaucuucugccuggcccugggccaggaccugcccggcaacgacaacagcaccgccacccugugccugggccaccacgccgugcccaacggcacccuggugaagaccaucaccgacgaccagaucgaggugaccaacgccaccgagcuggugcagagcagcagcaccggcaagaucugcaacaacccccacagaauccuggacggcaucgacugcacccugaucgacgcccugcugggcgacccccacugcgacguguuccagaacgagaccugggaccuguucguggagagaagcaaggccuucagcaacugcuaccccuacgacgugcccgacuacgccagccugagaagccugguggccagcagcggcacccuggaguucaucaccgagggcuucaccuggaccggcgugacccagaacggcggcagcaacgccugcaagagaggccccggcagcggcuucuucagcagacugaacuggcugaccaagagcggcagcaccuaccccgugcugaacgugaccaugcccaacaacgacaacuucgacaagcuguacaucuggggcgugcaccaccccagcaccaaccaggagcagaccagccuguacgugcaggccagcggcagagugaccgugagcaccagaagaagccagcagaccaucauccccaacaucggcagcagacccuggaucagaggccugagcagcagaaucaacaucuacuggaccaucgugaagcccggcgacgugcuggugaucaacagcaacggcaaccugaucgcccccagaggcuacuucaagaugagaaacggcaagagcagcaucaugagaagcgacgcccccaucgacaccugcaucagcgagugcaucacccccaacggcagcauccccaacgacaagcccuuccagaacgugaacaagaucaccuacggcgccugccccaaguacgugaagcagaacacccugaagcuggccaccggcaugagaaacgugcccgagaagcagaccagaggccuguucggcgccaucgccggcuucaucgagaacggcugggagggcaugaucgacggcugguacggcuucagacaccagaacagcgagggcaccggccaggccgccgaccugaagagcacccaggccgccaucgaccagaucaacggcaagcugaacagagugaucgagaagaccaacgagaaguuccaccagaucgagaaggaguucagcgagguggagggcagaauccaggaccuggagaaguacguggaggacaccaagaucgaccuguggagcuacaacgccgagcugcugguggcccuggagaaccagcacaccaucgaccugaccgacagcgagaugaacaagcuguucgagaagaccagaagacagcugagagagaacgccgaggacaugggcaacggcugcuucaagaucuaccacaagugcgacaacgccugcaucgagagcaucagaaacggcaccuacgaccacgacguguacagagacgaggcccugaacaacagauuccagaucaagggcguggagcugaagagcggcuacaaggacuggauccuguggaucagcuucgccaucagcugcuuccugcugugcguggugcugcugggcuucaucaugugggccugccagagaggcaacaucagaugcaacaucugcaucuga

SEQ ID NO: 162475 - RNA, 1701 nt, Artificial Sequence; identical to SEQ ID NO: 162459
  derived and/or modified CDS sequence (opt4) from hemagglutinin__InfluenzaA__ACI06167

SEQ ID NO: 162476 - RNA, 1701 nt, Artificial Sequence
  derived and/or modified CDS sequence (opt4) from hemagglutinin__InfluenzaA__ACI06168
augaagaccaucaucgcccugagcuacaucuucugccuggcccugggccaggaccugcccggcaacgacaacagcaccgccacccugugccugggccaccacgccgugcccaacggcacccuggugaagaccaucaccgacgaccagaucgaggugaccaacgccaccgagcuggugcagagcagcagcaccggcaagaucugcaacaacccccacagaauccuggacggcaucgacugcacccugaucgacgcccugcugggcgacccccacugcgacguguuccagaacgagaccugggaccuguucguggagagaagcaaggccuucagcaacugcuaccccuacgacgugcccgacuacgccagccugagaagccugguggccagcagcggcacccuggaguucaucaccgagggcuucaccuggaccggcgugacccagaacggcggcagcaacgccugcaagagaggccccggcagcggcuucuucagcagacugaacuggcugaccaagagcggcagcaccuaccccgugcugaacgugaccaugcccaacaacgacaacuucgacaagcuguacaucuggggcgugcaccaccccagcaccaaccaggagcagaccagccuguacgugcaggccagcggcagagugaccgugagcaccagaagaagccagcagaccaucauccccaacaucggcagcagacccugggugagaggccugagcagcagaaucagcaucuacuggaccaucgugaagcccggcgacgugcuggugaucaacagcaacggcaaccugaucgcccccagaggcuacuucaagaugagaaccggcaagagcagcaucaugagaagcgacgcccccaucgacaccugcaucagcgagugcaucacccccaacggcagcauccccaacgacaagcccuuccagaacgugaacaagaucaccuacggcgccugccccaaguacgugaagcagaacacccugaagcuggccaccggcaugagaaacgugcccgagaagcagaccagaggccuguucggcgccaucgccggcuucaucgagaacggcugggagggcaugaucgacggcugguacggcuucagacaccagaacagcgagggcaccggccaggccgccgaccugaagagcacccaggccgccaucgaccagaucaacggcaagcugaacagagugaucgagaagaccaacgagaaguuccaccagaucgagaaggaguucagcgagguggagggcagaauccaggaccuggagaaguacguggaggacaccaagaucgaccuguggagcuacaacgccgagcugcugguggcccuggagaaccagcacaccaucgaccugaccgacagcgagaugaacaagcuguucgagaagaccagaaagcagcugagagagaacgccgaggacaugggcaacggcugcuucaagaucuaccacaagugcgacaacgccugcaucgagagcaucagaaacggcaccuacgaccacgacguguacagagacgaggcccugaacaacagauuccagaucaagggcguggagcugaagagcggcuacaaggacuggauccuguggaucagcuucgccaucagcugcuuccugcugugcguggugcugcugggcuucaucaugugggccugccagagaggcaacaucagaugcaacaucugcaucuga

SEQ ID NO: 162477 - RNA, 1701 nt, Artificial Sequence; identical to SEQ ID NO: 162378
  derived and/or modified CDS sequence (opt4) from hemagglutinin__InfluenzaA__ACI06169

SEQ ID NO: 162478 - RNA, 1701 nt, Artificial Sequence; identical to SEQ ID NO: 162395
  derived and/or modified CDS sequence (opt4) from hemagglutinin__InfluenzaA__ACI06171

SEQ ID NO: 162479 - RNA, 1701 nt, Artificial Sequence; identical to SEQ ID NO: 162395
  derived and/or modified CDS sequence (opt4) from hemagglutinin__InfluenzaA__ACI06172

SEQ ID NO: 162480 - RNA, 1701 nt, Artificial Sequence
  derived and/or modified CDS sequence (opt4) from hemagglutinin__InfluenzaA__ACI06173
augaagaccaucaucgcccugagcuacaucuucugccuggcccugggccaggaccugcccggcaacgacaacagcaccgccacccugugccugggccaccacgccgugcccaacggcacccuggugaagaccaucaccgacgaccagaucgaggugaccaacgccaccgagcuggugcagagcagcagcaccggcaagaucugcaacaacccccacagaauccuggacggcaucgacugcacccugaucgacgcccugcugggcgacccccacugcgacguguuccagaacgagaccugggaccuguucguggagagaagcaaggccuucagcaacugcuaccccuacgacgugcccgacuacgccagccugagaagccugguggccagcagcggcacccuggaguucaucaccgagggcuucaccuggaccggcgugacccagaacggcggcagcaacgccugcaagagaggccccggcagcggcuucuucagcagacugaacuggcugaccaagagcggcagcaccuaccccgugcugaacgugaccaugcccaacaacgacaacuucgacaagcuguacaucuggggcgugcaccaccccagcaccaaccaggagcagaccagccuguacgugcaggccagcggcagagugaccgugagcaccagaagaagccagcagaccaucauccccaacaucggcagcagacccugggugagaggccugagcagcagaaucagcaucuacuggaccaucgugaagcccggcgacgugcuggagaucaacagcaacggcaaccugaucgcccccagaggcuacuucaagaugagaaccggcaagagcagcaucaugagaagcgacgcccccaucgacaccugcaucagcgagugcaucacccccaacggcagcauccccaacgacaagcccuuccagaacgugaacaagaucaccuacggcgccugccccaaguacgugaagcagaacacccugaagcuggccaccggcaugagaaacgugcccgagaagcagaccagaggccuguucggcgccaucgccggcuucaucgagaacggcugggagggcaugaucgacggcugguacggcuucagacaccagaacagcgagggcaccggccaggccgccgaccugaagagcacccaggccgccaucgaccagaucaacggcaagcugaacagagugaucgagaagaccaacgagaaguuccaccagaucgagaaggaguucagcgagguggagggcagaauccaggaccuggagaaguacguggaggacaccaagaucgaccuguggagcuacaacgccgagcugcugguggcccuggagaaccagcacaccaucgaccugaccgacagcgagaugaacaagcuguucgagaagaccagaagacagcugagagagaacgccgaggacaugggcaacggcugcuucaagaucuaccacaagugcgacaacgccugcaucgagagcaucagaaacggcaccuacgaccacgacguguacagagacgaggcccugaacaacagauuccagaucaagggcguggagcugaagagcggcuacaaggacuggauccuguggaucagcuucgccaucagcugcuuccugcugugcguggugcugcugggcuucaucaugugggccugccagagaggcaacaucagaugcaacaucugcaucuga

SEQ ID NO: 162481 - RNA, 1701 nt, Artificial Sequence; identical to SEQ ID NO: 162395
  derived and/or modified CDS sequence (opt4) from hemagglutinin__InfluenzaA__ACI06174

SEQ ID NO: 162482 - RNA, 1701 nt, Artificial Sequence; identical to SEQ ID NO: 162396
  derived and/or modified CDS sequence (opt4) from hemagglutinin__InfluenzaA__ACI06175

SEQ ID NO: 162483 - RNA, 1701 nt, Artificial Sequence; identical to SEQ ID NO: 162396
  derived and/or modified CDS sequence (opt4) from hemagglutinin__InfluenzaA__ACI06176

SEQ ID NO: 162484 - RNA, 1701 nt, Artificial Sequence; identical to SEQ ID NO: 162396
  derived and/or modified CDS sequence (opt4) from hemagglutinin__InfluenzaA__ACI06177

SEQ ID NO: 162485 - RNA, 1689 nt, Artificial Sequence
  derived and/or modified CDS sequence (opt4) from hemagglutinin__InfluenzaA__ACI25724
auggccaucaucuaccugauccugcuguucgccaccgugagaggcgaccagaucugcaucggcuaccacgccaacaacagcaccgagaagguggacaccauccuggagagaaacgugaccgugacccacgccaaggacauccuggagaagacccacaacggcaagcugugcaagcugaacggcauccccccccuggagcugggcgacugcagcaucgccggcuggcugcugggcaaccccgagugcgacagacugcugagagugcccgaguggagcuacaucauggagagagagaaccccagauacagccugugcuaccccggcagccugaacgacuacgaggagcugaagcaccugcugagcagcgugaagcacuucgagaaggugagaauccugcccaaggacagauggacccagcacaccaccaccggcggcagcaaggccugcgccgugagcggcaagcccagcuucuucagaaacaugguguggcugaccaagaagggccccaacuaccccguggccaagggcagcuacaacaacaccagcggcgagcagaugcugaucaucuggggcgugcaccaccccaaggacgaggccgagcagagagcccuguaccaggaggugggcaccuacgugagcgccagcaccagcacccugaacaagagaagcauccccgagaucgccgccagacccgaggugaacggccugggcagcagaauggaguucagcuggacccugcuggacgugugggacaccaucaacuucgagagcaccggcaaccugguggcccccgaguacggcuucaagaucagcaagagaggcagcagcggcaucaugaagaccgagggcacccugggcaacugcgagaccaagugccagaccccccugggcgccaucaacaccacccugcccuuccacaacgugcacccccugaccaucggcgagugccccaaguacgugaagagcgagaagcuggugcuggccaccggccugagaaacgugccccagaucgagagcagaggccuguucggcgccaucgccggcuucaucgagggcggcuggcagggcaugguggacggcugguacggcuaccaccacagcaacgaccagggcagcggcuacgccgccgacaaggagagcacccagaaggccuucgacggcaucaccaacaaggugaacagcgugaucgagaagaugaacacccaguucgaggccgugggcaaggaguucaacaaccuggagaagagacuggagaaccugaacaagaagauggaggacggcuuccuggacguguggaccuacaacgccgagcugcuggugcugauggagaacgagagaacccuggacuuccacgacagcaacgugaagaaccuguacgagaaggugagaaugcagcugagagacaacgugaaggagcugggcaacggcugcuucgaguucuaccacaagugcgacgacgagugcaugaacagcgugaagaacggcaccuacgacuaccccaaguacgaggaggagagcaagcugaagagaaacgagaucaagggcgugaagcugagcagcaugggcguguaccagauccuggccaucuacgccaccguggccggcagccugagccuggccaucaugguggccggcaucagcuucuggaugugcagcaacggcagccugcagugcagaaucugcaucuga

SEQ ID NO: 162486 - RNA, 1701 nt, Artificial Sequence
  derived and/or modified CDS sequence (opt4) from hemagglutinin__InfluenzaA__ACI25746
augaagaccaucaucgcccugagcuacaucuucugccuggcccugggccaguaccugcccggcaacgacaacagcaccgccacccugugccugggccaccacgccgugcccaacggcacccuggugaagaccaucaccgacgaccagaucgaggugaccaacgccaccgagcuggugcagagcagcagcaccggcaagaucugcaacaacccccacagaauccuggacggcaucgacugcacccugaucgacgcccugcugggcgacccccacugcgacguguuccagaacgagaccugggaccuguucguggagagaagcaaggccuucagcaacugcuaccccuacgacgugcccgacuacgccagccugagaagccugguggccagcagcggcacccuggaguucaucaccgagggcuucaccuggaccggcgugacccagaacggcggcagcaacgccugcaagagaggccccggcagcggcuucuucagcagacugaacuggcugaccaagagcggcagcaccuaccccgugcugaacgugaccaugcccaacaacgacaacuucgacaagcuguacaucuggggcgugcaccaccccagcaccaaccaggagcagaccagccuguacgugcaggccagcggcagagugaccgugagcaccagaagaagccagcagaccaucauccccaacaucggcagcagacccugggugagaggccugagcagcagaaucagcaucuacuggaccaucgugaagcccggcgacgugcuggugaucgacagcaacggcaaccugaucgcccccagaggcuacuucaagaugagaaccggcaagagcagcaucaugagaagcgacgcccccaucgacaccugcaucagcgagugcaucacccccaacggcagcauccccaacgacaagcccuuccagaacgugaacaagaucaccuacggcgccugccccaaguacgugaagcagaacacccugaagcuggccaccggcaugagaaacgugcccgagaagcagaccagaggccuguucggcgccaucgccggcuucaucgagaacggcugggagggcaugaucgacggcugguacggcuucagacaccagaacagcgagggcaccggccaggccgccgaccugaagagcacccaggccgccaucgaccagaucaacggcaagcugaacagagugaucgagaagaccaacgagaaguuccaccagaucgagaaggaguucagcgagguggagggcagaauccaggaccuggagaaguacguggaggacaccaagaucgaccuguggagcuacaacgccgagcugcugguggcccuggagaaccagcacaccaucgaccugaccgacagcgagaugaacaagcuguucgagaagaccagaagacagcugagagagaacgccgaggacaugggcaacggcugcuucaagaucuaccacaagugcgacaacgccugcaucgagagcaucagaaacggcaccuacgaccacgacguguacagagacgaggcccugaacaacagauuccagaucaagggcguggagcugaagagcggcuacaaggacuggauccuguggaucagcuucgccaucagcugcuuccugcugugcguggugcugcugggcuucaucaugugggccugccagagaggcaacaucagaugcaacaucugcaucuga

SEQ ID NO: 162487 - RNA, 1701 nt, Artificial Sequence
  derived and/or modified CDS sequence (opt4) from hemagglutinin__InfluenzaA__ACI25757
augaagaccaucaucgcccugagcuacaucuucugccuggcccugggccaggaccugcccggcaacgacaacagcaccgccacccugugccugggccaccacgccgugcccaacggcacccuggugaagaccaucaccgacgaccagaucgaggugaccaacgccaccgagcuggugcagagcagcagcaccggcaagaucugcaacaacccccacagaauccuggacggcaucgacugcacccugaucgacgcccugcugggcgacccccacugcgacguguuccagaacgagaccugggaccuguucguggagagaagcaaggccuucagcaacugcuaccccuacgacgugcccgacuacgccagccugagaagccugguggccagcagcggcacccuggaguucaucaccgagggcuucaccuggaccggcgugacccagaacggcggcagcaacgccugcaagagaggccccggcagcggcuucuucagcagacugaacuggcugaccaagagcggcagcaccuaccuggugcugaacgugaccaugcccaacaacgacaacuucgacaagcuguacaucuggggcgugcaccaccccagcaccaaccaggagcagaccagccuguacgugcaggccagcggcagagugaccgugagcaccagaagaagccagcagaccaucauccccaacaucggcagcagacccugggugagaggccugagcagcagaaucagcaucuacuggaccaucgugaagcccggcgacgugcuggugaucaacagcaacggcaaccugaucgcccccagaggcuacuucaagaugagaaccggcaagagcagcaucaugagaagcgacgcccccaucgacaccugcaucagcgagugcaucacccccaacggcagcauccccaacgacaagcccuuccagaacgugaacaagaucaccuacggcgccugccccaaguacgugaagcagaacacccugaagcuggccaccggcaugagaaacgugcccgagaagcagaccagaggccuguucggcgccaucgccggcuucaucgagaacggcugggagggcaugaucgacggcugguacggcuucagacaccagaacagcgagggcaccggccaggccgccgaccugaagagcacccaggccgccaucgaccagaucaacggcaagcugaacagagugaucgagaagaccaacgagaaguuccaccagaucgagaaggaguucagcgagguggagggcagaauccaggaccuggagaaguacguggaggacaccaagaucgaccuguggagcuacaacgccgagcugcugguggcccuggagaaccagcacaccaucgaccugaccgacagcgagaugaacaagcuguucgagaagaccagaagacagcugagagagaacgccgaggacaugggcaacggcugcuucaagaucuaccacaagugcgacaacgccugcaucgagagcaucagaaacggcaccuacaaccacgacguguacagagacgaggcccugaacaacagauuccagaucaagggcguggagcugaagagcggcuacaaggacuggauccuguggaucagcuucgccaucagcugcuuccugcugugcguggugcugcugggcuucaucaugugggccugccagagaggcaacaucagaugcaacaucugcaucuga

SEQ ID NO: 162488 - RNA, 1701 nt, Artificial Sequence; identical to SEQ ID NO: 162376
  derived and/or modified CDS sequence (opt4) from hemagglutinin__InfluenzaA__ACI25768

SEQ ID NO: 162489 - RNA, 1701 nt, Artificial Sequence
  derived and/or modified CDS sequence (opt4) from hemagglutinin__InfluenzaA__ACI25779
augaagaccaucaucgcccugagcuacaucuucugccuggcccugggccaggaccugcccggcaacgacaacagcaccgccacccugugccugggccaccacgccgugcccaacggcacccuggugaagaccaucaccgacgaccagaucgaggugaccaacgccaccgagcuggugcagagcagcagcaccggcaagaucugcaacaacccccacagaauccuggacggcaucgacugcacccugaucgacgcccugcugggcgacccccacugcgacguguuccagaacgagaccugggaccuguucguggagagaagcaaggccuucagcaacugcuaccccuacgacgugcccgacuacgccagccugagaagccugguggccagcagcggcacccuggaguucaucaccgagggcuucaccuggaccggcgugacccagaacggcggcagcaacgccugcaagagaggccccggcagcggcuucuucagcagacugaacuggcugaccaagagcggcagcaccuaccccgugcugaacgugaccaugcccaacaacgacaacuucgacaagcuguacaucuggggcgugcaccaccccagcaccaaccaggagcagaccagccuguacgugcaggccagcggcagagugaccgugagcaccagaagaagccagcagaccaucauccccaacaucuggagcagacccugggugagaggccugagcagcagaaucagcaucuacuggaccaucgugaagcccggcgacgugcuggugaucaacagcaacggcaaccugaucgcccccagaggcuacuucaagaugagaaccggcaagagcagcaucaugagaagcgacgcccccaucgacaccugcaucagcgagugcaucacccccaacggcagcauccccaacgacaagcccuuccagaacgugaacaagaucaccuacggcgccugccccaaguacgugaagcagaacacccugaagcuggccaccggcaugagaaacgugcccgagaagcagaccagaggccuguucggcgccaucgccggcuucaucgagaacggcugggagggcaugaucgacggcugguacggcuucagacaccagaacagcgagggcaccggccaggccgccgaccugaagagcacccaggccgccaucgaccagaucaacggcaagcugaacagagugaucgagaagaccaacgagaaguuccaccagaucgagaaggaguucagcgagguggagggcagaauccaggaccuggagaaguacguggaggacaccaagaucgaccuguggagcuacaacgccgagcugcugguggcccuggagaaccagcacaccaucgaccugaccgacagcgagaugaacaagcuguucgagaagaccagaagacagcugagagagaacgccgaggacaugggcaacggcugcuucaagaucuaccacaagugcgacaacgccugcaucgagagcaucagaaacggcaccuacgaccacgacguguacagagacgaggcccugaacaacagauuccagaucaagggcguggagcugaagagcggcuacaaggacuggauccuguggaucagcuucgccaucagcugcuuccugcugugcguggugcugcugggcuucaucaugugggccugccagagaggcaacaucagaugcaacaucugcaucuga

SEQ ID NO: 162490 - RNA, 1701 nt, Artificial Sequence
  derived and/or modified CDS sequence (opt4) from hemagglutinin__InfluenzaA__ACI25790
augaagaccaucaucgcccugagcuacaucuucugccuggcccugggccaggaccugcccggcaacgacaacagcaccgccacccugugccugggccaccacgccgugcccaacggcacccuggugaagaccaucaccgacgaccagaucgaggugaccaacgccaccgagcuggugcagagcagcagcaccggcaagaucugcaacaacccccacagaauccuggacggcaucgacugcacccugaucgacgcccugcugggcgacccccacugcgacguguuccagaacgagaccugggaccuguucguggagagaagcaaggccuucagcaacugcuaccccuacgacgugcccgacuacgccagccugagaagccugguggccagcagcggcacccuggaguucaucaccgagggcuucaccuggaccggcgugacccagaacggcggcagcaacgccugcaagagaggccccggcagcggcuucuucagcagacugaacuggcugaccaagagcggcagcaccuaccccgugcugaacgugaccaugcccaacaacgacaacuucgacaagcuguacaucuggggcgugcaccaccccagcaccaaccaggagcagaccagccuguacgugcaggccagcggcagagugaccgugagcaccagaagaagccagcagaccaucauccccaacaucuggagcagacccugggugagaggccugagcagcagaaucagcaucuacuggaccaucgugaagcccggcgacgugcuggugaucaacagcaacggcaaccugaucgcccccagaggcuacuucaagaugagaaccggcaagagcagcaucaugagaagcgacgcccccaucgacaccugcaucagcgagugcaucacccccaacggcagcauccccaacgacaagcccuuccagaacgugaacaagaucaccuacggcgccugccccaaguacgugaagcagaacacccugaagcuggccaccggcaugagaaacgugcccgagaagcagaccagaggccuguucggcgccaucgccggcuucaucgagaacggcugggagggcaugaucgacggcugguacggcuucagacaccagaacagcgagggcaccggccaggccgccgaccugaagagcacccaggccgccaucgaccagaucaacggcaagcugaacagagugaucgagaagaccaacgagaaguuccaccagaucgagaaggaguucagcgagguggagggcagaauccaggaccuggagaaguacguggaggacaccaagaucgaccuguggagcuacaacgccgagcugcugguggcccuggagaaccagcacaccaucgaccugaccgacagcgagaugaacaagcuguucgagaagaccagaagacagcugagagagaacgccgaggacaugggcaacggcugcuucaagaucuaccacaagugcgacaacgccugcaucgagagcaucagaagcggcaccuacgaccacgacguguacagagacgaggcccugaacaacagauuccagaucaagggcguggagcugaagagcggcuacaaggacuggauccuguggaucagcuucgccaucagcugcuuccugcugugcguggugcugcugggcuucaucaugugggccugccagagaggcaacaucagaugcaacaucugcaucuga

SEQ ID NO: 162491 - RNA, 1701 nt, Artificial Sequence
  derived and/or modified CDS sequence (opt4) from hemagglutinin__InfluenzaA__ACI25801
augaagaccaucaucgcccugagcuacaucuucugccuggcccugggccaggaccugcccggcaacgacaacagcaccgccacccugugccugggccaccacgccgugcccaacggcacccuggugaagaccaucaccgacgaccagaucgaggugaccaacgccaccgagcuggugcagagcagcagcaccggcaagaucugcaacaacccccacagaauccuggacggcaucaacugcacccugaucgacgcccugcugggcgacccccacugcgacguguuccagaacgagaccugggaccuguucguggagagaagcaaggccuucagcaacugcuaccccuacgacgugcccgacuacgccagccugagaagccugguggccagcagcggcacccuggaguucaucaccgaggacuucaccuggaccggcgugacccagaacggcggcagcaacgccugcaagagaggccccggcagcggcuucuucagcagacugaacuggcugaccaagagcggcagcaccuaccccgugcuggacgugaccaugcccaacaacgacaacuucgacaagcuguacaucuggggcgugcaccaccccagcaccaaccaggagcagaccagccuguacgugcaggccagcggcagagugaccgugagcaccagaagaagccagcagaccaucauccccaacaucggcagcagacccugggugagaggccugagcagcagaaucagcaucuacuggaccaucgugaagcccggcgacgugcuggugaucaacagcaacggcaaccugaucgcccccagaggcuacuucaagaugagaaccggcaagagcagcaucaugagaagcgacgcccccaucgacaccugcaucagcgagugcaucacccccaacggcagcauccccaacgacaagcccuuccagaacgugaacaagaucaccuacggcgccugccccaaguacgugaagcagaacacccugaagcuggccaccggcaugagaaacgugcccgagaagcagaccagaggccuguucggcgccaucgccggcuucaucgagaacggcugggagggcaugaucgacggcugguacggcuucagacaccagaacagcgagggcaccggccaggccgccgaccugaagagcacccaggccgccaucgaccagaucaacggcaagcugaacagagugaucgagaagaccaacgagaaguuccaccagaucgagaaggaguucagcgagguggagggcagaauccaggaccuggagaaguacguggaggacaccaagaucgaccuguggagcuacaacgccgagcugcugguggcccuggagaaccagcacaccaucgaccugaccgacagcgagaugaacaagcuguucgagaagaccagaagacagcugagagagaacgccgaggacaugggcaacggcugcuucaagaucuaccacaagugcgacaacgccugcaucgagagcaucagaaacggcaccuacgaccacgacguguacagagacgaggcccugaacaacagauuccagaucaagggcguggagcugaagagcggcuacaaggacuggauccuguggaucagcuucgccaucagcugcuuccugcugugcguggugcugcugggcuucaucaugugggccugccagagaggcaacaucagaugcaacaucugcaucuga

SEQ ID NO: 162492 - RNA, 1689 nt, Artificial Sequence; identical to SEQ ID NO: 162410
  derived and/or modified CDS sequence (opt4) from hemagglutinin__InfluenzaA__ACI26274

SEQ ID NO: 162493 - RNA, 1698 nt, Artificial Sequence
  derived and/or modified CDS sequence (opt4) from hemagglutinin__InfluenzaA__ACI26307
augaagaccaucaucgcccugagcuacauccugugccugguguucacccagaagcugcccggcaacgacaacagcaccgccacccugugccugggccaccacgccgugcccaacggcaccaucgugaagaccaucaccaacgaccagaucgaggugaccaacgccaccgagcuggugcagagcagcagcaccggcgagaucugcgacagcccccaccagauccuggacggcgagaacugcacccugaucgacgcccugcugggcgacccccagugcgacggcuuccagaacaagaagugggaccuguucguggagagaagcaaggccuacagcaacugcuaccccuacgacgugcccgacuacgccagccugagaagccugguggccagcagcggcacccuggaguucaacaacgagagcuucaacuggaccggcgugacccagaacggcaccagcagcgccugcaucagaagaagcaacaacagcuucuucagcagacugaacuggcugacccaccugaaguucaaguaccccgcccugaacgugaccaugcccaacaacgagaaguucgacaagcuguacaucuggggcgugcaccaccccgugaccgacaacgaccagaucuuccuguacgcccagagcggcagaaucaccgugagcaccaagagaagccagcagaccgugauccccaacaucggcagcagacccagagugagaaacagccccagcagaaucagcaucuacuggaccaucgugaagcccggcgacauccugcugaucaacagcaccggcaaccugaucgcccccagaggcuacuucaagaucagaagcggcaagagcagcaucaugagaagcgacgcccccaucggcaagugcaacagcgagugcaucacccccaacggcagcauccccaacgacaagcccuuccagaacgugaacagaaucaccuacggcgccugccccagauacgugaagcagaacacccugaagcuggccaccggcaugagaaacgugcccgagaagcagaccagaggcaucuucggcgccaucgccggcuucaucgagaacggcugggagggcaugguggacggcugguacggcuucagacaccagaacagcgagggcaucggccaggccgccgaccugaagagcacccaggccgccaucgaccagaucaacggcaagcugaacagacugaucggcaagaccaacgagaaguuccaccagaucgagaaggaguucagcgagguggagggcagaauccaggaccuggagaaguacguggaggacaccaagaucgaccuguggagcuacaacgccgagcugcugguggcccuggagaaccagcacaccaucgaccugaccgacagcgagaugaacaagcuguucgagaagaccaagaagcagcugagagagaacgccgaggacaugggcaacggcugcuucaagaucuaccacaagugcgacaacgccugcaucggcagcaucagaaacggcaccuacgaccacgacguguacagagacgaggcccugaacaacagauuccagaucaagggcguggagcugaagagcggcuacaaggacuggauccuguggaucagcuucgccaucagcugcuuccugcugugcguggcccugcugggcuucaucaugugggccugccagaagggcaacaucagaugcaacaucugcaucuga

SEQ ID NO: 162494 - RNA, 1701 nt, Artificial Sequence
  derived and/or modified CDS sequence (opt4) from hemagglutinin__InfluenzaA__ACI26362
augaagaccaucaucgcccugagcuacauccugugccugguguucgcccagaagcugcccggcaacgacaacagcaccgccacccugugccugggccaccacgccgugcccaacggcaccaucgugaagaccaucaccaacgaccagaucgaggugaccaacgccaccgagcuggugcagagcagcagcaccggcgagaucugcgacagcccccaccagauccuggacggcgagaacugcacccugaucgacgcccugcugggcgacccccagugcgacggcuuccagaacaagaagugggaccuguucguggagagaagcaaggccuacagcaacugcuaccccuacgacgugcccgacuacgccagccugagaagccugguggccagcagcggcacccuggaguucaacaacgagagcuucaacuggaccggcgugacccagaacggcaccagcagcgccugcaucagaagaagcaacaacagcuucuucagcagacugaacuggcugacccaccugaaguucaaguaccccgcccugaacgugaccaugcccaacaacgagcaguucgacaagcuguacaucuggggcgugcaccaccccggcaccgacaacgaccagaucuuccuguacgcccaggccagcggcagaaucaccgugagcaccaagagaagccagcagaccgugauccccaacaucggcagcagacccagagugagaaacauccccagcagaaucagcaucuacuggaccaucgugaagcccggcgacauccugcugaucaacagcaccggcaaccugaucgcccccagaggcuacuucaagaucagaagcggcaagagcagcaucaugagaagcgacgcccccaucggcaagugcaacagcgagugcaucacccccaacggcagcauccccaacgacaagcccuuccagaacgugaacagaaucaccuacggcgccugccccagauacgugaagcagaacacccugaagcuggccaccggcaugagaaacgugcccgagaagcagaccagaggcaucuucggcgccaucgccggcuucaucgagaacggcugggagggcaugguggacggcugguacggcuucagacaccagaacagcgagggcagaggccaggccgccgaccugaagagcacccaggccgccaucgaccagaucaacggcaagcugaacagacugaucggcaagaccaacgagaaguuccaccagaucgagaaggaguucagcgagguggagggcagaauccaggaccuggagaaguacguggaggacaccaagaucgaccuguggagcuacaacgccgagcugcugguggcccuggagaaccagcacaccaucgaccugaccgacagcgagaugaacaagcuguucgagaagaccaagaagcagcugagagagaacgccgaggacaugggcaacggcugcuucaagaucuaccacaagugcgacaacgccugcaucggcagcaucagaaacggcaccuacgaccacgacguguacagagacgaggcccugaacaacagauuccagaucaagggcguggagcugaagagcggcuacaaggacuggauccuguggaucagcuucgccaucagcugcuuccugcugugcguggcccugcugggcuucaucaugugggccugccagaagggcaacaucagaugcaacaucugcaucuga

SEQ ID NO: 162495 - RNA, 1701 nt, Artificial Sequence
  derived and/or modified CDS sequence (opt4) from hemagglutinin__InfluenzaA__ACI26373
augaagaccaucaucgcccugagcuacauccugugccugguguucgcccagaagcugcccggcaacgacaacagcaccgccacccugugccugggccaccacgccgugcccaacggcaccaucgugaagaccaucaccaacgaccagaucgaggugaccaacgccaccgagcuggugcagagcagcagcaccggcgagaucugcgacagcccccaccagauccuggacggcgagaacugcacccugaucgacgcccugcugggcgacccccagugcgacggcuuccagaacaagaagugggaccuguucguggagagaagcaaggccuacagcaacugcuaccccuacgacgugcccgacuacgccagccugagaagccugguggccagcagcggcacccuggaguucaacaacgagagcuucaacugggccggcgugacccagaacggcaccagcagcgccugcaucagaaagagcaacaacagcuucuucagcagacugaacuggcugacccaccugaaguucaaguaccccgcccugaacgugaccaugcccaacaacgagcaguucgacaagcuguacaucuggggcgugcaccaccccggcaccgacaacgaccagaucuuccuguacgcccaggccagcggcagaaucaccgugagcaccaagagaagccagcagaccgugauccccaacaucggcagcagacccagagugagaaacauccccagcagaaucagcaucuacuggaccaucgugaagcccggcgacauccugcugaucaacagcaccggcaaccugaucgcccccagaggcuacuucaagaucagaagcggcaagagcagcaucaugagaagcgacgcccccaucggcaagugcaacagcgagugcaucacccccaacggcagcauccccaacgacaagcccuuccagaacgugaacagaaucaccuacggcgccugccccagauacgugaagcagaacacccugaagcuggccaccggcaugagaaacgugcccgagaagcagaccagaggcaucuucggcgccaucgccggcuucaucgagaacggcugggagggcaugguggacggcugguacggcuucagacaccagaacagcgagggcagaggccaggccgccgaccugaagagcacccaggccgccaucgaccagaucaacggcaagcugaacagacugaucggcaagaccaacgagaaguuccaccagaucgagaaggaguucagcgagguggagggcagaauccaggaccuggagaaguacguggaggacaccaagaucgaccuguggagcuacaacgccgagcugcugguggcccuggagaaccagcacaccaucgaccugaccgacagcgagaugaacaagcuguucgagaagaccaagaagcagcugagagagaacgccgaggacaugggcaacggcugcuucaagaucuaccacaagugcgacaacgccugcaucggcagcaucagaaacggcaccuacgaccacgacguguacagagacgaggcccugaacaacagauuccagaucaagggcguggagcugaagagcggcuacaaggacuggauccuguggaucagcuucgccaucagcugcuuccugcugugcguggcccugcugggcuucaucaugugggccugccagaagggcaacaucagaugcaacaucugcaucuga

SEQ ID NO: 162496 - RNA, 1701 nt, Artificial Sequence; identical to SEQ ID NO: 162361
  derived and/or modified CDS sequence (opt4) from hemagglutinin__InfluenzaA__ACI26395

SEQ ID NO: 162497 - RNA, 1701 nt, Artificial Sequence
  derived and/or modified CDS sequence (opt4) from hemagglutinin__InfluenzaA__ACI26406
augaagaccaucaucgcccugagcuacauccugugccugguguucgcccagaagcugcccggcaacgacaacagcaccgccacccugugccugggccaccacgccgugcccaacggcaccaucgugaagaccaucaccaacgaccagaucgaggugaccaacgccaccgagcuggugcagagcagcagcaccggcgagaucugcgacagcccccaccagauccuggacggcgagaacugcacccugaucgacgcccugcugggcgacccccagugcgacggcuuccagaacaagaagugggaccuguucguggagagaagcaaggccuacagcaacugcuaccccuacgacgugcccgacuacgccagccugagaagccugguggccagcagcggcacccuggaguucaacaacgagagcuucaacuggaccggcgugacccagaacggcaccagcagcgccugcaucagaagaagcaacaacagcuucuucagcagacugaacuggcugacccaccugaaguucaagcaccccgcccugaacgugaccaugcccaacaacgagaaguucgacaagcuguacaucuggggcgugcaccaccccggcaccgacaacgaccagaucuuccuguacgcccaggccagcggcagaaucaccgugagcaccaagagaagccagcagaccgugauccccaacaucggcagcagacccagagugagaaacauccccagcagaaucagcaucuacuggaccaucgugaagcccggcgacauccugcugaucaacagcaccggcaaccugaucgcccccagaggcuacuucaagaucagaagcggcaagagcagcaucaugagaagcgacgcccccaucggcaagugcaacagcgagugcaucacccccaacggcagcauccccaacgacaagcccuuccagaacgugaacagaaucaccuacggcgccugccccagauacgugaagcagaacacccugaagcuggccaccggcaugagaaacgugcccgagaagcagaccagaggcaucuucggcgccaucgccggcuucaucgagaacggcugggagggcaugguggacggcugguacggcuucagacaccagaacagcgagggcaucggccaggccgccgaccugaagagcacccaggccgccaucgaccagaucaacggcaagcugaacagacugaucggcaagaccaacgagaaguuccaccagaucgagaaggaguucagcgagguggagggcagaauccaggaccuggagaaguacguggaggacaccaagaucgaccuguggagcuacaacgccgagcugcugguggcccuggagaaccagcacaccaucgaccugaccgacagcgagaugaacaagcuguucgagaagaccaagaagcagcugagagagaacgccgaggacaugggcaacggcugcuucaagaucuaccacaagugcgacaacgccugcaucggcagcaucagaaacggcaccuacgaccacgacguguacagagacgaggcccugaacaacagauuccagaucaagggcguggagcugaagagcggcuacaaggacuggauccuguggaucagcuucgccaucagcugcuuccugcugugcguggcccugcugggcuucaucaugugggccugccagaagggcaacaucagaugcaacaucugcaucuga

SEQ ID NO: 162498 - RNA, 1701 nt, Artificial Sequence; identical to SEQ ID NO: 161988
  derived and/or modified CDS sequence (opt4) from hemagglutinin__InfluenzaA__ACI26417

SEQ ID NO: 162499 - RNA, 1701 nt, Artificial Sequence
  derived and/or modified CDS sequence (opt4) from hemagglutinin__InfluenzaA__ACI26428
augaagaccaucaucgcccugagcuacauccugugccugguguucgcccagaagcugcccggcaacgacaacagcaccgccacccugugccugggccaccacgccgugcccaacggcaccaucgugaagaccaucaccaacgaccagaucgaggugaccaacgccaccgagcuggugcagaucagcagcaccggcggcaucugcgacagcccccaccagauccuggacggcgagaacugcacccugaucgacgcccugcugggcgacccccagugcgacggcuuccagaacaagaagugggaccuguucguggagagaagcaaggccuacagcaacugcuaccccuacgacgugcccgacuacgccagccugagaagccugguggccagcagcggcacccuggaguucaacaacgagagcuucaacuggaccggcgugacccagaacggcaccagcagcagcugcaagagaagaagcaacaacagcuucuucagcagacugaacuggcugacccaccugaaguucaaguaccccgcccugaacgugaccaugcccaacaacgagaaguucgacaagcuguacaucuggggcgugcaccaccccgugaccgacaacgaccagaucagacuguacgcccaggccagcggcagaaucaccgugagcaccaagagaagccagcagaccgugauccccaacaucggcuacagacccagagugagagacauccccagcagaaucagcaucuacuggaccaucgugaagcccggcgacauccugcugaucaacagcaccggcaaccugaucgcccccagaggcuacuucaagaucagaagcggcaagagcagcaucaugagaagcgacgcccccaucggcaagugcaacagcgagugcaucacccccaacggcagcauccccaacgacaagcccuuccagaacgugaacagaaucaccuacggcgccugccccagauacgugaagcagaacacccugaagcuggccaccggcaugagaaacgugcccgagaagcagaccagaggcaucuucggcgccaucgccggcuucaucgagaacggcugggagggcaugguggacggcugguacggcuucagacaccagaacagcgagggcaucggccaggccgccgaccugaagagcacccaggccgccaucaaccagaucaacggcaagcugaacagacugaucggcaagaccaacgagaaguuccaccagaucgagaaggaguucagcgagguggagggcagaauccaggaccuggagaaguacguggaggacaccaagaucgaccuguggagcuacaacgccgagcugcugguggcccuggagaaccagcacaccaucgaccugaccgacagcgagaugaacaagcuguucgagagaaccaagaagcagcugagagagaacgccgaggacaugggcaacggcugcuucaagaucuaccacaagugcgacaacgccugcaucggcagcaucagaaacggcaccuacgaccacgacguguacagagacgaggcccugaacaacagauuccagaucaagggcguggagcugaagagcggcuacaaggacuggauccuguggaucagcuucgccaucagcugcuuccugcugugcguggugcugcugggcuucaucaugugggccugccagaagggcaacaucagaugcaacaucugcaucuga

SEQ ID NO: 162500 - RNA, 1698 nt, Artificial Sequence
  derived and/or modified CDS sequence (opt4) from hemagglutinin__InfluenzaA__ACI26439
augaaggugaagcugcuggugcugcugugcaccuucaccgccaccuacgccgacaccaucugcaucggcuaccacgccaacaacagcaccgacaccguggacaccgugcuggagaagaacgugaccgugacccacagcgugaaccugcuggaggacagccacaacggcaagcugugccugcugaagggcaucgccccccugcagcugggcaacugcagcguggccggcuggauccugggcaaccccgagugcgagcugcugaucagcaaggagagcuggagcuacaucguggagaagcccaaccccgagaacggcaccugcuaccccggccacuucgccgacuacgaggagcugagagagcagcugagcagcgugagcagcuucgagagauucgagaucuuccccaaggagagcagcuggcccaaccacaccgugaccggcgugagcgccagcugcagccacaacggcaagagcagcuucuacaagaaccugcuguggcugaccggcaagaacggccuguaccccaaccugagcaagagcuacgccaacaacaaggagaaggaggugcuggugcuguggggcgugcaccacccccccaacaucggcaaccagagagcccuguaccacaccgagaacgccuacgugagcguggugagcagccacuacagcagaaaguucacccccgagaucgccaagagacccaaggugagagaccaggagggcagaaucaacuacuacuggacccugcuggagcccggcgacaccaucaucuucgaggccaacggcaaccugaucgcccccagauacgccuucgcccugagcagaggcuucggcagcggcaucaucaacagcaacgcccccauggacgagugcgacgccaagugccagaccccccagggcgccaucaacagcagccugcccuuccagaacgugcaccccgugaccaucggcgagugccccaaguacgugagaagcgccaagcugagaauggugaccggccugagaaacauccccagcauccagagcagaggccuguucggcgccaucgccggcuucaucgagggcggcuggaccggcaugguggacggcugguacggcuaccaccaccagaacgagcagggcagcggcuacgccgccgaccagaagagcacccagaacgccaucaacggcaucaccaacaaggugaacagcgugaucgagaagaugaacacccaguucaccgccgugggcaaggaguucaacaagcuggagagaagaauggagaaccugaacaagaagguggacgacggcuucaucgacguguggaccuacaacgccgagcugcuggugcugcuggagaacgagagaacccuggacuuccacgacagcaacgugaagaaccuguacgagaaggugaagagccagcugaagaacaacgccaaggagaucggcaacggcugcuucgaguucuaccacaagugcaacgacgagugcauggagagcgugaagaacggcaccuacgacuaccccaaguacagcgaggagagcaagcugagcagagagaagaucgacggcgugaagcuggagagcaugggcguguaccagauccuggccaucuacagcaccguggccagcagccuggugcugcuggugagccugggcgccaucagcuucuggaugugcagcaacggcagccugcagugcagaaucugcaucuga

SEQ ID NO: 162501 - RNA, 1698 nt, Artificial Sequence; identical to SEQ ID NO: 162500
  derived and/or modified CDS sequence (opt4) from hemagglutinin__InfluenzaA__ACI26450

SEQ ID NO: 162502 - RNA, 1701 nt, Artificial Sequence
  derived and/or modified CDS sequence (opt4) from hemagglutinin__InfluenzaA__ACI26461
augaagaccaucaucgcccugagcuacauccugugccugguguucacccagaagcugcccggcaacgacaacagcaccgccacccugugccugggccaccacgccgugcccaacggcaccaucgugaagaccaucaccaacgaccagaucgaggugaccaacgccaccgagcuggugcagagcagcagcaccggcgagaucugcgacagcccccaccagauccuggacggcgagaacugcacccugaucgacgcccugcugggcgacccccagugcgacggcuuccagaacaagaagugggaccuguucguggagagaagcaaggccuacagcaacugcuaccccuacgacgugcccgacuacgccagccugagaagccugguggccagcagcggcacccuggaguucaacaacgagagcuucaacuggaccggcgugacccagaacggcaccagcagcgccugcaucagaagaagcaacaacagcuucuucagcagacugaacuggcugacccaccugaaguucaaguaccccgcccugaacgugaccaugcccaacaacgagaaguucgacaagcuguacaucuggggcgugcaccaccccggcaccgacaacgaccagaucuuccccuacgcccaggccagcggcagaaucaccgugagcaccaagagaagccagcagaccgugauccccaacaucggcagcagacccagagugagaaacauccccagcagaaucagcaucuacuggaccaucgugaagcccggcgacauccugcugaucaacagcaccggcaaccugaucgcccccagaggcuacuucaagaucagaagcggcaagagcagcaucaugagaagcgacgcccccaucggcaagugcaacagcgagugcaucacccccaacggcagcauccccaacgacaagcccuuccagaacgugaacagaaucaccuacggcgccugccccagauacgugaagcagaacacccugaagcuggccaccggcaugagaaacgugcccgagaagcagaccagaggcaucuucggcgccaucgccggcuucaucgagaacggcugggagggcaugguggacggcugguacggcuucagacaccagaacagcgagggcaucggccaggccgccgaccugaagagcacccaggccgccaucgaccagaucaacggcaagcugaacagacugaucggcaagaccaacgagaaguuccaccagaucgagaaggaguucagcgagguggagggcagaauccaggaccuggagaaguacguggaggacaccaagaucgaccuguggagcuacaacgccgagcugcugguggcccuggagaaccagcacaccaucgaccugaccgacagcgagaugaacaagcuguucgagaagaccaagaagcagcugagagagaacgccgaggacaugggcaacggcugcuucaagaucuaccacaagugcgacaacgccugcaucggcagcaucagaaacggcaccuacgaccacaacguguacagagacgaggcccugaacaacagauuccagaucaagggcguggagcugaagagcggcuacaaggacuggauccuguggaucagcuucgccaucagcugcuuccugcugugcguggcccugcugggcuucaucaugugggccugccagaagggcaacaucagaugcaacaucugcaucuga

SEQ ID NO: 162503 - RNA, 1698 nt, Artificial Sequence
  derived and/or modified CDS sequence (opt4) from hemagglutinin__InfluenzaA__ACI26472
augaagaccaucaucgcccugagcuacauccugugccugguguucacccagaagcugcccggcaacgacaacagcaccgccacccugugccugggccaccacgccgugcccaacggcaccaucgugaagaccaucaccaacgaccagaucgaggugaccaacgccaccgagcuggugcagagcagcagcaccggcgagaucugcgacagcccccaccagauccuggacggcgagaacugcacccugaucgacgcccugcugggcgacccccagugcgacggcuuccagaacaagaagugggaccuguucguggagagaagcaaggccuacagcaacugcuaccccuacgacgugcccgacuacgccagccugagaagccugguggccagcagcggcacccuggaguucaacaacgagagcuucaacuggaccggcgugacccagaacggcaccagcagcgccugcaucagaagaagcaacaacagcuucuucagcagacugaacuggcugacccaccugaaguucaaguaccccgcccugaacgugaccaugcccaacaacgagaaguucgacaagcuguacaucuggggcgugcaccaccccgugaccgacaacgaccagaucuuccuguacgcccagagcggcagaaucaccgugagcaccaagagaagccagcagaccgugauccccaacaucggcuacagacccagagugagaaacauccccagcagaaucagcaucuacuggaccaucgugaagcccggcgacauccugcugaucaacagcaccggcaaccugaucgcccccagaggcuacuucaagaucagaagcggcaagagcagcaucaugagaagcgacgcccccaucggcaagugcaacagcgagugcaucacccccaacggcagcauccccaacgacaagcccuuccagaacgugaacagaaucaccuacggcgccugccccagauacgugaagcagaacacccugaagcuggccaccggcaugagaaacgugcccgagaagcagaccagaggcaucuucggcgccaucgccggcuucaucgagaacggcugggagggcaugguggacggcugguacggcuucagacaccagaacagcgagggcaucggccaggccgccgaccugaagagcacccaggccgccaucgaccagaucaacggcaagcugaacagacugaucggcaagaccaacgagaaguuccaccagaucgagaaggaguucagcgagguggagggcagaauccaggaccuggagaaguacguggaggacaccaagaucgaccuguggagcuacaacgccgagcugcugguggcccuggagaaccagcacaccaucgaccugaccgacagcgagaugaacaagcuguucgagaagaccaagaagcagcugagagagaacgccgaggacaugggcaacggcugcuucaagaucuaccacaagugcgacaacgccugcaucggcagcaucagaaacggcaccuacgaccacgacguguacagagacgaggcccugaacaacagauuccagaucaagggcguggagcugaagagcggcuacaaggacuggauccuguggaucagcuucgccaucagcugcuuccugcugugcguggcccugcugggcuucaucaugugggccugccagaagggcaacaucagaugcaacaucugcaucuga

SEQ ID NO: 162504 - RNA, 1701 nt, Artificial Sequence; identical to SEQ ID NO: 162495
  derived and/or modified CDS sequence (opt4) from hemagglutinin__InfluenzaA__ACI26483

SEQ ID NO: 162505 - RNA, 1701 nt, Artificial Sequence
  derived and/or modified CDS sequence (opt4) from hemagglutinin__InfluenzaA__ACI26505
augaagaccaucaucgcccugagcuacauccugugccugguguucgcccagaagcugcccggcaacgacaacagcaccgccacccugugccugggccaccacgccgugcccaacggcaccaucgugaagaccaucaccaacgaccagaucgaggugaccaacgccaccgagcuggugcagagcagcagcaccggcgagaucugcgacagcccccaccagauccuggacggcgagaacugcacccugaucgacgcccugcugggcgacccccagugcgacggcuuccagaacaagaagugggaccuguucguggagagaagcaaggccuacagcaacugcuaccccuacgacgugcccgacuacgccagccugagaagccugguggccagcagcggcacccuggaguucaacaacgagagcuucaacugggccggcgugacccagaacggcaccagcagcgccugcaucagaaagagcaacaacagcuucuucagcagacugaacuggcugacccaccugaaguucaaguaccccgcccugaacgugaccaugcccaacaacgagcaguucgacaagcuguacaucuggggcgugcaccaccccggcaccgacaacgaccagaucuuccuguacgcccaggccagcggcagaaucaccgugagcaccaagagaagccagcagaccgugauccccaacaucggcagcagacccagagugagaaacauccccagcagaaucagcaucuacuggaccaucgugaagcccggcgacauccugcugaucaacagcaccggcaaccugaucgcccccagaggcuacuucaagaucagaagcggcaagagcagcaucaugagaagcgacgcccccaucggcaagugcaacagcgagugcaucacccccaacggcagcauccccaacgacaagcccuuccagaacgugaacagaaucaccuacggcgccugccccagauacgugaagcagaacacccugaagcuggccaccggcaugagaaacgugcccgagaagcagaccagaggcaucuucggcgccaucgccggcuucaucgagaacggcugggagggcaugguggacggcugguacggcuucagacaccagaacagcgagggcagaggccaggccgccgaccugaagagcacccaggccgccaucgaccagaucaacggcaagcugaacagacugaucggcaagaccaacgagaaguuccaccagaucgagaaggaguucagcgagguggagggcagaauccaggaccuggagaaguacguggaggacaccaagaucgaccuguggagcuacaacgccgagcugcugguggcccuggagaaccagcacaccaucgaccugaccgacagcgagaugaacaagcuguucgagaagaccaagaagcagcugagagagaacgccgaggacaugggcaacggcugcuucaagaucuaccacaagugcgacaacgccugcaucagaagcaucagaaacggcaccuacgaccacgacguguacagagacgaggcccugaacaacagauuccagaucaagggcguggagcugaagagcggcuacaaggacuggauccuguggaucagcuucgccaucagcugcuuccugcugugcguggcccugcugggcuucaucaugugggccugccagaagggcaacaucagaugcaacaucugcaucuga

SEQ ID NO: 162506 - RNA, 1701 nt, Artificial Sequence; identical to SEQ ID NO: 162494
  derived and/or modified CDS sequence (opt4) from hemagglutinin__InfluenzaA__ACI26516

SEQ ID NO: 162507 - RNA, 1701 nt, Artificial Sequence; identical to SEQ ID NO: 162495
  derived and/or modified CDS sequence (opt4) from hemagglutinin__InfluenzaA__ACI26527

SEQ ID NO: 162508 - RNA, 1701 nt, Artificial Sequence
  derived and/or modified CDS sequence (opt4) from hemagglutinin__InfluenzaA__ACI26538
augaagaccaucaucgcccugagcuacauccugugccugguguucgcccagaagcugcccggcaacgacaacagcaccgccacccugugccugggccaccacgccgugcccaacggcaccaucgugaagaccaucaccaacgaccagaucgaggugaccaacgccaccgagcuggugcagagcagcagcaccggcgagaucugcgacagcccccaccagauccuggacggcgagaacugcacccugaucgacgcccugcugggcgacccccagugcgacggcuuccagaacaagaagugggaccuguucguggagagaagcaaggccuacagcaacugcuaccccuacgacgugcccgacuacgccagccugagaagccugguggccagcagcggcacccuggaguucaacaacgagagcuucaacuggaccggcgugacccagaacggcaccagcagcgccugcaucagaagaagcaacaacagcuucuucagcagacugaacuggcugacccaccugaaguucaaguaccccgcccugaacgugaccaugcccaacaacgagcaguucgacaagcuguacaucuggggcgugcaccaccccggcaccgacaacgaccagaucuuccuguacgcccaggccagcggcagaaucaccgugagcaccaagagaagccagcagaccgugauccccaacaucggcagcagacccagagugagaaacauccccagcagaaucagcaucuacuggaccaucgugaagcccggcgacauccugcugaucaacagcaccggcaaccugaucgcccccagaggcuacuucaagaucagaagcggcaagagcagcaucaugagaagcgacgcccccaucggcaagugcaacagcgagugcaucacccccaacggcagcauccccaacgacaagcccuuccagaacgugaacagaaucaccuacggcgccugccccagauacgugaagcagaacacccugaagcuggccaccggcaugagaaacgugcccgacaagcagaccagaggcaucuucggcgccaucgccggcuucaucgagaacggcugggagggcaugguggacggcugguacggcuucagacaccagaacagcgagggcagaggccaggccgccgaccugaagagcacccaggccgccaucgaccagaucaacggcaagcugaacagacugaucggcaagaccaacgagaaguuccaccagaucgagaaggaguucagcgagguggagggcagaauccaggaccuggagaaguacguggaggacaccaagaucgaccuguggagcuacaacgccgagcugcugguggcccuggagaaccagcacaccaucgaccugaccgacagcgagaugaacaagcuguucgagaagaccaagaagcagcugagagagaacgccgaggacaugggcaacggcugcuucaagaucuaccacaagugcgacaacgccugcaucggcagcaucagaaacggcaccuacgaccacgacguguacagagacgaggcccugaacaacagauuccagaucaagggcguggagcugaagagcggcuacaaggacuggauccuguggaucagcuucgccaucagcugcuuccugcugugcguggcccugcugggcuucaucaugugggccugccagaagggcaacaucagaugcaacaucugcaucuga

SEQ ID NO: 162509 - RNA, 1701 nt, Artificial Sequence
  derived and/or modified CDS sequence (opt4) from hemagglutinin__InfluenzaA__ACI26549
augaagaccaucaucgcccugagcuacaucuucugccugguguucgcccagaagcugcccggcaacgacaacagcaccgccacccugugccugggccaccacgccgugcccaacggcacccuggugaagaccaucaccaacgaccagaucgaggugaccaacgccaccgagcuggugcagagcagcagcaccggcagaaucugcgacagcccccacagaauccuggacggcaagaacugcacccugaucgacgcccugcugggcgacccccacugcgacggcuuccagaacgagaagugggaccuguucguggagagaagcaaggccuacagcaacugcuaccccuacgacgugcccgacuacgccagccugagaagccugguggccagcagcggcacccuggaguucaucaacgaggacuucaacuggaccggcgugacccagagcggcggcagcuacagcugcaagagaggcagcgugaacagcuucuucagcagacugaacuggcugcacgagagcgaguacaaguaccccgcccugaacgugaccaugcccaacaacggcaaguucgacaagcuguacaucuggggcgugcaccaccccagcaccgacagagagcagaccaagcuguacgugagagccagcggcagagugaccgugagcaccaagagaagccagcagaccgugauccccaacaucggcagcagacccugggugagaggccugagcagcagaaucagcaucuacuggaccaucgugaagcccggcgacauccugcugaucaacagcaccggcaaccugaucgcccccagaggcuacuucaagaucagaaccggcaagagcagcaucaugagaagcgacgcccccaucggcaccugcagcagcgagugcaucacccccaacggcagcauccccaacgacaagcccuuccagaacgugaacaagaucaccuacggcgccugccccagauacgugaagcagaacacccugaagcuggccaccggcaugagaaacgugcccgagaagcagaccagaggcaucuucggcgccaucgccggcuucaucgagaacggcugggagggcaugguggacggcugguacggcuucagacaccagaacagcgagggcaccggccaggccgccgaccugaagagcacccaggccgccaucgaccagaucaacggcaagcugaacagacugaucgagaagaccaacgagaaguuccaccagaucgagaaggaguucagcgagguggagggcagaauccaggaccuggaggaguacguggaggacaccaagaucgaccuguggagcuacaacgccgagcugcugguggcccuggagaaccagcacaccaucgaccugaccgacagcgagaugaacaagcuguucgagaagaccagaaagcagcugagagagaacgccgaggacaugggcaacggcugcuucaagaucuaccacaagugcgacaacgccugcaucggcagcaucagaaacggcaccuacgaccacgacguguacagagacgaggcccugaacaacagauuccagaucaagggcguggagcugaagagcggcuacaaggacuggauccuguggaucagcuucgccaucagcugcuuccugcugugcguggugcugcugggcuucaucaugugggccugccagaagggcaacaucagaugcaacaucugcaucuga

SEQ ID NO: 162510 - RNA, 1701 nt, Artificial Sequence
  derived and/or modified CDS sequence (opt4) from hemagglutinin__InfluenzaA__ACI26560
augaagaccaucaucgcccugagcuacaucuucugccugguguucgcccagaagcugcccggcaacgacaacagcaccgccacccugugccugggccaccacgccgugcccaacggcacccuggugaagaccaucaccaacgaccagaucgaggugaccaacgccaccgagcuggugcagagcagcagcaccggcagaaucugcgacagcccccacagaauccuggacggcaagaacugcacccugaucgacgcccugcugggcgacccccacugcgacggcuuccagaacaaggagugggaccuguucguggagagaagcaaggccuacagcaacugcuaccccuacgacgugcccgacuacgccagccugagaagccugguggccagcagcggcacccuggaguucaucaacgaggacuucaacuggaccggcguggcccagagcggcggcagcuacgccugcaagagaggcagcgugaacagcuucuucagcagacugaacuggcugcacgagagcgaguacaaguaccccgcccugaacgugaccaugcccaacaacggcaaguucgacaagcuguacaucuggggcgugcaccaccccaucaccgacagagagcagaccaaccuguacgugagagccagcggcagagugaccgugagcaccaagagaagccagcagaccgugauccccaacaucggcagcagacccugggugagaggccugagcagcagaaucagcaucuacuggaccaucgugaagcccggcgacauccugcugaucaacagcaccggcaaccugaucgcccccagaggcuacuucaagaucagaaccggcaagagcagcaucaugagaagcgacgcccccaucggcaccugcagcagcgagugcaucacccccaacggcagcauccccaacgacaagcccuuccagaacgugaacagaaucaccuacggcgccugccccagauacgugaagcagaacacccugaagcuggccaccggcaugagaaacgugcccgagaagcagaccagaggcaucuucggcgccaucgccggcuucaucgagaacggcugggagggcaugguggacggcugguacggcuucagacaccagaacagcgagggcaccggccaggccgccgaccugaagagcacccaggccgccaucgaccagaucaacggcaagcugaacagacugaucgagaagaccaacgagaaguuccaccagaucgagaaggaguucagcgagguggagggcagaauccaggaccuggagaaguacguggaggacaccaagaucgaccuguggagcuacaacgccgagcugcugguggcccuggagaaccagcacaccaucgaccugaccgacagcgagaugaacaagcuguucgagaagaccagaaagcagcugagagagaacgccgaggacaugggcaacggcugcuucaagaucuaccacaagugcgacaacgccugcaucggcagcaucagaaacggcaccuacgaccacgacguguacagagacgaggcccugaacaacagauuccagaucaagggcguggagcugaagagcggcuacaaggacuggauccuguggaucagcuucgccaucagcugcuuccugcugugcguggugcugcugggcuucaucaugugggccugccagaagggcaacaucagaugcaacaucugcaucuga

SEQ ID NO: 162511 - RNA, 1701 nt, Artificial Sequence
  derived and/or modified CDS sequence (opt4) from hemagglutinin__InfluenzaA__ACI26571
augaagaccaucaucgcccugagcuacaucuucugccugguguucgcccagaagcugcccggcaacgacaacagcaccgccacccugugccugggccaccacgccgugcccaacggcacccuggugaagaccaucaccaacgaccagaucgaggugaccaacgccaccgagcuggugcagagcagcagcaccggcagaaucugcgacagcccccacagaauccuggacggcaagaacugcacccugaucgacgcccugcugggcgacccccacugcgacggcuuccagaacaaggagugggaccuguucguggagagaagcaaggccuacagcaacugcuaccccuacgacgugcccgacuacgccagccugagaagccugguggccagcagcggcacccuggaguucaucaacgaggacuucaacuggaccggcguggcccagagcggcggcagcuacgccugcaagagaggcagcgugaacagcuucuucagcagacugaacuggcugcacgagagcgaguacaaguaccccgcccugaacgugaccaugcccaacaacggcaaguucgacaagcuguacaucuggggcgugcaccaccccagcaccgacagagagcagaccaagcuguacgugagagccagcggcagagugaccgugagcaccaagagaagccagcagaccgugauccccaacaucggcagcagacccugggugagaggccugagcagcagaaucagcaucuacuggaccaucgugaagcccggcgacauccugcugaucaacagcaccggcaaccugaucgcccccagaggcuacuucaagaucagaaccggcaagagcagcaucaugagaagcgacgcccccaucggcaccugcagcagcgagugcaucacccccaacggcagcauccccaacgacaagcccuuccagaacgugaacagaaucaccuacggcgccugccccagauacgugaagcagaacacccugaagcuggccaccggcaugagaaacgugcccgagaagcagaccagaggcaucuucggcgccaucgccggcuucaucgagaacggcugggagggcaugguggacggcugguacggcuucagacaccagaacagcgagggcaccggccaggccgccgaccugaagagcacccaggccgccaucgaccagaucaacggcaagcugaacagacugaucgagaagaccaacgagaaguuccaccagaucgagaaggaguucagcgagguggagggcagaauccaggaccuggagaaguacguggaggacaccaagaucgaccuguggagcuacaacgccgagcugcugguggcccuggagaaccagcacaccaucgaccugaccgacagcgagaugaacaagcuguucgagaagaccagaaagcagcugagagagaacgccgaggacaugggcaacggcugcuucaagaucuaccacaagugcgacaacgccugcaucggcagcaucagaaacggcaccuacaaccacgacguguacagagacgaggcccugaacaacagauuccagaucaagggcguggagcugaagagcggcuacaaggacuggauccuguggaucagcuucgccaucagcugcuuccugcugugcguggugcugcugggcuucaucaugugggccugccagaagggcaacaucagaugcaacaucugcaucuga

SEQ ID NO: 162512 - RNA, 1701 nt, Artificial Sequence
  derived and/or modified CDS sequence (opt4) from hemagglutinin__InfluenzaA__ACI26593
augaagaccaucaucgcccugagcuacauccugugccugguguucgcccagaagcugcccggcaacgacaacagcaccgccacccugugccugggccaccacgccgugcccaacggcacccuggugaagaccaucaccaacgaccagaucgaggugaccaacgccaccgagcuggugcagagcagcagcaccggcagaaucugcgacagcccccacagaauccuggacggcaagaacugcacccugaucgacgcccugcugggcgacccccacugcgacggcuuccagaacaaggagugggaccuguucguggagagaagcaaggccuacagcaacugcuaccccuacgacgugcccgacuacgccagccugagaagccugguggccagcagcggcacccuggaguucaccaacgaggacuucaacuggaccggcguggcccagagcggcgagagcuacgccugcaagagaggcagcgugaagagcuucuucagcagacugaacuggcugcacaagagcgacuacaaguaccccgcccugaacgugaccaugcccaacaacggcaaguucgacaagcuguacaucuggggcgugcaccaccccagcaccgacagagagcagaccagccuguacgugagagccagcggcagagugaccgugagcaccaagagaagccagcagaccgugauccccaacaucggcagcagacccugggugagaggccugagcagcagaaucagcaucuacuggaccaucgugaagcccggcgacauccugcugaucaacagcaccggcaaccugaucgcccccagaggcuacuucaagaucagaaccggcaagagcagcaucaugagaagcgacgcccccaucggcaccugcagcagcgagugcaucacccccaacggcagcauccccaacgacaagcccuuccagaacgugaacagaaucaccuacggcgccugccccagauacgugaagcagaacacccugaagcuggccaccggcaugagaaacgugcccgagaagcagaccagaggcaucuucggcgccaucgccggcuucaucgagaacggcugggagggcaugguggacggcugguacggcuucagacaccagaacagcgagggcaccggccaggccgccgaccugaagagcacccaggccgccaucgaccagaucaacggcaagcugaacagacugaucgagaagaccaacgagaaguuccaccagaucgagaaggaguucagcgagguggagggcagaauccaggaccuggagaaguacguggaggacaccaagaucgaccuguggagcuacaacgccgagcugcugguggcccuggagaaccagcacaccaucgaccugaccgacagcgagaugaacaagcuguucgagaagaccagaaagcagcugagagagaacgccgaggacaugggcaacggcugcuucaagaucuaccacaagugcgacaacgccugcaucggcagcaucagaaacggcaccuacgaccacgacguguacagagacgaggcccugaacaacagauuccagaucaagggcguggagcugaagagcggcuacaaggacuggauccuguggaucagcuucgccaucagcugcuuccugcugugcguggugcugcugggcuucaucaugugggccugccagaagggcaacaucagaugcaacaucugcaucuga

SEQ ID NO: 162513 - RNA, 1698 nt, Artificial Sequence
  derived and/or modified CDS sequence (opt4) from hemagglutinin__InfluenzaA__ACI32715
augaaggugaagcugcuggugcugcugugcaccuucaccgccaccuacgccgacaccaucugcaucggcuaccacgccaacaacagcaccgacaccguggacaccgugcuggagaagaacgugaccgugacccacagcgugaaccugcuggaggacagccacaacggcaagcugugccugcugaagggcaucgccccccugcagcugggcaacugcagcguggccggcuggauccugggcaaccccgagugcgagcugcugaucagcaaggagagcuggagcuacaucguggagacccccaaccccgagaacggcaccugcuaccccggcuacuucgccgacuacgaggagcugagagagcagcugagcagcgugagcagcuucgagagauucgagaucuuccccaaggagagcagcuggcccaaccacaccgugaccggcgugagcgccagcugcagccacaacggcaagagcagcuucuacagaaaccugcuguggcugaccggcaagaacggccuguaccccaaccugagcaagagcuacgccaacaacaaggagaaggaggugcuggugcuguggggcgugcaccacccccccaacaucggcgaccagagagcccuguaccacaccgagaacgccuacgugagcguggugagcagccacuacagcagaagauucacccccgagaucgccaagagacccaaggugagagaccaggagggcagaaucaacuacuacuggacccugcuggagcccggcgacaccaucaucuucgaggccaacggcaaccugaucgcccccagauucgccuucgcccugagcagaggcuucggcagcggcaucaucaccagcaacgcccccauggacgagugcgacgccaagugccagaccccccagggcgccaucaacagcagccugcccuuccagaacgugcaccccgugaccaucggcgagugccccaaguacgugagaagcgccaagcugagaauggccaccggccugagaaacauccccagcauccagagcagaggccuguucggcgccaucgccggcuucaucgagggcggcuggaccggcaugguggacggcugguacggcuaccaccaccagaacgagcagggcagcggcuacgccgccgaccagaagagcacccagaacgccaucaacggcaucaccaacaaggugaacaccgugaucgagaagaugaacacccaguucaccgccgugggcaaggaguucagcaagcuggagagaagaauggagaaccugaacaagaagguggacgacggcuuccuggacaucuggaccuacaacgccgagcugcuggugcugcuggagaacgagagaacccuggacuuccacgacagcaacgugaagaaccuguacgagaaggugaagagccagcugaagaacaacgccaaggagaucggcaacggcugcuucgaguucuaccacaagugcaacgacgagugcauggagagcgugaagaacggcaccuacgacuaccccaaguacagcgaggagagcaagcugaacagagagaagaucgacggcgugaagcuggagagcaugggcguguaccagauccuggccaucuacagcaccguggccagcagccuggugcugcuggugagccugggcgccaucagcuucuggaugugcagcaacggcagccugcagugcagaaucugcaucuga

SEQ ID NO: 162514 - RNA, 1698 nt, Artificial Sequence
  derived and/or modified CDS sequence (opt4) from hemagglutinin__InfluenzaA__ACI32716
augaaggugaagcugcuggugcugcugugcaccuucaccgccaccuacgccgacaccaucugcaucggcuaccacgccaacaacagcaccgacaccguggacaccgugcuggagaagaacgugaccgugacccacagcgugaaccugcuggaggacagccacaacggcaagcugugccugcugaagggcaucgccccccugcagcugggcaacugcagcguggccggcuggauccugggcaaccccgagugcgagcugcugaucagcaaggagagcuggagcuacaucguggagacccccaaccccgagaacggcaccugcuaccccggcuacuucgccgacuacgaggagcugagagagcagcugagcagcgugagcagcuucgagagauucgagaucuuccccaaggagagcagcuggcccaaccacaccgugaccggcgugagcgccagcugcagccacaacggcaagagcagcuucuacagaaaccugcuguggcugaccggcaagaacggccuguaccccaaccugagcaagagcuacgccaacaacaaggagaaggaggugcuggugcuguggggcgugcaccacccccccaacaucggcgaccagagagcccuguaccacaccgagaacgccuacgugagcguggugagcagccacuacagcagaagauucacccccgagaucgccaagagacccaaggugagagaccaggagggcagaaucaacuacuacuggacccugcuggagcccggcgacaccaucaucuucgaggccaacggcaaccugaucgcccccagauucgccuucgcccugagcagaggcuucggcagcggcaucaucaccagcaacgcccccauggacgagugcgacgccaagugccagaccccccagggcgccaucaacagcagccugcccuuccagaacgugcaccccgugaccaucggcgagugccccaaguacgugagaagcgccaagcugagaauggccaccggccugagaaacauccccagcauccagagcagaggccuguucggcgccaucgccggcuucaucgagggcggcuggaccggcaugguggacggcugguacggcuaccaccaccagaacgagcagggcagcggcuacgccgccgaccagaagagcacccagaacgccaucaacggcaucaccaacaaggugaacagcgugaucgagaagaugaacacccaguucaccgccgugggcaaggaguucagcaagcuggagagaagaauggagaaccugaacaagaagguggacgacggcuuccuggacaucuggaccuacaacgccgagcugcuggugcugcuggagaacgagagaacccuggacuuccacgacagcaacgugaagaaccuguacgagaaggugaagagccagcugaagaacaacgccaaggagaucggcaacggcugcuucgaguucuaccacaagugcaacgacgagugcauggagagcgugaagaacggcaccuacgacuaccccaaguacagcgaggagagcaagcugaacagagagaagaucgacggcgugaagcuggagagcaugggcguguaccagauccuggccaucuacagcaccguggccagcagccuggugcugcuggugagccugggcgccaucagcuucuggaugugcagcaacggcagccugcagugcaccaucugcaucuga

SEQ ID NO: 162515 - RNA, 1698 nt, Artificial Sequence
  derived and/or modified CDS sequence (opt4) from hemagglutinin__InfluenzaA__ACI32717
augaaggugaagcugcuggugcugcugugcaccuucaccgccaccuacgccgacaccaucugcaucggcuaccacgccaacaacagcaccgacaccguggacaccgugcuggagaagaacgugaccgugacccacagcgugaaccugcuggaggacagccacaacggcaagcugugccugcugaagggcaucgccccccugcagcugggcaacugcagcguggccggcuggauccugggcaaccccgagugcgagcugcugaucagcaaggagagcuggagcuacaucguggagacccccaaccccgagaacggcaccugcuaccccggcuacuucgccgacuacgaggagcugagagagcagcugagcagcgugagcagcuucgagagauucgagaucuuccccaaggagagcagcuggcccaaccacaccgugaccggcgugagcgccagcugcagccacaacggcaagagcagcuucuacagaaaccugcuguggcugaccggcaagaacggccuguaccccaaccugagcaagagcuacgccaacaacaaggagaaggaggugcuggugcuguggggcgugcaccacccccccaacaucggcgaccagagagcccuguaccacaccgagaacgccuacgugagcguggugagcagccacuacagcagaagauucacccccgagaucgccaagagacccaaggugagagaccaggagggcagaaucaacuacuacuggacccugcuggagcccggcgacaccaucaucuucgaggccaacggcaaccugaucgcccccagauucgccuucgcccugagcagaggcuucggcagcggcaucaucaccagcaacgcccccauggacgagugcgacgccaagugccagaccccccagggcgccaugaacagcagccugcccuuccagaacgugcaccccgugaccaucggcgagugccccaaguacgugagaagcgccaagcugagaauggccaccggccugagaaacauccccagcauccagagcagaggccuguucggcgccaucgccggcuucaucgagggcggcuggaccggcaugguggacggcugguacggcuaccaccaccagaacgagcagggcagcggcuacgccgccgaccagaagagcacccagaacgccaucaacggcaucaccaacaaggugaacagcgugaucgagaagaugaacacccaguucaccgccgugggcaaggaguucagcaagcuggagagaagaauggagaaccugaacaagaagguggacgacggcuuccuggacaucuggaccuacaacgccgagcugcuggugcugcuggagaacgagagaacccuggacuuccacgacagcaacgugaagaaccuguacgagaaggugaagagccagcugaagaacaacgccaaggagaucggcaacggcugcuucgaguucuaccacaagugcaacgacgagugcauggagagcgugaagaacggcaccuacgacuaccccaaguacagcgaggagagcaagcugaacagagagaagaucgacggcgugaagcuggagagcaugggcguguaccagauccuggccaucuacagcaccguggccagcagccuggugcugcuggugagccugggcgccaucaacuucuggaugugcagcaacggcagccugcagugcaagaucugcaucuga

SEQ ID NO: 162516 - RNA, 1698 nt, Artificial Sequence
  derived and/or modified CDS sequence (opt4) from hemagglutinin__InfluenzaA__ACI32718
augaaggugaagcugcuggugcugcugugcaccuucaccgccaccuacgccgacaccaucugcaucggcuaccacgccaacaacagcaccgacaccguggacaccgugcuggagaagaacgugaccgugacccacagcgugaaccugcuggaggacagccacaacggcaagcugugccugcugaagggcaucgccccccugcagcugggcaacugcagcguggccggcuggauccugggcaaccccgagugcgagcugcugaucagcaaggagagcuggagcuacaucguggagacccccaaccccgagaacggcaccugcuaccccggcuacuucgccgacuacgaggagcugagagagcagcugagcagcgugagcagcuucgagagauucgagaucuuccccaaggagagcagcuggcccaaccacaccgccaccggcgugagcgccagcugcagccacaacggcaagagcagcuucuacagaaaccugcuguggcugaccggcaagaacggccuguaccccaaccugagcaagagcuacgccaacaacaaggagaaggaggugcuggugcuguggggcgugcaccacccccccaacaucggcgaccagagagcccuguaccacaccgagaacgccuacgugagcguggugagcagccacuacagcagaagauucacccccgagaucgccaagagacccaaggugagagaccaggagggcagaaucaacuacuacuggacccugcuggagcccggcgacaccaucaucuucgaggccaacggcaaccugaucgcccccagauucgccuucgcccugagcagaggcuucggcagcggcaucaucaccagcaacgcccccauggacgagugcgacgccaagugccagaccccccagggcgccaucaacagcagccugcccuuccagaacgugcaccccgugaccaucggcgagugccccaaguacgugagaagcgccaagcugagaauggccaccggccugagaaacauccccagcauccagagcagaggccuguucggcgccaucgccggcuucaucgagggcggcuggaccggcaugguggacggcugguacggcuaccaccaccagaacgagcagggcagcggcuacgccgccgaccagaagagcacccagaacgccaucaacggcaucaccaacaaggugaacagcgugaucgagaagaugaacacccaguucaccgccgugggcaaggaguucagcaagcuggagagaagaauggagaaccugaacaagaagguggacgacggcuuccuggacaucuggaccuacaacgccgagcugcuggugcugcuggagaacgagagaacccuggacuuccacgacagcaacgugaagaaccuguacgagaaggugaagagccagcugaagaacaacgccaaggaggugggcaacggcugcuucgaguucuaccacaagugcaacgacgagugcauggagagcgugaagaacggcaccuacgacuaccccaaguacagcgaggagagcaagcugaacagagagaagaucgacggcgugaagcuggagagcaugggcguguaccagauccuggccaucuacagcaccguggccagcagccuggugcugcuggugagccugggcgccaucagcuucuggaugugcagcaacggcagccugcagugcaccaucugcaucuga

SEQ ID NO: 162517 - RNA, 1698 nt, Artificial Sequence; identical to SEQ ID NO: 162514
  derived and/or modified CDS sequence (opt4) from hemagglutinin__InfluenzaA__ACI32719

SEQ ID NO: 162518 - RNA, 1698 nt, Artificial Sequence; identical to SEQ ID NO: 162514
  derived and/or modified CDS sequence (opt4) from hemagglutinin__InfluenzaA__ACI32720

SEQ ID NO: 162519 - RNA, 1698 nt, Artificial Sequence
  derived and/or modified CDS sequence (opt4) from hemagglutinin__InfluenzaA__ACI32721
augaaggugaagcugcuggugcugcugugcaccuucaccgccaccuacgccgacaccaucugcaucggcuaccacgccaacaacagcaccgacaccguggacaccgugcuggagaagaacgugaccgugacccacagcgugaaccugcuggaggacagccacaacggcaagcugugccugcugaagggcaucgccccccugcagcugggcaacugcagcguggccggcuggauccugggcaaccccgagugcgagcugcugaucagcaaggagagcuggagcuacaucguggagacccccaaccccgagaacggcaccugcuaccccggcuacuucgccgacuacgaggagcugagagagcagcugagcagcgugagcagcuucgagagauucgagaucuuccccaaggagagcagcuggcccaaccacaccgugaccggcgugagcgccagcugcagccacaacggcaagagcagcuucuacagaaaccugcuguggcugaccggcaagaacggccuguaccccaaccugagcaagagcuacgccaacaacaaggagaaggaggugcuggugcuguggggcgugcaccacccccccaacaucggcgaccagagagcccuguaccacaccgagaacgccuacgugagcguggugagcagccacuacagcagaagauucacccccgagaucgccaagagacccaaggugagagaccaggagggcagaaucagcuacuacuggacccugcuggagcccggcgacaccaucaucuucgaggccaacggcaaccugaucgcccccagauucgccuucgcccugagcagaggcuucggcagcggcaucaucaccagcaacgcccccauggacgagugcgacgccaagugccagaccccccagggcgccaucaacagcagccugcccuuccagaacgugcaccccgugaccaucggcgagugccccaaguacgugagaagcgccaagcugagaauggccaccggccugagaaacauccccagcauccagagcagaggccuguucggcgccaucgccggcuucaucgagggcggcuggaccggcaugguggacggcugguacggcuaccaccaccagaacgagcagggcagcggcuacgccgccgaccagaagagcacccagaacgccaucaacggcaucaccaacaaggugaacagcgugaucgagaagaugaacacccaguucaccgccgugggcaaggaguucagcaagcuggagagaagaauggagaaccugaacaagaagguggacgacggcuuccuggacaucuggaccuacaacgccgagcugcuggugcugcuggagaacgagagaacccuggacuuccacgacagcaacgugaagaaccuguacgagaaggugaagagccagcugaagaacaacgccaaggagaucggcaacggcugcuucgaguucuaccacaagugcaacgacgagugcauggagagcgugaagaacggcaccuacgacuaccccaaguacagcgaggagagcaagcugaacagagagaagaucgacggcgugaagcuggagagcaugggcguguaccagauccuggccaucuacagcaccguggccagcagccuggugcugcuggugagccugggcgccaucagcuucuggaugugcagcaacggcagccugcagugcagaaucugcaucuga

SEQ ID NO: 162520 - RNA, 1698 nt, Artificial Sequence; identical to SEQ ID NO: 162514
  derived and/or modified CDS sequence (opt4) from hemagglutinin__InfluenzaA__ACI32722

SEQ ID NO: 162521 - RNA, 1698 nt, Artificial Sequence
  derived and/or modified CDS sequence (opt4) from hemagglutinin__InfluenzaA__ACI32723
augaaggugaagcugcuggugcugcugugcaccuucaccgccaccuacgccgacaccaucugcaucggcuaccacgccaacaacagcaccgacaccguggacaccgugcuggagaagaacgugaccgugacccacagcgugaaccugcuggaggacagccacaacggcaagcugugccugcugaagggcaucgccccccugcagcugggcaacugcagcguggccggcuggauccugggcaaccccgagugcgagcugcugaucagcaaggagagcuggagcuacaucguggagacccccaaccccgagaacggcaccugcuaccccggcuacuucgccgacuacgaggagcugagagagcagcugagcagcgugagcagcuucgagagauucgagaucuuccccaaggagagcagcuggcccaaccacaccgugaccggcgugagcgccagcugcagccacaacggcaagagcagcuucuacagaaaccugcuguggcugaccggcaagaacggccuguaccccaaccugagcaagagcuacgccaacaacaaggagaaggaggugcuggugcuguggggcgugcaccacccccccaacaucggcgaccagagagcccuguaccacaccgagaacgccuacgugagcguggugagcagccacuacagcagaagauucacccccgagaucgccaagagacccaaggugagagaccaggagggcagaaucaacuacuacuggacccugcuggagcccggcgacaccaucaucuucgaggccaacggcaaccugaucgcccccagauucgccuucgcccugagcagaggcuucggcagcggcaucaucaccagcaacgcccccauggacgagugcgacgccaagugccagaccccccagggcgccaucaacagcagccugcccuuccagaacgugcaccccgugaccaucggcgagugccccaaguacgugagaagcgccaagcugagaauggccaccggccugagaaacauccccagcauccagagcagaggccuguucggcgccaucgccggcuucaucgagggcggcuggaccggcaugguggacggcugguacggcuaccaccaccagaacgagcagggcagcggcuacgccgccgaccagaagagcacccagaacgccaucaacggcaucaccaacaaggugaacagcgugaucgagaagaugaacacccaguucaccgccgugggcaaggaguucagcaagcuggagagaagaauggagaaccugaacaagaagguggacgacggcuuccuggacaucuggaccuacaacgccgagcugcuggugcugcuggagaacgagagaacccuggacuuccacgacagcaacgugaagaaccuguacgagaaggugaagagccagcugaagaacaacgccaaggagaucggcaacggcugcuucgaguucuaccacaagugcaacgacgagugcauggagagcgugaagaacggcaccuacgacuaccccaaguacagcgaggagagcaagcugaacagagagaagaucgacggcgugaagcuggagagcaugggcguguaccagauccuggccaucuacagcaccguggccagcagccuggugcugcuggugagccugggcgccaucagcuucuggaugugcagcaacggcagccugcagugcagaaucugcuucuga

SEQ ID NO: 162522 - RNA, 1698 nt, Artificial Sequence
  derived and/or modified CDS sequence (opt4) from hemagglutinin__InfluenzaA__ACI32724
augaaggugaagcugcuggugcugcugugcaccuucaccgccaccuacgccgacaccaucugcaucggcuaccacgccaacaacagcaccgacaccguggacaccgugcuggagaagaacgugaccgugacccacagcgugaaccugcuggaggacagccacaacggcaagcugugccugcugaagggcaucgccccccugcagcugggcaacugcagcguggccggcuggauccugggcaaccccgagugcgagcugcugaucagcaaggagagcuggagcuacaucguggagacccccaaccccgagaacggcaccugcuaccccggcuacuucgccgacuacgaggagcugagagagcagcugagcagcgugagcagcuucgagagauucgagaucuuccccaaggagagcagcuggcccaaccacaccgugaccggcgugagcgccagcugcagccacaacggcaagagcagcuucuacagaaaccugcuguggcugaccggcaagaacggccuguaccccaaccugagcaagagcuacgccaacaacaaggagaaggaggugcuggugcuguggggcgugcaccacccccccaacaucggcgaccagagagcccuguaccacaccgagaacgccuacgugagcguggugagcagccacuacagcagaagauucacccccgagaucgccaagagacccaaggugagagaccaggagggcagaaucaacuacuacuggacccugcugaagcccggcgacaccaucaucuucgaggccaacggcaaccugaucgcccccagauucgccuucgcccugagcagaggcuucggcagcggcaucaucaccagcaacgcccccauggacgagugcgacgccaagugccagaccccccagggcgccaucaacagcagccugcccuuccagaacgugcaccccgugaccaucggcgagugccccaaguacgugagaagcgccaagcugagaauggccaccggccugagaaacauccccagcauccagagcagaggccuguucggcgccaucgccggcuucaucgagggcggcuggaccggcaugguggacggcugguacggcuaccaccaccagaacgagcagggcagcggcuacgccgccgaccagaagagcacccagaacgccaucaacggcaucaccaacaaggugaacagcgugaucgagaagaugaacacccaguucaccgccgugggcaaggaguucagcaagcuggagagaagaauggagaaccugaacaagaagguggacgacggcuuccuggacaucuggaccuacaacgccgagcugcuggugcugcuggagaacgagagaacccuggacuuccacgacagcaacgugaagaaccuguacgagaaggugaagagccagcugaagaacaacgccaaggagaucggcaacggcugcuucgaguucuaccacaagugcaacgacgagugcauggagagcgugaagaacggcaccuacgacuaccccaaguacagcgaggagagcaagcugaacagagagaagaucgacggcgugaagcuggagagcaugggcguguaccagauccuggccaucuacagcaccguggccagcagccuggugcugcuggugagccugggcgccaucagcuucuggaugugcagcaacggcagccugcagugcaagaucugcaucuga

SEQ ID NO: 162523 - RNA, 1698 nt, Artificial Sequence; identical to SEQ ID NO: 161445
  derived and/or modified CDS sequence (opt4) from hemagglutinin__InfluenzaA__ACI32725

SEQ ID NO: 162524 - RNA, 1698 nt, Artificial Sequence
  derived and/or modified CDS sequence (opt4) from hemagglutinin__InfluenzaA__ACI32726
augaaggugaagcugcuggugcugcugugcaccuucaccgccaccuacgccgacaccaucugcaucggcuaccacgccaacaacagcaccgacaccguggacaccgugcuggagaagaacgugaccgugacccacagcgugaaccugcuggaggacagccacaacggcaagcugugccugcugaagggcaucgccccccugcagcugggcaacugcagcguggccggcuggauccugggcaaccccgagugcgagcugcugaucagcaaggagagcuggagcuacaucguggagacccccaaccccgagaacggcaccugcuaccccggcuacuucgccgacuacgaggagcugagagagcagcugagcagcgugagcagcuucgagagauucgagaucuuccccaaggagagcagcuggcccaaccacaccgugaccggcgugagcgccagcugcagccacaacggcaagagcagcuucuacagaaaccugcuguggcugaccggcaagaacggccuguaccccaaccugagcaagagcuacgccaacaacaaggagaaggaggugcuggugcuguggggcgugcaccacccccccaacaucggcgaccagagagcccuguaccacaccgagaacgccuacgugagcguggugagcagccacuacagcagaagauucacccccgagaucgccaagagacccaaggugagagaccaggagggcagaaucaacuacuacuggacccugcuggagcccggcgacaccaucaucuucgaggccaacggcaaccugaucgcccccagauucgccuucgcccugagcagaggcuucggcagcggcaucaucaccagcaacgcccccauggacgagugcgacgccaagugccagaccccccagggcgccaucaacagcagccugcccuuccagaacgugcaccccgugaccaucggcgagugccccaaguacgugagaagcgccaagcugagaauggccaccggccugagaaacauccccagcauccagagcagaggccuguucggcgccaucgccggcuucaucgagggcggcuggaccggcaugguggacggcugguacggcuaccaccaccagaacgagcagggcagcggcuacgccgccgaccagaagagcacccagaacgccaucaacggcaucaccaacaaggugaacagcgugaucgagaagaugaacacccaguucaccgccgugggcaaggaguucagcaagcuggagaagagaauggagaaccugaacaagaagguggacgacggcuuccuggacaucuggaccuacaacgccgagcugcuggugcugcuggagaacgagagaacccuggacuuccacgacagcaacgugaagaaccuguacgagaaggugaagagccagcugaagaacaacgccaaggagaucggcaacggcugcuucgaguucuaccacaagugcaacgacgagugcauggagagcgugaagaacggcaccuacgacuaccccaaguacagcgaggagagcaagcugaacagagagaagaucgacggcgugaagcuggagagcaugggcaucuaccagauccuggccaucuacagcaccgugaccagcagccuggugcugcuggugagccugggcgccaucagcuucuggaugugcagcaacggcagccugcagugcagaaucugcaucuga

SEQ ID NO: 162525 - RNA, 1698 nt, Artificial Sequence
  derived and/or modified CDS sequence (opt4) from hemagglutinin__InfluenzaA__ACI32727
augaaggugaagcugcuggugcugcugugcaccuucaccgccaccuacgccgacaccaucugcaucggcuaccacgccaacaacagcaccgacaccguggacaccgugcuggagaagaacgugaccgugacccacagcgugaaccugcuggaggacagccacaacggcaagcugugccugcugaagggcaucgccccccugcagcugggcaacugcagcguggccggcuggauccugggcaaccccgagugcgagcugcugaucagcaaggagagcuggagcuacaucguggagacccccaaccccgagaacggcaccugcuaccccggcuacuucgccgacuacgaggagcugagagagcagcugagcagcaucagcagcuucgagagauucgagaucuuccccaaggagagcagcuggcccaaccacaccgugaccggcgugagcgccagcugcagccacaacggcaagagcagcuucuacagaaaccugcuguggcugaccggcaagaacggccuguaccccaaccugagcaagagcuacgccaacaacaaggagaaggaggugcuggugcuguggggcgugcaccacccccccaacaucggcgaccagagagcccuguaccacaccgagaacgccuacgugagcguggugagcagccacuacagcagaagauucacccccgagaucgccaagagacccaaggugagagaccaggagggcagaaucaacuacuacuggacccugcuggagcccggcgacaccaucaucuucgaggccaacggcaaccugaucgcccccagauucgccuucgcccugagcagaggcuucggcagcggcaucaucaccagcaacgcccccauggacgagugcgacgccaagugccagaccccccagggcgccaucaacagcagccugcccuuccagaacgugcaccccgugaccaucggcgagugccccaaguacgugagaagcgccaagcugagaauggccaccggccugagaaacauccccagcauccagagcagaggccuguucggcgccaucgccggcuucaucgagggcggcuggaccggcaugguggacggcugguacggcuaccaccaccagaacgagcagggcagcggcuacgccgccgaccagaagagcacccagaacgccaucaacggcaucaccaacaaggugaacagcgugaucgagaagaugaacacccaguucaccgccgugggcaaggaguucagcaagcuggagagaagaauggagaaccugaacaagaagguggacgacggcuuccuggacaucuggaccuacaacgccgagcugcuggugcugcuggagaacgagagaacccuggacuuccacgacagcaacgugaagaaccuguacgagaaggugaagagccagcugaagaacaacgccaaggagaucggcaacggcugcuucgaguucuaccacaagugcaacgacgagugcauggagagcgugaagaacggcaccuacgacuaccccaaguacagcgaggagagcaagcugaacagagagaagaucgacggcgugaagcuggagagcaugggcguguaccagauccuggccaucuacagcaccguggccagcagccuggugcugcuggugacccugggcgccaucagcuucuggaugugcagcaacggcagccugcagugcaccaucugcaucuga

SEQ ID NO: 162526 - RNA, 1698 nt, Artificial Sequence
  derived and/or modified CDS sequence (opt4) from hemagglutinin__InfluenzaA__ACI32729
augaaggugaagcugcuggugcugcugugcaccuucaccgccaccuacgccgacaccaucugcaucggcuaccacgccaacaacagcaccgacaccguggacaccgugcuggagaagaacgugaccgugacccacagcgugaaccugcuggaggacagccacaacggcaagcugugccugcugaagggcaucgccccccugcagcugggcaacugcagcguggccggcuggauccugggcaaccccgagugcgagcugcugauccccaaggagagcuggagcuacaucguggagacccccaaccccgagaacggcaccugcuaccccggcuacuucgccgacuacgaggagcugagagagcagcugagcagcgugagcagcuucgagagauucgagaucuuccccaaggagagcagcuggcccaaccacaccgugaccggcgugagcgccagcugcagccacaacggcaagagcagcuucuacagaaaccugcuguggcugaccggcaagaacggccuguaccccaaccugagcaagagcuacgccaacaacaaggagaaggaggugcuggugcuguggggcgugcaccacccccccaacaucggcgaccagagagcccuguaccacaccgagaacgccuacgugagcguggugagcagccacuacagcagaagauucacccccgagaucgccaagagacccaaggugagagaccaggagggcagaaucaacuacuacuggacccugcuggagcccggcgacaccaucaucuucgaggccaacggcaaccugaucgcccccagauucgccuucgcccugagcagaggcuucggcagcggcaucaucaccagcaacgcccccauggacgagugcgacgccaagugccagaccccccagggcgccaucaacagcagccugcccuuccagaacgugcaccccgugaccaucggcgagugccccaaguacgugagaagcgccaagcugagaauggugaccggccugagaaacauccccagcauccagagcagaggccuguucggcgccaucgccggcuucaucgagggcggcuggaccggcaugguggacggcugguacggcuaccaccaccagaacgagcagggcagcggcuacgccgccgaccagaagagcacccagaacgccaucaacggcgugaccaacaaggugaacagcgugaucgagaagaugaacacccaguucaccgccgugggcaaggaguucaacaagcuggagagaagaauggagaaccugaacaagaagguggacgacggcuuccuggacaucuggaccuacaacgccgagcugcuggugcugcuggagaacgagagaacccuggacuuccacgacagcaacgugaagaaccuguacgagaaggugaagagccagcugaagaacaacgccaaggagaucggcaacggcugcuucgaguucuaccacaagugcaacgacgagugcauggagagcgugaagaacggcaccuacgacuaccccaaguacagcgaggagagcaagcugaacagagagaagaucgacggcgugaagcuggagagcaugggcguguaccagauccuggccaucuacagcaccguggccagcagccuggugcugcuggugagccugggcgccaucagcuucuggaugugcagcaacggcagccugcagugcagaaucugcaucuga

SEQ ID NO: 162527 - RNA, 1698 nt, Artificial Sequence; identical to SEQ ID NO: 162526
  derived and/or modified CDS sequence (opt4) from hemagglutinin__InfluenzaA__ACI32730

SEQ ID NO: 162528 - RNA, 1698 nt, Artificial Sequence
  derived and/or modified CDS sequence (opt4) from hemagglutinin__InfluenzaA__ACI32731
augaaggugaagcugcuggugcugcugugcaccuucaccgccaccuacgccgacaccaucugcaucggcuaccacgccaacaacagcaccgacaccguggacaccgugcuggagaagaacgugaccgugacccacagcgugaaccugcuggaggacagccacaacggcaagcugugccugcugaagggcaucgccccccugcagcugggcaacugcagcguggccggcuggauccugggcaaccccgagugcgagcugcugaucagcaaggagagcuggagcuacaucguggagaagcccaaccccgagaacggcaccugcuaccccggccacuucgccgacuacgaggagcugagagagcagcugagcagcgugagcagcuucgagagauucgagaucuuccccaaggagagcagcuggcccaaccacaccgugaccggcgugagcgccagcugcagccacaacggcaagagcagcuucuacaagaaccugcuguggcugaccggcaagaacggccuguaccccaaccugagcaagagcuacgccaacaacaaggagaaggaggugcuggugcuguggggcgugcaccacccccccaacaucggcgaccagaaggcccuguaccacaccgagaacgccuacgugagcguggugagcagccacuacagcagaaaguucaaccccgagaucgccaagagacccaaggugagagaccaggagggcagaaucaacuacuacuggacccugcuggagcccggcgacaccaucaucuucgaggccaacggcaaccugaucgcccccagauacgccuucgcccugagcagaggcuucggcagcggcaucaucaacagcaacgcccccauggacgagugcgacgccaagugccagaccccccagggcgccaucaacagcagccugcccuuccagaacgugcaccccgugaccaucggcgagugccccaaguacgugagaagcgccaagcugagaauggugaccggccugagaaacauccccagcauccagagcagaggccuguucggcgccaucgccggcuucaucgagggcggcuggaccggcaugguggacggcugguacggcuaccaccaccagaacgagcagggcagcggcuacgccgccgaccagaagagcacccagaacgccaucaacggcaucaccaacaaggugaacagcgugaucgagaagaugaacacccaguucaccgccgugggcaaggaguucaacaagcuggagagaagaauggagaaccugaacaagaagguggacgacggcuucaucgacaucuggaccuacaacgccgagcugcuggugcugcuggagaacgagagaacccuggacuuccacgacagcaacgugaagaaccuguacgagaaggugaagagccagcugaagaacaacgccaaggagaucggcaacggcugcuucgaguucuaccacaagugcaacgacgagugcauggagagcgugaagaacggcaccuacgacuaccccaaguacagcgaggagagcaagcugaacagagagaagaucgacggcgugaagcuggagagcaugggcguguaccagauccuggccaucuacagcaccguggccagcagccuggugcugcuggugagccugggcgccaucagcuucuggaugugcagcaacggcagccugcagugcaagaucugcaucuga

SEQ ID NO: 162529 - RNA, 1698 nt, Artificial Sequence
  derived and/or modified CDS sequence (opt4) from hemagglutinin__InfluenzaA__ACI32732
augaaggugaagcugcuggugcugcugugcaccuucaccgccaccuacgccgacaccaucugcaucggcuaccacgccaacaacagcaccgacaccguggacaccgugcuggagaagaacgugaccgugacccacagcgugaaccugcuggaggacagccacaacggcaagcugugccugcugaagggcaucgccccccugcagcugggcaacugcagcguggccggcuggauccugggcaaccccgagugcgagcugcugaucagcaaggagagcuggagcuacaucguggagacccccaaccccgagaacggcaccugcuaccccggcuacuucgccgacuacgaggagcugagagagcagcugagcagcgugagcagcuucgagagauucgagaucuuccccaaggagagcagcuggcccaaccacaccgugaccggcgugagcgccagcugcagccacaacggcaagagcagcuucuacagaaaccugcuguggcugaccggcaagaacggccuguaccccaaccugagcaagagcuacgccaacaacaaggagaaggaggugcuggugcuguggggcgugcaccacccccccaacaucggcgaccagagagcccuguaccacaccgagaacgccuacgugagcguggugagcagccacuacagcagaagauucacccccgagaucgccaagagacccaaggugagagaccaggagggcagaaucaacuacuacuggacccugcuggagcccggcgacaccaucaucuucgaggccaacggcaaccugaucgcccccagauucgccuucgcccugagcagaggcuucggcagcggcaucaucaccagcaacgcccccauggacgagugcgacgccaagugccagaccccccagggcgccaucaacagcagccugcccuuccagaacgugcaccccgugaccaucggcgagugccccaaguacgugagaagcgccaagcugagaauggugaccggccugagaaacauccccagcauccagagcagaggccuguucggcgccaucgccggcuucaucgagggcggcuggaccggcaugguggacggcugguacggcuaccaccaccagaacgagcagggcagcggcuacgccgccgaccagaagagcacccagaacgccaucaacggcaucaccaacaaggugaacagcgugaucgagaagaugaacacccaguucaccgccgugggcaaggaguucaacaagcuggagagaagaauggagaaccugaacaagaagguggacgacggcuuccuggacaucuggaccuacaacgccgagcugcuggugcugcuggagaacgagagaacccuggacuuccacgacagcaacgugaagaaccuguacgagaaggugaagagccagcugaagaacaacgccaaggagaucggcaacggcugcuucgaguucuaccacaagugcaacgacgagugcauggagagcgugaagaacggcaccuacgacuaccccaaguacagcgaggagagcaagcugaacagagagaagaucgacggcgugaagcuggagagcaugggcguguaccagauccuggccaucuacagcaccguggccagcagccuggugcugcuggugagccugggcgccaucagcuucuggaugugcagcaacggcagccugcagugcaccaucugcaucuga

SEQ ID NO: 162530 - RNA, 1698 nt, Artificial Sequence
  derived and/or modified CDS sequence (opt4) from hemagglutinin__InfluenzaA__ACI32733
augaaggugaagcugcuggugcugcugugcaccuucaccgccaccuacgccgacaccaucugcaucggcuaccacgccaacaacagcaccgacaccguggacaccgugcuggagaagaacgugaccgugacccacagcgugaaccugcuggaggacagccacaacggcaagcugugccugcugaagggcaucgccccccugcagcugggcaacugcagcguggccggcuggauccugggcaaccccgagugcgagcugcugaucagcaaggagagcuggagcuacaucguggagaagcccaaccccgagaacggcaccugcuaccccggccacuucgccgacuacgaggagcugagagagcagcugagcagcgugagcagcuucgagagauucgagaucuuccccaaggagagcagcuggcccaaccacaccgugaccggcgugagcgccagcugcagccacaacggcaagagcagcuucuacaagaaccugcuguggcugaccggcaagaacggccuguaccccaaccugagcaagagcuacgccaacaacaaggagaaggaggugcuggugcuguggggcgugcaccacccccccaacaucggcgaccagaaggcccuguaccacaccgagaacgccuacgugagcguggugagcagccacuacagcagaaaguucaacagcgagaucgccaagagacccaaggugagagaccaggagggcagaaucaacuacuacuggacccugcuggagcccggcgacaccaucaucuucgaggccaacggcaaccugaucgcccccagauacgccuucgcccugagcagaggcuucggcagcggcaucaucaacagcaacgcccccauggacgagugcgacgccaagugccagaccccccagggcgccaucaacagcagccugcccuuccagaacgugcaccccgugaccaucggcgagugccccaaguacgugagaagcgccaagcugagaauggugaccggccugagaaacauccccagcauccagagcagaggccuguucggcgccaucgccggcuucaucgagggcggcuggaccggcaugguggacggcugguacggcuaccaccaccagaacgagcagggcagcggcuacgccgccgaccagaagagcacccagaacgccaucaacggcaucaccaacaaggugaacagcgugaucgagaagaugaacacccaguucaccgccgugggcaaggaguucaacaagcuggagagaagaauggagaaccugaacaagaagguggacgacggcuucaucgacaucuggaccuacaacgccgagcugcuggugcugcuggagaacgagagaacccuggacuuccacgacagcaacgugaagaaccuguacgagaaggugaagagccagcugaagaacaacgccaaggagaucggcaacggcugcuucgaguucuaccacaagugcaacgacgagugcauggagagcgugaagaacggcaccuacgacuaccccaaguacagcgaggagagcaagcugaacagagagaagaucgacggcgugaagcuggagagcaugggcguguaccagauccuggccaucuacagcaccguggccagcagccuggugcugcuggugagccugggcgccaucagcuucuggaugugcagcaacggcagccugcagugcaccaucugcaucuga

SEQ ID NO: 162531 - RNA, 1698 nt, Artificial Sequence
  derived and/or modified CDS sequence (opt4) from hemagglutinin__InfluenzaA__ACI32734
augaaggugaagcugcuggugcugcugugcaccuucaccgccaccuacgccgacaccaucugcaucggcuaccacgccaacaacagcaccgacaccguggacaccgugcuggagaagaacgugaccgugacccacagcgugaaccugcuggaggacagccacaacggcaagcugugccugcugaagggcaucgccccccugcagcugggcaacugcagcguggccggcuggauccugggcaaccccgagugcgagcugcugaucagcaaggagagcuggagcuacaucguggagacccccaaccccgagaacggcaccugcuaccccggcuacuucgccgacuacgaggagcugagagagcagcugagcagcgugagcagcuucgagagauucgagaucuuccccaaggagagcagcuggcccaaccacaccgugaccggcgugagcgccagcugcagccacaacggcaagagcagcuucuacagaaaccugcuguggcugaccggcaagaacggccuguaccccaaccugagcaagagcuacgccaacaacaagaagaaggaggugcuggugcuguggggcgugcaccacccccccaacaucggcgaccagaaggcccuguaccacaccgagaacgccuacgugagcguggugagcagccacuacagcagaagauucacccccgagaucgccaagagacccaaggugagagaccaggagggcagaaucaacuacuacuggacccugcuggagcccggcgacaccaucaucuucgaggccaacggcaaccugaucgcccccagauucgccuucgcccugagcagaggcuucggcagcggcaucaucaccagcaacgcccccauggacgagugcgacgccaagugccagaccccccagggcgccaucaacagcagccugcccuuccagaacgugcaccccgugaccaucggcgagugccccaaguacgugagaagcgccaagcugagaauggugaccggccugagaaacauccccagcauccagagcagaggccuguucggcgccaucgccggcuucaucgagggcggcuggaccggcaugguggacggcugguacggcuaccaccaccagaacgagcagggcagcggcuacgccgccgaccagaagagcacccagaacgccaucaacggcaucaccaacaaggugaacagcgugaucgagaagaugaacacccaguucaccgccgugggcaaggaguucaacaagcuggagagaagaauggagaaccugaacaagaagguggacgacggcuuccuggacaucuggaccuacaacgccgagcugcuggugcugcuggagaacgagagaacccuggacuuccacgacagcaacgugaagaaccuguacgagaaggugaagagccagcugaagaacaacgccaaggagaucggcaacggcugcuucgaguucuaccacaagugcaacgacgagugcauggagagcgugaagaacggcaccuacgacuaccccaaguacagcgaggagagcaagcugaacagagagaagaucgacggcgugaagcuggagagcaugggcguguaccagauccuggccaucuacagcaccguggccagcagccuggugcugcuggugagccugggcgccaucagcuucuggaugugcagcaacggcagccugcagugcaccaucugcaucuga

SEQ ID NO: 162532 - RNA, 1698 nt, Artificial Sequence
  derived and/or modified CDS sequence (opt4) from hemagglutinin__InfluenzaA__ACI32736
augaaggugaagcugcuggugcugcugugcaccuucaccgccaccuacgccgacaccaucugcaucggcuaccacgccaacaacagcaccgacaccguggacaccgugcuggagaagaacgugaccgugacccacagcgugaaccugcuggaggacagccacaacggcaagcugugccugcugaagggcaucgccccccugcagcugggcaacugcagcguggccggcuggauccugggcaaccccgagugcgagcugcugaucagcagagagagcuggagcuacaucguggagaagcccaaccccgagaacggcaccugcuaccccggccacuucgccgacuacgaggagcugagagagcagcugagcagcgugagcagcuucgagagauucgagaucuuccccaaggagagcagcuggcccaaccacaccgccaccggcgugagcgccagcugcagccacaacggcaagagcagcuucuacaagaaccugcuguggcugaccggcaagaacggccuguaccccaaccugagcaagagcuacgccaacaacaaggagaaggaggugcuggugcuguggggcgugcaccacccccccaacaucggcgaccagagagcccuguaccacaccgagaacgccuacgugagcguggugagcagccacuacagcagaaaguucacccccgagaucgccaagagacccaaggugagagaccaggagggcagaaucaacuacuacuggacccugcuggagcccggcgacaccaucaucuucgaggccaacggcaaccugaucgcccccagauacgccuucgcccugagcagaggcuucggcagcggcaucaucaacagcaacgcccccauggacgagugcgacgccaagugccagaccccccagggcgccaucaacagcagccugcccuuccagaacgugcaccccgugaccaucggcgagugccccaaguacgugagaagcgccaagcugagaauggugaccggccugagaaacauccccagcauccagagcagaggccuguucggcgccaucgccggcuucaucgagggcggcuggaccggcaugguggacggcugguacggcuaccaccaccagaacgagcagggcagcggcuacgccgccgaccagaagagcacccagaacgccaucaacggcaucaccaacaaggugaacagcgugaucgagaagaugaacacccaguucaccgccgugggcaaggaguucaacaagcuggagagaagaauggagaaccugaacaagaagguggacgacggcuucaucgacaucuggaccuacaacgccgagcugcuggugcugcuggagaacgagagaacccuggacuuccacgacagcaacgugagaaaccuguacgagaaggugaagagccagcugaagaacaacgccaaggagaucggcaacggcugcuucgaguucuaccacaagugcaacgacgagugcauggagagcgugaagaacggcaccuacgacuaccccaaguacagcgaggagagcaagcugaacagagagaagaucgacggcgugaagcuggagagcaugggcguguaccagauccuggccaucuacagcaccguggccagcagccuggugcugcuggugagccugggcgccaucagcuucuggaugugcagcaacggcagccugcagugcagaaucugcaucuga

SEQ ID NO: 162533 - RNA, 1698 nt, Artificial Sequence
  derived and/or modified CDS sequence (opt4) from hemagglutinin__InfluenzaA__ACI32737
augaaggugaagcugcuggugcugcugugcaccuucaccgccaccuacgccgacaccaucugcaucggcuaccacgccaacaacagcaccgacaccguggacaccgugcuggagaagaacgugaccgugacccacagcgugaaccugcuggagaacagccacaacggcaagcugugccugcugaagggcaucgccccccugcagcugggcaacugcagcguggccggcuggauccugggcaaccccgagugcgagcugcugauccccaaggagagcuggagcuacaucguggagauccccaaccccgagaacggcaccugcuaccccggcuacuucgccgacuacgaggagcugagagagcagcugagcagcgugagcagcuucgagagauucgagaucuuccccaaggagagcagcuggcccaaccacaccgugaccggcgugagcgccagcugcagccacaacggcaagagcagcuucuacagaaaccugcuguggcugaccggcaagaacggccuguaccccaaccugagcaagagcuacgccaacaacaaggagaaggaggugcuggugcuguggggcgugcaccacccccccaacaucggcgaccagagagcccuguaccacaccgagaacgccuacgugagcguggugagcagccacuacagcagaagauucacccccgagaucgccaagagacccaaggugagagaccaggagggcagaaucaacuacuacuggacccugcuggagcccggcgacaccaucaucuucgaggccaacggcaaccugaucgcccccagauucgccuucgcccugagcagaggccugggcagcggcaucaucaccagcaacgcccccauggacgagugcgacgccaagugccagaccccccagggcgccaucaacagcagccugcccuuccagaacgugcaccccgugaccaucggcgagugccccaaguacgugagaagcgccaagcugagaauggugaccggccugagaaacauccccagcauccagagcagaggccuguucggcgccaucgccggcuucaucgagggcggcuggaccggcaugguggacggcugguacggcuaccaccaccagaacgagcagggcagcggcuacgccgccgaccagaagagcacccagaacgccaucaacggcaucaccaacaaggugaacagcgugaucgagaagaugaacacccaguucaccgccgugggcaaggaguucaacaagcuggagagaagaauggagaaccugaacaagaagguggacgacggcuuccuggacaucuggaccuacaacgccgagcugcuggugcugcuggagaacgagagaacccuggacuuccacgacagcaacgugaagaaccuguacgagaaggugaagagccagcugagaaacaacgccaaggagaucggcaacggcugcuucgaguucuaccacaagugcaacgacgagugcauggagagcgugaagaacggcaccuacgacuaccccaaguacagcgaggagagcaagcugaacagagagaagaucgacggcgugaagcuggagagcaugggcguguaccagauccuggccaucuacagcaccguggccagcagccuggugcugcuggugagccugggcgccaucagcuucuggaugugcagcaacggcagccugcagugcagaaucugcaucuga

SEQ ID NO: 162534 - RNA, 1698 nt, Artificial Sequence
  derived and/or modified CDS sequence (opt4) from hemagglutinin__InfluenzaA__ACI32739
augaaggugaagcugcugauccugcugugcaccuucaccgccaccuacgccgacaccaucugcaucggcuaccacgccaacaacagcaccgacaccguggacaccgugcuggagaagaacgugaccgugacccacagcgugaaccugcuggaggacagccacaacggcaagcugugccugcugaagggcaucgccccccugcagcugggcaacugcagcguggccggcuggauccugggcaaccccgagugcgagcugcugaucagcaaggagagcuggagcuacaucguggagacccccaaccccgagaacggcaccugcuaccccggcuacuucgccgacuacgaggagcugagagagcagcugagcagcgugagcagcuucgagagauucgagaucuuccccaaggagagcagcuggcccaaccacaccgugaccggcgugagcgccagcugcagccacaacggcaagagcagcuucuacagaaaccugcuguggcugaccggcaagaacggccuguaccccaaccugagcaagagcuacgccaacaacaaggagaaggaggugcugauccuguggggcgugcaccacccccccaacaucggcaaccagagaacccuguaccacaccgagaacgccuacgugagcguggugagcagccacuacagcagaagauucacccccgagaucaccaagagacccaaggugagagaccaggagggcagaaucaacuacuacuggacccugcuggagcccggcgacaccaucaucuucgaggccaacggcaaccugaucgcccccugguacgccuucgcccugagcagaggcuucggcagcggcaucaucaccagcaacgcccccauggacgagugcgacgccaagugccagaccccccagggcgccaucaacagcagccugcccuuccagaacgugcaccccgugaccaucggcgagugccccaaguacgugagaagcgccaagcugagaauggugaccggccugagaaacauccccagcauccagagcagaggccuguucggcgccaucgccggcuucaucgagggcggcuggaccggcaugguggacggcugguacggcuaccaccaccagaacgagcagggcagcggcuacgccgccgaccagaagagcacccagaacgccaucaacggcaucaccaacaaggugaacagcgugaucgagaagaugaacacccaguucaccgccgugggcaaggaguucaacaagcuggagagaagaauggagaaccugaacaagaagguggacgacggcuuccuggacaucuggaccuacaacgccgagcugcuggugcugcuggagaacgagagaacccuggacuuccacgacagcaacgugaagaaccuguacgagaaggugaagagccagcugaagaacaacgccaaggagaucggcaacggcugcuucgaguucuaccacaagugcaacaacgagugcauggagagcgugaagaacggcaccuacgacuaccccaaguacagcgaggagagcaagcugaacagagagaagaucgacggcgugaagcuggagagcaugggcguguaccagauccuggccaucuacagcaccguggccagcagccuggugcugcuggugagccugggcgccaucagcuucuggaugugcagcaacggcagccugcagugcaagaucugcaucuga

SEQ ID NO: 162535 - RNA, 1698 nt, Artificial Sequence
  derived and/or modified CDS sequence (opt4) from hemagglutinin__InfluenzaA__ACI32740
augaaggugaagcugcugauccugcugugcaccuucaccgccaccuacgccgacaccaucugcaucggcuaccacgccaacaacagcaccgacaccguggacaccgugcuggagaagaacgugaccgugacccacagcgugaaccugcuggaggacagccacaacggcaagcugugccugcugaagggcaucgccccccugcagcugggcaacugcagcguggccggcuggauccugggcaaccccgagugcgagcugcugaucagcaaggagagcuggagcuacaucguggagacccccaaccccgagaacggcgccugcuaccccggcuacuucgccgacuacgaggagcugagagagcagcugagcagcgugagcagcuucgagagauucgagaucuuccccaaggagagcagcuggcccaagcacaccgugaccggcgugagcgccagcugcagccacaacggcaagagcagcuucuacagaaaccugcuguggcugaccggcaagaacggccuguaccccaaccugagcaagagcuacgccaacaacaaggagaaggaggugcugauccuguggggcgugcaccacccccccaacaucggcgaccagagaacccuguaccacaccgagaacgccuacgugagcguggugagcagccacuacagcagaagauucacccccgagaucaccaagagacccaaggugagagaccaggagggcagaaucaacuacuacuggacccugcuggagcccggcgacaccaucaucuucgaggccaacggcaaccugaucgcccccugguacgccuucgcccugagcagaggcuucggcagcggcaucaucaccagcaacgcccccauggacgagugcgacgccaagugccagaccccccagggcgccaucaacagcagccugcccuuccagaacgugcaccccgugaccaucggcgagugccccaaguacgugagaagcgccaagcugagaauggugaccggccugagaaacauccccagcauccagagcagaggccuguucggcgccaucgccggcuucaucgagggcggcuggaccggcaugguggacggcugguacggcuaccaccaccagaacgagcagggcagcggcuacgccgccgaccagaagagcacccagaacgccaucaacggcaucaccaacaaggugaacagcgugaucgagaagaugaacacccaguucaccgccgugggcaaggaguucaacaagcuggagagaagaauggagaaccugaacaagaagguggacgacggcuuccuggacaucuggaccuacaacgccgagcugcuggugcugcuggagaacgagagaacccuggacuuccacgacagcaacgugaagaaccuguacgagaaggugaagagccagcugaagaacaacgccaaggagaucggcaacggcugcuucgaguucuaccacaagugcaacaacgagugcauggagagcgugaagaacggcaccuacgacuaccccaaguacagcgaggagagcaagcugaacagagagaagaucgacggcgugaagcuggacagcaugggcguguaccagauccuggccaucuacagcaccguggccagcagccuggugcugcuggugagccugggcgccaucagcuucuggaugugccccaacggcagccugcagugcaccaucugcaucuga

SEQ ID NO: 162536 - RNA, 1698 nt, Artificial Sequence
  derived and/or modified CDS sequence (opt4) from hemagglutinin__InfluenzaA__ACI32741
augaaggugaagcugcugauccugcugugcaccuucaccgccaccuacgccgacaccaucugcaucggcuaccacgccaacaacagcaccgacaccguggacaccgugcuggagaagaacgugaccgugacccacagcgugaaccugcuggaggacagccacaacggcaagcugugccugcugaagggcaucgccccccugcagcugggcaacugcagcguggccggcuggauccugggcaaccccgagugcgagcugcugaucagcaaggagagcuggagcuacaucguggagacccccaaccccgagaacggcgccugcuaccccggcuacuucgccgacuacgaggagcugagagagcagcugagcagcgugagcagcuucgagagauucgagaucuuccccaaggagagcagcuggcccaagcacaccgugaccggcgugagcgccagcugcagccacaacggcaagagcagcuucuacagaaaccugcuguggcugaccggcaagaacggccuguaccccaaccugagcaagagcuacgccaacaacaaggagaaggaggugcugauccuguggggcgugcaccacccccccaacaucggcgaccagagaacccuguaccacaccgagaacgccuacgugagcguggugagcagccacuacagcagaagauucacccccgagaucaccaagagacccaaggugagagaccaggagggcagaaucaacuacuacuggacccugcuggagcccggcgacaccaucaucuucgaggccaacggcaaccugaucgcccccugguacgccuucgcccugagcagaggcuucggcagcggcaucaucaccagcaacgcccccauggacgagugcgacgccaagugccagaccccccagggcgccaucaacagcagccugcccuuccagaacgugcaccccgugaccaucggcgagugccccaaguacgugagaagcgccaagcugagaauggugaccggccugagaaacauccccagcauccagagcagaggccuguucggcgccaucgccggcuucaucgagggcggcuggaccggcaugguggacggcugguacggcuaccaccaccagaacgagcagggcagcggcuacgccgccgaccagaagagcacccagaacgccaucaacggcaucaccaacaaggugaacagcgugaucgagaagaugaacacccaguucaccgccgugggcaaggaguucaacaagcuggagagaagaauggagaaccugaacaagaagguggacgacggcuuccuggacaucuggaccuacaacgccgagcugcuggugcugcuggagaacgagagaacccuggacuuccacgacagcaacgugaagaaccuguacgagaaggugaagagccagcugaagaacaacgccaaggagaucggcaacggcugcuucgaguucuaccacaagugcaacaacgagugcauggagagcgugaagaacggcaccuacgacuaccccaaguacagcgaggagagcaagcugaacagagagaagaucgacggcgugaagcuggacagcaugggcguguaccagauccuggccaucuacagcaccguggccagcagccuggugcugcuggugagccugggcgccaucagcuucuggaugugccccaacggcagccugcagugcaagaucugcaucuga

SEQ ID NO: 162537 - RNA, 1698 nt, Artificial Sequence
  derived and/or modified CDS sequence (opt4) from hemagglutinin__InfluenzaA__ACI32742
augaaggugaagcugcugauccugcugugcaccuucaccgccaccuacgccgacaccaucugcaucggcuaccacgccaacaacagcaccgacaccguggacaccgugcuggagaagaacgugaccgugacccacagcgugaaccugcuggaggacagccacaacggcaagcugugccugcugaagggcaucgccccccugcagcugggcaacugcagcguggccggcuggauccugggcaaccccgagugcgagcugcugaucagcaaggagagcuggagcuacaucguggagacccccaaccccgagaacggcaccugcuaccccggcuacuucgccgacuacgaggagcugagagagcagcugagcagcgugagcagcuucgagagauucgagaucuuccccaaggagagcagcuggcccaaccacaccgugaccggcgugagcgccagcugcagccacaacggcaagagcagcuucuacagaaaccugcuguggcugaccggcaagaacggccuguaccccaaccugagcaagagcuacgccaacaacaaggagaaggaggugcugauccuguggggcgugcaccacccccccaacaucggcgaccagagaacccuguaccacaccgagaacgccuacgugagcguggugagcagccacuacagcagaagauucacccccgagaucaccaagagacccaaggugagagaccaggagggcagaaucaacuacuacuggacccugcuggagcccggcgacaccaucaucuucgaggccaacggcaaccugaucgcccccugguacgccuucgcccugagcagaggcuucggcagcggcaucaucaccagcaacgcccccauggacgagugcgacgccaagugccagaccccccagggcgccaucaacagcagccugcccuuccagaacgugcaccccgugaccaucggcgagugccccaaguacgugagaagcgccaagcugagaauggugaccggccugagaaacauccccagcauccagagcagaggccuguucggcgccaucgccggcuucaucgagggcggcuggaccggcaugguggacggcugguacggcuaccaccaccagaacgagcagggcagcggcuacgccgccgaccagaagagcacccagaacgccaucaacggcaucaccaacaaggugaacagcgugaucgagaagaugaacacccaguucaccgccgugggcaaggaguucaacaagcuggagagaagaauggagaaccugaacaagaagguggacgacggcuuccuggacaucuggaccuacaacgccgagcugcuggugcugcuggagaacgagagaacccuggacuuccacgacagcaacgugaagaaccuguacgagaaggugaagagccagcugaagaacaacgccaaggagaucggcaacggcugcuucgaguucuaccacaagugcaacaacgagugcauggagagcgugaagaacggcaccuacgacuaccccaaguacagcgaggagagcaagcugaacagagagaagaucgacggcgugaagcuggacagcaugggcguguaccagauccuggccaucuacagcaccguggccagcagccuggugcugcuggugagccugggcgccaucagcuucuggaugugcagcaacggcagccugcagugcaagaucugcaucuga

SEQ ID NO: 162538 - RNA, 1698 nt, Artificial Sequence
  derived and/or modified CDS sequence (opt4) from hemagglutinin__InfluenzaA__ACI32743
augaaggugaagcugcugauccugcugugcaccuucaccgccaccuacgccgacaccaucugcaucggcuaccacgccaacaacagcaccgacaccguggacaccgugcuggagaagaacgugaccgugacccacagcgugaaccugcuggaggacagccacaacggcaagcugugccugcugaagggcaucgccccccugcagcugggcaacugcagcguggccggcuggauccugggcaaccccgagugcgagcugcugaucagcaaggagagcuggagcuacaucguggagacccccaaccccgagaacggcgccugcuaccccggcuacuucgccgacuacgaggagcugagagagcagcugagcagcgugagcagcuucgagagauucgagaucuuccccaagaagagcagcuggcccaaccacaccgugaccggcgugagcgccagcugcagccacaacggcaagagcagcuucuacagaaaccugcuguggcugaccggcaagaacggccuguaccccaaccugagcaagagcuacgccaacaacaaggagaaggaggugcugauccuguggggcgugcaccacccccccaacaucggcaaccagagaacccuguaccacaccgagaacgccuacgugagcguggugagcagccacuacagcagaagauucacccccgagaucaccaagagacccaaggugagagaccaggagggcagaaucaacuacuacuggacccugcuggagcccggcgacaccaucaucuucgaggccaacggcaaccugaucgcccccugguacgccuucgcccugagcagaggcuucggcagcggcaucaucaccagcaacgcccccauggacgagugcgacgccaagugccagaccccccagggcgccaucaacagcagccugcccuuccagaacgugcaccccgugaccaucggcgagugccccaaguacgugagaagcgccaagcugagaauggugaccggccugagaaacauccccagcauccagagcagaggccuguucggcgccaucgccggcuucaucgagggcggcuggaccggcaugguggacggcugguacggcuaccaccaccagaacgagcagggcagcggcuacgccgccgaccagaagagcacccagaacgccaucaacggcaucaccaacaaggugaacagcgugaucgagaagaugaacacccaguucaccgccgugggcaaggaguucaacaagcuggagagaagaauggagaaccugaacaagaagguggacgacggcuuccuggacaucuggaccuacaacgccgagcugcuggugcugcuggagaacgagagaacccuggacuuccacgacagcaacgugaagaaccuguacgagaaggugaagagccagcugaagaacaacgccaaggagaucggcaacggcugcuucgaguucuaccacaagugcaacaacgagugcauggagagcgugaagaacggcaccuacgacuaccccaaguacagcgaggagagcaagcugaacagagagaagaucgacggcgugaagcuggacagcaugggcguguaccagauccuggccaucuacagcaccguggccagcagccuggugcugcuggugagccugggcgccaucagcuucuggaugugcagcaacggcagccugcagugcagaaucugcaucuga

SEQ ID NO: 162539 - RNA, 1701 nt, Artificial Sequence
  derived and/or modified CDS sequence (opt4) from hemagglutinin__InfluenzaA__ACJ09818
augaagaccaucaucgcccugagcuacauccugugccugguguucgcccagaagcugcccggcaacgacaacagcaccgccacccugugccugggccaccacgccgugcccaacggcaccaucgugaagaccaucaccaacgaccagguggaggugaccaacgccaccgagcuggugcagagcagcagcaccggcgagaucugcgacagcccccaccagauccuggacggcgagaacugcacccugaucgacgcccugcugggcgacccccagugcgacggcuuccagaacaagaagugggaccuguucguggagagaagcaaggccuacagcaacugcuaccccuacgacgugcccgacuacgccagccugagaagccugguggccagcagcggcacccuggaguucaacaacgagagcuucaacuggaccggcgugacccagaacggcaccagcagcgccugcaucagaagaagcaacaacagcuucuucagcagacugaacuggcugacccaccugaaguucaaguaccccgcccugaacgugaccaugcccaacaacgagaaguucgacaagcuguacaucuggggcgugcaccaccccggcaccgacaacgaccagaucuuccuguacgcccaggccagcggcagaaucaccgugagcaccaagagaagccagcagaccgugauccccaacaucggcagcagacccagagugagaaacauccccagcagaaucagcaucuacuggaccaucgugaagcccggcgacauccugcugaucaacagcaccggcaaccugaucgcccccagaggcuacuucaagaucagaagcggcaagagcagcaucaugagaagcgacgcccccaucggcaagugcaacagcgagugcaucacccccaacggcagcauccccaacgacaagcccuuccagaacgugaacagaaucaccuacggcgccugccccagauacgugaagcagaacacccugaagcuggccaccggcaugagaaacgugcccgagaagcagaccagaggcaucuucggcgccaucgccggcuucaucgagaacggcugggagggcaugguggacggcugguacggcuucagacaccagaacagcgagggcaucggccaggccgccgaccugaagagcacccaggccgccaucgaccagaucaacggcaagcugaacagacugaucggcaagaccaacgagaaguuccaccagaucgagaaggaguucagcgagguggagggcagaauccaggaccuggagaaguacguggaggacaccaagaucgaccuguggagcuacaacgccgagcugcugguggcccuggagaaccagcacaccaucgaccugaccgacagcgagaugaacaagcuguucgagaagaccaagaagcagcugagagagaacgccgaggacaugggcaacggcugcuucaagaucuaccacaagugcgacaacgccugcaucggcagcaucagaaacggcaccuacgaccacgacguguacagagacgaggcccugaacaacagauuccagaucaagggcguggagcugaagagcggcuacaaggacuggauccuguggaucagcuucgccaugagcugcuuccugcugugcguggcccugcugggcuucaucaugugggccugccagaagggcaacaucagaugcaacaucugcaucuga

SEQ ID NO: 162540 - RNA, 1683 nt, Artificial Sequence
  derived and/or modified CDS sequence (opt4) from hemagglutinin__InfluenzaA__ACJ67533
auggagaccaucagccugaucaccauccugcugguggugaccgccagcaacgccgacaagaucugcaucggccaccagagcaccaacagcaccgagaccguggacacccugaccgagaccaacgugcccgugacccacgccaaggagcugcugcacaccgagcacaacggcaugcugugcgccaccagccugggccacccccugauccuggacaccugcaccaucgagggccugguguacggcaaccccagcugcgaccugcugcuggagggcagagaguggagcuacaucguggagagaagcagcgccgugaacggcaccugcuaccccggcaacguggagaaccuggaggagcugagaacccuguucagcagcgccagcagcuaccagagaauccagaucuuccccgacaccaccuggaacgugaccuacaccggcaccagcagagccugcagcggcagcuucuacagaagcaugagauggcugacccagaagagcggcuucuaccccgugcaggacgcccaguacaccaacaacagaggcaagagcauccuguucguguggggcauccaccacccccccaccuacgccgagcagaccaaccuguacaucagaaacgacaccaccaccagcgugaccaccgaggaccugaacagaaccuucaagcccgugaucggccccagaccccuggugaacggccugcagggcagaaucgacuacuacuggagcgugcugaagcccggccagacccugagagugagaagcaacggcaaccugaucgcccccugguacggccacgugcugagcggcggcagccacggcagaauccugaagaccgaccugaagagcggcagcugcguggugcagugccagaccgagaagggcggccugaacagcacccugcccuuccacaacaucagcaaguacgccuucggcaccugccccaaguacgugagagugaacagccugaagcuggccgugggccugagaaacgugcccgccagaagcagcagaggccuguucggcgccaucgccggcuucaucgagggcggcuggcccggccugguggccggcugguacggcuuccagcacagcaacgaccagggcgugggcauggccgccgacagagacagcacccagaaggccaucgacaagaucaccagcaaggugaacaacaucguggacaagaugaacaagcaguacgagaucaucgaccacgaguucagcgagguggagaccagacugaacaugaucaacaacaagaucgacgaccagauccaggacgugugggccuacaacgccgagcugcuggugcugcuggagaaccagaagacccuggacgagcacgacgccaacgugaacaaccuguacaacaaggugaagagagcccugggcagcaacgccauggaggacggcaagggcugcuucgagcuguaccacaagugcgacgaccagugcauggagaccaucagaaacggcaccuacaacagaagaaaguacagagaggagagcagacuggagagacagaagaucgagggcgugaagcuggagagcgagagaaccuacaagauccugaccaucuacagcaccguggccagcagccuggugcuggccaugggcuucgccgccuuccuguucugggccaugagcaacggcagcugcagaugcaacaucugcaucuga

SEQ ID NO: 162541 - RNA, 1704 nt, Artificial Sequence
  derived and/or modified CDS sequence (opt4) from hemagglutinin__InfluenzaA__ACJ68607
auggagaagaucgugcugcugcuggccaucgugagccuggugaagagcgaccagaucugcaucggcuaccacgccaacaacagcaccgagcagguggacaccaucauggagaagaacgugaccgugacccacgcccaggacauccuggagaagacccacaacggcaagcugugcgaccuggacggcgugaagccccugauccugggcgacugcagcguggccggcuggcugcugggcaaccccaugugcgacgaguucaucaacgugcccgaguggagcuacaucguggagaaggccaaccccgccaacgaccugugcuaccccggcaacuucaacgacuacgaggagcugaagcaccugcugagcagaaucaaccacuucgagaagauccagaucauccccaagagcagcuggagcgaccacgaggccagcagcggcgugagcagcgccugccccuaccagggcacccccagcuucuucagaaacgugguguggcugaucaagaagaacaacaccuaccccaccaucaagagaagcuacaacaacaccaaccaggaggaccugcugauccuguggggcauccaccacagcaacgacgccgccgagcagaccaagcuguaccagaaccccaccaccuacaucagcgugggcaccagcacccugaaccagagacuggugcccaagaucgccaccagaagcaaggugaacggccagagcggcagaauggacuucuucuggaccauccugaagcccaacgacgccaucaacuucgagagcaacggcaacuucaucgcccccgaguacgccuacaagaucgugaagaagggcgacagcgccaucaugaagagcgagguggaguacggcaacugcaacaccaagugccagacccccaucggcgccaucaacagcagcaugcccuuccacaacauccacccccugaccaucggcgagugccccaaguacgugaagagcaacaagcuggugcuggccaccggccugagaaacagcccccugagagagagaagaagaaagagaggccuguucggcgccaucgccggcuucaucgagggcggcuggcagggcaugguggacggcugguacggcuaccaccacagcaacgagcagggcagcggcuacgccgccgacaaggagagcacccagaaggccaucgacggcgugaccaacaaggugaacagcaucaucgacaagaugaacacccaguucgaggccgugggcagagaguucaacaaccuggagagaagaaucgagaaccugaacaagaagauggaggacggcuuccuggacguguggaccuacaacgccgagcugcuggugcugauggagaacgagagaacccuggacuuccacgacagcaacgugaagaaccuguacgacaaggugagacugcagcugagagacaacgccaaggagcugggcaacggcugcuucgaguucuaccacaagugcgacaacgagugcauggagagcgugagaaacggcaccuacgacuacccccaguacagcgaggaggccagacugaagagagaggagaucagcggcgugaagcuggagagcaucggcaccuaccagauccugagcaucuacagcaccguggccagcagccuggcccuggccaucaugguggccggccugagccuguggaugugcagcaacggcagccugcagugcagaaucugcaucuga

SEQ ID NO: 162542 - RNA, 1704 nt, Artificial Sequence
  derived and/or modified CDS sequence (opt4) from hemagglutinin__InfluenzaA__ACJ68609
auggagaagaucgugcugcugcuggccaucgugagccuggugaagagcgaccagaucugcaucggcuaccacgccaacaacagcaccgagcagguggacaccaucauggagaagaacgugaccgugacccacgcccaggacauccuggagaagacccacaacggcaagcugugcgaccuggacggcgugaagccccugauccugagagacugcagcguggccggcuggcugcugggcaaccccaugugcgacgaguucaucaacgugcccgaguggagcuacaucguggagaaggccaaccccgccaacgaccugugcuaccccggcaacuucaacgacuacgaggagcugaagcaccugcugagcagaaucaaccacuucgagaagauccagaucauccccaagagcagcuggagcgaccacgaggccagcagcggcgugagcagcgccugccccuaccagggcacccccagcuucuucagaaacgugguguggcugaucaagaagaacaacaccuaccccaccaucaagagaagcuacaacaacaccaaccaggaggaccugcugauccuguggggcauccaccacagcaacgacgccgccgagcagaccaagcuguaccagaaccccaccaccuacaucagcgugggcaccagcacccugaaccagagacuggugcccaagaucgccaccagaagcaaggugaacggccagagcggcagaauggacuucuucuggaccauccugaagcccaacgacgccaucaacuucgagagcaacggcaacuucaucgcccccgaguacgccuacaagaucgugaagaagggcgacagcgccaucaugaagagcgagguggaguacggcaacugcaacaccaagugccagacccccaucggcgccaucaacagcagcaugcccuuccacaacauccacccccugaccaucggcgagugccccaaguacgugaagagcaacaagcuggugcuggccaccggccugagaaacagcccccugagagagagaagaagaaagagaggccuguucggcgccaucgccggcuucaucgagggcggcuggcagggcaugguggacggcugguacggcuaccaccacagcaacgagcagggcagcggcuacgccgccgacaaggagagcacccagaaggccaucgacggcgugaccaacaaggugaacagcaucaucgacaagaugaacacccaguucgaggccgugggcagagaguucaacaaccuggagagaagaaucgagaaccugaacaagaagauggaggacggcuuccuggacguguggaccuacaacgccgagcugcuggugcugauggagaacgagagaacccuggacuuccacgacagcaacgugaagaaccuguacgacaaggugagacugcagcugagagacaacgccaaggagcugggcaacggcugcuucgaguucuaccacaagugcgacaacgagugcauggagagcgugagaaacggcaccuacgacuacccccaguacagcgaggaggccagacugagaagagaggagaucagcggcgugaagcuggagagcaucggcaccuaccagauccugagcaucuacagcaccguggccagcagccuggcccuggccaucaugguggccggccugagccuguggaugugcagcaacggcagccugcagugcagaaucugcaucuga

SEQ ID NO: 162543 - RNA, 1704 nt, Artificial Sequence
  derived and/or modified CDS sequence (opt4) from hemagglutinin__InfluenzaA__ACJ68610
auggagaagaucgugcuguuccuggccaucgugagccuggugaagagcgaccagaucugcaucggcuaccacgccaacaacagcaccgagcagguggacaccaucauggagaagaacgugaccgugacccacgcccaggacauccuggagaagacccacaacggcaagcugugcgaccuggacggcgugaagccccugauccugagagacugcagcguggccggcuggcugcugggcaaccccaugugcgacgaguucaucaacgugcccgaguggagcuacaucguggagaaggccaaccccgccaacgaccugugcuaccccggcaacuucaacgacuacgaggagcugaagcaccugcugagcagaaucaaccacuucgagaagauccagaucauccccaagagcagcuggagcgaccacgaggccagcagcggcgugagcagcgccugccccuaccagggcacccccagcuucuucagaaacgugguguggcugaucaagaagaacaacaccuaccccaccaucaagagaagcuacaacaacaccaaccaggaggaccugcugauccuguggggcauccaccacagcaacgacgccgccgagcagaccaagcuguaccagaaccccaccaccuacaucagcgugggcaccagcacccugaaccagagacuggugcccaagaucgccaccagaagcaaggugaacggccagagcggcagaauggacuucuucuggaccauccugaagcccaacgacgccaucaacuucgagagcaacggcaacuucaucgcccccgaguacgccuacaagaucgugaagaagggcgacagcgccaucaucaagagcgagguggaguacggcaacugcaacaccaagugccagacccccaucggcgccaucaacagcagcaugcccuuccacaacauccacccccugaccaucggcgagugccccaaguacgugaagagcaacaagcuggugcuggccaccggccugagaaacagcccccugagagagagaagaagaaagagaggccuguucggcgccaucgccggcuucaucgagggcggcuggcagggcaugguggacggcugguacggcuaccaccacagcaacgagcagggcagcggcuacgccgccgacaaggagagcacccagaaggccaucgacggcgugaccaacaaggugaacagcaucaucgacaagaugaacacccaguucgaggccgugggcagagaguucaacaaccuggagagaagaaucgagaaccugaacaagaagauggaggacggcuuccuggacguguggaccuacaacgccgagcugcuggugcugauggagaacgagagaacccuggacuuccacgacagcaacgugaagaaccuguacgacaaggugagacugcagcugagagacaacgccaaggagcugggcaacggcugcuucgaguucuaccacaagugcgacaacgagugcauggagagcgugagaaacggcaccuacgacuacccccaguacagcgaggaggccagacugaagagagaggagaucagcggcgugaagcuggagagcaucggcaccuaccagauccugagcaucuacagcaccguggccagcagccuggcccuggccaucaugguggccggccugagccuguggaugugcagcaacggcagccugcagugcagaaucugcaucuga

SEQ ID NO: 162544 - RNA, 1704 nt, Artificial Sequence
  derived and/or modified CDS sequence (opt4) from hemagglutinin__InfluenzaA__ACJ68611
auggagaagaucgugcugcugcuggccaucgugagccuggugaagagcgaccagaucugcaucggcuaccacgccaacaacagcaccgagcagguggacaccaucauggagaagaacgugaccgugacccacgcccaggacauccuggagaagacccacaacggcaagcugugcgaccuggacggcgugaagccccugauccugagagacugcagcguggccggcuggcugcugggcaaccccaugugcgacgaguucaucaacgugcccgaguggagcuacaucguggagaaggccaaccccgccaacgaccugugcuaccccggcaacuucaacgacuacgaggagcugaagcaccugcugagcagaaucaaccacuucgagaagauccagaucauccccaagagcagcuggagcgaccacgaggccagccugggcgugagcagcgccugccccuaccagggcaugcccagcuucuucagaaacgugguguggcugaucaagaagaacaacaccuaccccaccaucaagagaagcuacaacaacaccaaccaggaggaccugcugauccuguggggcauccaccacagcaacgacgccgccgagcagaccaagcuguaccagaaccccaccaccuacaucagcgugggcaccagcacccugaaccagagacuggugcccaagaucgccaccagaagcaaggugaacggccagagcggcagaauggacuucuucuggaccauccugaagcccaacgacgccaucaacuucgagagcaacggcaacuucaucgcccccgaguacgccuacaagaucgugaagaagggcgacagcgccaucaugaagagcgaggugggcuacggcaacugcaacaccaagugccagacccccaucggcgccaucaacagcagcaugcccuuccacaacauccacccccugaccaucggcgagugccccaaguacgugaagagcaacaagcuggugcuggccaccggccugagaaacagcccccugagagagagaagaagaaagagaggccuguucggcgccaucgccggcuucaucgagggcggcuggcagggcaugguggacggcugguacggcuaccaccacagcaacgagcagggcagcggcuacgccgccgacaaggagagcacccagaaggccaucgacggcgugaccaacaaggugaacagcaucaucgacaagaugaacacccaguucgaggccgugggcagagaguucaacaaccuggagagaagaaucgagaaccugaacaagaagauggaggacggcuuccuggacguguggaccuacaacgccgagcugcuggugcugauggagaacgagagaacccuggacuuccacgacagcaacgugaagaaccuguacgacaaggugagacugcagcugagagacaacgccaaggagcugggcaacggcugcuucgaguucuaccacaagugcgacgacgagugcauggagagcgugagaaacggcaccuacgacuacccccaguacagcgaggaggccagacugaagagagaggagaucagcggcgugaagcuggagagcaucggcaccuaccagauccugagcaucuacagcaccguggccagcagccuggcccuggccaucaugguggccggccugagccuguggaugugcagcaacggcagccugcagugcagaaucugcaucuga

SEQ ID NO: 162545 - RNA, 1704 nt, Artificial Sequence
  derived and/or modified CDS sequence (opt4) from hemagglutinin__InfluenzaA__ACJ68612
auggagaagaucgugcugcugcuggccaucgugagccuggugaagagcgaccagaucugcaucggcuaccacgccaacaacagcaccgagcagguggacaccaucauggagaagaacgugaccgugacccacgcccaggacauccuggagaagacccacaacggcaagcugugcgaccuggacggcgugaagccccugauccugagagacugcagcguggccggcuggcugcugggcaaccccaugugcgacgaguucaucaacgugcccgaguggagcuacaucguggagaaggccaaccccgccaacgaccugugcuaccccggcaacuucaacgacuacgaggagcugaagcaccugcugagcagaaucaaccacuucgagaagauccagaucauccccaagagcagcuggcccgaccacgaggccagcagcggcgugagcagcgccugccccuaccagggcacccccagcuucuucagaaacgugguguggcugaucaagaagaacaacaccuaccccaccaucaagagaagcuacaacaacaccaaccaggaggaccugcugauccuguggggcauccaccacagcaacaacgccgccgagcagaccaagcuguaccagaaccccaccaccuacaucagcgugggcaccagcacccugaaccugagacuggugcccaagaucgccaccagaagcaaggugaacggccagagcggcagaauggacuucuucuggaccauccugaagcccaacgacgccaucaacuucgagagcaacggcaacuucaucgcccccgaguacgccuacaagaucgugaagaagggcgacagcgccaucaugaagagcgagguggaguacggcaacugcaacaccaagugccagacccccaucggcgccaucaacagcagcaugcccuuccacaacauccacccccugaccaucggcgagugccccaaguacgugaagagcaacaagcuggugcuggccaccggccugagaaacagcccccugagagagagaagaagaaagagaggccuguucggcgccaucgccggcuucaucgagggcggcuggcagggcaugguggacggcugguacggcuaccaccacagcaacgagcagggcagcggcuacgccgccgacaaggagagcacccagaaggccaucgacggcgugaccaacaaggugaacagcaucaucgacaagaugaacacccaguucgaggccgugggcagagaguucaacaaccuggagagaagaaucgagaaccugaacaagaagauggaggacggcuuccuggacguguggaccuacaacgccgagcugcuggugcugauggagaacgagagaacccuggacuuccacgacagcaacgugaagaaccuguacgacaaggugagacugcagcugagagacaacgccaaggagcugggcaacggcugcuucgaguucuaccacaagugcgacaacgagugcauggagagcgugagaaacggcaccuacgacuacccccaguacagcgaggaggccagacugaagagagaggagaucagcggcgugaagcuggagagcaucggcgccuaccagauccugagcaucuacagcaccguggccagcagccuggcccuggccaucaugguggccggccugagccuguggaugugcagcaacggcagccugcagugcagaaucugcaucuga

SEQ ID NO: 162546 - RNA, 1704 nt, Artificial Sequence
  derived and/or modified CDS sequence (opt4) from hemagglutinin__InfluenzaA__ACJ68613
auggagaagaucgugcuguuccuggccaucgugagccacgugaagagcgaccagaucugcaucggcuaccacgccaacaacagcaccgagcagguggacaccaucauggagaagaacgugaccgugacccacgcccaggacauccuggagaagacccacaacggcaagcugugcgaccugggcggcgugaagccccugauccugagagacugcagcguggccggcuggcugcugggcaaccccaugugcgacgaguucaucaacgugcccgaguggagcuacaucguggagaaggccaaccccgccaacgaccugugcuaccccggcaacuucaacgacuacgaggagcugaagcaccugcugagcagaaucaaccacuucgagaagauccagaucauccccaagagcagcuggagcgaccacgaggccagcagcggcgugagcagcgugugccccuaccagggcacccccagcuucuucagaaacgugguguggcugaucaagaagaacaacaccuaccccaccaucaagaagagcuacaacaacaccaaccaggaggaccugcugauccuguggggcauccaccacagcaacgacgccgccgagcagaccaagcuguaccagaaccccaccaccuacaucagcgugggcaccagcacccugaaccagagacuggugcccaagaucgccaccagaagcaaggugaacggccagagcggcagaauggacuucuucuggaccauccugaagcccaacgacgccaucaacuucgagagcaacggcaacuucaucgcccccgaguacgccuacaagaucgugaagaagggcgacagcgccaucaugaagagcgagguggaguacggcaacugcaacaccaagugccagacccccaucggcgccaucaacagcagcaugcccuuccacaacauccacccccugaccaucggcgagugccccaaguacgugaagagcaacaagcuggugcuggccaccggccugagaaacagcccccugagagagagaagaagaaagagaggccuguucggcgccaucgccggcuucaucgagggcggcuggcagggcaugguggacggcugguacggcuaccaccacagcaacgagcagggcagcggcuacgccgccgacaaggagagcacccagaaggccaucgacggcgugaccaacaaggugaacagcaucaucgacaagaugaacacccaguucgaggccgugggcagagaguucaacaaccuggagagaagaaucgagaaccugaacaagaagauggaggacggcuuccuggacguguggaccuacaacgccgagcugcuggugcugauggagaacgagagaacccuggacuuccacgacagcaacgugaagaaccuguacgacaaggugagacugcagcugagagacaacgccaaggagcugggcaacggcugcuucgaguucuaccacaagugcgacaacgagugcauggagagcgugagaaacggcaccuacgacuacccccaguacagcgaggaggccagacugaagagagaggagaucagcggcgugaagcuggagagcaucggcaccuaccagauccugagcaucuacagcaccguggccagcagccuggcccuggccaucaugguggccggccugagccuguggaugugcagcaacggcagccugcagugcagaaucugcaucuga

SEQ ID NO: 162547 - RNA, 1707 nt, Artificial Sequence
  derived and/or modified CDS sequence (opt4) from hemagglutinin__InfluenzaA__ACJ68614
auggagaagaucgugcugcugcuggccaucgugagccuggugaagagcgaccagaucugcaucggcuaccacgccaacaacagcaccgagcagguggacaccaucauggagaagaacgugaccgugacccacgcccaggacauccuggagaagacccacaacggcaagcugugcgaccuggacggcgugaagccccugauccugagagacugcagcguggccggcuggcugcugggcaaccccaugugcgacgaguuccugaacgugcccgaguggagcuacaucguggagaagaucaaccccgugaacgaccugugcuaccccggcaacuucaacgacuacgaggagcugaagcaccugcugagcagaaucaaccacuucgagaagauccagaucauccccaagagcagcuggagcgaccacgaggccagcagcggcgugagcagcgccugccccuaccagggcagaagcagcuucuucagaaacgugguguggcugaucaagaagaacaacaccuaccccaccaucaagagaagcuacaacaacaccaaccaggaggaccugcuggugcuguggggcauccaccaccccaacgacgccgccgagcagaccagacuguaccagaaccccaccaccuacaucagcgugggcaccagcacccugaaccagagacuggugcccaagcuggccaccagaagcaaggugaacggccagagcggcagaauggaguucuucuggaccauccugaagcccaacgacgccaucaacuucgagagcaacggcaacuucaucgcccccgagaacgccuacaagaucgugaagaagggcgacagcaccaucaugaagagcgagcuggaguacggcaacugcaacaccaagugccagacccccaucggcgccaucaacagcagcaugcccuuccacaacauccacccccugaccaucggcgagugccccaaguacgugaagagcaacagacuggugcuggccaccggccugagaaacagcccccagggcgagagaagaagaaagaagagaggccuguucggcgccaucgccggcuucaucgagggcggcuggcagggcaugguggacggcugguacggcuaccaccacagcaacgagagaggcagcggcuacgccgccgacaaggagagcacccagaaggccaucgacggcgugaccaacaaggugaacagcaucaucgacaagaugaacacccaguucgaggccgugggcagagaguucaacaaccuggagagaagaaucgagaaccugaacaagaagauggaggacggcuuccuggacguguggaccuacaacgccgagcugcuggugcugauggagaacgagagaacccuggacuuccacgacagcaacgugaagaaccuguacgacaaggugagacugcagcugagagacaacgccaaggagcugggcaacggcugcuucgaguucuaccacagaugcgacaacgagugcauggagagcgugagaaacggcaccuacgacuacccccaguacagcgaggaggccagacugaagagagaggagaucagcggcgugaagcuggagagcaucggcaccuaccagauccugagcaucuacagcaccguggccagcagccuggcccuggccaucaugguggccggccugagccuguggaugugcagcaacggcagccugcagugcagaaucugcaucuga

SEQ ID NO: 162548 - RNA, 1698 nt, Artificial Sequence
  derived and/or modified CDS sequence (opt4) from hemagglutinin__InfluenzaA__ACK99007
augaaggugaagcugcuggugcugcugugcaccuucaccgccaccuacgccgacaccaucugcaucggcuaccacgccaacaacagcaccgacaccguggacaccgugcuggagaagaacgugaccgugacccacagcgugaaccugcuggagaacagccacaacggcaagcugugccugcugaagggcaucgccccccugcagcugggcaacugcagcguggccggcuggauccugggcaaccccgagugcgagcugcugaucagcaaggagagcuggagcuacaucguggagaagcccaaccccgagaacggcaccugcuaccccggccacuucgccgacuacgaggagcugagagagcagcugagcagcgugagcagcuucgagagauucgagaucuuccccaaggagagcagcuggcccaaccacaccgugaccggcgugagcgccagcugcagccacaacggcgagagcagcuucuacagaaaccugcuguggcugaccggcaagaacggccuguaccccaaccugagcaagagcuacgccaacaacaaggagaaggaggugcuggugcuguggggcgugcaccacccccccaacaucggcgaccagaaggcccuguaccacaccgagaacgccuacgugagcguggugagcagccacuacagcagaaaguucacccccgagaucgccaagagacccaaggugagagaccaggagggcagaaucaacuacuacuggacccugcuggagcccggcgacaccaucaucuucgaggccaacggcaaccugaucgcccccagauacgccuucgcccugagcagaggcuucggcagcggcaucaucaacagcaacgcccccauggacaagugcgacgccaagugccagaccccccagggcgccaucaacagcagccugcccuuccagaacgugcaccccgugaccaucggcgagugccccaaguacgugagaagcgccaagcugagaauggugaccggccugagaaacauccccagcauccagagcagaggccuguucggcgccaucgccggcuucaucgagggcggcuggaccggcaugguggacggcugguacggcuaccaccaccagaacgagcagggcagcggcuacgccgccgaccagaagagcacccagaacgccaucaacggcaucaccaacaaggugaacagcgugaucgagaagaugaacacccaguucaccgccgugggcaaggaguucaacaagcuggagagaagaauggagaaccugaacaagaagguggacgacggcuucaucgacaucuggaccuacaacgccgagcugcuggugcugcuggagaacgagagaacccuggacuuccacgacagcaacgugaagaaccuguacgagaaggugaagagccagcugaagaacaacgccaaggagaucggcaacggcugcuucgaguucuaccacaagugcaacgacgagugcauggagagcgugaagaacggcaccuacgacuaccccaaguacagcgaggagagcaagcugaacagagagaagaucgacggcgugaagcuggagagcaugggcguguaccagauccuggccaucuacagcaccguggccagcagccuggugcugcuggugagccugggcgccaucagcuucuggaugugcagcaacggcagccugcagugcagaaucugcaucuga

SEQ ID NO: 162549 - RNA, 1698 nt, Artificial Sequence
  derived and/or modified CDS sequence (opt4) from hemagglutinin__InfluenzaA__ACK99008
augaaggugaagcugcuggugcugcugugcaccuucaccgccaccuacgccgacaccaucugcaucggcuaccacgccaacaacagcaccgacaccguggacaccgugcuggagaagaacgugaccgugacccacagcgugaaccugcuggagaacagccacaacggcaagcugugccugcugaagggcaucgccccccugcagcugggcaacugcagcguggccggcuggauccugggcaaccccgagugcgagcugcugaucagcaaggagagcuggagcuacaucguggagaagcccaaccccgagaacggcaccugcuaccccggccacuucgccgacuacgaggagcugagagagcagcugagcagcgugagcagcuucgagagauucgagaucuuccccaaggagagcagcuggcccaaccacaccgugaccggcgugagcgccagcugcagccacaacggcgagagcagcuucuacagaaaccugcuguggcugaccggcaagaacggccuguaccccaaccugagcaagagcuacgccaacaacaaggagaaggaggugcuggugcuguggggcgugcaccacccccccaacaucggcgaccagaaggcccuguaccacaccgagaacgccuacgugagcguggugagcagccacuacagcagaaaguucacccccgagaucgccaagagacccaaggugagagaccaggagggcagaaucaacuacuacuggacccugcuggagcccggcgacaccaucaucuucgaggccaacggcaaccugaucgcccccagauacgccuucgcccugagcagaggcuucggcagcggcaucaucaacagcaacgcccccauggacaagugcgacgccaagugccagaccccccagggcgccaucaacagcagccugcccuuccagaacgugcaccccgugaccaucggcgagugccccaaguacgugagaagcgccaagcugagaauggugaccggccugagaaacauccccagcauccagagcagaggccuguucggcgccaucgccggcuucaucgagggcggcuggaccggcaugguggacggcugguacggcuaccaccaccagaacgagcagggcagcggcuacgccgccgaccagaagagcacccagaacgccaucaacggcaucaccaacaaggugaacagcgugaucgagaagaugaacacccaguucaccgccgugggcaaggaguucaacaagcuggagagaagaauggagaaccugaacaagaagguggacgacggcuucaucgacaucuggaccuacaacgccgagcugcuggugcugcuggagaacgagagaacccuggacuuccacgacagcaacgugaagaaccuguacgagaaggugaagagccagcugaagaacaacgccaaggagaucggcaacggcugcuucgaguucuaccacaagugcaacgacgagugcauggagagcgugaagaacggcaccuacgacuaccccaaguacagcgaggagagcaagcugaacagagagaagaucgacggcgugaagcuggagagcauggagguguaccagauccuggccaucuacagcaccguggccagcagccuggugcugcuggugagccugggcgccaucagcuucuggaugugcagcaacggcagccugcagugcagaaucugcaucuga

SEQ ID NO: 162550 - RNA, 1698 nt, Artificial Sequence
  derived and/or modified CDS sequence (opt4) from hemagglutinin__InfluenzaA__ACK99009
augaaggugaagcugcuggugcugcugugcaccuucaccgccaccuacgccgacaccaucugcaucggcuaccacgccaacaacagcaccgacaccguggacaccgugcuggagaagaacgugaccgugacccacagcgugaaccugcuggagaacagccacaacggcaagcugugccugcugaagggcaucgccccccugcagcugggcaacugcagcguggccggcuggauccugggcaaccccgagugcgagcugcugaucagcaaggagagcuggagcuacaucguggagaagcccaaccccgagaacggcaccugcuaccccggccacuucgccgacuacgaggagcugagagagcagcugagcagcgugagcagcuucgagagauucgagaucuuccccaaggagagcagcuggcccaaccacaccgugaccggcgugagcgccagcugcagccacaacggcgagagcagcuucuacagaaaccugcuguggcugaccggcaagaacggccuguaccccaaccugagcaagagcuacgccaacaacaaggagaaggaggugcuggugcuguggggcgugcaccacccccccaacaucggcgaccagaaggcccuguaccacaccgagaacgccuacgugagcguggugagcagccacuacagcagaaaguucacccccgagaucgccaagagacccaaggugagagaccaggagggcagaaucaacuacuacuggacccugcuggagcccggcgacaccaucaccuucgaggccaacggcaaccugaucgcccccagauacgccuucgcccugagcagaggcuucggcagcggcaucaucaacagcaacgcccccauggacaagugcgacgccaagugccagaccccccagggcgccaucaacagcagccugcccuuccagaacgugcaccccgugaccaucggcgagugccccaaguacgugagaagcgccaagcugagaauggugaccggccugagaaacauccccagcauccagagcagaggccuguucggcgccaucgccggcuucaucgagggcggcuggaccggcaugguggacggcugguacggcuaccaccaccagaacgagcagggcagcggcuacgccgccgaccagaagagcacccagaacgccaucaacggcaucaccaacaaggugaacagcgugaucgagaagaugaacacccaguucaccgccgugggcaaggaguucaacaagcuggagagaagaauggagaaccugaacaagaagguggacgacggcuucaucgacaucuggaccuacaacgccgagcugcuggugcugcuggagaacgagagaacccuggacuuccacgacagcaacgugaagaaccuguacgagaaggugaagagccagcugaagaacaacgccaaggagaucggcaacggcugcuucgaguucuaccacaagugcaacgacgagugcauggagagcgugaagaacggcaccuacgacuaccccaaguacagcgaggagagcaagcugaacagagagaagaucgacggcgugaagcuggagagcaugggcguguaccagauccuggccaucuacagcaccguggccagcagccuggugcugcuggugagccugggcgccaucagcuucuggaugugcagcaacggcagccugcagugcagaaucugcaucuga

SEQ ID NO: 162551 - RNA, 1698 nt, Artificial Sequence; identical to SEQ ID NO: 162548
  derived and/or modified CDS sequence (opt4) from hemagglutinin__InfluenzaA__ACK99011

SEQ ID NO: 162552 - RNA, 1698 nt, Artificial Sequence
  derived and/or modified CDS sequence (opt4) from hemagglutinin__InfluenzaA__ACK99012
augaaggugaagcugcuggugcugcugugcaccuucaccgccaccuacgccgacaccaucugcaucggcuaccacgccaacaacagcaccgacaccguggacaccgugcuggagaagaacgugaccgugacccacagcgugaaccugcuggagaacagccacaacggcaagcugugccugcugaagggcaucgccccccugcagcugggcaacugcagcguggccggcuggauccugggcaaccccgagugcgagcugcugaucagcaaggagagcuggagcuacaucguggagaagcccaaccccgagaacggcaccugcuaccccggccacuucgccgacuacgaggagcugagagagcagcugagcagcgugagcagcuucgagagauucgagaucuuccccaaggagagcagcuggcccaaccacaccgugaccggcgugagcgccagcugcagccacaacggcgagagcagcuucuacagaaaccugcuguggcugaccggcaagaacggccuguaccccaaccugagcaagagcuacgccaacaacaaggagaaggaggugcuggugcuguggggcgugcaccacccccccaacaucggcgaccagaaggcccuguaccacaccgagaacgccuacgugagcguggugagcagccacuacagcagaaaguucacccccgagaucgccaagagacccaaggugagagaccaggagggcagaaucaacuacuacuggacccugcuggagcccggcgacaccaucaucuucgaggccaacggcaaccugaucgcccccagauacgccuucgcccugagcagaggcuucggcagcggcaucaucaacagcaacgcccccauggacaagugcgacgccaagugccagaccccccagggcgccaucaacagcagccugcccuuccagaacgugcaccccgugaccaucggcgagugccccaaguacgugagaagcgccaagcugagaauggugaccggccugagaaacauccccagcauccagagcagaggccuguucggcgccaucgccggcuucaucgagggcggcuggaccggcaugguggacggcugguacggcuaccaccaccagaacgagcagggcagcggcuacgccgccgaccagaagagcacccagaacgccaucaacggcaucaccaacaaggugaacagcgugaucgagaagaugaacacccaguucaccgccgugggcaaggaguucaacaagcuggagagaagaauggagaaccugaacaagaagguggacgacggcuucaucgacaucuggaccuacaacgccgagcugcuggugcugcuggagaacgagagaacccuggacuuccacgacagcaacgugaagaaccuguacgagaaggugaagagccagcugaagaacaacgccaaggagaucggcaacggcugcuucgaguucuaccacaagugcaacgacgagugcauggagagcgugaagaacggcaccuacgacuaccccaaguacagcgaggagagcaagcugaacagagagaagaucgacggcgugaagcuggagagcaugggcguguaccagauccuggccaucuacagcaccguggccagcagccuggugcugcugaucagccugggcgccaucagcuucuggaugugcagcaacggcagccugcagugcagaaucugcaucuga

SEQ ID NO: 162553 - RNA, 1698 nt, Artificial Sequence; identical to SEQ ID NO: 162548
  derived and/or modified CDS sequence (opt4) from hemagglutinin__InfluenzaA__ACK99013

SEQ ID NO: 162554 - RNA, 1698 nt, Artificial Sequence
  derived and/or modified CDS sequence (opt4) from hemagglutinin__InfluenzaA__ACK99014
augaaggugaagcugcuggugcugcugugcaccuucaccgccaccuacgccgacaccaucugcaucggcuaccacgccaacaacagcaccgacaccguggacaccgugcuggagaagaacgugaccgugacccacagcgugaaccugcuggagaacagccacaacggcaagcugugccugcugaagggcaucgccccccugcagcugggcaacugcagcguggccggcuggauccugggcaaccccgagugcgagcugcugaucagcaaggagagcuggagcuacaucguggagaagcccaaccccgagaacggcaccugcuaccccggccacuucgccgacuacgaggagcugagagagcagcugagcagcgugagcagcuucgagagauucgagaucuuccccaaggagagcagcuggcccaaccacaccgugaccggcgugagcgccagcugcagccacaacggcgagagcagcuucuacagaaaccugcuguggcugaccggcaagaacggccuguaccccaaccugagcaagagcuacgccaacaacaaggagaaggaggugcuggugcuguggggcgugcaccacccccccaacaucggcgaccagaaggcccuguaccacaccgagaacgccuacgugagcguggugagcagccacuacagcagaaaguucacccccgagaucgccaagagacccaaggugagagaccaggagggcagaaucaacuacuacuggacccugcuggagcccggcgacaccaucaucuucgaggccaacggcaaccugaucgcccccagauacgccuucacccugagcagaggcuucggcagcggcaucaucaacagcaacgcccccauggacaagugcgacgccaagugccagaccccccagggcgccaucaacagcagccugcccuuccagaacgugcaccccgugaccaucggcgagugccccaaguacgugagaagcgccaagcugagaauggugaccggccugagaaacauccccagcauccagagcagaggccuguucggcgccaucgccggcuucaucgagggcggcuggaccggcaugguggacggcugguacggcuaccaccaccagaacgagcagggcagcggcuacgccgccgaccagaagagcacccagaacgccaucaacggcaucaccaacaaggugaacagcgugaucgagaagaugaacacccaguucaccgccgugggcaaggaguucaacaagcuggagagaagaauggagaaccugaacaagaagguggacgacggcuucaucgacaucuggaccuacaacgccgagcugcuggugcugcuggagaacgagagaacccuggacuuccacgacagcaacgugaagaaccuguacgagaaggugaagagccagcugaagaacaacgccaaggagaucggcaacggcugcuucgaguucuaccacaagugcaacgacgagugcauggagagcgugaagaacggcaccuacgacuaccccaaguacagcgaggagagcaagcugaacagagagaagaucgacggcgugaagcuggagagcaugggcguguaccagauccuggccaucuacagcaccguggccagcagccuggugcugcuggugagccugggcgccaucagcuucuggaugugcagcaacggcagccugcagugcagaaucugcaucuga

SEQ ID NO: 162555 - RNA, 1698 nt, Artificial Sequence; identical to SEQ ID NO: 162548
  derived and/or modified CDS sequence (opt4) from hemagglutinin__InfluenzaA__ACK99016

SEQ ID NO: 162556 - RNA, 1698 nt, Artificial Sequence; identical to SEQ ID NO: 162548
  derived and/or modified CDS sequence (opt4) from hemagglutinin__InfluenzaA__ACK99018

SEQ ID NO: 162557 - RNA, 1698 nt, Artificial Sequence; identical to SEQ ID NO: 162548
  derived and/or modified CDS sequence (opt4) from hemagglutinin__InfluenzaA__ACK99023

SEQ ID NO: 162558 - RNA, 1698 nt, Artificial Sequence
  derived and/or modified CDS sequence (opt4) from hemagglutinin__InfluenzaA__ACK99026
augaaggugaagcugcuggugcugcugugcaccuucaccgccaccuacgccgacaccaucugcaucggcuaccacgccaacaacagcaccgacaccguggacaccgugcuggagaagaacgugaccgugacccacagcgugaaccugcuggagaacagccacaacggcaagcugugccugcugaagggcaucgccccccugcagcugggcaacugcagcguggccggcuggauccugggcaaccccgagugcgagcugcugaucagcaaggagagcuggagcuacaucguggagaagcccaaccccgagaacggcaccugcuaccccggccacuucgccgacuacgaggagcugagagagcagcugagcagcgugagcagcuucgagagauucgagaucuuccccaaggagagcagcuggcccaaccacaccgugaccggcgugagcgccagcugcagccacaacggcgagagcagcuucuacagaaaccugcuguggcugaccggcaagaacggccuguaccccaaccugagcaagagcuacgccaacaacaaggagaaggaggugcuggugcuguggggcgugcaccacccccccaacaucggcgaccagaaggcccuguaccacaccgagaacgccuacgugagcguggugagcagccacuacagcagaaaguucacccccgagaucgccaagagacccaaggugagagaccaggagggcagaaucaacuacuacuggacccugcuggagcccggcgacaccaucaucuucgaggccaacggcaaccugaucgcccccagauacgccuucgcccugagcagaggcuucggcagcggcaucaucaacagcaacgcccccauggacaagugcgacgccaagugccagaccccccagggcgccaucaacagcagccugcccuuccagaacgugcaccccaucaccaucggcgagugccccaaguacgugagaagcgccaagcugagaauggugaccggccugagaaacauccccagcauccagagcagaggccuguucggcgccaucgccggcuucaucgagggcggcuggaccggcaugguggacggcugguacggcuaccaccaccagaacgagcagggcagcggcuacgccgccgaccagaagagcacccagaacgccaucaacggcaucaccaacaaggugaacagcgugaucgagaagaugaacacccaguucaccgccgugggcaaggaguucaacaagcuggagagaagaauggagaaccugaacaagaagguggacgacggcuucaucgacaucuggaccuacaacgccgagcugcuggugcugcuggagaacgagagaacccuggacuuccacgacagcaacgugaagaaccuguacgagaaggugaagagccagcugaagaacaacgccaaggagaucggcaacggcugcuucgaguucuaccacaagugcaacgacgagugcauggagagcgugaagaacggcaccuacgacuaccccaaguacagcgaggagagcaagcugaacagagagaagaucgacggcgugaagcuggagagcaugggcguguaccagauccuggccaucuacagcaccguggccagcagccuggugcugcuggugagccugggcgccaucagcuucuggaugugcagcaacggcagccugcagugcagaaucugcaucuga

SEQ ID NO: 162559 - RNA, 1698 nt, Artificial Sequence; identical to SEQ ID NO: 162232
  derived and/or modified CDS sequence (opt4) from hemagglutinin__InfluenzaA__ACK99027

SEQ ID NO: 162560 - RNA, 1698 nt, Artificial Sequence
  derived and/or modified CDS sequence (opt4) from hemagglutinin__InfluenzaA__ACK99028
augaaggugaagcugcuggugcugcugugcaccuucaccgccaccuacgccgacaccaucugcaucggcuaccacgccaacaacagcaccgacaccguggacaccgugcuggagaagaacgugaccgugacccacagcgugaaccugcuggagaacagccacaacggcaagcugugccugcugaagggcaucgccccccugcagcugggcaacugcagcguggccggcuggauccugggcaaccccgagugcgagcugcugaucagcaaggagagcuggagcuacaucguggagaagcccaaccccgagaacggcaccugcuaccccggccacuucgccgacuacgaggagcugagagagcagcugagcagcgugagcagcuucgagagauucgagaucuuccccaaggagagcagcuggcccaaccacaccgugaccggcgugagcgccagcugcagccacaacggcgagagcagcuucuacagaaaccugcuguggcugaccggcaagaacggccuguaccccaaccugagcaagagcuacgccaacaacaaggagaaggaggugcuggugcuguggggcgugcaccacccccccaacaucggcgaccagaaggcccuguaccacaccgagaacgccuacgugagcguggugagcagccacuacagcagaaaguucacccccgagaucgccaagagacccaaggugagagaccaggagggcagaaucaacuacuacuggacccugcuggagcccggcgacaccaucaucuucgaggccaacggcaaccugaucgcccccagauacgccuucgcccugagcagaggcuucggcagcggcaucaucaacagcaacgcccccauggacaagugcgacgccaagugccagacccccaagggcgccaucaacagcagccugcccuuccagaacgugcaccccgugaccaucggcgagugccccaaguacgugagaagcgccaagcugagaauggugaccggccugagaaacauccccagcauccagagcagaggccuguucggcgccaucgccggcuucaucgagggcggcuggaccggcaugguggacggcugguacggcuaccaccaccagaacgagcagggcagcggcuacgccgccgaccagaagagcacccagaacgccaucaacggcaucaccaacaaggugaacagcgugaucgagaagaugaacacccaguucaccgccgugggcaaggaguucaacaagcuggagagaagaauggagaaccugaacaagaagguggacgacggcuucaucgacaucuggaccuacaacgccgagcugcuggugcugcuggagaacgagagaacccuggacuuccacgacagcaacgugaagaaccuguacgagaaggugaagagccagcugaagaacaacgccaaggagaucggcaacggcugcuucgaguucuaccacaagugcaacgacgagugcauggagagcgugaagaacggcaccuacgacuaccccaaguacagcgaggagagcaagcugaacagagagaagaucgacggcgugaagcuggagagcaugggcguguaccagauccuggccaucuacagcaccguggccagcagccuggugcugcuggugagccugggcgccaucagcuucuggaugugcagcaacggcagccugcagugcagaaucugcaucuga

SEQ ID NO: 162561 - RNA, 1698 nt, Artificial Sequence
  derived and/or modified CDS sequence (opt4) from hemagglutinin__InfluenzaA__ACK99029
augaaggugaagcugcuggugcugcugugcaccuucaccgccaccuacgccgacaccaucugcaucggcuaccacgccaacaacagcaccgacaccguggacaccgugcuggagaagaacgugaccgugacccacagcgugaaccugcuggagaacagccacaacggcaagcugugccugcugaagggcaucgccccccugcagcugggcaacugcagcguggccggcuggauccugggcaaccccgagugcgagcugcugaucagcaaggagagcuggagcuacaucguggagaagcccaaccccgagaacggcaccugcuaccccggccacuucgccgacuacgaggagcugagagagcagcugagcagcgugagcagcuucgagagauucgagaucuuccccaaggagagcagcuggcccaaccacaccgugaccggcgugagcgccagcugcagccacaacggcgagagcagcuucuacagaaaccugcuguggcugaccggcaagaacggccuguaccccaaccugagcaagagcuacgccaacaacaaggagaaggaggugcuggugcuguggggcgugcaccacccccccaacaucggcgaccagaaggcccuguaccacaccgagaacgccuacgugagcguggugagcagccacuacagcagaaaguucacccccgagaucagcaagagacccaaggugagagaccaggagggcagaaucaacuacuacuggacccugcuggagcccggcgacaccaucaucuucgaggccaacggcaaccugaucgcccccagauacgccuucgcccugagcagaggcuucggcagcggcaucaucaacagcaacgcccccauggacaagugcgacgccaagugccagaccccccagggcgccaucaacagcagccugcccuuccagaacgugcaccccgugaccaucggcgagugccccaaguacgugagaagcgccaagcugagaauggugaccggccugagaaacauccccagcauccagagcagaggccuguucggcgccaucgccggcuucaucgagggcggcuggaccggcaugguggacggcugguacggcuaccaccaccagaacgagcagggcagcggcuacgccgccgaccagaagagcacccagaacgccaucaacggcaucaccaacaaggugaacagcgugaucgagaagaugaacacccaguucaccgccgugggcaaggaguucaacaagcuggagagaagaauggagaaccugaacaagaagguggacgacggcuucaucgacaucuggaccuacaacgccgagcugcuggugcugcuggagaacgagagaacccuggacuuccacgacagcaacgugaagaaccuguacgagaaggugaagagccagcugaagaacaacgccaaggagaucggcaacggcugcuucgaguucuaccacaagugcaacgacgagugcauggagagcgugaagaacggcaccuacgacuaccccaaguacagcgaggagagcaagcugaacagagagaagaucgacggcgugaagcuggagagcaugggcguguaccagauccuggccaucuacagcaccguggccagcagccuggugcugcuggugagccugggcgccaucagcuucuggaugugcagcaacggcagccugcagugcagaaucugcaucuga

SEQ ID NO: 162562 - RNA, 1698 nt, Artificial Sequence; identical to SEQ ID NO: 162548
  derived and/or modified CDS sequence (opt4) from hemagglutinin__InfluenzaA__ACK99030

SEQ ID NO: 162563 - RNA, 1698 nt, Artificial Sequence; identical to SEQ ID NO: 162548
  derived and/or modified CDS sequence (opt4) from hemagglutinin__InfluenzaA__ACK99031

SEQ ID NO: 162564 - RNA, 1698 nt, Artificial Sequence; identical to SEQ ID NO: 162548
  derived and/or modified CDS sequence (opt4) from hemagglutinin__InfluenzaA__ACK99032

SEQ ID NO: 162565 - RNA, 1698 nt, Artificial Sequence; identical to SEQ ID NO: 162548
  derived and/or modified CDS sequence (opt4) from hemagglutinin__InfluenzaA__ACK99033

SEQ ID NO: 162566 - RNA, 1698 nt, Artificial Sequence
  derived and/or modified CDS sequence (opt4) from hemagglutinin__InfluenzaA__ACK99034
augaaggugaagcugcuggugcugcugugcaccuucaccgccaccuacgccgacaccaucugcaucggcuaccacgccaacaacagcaccgacaccguggacaccgugcuggagaagaacgugaccgugacccacagcgugaaccugcuggagaacagccacaacggcaagcugugccugcugaagggcaucgccccccugcagcugggcaacugcagcguggccggcuggauccugggcaaccccgagugcgagcugcugaucagcaaggagagcuggagcuacaucguggagaagcccaaccccgagaacggcaccugcuaccccggccacuucgccgacuacgaggagcugagagagcagcugagcagcgugagcagcuucgagagauucgagaucuuccccaaggagagcagcuggcccaaccacaccgugaccggcgugagcgccagcugcagccacaacggcgagagcagcuucuacagaaaccugcuguggcugaccggcaagaacggccuguaccccaaccugagcaagagcuacgccaacaacaaggagaaggaggugcuggugcuguggggcgugcaccacccccccaacaucggcgaccagaaggcccuguaccacaccgagaacgccuacgugagcguggugagcagccacuacagcagaaaguucacccccgagaucgccaagagacccaaggugagagaccaggagggcagaaucaacuacuacuggacccugcuggagcccggcgacaccaucaucuucgaggccaacggcaaccugaucgcccccagauacgccuucgcccugagcagagacuucggcagcggcaucaucaacagcaacgcccccauggacaagugcgacgccaagugccagaccccccagggcgccaucaacagcagccugcccuuccagaacgugcaccccgugaccaucggcgagugccccaaguacgugagaagcgccaagcugagaauggugaccggccugagaaacauccccagcauccagagcagaggccuguucggcgccaucgccggcuucaucgagggcggcuggaccggcaugguggacggcugguacggcuaccaccaccagaacgagcagggcagcggcuacgccgccgaccagaagagcacccagaacgccaucaacggcaucaccaacaaggugaacagcgugaucgagaagaugaacacccaguucaccgccgugggcaaggaguucaacaagcuggagagaagaauggagaaccugaacaagaagguggacgacggcuucaucgacaucuggaccuacaacgccgagcugcuggugcugcuggagaacgagagaacccuggacuuccacgacagcaacgugaagaaccuguacgagaaggugaagagccagcugaagaacaacgccaaggagaucggcaacggcugcuucgaguucuaccacaagugcaacgacgagugcauggagagcgugaagaacggcaccuacgacuaccccaaguacagcgaggagagcaagcugaacagagagaagaucgacggcgugaagcuggagagcaugggcguguaccagauccuggccaucuacagcaccguggccagcagccuggugcugcuggugagccugggcgccaucagcuucuggaugugcagcaacggcagccugcagugcagaaucugcaucuga

SEQ ID NO: 162567 - RNA, 1698 nt, Artificial Sequence
  derived and/or modified CDS sequence (opt4) from hemagglutinin__InfluenzaA__ACK99035
augaaggugaagcugcuggugcugcugugcaccuucaccgccaccuacgccgacaccaucugcaucggcuaccacgccaacaacagcaccgacaccguggacaccgugcuggagaagaacgugaccgugacccacagcgugaaccugcuggagaacagccacaacggcaagcugugccugcugaagggcaucgccccccugcagcugggcaacugcagcguggccggcuggauccugggcaaccccgagugcgagcugcugaucagcaaggagagcuggagcuacaucguggagaagcccaaccccgagaacggcaccugcuaccccggccacuucgccgacuacgaggagcugagagagcagcugagcagcgugagcgccuucgagagauucgagaucuuccccaaggagagcagcuggcccaaccacaccgugaccggcgugagcgccagcugcagccacaacggcgagagcagcuucuacagaaaccugcuguggcugaccggcaagaacggccuguaccccaaccugagcaagagcuacgccaacaacaaggagaaggaggugcuggugcuguggggcgugcaccacccccccaacaucggcgaccagaaggcccuguaccacaccgagaacgccuacgugagcguggugagcagccacuacagcagaaaguucacccccgagaucagcaagagacccaaggugagagaccaggagggcagaaucaacuacuacuggacccugcuggagcccggcgacaccaucaucuucgaggccaacggcaaccugaucgcccccagauacgccuucgcccugagcagaggcuucggcagcggcaucaucaacagcaacacccccauggacaagugcgacgccaagugccagaccccccagggcgccaucaacagcagccugcccuuccagaacgugcaccccgugaccaucggcgagugccccaaguacgugagaagcgccaagcugagaauggugaccggccugagaaacauccccagcauccagagcagaggccuguucggcgccaucgccggcuucaucgagggcggcuggaccggcaugguggacggcugguacggcuaccaccaccagaacgagcagggcagcggcuacgccgccgaccagaagagcacccagaacgccaucaacggcaucaccaacaaggugaacagcgugaucgagaagaugaacacccaguucaccgccgugggcaaggaguucaacaagcuggagagaagaauggagaaccugaacaagaagguggacgacggcuucaucgacaucuggaccuacaacgccgagcugcuggugcugcuggagaacgagagaacccuggacuuccacgacagcaacgugaagaaccuguacgagaaggugaagagccagcugaagaacaacgccaaggagaucggcaacggcugcuucgaguucuaccacaagugcaacgacgagugcauggagagcgugaagaacggcaccuacgacuaccccaaguacagcgaggagagcaagcugaacagagagaagaucgacggcgugaagcuggagagcaugggcguguaccagauccuggccaucuacagcaccguggccagcagccuggugcugcuggugagccugggcgccaucagcuucuggaugugcagcaacggcagccugcagugcagaaucugcaucuga

SEQ ID NO: 162568 - RNA, 1701 nt, Artificial Sequence; identical to SEQ ID NO: 162398
  derived and/or modified CDS sequence (opt4) from hemagglutinin__InfluenzaA__ACK99421

SEQ ID NO: 162569 - RNA, 1689 nt, Artificial Sequence
  derived and/or modified CDS sequence (opt4) from hemagglutinin__InfluenzaA__ACK99432
auggccaucaucuaccugauccugcuguucaccgccgugagaggcgaccagaucugcaucggcuaccacgccaacaacagcaccgagaagaucgacaccauccuggagagaaacgugaccgugacccacgccaaggacauccuggagaagacccacaacggcaagcugugcaagcugaacggcauccccccccuggagcugggcgacugcagcaucgccggcuggcugcugggcaaccccgagugcgacagacugcugagagugcccgaguggagcuacaucauggagaaggagaaccccagauacagccugugcuaccccggcagcuucaacgacuacgaggagcugaagcaccugcugagcagcgugaagcacuucgagaaggugaagauccugcccaaggacagauggacccagcacaccaccaccggcggcagcauggccugcgccgugagcggcaagcccagcuucuucagaaacaugguguggcugaccaccaagggccccaacuaccccguggcccagggcagcuacaacaacaccagcggcgagcagaugcugaucaucuggggcgugcaccaccccaacgacgaggccgagcagagagcccuguaccagaaggugggcaccuacgugagcgccagcaccagcacccuguacaagagaagcauccccgagaucgccgccagacccaaggugaacggccugggcagcagaauggaguucagcuggacccugcuggacaugugggacaccaucaacuucgagagcaccggcaaccugguggcccccgaguacggcuucaagaucagcaagagaggcagcagcggcaucaugaagaccgagggcacccuggagaacugcgagaccaagugccagaccccccugggcgccaucaacaccacccugcccuuccacaacgugcacccccugaccaucggcgagugccccaaguacgugaagagcgagaagcuggugcuggccaccggccugagaaacgugccccagaucgagagcagaggccuguucggcgccaucgccggcuucaucgagggcggcuggcagggcaugguggacggcugguacggcuaccaccacagcaacgaccagggcagcggcuacgccgccgacaaggagagcacccagaaggccuucgacggcaucaccaacaaggugaacagcgugaucgagaagaugaacacccaguucgaggccgugggcaaggaguucagcaaccuggagaagagacuggagaaccugaacaagaagauggaggacggcuuccuggacguguggaccuacaacgccgagcugcuggugcugauggagaacgagagaacccuggacuuccacgacagcaacgugaagaaccuguacgacaaggugagaaugcagcugagagacaacgugaaggagcugggcaacggcugcuucgaguucuaccacaagugcgacaacgagugcauggacagcgugaagaacggcaccuacgacuaccccaaguacgaggaggagagcaagcugaacagaaacgagaucaagggcgugaagcugagcagcaugggcguguaccagauccuggccaucuacgccaccguggccggcagccugagccuggccaucaugauggccggcaucagcuucuggaugugcagcaacggcagccugcagugcagaaucugcaucuga

SEQ ID NO: 162570 - RNA, 1701 nt, Artificial Sequence
  derived and/or modified CDS sequence (opt4) from hemagglutinin__InfluenzaA__ACK99443
augaaggccaagcugcuggugcugcugugcgccuucaccgccaccgacgccgacaccaucugcaucggcuaccacgccaacaacagcaccgacaccguggacaccgugcuggagaagaacgugaccgugacccacagcgugaaccugcuggaggacagccacaacggcaagcugugcagacugaagggcaucgccccccugcagcugggcaacugcagcaucgccggcuggauccugggcaaccccgagugcgagagccuguucagcaaggagagcuggagcuacaucgccgagacccccaacagcgagaacggcaccugcuaccccggcuacuucgccgacuacgaggagcugagagagcagcugagcagcgugagcagcuucgagagauucgagaucuuccccaaggagagcagcuggcccaaccacaccgugaccaagggcgugaccgccgccugcagccacaacggcaagagcagcuucuacagaaaccugcuguggcugaccgagaagaacggccuguaccccaaccugagcaagagcuacgugaacaacaaggagaaggaggugcuggugcuguggggcgugcaccaccccagcaacaucggcgaccagagagccaucuaccacaccgagaacgccuacgugagcguggugagcagccacuacagcagaagauucacccccgagaucgccaagagacccaaggugagaggccaggagggcagaaucaacuacuacuggacccugcuggagcccggcgacaccaucaucuucgaggccaacggcaaccugaucgcccccugguacgccuucgcccugagcagaggcuucggcagcggcaucaucaccagcaacgccagcauggacgagugcgacgccaagugccagaccccccagggcgccaucaacagcagccugcccuuccagaacgugcaccccgugaccaucggcgagugccccaaguacgugagaagcaccaagcugagaauggugaccggccugagaaacauccccagcgugcagagcagaggccuguucggcgccaucgccggcuucaucgagggcggcuggaccggcaugaucgacggcugguacggcuaccaccaccagaacgagcagggcagcggcuacgccgccgaccagaagagcacccagaacgccaucaacggcaucaccaacaaggugaacagcgugaucgagaagaugaacacccaguucaccgccgugggcaaggaguucaacaagcuggagagaagaauggagaaccugaacaagaagguggacgacggcuuccuggacaucuggaccuacaacgccgagcugcuggugcugcuggagaacgagagaacccuggacuuccacgacagcaacgugaagaaccuguacgagaaggugaagagccagcugaagaacaacgccaaggagaucggcaacggcugcuucgaguucuaccacaagugcaacaacgagugcauggagagcgugaagaacggcaccuacgacuaccccaaguacagcgaggagagcaagcugaacagagagaagaucgacggcgugaagcuggagagcaugggcguguaccagauccuggccaucuacagcaccguggccagcagccuggugcugcuggugagccugggcgccaucagcuucuggaugugcagcaacggcagccugcagugcagaaucugcaucuga

SEQ ID NO: 162571 - RNA, 1701 nt, Artificial Sequence
  derived and/or modified CDS sequence (opt4) from hemagglutinin__InfluenzaA__ACK99465
augaaggccaagcugcuggugcugcugugcgccuucaccgccaccuacgccgacaccaucugcaucggcuaccacgccaacaacagcaccgacaccguggacaccgugcuggagaagaacgugaccgugacccacagcgugaaccugcuggaggacagccacaacggcaagcugugcagacugaagggcaccgccccccugcagcugggcaacugcagcguggccggcuggauccugggcaaccccgagugcgagagccuguucagcaaggagagcuggagcuacaucgccgagaagcccaaccccgagaacggcaccugcuaccccggcuacuucgccgacuacgaggagcugagagagcagcugagcagcgugagcagcuucgagagauucgagaucuuccccaaggagagcagcuggcccaaccacaccgugaccaagggcgugaccgccagcugcagccacaacggcaagagcagcuucuacaagaaccugcuguggcugaccaagaagaacggccuguaccccaaccugagcaagagcuacgugaacaacaaggagaaggaggugcuggugcuguggggcgugcaccaccccagcaacaucggcgaccagagagccaucuaccacaccgagaacgccuacgugagcguggugagcagccacuacagcagaagauucacccccgagaucgccaagagacccaaggugagagaccaggagggcagaaucaacuacuacuggacccugcuggagcccggcgacaccaucaucuucgaggccaacggcaaccugaucgcccccugguacgccuucgcccugagcagaggcuucggcagcggcaucaucaccagcaacgccagcaugggcgagugcgacgccaagugccagaccccccagggcgccaucaacagcagccugcccuuccagaacgugcaccccgugaccaucggcgagugccccaaguacgugagaagcaccaagcugagaauggugaccggccugagaaacauccccagcauccagagcagaggccuguucggcgccaucgccggcuucaucgagggcggcuggaccggcaugaucgacggcugguacggcuaccaccaccagaacgagcagggcagcggcuacgccgccgacaagaagagcacccagaacgccaucgacggcaucaccaacaaggugaacagcgugaucgagaagaugaacacccaguucaccgccgugggcaaggaguucaacaagcuggagagaagaauggagaaccugaacaagaagguggacgacggcuuccuggacaucuggaccuacaacgccgagcugcuggugcugcuggagaacgagagaacccuggacuuccacgacagcaacgugaagaaccuguacgagaaggugaagaaccagcugaagaacaacgccaaggagaucggcaacggcugcuucgaguucuaccacaagugcaacaacgagugcauggagagcgugaagaacggcaccuacgacuaccccaaguacagcgaggagagcaagcugaagagagagaagaucgacggcgugaagcuggagagcaugggcguguaccagauccuggccaucuacagcaccguggccagcagccuggugcugcuggugagccugggcgccaucagcuucuggaugugcagcaacggcagccugcagugcagaaucugcaucuga

SEQ ID NO: 162572 - RNA, 1701 nt, Artificial Sequence
  derived and/or modified CDS sequence (opt4) from hemagglutinin__InfluenzaA__ACK99476
augaagaccaucaucgcccugagcuacauccugugcaugguguucgcccagaagcugcccggcaacgacaacagcaccgccacccugugccugggccaccacgccgugcccaacggcacccuggugaagaccaucaccaacgaccagaucgaggugaccaacgccaccgagcuggugcagagcagcagcaccggcagaaucugcgacagcccccacagaauccuggacggcaagaacugcacccugaucgacgcccugcugggcgacccccacugcgacgacuuccagaacaaggagugggaccuguucguggagagaagcaaggccuacagcaacugcuaccccuacgacgugcccgacuacgccagccugagaagccugguggccagcagcggcacccuggaguucaacaacgagagcuucaacuggaccggcguggcccagaacggcaccagcuacgccugcaagagaagaagcgugaagagcuucuucagcagacugaacuggcugcacaagcuggaguacaaguaccccgcccugaacgugaccaugcccaacaacgacaaguucgacaagcuguacaucuggggcgugcaccaccccagaaccgacagcgaccagaccagccuguacgugcaggccagcggcagagugaccgugagcaccaagagaagccagcagaccgugauccccaacaucggcagcagccccugggugagaggcgugagcagcagaaucagcaucuacuggaccaucgugaagcccggcgacauccugcugaucaacagcaccggcaaccugaucgcccccagaggcuacuucaagaucagaagcggcaagagcagcaucaugagaagcgacgcccccaucggcaacugcaacagcgagugcaucacccccaacggcagcauccccaacgacaagcccuuccagaacgugaacagaaucaccuacggcgccugccccagauacgugaagcagaacacccugaagcuggccaccggcaugagaaacgugcccgagaagcagaccagaggcaucuucggcgccaucgccggcuucaucgagaacggcugggagggcaugguggacggcugguacggcuucagacaccagaacagcgagggcaccggccaggccgccgaccugaagagcacccaggccgccaucaaccagaucaacggcaagcugaacagacugaucgagaagaccaacgagaaguuccaccagaucgagaaggaguucagcgagguggagggcagaauccaggaccuggagaaguacguggaggacaccaagaucgaccuguggagcuacaacgccgagcugcugguggcccuggagaaccagcacaccaucgaccugaccgacagcgagaugaacaagcuguucgagagaaccagaaagcagcugagagagaacgccgaggacaugggcaacggcugcuucaagaucuaccacaagugcgacaacgccugcaucggcagcaucagaaacggcaccuacgaccacgacguguacagagacgaggcccugaacaacagauuccagaucaagggcguggagcugaagagcggcuacaaggacuggauccuguggaucagcuucgccaucagcugcuuccugcugugcguggugcugcugggcuucaucaugugggccugccagaagggcaacaucagaugcaacaucugcaucuga

SEQ ID NO: 162573 - RNA, 1698 nt, Artificial Sequence; identical to SEQ ID NO: 161974
  derived and/or modified CDS sequence (opt4) from hemagglutinin__InfluenzaA__ACL12063

SEQ ID NO: 162574 - RNA, 1701 nt, Artificial Sequence
  derived and/or modified CDS sequence (opt4) from hemagglutinin__InfluenzaA__ACL12129
augaagaccaucaucgcccugagcuacauccugugccugguguucgcccagaagcugcccggcaacgacaacagcaccgccacccugugccugggccaccacgccgugcccaacggcacccuggugaagaccaucaccaacgaccagaucgaggugaccaacgccaccgagcuggugcagagcagcagcaccggcagaaucugcggcagcccccacagaauccuggacggcaagaacugcacccugaucgacgcccugcugggcgacccccacugcgacggcuuccagaacaaggagugggaccuguucguggagagaagcaaggccuacagcaacugcuaccccuacgacgugcccgacuacgccagccugagaagccugguggccagcagcggcacccuggaguucaucaacgaggacuucaacuggaccggcguggcccaggacggcggcagcuacgccugcaagagaggcagcgugaacagcuucuucagcagacugaacuggcugcacaagcuggaguacaaguaccccgcccugaacgugaccaugcccaacaacggcaaguucgacaagcuguacaucuggggcgugcaccaccccagcaccgacagcgaccagaccagccuguacgugagagccagcggcagagugaccgugagcaccaagagaagccagcagaccgugacccccaacaucggcagcagacccugggugagaggccagagcagcagaaucagcaucuacuggaccaucgugaagcccggcgacauccugcugaucgacagcaccggcaaccugaucgcccccagaggcuacuucaagaucagaaacggcaagagcagcaucaugagaagcgacgcccccaucggcaacugcagcagcgagugcaucacccccaacggcagcauccccaacgacaagcccuuccagaacgugaacagaaucaccuacggcgccugccccagauacgugaagcagaacacccugaagcuggccaccggcaugagaaacgugcccgagaagcagaccagaggcaucuucggcgccaucgccggcuucaucgagaacggcugggagggcaugguggacggcugguacggcuucagacaccagaacagcgagggcaccggccaggccgccgaccugaagagcacccaggccgccaucgaccagaucaacggcaagcugaacagacugaucgagaagaccaacgagaaguuccagcagaucgagaaggaguucagcgagguggagggcagaauccaggaccuggagaaguacguggaggacaccaagaucgaccuguggagcuacaacgccgagcugcugguggcccuggagaaccagcacaccaucgaccugaccgacagcgagaugaacaagcuguucgagaagaccagaaagcagcugagagagaacgccgaggacaugggcaacggcugcuucaagaucuaccacaagugcgacaacgccugcaucggcagcaucagaaacggcaccuacgaccacgacguguacagagacgaggcccugaacaacagauuccagaucaagggcguggagcugaagagcggcuacaaggacuggauccuguggaucagcuucgccaucagcugcuuccugcugugcguggugcugcugggcuucaucaugugggccugccagaagggcaacaucagaugcaacaucugcaucuga

SEQ ID NO: 162575 - RNA, 1701 nt, Artificial Sequence; identical to SEQ ID NO: 162416
  derived and/or modified CDS sequence (opt4) from hemagglutinin__InfluenzaA__ACL12140

SEQ ID NO: 162576 - RNA, 1698 nt, Artificial Sequence; identical to SEQ ID NO: 162500
  derived and/or modified CDS sequence (opt4) from hemagglutinin__InfluenzaA__ACL12151

SEQ ID NO: 162577 - RNA, 1701 nt, Artificial Sequence; identical to SEQ ID NO: 162494
  derived and/or modified CDS sequence (opt4) from hemagglutinin__InfluenzaA__ACL12162

SEQ ID NO: 162578 - RNA, 1701 nt, Artificial Sequence
  derived and/or modified CDS sequence (opt4) from hemagglutinin__InfluenzaA__ACL12173
augaagaccaucaucgcccugagcuacauccugugccugguguucgcccagaagcugcccggcaacgacaacagcaccgccacccugugccugggccaccacgccgugcccaacggcaccaucgugaagaccaucaccaacgaccagaucgaggugaccaacgccaccgagcuggugcagagcagcagcaccggcgagaucugcgacagcccccaccagauccuggacggcgagaacugcacccugaucgacgcccugcugggcgacccccagugcgacggcuuccagaacaagaagugggaccuguucguggagagaagcaaggccuacagcaacugcuaccccuacgacgugcccgacuacgccagccugagaagccugguggccagcagcggcacccuggaguucaacaacgagagcuucaacuggaccggcgugacccagaacggcaccagcagcgccugcaucagaagaagcaacaacagcuucuucagcagacugaacuggcugacccaccugaaguucaaguaccccgcccugaacgugaccaugcccaacaacgagcaguucgacaagcuguacaucuggggcgugcaccaccccggcaccgacaacgaccagaucuuccuguacgcccaggccagcggcagaaucaccgugagcaccaagagaagccagcagaccgugauccccaacaucggcagcagacccagagugagaaacauccccagcagaaucagcaucuacuggaccaucgugaagcccggcgacauccugcugaucaacagcaccggcaaccugaucgcccccagaggcuacuucaagaucagaagcggcaagagcagcaucaugagaagcgacgcccccaucggcaagugcaacagcgagugcaucacccccaacggcagcauccccaacgacaagcccuuccagaacgugaacagaaucaccuacggcgccugccccagauacgugaagcagaacacccugaagcuggccaccggcaugagaaacgugcccgagaagcagaccagaggcaucuucggcgccaucgccggcuucaucgagaacggcugggagggcaugguggacggcugguacggcuucagacaccagaacagcgagggcagaggccaggccgccgaccugaagagcacccaggccgccaucaaccagaucaacggcaagcugaacagacugaucggcaagaccaacgagaaguuccaccagaucgagaaggaguucagcgagguggagggcagaauccaggaccuggagaaguacguggaggacaccaagaucgaccuguggagcuacaacgccgagcugcugguggcccuggagaaccagcacaccaucgaccugaccgacagcgagaugaacaagcuguucgagaagaccaagaagcagcugagagagaacgccgaggacaugggcaacggcugcuucaagaucuaccacaagugcgacaacgccugcaucggcagcaucagaaacggcaccuacgaccacgacguguacagagacgaggcccugaacaacagauuccagaucaagggcguggagcugaagagcggcuacaaggacuggauccuguggaucagcuucgccaucagcugcuuccugcugugcguggcccugcugggcuucaucaugugggccugccagaagggcaacaucagaugcaacaucugcaucuga

SEQ ID NO: 162579 - RNA, 1701 nt, Artificial Sequence
  derived and/or modified CDS sequence (opt4) from hemagglutinin__InfluenzaA__ACL12184
augaagaccaucaucgcccugagcuacauccugugccugguguucgcccagaagcugcccggcaacgacaacagcaccgccacccugugccugggccaccacgccgugcccaacggcaccaucgugaagaccaucaccaacgaccagaucgaggugaccaacgccaccgagcuggugcagagcagcagcaccggcgagaucugcgacagcccccaccagauccuggacggcgagaacugcacccugaucgacgcccugcugggcgacccccagugcgacggcuuccagaacaagaagugggaccuguucguggagagaagcaaggccuacagcaacugcuaccccuacgacgugcccgacuacgccagccugagaagccugguggccagcagcggcacccuggaguucaacaacgagagcuucaacuggaccggcgugacccagaacggcaccagcagcgccugcaucagaagaagcaacaacagcuucuucagcagacugaacuggcugacccaccugaaguucaaguaccccgcccugaacgugaccaugcccaacaacgagcaguucgacaagcuguacaucuggggcgugcaccaccccggcaccgacaacgaccagaucuuccuguacgcccaggccagcggcagaaucaccgugagcaccaagagaagccagcagaccgugauccccaacaucggcagcagacccagagugagaaacauccccagcagaaucagcaucuacuggaccaucgugaagcccggcgacauccugcugaucaacagcaccggcaaccugaucgcccccagaggcuacuucaagaucagaagcggcaagagcagcaucaugagaagcgacgcccccaucggcaagugcaacagcgagugcaucacccccaacggcagcauccccaacgacaagcccuuccagaacgugaacagaaucaccuacggcgccugccccagauacgugaagcagaacacccugaagcuggccaccggcaugagaaacgugcccgagaagcagaccagaggcaucuucggcgccaucgccggcuucaucgagaacggcugggagggcaugguggacggcugguacggcuucagacaccagaacagcgagggcagaggccaggccgccgaccugaagagcacccaggccgccaucgaccagaucaacggcaagcugaacagacugaucggcaagaccaacgagaaguuccaccagaucgagaaggaguucagcgagguggagggcagaauccaggaccuggagaaguacguggaggacaccaagaucgaccuguggagcuacaacgccgagcugcugguggcccuggagaaccagcacaccaucgaccugaccgacagcgagaugaacaagcuguucgagaagaccaagaagcagcugagagagaacgccgaggacaugggcaacggcugcuucaagaucuaccacaagugcgacaacgccugcaucggcagcaucagaaacggcaccuacaaccacgacguguacagagacgaggcccugaacaacagauuccagaucaagggcguggagcugaagagcggcuacaaggacuggauccuguggaucagcuucgccaucagcugcuuccugcugugcguggcccugcugggcuucaucaugugggccugccagaagggcaacaucagaugcaacaucugcaucuga

SEQ ID NO: 162580 - RNA, 1701 nt, Artificial Sequence; identical to SEQ ID NO: 162494
  derived and/or modified CDS sequence (opt4) from hemagglutinin__InfluenzaA__ACL12195

SEQ ID NO: 162581 - RNA, 1701 nt, Artificial Sequence
  derived and/or modified CDS sequence (opt4) from hemagglutinin__InfluenzaA__ACL12217
augaagaccaucaucgcccugagcuacauccugugccugguguucgcccagaagcugcccggcaacgacaacagcaccgccacccugugccugggccaccacgccgugcccaacggcaccaucgugaagaccaucaccaacgaccagaucgaggugaccaacgccaccgagcuggugcagagcagcagcaccggcgagaucugcgacagcccccaccagauccuggacggcgagaacugcacccugaucgacgcccugcugggcgacccccagugcgacggcuuccagaacaagaagugggaccuguucguggagagaagcaaggccuacagcaacugcuaccccuacgacgugcccgacuacgccagccugagaagccugguggccagcagcggcacccuggaguucaacaacgagagcuucaacuggaccggcgugacccagaacggcaccagcagcgccugcaucagaagaagcaacaacagcuucuucagcagacugaacuggcugacccaccugaaguucaaguaccccgcccugaacgugaccaugcccaacaacgagcaguucgacaagcuguacaucuggggcgugcaccaccccggcaccgacaacgaccagaucuuccuguacgcccaggccagcggcagaaucaccgugagcaccaagagaagccagcagaccgugauccccaacaucggcagcagacccagagugagaaacauccccagcagaaucagcaucuacuggaccaucgugaagcccggcgacgugcugcugaucaacagcaccggcaaccugaucgcccccagaggcuacuucaagaucagaagcggcaagagcagcaucaugagaagcgacgcccccaucggcaagugcaacagcgagugcaucacccccaacggcagcauccccaacgacaagcccuuccagaacgugaacagaaucaccuacggcgccugccccagauacgugaagcagaacacccugaagcuggccaccggcaugagaaacgugcccgagaagcagaccagaggcaucuucggcgccaucgccggcuucaucgagaacggcugggagggcaugguggacggcugguacggcuucagacaccagaacagcgagggcagaggccaggccgccgaccugaagagcacccaggccgccaucgaccagaucaacggcaagcugaacagacugaucggcaagaccaacgagaaguuccaccagaucgagaaggaguucagcgagguggagggcagaauccaggaccuggagaaguacguggaggacaccaagaucgaccuguggagcuacaacgccgagcugcugguggcccuggagaaccagcacaccaucgaccugaccgacagcgagaugaacaagcuguucgagaagaccaagaagcagcugagagagaacgccgaggacaugggcaacggcugcuucaagaucuaccacaagugcgacaacgccugcaucggcagcaucagaaacggcaccuacgaccacgacguguacagagacgaggcccugaacaacagauuccagaucaagggcguggagcugaagagcggcuacaaggacuggauccuguggaucagcuucgccaucagcugcuuccugcugugcguggcccugcugggcuucaucaugugggccugccagaagggcaacaucagaugcaacaucugcaucuga

SEQ ID NO: 162582 - RNA, 1701 nt, Artificial Sequence; identical to SEQ ID NO: 162494
  derived and/or modified CDS sequence (opt4) from hemagglutinin__InfluenzaA__ACL12228

SEQ ID NO: 162583 - RNA, 1701 nt, Artificial Sequence; identical to SEQ ID NO: 162494
  derived and/or modified CDS sequence (opt4) from hemagglutinin__InfluenzaA__ACL12239

SEQ ID NO: 162584 - RNA, 1701 nt, Artificial Sequence
  derived and/or modified CDS sequence (opt4) from hemagglutinin__InfluenzaA__ACL12250
augaagaccaucaucgcccugagcuacauccugugccugguguucgcccagaaguuccccggcaacgacaacagcaccgccacccugugccugggccaccacgccgugcccaacggcaccaucgugaagaccaucaccaacgaccagaucgaggugaccaacgccaccgagcuggugcagagcagcagcaccggcgagaucugcgacagcccccaccagauccuggacggcgagaacugcacccugaucgacgcccugcugggcgacccccagugcgacggcuuccagaacaagaacugggaccuguucguggagagaagcaaggccuacagcaacugcuaccccuacgacgugcccgacuacgugagccugagaagccugguggccagcagcggcacccuggaguucaacaacgagagcuucaacuggaccggcgugacccagaacggcaccagcagcgccugcaucagaagaagcaacaacagcuucuucagcagacugaacuggcugacccacagcaaguucaaguaccccgcccugaacgugaccaugcccaacaacgagaacuucgacaagcuguacaucuggggcgugcaccaccccggcaccgacaacgaccagaucuuccuguacgcccaggccagcggcagaaucaccgugagcaccaagagaagccagcagaccgugauccccaacaucggcagcagacccagagugagaaacauccccagcagaaucagcaucuacuggaccaucgugaagcccggcgacauccugcugaucaacagcaccggcaaccugaucgcccccagaggcuacuucaagaucagaagcggcaagagcagcaucaugagaagcgacgcccccaucggcaagugcaacagcgagugcaucacccccaacggcagcauccccaacgacaagcccuuccagaacgugaacagaaucaccuacggcgccugccccagauacgugaagcagaacacccugaagcuggccaccggcaugagaaacgugcccgagaagcagaccagaggcaucuucggcgccaucgccggcuucaucgagaacggcugggagggcaugguggacggcugguacggcuucagacaccagaacagcgagggcaucggccaggccgccgaccugaagagcacccaggccgccaucgaccagaucaacggcaagcugaacagacugaucggcaagaccaacgagaaguuccaccagaucgagaaggaguucagcgagguggagggcagaauccaggaccuggagaaguacguggaggacaccaagaucgaccuguggagcuacaacgccgagcugcugguggcccuggagaaccagcacaccaucgaccugaccgacagcgagaugaacaagcuguucgagaagaccaagaagcagcugagagagaacgccgaggacaugggcaacggcugcuucaagaucuaccacaagugcgacaacgccugcaucggcagcaucagaaacggcaccuacgaccacgacguguacagagacgaggcccugaacaacagauuccagaucaagggcguggagcugaagagcggcuacaaggacuggauccuguggaucagcuucgccaucagcugcuuccugcugugcaucgcccugcugggcuucaucaugugggccugccagaagggcaacaucagaugcaacaucugcaucuga

SEQ ID NO: 162585 - RNA, 1701 nt, Artificial Sequence
  derived and/or modified CDS sequence (opt4) from hemagglutinin__InfluenzaA__ACL12261
augaaggccaagcugcuggugcugcugugcgccuucaccgccaccgacgccgacaccaucugcaucggcuaccacgccaacaacagcaccgacaccguggacaccgugcuggagaagaacgugaccgugacccacagcgugaaccugcuggaggacagccacaacggcaagcugugcagacugaagggcaucgccccccugcagcugggcaacugcagcaucgccggcuggauccugggcaaccccgagugcgagagccuguucagcaagaagagcuggagcuacaucgccgagacccccaacagcgagaacggcaccugcuaccccggcuacuucgccgacuacgaggagcugagagagcagcugagcagcgugagcagcuucgagagauucgagaucuuccccaaggagagcagcuggcccaaccacaccgugaccaagggcgugaccgccgccugcagccacaagggcagaagcagcuucuacagaaaccugcuguggcugaccgagaagaacggccuguaccccaaccugagcaagagcuacgugaacaacaaggagaaggaggugcuggugcuguggggcgugcaccaccccagcaacaucggcgaccagagagccaucuaccacaccgagaacgccuacgugagcguggugagcagccacuacaacagaagauucacccccgagaucgccaagagacccaaggugagaggccaggagggcagaaucaacuacuacuggacccugcuggagcccggcgacaccaucaucuucgaggccaacggcaaccugaucgcccccugguacgccuucgcccugagcagaggcuucggcagcggcaucaucaccagcaacgccagcauggacgagugcgacgccaagugccagaccccccagggcgccaucaacagcagccugcccuuccagaacgugcaccccgugaccaucggcgagugccccaaguacgugagaagcaccaagcugagaauggugaccggccugagaaacauccccagcauccagagcagaggccuguucggcgccaucgccggcuucaucgagggcggcuggaccggcaugaucgacggcugguacggcuaccaccaccagaacgagcagggcagcggcuacgccgccgaccagaagagcacccagaacgccaucaacggcaucaccaacaaggugaacagcgugaucgagaagaugaacacccaguucaccgccgugggcaaggaguucaacaagcuggagaagagaauggagaaccugaacaagaagguggacgacggcuuccuggacaucuggaccuacaacgccgagcugcuggugcugcuggagaacgagagaacccuggacuuccacgacagcaacgugaagaaccuguacgagaaggugaagaaccagcugaagaacaacgccaaggagaucggcaacggcugcuucgaguucuaccacaagugcaacaacgagugcauggagagcgugaagaacggcaccuacgacuaccccaaguacagcgaggagagcaagcugaacagagagaagaucgacggcgugaagcuggagagcaugggcguguaccagauccuggccaucuacagcaccguggccagcagccuggugcugcuggugagccugggcgccaucagcuucuggaugugcagcaacggcagccugcagugcagaaucugcaucuga

SEQ ID NO: 162586 - RNA, 1689 nt, Artificial Sequence
  derived and/or modified CDS sequence (opt4) from hemagglutinin__InfluenzaA__ACN32272
auggccaucaucuaccugauccugcuguucaccgccgugagaggcgaccagaucugcaucggcuaccacgccaacaacagcaccgagaagaucgacaccauccuggagagaaacgugaccgugacccacgccaaggacauccuggagaagacccacaacggcaagcugugcaagcugaacggcauccccccccuggagcugggcgacugcagcaucgccggcuggcugcugggcaaccccgagugcgacagacugcugagagugcccgaguggagcuacaucauggagaaggagaaccccagauacagccugugcuaccccggcagcuucaacgacuacgaggagcugaagcaccugcugagcagcgugaagcacuucgagaaggugaagauccugcccaaggacagauggacccagcacaccaccaccggcggcagcauggccugcgccgugagcggcaagcccagcuucuucagaaacaugguguggcugaccaccaagggccccaacuaccccguggcccagggcagcuacaacaacaccagcggcgagcagaugcugaucaucuggggcgugcaccaccccaacgacgaggccgagcagagagcccuguaccagaacgugggcaccuacgugagcgccagcaccagcacccuguacaagagaagcauccccgagaucgccgccagacccaaggugaacggccugggcagcagaauggaguucagcuggacccugcuggacaugugggacaccaucaacuucgagagcaccggcaaccugguggcccccgaguacggcuucaagaucagcaagagaggcagcagcggcaucaugaagaccgagggcacccuggagaacugcgagaccaagugccagaccccccugggcgccaucaacaccacccugcccuuccacaacgugcacccccugaccaucggcgagugccccaaguacgugaagagcgagaagcuggugcuggccaccggccugagaaacgugccccagaucgagagcagaggccuguucggcgccaucgccggcuucaucgagggcggcuggcagggcaugguggacggcugguacggcuaccaccacagcaacgaccagggcagcggcuacgccgccgacaaggagagcacccagaaggccuucgacggcaucaccaacaaggugaacagcgugaucgagaagaugaacacccaguucgaggccgugggcaaggaguucagcaaccuggagaagagacuggagaaccugaacaagaagauggaggacggcuuccuggacguguggaccuacaacgccgagcugcuggugcugauggagaacgagagaacccuggacuuccacgacagcaacgugaagaaccuguacgacaaggugagaaugcagcugagagacaacgugaaggagcugggcaacggcugcuucgaguucuaccacaagugcgacaacgagugcauggacagcgugaagaacggcaccuacgacuaccccaaguacgaggaggagagcaagcugaacagaaacgagaucaagggcgugaagcugagcagcaugggcguguaccagauccuggccaucuacgccaccguggccggcagccugagccuggccaucaugauggccggcaucagcuucuggaugugcagcaacggcagccugcagugcagaaucugcaucuga

SEQ ID NO: 162587 - RNA, 1701 nt, Artificial Sequence
  derived and/or modified CDS sequence (opt4) from hemagglutinin__InfluenzaA__ACN32283
augaagaccaucaucgcccugagcuacauccugugccuggugagcgcccagaaguuccccggcaacgacaacagcaccgccacccugugccugggccaccacgccgugcccaacggcaccaucgugaagaccaucaccaacgaccagaucgaggugaccaacgccaccgagcuggugcagagcagcagcaccggcgagaucugcgacagcccccaccagauccuggacggcgagaacugcacccugaucgacgcccugcugggcgacccccagugcgacggcuuccagaacaagaagugggaccuguucguggagagaagcaaggccuacagcaacugcuaccccuacgacgugcccgacuacgccagccugagaagccugguggccagcagcggcacccuggaguucaacaacgagagcuucaacuggaccggcgugacccagaacggcaccagcagcgccugcaucagaagaagcaacaacagcuucuucagcagacugaacuggcugacccaccugaaguucaaguaccccgcccugaacgugaccaugcccaacaacgaggaguucgacaagcuguacaucuggggcgugcaccaccccggcaccgacaacgaccagaucuuccuguacgcccaggccagcggcagaaucaccgugagcaccaagagaagccagcagaccgugauccccaacaucggcagcagacccagagugagaaacauccccagcagaaucagcaucuacuggaccaucgugaagcccggcgacauccugcugaucaacagcaccggcaaccugaucgcccccagaggcuacuucaagaucagaagcggcaagagcagcaucaugagaagcgacgcccccaucggcaagugcaacagcgagugcaucacccccaacggcagcauccccaacgacaagcccuuccagaacgugaacagaaucaccuacggcgccugccccagauacgugaagcagaacacccugaagcuggccaccggcaugagaaacgugcccgagaagcagaccagaggcaucuucggcgccaucgccggcuucaucgagaacggcugggagggcaugguggacggcugguacggcuucagacaccagaacagcgagggcaucggccaggccgccgaccugaagagcacccaggccgccaucgaccagaucaacggcaagcugaacagacugaucggcaagaccaacgagaaguuccaccagaucgagaaggaguucagcgagguggagggcagaauccaggaccuggagaaguacguggaggacaccaagaucgaccuguggagcuacaacgccgagcugcugguggcccuggagaaccagcacaccaucgaccugaccgacagcgagaugaacaagcuguucgagaagaccaagaagcagcugagagagaacgccgaggacaugggcaacggcugcuucaagaucuaccacaagugcgacaacgccugcaucggcagcaucagaaacggcaccuacgaccacgacguguacagagacgaggcccugaacaacagauuccagaucaagggcguggagcugaagagcggcuacaaggacuggauccuguggaucagcuucgccaucagcugcuuccugcugugcguggcccugcugggcuucaucaugugggccugccagaagggcaacaucagaugcaacaucugcaucuga

SEQ ID NO: 162588 - RNA, 1701 nt, Artificial Sequence
  derived and/or modified CDS sequence (opt4) from hemagglutinin__InfluenzaA__ACN32474
augaagaccaucaucgcccugagcuacauccugugccuggugagcgcccagaagcugcccggcaacgacaacagcaccgccacccugugccugggccaccacgccgugcccaacggcaccaucgugaagaccaucaccaacgaccagaucgaggugaccaacgccaccgagcuggugcagagcagcagcaccggcgagaucugcgacagcccccaccaggugcuggacggcgagaacugcacccugaucgacgcccugcugggcgacccccagugcgacggcuuccagaacaagaagugggaccuguucguggagagaagcaaggccuacagcaacugcuaccccuacgacgugcccgacuacaccagccugagaagccugguggccagcagcggcacccuggaguucaacaacgagagcuucaacuggaccggcgugacccagaacggcaccagcagcgccugcaucagaagaagcaacaacagcuucuucagcagacugaacuggcugacccaccugaaguucaaguaccccgcccugaacaugaccaugcccaacaacgaggaguucgacaagcuguacaucuggggcgugcaccaccccggcaccgacaacgaccagaucuuccuguacgcccaggccagcggcagaaucaccgugagcaccaagagaagccagcagaccgugauccccaacaucggcagcagacccagagugagaaacauccccagcagaaucagcaucuacuggaccaucgugaagcccggcgacauccugcugaucaacagcaccggcaaccugaucgcccccagaggcuacuucaagaucagaagcggcaagagcagcaucaugagaagcgacgcccccaucggcaagugcaacagcgagugcaucacccccaacggcagcauccccaacgacaagcccuuccagaacgugaacagaaucaccuacggcgccugccccagauacgugaagcagaacacccugaagcuggccaccggcaugagaaacgugcccgagaagcagaccagaggcaucuucggcgccaucgccggcuucaucgagaacggcugggagggcaugguggacggcugguacggcuucagacaccagaacagcgagggcaucggccaggccgccgaccugaagagcacccaggccgccaucgaccagaucaacggcaagcugaacagacugaucggcaagaccaacgagaaguuccaccagaucgagaaggaguucagcgagguggagggcagaauccaggaccuggagaaguacguggaggacaccaagaucgaccuguggagcuacaacgccgagcugcugguggcccuggagaaccagcacaccaucgaccugaccgacagcgagaugaacaagcuguucgagaagaccaagaagcagcugagagagaacgccgaggacaugggcaacggcugcuucaagaucuaccacaagugcgacaacgccugcaucggcagcaucagaaacggcaccuacgaccacgagguguacagagacgaggcccugaacaacagauuccagaucaagggcguggagcugaagagcggcuacaaggacuggauccuguggaucagcuucgccaucagcugcuuccugcugugcguggcccugcugggcuucaucaugugggccugccagaagggcaacaucagaugcaacaucugcaucuga

SEQ ID NO: 162589 - RNA, 1698 nt, Artificial Sequence; identical to SEQ ID NO: 162548
  derived and/or modified CDS sequence (opt4) from hemagglutinin__InfluenzaA__ACN32501

SEQ ID NO: 162590 - RNA, 1701 nt, Artificial Sequence
  derived and/or modified CDS sequence (opt4) from hemagglutinin__InfluenzaA__ACN32534
augaagaccaucaucgcccugagcuacauccugugccugguguucgcccagaagcugcccggcaacgacaacagcaccgccacccugugccugggccaccacgccgugcccaacggcacccuggugaagaccaucaccaacgaccagaucgaggugaccaacgccaccgagcuggugcagagcagcagcaccggcagaaucugcgacagcccccaccagauccuggacggcgagaacugcacccugaucgacgcccugcugggcgacccccacugcgacggcuuccagaacaaggagugggaccuguucguggagagaagcaaggccuacagcaacugcuaccccuacgacgugcccgacuacgugagccugagaagccugguggccagcagcggcacccuggaguucaacaacgagagcuucaacuggaccggcguggcccagaacggcaccagcagcgccugcaagagaagaagcgacaagagcuucuucagcagacugaacuggcugcaccagcugaaguacaaguaccccgcccugaacgugaccaugcccaacaacgagaaguucgacaagcuguacaucuggggcgugcaccaccccggcaccgacagcgaccagaucagccuguacgcccaggccagcggcagagugaccgugagcaccaagagaagccagcagaccgugauccccaacaucggcagcggccccugggugagaggcgugagcagcagaaucagcaucuacuggaccaucgugaagcccggcgacauccugcugaucaacagcaccggcaaccugaucgcccccagaggcuacuucaagaucagaagcggcaagagcagcaucaugagaagcgacgcccccaucggcaagugcaacagcgagugcaucacccccaacggcagcauccccaacggcaagcccuuccagaacgugaacagaaucaccuacggcgccugccccagauacgugaagcagaacacccugaagcuggccaccggcaugagaaacgugcccgagaagcagaccagaggcaucuucggcgccaucgccggcuucaucgagaacggcugggagggcaugauggacggcugguacggcuucagacaccagaacagcgagggcaccggccaggccgccgaccugaagagcacccaggccgccaucaaccagaucaacggcaagcugaacagacugaucgagaagaccaacgagaaguuccaccagaucgagaaggaguucagcgagguggagggcagaauccaggaccuggagaaguacguggaggacaccaagaucgaccuguggagcuacaacgccgagcugcugguggcccuggagaaccagcacaccaucgaccugaccgacagcgagaugaacaagcuguucgagagaaccaagaagcagcugagagagaacgccgaggacaugggcaacggcugcuucaagaucuaccacaagugcgacaacgccugcaucggcagcaucagaaacggcaccuacgaccacgacguguacagagacgaggcccugaacaacagauuccagaucaagggcguggagcugaagagcggcuacaaggacuggauccuguggaucagcuucgccaucagcugcuuccugcugugcaucgugcugcugggcuucaucaugugggccugccagaagggcaacaucagaugcaacaucugcaucuga

SEQ ID NO: 162591 - RNA, 1701 nt, Artificial Sequence
  derived and/or modified CDS sequence (opt4) from hemagglutinin__InfluenzaA__ACN32545
augaagaccaucaucgcccugagcuacauccugugccugguguucgcccagaagcugcccggcaacgacaacagcaccgccacccugugccugggccaccacgccgugcccaacggcaccaucgugaagaccaucaccaacgaccagaucgaggugaccaacgccaccgagcuggugcagagcagcagcaccggcgagaucugcgacagcccccaccagauccuggacggcgagaacugcacccugaucgacgcccugcugggcgacccccacugcgacggcuuccagaacaagaagugggaccuguucguggagagaagcaaggccuacagcaacugcuaccccuacgacgugcccgacuacgccagccugagaagccugaucgccagcagcggcacccuggaguucaacaacgagagcuucaacuggaccggcgugacccagaacggcaccagcagcgccugcaucagaagaagcaacaacagcuucuucagcagacugaacuggcugacccaccugaaguucaaguaccccgcccugaacgugaccaugcccaacaacgagaaguucgacaagcuguacaucuggggcgugcaccaccccggcaccgacaacgaccagaucuuccuguacgcccaggccagcggcagaaucaccgugagcaccaagagaagccagcagaccgugauccccaacaucggcagcagacccagagugagaaacauccccagcagaaucagcaucuacuggaccaucgugaagcccggcgacauccugcugaucaacagcaccggcaaccugaucgcccccagaggcuacuucaagaucagaagcggcaagagcagcaucaugagaagcgacgcccccaucggcaagugcaacagcgagugcaucacccccaacggcagcauccccaacgacaagcccuuccagaacgugaacagaaucaccuacggcgccugccccagauacgugaagcagaacacccugaagcuggccaccggcaugagaaacgugcccgagaagcagaccagaggcaucuucggcgccaucgccggcuucaucgagaacggcugggagggcaugguggacggcugguacggcuucagacaccagaacagcgagggcaucggccaggccgccgaccugaagagcacccaggccgccaucgaccagaucaacggcaagcugaacagacugaucggcaagaccaacgagaaguuccaccagaucgagaaggaguucagcgagguggagggcagaauccaggaccuggagaaguacguggaggacaccaagaucgaccuguggagcuacaacgccgagcugcugguggcccuggagaaccagcacaccaucgaccugaccgacagcgagaugaacaagcuguucgagaagaccaagaagcagcugagagagaacgccgaggacaugggcaacggcugcuucaagaucuaccacaagugcgacaacgccugcaucggcagcaucagaaacggcaccuacgaccacgacguguacagagacgaggcccugaacaacagauuccagaucaagggcguggagcugaagagcggcuacaaggacuggauccuguggaucagcuucgccaucagcugcuuccugcugugcguggcccugcugggcuucaucaugugggccugccagaagggcaacaucagaugcaacaucugcaucuga

SEQ ID NO: 162592 - RNA, 1698 nt, Artificial Sequence
  derived and/or modified CDS sequence (opt4) from hemagglutinin__InfluenzaA__ACN32793
augaaggugaagcugcuggugcugcugugcaccuucaccgccaccuacgccgacaccaucugcaucggcuaccacgccaacaacagcaccgacaccguggacaccgugcuggagaagaacgugaccgugacccacagcgugaaccugcuggaggacagccacaacggcaagcugugccugcugaagggcaucgccccccugcagcugggcaacugcagcguggccggcuggauccugggcaaccccgagugcgagcugcugaucagcaaggagagcuggagcuacaucguggagacccccaaccccgagaacggcaccugcuaccccggcuacuucgccgacuacgaggagcugagagagcagcugagcagcgugagcagcuucgagagauucgagaucuuccccaaggagagcagcuggcccaaccacaccgugaccggcgugagcgccagcugcagccacaacggcaagagcagcuucuacagaaaccugcuguggcugaccggcaagaacggccuguaccccaaccugagcgagagcuacgccaacaacaaggagaaggaggugcuggugcuguggggcgugcaccacccccccaacaucggcgaccagagagcccuguaccacaccgagaacgccuacgugagcguggugagcagccacuacagcagaagauucacccccgagaucgccaagagacccaaggugagagaccaggagggcagaaucaacuacuacuggacccugcuggagcccggcgacaccaucaucuucgaggccaacggcaaccugaucgcccccagauucgccuucgcccugagcagaggcuucggcagcggcaucaucaccagcaacgcccccauggacgagugcgacgccaagugccagaccccccagggcgccaucaacagcagccugcccuuccagaacgugcaccccgugaccaucggcgagugccccaaguacgugagaagcaccaagcugagaauggugaccggccugagaaacauccccagcauccagagcagaggccuguucggcgccaucgccggcuucaucgagggcggcuggaccggcaugguggacggcugguacggcuaccaccaccagaacgagcagggcagcggcuacgccgccgaccagaagagcacccagaacgccaucaacggcaucaccaacaaggugaacagcgugaucgagaagaugaacacccaguucaccgccgugggcaaggaguucaacaagcuggagagaagaauggagaaccugaacaagaagguggacgacggcuuccuggacaucuggaccuacaacgccgagcugcuggugcugcuggagaacgagagaacccuggacuuccacgacagcaacgugaagaaccuguacgagaaggugaagagccagcugaagaacaacgccaaggagaucggcaacggcugcuucgaguucuaccacaagugcaacgacgagugcauggagagcgugaagaacggcaccuacgacuaccccaaguacagcgaggagagcaagcugaacagagagaagaucgacggcgugaagcuggagagcaugggcguguaccagauccuggccaucuacagcaccguggccagcagccuggugcugcuggugagccugggcgccaucagcuucuggaugugcagcaacggcagccugcagugcagaaucugcaucuga

SEQ ID NO: 162593 - RNA, 1698 nt, Artificial Sequence; identical to SEQ ID NO: 162017
  derived and/or modified CDS sequence (opt4) from hemagglutinin__InfluenzaA__ACN32804

SEQ ID NO: 162594 - RNA, 1698 nt, Artificial Sequence; identical to SEQ ID NO: 162005
  derived and/or modified CDS sequence (opt4) from hemagglutinin__InfluenzaA__ACN32815

SEQ ID NO: 162595 - RNA, 1698 nt, Artificial Sequence; identical to SEQ ID NO: 162015
  derived and/or modified CDS sequence (opt4) from hemagglutinin__InfluenzaA__ACN32826

SEQ ID NO: 162596 - RNA, 1701 nt, Artificial Sequence; identical to SEQ ID NO: 162494
  derived and/or modified CDS sequence (opt4) from hemagglutinin__InfluenzaA__ACN32848

SEQ ID NO: 162597 - RNA, 1701 nt, Artificial Sequence
  derived and/or modified CDS sequence (opt4) from hemagglutinin__InfluenzaA__ACN32870
augaagaccaucaucgcccugagcuacauccugugccugguguucgcccagaaguuccccggcaacgacaacagcaccgccacccugugccugggccaccacgccgugcccaacggcaccaucgugaagaccaucaccaacgaccagaucgaggugaccaacgccaccgagcuggugcagagcagcagcaccggcgagaucugcgacagcccccaccagauccuggacggcgagaacugcacccugaucgacgcccugcugggcgacccccagugcgacggcuuccagaacaagaacugggaccuguucguggagagaagcaaggccuacagcaacugcuaccccuacgacgugcccgacuacgccagccugagaagccugguggccagcagcggcacccuggaguucaacaacgagagcuucaacuggaccggcgugacccagaacggcaccagcagcgccugcaucagaagaagcaacaacagcuucuucagcagacugaacuggcugacccacagcaaguucaaguaccccgcccugaacgugaccaugcccaacaacgagaacuucgacaagcuguacaucuggggcgugcaccaccccggcaccgacaacgaccagaucuuccuguacgcccaggccagcggcagaaucaccgugagcaccaagagaagccagcagaccgugauccccaacaucggcagcagacccagagugagaaacauccccagcagaaucagcaucuacuggaccaucgugaagcccggcgacauccugcugaucaacagcaccggcaaccugaucgcccccagaggcuacuucaagaucagaagcggcaagagcagcaucaugagaagcgacgcccccaucggcaagugcaacagcgagugcaucacccccaacggcagcauccccaacgacaagcccuuccagaacgugaacagaaucaccuacggcgccugccccagauacgugaagcagaacacccugaagcuggccaccggcaugagaaacgugcccgagaagcagaccagaggcaucuucggcgccaucgccggcuucaucgagaacggcugggagggcaugguggacggcugguacggcuucagacaccagaacagcgagggcaucggccaggccgccgaccugaagagcacccaggccgccaucgaccagaucaacggcaagcugaacagacugaucggcaagaccaacgagaaguuccaccagaucgagaaggaguucagcgagguggagggcagaauccaggaccuggagaaguacguggaggacaccaagaucgaccuguggagcuacaacgccgagcugcugguggcccuggagaaccagcacaccaucgaccugaccgacagcgagaugaacaagcuguucgagaagaccaagaagcagcugagagagaacgccgaggacaugggcaacggcugcuucaagaucuaccacaagugcgacaacgccugcaucggcagcaucagaaacggcaccuacgaccacgacguguacagagacgaggcccugaacaacagauuccagaucaagggcguggagcugaagagcggcuacaaggacuggauccuguggaucagcuucgccaucagcugcuuccugcugugcaucgcccugcugggcuucaucaugugggccugccagaagggcaacaucagaugcaacaucugcaucuga

SEQ ID NO: 162598 - RNA, 1701 nt, Artificial Sequence; identical to SEQ ID NO: 162597
  derived and/or modified CDS sequence (opt4) from hemagglutinin__InfluenzaA__ACN32892

SEQ ID NO: 162599 - RNA, 1701 nt, Artificial Sequence; identical to SEQ ID NO: 162494
  derived and/or modified CDS sequence (opt4) from hemagglutinin__InfluenzaA__ACN32903

SEQ ID NO: 162600 - RNA, 1701 nt, Artificial Sequence
  derived and/or modified CDS sequence (opt4) from hemagglutinin__InfluenzaA__ACN32914
augaagaccaucaucgcccugagcuacauccugugccuggccuucgcccagaagcugcccggcaacgacaacagcaccgccacccugugccugggccaccacgccgugcccaacggcaccaucgugaagaccaucaccaacgaccagaucgaggugaccaacgccaccgagcuggugcagagcagcagcaccggcgagaucugcgacagcccccaccagauccuggacggcgagaacugcacccugaucgacgcccugcugggcgacccccagugcgacggcuuccagaacaagaagugggaccuguucguggagagaagcaaggccuacagcaacugcuaccccuacgacgugcccgacuacgccagccugagaagccugguggccagcagcggcacccuggaguucaacaacgagagcuucaacuggaccggcgugacccagaacggcaccagcagcgccugcaucagaagaagcaacaacagcuucuucagcagacugaacuggcugacccaccugaaguucaaguaccccgcccugaacgugaccaugcccaacaacgagcaguucgacaagcuguacaucuggggcgugcaccaccccggcaccgacaacgaccagaucuuccuguacgcccaggccagcggcagaaucaccgugagcaccaagagaagccagcagaccgugauccccaacaucggcagcagacccagagugagaaacauccccagcagaaucagcaucuacuggaccaucgugaagcccggcgacauccugcugaucaacagcaccggcaaccugaucgcccccagaggcuacuucaagaucagaagcggcaagagcagcaucaugagaagcgacgcccccaucggcaagugcaacagcgagugcaucacccccaacggcagcauccccaacgacaagcccuuccagaacgugaacagaaucaccuacggcgccugccccagauacgugaagcagaacacccugaagcuggccaccggcaugagaaacgugcccgagaagcagaccagaggcaucuucggcgccaucgccggcuucaucgagaacggcugggagggcaugguggacggcugguacggcuucagacaccagaacagcgagggcagaggccaggccgccgaccugaagagcacccaggccgccaucgaccagaucaacggcaagcugaacagacugaucggcaagaccaacgagaaguuccaccagaucgagaaggaguucagcgagguggagggcagaauccaggaccuggagaaguacguggaggacaccaagaucgaccuguggagcuacaacgccgagcugcugguggcccuggagaaccagcacaccaucgaccugaccgacagcgagaugaacaagcuguucgagaagaccaagaagcagcugagagagaacgccgaggacaugggcaacggcugcuucaagaucuaccacaagugcgacaacgccugcaucggcagcaucagaaacggcaccuacgaccacgacguguacagagacgaggcccugaacaacagauuccagaucaagggcguggagcugaagagcggcuacaaggacuggauccuguggaucagcuucgccaucagcugcuuccugcugugcguggcccugcugggcuucaucaugugggccugccagaagggcaacaucagaugcaacaucugcaucuga

SEQ ID NO: 162601 - RNA, 1701 nt, Artificial Sequence; identical to SEQ ID NO: 162494
  derived and/or modified CDS sequence (opt4) from hemagglutinin__InfluenzaA__ACN32925

SEQ ID NO: 162602 - RNA, 1701 nt, Artificial Sequence
  derived and/or modified CDS sequence (opt4) from hemagglutinin__InfluenzaA__ACN32936
augaagaccaucaucgcccugagcuacauccugugccugguguucgcccagaaguuccccggcaacgacaacagcaccgccacccugugccugggccaccacgccgugcccaacggcaccaucgugaagaccaucaccaacgaccagaucgaggugaccaacgccaccgagcuggugcagagcagcagcaccggcgagaucugcgacagcccccaccagauccuggacggcgagaacugcacccugaucgacgcccugcugggcgacccccagugcgacggcuuccagaacaagaacugggaccuguucguggagagaagcaaggccuacagcaacugcuaccccuacgacgugcccgacuacgccagccugagaagccugguggccagcagcggcacccuggaguucaacaacgagagcuucaacuggaccggcgugacccagaacggcaccagcagcgccugcaucagaagaagcaacaacagcuucuucagcagacugaacuggcugacccacagcaaguucaaguaccccgcccugaacgugaccaugcccaacaacgagaacuucgacaagcuguacaucuggggcgugcaccaccccggcaccgacaacgaccagaucuuccuguacgcccaggccagcggcagaaucaccgugagcaccaagagaagccagcagaccgugauccccaacaucggcagcagacccagaaucaagaacauccccagcagaaucagcaucuacuggaccaucgugaagcccggcgacauccugcugaucaacagcaccggcaaccugaucgcccccagaggcuacuucaagaucagaagcggcaagagcagcaucaugagaagcgacgcccccaucggcaagugcaacagcgagugcaucacccccaacggcagcauccccaacgacaagcccuuccagaacgugaacagaaucaccuacggcgccugccccagauacgugaagcagaacacccugaagcuggccaccggcaugagaaacgugcccgagaagcagaccagaggcaucuucggcgccaucgccggcuucaucgagaacggcugggagggcaugguggacggcugguacggcuucagacaccagaacagcgagggcaucggccaggccgccgaccugaagagcacccaggccgccaucgaccagaucaacggcaagcugaacagacugaucggcaagaccaacgagaaguuccaccagaucgagaaggaguucagcgagguggagggcagaauccaggaccuggagaaguacguggaggacaccaagaucgaccuguggagcuacaacgccgagcugcugguggcccuggagaaccagcacaccaucgaccugaccgacagcgagaugaacaagcuguucgagaagaccaagaagcagcugagagagaacgccgaggacaugggcaacggcugcuucaagaucuaccacaagugcgacaacgccugcaucggcagcaucagaaacggcaccuacgaccacgacguguacagagacgaggcccugaacaacagauuccagaucaagggcguggagcugaagagcggcuacaaggacuggauccuguggaucagcuucgccaucagcugcuuccugcugugcaucgcccugcugggcuucaucaugugggccugccagaagggcaacaucagaugcaacaucugcaucuga

SEQ ID NO: 162603 - RNA, 1701 nt, Artificial Sequence; identical to SEQ ID NO: 162494
  derived and/or modified CDS sequence (opt4) from hemagglutinin__InfluenzaA__ACN32947

SEQ ID NO: 162604 - RNA, 1701 nt, Artificial Sequence
  derived and/or modified CDS sequence (opt4) from hemagglutinin__InfluenzaA__ACN32958
augaagaccaucaucgcccugagcuacauccugugccugguguucgcccagaagcugcccggcaacgacaacagcaccgccacccugugccugggccaccacgccgugcccaacggcaccaucgugaagaccaucaccaacgaccagaucgaggugaccaacgccaccgagcuggugcagagcagcagcaccggcgagaucugcgacagcccccaccagauccuggacggcgagaacugcacccugaucgacgcccugcugggcgacccccagugcgacggcuuccagaacaagaagugggaccuguucguggagagaaacaaggccuacagcaacugcuaccccuacgacgugcccgacuacgccagccugagaagccugguggccagcagcggcacccuggaguucaacaacgagagcuucaacuggaccggcgugacccagaacggcaccagcagcgccugcaucagaagaagcaacaacagcuucuucagcagacugaacuggcugacccaccugaaguucaaguaccccgcccugaacgugaccaugcccaacaacgagcaguucgacaagcuguacaucuggggcgugcaccaccccggcaccgacaacgaccagaucuuccuguacgcccaggccagcggcagaaucaccgugagcaccaagagaagccagcagaccgugauccccaacaucggcagcagacccagagugagaaacauccccagcagaaucagcaucuacuggaccaucgugaagcccggcgacauccugcugaucaacagcaccggcaaccugaucgcccccagaggcuacuucaagaucagaagcggcaagagcagcaucaugagaagcgacgcccccaucggcaagugcaacagcgagugcaucacccccaacggcagcauccccaacgacaagcccuuccagaacgugaacagaaucaccuacggcgccugccccagauacgugaagcagaacacccugaagcuggccaccggcaugagaaacgugcccgagaagcagaccagaggcaucuucggcgccaucgccggcuucaucgagaacggcugggagggcaugguggacggcugguacggcuucagacaccagaacagcgagggcagaggccaggccgccgaccugaagagcacccaggccgccaucgaccagaucaacggcaagcugaacagacugaucggcaagaccaacgagaaguuccaccagaucgagaaggaguucagcgagguggagggcagaauccaggaccuggagaaguacguggaggacaccaagaucgaccuguggagcuacaacgccgagcugcugguggcccuggagaaccagcacaccaucgaccugaccgacagcgagaugaacaagcuguucgagaagaccaagaagcagcugagagagaacgccgaggacaugggcaacggcugcuucaagaucuaccacaagugcgacaacgccugcaucggcagcaucagaaacggcaccuacgaccacgacguguacagagacgaggcccugaacaacagauuccagaucaagggcguggagcugaagagcggcuacaaggacuggauccuguggaucagcuucgccaucagcugcuuccugcugugcguggcccugcugggcuucaucaugugggccugccagaagggcaacaucagaugcaacaucugcaucuga

SEQ ID NO: 162605 - RNA, 1701 nt, Artificial Sequence
  derived and/or modified CDS sequence (opt4) from hemagglutinin__InfluenzaA__ACN32969
augaagaccaucaucgcccugagcuacauccugugccuggugagcgcccagaagcugcccggcaacgacaacagcaccgccacccugugccugggccaccacgccgugcccaacggcaccaucgugaagaccaucaccaacgaccagaucgaggugaccaacgccaccgagcuggugcagagcagcagcaccggcgagaucugcgacagcccccaccaggugcuggacggcgagaacugcacccugaucgacgcccugcugggcgacccccagugcgacggcuuccagaacaagaagugggaccuguucguggagagaagcaaggccuacagcaacugcuaccccuacgacgugcccgacuacgccagccugagaagccugguggccagcagcggcacccuggaguucaacaacgagagcuucaacuggaccggcgugacccagaacggcaccagcagcgccugcaucagaagaagcaacaacagcuucuucagcagacugaacuggcugacccacagcaaguucaaguaccccgcccugaacgugaccaugcccaacaacgaggaguucgacaagcuguacaucuggggcgugcaccaccccggcaccgacaacgaccagaucuuccuguacgcccaggccagcggcagaaucaccgugagcaccaagagaagccagcagaccgugauccccaacaucggcagcagacccagagugagaaacauccccagcagaaucagcaucuacuggaccaucgugaagcccggcgacauccugcugaucaacagcaccggcaaccugaucgcccccagaggcuacuucaagcugagaagcggcaagagcagcaucaugagaagcgacgcccccaucggcaagugcaacagcgagugcaucacccccaacggcagcauccccaacgacaagcccuuccagaacgugaacagaaucaccuacggcgccugccccagauacgugaagcagaacacccugaagcuggccaccggcaugagaaacgugcccgagaagcagaccagaggcaucuucggcgccaucgccggcuucaucgagaacggcugggagggcaugguggacggcugguacggcuucagacaccagaacagcgagggcaucggccaggccgccgaccugaagagcacccaggccgccaucgaccagaucaacggcaagcugaacagacugaucggcaagaccaacgagaaguuccaccagaucgagaaggaguucagcgagguggagggcagaauccaggaccuggagaaguacguggaggacaccaagaucgaccuguggagcuacaacgccgagcugcugguggcccuggagaaccagcacaccaucgaccugaccgacagcgagaugaacaagcuguucgagaagaccaagaagcagcugagagagaacgccgaggacaugggcaacggcugcuucaagaucuaccacaagugcgacaacgccugcaucggcagcaucagaaacggcaccuacgaccacgagguguacagagacgaggcccugaacaacagauuccagaucaagggcguggagcugaagagcggcuacaaggacuggauccuguggaucagcuucgccaucagcugcuuccugcugugcguggcccugcugggcuucaucaugugggccugccagaagggcaacaucagaugcaacaucugcaucuga

SEQ ID NO: 162606 - RNA, 1701 nt, Artificial Sequence
  derived and/or modified CDS sequence (opt4) from hemagglutinin__InfluenzaA__ACN32980
augaagaccaucaucgcccugagcuacauccugugccugguguucgcccagaagcugcccggcaacgacaacagcaccgccacccugugccugggccaccacgccgugcccaacggcaccaucgugaagaccaucaccaacgaccagaucgaggugaccaacgccaccgagcuggugcagagcagcagcaccggcgagaucugcgacagcccccaccagauccuggacggcgagaacugcacccugaucgacgcccugcugggcgacccccagugcgacggcuuccagaacaagaagugggaccuguucguggagagaagcaaggcccacagcaacugcuaccccuacgacgugcccgacuacgccagccugagaagccugguggccagcagcggcacccuggaguucaacaacgagagcuucaacuggaccggcgugacccagaacggcaccagcagcgccugcaucagaagaagcaagaacagcuucuucagcagacugaacuggcugacccaccugaaguucaaguaccccgcccugaacgugaccaugcccaacgacgagaaguucgacaagcuguacaucuggggcgugcaccaccccggcaccgacaacgaccagaucuuccuguacgcccaggccagcggcagaaucaccgugagcaccaagagaagccagcagaccgugauccccaacaucggcagcagacccagagugagaaacauccccagcagaaucagcaucuacuggaccaucgugaagcccggcgacauccugcugaucaacagcaccggcaaccugaucgcccccagaggcuacuucaagaucagaagcggcaagagcagcaucaugagaagcgacgcccccaucggcaagugcaacagcgagugcaucacccccaacggcagcauccccaacgacaagcccuuccagaacgugaacagaaucaccuacggcgccugccccagauacgugaagcagaacacccugaagcuggccaccggcaugagaaacgugcccgagaagcagaccagaggcaucuucggcgccaucgccggcuucaucgagaacggcugggagggcaugguggacggcugguacggcuucagacaccagaacagcgagggcaucggccaggccgccgaccugaagagcacccaggccgccaucgaccagaucaacggcaagcugaacagacugaucggcaagaccaacgagaaguuccaccagaucgagaaggaguucagcgagguggagggcagaauccaggaccuggagaaguacguggaggacaccaagaucgaccuguggagcuacaacgccgagcugcugguggcccuggagaaccagcacaccaucgaccugaccgacagcgagaugaacaagcuguucgagaagaccaagaagcagcugagagagaacgccgaggacaugggcaacggcugcuucaagaucuaccacaagugcgacaacgccugcgugggcagcaucagaaacggcaccuacgaccacgacguguacagagacgaggcccugaacaacagauuccagaucaagggcguggagcugaagagcggcuacaaggacuggauccuguggaucagcuucgccaucagcugcuuccugcugugcguggcccugcugggcuucaucaugugggccugccagaagggcaacaucagaugcaacaucugcaucuga

SEQ ID NO: 162607 - RNA, 1701 nt, Artificial Sequence; identical to SEQ ID NO: 162494
  derived and/or modified CDS sequence (opt4) from hemagglutinin__InfluenzaA__ACN32991

SEQ ID NO: 162608 - RNA, 1701 nt, Artificial Sequence; identical to SEQ ID NO: 162494
  derived and/or modified CDS sequence (opt4) from hemagglutinin__InfluenzaA__ACN33002

SEQ ID NO: 162609 - RNA, 1701 nt, Artificial Sequence; identical to SEQ ID NO: 162494
  derived and/or modified CDS sequence (opt4) from hemagglutinin__InfluenzaA__ACN33013

SEQ ID NO: 162610 - RNA, 1701 nt, Artificial Sequence
  derived and/or modified CDS sequence (opt4) from hemagglutinin__InfluenzaA__ACN33035
augaagaccaucaucgcccugagcuacauccugugccugguguucgcccagaagcugcccggcaacgacaacagcaccgccacccugugccugggccaccacgccgugcccaacggcaccaucgugaagaccaucaccaacgaccagaucgaggugaccaacgccaccgagcuggugcagagcagcagcaccggcgagaucugcgacagcccccaccagauccuggacggcgagaacugcacccugaucgacgcccugcugggcgacccccagugcgacggcuuccagaacaagaagugggaccuguucguggagagaagcaaggccuacagcaacugcuaccccuacgacgugcccgacuacgccagccugagaagccugguggccagcagcggcacccuggaguucaacaacgagagcuucaacuggaccggcgugacccagaacggcaccagcagcgccugcaucagaagaagcaacaacagcuucuucagcagacugaacuggcugacccaccugaaguucaaguaccccgcccugaacgugaccaugcccaacaacgagcaguucgacaagcuguacguguggggcgugcaccaccccggcaccgacaacgaccagaucuuccuguacgcccaggccagcggcagaaucaccgugagcaccaagagaagccagcagaccgugauccccaacaucggcagcagacccagagugagaaacauccccagcagaaucagcaucuacuggaccaucgugaagcccggcgacauccugcugaucaacagcaccggcaaccugaucgcccccagaggcuacuucaagaucagaagcggcaagagcagcaucaugagaagcgacgcccccaucggcaagugcaacagcgagugcaucacccccaacggcagcauccccaacgacaagcccuuccagaacgugaacagaaucaccuacggcgccugccccagauacgugaagcagaacacccugaagcuggccaccggcaugagaaacgugcccgagaagcagaccagaggcaucuucggcgccaucgccggcuucaucgagaacggcugggagggcaugguggacggcugguacggcuucagacaccagaacagcgagggcagaggccaggccgccgaccugaagagcacccaggccgccaucgaccagaucaacggcaagcugaacagacugaucggcaagaccaacgagaaguuccaccagaucgagaaggaguucagcgagguggagggcagaauccaggaccuggagaaguacguggaggacaccaagaucgaccuguggagcuacaacgccgagcugcugguggcccuggagaaccagcacaccaucgaccugaccgacagcgagaugaacaagcuguucgagaagaccaagaagcagcugagagagaacgccgaggacaugggcaacggcugcuucaagaucuaccacaagugcgacaacgccugcaucggcagcaucagaaacggcaccuacgaccacgacguguacagagacgaggcccugaacaacagauuccagaucaagggcguggagcugaagagcggcuacaaggacuggauccuguggaucagcuucgccaucagcugcuuccugcugugcguggcccugcugggcuucaucaugugggccugccagaagggcaacaucagaugcaacaucugcaucuga

SEQ ID NO: 162611 - RNA, 1701 nt, Artificial Sequence; identical to SEQ ID NO: 162494
  derived and/or modified CDS sequence (opt4) from hemagglutinin__InfluenzaA__ACN33046

SEQ ID NO: 162612 - RNA, 1701 nt, Artificial Sequence; identical to SEQ ID NO: 162494
  derived and/or modified CDS sequence (opt4) from hemagglutinin__InfluenzaA__ACN33057

SEQ ID NO: 162613 - RNA, 1701 nt, Artificial Sequence; identical to SEQ ID NO: 162494
  derived and/or modified CDS sequence (opt4) from hemagglutinin__InfluenzaA__ACN33068

SEQ ID NO: 162614 - RNA, 1701 nt, Artificial Sequence; identical to SEQ ID NO: 162597
  derived and/or modified CDS sequence (opt4) from hemagglutinin__InfluenzaA__ACN33079

SEQ ID NO: 162615 - RNA, 1698 nt, Artificial Sequence
  derived and/or modified CDS sequence (opt4) from hemagglutinin__InfluenzaA__ACN33090
augaaggugaagcugcugauccugcugugcaccuucaccgccaccuacgccgacaccaucugcaucggcuaccacgccaacaacagcaccgacaccguggacaccgugcuggagaagaacgugaccgugacccacagcgugaaccugcuggaggacagccacaacggcaagcugugccugcugaagggcaucgccccccugcagcugggcaacugcagcguggccggcuggauccugggcaaccccgagugcgagcugcugaucagcaaggagagcuggagcuacaucguggagacccccaaccccgagaacggcaccugcuaccccggcuacuucgccgacuacgaggagcugagagagcagcugagcagcgugagcagcuucgagagauucgagaucuuccccaaggagagcagcuggcccaaccacaccgugaccggcgugagcgccagcugcagccacaacggcaagagcagcuucuacagaaaccugcuguggcugaccggcaagaacggccuguaccccaaccugagcaagagcuacgccaacaacaaggagaaggaggugcuggugcuguggggcgugcaccaccccagcaacaucggcgaccagagagcccuguaccacaccgagaacgccuacgugagcguggugagcagccacuacagcagaagauucacccccgagaucgccaagagacccaaggugagagaccaggagggcagaaucaacuacuacuggacccugcuggagcccggcgacaccaucaucuucgaggccaacggcaaccugaucgcccccagauucgccuucgcccugagcagaggcuucggcagcggcaucaucaccagcaacgcccccauggacgagugcgacgccaagugccagaccccccagggcgccaucaacagcagccugcccuuccagaacgugcaccccgugaccaucggcgagugccccaaguacgugagaagcaccaagcugagaauggugaccggccugagaaacauccccagcauccagagcagaggccuguucggcgccaucgccggcuucaucgagggcggcuggaccggcaugguggacggcugguacggcuaccaccaccagaacgagcagggcagcggcuacgccgccgaccagaagagcacccagaacgccaucaacggcaucaccaacaaggugaacagcgugaucgagaagaugaacacccaguucaccgccgugggcaaggaguucaacaagcuggagagaagaauggagaaccugaacaagaagguggacgacggcuuccuggacaucuggaccuacaacgccgagcugcuggugcugcuggagaacgagagaacccuggacuuccacgacagcaacgugaagaaccuguacgagaaggugaagagccagcugaagaacaacgccaaggagaucggcaacggcugcuucgaguucuaccacaagugcaacgacgagugcauggagagcgugaagaacggcaccuacgacuaccccaaguacagcgaggagagcaagcugaacagagagaagaucgacggcgugaagcuggagagcaugggcguguaccagauccuggccaucuacagcaccguggccagcagccuggugcugcuggugagccugggcgccaucagcuucuggaugugcagcaacggcagccugcagugcagaaucugcaucuga

SEQ ID NO: 162616 - RNA, 1698 nt, Artificial Sequence; identical to SEQ ID NO: 161974
  derived and/or modified CDS sequence (opt4) from hemagglutinin__InfluenzaA__ACN33101

SEQ ID NO: 162617 - RNA, 1701 nt, Artificial Sequence; identical to SEQ ID NO: 162597
  derived and/or modified CDS sequence (opt4) from hemagglutinin__InfluenzaA__ACN33112

SEQ ID NO: 162618 - RNA, 1698 nt, Artificial Sequence; identical to SEQ ID NO: 162548
  derived and/or modified CDS sequence (opt4) from hemagglutinin__InfluenzaA__ACN33123

SEQ ID NO: 162619 - RNA, 1698 nt, Artificial Sequence; identical to SEQ ID NO: 162548
  derived and/or modified CDS sequence (opt4) from hemagglutinin__InfluenzaA__ACN33145

SEQ ID NO: 162620 - RNA, 1701 nt, Artificial Sequence; identical to SEQ ID NO: 162494
  derived and/or modified CDS sequence (opt4) from hemagglutinin__InfluenzaA__ACN33156

SEQ ID NO: 162621 - RNA, 1701 nt, Artificial Sequence
  derived and/or modified CDS sequence (opt4) from hemagglutinin__InfluenzaA__ACN33178
augaagaccaucaucgcccugagcuacauccugugccugguguucgcccagaaguuccccggcaacgacaacagcaccgccacccugugccugggccaccacgccgugcccaacggcaccaucgugaagaccaucaccaacgaccagaucgaggugaccaacgccaccgagcuggugcagagcagcagcaccggcgagaucugcgacagcccccaccagauccuggacggcgagaacugcacccugaucgacgcccugcugggcgacccccagugcgacggcuuccagaacaagaacugggaccuguucguggagagaagcaaggccuacagcaacugcuaccccuacgacgugcccgacuacgccagccugagaagccugguggccagcagcggcacccuggaguucaacaacgagagcuucaacuggaccggcgugacccagaacggcaccagcagcgccugcaucagaagaagcaacaacagcuucuucagcagacugaacuggcugacccacagcaaguucaaguaccccgcccugaacgugaccaugcccaacaacgagaacuucgacaagcuguacaucuggggcgugcaccaccccggcaccgacaacgaccagaucuuccuguacgcccaggccagcggcagaaucaccgugagcaccaagagaagccagcagaccgugauccccaacaucggcagcagacccagagugagaaacauccccagcagaaucagcaucuacuggaccaucgugaagcccggcgacauccugcugaucaacagcaccggcaaccugaucgcccccagaggcuacuucaagaucagaagcggcaagagcagcaucaugagaagcgacgcccccaucggcaagugcaacagcgagugcaucacccccaacggcagcauccccaacgacaagcccuuccagaacgugaacagaaucaccuacggcgccugccccagauacgugaagcagaacacccugaagcuggccaccggcaugagaaacgugcccgagaagcagaccagaggcaucuucggcgccaucgccggcuucaucgagaacggcugggagggcaugguggacggcugguacggcuucagacaccagaacagcgagggcaucggccaggccgccgaccugaagagcacccaggccgccaucgaccagaucaacggcaagcugaacagacugaucggcaagaccaacgagaaguuccaccagaucgagaaggaguucagcgagguggagggcagaauccaggaccuggagaaguacguggaggacaccaagaucgaccuguggagcuacaacgccgagcugcugguggcccuggagaaccagcacaccaucgaccugaccgacagcgagaugaacaagcuguucgagaagaccaagaagcagcugagagagaacgccgaggacaugggcaacggcugcuucaagaucuaccacaagugcgacaacgccugcaucggcagcaucagaaacggcaccuacgaccacgacguguacagagacgaggcccugaacaacagauuccacaucaagggcguggagcugaagagcggcuacaaggacuggauccuguggaucagcuucgccaucagcugcuuccugcugugcaucgcccugcugggcuucaucaugugggccugccagaagggcaacaucagaugcaacaucugcaucuga

SEQ ID NO: 162622 - RNA, 1701 nt, Artificial Sequence; identical to SEQ ID NO: 162494
  derived and/or modified CDS sequence (opt4) from hemagglutinin__InfluenzaA__ACN33189

SEQ ID NO: 162623 - RNA, 1701 nt, Artificial Sequence
  derived and/or modified CDS sequence (opt4) from hemagglutinin__InfluenzaA__ACN33200
augaagaccaucaucgcccugagcuacauccugugccugguguucgcccagaaguuccccggcaacgacaacagcaccgccacccugugccugggccaccacgccgugcccaacggcaccaucgugaagaccaucaccaacgaccagaucgaggugaccaacgccaccgagcuggugcagagcagcagcaccggcgagaucugcgacagcccccaccagauccuggacggcgagaacugcacccugaucgacgcccugcugggcgacccccagugcgacggcuuccagaacaagaacugggaccuguucguggagagaagcaaggccuacagcaacugcuaccccuacgacgugcccgacuacgccagccugagaagccugguggccagcagcggcacccuggaguucaacaacgagagcuucaacuggaccggcgugacccagaacggcaccagcagcgccugcaucagaagaagcaacaacagcuucuucagcagacugaacuggcugacccacagcaaguucaaguaccccgcccugaacgugaccaugcccaacaacgagaacuucgacaagcuguacaucuggggcgugcaccaccccggcaccgacaacgaccagaucuuccuguacgcccaggccagcggcagaaucaccgugagcaccaagagaagccagcagaccgugauccccaacaucggcagcagacccagagugagaaacauccccagcagaaucagcaucuacuggaccaucguggagcccggcgacauccugcugaucaacagcaccggcaaccugaucgcccccagaggcuacuucaagaucagaagcggcaagagcagcaucaugagaagcgacgcccccaucggcaagugcaacagcgagugcaucacccccaacggcagcauccccaacgacaagcccuuccagaacgugaacagaaucaccuacggcgccugccccagauacgugaagcagaacacccugaagcuggccaccggcaugagaaacgugcccgagaagcagaccagaggcaucuucggcgccaucgccggcuucaucgagaacggcugggagggcaugguggacggcugguacggcuucagacaccagaacagcgagggcaucggccaggccgccgaccugaagagcacccaggccgccaucgaccagaucaacggcaagcugaacagacugaucggcaagaccaacgagaaguuccaccagaucgagaaggaguucagcgagguggagggcagaauccaggaccuggagaaguacguggaggacaccaagaucgaccuguggagcuacaacgccgagcugcugguggcccuggagaaccagcacaccaucgaccugaccgacagcgagaugaacaagcuguucgagaagaccaagaagcagcugagagagaacgccgaggacaugggcaacggcugcuucaagaucuaccacaagugcgacaacgccugcaucggcagcaucagaaacggcaccuacgaccacgacguguacagagacgaggcccugaacaacagauuccagaucaagggcguggagcugaagagcggcuacaaggacuggauccuguggaucagcuucgccaucagcugcuuccugcugugcaucgcccugcugggcuucaucaugugggccugccagaagggcaacaucagaugcaacaucugcaucuga

SEQ ID NO: 162624 - RNA, 1701 nt, Artificial Sequence
  derived and/or modified CDS sequence (opt4) from hemagglutinin__InfluenzaA__ACN33211
augaagaccaucaucgcccugagcuacauccugugccugguguucgcccagaagcugcccggcaacgacaacagcaccgccacccugugccugggccaccacgccgugcccaacggcaccaucgugaagaccaucaccaacgaccagaucgaggugaccaacgccaccgagcuggugcagagcagcagcaccggcgagaucugcgacagcccccaccagauccuggacggcgagaacugcacccugaucgacgcccugcugggcgacccccagugcgacggcuuccagaacaagaagugggaccuguucguggagagaagcaaggccuacagcaacugcuaccccuacgacgugcccgacuacgccagccugagaagccugguggccagcagcggcacccuggaguucaacaacgagagcuucaacuggaccggcgugacccagaacggcaccagcagcgccugcaucagaagaagcaacaacagcuucuucagcagacugaacuggcugacccaccugaaguucaaguaccccgcccugaacgugaccaugcccaacaacgagcaguucgacaagcuguacaucuggggcgugcaccaccccggcaccgacaacgaccagaucuuccuguacgcccaggccagcggcagaaucaccgugagcaccaagagaagccagcagaccgugauccccaacaucggcagcagacccagagugagaaacauccccagcagaaucagcaucuacuggaccaucgugaagcccggcgacauccugcugaucaacagcaccggcaaccugaucgcccccagaggcuacuucaagaucagaagcggcaagagcagcaucaugagaagcgacgcccccaucggcaagugcaacagcgagugcaucacccccaacggcagcauccccaacgacaagcccuuccagaacgugaacagaaucaccuacggcgccugccccagauacgugaagcagaacacccugaagcuggccaccggcaugagaaacgugcccgagaagcagaccagaggcaucuucggcgccaucgccggcuucaucgagaacggcugggagggcaugguggacggcugguacggcuucagacaccagaacagcgagggcagaggccaggccgccgaccugaagagcacccaggccgccaucgaccagaucaacggcaagcugaacagacugaucggcaagaccaacgagaaguuccaccagaucgagaaggaguucagcgagguggagggcagaauccaggaccuggagaaguacguggaggacaccaagaucgaccuguggagcuacaacgccgagcugcugguggcccuggagaaccagcacaccaucgaccugaccgacagcgagaugaacaagcuguucgagaagaccaagaagcagcugagagagaacgccgaggacaugggcaacggcugcuucaagaucuaccacaagugcgacaacgccugcaucggcagcaucagaaacggcaccuacgaccacgacguguacagagacgaggcccugagcaacagauuccagaucaagggcguggagcugaagagcggcuacaaggacuggauccuguggaucagcuucgccaucagcugcuuccugcugugcguggcccugcugggcuucaucaugugggccugccagaagggcaacaucagaugcaacaucugcaucuga

SEQ ID NO: 162625 - RNA, 1698 nt, Artificial Sequence; identical to SEQ ID NO: 162016
  derived and/or modified CDS sequence (opt4) from hemagglutinin__InfluenzaA__ACN42981

SEQ ID NO: 162626 - RNA, 1698 nt, Artificial Sequence; identical to SEQ ID NO: 162250
  derived and/or modified CDS sequence (opt4) from hemagglutinin__InfluenzaA__ACN42992

SEQ ID NO: 162627 - RNA, 1701 nt, Artificial Sequence; identical to SEQ ID NO: 162494
  derived and/or modified CDS sequence (opt4) from hemagglutinin__InfluenzaA__ACN43003

SEQ ID NO: 162628 - RNA, 1701 nt, Artificial Sequence
  derived and/or modified CDS sequence (opt4) from hemagglutinin__InfluenzaA__ACN43014
augaagaccaucaucgcccugagcuacauccugugccugguguucgcccagaaguuccccggcaacgacaacagcaccgccacccugugccugggccaccacgccgugcccaacggcaccaucgugaagaccaucaccaacgaccagaucgaggugaccaacgccaccgagcuggugcagagcagcagcaccggcgagaucugcgacagcccccaccagauccuggacggcgagaacugcacccugaucgacgcccugcugggcgacccccagugcgacggcuuccagaacaagaacugggaccuguucguggagagaagcaaggccuacagcaacugcuaccccuacgacgugcccgacuacgccagccugagaagccugguggccagcagcggcacccuggaguucaacaacgagagcuucaacuggaucggcgugacccagaacggcaccagcagcgccugcaucagaagaagcaacaacagcuucuucagcagacugaacuggcugacccacagcaaguucaaguaccccgcccugaacgugaccaugcccaacaacgagaacuucgacaagcuguacaucuggggcgugcaccaccccggcaccgacaacgaccagaucuuccuguacgcccaggccagcggcagaaucaccgugagcaccaagagaagccagcagaccgugauccccaacaucggcagcagacccagagugagaaacauccccagcagaaucagcaucuacuggaccaucgugaagcccggcgacauccugcugaucaacagcaccggcaaccugaucgcccccagaggcuacuucaagaucagaagcggcaagagcagcaucaugagaagcgacgcccccaucggcaacugcaacagcgagugcaucacccccaacggcagcauccccaacgacaagcccuuccagaacgugaacagaaucaccuacggcagcugccccagauacgugaagcagaacacccugaagcuggccaccggcaugagaaacgugcccgagaagcagaccagaggcaucuucggcgccaucgccggcuucaucgagaacggcugggagggcaugguggacggcugguacggcuucagacaccagaacagcgagggcaucggccaggccgccgaccugaagagcacccaggccgccaucgaccagaucaacggcaagcugaacagacugaucggcaagaccaacgagaaguuccaccagaucgagaaggaguucagcgagguggagggcagaauccaggaccuggagaaguacguggaggacaccaagaucgaccuguggagcuacaacgccgagcugcugguggcccuggagaaccagcacaccaucgaccugaccgacagcgagaugaacaagcuguucgagaagaccaagaagcagcugagagagaacgccgaggacaugggcaacggcugcuucaagaucuaccacaagugcgacaacgccugcaucggcagcaucagaaacggcaccuacgaccacgacguguacagagacgaggcccugaacaacagauuccagaucaagggcguggagcugaagagcggcuacaaggacuggauccuguggaucagcuucgccaucagcugcuuccugcugugcaucgcccugcugggcuucaucaugugggccugccagaagggcaacaucagaugcaacaucugcaucuga

SEQ ID NO: 162629 - RNA, 1701 nt, Artificial Sequence; identical to SEQ ID NO: 162494
  derived and/or modified CDS sequence (opt4) from hemagglutinin__InfluenzaA__ACN43025

SEQ ID NO: 162630 - RNA, 1701 nt, Artificial Sequence; identical to SEQ ID NO: 162494
  derived and/or modified CDS sequence (opt4) from hemagglutinin__InfluenzaA__ACN43036

SEQ ID NO: 162631 - RNA, 1701 nt, Artificial Sequence; identical to SEQ ID NO: 162494
  derived and/or modified CDS sequence (opt4) from hemagglutinin__InfluenzaA__ACN43047

SEQ ID NO: 162632 - RNA, 1701 nt, Artificial Sequence
  derived and/or modified CDS sequence (opt4) from hemagglutinin__InfluenzaA__ACN43058
augaagaccaucaucgcccugagcuacauccugugccugguguucgcccagaagcugcccggcaacgacaacagcaccgccacccugugccugggccaccacgccgugcccaacggcaccaucgugaagaccaucaccaacgaccagaucgaggugaccaacgccaccgagcuggugcagagcagcagcaccggcgagaucugcggcagcccccaccagauccuggacggcgagaacugcacccugaucgacgcccugcugggcgacccccagugcgacggcuuccagaacaagaagugggaccuguucguggagagaagcaaggccuacagcaacugcuaccccuacgacgugcccgacuacgccagccugagaagccugguggccagcagcggcacccuggaguucaacaacgagagcuucaacuggaccggcgugacccagaacggcaccagcagcgccugcaucagaagaagcaacaacagcuucuucagcagacugaacuggcugacccaccugaaguucaaguaccccgcccugaacgugaccaugcccaacaacgagcaguucgacaagcuguacaucuggggcgugcaccaccccggcaccgacaacgaccagaucuuccuguacgcccaggccagcggcagaaucaccgugagcaccaagagaagccagcagaccgugauccccaacaucggcagcagacccagagugagaaacauccccagcagaaucagcaucuacuggaccaucgugaagcccggcgacauccugcugaucaacagcaccggcaaccugaucgcccccagaggcuacuucaagaucagaagcggcaagagcagcaucaugagaagcgacgcccccaucggcaagugcaacagcgagugcaucacccccaacggcagcauccccaacgacaagcccuuccagaacgugaacagaaucaccuacggcgccugccccagauacgugaagcagaacacccugaagcuggccaccggcaugagaaacgugcccgagaagcagaccagaggcaucuucggcgccaucgccggcuucaucgagaacggcugggagggcaugguggacggcugguacggcuucagacaccagaacagcgagggcagaggccaggccgccgaccugaagagcacccaggccgccaucgaccagaucaacggcaagcugaacagacugaucggcaagaccaacgagaaguuccaccagaucgagaaggaguucagcgagguggagggcagaauccaggaccuggagaaguacguggaggacaccaagaucgaccuguggagcuacaacgccgagcugcugguggcccuggagaaccagcacaccaucgaccugaccgacagcgagaugaacaagcuguucgagaagaccaagaagcagcugagagagaacgccgaggacaugggcaacggcugcuucaagaucuaccacaagugcgacaacgccugcaucggcagcaucagaaacggcaccuacgaccacgacguguacagagacgaggcccugaacaacagauuccagaucaagggcguggagcugaagagcggcuacaaggacuggauccuguggaucagcuucgccaucagcugcuuccugcugugcguggcccugcugggcuucaucaugugggccugccagaagggcaacaucagaugcaacaucugcaucuga

SEQ ID NO: 162633 - RNA, 1701 nt, Artificial Sequence; identical to SEQ ID NO: 162494
  derived and/or modified CDS sequence (opt4) from hemagglutinin__InfluenzaA__ACN43069

SEQ ID NO: 162634 - RNA, 1701 nt, Artificial Sequence; identical to SEQ ID NO: 162597
  derived and/or modified CDS sequence (opt4) from hemagglutinin__InfluenzaA__ACN43080

SEQ ID NO: 162635 - RNA, 1701 nt, Artificial Sequence
  derived and/or modified CDS sequence (opt4) from hemagglutinin__InfluenzaA__ACN72617
auggaggccaagcuguucgugcuguucugcgccuucaccgcccugaaggccgacaccaucugcgugggcuaccacgccaacaacagcaccgacaccguggacaccauccuggagaagaacgugaccgugacccacagcgugaaccugcuggagaacagccacaacggcaagcugugcagccugaacggcaaggccccccugcagcugggcaacugcaacguggccggcuggauccugggcaaccccgagugcgaccugcugcugaccgccaacagcuggagcuacaucaucgagaccagcgacagcaagaacggcgccugcuaccccggcgaguucgccgacuacgaggagcugagagagcagcugagcaccgugagcagcuucgagagauucgagaucuuccccaaggccaccagcuggcccaaccacgagaccaccaagggcaccaccguggccugcagccacagcggcgccaacagcuucuacagaaaccugcuguggaucgugaagaagggcaacagcuaccccaagcugagcaagagcuacaccaacaacaagggcaaggaggugcuggugaucuggggcgugcaccacccccccaccgacagcgaccagcagacccuguaccagaacaagcacaccuacgugagcgugggcagcagcaaguacuaccagagauucacccccgagaucgugaccagacccaaggugagagagcaggccggcagaaugaacuacuacuggacccugcuggaccagggcgacaccaucaccuucgaggccaccggcaaccugaucgcccccuggcacgccuucgcccugaacaagggcagcaacagcggcaucaugaugagcgacgcccacgugcacaacugcaccaccaagugccagaccccccacggcgcccugaagggcaaccugcccuuccagaacgugcaccccaucaccaucggcgagugccccaaguacgugaagagcacccagcugagaauggccaccggccugagaaacauccccagcauccagagcagaggccuguucggcgccaucgccggcuucaucgagggcggcuggaccggcaugaucgacggcugguacggcuaccaccaccagaacgagcagggcagcggcuacgccgccgacagaaagagcacccagaucgccaucgacggcaucagcaacaaggugaacagcgugaucgagaagaugaacauccaguucaccagcgugggcaaggaguucaacaaccuggagaagagaaucgagaaccugaacaagaagguggacgacggcuuccuggacguguggaccuacaacgccgagcugcugauccugcuggagaacgagagaacccuggacuuccacgacuucaacgugaagaaccuguacgagaaggugaagagccagcugagaaacaacgccaaggagaucggcaacggcugcuucgaguucuaccacaagugcgacaacgagugcauggagagcgugaagaacggcaccuacaacuaccccagauacagcgaggagagcaagcugaacagagaggagaucgacggcgugaagcuggagagcgugggcgugcaccagauccuggccaucuacagcaccguggccagcagccuggugcugcuggugagccugggcgccaucagcuucuggaugugcagcaacggcagccugcagugcagaaucugcaucuga

SEQ ID NO: 162636 - RNA, 1701 nt, Artificial Sequence
  derived and/or modified CDS sequence (opt4) from hemagglutinin__InfluenzaA__ACN72632
augaagaccgugaucgcccugagcuacguguucugccugguguucggccaggaccugcccggcaagggcaacaacaccgccacccugugccugggccaccacgccgugcccaacggcacccuggugaagaccaucaccgacgaccagaucgaggugaccaacgccaccgagcuggugcagaacuucagcaucggcaagaucugcaagaacccccacagaauccuggacggcgccaacugcacccugaucgacagccugcugggcgacccccacugcgacggcuuccagaacgagaagugggaccuguucaucgagagaagcaaggccuucagcaacugcuaccccuacgacgugcccgaguacaccagccugagaagccugaucgccagcagcggcacccuggaguucaccaacgaggacuucaacuggaccggcgugacccagaacggcggcagcagcgccugcaagagaggccccaacaacagcuucuucagcagacugaacuggcuguacaagagcggcaacaccuaccccaugcugaacgugaccaugcccaacagcgacgacuucgacaagcuguacaucuggggcgugcaccaccccagcaccgacagagagcagaccaaccuguacauccaggccagcggcaagaucaucgugagcaccaagagaagccagcagaccaucauccccaacaucggcagcagacccugggugagaggccugagcagcagaaucagcaucuacuggaccaucgugaagcccggcgacauccugaucaucaacagcaacggcaaccugaucgcccccagaggcuacuucaagauccagaccggcaagagcagcgugaugagaagcgacgcccccaucggcaccugcaacuacgagugcaucacccccaacggcagcauccccaacgacaagcccuuccagaacgugaacagaaucaccuacggcgccugcccccacuacaucaagcagaacacccugaagcuggccaccggcaugagaaacauccccgagagacagaccagaggcaucuucggcgccaucgccggcuucaucgagaacggcugggagggcauggugaacggcugguacggcuucagacaccagaacagcgagggcaucggccaggccgccgaccugaagagcacccaggccgccaucaaccagaucaacggcaagcugaacagagugaucgagaagaccaacgagaaguuccaccagaucgagaaggaguucagcgagguggagggcagaauccaggaccuggagagauacguggaggacaccaagaucgaccuguggagcuacaacgccgagcugcugguggcccuggagaaccagcacaccaucgaccugaccgacagcgagaugaacaagcuguucgagaagaccagaaagcagcugagagagaacgccgaggacaugggcaacggcugcuucaagaucuaccacaagugcgacaacagcugcauggagagcaucagaaacggcaccuacgaccacaacgaguacagagacgaggccgugaacaacagauuccagaucaagagcguggagcugaagagcggcuacaaggacuggauccuguggaucagcuucgccaucagcugcuuccugcugugcgccguguggcugggcuucaucaucugggccugccagaagggcaacaucagaugcaacaucugcaucuga

SEQ ID NO: 162637 - RNA, 1701 nt, Artificial Sequence; identical to SEQ ID NO: 162494
  derived and/or modified CDS sequence (opt4) from hemagglutinin__InfluenzaA__ACN76478

SEQ ID NO: 162638 - RNA, 1701 nt, Artificial Sequence
  derived and/or modified CDS sequence (opt4) from hemagglutinin__InfluenzaA__ACN76489
augaagaccaucaucgcccugggcuacauccugugccuggugagcgcccagaagcugcccggcaacgacaacagcaccgccacccugugccugggccaccacgccgugcccaacggcaccaucgugaagaccaucaccaacgaccagaucgaggugaccaacgccaccgagcuggugcagagcagcagcaccggcgagaucugcgacagcccccaccaggugcuggacggcgagaacugcacccugaucgacgcccugcugggcgacccccagugcgacggcuuccagaacaagaagugggaccuguucguggagagaagcaaggccuacagcaacugcuaccccuacgacgugcccgacuacgccagccugagaagccugguggccagcagcggcacccuggaguucaacaacgagagcuucaacuggaccggcgugacccagaacggcaccagcagcgccugcaucagaagaagcaacaacagcuucuucagcagacugaacuggcugacccaccugaaguucaaguaccccgcccugaacgugaccaugcccaacaacgaggaguucgacaagcuguacaucuggggcgugcaccaccccggcaccgacaacgaccagaucuuccuguacgcccaggccagcggcagaaucaccgugagcaccaagagaagccagcagaccgugauccccaacaucggcagcagacccagagugagaaacauccccagcagaaucagcaucuacuggaccaucgugaagcccggcgacauccugcugaucaacagcaccggcaaccugaucgcccccagaggcuacuucaagaucagaagcggcaagagcagcaucaugagaagcgacgcccccaucggcaagugcaacagcgagugcaucacccccaacggcagcauccccaacgacaagcccuuccagaacgugaacagaaucaccuacggcgccugccccagauacgugaagcagaacacccugaagcuggccaccggcaugagaaacgugcccgagaagcagaccagaggcaucuucggcgccaucgccggcuucaucgagaacggcugggagggcaugguggacggcugguacggcuucagacaccagaacagcgagggcaucggccaggccgccgaccugaagagcacccaggccgccaucgaccagaucaacggcaagcugaacagacugaucggcaagaccaacgagaaguuccaccagaucgagaaggaguucagcgagguggagggcagaauccaggaccuggagaaguacguggaggacaccaagaucgaccuguggagcuacaacgccgagcugcugguggcccuggagaaccagcacaccaucgaccugaccgacagcgagaugaacaagcuguucgagaagaccaagaagcagcugagagagaacgccgaggacaugggcaacggcugcuucaagaucuaccacaagugcgacaacgccugcaucggcagcaucagaaacggcaccuacgaccacgagguguacagagacgaggcccugaacaacagauuccagaucaagggcguggagcugaagagcggcuacaaggacuggauccuguggaucagcuucgccaucagcugcuuccugcugugcguggcccugcugggcuucaucaugugggccugccagaagggcaacaucagaugcaacaucugcaucuga

SEQ ID NO: 162639 - RNA, 1701 nt, Artificial Sequence; identical to SEQ ID NO: 162494
  derived and/or modified CDS sequence (opt4) from hemagglutinin__InfluenzaA__ACN76500

SEQ ID NO: 162640 - RNA, 1701 nt, Artificial Sequence; identical to SEQ ID NO: 162494
  derived and/or modified CDS sequence (opt4) from hemagglutinin__InfluenzaA__ACN76511

SEQ ID NO: 162641 - RNA, 1701 nt, Artificial Sequence; identical to SEQ ID NO: 162494
  derived and/or modified CDS sequence (opt4) from hemagglutinin__InfluenzaA__ACN76522

SEQ ID NO: 162642 - RNA, 1701 nt, Artificial Sequence; identical to SEQ ID NO: 162494
  derived and/or modified CDS sequence (opt4) from hemagglutinin__InfluenzaA__ACO36331

SEQ ID NO: 162643 - RNA, 1701 nt, Artificial Sequence
  derived and/or modified CDS sequence (opt4) from hemagglutinin__InfluenzaA__ACO36342
augaagaccaucaucgcccugagcuacauccugugccugguguucgcccagaaguuccccggcaacgacaacagcaccgccacccugugccugggccaccacgccgugcccaacggcaccaucgugaagaccaucaccaacgaccagaucgaggugaccaacgccaccgagcuggugcagagcagcagcaccggcgagaucugcgacagcccccaccagauccuggacggcgagaacugcacccugaucgacgcccugcugggcgacccccagugcgacggcuuccagaacaagaacugggaccuguucguggagagaagcaaggccuacagcaacugcuaccccuacgacgugcccgacuacgccagccugagaagccugguggccagcagcggcacccuggaguucaacaacgagagcuucaacuggaccggcgugacccagaacggcaccagcagcgccugcaucagaagaagcaacaacagcuucuucagcagacugaacuggcugacccacagcaaguucaaguaccccgcccugaacgugaccaugcccaacaacgagaacuucgacaagcuguacaucuggggcgugcaccaccccggcaccgacaacgaccagaucuuccuguacgcccaggccagcggcagaaucaccgugagcaccaagagaagccagcagaccgugauccccaacaucggcagcagacccagagugagaaacauccccagcagaaucagcaucuacuggaccaucgugaagcccggcgacauccugcugaucaacagcaccggcaaccugaucgcccccagaggcuacuucaagaucagaagcggcaagagcagcaucaugagaagcgacgcccccaucggcaagugcaacagcgagugcaucacccccaacggcagcauccccaacgacaagcccuuccagaacgugaacagaaucaccuacggcgccugccccagauacgugaagcagaacacccugaagcuggccaccggcaugagaaacgugcccgagaagcagaccagaggcaucuucggcgccaucgccggcuucaucgagaacggcugggagggcaugguggacggcugguacggcuucagacaccagaacagcgagggcaucggccaggccgccgaccugaagagcacccaggccgccaucgaccagaucaacggcaagcugaacagacugaucggcaagaccaacgagaaguuccaccagaucgagaaggaguucagcgagaucgagggcagaauccaggaccuggagaaguacguggaggacaccaagaucgaccuguggagcuacaacgccgagcugcugguggcccuggagaaccagcacaccaucgaccugaccgacagcgagaugaacaagcuguucgagaagaccaagaagcagcugagagagaacgccgaggacaugggcaacggcugcuucaagaucuaccacaagugcgacaacgccugcaucggcagcaucagaaacggcaccuacgaccacgacguguacagagacgaggcccugaacaacagauuccagaucaagggcguggagcugaagagcggcuacaaggacuggauccuguggaucagcuucgccaucagcugcuuccugcugugcaucgcccugcugggcuucaucaugugggccugccagaagggcaacaucagaugcaacaucugcaucuga

SEQ ID NO: 162644 - RNA, 1701 nt, Artificial Sequence
  derived and/or modified CDS sequence (opt4) from hemagglutinin__InfluenzaA__ACO36364
augaagaccaucaucgcccugagcuacauccugugccugguguucgcccagaagcugcccggcaacgacaacagcaccgccacccugugccugggccaccacgccgugcccaacggcaccaucgugaagaccaucaccaacgaccagaucgaggugaccaacgccaccgagcuggugcagagcagcagcaccggcgagaucugcgacagcccccaccagauccuggacggcgagaacugcacccugaucgacgcccugcugggcgacccccagugcgacggcuuccagaacaagaagugggaccuguucguggagagaagcaaggccuacagcaacugcuaccccuacgacgugcccgacuacgccagccugagaagccugguggccagcagcggcacccuggaguucaacaacgagagcuucaacuggaccggcgugacccagaacggcaccagcagcgccugcaucagaagaagcaacaacagcuucuucagcagacugaacuggcugacccaccugaaguucaaguaccccgcccugaacgugaccaugcccaacaacgagaaguucgacaagcuguacaucuggggcgugcaccaccccggcaccgacaacgaccagaucuuccuguacgcccaggccagcggcagaaucaccgugagcaccaagagaagccagcagaccgugauccccaacaucggcagcagacccagagugagaaacauccccagcagaaucagcaucuacuggaccaucgugaagcccggcgacauccugcugaucaacagcaccggcaaccugaucgcccccagaggcuacuucaagaucagaagcggcaagagcagcaucaugagaagcgacgcccccaucggcaagugcaacagcgagugcaucacccccaacggcagcauccccaacgacaagcccuuccagaacgugaacagaaucaccuacggcgccugccccagauacgugaagcagaacacccugaagcuggccaccggcaugagaaacgugcccgagaagcagaccagaggcaucuucggcgccaucgccggcuucaucgagaacggcugggagggcaugguggacggcugguacggcuucagacaccagaacagcgagggcaccggccaggccgccgaccugaagagcacccaggccgccaucgaccagaucaacggcaagcugaacagacugaucggcaagaccaacgagaaguuccaccagaucgagaaggaguucagcgagguggagggcagaauccaggaccuggagaaguacguggaggacaccaagaucgaccuguggagcuacaacgccgagcugcugguggcccuggagaaccagcacaccaucgaccugaccgacagcgagaugaacaagcuguucgagaagaccaagaagcagcugagagagaacgccgaggacaugggcaacggcugcuucaagaucuaccacaagugcgacaacgccugcaucggcagcaucagaaacggcaccuacgaccacgacguguacagagacgaggcccugaacaacagauuccagaucaagggcguggagcugaagagcggcuacaaggacuggauccuguggaucagcuucgccaucagcugcuuccugcugugcguggcccugcugggcuucaucaugugggccugccagaagggcaacaucagaugcaacaucugcaucuga

SEQ ID NO: 162645 - RNA, 1701 nt, Artificial Sequence; identical to SEQ ID NO: 162361
  derived and/or modified CDS sequence (opt4) from hemagglutinin__InfluenzaA__ACO36375

SEQ ID NO: 162646 - RNA, 1698 nt, Artificial Sequence; identical to SEQ ID NO: 162548
  derived and/or modified CDS sequence (opt4) from hemagglutinin__InfluenzaA__ACO36397

SEQ ID NO: 162647 - RNA, 1701 nt, Artificial Sequence; identical to SEQ ID NO: 162361
  derived and/or modified CDS sequence (opt4) from hemagglutinin__InfluenzaA__ACO36408

SEQ ID NO: 162648 - RNA, 1701 nt, Artificial Sequence; identical to SEQ ID NO: 161988
  derived and/or modified CDS sequence (opt4) from hemagglutinin__InfluenzaA__ACO36419

SEQ ID NO: 162649 - RNA, 1701 nt, Artificial Sequence; identical to SEQ ID NO: 161988
  derived and/or modified CDS sequence (opt4) from hemagglutinin__InfluenzaA__ACO36430

SEQ ID NO: 162650 - RNA, 1701 nt, Artificial Sequence
  derived and/or modified CDS sequence (opt4) from hemagglutinin__InfluenzaA__ACO36441
augaagaccaucaucgcccugagcuacauccugugccugguguucgcccagaagcugcccggcaacgacaacagcaccgccacccugugccugggccaccacgccgugcccaacggcaccaucgugaagaccaucaccaacgaccagaucgaggugaccaacgccaccgagcuggugcagagcagcagcaccggcggcaucugcgacagcccccaccagauccuggacggcgagaacugcacccugaucgacgcccugcugggcgacccccagugcgacggcuuccagaacaagaagugggaccuguucguggagagaagcaaggccuacagcaacugcuaccccuacgacgugcccgacuacgccagccugagaagccugguggccagcagcggcacccuggaguucaacaacgagagcuucgacuggaccggcgugacccagaacggcaccagcagcgccugcaagagaagaagcaacaagagcuucuucagcagacugaacuggcugacccaccugaaguacaaguaccccgcccugaacgugaccaugcccaacaacgagaaguucgacaagcuguacaucuggggcgugcaccaccccggcaccgacagcgaccagaucagccuguacgcccaggccagcggcagaaucaccgugagcaccaagagaagccagcagaccgugauccccaacaucggcagcagacccagagugagagacgugagcagcagaaucagcaucuacuggaccaucgugaagcccggcgacauccugcugaucaacagcaccggcaaccugaucgcccccagaggcuacuucaagaucagaagcggcaagagcagcaucaugagaagcgacgcccccaucggcaagugcaacagcgagugcaucacccccaacggcagcauccccaacgacaagcccuuccagaacgugaacagaaucaccuacggcgccugccccagauacgugaagcagaacacccugaagcuggccaccggcaugagaaacgugcccgagaagcagaccagaggcaucuucggcgccaucgccggcuucaucgagaacggcugggagggcaugguggacggcugguacggcuucagacaccagaacagcgagggcaccggccaggccgccgaccugaagagcacccaggccgccaucaaccagaucaacggcaagcugaacagacugaucggcaagaccaacgagaaguuccaccagaucgagaaggaguucagcgagguggagggcagaauccaggaccuggagaaguacguggaggacaccaagaucgaccuguggagcuacaacgccgagcugcugguggcccuggagaaccagcacaccaucgaccugaccgacagcgagaugaacaagcuguucgagagaaccaagaagcagcugagagagaacgccgaggacaugggcaacggcugcuucaagaucuaccacaagugcgacaacgccugcaucggcagcaucagaaacggcaccuacgaccacgacguguacagagacgaggcccugaacaacagauuccagaucaagggcguggagcugaagagcggcuacaaggacuggauccuguggaucagcuucgccaucagcugcuuccugcugugcguggcccugcugggcuucaucaugugggccugccagaagggcaacaucagaugcgacaucugcaucuga

SEQ ID NO: 162651 - RNA, 1701 nt, Artificial Sequence
  derived and/or modified CDS sequence (opt4) from hemagglutinin__InfluenzaA__ACO36452
augaagaccaucaucgcccugagcuacauccugugccugguguucgcccagaagcugcccggcaacgacaacagcaccgccacccugugccugggccaccacgccgugcccaacggcaccaucgugaagaccaucaccaacgaccagaucgaggugaccaacgccaccgagcuggugcagagcagcagcaccggcggcaucugcgacagcccccaccagauccuggacggcgagaacugcacccugaucgacgcccugcugggcgacccccagugcgacggcuuccagaacaagaagugggaccuguucguggagagaagcaaggccuacagcaacugcuaccccuacgacgugcccgacuacgccagccugagaagccugguggccagcagcggcacccuggaguucaacaacgagagcuucgacuggaccggcgugacccagaacggcaccagcagcagcugcaagagaagaagcaacaacagcuucuucagcagacugaacuggcugacccaccugaaguacaaguaccccgcccugaacgugaccaugcccaacaacgagaaguucgacaagcuguacaucuggggcgugcaccaccccggcaccgacagcgaccagaucagccuguacgcccaggccagcggcagaaucaccaucagcaccaagagaagccagcagaccgugauccccaacaucggcagcagacccagagugagagacgugagcagcagaaucagcaucuacuggaccaucgugaagcccggcgacauccugcugaucaacagcaccggcaaccugaucgcccccagaggcuacuucaagaucagaagcggcaagagcagcaucaugagaagcgacgcccccaucggcaagugcaacagcgagugcaucacccccaacggcagcauccccaacgacaagcccuuccagaacgugaacagaaucaccuacggcgccugccccagauacgugaagcagaacacccugaagcuggccaccggcaugagaaacgugcccgagaagcagaccagaggcaucuucggcgccaucgccggcuucaucgagaacggcugggagggcaugguggacggcugguacggcuucagacaccagaacagcgagggcaccggccaggccgccgaccugaagagcacccaggccgccaucaaccagaucaacggcaagcugaacagacugaucggcaagaccaacgagaaguuccaccagaucgagaaggaguucagcgagguggagggcagaauccaggaccuggagaaguacguggaggacaccaagaucgaccuguggagcuacaacgccgagcugcugguggcccuggagaaccagcacaccaucgaccugaccgacagcgagaugaacaagcuguucgagagaaccaagaagcagcugagagagaacgccgaggacaugggcaacggcugcuucaagaucuaccacaagugcgacaacgccugcaucggcagcaucagaaacggcaccuacgaccacgacguguacagagacgaggcccugaacaacagauuccagaucaagggcguggagcugaagagcggcuacaaggacuggauccuguggaucagcuucgccaucagcugcuuccugcugugcguggcccugcugggcuucaucaugugggccugccagaagggcaacaucagaugcaacaucugcaucuga

SEQ ID NO: 162652 - RNA, 1701 nt, Artificial Sequence
  derived and/or modified CDS sequence (opt4) from hemagglutinin__InfluenzaA__ACO36463
augaagaccaucaucgcccugagcuacauccugugccugguguucgcccagaagcugcccggcaacgacaacagcaccgccacccugugccugggccaccacgccgugcccaacggcaccaucgugaagaccaucaccaacgaccagaucgaggugaccaacgccaccgagcuggugcagagcagcagcaccggcggcaucugcgacagcccccaccagauccuggacggcgagaacugcacccugaucgacgcccugcugggcgacccccagugcgacggcuuccagaacaagaagugggaccuguucaucgagagaagcaaggccuacagcaacugcuaccccuacgacgugcccgacuacgccagccugagaagccugguggccagcagcggcacccuggaguucaacaacgagagcuucaacuggaccggcgugacccagaacggcaccagcagcgccugccagagaagaagcaacaagagcuucuucagcagacugaacuggcugacccaccugaaguucaaguaccccgcccugaacgugaccaugcccaacaacgagaaguucgacaagcuguacaucuggggcgugcaccaccccggcaccgacaacgaccagaucagccuguacgcccagaccagcggcagaaucaccgugagcaccaagagaagccagcagaccgugauccccaacaucggcagcagacccagagugagagacgugcccagcagaaucagcaucuacuggaccaucgugaagcccggcgacauccugcugaucaacagcaccggcaaccugaucgcccccagaggcuacuucaagaucagaagcggcaagagcagcaucaugagaagcgacgcccccaucggcaagugcaacagcgagugcaucacccccaacggcagcauccccaacgacaagcccuuccagaacgugaacagaaucaccuacggcgccugccccagauacgugaagcagaacacccugaagcuggccaccggcaugagaaacgugcccgagagacagaccagaggcaucuucggcgccaucgccggcuucaucgagaacggcugggagggcaugguggacggcugguacggcuucagacaccagaacagcgagggcaccggccaggccgccgaccugaagagcacccaggccgccaucaaccagaucaacggcaagcugaacagacugaucggcaagaccaacgagaaguuccaccagaucgagaaggaguucagcgagguggagggcagaauccaggaccuggagaaguacguggaggacaccaagaucgaccuguggagcuacaacgccgagcugcugguggcccuggagaaccagcacaccaucgaccugaccgacagcgagaugaacaagcuguucgagagaaccaagaagcagcugagagagaacgccgaggacaugggcaacggcugcuucaagaucuaccacaagugcgacaacgccugcaucggcagcaucagaaacggcaccuacgaccacgacguguacagagacgaggcccugaacaacagauuccagaucaagggcguggagcugaagagcggcuacaaggacuggauccuguggaucagcuucgccaucagcugcuucgugcugugcguggcccugcugggcuucaucaugugggccugccagaagggcaacaucagaugcaacaucugcaucuga

SEQ ID NO: 162653 - RNA, 1701 nt, Artificial Sequence
  derived and/or modified CDS sequence (opt4) from hemagglutinin__InfluenzaA__ACO36474
augaagaccaucaucgcccugagcuacauccugugccugguguucgcccagaagcugcccggcaacgacaacagcaccgccacccugugccugggccaccacgccgugcccaacggcaccaucgugaagaccaucaccaacgaccagaucgaggugaccaacgccaccgagcuggugcagagcagcagcaccggcggcaucugcgacagcccccaccagauccuggacggcgagaacugcacccugaucgacgcccugcugggcgacccccagugcgacggcuuccagaacaagaagugggaccuguucguggagagaagcaaggccuacagcaacugcuaccccuacgacgugcccgacuacgccagccugagaagccugguggccagcagcggcacccuggaguucaacaacgagagcuucgacuggaccggcgugacccagaacggcaccagcagcagcugcaagagaagaagcaacaacagcuucuucagcagacugaacuggcugacccaccugagauacaaguaccccgcccugaacgugaccaugcccaacaacgagaaguucgacaagcuguacaucuggggcgugcaccaccccggcaccgacagcgaccagaucagccuguacgcccaggccagcggcagaaucaccgugagcaccaagagaagccagcagaccgugauccccaacaucggcagcagacccagagugagagacgugagcagcagaaucagcaucuacuggaccaucgugaagcccggcgacauccugcugaucaacagcaccggcaaccugaucgcccccagaggcuacuucaagaucagaagcggcaagagcagcaucaugagaagcgacgcccccaucggcaagugcaacagcgagugcaucacccccaacggcagcauccccaacgacaagcccuuccagaacgugaacagaaucaccuacggcgacugccccagauacgugaagcagaacacccugaagcuggccaccggcaugagaaacgugcccgagaagcagaccagaggcaucuucggcgccaucgccggcuucaucgagaacggcugggagggcaugguggacggcugguacggcuucagacaccagaacagcgagggcaccggccaggccgccgaccugaagagcacccaggccgccaucaaccagaucaacggcaagcugaacagacugaucggcaagaccaacgagaaguuccaccagaucgagaaggaguucagcgagguggagggcagaauccaggaccuggagaaguacguggaggacaccaagaucgaccuguggagcuacaacgccgagcugcugguggcccuggagaaccagcacaccaucgaccugaccgacagcgagaugaacaagcuguucgagagaaccaagaagcagcugagagagaacgccgaggacaugggcaacggcugcuucaagaucuaccacaagugcgacaacgccugcaucggcagcaucagaaacggcaccuacgaccacgacguguacagagacgaggcccugaacaacagauuccagaucaagggcguggagcugaagagcggcuacaaggacuggauccuguggaucagcuucgccaucagcugcuuccugcugugcguggcccugcugggcuucaucaugugggccugccagaagggcaacaucagaugcaacaucugcaucuga

SEQ ID NO: 162654 - RNA, 1701 nt, Artificial Sequence
  derived and/or modified CDS sequence (opt4) from hemagglutinin__InfluenzaA__ACO36496
augaagaccaucaucgcccugagcuacauccugugccugguguucgcccagaagcugcccggcaacgacaacagcaccgccacccugugccugggccaccacgccgugcccaacggcaccaucgugaagaccaucaccaacgaccagaucgaggugaccaacgccaccgagcuggugcagagcagcagcaccggcggcaucugcgacagcccccaccagauccuggacggcgagaacugcacccugaucgacgcccugcugggcgacccccagugcgacggcuuccagaacaagaagugggaccuguucguggagagaagcaaggccuacagcaacugcuaccccuacgacgugcccgacuacgccagccugagaagccugguggccagcagcggcacccuggaguucaacaacgagagcuucaacuggaccggcgugacccagaacggcaccagcagcgccugcaagagaagaagcaacaacggcuucuucagcagacugaacuggcugacccaccugaaguucaaguaccccgcccugaacgugaccaugcccaacaacgagaaguucgacaagcuguacaucuggggcgugcaccaccccggcaccgacaacgaccagaucagccuguacgcccaggccagcggcagaaucaccgugagcaccaagagaagccagcagaccgugauccccaacaucggcagcagacccagagugagagacaucagcagcagaaucagcaucuacuggaccaucgugaagcccggcgacauccugcugaucaacagcaccggcaaccugaucgcccccagaggcuacuucaagaucagaagcggcaagagcagcaucaugagaagcgacgcccccaucggcaagugcaacagcgagugcaucacccccaacggcagcauccccaacgacaagcccuuccagaacgugaacagaaucaccuacggcgccugccccagauacgugaagcagaacacccugaagcuggccaccggcaugagaaacgugcccgagacccagaccagaggcaucuucggcgccaucgccggcuucaucgagaacggcugggagggcaugguggacggcugguacggcuucagacaccagaacagcgagggcaccggccaggccgccgaccugaagagcacccaggccgccaucaaccagaucaacggcaagcugaacagacugaucggcaagaccaacgagaaguuccaccagaucgagaaggaguucagcgagguggagggcagaauccaggaccuggagaaguacguggaggacaccaagaucgaccuguggagcuacaacgccgagcugcugguggcccuggagaaccagcacaccaucgaccugaccgacagcgagaugaacaagcuguucgagagaaccaagaagcagcugagagagaacgccgaggacaugggcaacggcugcuucaagaucuaccacaagugcgacaacgccugcaucggcagcaucagaaacggcaccuacgaccacgacguguacagagacgaggcccugaacaacagauuccagaucaagggcguggagcugaagagcggcuacaaggacuggauccuguggaucagcuucgccaucagcugcuuccugcugugcguggcccugcugggcuucaucaugugggccugccagaagggcaacaucagaugcaacaucugcaucuga

SEQ ID NO: 162655 - RNA, 1701 nt, Artificial Sequence
  derived and/or modified CDS sequence (opt4) from hemagglutinin__InfluenzaA__ACO36518
augaagaccaucaucgcccugagcuacauccugugccugguguucgcccagaagcugcccggcaacgacaacagcaccgccacccugugccugggccaccacgccgugcccaacggcaccaucgugaagaccaucaccaacgaccagaucgaggugaccaacgccaccgagcuggugcagagcagcagcaccggcggcaucugcgacagcccccaccagauccuggacggcgagaacugcacccugaucgacgcccugcugggcgacccccagugcgacggcuuccagaacaagaagugggaccuguucguggagagaagcaaggccuacagcaacugcuaccccuacgacgugcccgacuacgccagccugagaagccugguggccagcagcggcacccuggaguucaacaacgagagcuucaacuggaccggcgugacccagaacggcaccagcagcgccugcaagagaagaagcaacaagagcuucuucagcagacugaacuggcugacccaccugaaguucaaguaccccgcccugaacgugaccaugcccaacaacgagaaguucgacaagcuguacaucuggggcgugcaccaccccggcaccgacaacgaccagaucagccuguacgcccaggccagcggcagaaucaccgugagcaccaagagaagccagcagaccgugauccccaacaucggcagcagacccagagugagagacgugcccagcagaaucagcaucuacuggaccaucgugaagcccggcgacauccugcugaucaacagcaccggcaaccugaucgcccccagaggcuacuucaagaucagaagcggcaagagcagcaucaugagaagcgacgcccccaucggcaagugcaacagcgagugcaucacccccaacggcagcauccccaacgacaagcccuuccagaacgugaacagaaucaccuacggcaccugccccagauacgugaagcagaacacccugaagcuggccaccggcaugagaaacgugcccgagaagcagaccagaggcaucuucggcgccaucgccggcuucaucgagaacggcugggagggcaugguggacggcugguacggcuucagacaccagaacagcgagggcaccggccaggccgccgaccugaagagcacccaggccgccaucaaccagaucaacggcaagcugaacagacugaucggcaagaccaacgagaaguuccaccagaucgagaaggaguucagcgagguggagggcagaauccaggaccuggagaaguacguggaggacaccaagaucgaccuguggagcuacaacgccgagcugcugguggcccuggagaaccagcacaccaucgaccugaccgacagcgagaugaacaagcuguucgagagaaccaagaagcagcugagagagaacgccgaggacaugggcaacggcugcuucaagaucuaccacaagugcgacaacgccugcaucggcagcaucagaaacggcaccuacgaccacgacguguacagagacgaggcccugaacaacagauuccagaucaagggcguggagcugaagcugggcuacaaggacuggauccuguggaucagcuucgccaucagcugcuuccugcugugcguggcccugcugggcuucaucaugugggccugccagaagggcaacaucagaugcaacaucugcaucuga

SEQ ID NO: 162656 - RNA, 1701 nt, Artificial Sequence
  derived and/or modified CDS sequence (opt4) from hemagglutinin__InfluenzaA__ACO36551
augaagaccaucaucgcccugagccacauccugugccugguguucgcccagaagccccccggcaacgacaacagcaccgccacccugugccugggccaccacgccgugcccaacggcaccaucgugaagaccaucaccaacgaccagaucgaggugaccaacgccaccgagcuggugcagagcagcagcaccggcggcaucugcgacagcccccaccagauccuggacggcgagaacugcacccugaucgacgcccugcugggcgacccccagugcgacggcuuccagaacaagaagugggaccuguucguggagagaagcaaggccuacagcaacugcuaccccuacgacgugcccgacuacgccagccugagaagccugguggccagcagcggcacccuggaguucaacaacgagagcuucaacuggaccggcgugacccagaacggcaccagcagcgccugcaagagaagaagcaacaacagcuucuucagcagacugaacuggcugacccaccugaaguucaaguaccccgcccugaacgugaccaugcccaacaacgagaaguucgacaagcuguacaucuggggcgugcaccaccccggcaccgacaacgaccagaucagccuguacgcccaggccagcggcagaaucaccgugagcaccaagagaagccagcagaccgugauccccaacaucggcagcagacccagagugagagacaucagcagcagaaucagcaucuacuggaccaucgugaagcccggcgacauccugcugaucaacagcaccggcaaccugaucgcccccagaggcuacuucaagaucagaagcggcaagagcagcaucaugagaagcgacgcccccaucggcaagugcaacagcgagugcaucacccccaacggcagcauccccaacgacaagcccuuccagaacgugaacagaaucaccuacggcgccugccccagauacgugaagcagaacacccugaagcuggccaccggcaugagaaacgugcccgagacccagaccagaggcaucuucggcgccaucgccggcuucaucgagaacggcugggagggcaugguggacggcugguacggcuucagacaccagaacagcgagggcaccggccaggccgccgaccugaagagcacccaggccgccaucaaccagaucaacggcaagcugaacagacugaucggcaagaccaacgagaaguuccaccagaucgagaaggaguucagcgagguggagggcagaauccaggaccuggagaaguacguggaggacaccaagaucgaccuguggagcuacaacgccgagcugcugguggcccuggagaaccagcacaccaucgaccugaccgacagcgagaugaacaagcuguucgagagaaccaagaagcagcugagagagaacgccgaggacaugggcaacggcugcuucaagaucuaccacaagugcgacaacgccugcaucggcagcaucagaaacgagaccuacgaccacgacguguacagagacgaggcccugaacaacagauuccagaucaagggcguggagcugaagagcggcuacaaggacuggauccuguggaucagcuucgccaucagcugcuuccugcugugcguggcccugcugggcuucaucaugugggccugccagaagggcaacaucagaugcaacaucugcaucuga

SEQ ID NO: 162657 - RNA, 1701 nt, Artificial Sequence
  derived and/or modified CDS sequence (opt4) from hemagglutinin__InfluenzaA__ACO36562
augaagaccaucaucgcccugagcuacauccugugccugguguucgcccagaagcugcccggcaacgacaacagcaccgccacccugugccugggccaccacgccgugcccaacggcaccaucgugaagaccaucaccaacgaccagaucgaggugaccaacgccaccgagcuggugcagagcagcagcaccggcggcaucugcgacagcccccaccagauccuggacggcgagaacugcacccugaucgacgcccugcugggcgacccccagugcgacggcuuccagaacaagaagugggaccuguucguggagagaagcaaggccuacagcaacugcuaccccuacgacgugcccgacuacgccagccugagaagccugguggccagcagcggcacccuggaguucaacaacgagagcuucaacuggaccggcgugacccagaacggcaccagcagcgccugcaagagaagaagcaacaacagcuucuucagcagacugaacuggcugacccaccugaaguucaaguaccccgcccugaacgugaccaugcccaacaacgagaaguucgacaagcuguacaucuggggcgugcaccaccccggcaccgacaacgaccagaucagccuguacgcccaggccagcggcagaaucaccgugagcaccaagagaagccagcagaccgugauccccaacaucggcagcagacccagagugagagacauccccagcagaaucagcaucuacuggaccaucgugaagcccggcgacauccugcugaucaacagcaccggcaaccugaucgcccccagaggcuacuucaagaucagaagcggcaagagcagcaucaugagaagcgacgcccccaucggcaagugcaacagcgagugcaucacccccaacggcagcauccccaacgacaagcccuuccagaacgugaacagaaucaccuacggcgccugccccagauacgugaagcagaacacccugaagcuggccaccggcaugagaaacgugcccgagacccagaccagaggcaucuucggcgccaucgccggcuucaucgagaacggcugggagggcaugguggacggcugguacggcuucagacaccagaacagcgagggcaccggccaggccgccgaccugaagagcacccaggccgccaucaaccagaucaacggcaagcugaacagacugaucggcaagaccaacgagaaguuccaccagaucgagaaggaguucagcgagguggagggcagaauccaggaccuggagaaguacguggaggacaccaagaucgaccuguggagcuacaacgccgagcugcugguggcccuggagaaccagcacaccaucgaccugaccgacagcgagaugaacaagcuguucgagagaaccaagaagcagcugagagagaacgccgaggacaugggcaacggcugcuucaagaucuaccacaagugcgacaacgccugcaucggcagcaucagaaacgagaccuacgaccacgacguguacagagacgaggcccugaacaacagauuccagaucaagggcguggagcugaagagcggcuacaaggacuggauccuguggaucagcuucgccaucagcugcuuccugcugugcguggcccugcugggcuucaucaugugggccugccagaagggcaacaucagaugcaacaucugcaucuga

SEQ ID NO: 162658 - RNA, 1701 nt, Artificial Sequence
  derived and/or modified CDS sequence (opt4) from hemagglutinin__InfluenzaA__ACO36573
augaagaccaucaucgcccugagcuacauccugugccugguguucgcccagaagcugcccggcaacgacaacagcaccgccacccugugccugggccaccacgccgugcccaacggcaccaucgugaagaccaucaccaacgaccagaucgaggugaccaacgccaccgagcuggugcagagcagcagcaccggcggcaucugcgacagcccccaccagauccuggacggcgagaacugcacccugaucgacgcccugcugggcgacccccagugcgacggcuuccagaacaagaagugggaccuguucguggagagaagcaaggccuacagcaacugcuaccccuacgacgugcccgacuacgccagccugagaagccugguggccagcagcggcacccuggaguucaacaacgagagcuucaacuggaccggcgugacccagaacggcaccagcagcgccugcaagagaagaagcaacaacagcuucuucagcagacugaacuggcugacccaccugaaguucaaguaccccgcccugaacgugaccaugcccaacaacgagaaguucgacaagcuguacaucuggggcgugcaccaccccggcaccgacaacgaccagaucagccuguacgcccaggccagcggcagaaucaccgugagcaccaagagaagccagcagaccgugauccccaacaucggcagcagacccagagugagagacaucagcagcagaaucagcaucuacuggaccaucgugaagcccggcgacauccugcugaucaacagcaccggcaaccugaucgcccccagaggcuacuucaagaucagaagcggcaagagcagcaucaugagaagcgacgcccccaucggcaagugcaacagcgagugcaucacccccaacggcagcauccccaacgacaagcccuuccagaacgugaacagaaucaccuacggcgccugccccagauacgugaagcagaacacccugaagcuggccaccggcaugagaaacgugcccgagacccagaccagaggcaucuucggcgccaucgccggcuucaucgagaacggcugggagggcaugguggacggcugguacggcuucagacaccagaacagcgagggcaccggccaggccgccgaccugaagagcacccaggccgccaucaaccagaucaacggcaagcugaacagacugaucggcaagaccaacgagaaguuccaccagaucgagaaggaguucagcgagguggagggcagaauccaggaccuggagaaguacguggaggacaccaagaucgaccuguggagcuacaacgccgagcugcugguggcccuggagaaccagcacaccaucgaccugaccgacagcgagaugaacaagcuguucgagagaaccaagaagcagcugagagagaacgccgaggacaugggcaacggcugcuucaagaucuaccacaagugcgacaacgccugcaucggcagcaucagaaacgagaccuacgaccacgacguguacagagacgaggcccugaacaacagauuccagaucaagggcguggagcugaagagcggcuacaaggacuggauccuguggaucagcuucgccaucagcugcuuccugcugugcguggcccugcugggcuucaucaugugggccugccagaagggcaacaucagaugcaacaucugcaucuga

SEQ ID NO: 162659 - RNA, 1701 nt, Artificial Sequence
  derived and/or modified CDS sequence (opt4) from hemagglutinin__InfluenzaA__ACO36584
augaagaccaucaucgcccugagcuacauccugugccugguguucagccagaagcugcccggcaacgacaacagcaccgccacccugugccugggccaccacgccgugcccaacggcaccaucgugaagaccaucaccaacgaccagaucgaggugaccaacgccaccgagcuggugcagagcagcagcaccggcggcaucugcgacagcccccaccagauccuggacggcgagaacugcacccugaucgacgcccugcugggcgacccccagugcgacggcuuccagaacaagaagugggaccuguucguggagagaagcaaggccuacagcaacugcuaccccuacgacgugcccgacuacgccagccugagaagccugguggccagcagcggcacccuggaguucaacaacgagagcuucaacuggaccggcgugacccagaacggcaccagcagcgccugcaagagaagaagcaacaacagcuucuucagcagacugaacuggcugacccaccugaaguucaaguaccccgcccugaacgugaccaugcccaacaacgagaaguucgacaagcuguacaucuggggcgugcaccaccccggcaccgacaacgaccagaucagccuguacgcccaggccagcggcagaaucaccgugagcaccaagaagagccagcagaccgugauccccaacaucggcagcagacccagagugagagacaucagcagcagaaucagcaucuacuggaccaucgugaagcccggcgacauccugcugaucaacagcaccggcaaccugaucgcccccagaggcuacuucaagaucagaagcggcaagagcagcaucaugagaagcgacgcccccaucggcaagugcaacagcgagugcaucacccccaacggcagcauccccaacgacaagcccuuccagaacgugaacagaaucaccuacggcgccugccccagauacgugaagcagaacacccugaagcuggccaccggcaugagaaacgugcccgagacccagaccagaggcaucuucggcgccaucgccggcuucaucgagaacggcugggagggcaugguggacggcugguacggcuucagacaccagaacagcgagggcaccggccaggccgccgaccugaagagcacccaggccgccaucaaccagaucaacggcaagcugaacagacugaucggcaagaccaacgagaaguuccaccagaucgagaaggaguucagcgagguggagggcagaauccaggaccuggagaaguacguggaggacaccaagaucgaccuguggagcuacaacgccgagcugcugguggcccuggagaaccagcacaccaucgaccugaccgacagcgagaugaacaagcuguucgagagaaccaagaagcagcugagagagaacgccgaggacaugggcaacggcugcuucaagaucuaccacaagugcgacaacgccugcaucggcagcaucagaaacgagaccuacgaccacgacguguacagagacgaggcccugaacaacagauuccagaucaagggcguggagcugaagagcggcuacaaggacuggauccuguggaucagcuucgccaucagcugcuuccugcugugcguggcccugcugggcuucaucaugugggccugccagaagggcaacaucagaugcaacaucugcaucuga

SEQ ID NO: 162660 - RNA, 1701 nt, Artificial Sequence; identical to SEQ ID NO: 160690
  derived and/or modified CDS sequence (opt4) from hemagglutinin__InfluenzaA__ACO36595

SEQ ID NO: 162661 - RNA, 1701 nt, Artificial Sequence
  derived and/or modified CDS sequence (opt4) from hemagglutinin__InfluenzaA__ACO36606
augaagaccaucaucgcccugagcuacauccugugccugguguucgcccagaagcugcccggcaacgacaacagcaccgccacccugugccugggccaccacgccgugcccaacggcaccaucgugaagaccaucaccaacgaccagaucgaggugaccaacgccaccgagcuggugcagagcagcagcaccggcggcaucugcgacagcccccaccagauccuggacggcgagaacugcacccugaucgacgcccugcugggcgacccccagugcgacggcuuccagaacaagaagugggaccuguucguggagagaagcaaggccuacagcaacugcuaccccuacgacgugcccgacuacgccagccugagaagccugguggccagcagcggcacccuggaguucaagaacgagagcuucaacuggaccggcgugacccagaacggcaccagcagcgccugcaagagaagaagcaacaacagcuucuucagcagacugaacuggcugacccaccugaaguucaaguaccccgcccugaacgugaccaugcccaacaacgagaaguucgacaagcuguacaucuggggcgugcaccaccccggcaccgacaacgaccagaucuuccuguacgcccaggccagcggcagaaucaccgugagcacccagagaagccagcagaccgugauccccaacaucggcagcagacccagagugagaaacauccccagcagaaucagcaucuacuggaccaucgugaagcccggcgacauccugcugaucaacagcaccggcaaccugaucgcccccagaggcuacuucaagaucagaagcggcaagagcagcaucaugagaagcgacgcccccaucggcaagugcaacagcgagugcaucacccccaacggcagcauccccaacgacaagcccuuccagaacgugaacagaaucaccuacggcgccugccccagauacgugaagcagaacacccugaagcuggccaccggcaugagaaacgugcccgagaagcagaccagaggcaucuucggcgccaucgccggcuucaucgagaacggcugggagggcaugguggacggcugguacggcuucagacaccagaacagcgagggcaucggccaggccgccgaccugaagagcacccaggccgccaucaaccagaucaacggcaagcugaacagacugaucggcaagaccaacgagaaguuccaccagaucgagaaggaguucagcgagguggagggcagaauccaggaccuggagaaguacguggaggacaccaagaucgaccuguggagcuacaacgccgagcugcugguggcccuggagaaccagcacaccaucgaccugaccgacagcgagaugaacaagcuguucgagagaaccaagaagcagcugagagagaacgccgaggacaugggcaacggcugcuucaagaucuaccacaagugcgacaacgccugcaucggcagcaucagaaacggcaccuacgaccacgacguguacagagacgaggcccugaacaacagauuccagaucaagggcguggagcugaagagcggcuacaaggacuggauccuguggaucagcuucgccaucagcugcuuccugcugugcguggcccugcugggcuucaucaugugggccugccagaagggcaacaucagaugcaacaucugcaucuga

SEQ ID NO: 162662 - RNA, 1701 nt, Artificial Sequence; identical to SEQ ID NO: 160690
  derived and/or modified CDS sequence (opt4) from hemagglutinin__InfluenzaA__ACO36617

SEQ ID NO: 162663 - RNA, 1701 nt, Artificial Sequence; identical to SEQ ID NO: 160690
  derived and/or modified CDS sequence (opt4) from hemagglutinin__InfluenzaA__ACO36628

SEQ ID NO: 162664 - RNA, 1701 nt, Artificial Sequence
  derived and/or modified CDS sequence (opt4) from hemagglutinin__InfluenzaA__ACO36639
augaagaccaucaucgcccugagcuacauccugugccugguguucgcccagaagcugcccggcaacgacaacagcaccgccacccugugccugggccaccacgccgugcccaacggcaccaucgugaagaccaucaccaacgaccagaucgaggugaccaacgccaccgagcuggugcagagcagcagcaccggcggcaucugcgacagcccccaccagauccuggacggcgagaacugcacccugaucgacgcccugcugggcgacccccagugcgacggcuuccagaacaagaagugggaccuguucguggagagaagcaaggccuacagcaacugcuaccccuacgacgugcccgacuacgccagccugagaagccugguggccagcagcggcacccuggaguucaacaacgagagcuucaacuggaccggcgugacccagaacggcaccagcagcgccugcaagagaagaagcaacaacagcuucuucagcagacugaacuggcugacccaccugaaguucaaguaccccgcccugaacgugaccaugcccaacaacgagaaguucgacaagcuguacaucuggggcgugcaccaccccggcaccgacaacgaccagaucuuccuguacgcccaggccagcggcagaaucaccgugagcaccaagagaagccagcagaccgugauccccaacaucggcagcagacccagagugagaaacauccccagcagaaucagcaucuacuggaccaucgugaagcccggcgacauccugcugaucaacagcaccggcaaccugaucgcccccagaggcuacuucaagaucagaagcggcaagagcagcaucaugagaagcgacgcccccaucggcaagugcaacagcgagugcaucacccccaacggcagcauccccaacgacaagcccuuccagaacgugaacagaaucaccuacggcgccugccccagauacgugaagcagaacacccugaagcuggccaccggcaugagaaacgugcccgagaagcagaccagaggcaucuucggcgccaucgccggcuucaucgagaacggcugggagggcaugguggacggcugguacggcuucagacaccagaacagcgagggcaucggccaggccgccgaccugaagagcacccaggccgccaucaaccagaucaacggcaagcugaacagacugaucggcaagaccaacgagaaguuccaccagaucgagaaggaguucagcgagguggagggcagaauccaggaccuggagaaguacguggaggacaccaagaucgaccuguggagcuacaacgccgagcugcugguggcccuggagaaccagcacaccaucgaccugaccgacagcgagaugaacaagcuguucgagagaaccaagaagcagcugagagagaacgccgaggacaugggcaacggcugcuucaagaucuaccacaagugcgacaacgccugcaucggcagcaucagaaacggcaccuacgaccacgacguguacagagacgaggcccugaacaacagauuccagaucaagggcguggagcugaagagcggcuacaaggacuggauccuguggaucagcuucgccaucagcugcuuccugcugugcuucgcccugcugggcuucaucaugugggccugccagaagggcaacaucagaugcaacaucugcaucuga

SEQ ID NO: 162665 - RNA, 1701 nt, Artificial Sequence
  derived and/or modified CDS sequence (opt4) from hemagglutinin__InfluenzaA__ACO36661
augaagaccaucaucgcccugagcuacauccugugccugguguucgcccagaagcugcccggcaacgacaacagcaccgccacccugugccugggccaccacgccgugcccaacggcaccaucgugaagaccaucaccaacgaccagaucgaggugaccaacgccaccgagcuggugcagagcagcagcaccggcggcaucugcgacagcccccaccagauccuggacggcgagaacugcacccugaucgacgcccugcugggcgacccccagugcgacggcuuccagaacaagaagugggaccuguucguggagagaagcaaggccuacagcaacugcuaccccuacgacgugcccgacuacgccagccugagaagccugguggccagcagcggcacccuggaguucaacaacgagagcuucaacuggaccggcgugacccagaacggcaccagcagcgccugcaagagaagaagcaacaacagcuucuucagcagacugaacuggcugacccaccugaaguucaaguaccccgcccugaacgugaccaugcccaacaacgagaaguucgacaagcuguacaucuggggcgugcaccaccccggcaccgacaacgaccagaucuuccuguacgcccaggccagcggcagaaucaccgugagcaccaagagaagccagcagaccgugauccccaacaucggcagcagacccagagugagaaacauccccagcagaaucagcaucuacuggaccaucgugaagcccggcgacauccugcugaucaacagcaccggcaaccugaucgcccccagaggcuacuucaagaucagaagcggcaagagcagcaucaugagaagcgacgcccccaucggcaagugcaacagcgagugcaucacccccaacggcagcauccccaacgacaagcccuuccagaacgugaacagaaucaccuacggcgccugccccagauacgugaagcagaacacccugaagcuggccaccggcaugagaaacgugcccgagaagcagaccagaggcaucuucggcgccaucgccggcuucaucgagaacggcugggagggcaugguggacggcugguacggcuucagacaccagaacagcgagggcaucggccaggccgccgaccugaagagcacccaggccgccaucaaccagaucaacggcaagcugaacagacugaucggcaagaccaacgagaaguuccaccagaucgagaaggaguucagcgagguggagggcagaauccaggaccuggagaaguacguggaggacaucaagaucgaccuguggagcuacaacgccgagcugcugguggcccuggagaaccagcacaccaucgaccugaccgacagcgagaugaacaagcuguucgagagaaccaagaagcagcugagagagaacgccgaggacaugggcaacggcugcuucaagaucuaccacaagugcgacaacgccugcaucggcagcaucagaaacggcaccuacgaccacgacguguacagagacgaggcccugaacaacagauuccagaucaagggcguggagcugaagagcggcuacaaggacuggauccuguggaucagcuucgccaucagcugcuuccugcugugcguggcccugcugggcuucaucaugugggccugccagaagggcaacaucagaugcaacaucugcaucuga

SEQ ID NO: 162666 - RNA, 1701 nt, Artificial Sequence; identical to SEQ ID NO: 160690
  derived and/or modified CDS sequence (opt4) from hemagglutinin__InfluenzaA__ACO36683

SEQ ID NO: 162667 - RNA, 1701 nt, Artificial Sequence; identical to SEQ ID NO: 162657
  derived and/or modified CDS sequence (opt4) from hemagglutinin__InfluenzaA__ACO37122

SEQ ID NO: 162668 - RNA, 1701 nt, Artificial Sequence
  derived and/or modified CDS sequence (opt4) from hemagglutinin__InfluenzaA__ACO94514
augaagaccaucaucgcccugagcuacauccugugccugguguucgcccagaagcugcccggcaacgacaacagcaccgccacccugugccugggccaccacgccgugcccaacggcaccaucgugaagaccaucaccaacgaccagaucgaggugaccaacgccaccgagcuggugcagagcagcagcaccggcgagaucugcgacagcccccaccagauccuggacggcgagaacugcacccugaucgacgcccugcugggcgacccccagugcgacggcuuccagaacaagaagugggaccuguucguggagagaagcaaggccuacagcaacugcuaccccuacgacgugcccgacuacgccagccugagaagccugguggccagcagcggcacccuggaguucaacaacgagagcuucaacuggaccggcgugacccagaacggcaccagcagcgccugcaucagaaagagcaacaacagcuucuucagcagacugaacuggcugacccaccugaaguucaaguaccccgcccugaacgugaccaugcccaacaacgagcaguucgacaagcuguacaucuggggcgugcaccaccccggcaccgacaacgaccagaucuuccuguacgcccaggccagcggcagaaucaccgugagcaccaagagaagccagcagaccgugauccccaacaucggcagcagacccagagugagaaacauccccagcagaaucagcaucuacuggaccaucgugaagcccggcgacauccugcugaucaacagcaccggcaaccugaucgcccccagaggcuacuucaagaucagaagcggcaagagcagcaucaugagaagcgacgcccccaucggcaagugcaacagcgagugcaucacccccaacggcagcauccccaacgacaagcccuuccagaacgugaacagaaucaccuacggcgccugccccagauacgugaagcagaacacccugaagcuggccaccggcaugagaaacgugcccgagaagcagaccagaggcaucuucggcgccaucgccggcuucaucgagaacggcugggagggcaugguggacggcugguacggcuucagacaccagaacagcgagggcagaggccaggccgccgaccugaagagcacccaggccgccaucgaccagaucaacggcaagcugaacagacugaucggcaagaccaacgagaaguuccaccagaucgagaaggaguucagcgagguggagggcagaauccaggaccuggagaaguacguggaggacaccaagaucgaccuguggagcuacaacgccgagcugcugguggcccuggagaaccagcacaccaucgaccugaccgacagcgagaugaacaagcuguucgagaagaccaagaagcagcugagagagaacgccgaggacaugggcaacggcugcuucaagaucuaccacaagugcgacaacgccugcaucggcagcaucagaaacggcaccuacgaccacgacguguacagagacgaggcccugaacaacagauuccagaucaagggcguggagcugaagagcggcuacaaggacuggauccuguggaucagcuucgccaucagcugcuuccugcugugcguggcccugcugggcuucaucaugugggccugccagaagggcaacaucagaugcaacaucugcaucuga

SEQ ID NO: 162669 - RNA, 1701 nt, Artificial Sequence
  derived and/or modified CDS sequence (opt4) from hemagglutinin__InfluenzaA__ACO94515
augaagaccaucaucgcccugagcuacauccugugccugguguucgcccagaagcugcccggcaacgacaacagcaccgccacccugugccugggccaccacgccgugcccaacggcaccaucgugaagaccaucaccaacgaccagaucgaggugaccaacgccaccgagcuggugcagagcagcagcaccggcgagaucugcgacagcccccaccagauccuggacggcgagaacugcacccugaucgacgcccugcugggcgacccccagugcgacggcuuccagaacaagaagugggaccuguucguggagagaagcaaggccuacagcaacugcuaccccuacgacgugcccgacuacgccagccugagaagccugguggccagcagcggcacccuggaguucaacaacgagagcuucaacuggaccggcgugacccagaacggcaccagcagcgccugcaucagaaagagcaacaacagcuucuucagcagacugaacuggcugacccaccugaaguucaaguaccccgcccugaacgugaccaugcccaacaacgagcaguucgacaagcuguacaucuggggcgugcaccaccccggcaccgacaacgaccagaucuuccuguacgcccaggccagcggcagaaucaccgugagcaccaagagaagccagcagaccgugauccccaacaucggcagcagacccagagugagaaacauccccagcagaaucagcaucuacuggaccaucgugaagcccggcgacauccugcugaucaacagcaccggcaaccugaucgcccccagaggcuacuucaagaucagaagcggcaagagcagcaucaugagaagcgacgcccccaucggcaagugcaacagcgagugcaucacccccaacggcagcauccccaacgacaagcccuuccagaacgugaacagaaucaccuacggcgccugccccagauacgugaagcagaacacccugaagcuggccaccggcaugagaaacgugcccgagaagcagaccagaggcaucuucggcgccaucgccggcuucaucgagaacggcugggagggcaugauggacggcugguacggcuucagacaccagaacagcgagggcagaggccaggccgccgaccugaagagcacccaggccgccaucgaccagaucaacggcaagcugaacagacugaucggcaagaccaacgagaaguuccaccagaucgagaaggaguucagcgagguggagggcagaauccaggaccuggagaaguacguggaggacaccaagaucgaccuguggagcuacaacgccgagcugcugguggcccuggagaaccagcacaccaucgaccugaccgacagcgagaugaacaagcuguucgagaagaccaagaagcagcugagagagaacgccgaggacaugggcaacggcugcuucaagaucuaccacaagugcgacaacgccugcaucggcagcaucagaaacggcaccuacgaccacgacguguacagagacgaggcccugaacaacagauuccagaucaagggcguggagcugaagagcggcuacaaggacuggauccuguggaucagcuucgccaucagcugcuuccugcugugcguggcccugcugggcuucaucaugugggccugccagaagggcaacaucagaugcaacaucugcaucuga

SEQ ID NO: 162670 - RNA, 1701 nt, Artificial Sequence; identical to SEQ ID NO: 162494
  derived and/or modified CDS sequence (opt4) from hemagglutinin__InfluenzaA__ACO94516

SEQ ID NO: 162671 - RNA, 1701 nt, Artificial Sequence; identical to SEQ ID NO: 162494
  derived and/or modified CDS sequence (opt4) from hemagglutinin__InfluenzaA__ACO94672

SEQ ID NO: 162672 - RNA, 1701 nt, Artificial Sequence
  derived and/or modified CDS sequence (opt4) from hemagglutinin__InfluenzaA__ACO94683
augaagaccaucaucgcccugagcuacauccugugccuggugagcgcccagaagcugcccggcaacgacaacagcaccgccacccugugccugggccaccacgccgugcccaacggcaccaucgugaagaccaucaccaacgaccagaucgaggugaccaacgccaccgagcuggugcagagcagcagcaccggcgagaucugcgacagcccccaccaggugcuggacggcgagaacugcacccugaucgacgcccugcugggcgacccccagugcgacggcuuccagaacaagaagugggaccuguucguggagagaagcaaggccuacagcaacugcuaccccuacgacgugcccgacuacgccagccugagaagccugguggccagcagcggcacccuggaguucaacaacgagagcuucaacuggaccggcgugacccagaacggcaccagcagcgccugcaucagaagaagcaacaacagcuucuucagcagacugaacuggcugacccacagcaaguucaaguaccccgcccugaacgugaccaugcccaacaacgaggaguucgacaagcuguacaucuggggcgugcaccaccccggcaccgacaacgaccagaucuuccuguacgcccaggccagcggcagaaucaccgugagcaccaagagaagccagcagaccgugauccccaacaucggcagcagacccagagugagaaacauccccagcagaaucagcaucuacuggaccaucgugaagcccggcgacauccugcugaucaacagcaccggcaaccugaucgcccccagaggcuacuucaagaucagaagcggcaagagcagcaucaugagaagcgacgcccccaucggcaagugcaacagcgagugcaucacccccaacggcagcauccccaacgacaagcccuuccagaacgugaacagaaucaccuacggcgccugccccagauacgugaagcagaacacccugaagcuggccaccggcaugagaaacgugcccgagaagcagaccagaggcaucuucggcgccaucgccggcuucaucgagaacggcugggagggcaugguggacggcugguacggcuucagacaccagaacagcgagggcaucggccaggccgccgaccugaagagcacccaggccgccaucgaccagaucaacggcaagcugaacagacugaucggcaagaccaacgagaaguuccaccagaucgagaaggaguucaccgagguggagggcagaauccaggaccuggagaaguacguggaggacaccaagaucgaccuguggagcuacaacgccgagcugcugguggcccuggagaaccagcacaccaucgaccugaccgacagcgagaugaacaagcuguucgagaagaccaagaagcagcugagagagaacgccgaggacaugggcaacggcugcuucaagaucuaccacaagugcgacaacgccugcaucggcagcaucagaaacggcaccuacgaccacgagguguacagagacgaggcccugaacaacagauuccagaucaagggcguggagcugaagagcggcuacaaggacuggauccuguggaucagcuucgccaucagcugcuuccugcugugcguggcccugcugggcuucaucaugugggccugccagaagggcaacaucagaugcaacaucugcaucuga

SEQ ID NO: 162673 - RNA, 1701 nt, Artificial Sequence; identical to SEQ ID NO: 162494
  derived and/or modified CDS sequence (opt4) from hemagglutinin__InfluenzaA__ACO94694

SEQ ID NO: 162674 - RNA, 1698 nt, Artificial Sequence; identical to SEQ ID NO: 162548
  derived and/or modified CDS sequence (opt4) from hemagglutinin__InfluenzaA__ACO94705

SEQ ID NO: 162675 - RNA, 1701 nt, Artificial Sequence
  derived and/or modified CDS sequence (opt4) from hemagglutinin__InfluenzaA__ACO94727
augaagaccaucaucgcccugagcuacauccugugccugguguucgcccagaagcugcccggcaacgacaacagcaccgccacccugugccugggccaccacgccgugcccaacggcaccaucgugaagaccaucaccaacgaccagaucgaggugaccaacgccaccgagcuggugcagagcagcagcaccggcgagaucugcgacagcccccaccagauccuggacggcgagaacugcacccugaucgacgcccugcugggcgacccccagugcgacggcuuccagaacaagaagugggaccuguucguggagagaagcaaggccuacagcaacugcuaccccuacgacgugcccgacuacgccagccugagaagccugguggccagcagcggcacccuggaguucaacaacgagagcuucaacuggaccggcgugacccagaacggcaccagcagcgccugcaucagaagaagcaacaacagcuucuucagcagacugaacuggcugacccaccugaaguucaaguaccccgcccugaacgugaccaugcccaacaacgagcaguucgacaagcuguacaucuggggcgugcaccaccccggcaccgacaacgaccagaucuuccuguacgcccaggccagcggcagaaucaccgugagcaccaagagaagccagcagaccgugauccccaacaucggcagcagacccagagugagaaacauccccagcagaaucagcaucuacuggaccaucgugaagcccggcgacauccugcugaucaacagcaccggcaaccugaucgcccccagaggcuacuucaagaucagaagcggcaagagcagcaucaugaagagcgacgcccccaucggcaagugcaacagcgagugcaucacccccaacggcagcauccccaacgacaagcccuuccagaacgugaacagaaucaccuacggcgccugccccagauacgugaagcagaacacccugaagcuggccaccggcaugagaaacgugcccgagaagcagaccagaggcaucuucggcgccaucgccggcuucaucgagaacggcugggagggcaugguggacggcugguacggcuucagacaccagaacagcgagggcagaggccaggccgccgaccugaagagcacccaggccgccaucgaccagaucaacggcaagcugaacagacugaucggcaagaccaacgagaaguuccaccagaucgagaaggaguucagcgagguggagggcagaauccaggaccuggagaaguacguggaggacaccaagaucgaccuguggagcuacaacgccgagcugcugguggcccuggagaaccagcacaccaucgaccugaccgacagcgagaugaacaagcuguucgagaagaccaagaagcagcugagagagaacgccgaggacaugggcaacggcugcuucaagaucuaccacaagugcgacaacgccugcaucggcagcaucagaaacggcaccuacgaccacgacguguacagagacgaggcccugaacaacagauuccagaucaagggcguggagcugaagagcggcuacaaggacuggauccuguggaucagcuucgccaucagcugccugcugcugugcguggcccugcugggcuucaucaugugggccugccagaagggcaacaucagaugcaacaucugcaucuga

SEQ ID NO: 162676 - RNA, 1701 nt, Artificial Sequence
  derived and/or modified CDS sequence (opt4) from hemagglutinin__InfluenzaA__ACO94738
augaagaccaucaucgcccugagcuacauccagugccugguguucgcccagaaguuccccggcaacgacaacagcaccgccacccugugccugggccaccacgccgugcccaacggcaccguggugaagaccaucaccaacgaccagaucgaggugaccaacgccaccgagcuggugcagagcagcagcaccggcgagaucugcgacagcccccaccagauccuggacggcgagaacugcacccugaucgacgcccugcugggcgacccccagugcgacggcuuccagaacaagaacugggaccuguucguggagagaagcaaggccuacagcaacugcuaccccuacgacgugcccgacuacgccagccugagaagccugguggccagcagcggcacccuggaguucaacaacgagagcuucaacuggaccggcgugacccagaacggcaccagcagcgccugcaucagaagaagcaacaacagcuucuucagcagacugaacuggcugacccacagcaaguucaaguaccccgcccugaacgugaccaugcccaacaacgagaacuucgacaagcuguacaucuggggcgugcaccaccccggcaccgacaacgaccagaucuuccuguacgccagagccagcggcagaaucaccgugagcaccaagagaagccagcagaccgugauccccaacaucggcagcagacccagagugagaaacauccccagcagaaucagcaucuacuggaccaucgugaagcccggcgacauccugcugaucaacagcaccggcaaccugaucgcccccagaggcuacuucaagaucagaagcggcaagagcagcaucaugagaagcgacgcccccaucggcaagugcaacagcgagugcaucacccccaacggcagcauccccaacgacaagcccuuccagaacgugaacagaaucaccuacggcgccugccccagauacgugaagcagaacacccugaagcuggccaccggcaugagaaacgugcccgagaagcagaccagaggcaucuucggcgccaucgccggcuucaucgagaacggcugggagggcaugguggacggcugguacggcuucagacaccagaacagcgagggcaucggccaggccgccgaccugaagagcacccaggccgccaucgaccagaucaacggcaagcugaacagacugaucggcaagaccaacgagaaguuccaccagaucgagaaggaguucagcgagguggagggcagaauccaggaccuggagaaguacguggaggacaccaagaucgaccuguggagcuacaacgccgagcugcugguggcccuggagaaccagcacaccaucgaccugaccgacagcgagaugaacaagcuguucgagaagaccaagaagcagcugagagagaacgccgaggacaugggcaacggcugcuucaagaucuaccacaagugcgacaacgccugcaucggcagcaucagaaacggcaccuacgaccacgacguguacagagacgaggcccugaacaacagauuccagaucaagggcguggagcugaagagcggcuacaaggacuggauccuguggaucagcuucgccaucagcugcuuccugcugugcaucgcccugcugggcuucaucaugugggccugccagaagggcaacaucagaugcaacaucugcaucuga

SEQ ID NO: 162677 - RNA, 1701 nt, Artificial Sequence; identical to SEQ ID NO: 162597
  derived and/or modified CDS sequence (opt4) from hemagglutinin__InfluenzaA__ACO94760

SEQ ID NO: 162678 - RNA, 1701 nt, Artificial Sequence
  derived and/or modified CDS sequence (opt4) from hemagglutinin__InfluenzaA__ACO94771
augaagaccaucaucgcccugagcuacauccugugccugguguucgcccagaagcugcccggcaacgacaacagcaccgccacccugugccugggccaccacgccgugcccaacggcaccaucgugaagaccaucaccaacgaccagaucgaggugaccaacgccaccgagcuggugcagagcagcagcaccggcgagaucugcgacagcccccaccagauccuggacggcgagaacugcacccugaucgacgcccugcugggcgacccccagugcgacggcuuccagaacaagaagugggaccuguucguggagagaagcaaggccuacagcaacugcuaccccuacgacgugcccgacuacgccagccugagaagccugguggccagcagcggcacccuggaguucaacaacgagagcuucaacuggaccggcgugacccagaacggcaccagcagcgccugcaucagaagaagcaacaacagcuucuucagcagacugaacuggcugacccaccugaaguucaaguaccccgcccugaacgugaccaugcccaacaacgagcaguucgacaagcuguacaucuggggcgugcaccaccccggcaccgacaacgaccagaucuuccuguacgcccaggccagcggcagaaucaccgugagcaccaagagaagccagcagaccgugauccccaacaucggcagcagacccagagugagaaacauccccagcagaaucagcaucuacuggaccaucgugaagcccggcgacauccugcugaucaacagcaccggcaaccugaucgcccccagaggcuacuucaagaucagaagcggcaagagcagcaucaugagaagcgacgcccccaucggcaagugcaacagcgagugcaucacccccaacggcagcauccccaacgacaagcccuuccagaacgugaacagaaucaccuacggcgccugccccagauacgugaagcagaacacccugaagcuggccaccggcaugagaaacgugcccgagaagcagaccagaggcaucuucggcgccaucgccggcuucaucgagaacggcugggagggcaugguggacggcugguacggcuucagacaccagaacagcgagggcagaggccaggccgccgaccugaagagcacccaggccgccaucgaccagaucaacggcaagcugaacagacugaucggcaagaccaacgagaaguuccaccagaucgagaaggaguucagcgagguggagggcagaauccaggaccuggagaaguacguggaggacaccaagaucgaccuguggagcuacaacgccgagcugcugguggcccuggagaaccagcacaccaucgaccugaccgacagcgagaugaacaagcuguucgagaagaccaagaagcagcugagagagaacgccgaggacaugggcaacggcugcuucaagaucuaccacaagugcgacaacgccugcaucggcagcaucagaaacggcaccuacgaccacgacguguacagagacgaggcccugaacaacagauuccagaucaagggcguggagcugaagagcggcuacaaggacuggauccuguggaucagcuucgccaucagcugccugcugcugugcguggcccugcugggcuucaucaugugggccugccagaagggcaacaucagaugcaacaucugcaucuga

SEQ ID NO: 162679 - RNA, 1701 nt, Artificial Sequence; identical to SEQ ID NO: 162494
  derived and/or modified CDS sequence (opt4) from hemagglutinin__InfluenzaA__ACO94782

SEQ ID NO: 162680 - RNA, 1701 nt, Artificial Sequence; identical to SEQ ID NO: 162494
  derived and/or modified CDS sequence (opt4) from hemagglutinin__InfluenzaA__ACO94793

SEQ ID NO: 162681 - RNA, 1698 nt, Artificial Sequence
  derived and/or modified CDS sequence (opt4) from hemagglutinin__InfluenzaA__ACO94804
augaaggugaagcugcuggugcugcugugcaccuucaccgccaccuacgccgacaccaucugcaucggcuaccacgccaacaacagcaccgacaccguggacaccgugcuggagaagaacgugaccgugacccacagcgugaaccugcuggaggacagccacaacggcaagcugugccugcugaagggcaucgccccccugcagcugggcaacugcagcguggccggcuggauccugggcaaccccgagugcgagcugcugaucagcagagagagcuggagcuacaucguggagaagcccaaccccgagaacggcaccugcuaccccggccacuucgccgacuacgaggagcugagagagcagcugagcagcgugagcagcuucgagagauucgagaucuuccccaaggagagcagcuggcccaaccacaccaccaccggcgugagcgccagcugcagccacaacggcgagagcagcuucuacaagaaccugcuguggcugaccggcaagaacggccuguaccccaaccugagcaagagcuacgccaacaacaaggagaaggaggugcuggugcuguggggcgugcaccacccccccaacaucggcaaccagagagcccuguaccacaccgagaacgccuacgugagcguggugagcagccacuacagcagaaaguucacccccgagaucgccaagagacccaaggugagagaccaggagggcagaaucaacuacuacuggacccugcuggagcccggcgacaccaucaucuucgaggccaacggcaaccugaucgcccccagauacgccuucgcccugagcagaggcuucggcagcggcaucaucaacagcaacgcccccauggacggcugcgacgccaagugccagaccccccagggcgccaucaacagcagccugcccuuccagaacgugcaccccgugaccaucggcgagugccccaaguacgugagaagcgccaagcugagaauggugaccggccugagaaacauccccagcauccagagcagaggccuguucggcgccaucgccggcuucaucgagggcggcuggaccggcaugguggacggcugguacggcuaccaccaccagaacgagcagggcagcggcuacgccgccgaccagaagagcacccagaacgccaucaacggcaucaccaacaaggugaacagcgugaucgagaagaugaacacccaguucaccgccgugggcaaggaguucaacaagcuggagagaagaauggagaaccugaacaagaagguggacgacggcuucaucgacaucuggaccuacaacgccgagcugcuggugcugcuggagaacgagagaacccuggacuuccacgacagcuacgugaagaaccuguacgagaaggugaagagccagcugaagaacaacgccaaggagaucggcaacggcugcuucgaguucuaccacaagugcaacgacgagugcauggagagcgugaagaacggcaccuacgacuaccccaaguacagcgaggagagcaagcugaacagagagaagaucgacggcgugaagcuggagagcaugggcguguaccagauccuggccaucuacagcaccguggccagcagccuggugcugcuggugagccugggcgccaucagcuucuggaugugcagcaacggcagccugcagugcagaaucugcaucuga

SEQ ID NO: 162682 - RNA, 1701 nt, Artificial Sequence; identical to SEQ ID NO: 162361
  derived and/or modified CDS sequence (opt4) from hemagglutinin__InfluenzaA__ACO94815

SEQ ID NO: 162683 - RNA, 1701 nt, Artificial Sequence; identical to SEQ ID NO: 162368
  derived and/or modified CDS sequence (opt4) from hemagglutinin__InfluenzaA__ACO94848

SEQ ID NO: 162684 - RNA, 1698 nt, Artificial Sequence; identical to SEQ ID NO: 162548
  derived and/or modified CDS sequence (opt4) from hemagglutinin__InfluenzaA__ACO94859

SEQ ID NO: 162685 - RNA, 1698 nt, Artificial Sequence
  derived and/or modified CDS sequence (opt4) from hemagglutinin__InfluenzaA__ACO94870
augaaggugaagcugcuggugcugcugugcaccuucaccgccaccuacgccgacaccaucugcaucggcuaccacgccaacaacagcaccgacaccguggacaccgugcuggagaagaacgugaccgugacccacagcgugaaccugcuggagaacagccacaacggcaagcugugccugcugaagggcaucgccccccugcagcugggcaacugcagcguggccggcuggauccugggcaaccccgagugcgagcugcugaucagcaaggagagcuggagcuacaucguggagaagcccaaccccgagaacggcaccugcuaccccggccacuucgccgacuacgaggagcugagagagcagcugagcagcgugagcagcuucgagagauucgagaucuuccccaaggagagcagcuggcccaaccacaccgugaccggcgugagcgccagcugcagccacaacggcgagagcagcuucuacagaaaccugcuguggcugaccggcaagaacggccuguaccccaaccugagcaagagcuacgccaacaacaagggcaaggaggugcuggugcuguggggcgugcaccacccccccaacaucggcgaccagaacacccuguaccacaccgagaacgccuacgugagcguggugagcagccacuacagcagaaaguucacccccgagaucgccaagagacccaaggugagagaccaggagggcagaaucaacuacuacuggacccugcuggagcccggcgacaccaucaucuucgaggccaacggcaaccugaucgcccccagauacgccuucgcccugaacagaggcuucggcagcggcaucaucaacagcaacgcccccauggacaagugcgacgccaagugccagaccccccagggcgccaucaacagcagccugcccuuccagaacgugcaccccgugaccaucggcgagugccccaaguacgugagaagcgccaagcugagaauggugaccggccugagaaacauccccagcauccagagcagaggccuguucggcgccaucgccggcuucaucgagggcggcuggaccggcaugguggacggcugguacggcuaccaccaccagaacgagcagggcagcggcuacgccgccgaccagaagagcacccagaacgccaucaacggcaucaccaacaaggugaacagcgugaucgagaagaugaacacccaguucaccgccgugggcaaggaguucaacaagcuggagagaagaauggagaaccugaacaagaagguggacgacggcuucaucgacaucuggaccuacaacgccgagcugcuggugcugcuggagaacgagagaacccuggacuuccacgacagcaacgugaagaaccuguacgagaaggugaagagccagcugaagaacaacgccaaggagaucggcaacggcugcuucgaguucuaccacaagugcaacgacgagugcauggagagcgugaagaacggcaccuacgacuaccccaaguacagcgaggagagcaagcugaacagagagaagaucgacggcgugaagcuggagagcaugggcguguaccagauccuggccaucuacagcaccguggccagcagccuggugcugcuggugagccugggcgccaucagcuucuggaugugcagcaacggcagccugcagugcagaaucugcaucuga

SEQ ID NO: 162686 - RNA, 1701 nt, Artificial Sequence
  derived and/or modified CDS sequence (opt4) from hemagglutinin__InfluenzaA__ACO94881
augaagaccaucaucgcccugagcuacauccugugccugguguucgcccagaagcugcccggcaacgacaacagcaccgccacccugugccugggccaccacgccgugcccaacggcaccaucgugaagaccaucaccaacgaccagaucgaggugaccaacgccaccgagcuggugcagagcagcagcaccggcggcaucugcgacagcccccaccagauccuggacggcgagaacugcacccugaucgacgcccugcugggcgacccccagugcgacggcuuccagaacaagaagugggaccuguucguggagagaagcaaggccuacagcaacugcuaccccuacgacgugcccgacuacgccagccugagaagccugguggccagcagcggcacccuggaguucaacaacgagagcuucgacuggaccggcgugacccagaacggcaccagcagcagcugcaagagaagaagcaacaacagcuucuucagcagacugaacuggcugacccaccugaaguacaaguaccccgcccugaacgugaccaugcccaacaacgagaaguucgacaagcuguacaucuggggcgugcaccaccccggcaccgacagcgaccagaucagccuguacgcccaggccagcggcagaaucaccgugagcaccaagagaagccagcagaccgugauccccaacaucggcagcagacccagagugagagacgugagcagcagaaucagcaucuacuggaccaucgugaagcccggcgacauccugcugaucaacagcaccggcaaccugaucgcccccagaggcuacuucaagaucagaagcggcaagagcagcaucaugagaagcgacgcccccaucggcaagugcaacagcgagugcaucacccccaacggcagcauccccaacgacaagcccuuccagaacgugaacagaaucaccuacggcgccugccccagauacgugaagcagaacacccugaagcuggccaccggcaugagaaacgugcccgagaagcagaccagaggcaucuucggcgccaucgccggcuucaucgagaacggcugggagggcaugguggacggcugguacggcuucagacaccagaacagcgagggcaccggccaggccgccgaccugaagagcacccaggccgccaucaaccagaucaacggcaagcugaacagacugaucggcaagaccaacgagaaguuccaccagaucgagaaggaguucagcgagguggagggcagaauccaggaccuggagaaguacguggaggacaccaagaucgaccuguggagcuacaacgccgagcugcugguggcccuggagaaccagcacaccaucgaccugaccgacagcgagaugaacaagcuguucgagagaaccaagaagcagcugagagagaacgccgaggacaugggcaacggcugcuucaagaucuaccacagaugcgacaacgccugcaucggcagcaucagaaacggcaccuacgaccacgacguguacagagacgaggcccugaacaacagauuccagaucaagggcguggagcugaagagcggcuacaaggacuggauccuguggaucagcuucgccaucagcugcuuccugcugugcguggcccugcugggcuucaucaugugggccugccagaagggcaacaucagaugcaacaucugcaucuga

SEQ ID NO: 162687 - RNA, 1701 nt, Artificial Sequence
  derived and/or modified CDS sequence (opt4) from hemagglutinin__InfluenzaA__ACO94892
augaagaccaucaucgcccugagcuacauccugugccugguguucgcccagaagcugcccggcaacgacaacagcaccgccacccugugccugggccaccacgccgugcccaacggcaccaucgugaagaccaucaccaacgaccagaucgaggugaccaacgccaccgagcuggugcagagcagcagcaccggcggcaucugcgacagcccccaccagauccuggacggcgagaacugcacccugaucgacgcccugcugggcgacccccagugcgacggcuuccagaacaagaagugggaccuguucguggagagaagcaaggccuacagcaacugcuaccccuacgacgugcccgacuacgccagccugagaagccugguggccagcagcggcacccuggaguucaacaacgagagcuucaacuggaccggcgugacccagaacggcaccagcagcgccugccagagaagaagcaacaagagcuucuucagcagacugaacuggcugacccaccugaaguucaaguaccccgcccugaacgugaccaugcccaacaacgagaaguucgacaagcuguacaucuggggcgugcaccaccccggcaccgacaacgaccagaucagccuguacgcccagaccagcggcagaaucaccaucagcaccaagagaagccagcagaccgugauccccaacaucggcagcagacccagagugagagacgugcccagcagaaucagcaucuacuggaccaucgugaagcccggcgacauccugcugaucaacagcaccggcaaccugaucgcccccagaggcuacuucaagaucagaagcggcaagagcagcaucaugagaagcgacgcccccaucgugaagugcaacagcgagugcaucacccccaacggcagcauccccaacgacaagcccuuccagaacgugaacagaaucaccuacggcgccugccccagauacgugaagcagaacacccugaagcuggccaccggcaugagaaacgugcccgagagacagaccagaggcaucuucggcgccaucgccggcuucaucgagaacggcugggagggcaugguggacggcugguacggcuucagacaccagaacagcgagggcaccggccaggccgccgaccugaagagcacccaggccgccaucaaccagaucaacggcaagcugaacagacugaucggcaagaccaacgagaaguuccaccagaucgagaaggaguucagcgagguggagggcagaauccaggaccuggagaaguacguggaggacaccaagaucgaccuguggagcuacaacgccgagcugcugguggcccuggagaaccagcacaccaucgaccugaccgacagcgagaugaacaagcuguucgagagaaccaagaagcagcugagagagaacgccgaggacaugggcaacggcugcuucaagaucuaccacaagugcgacaacgccugcaucggcagcaucagaaacggcaccuacgaccacgacguguacagagacgaggcccugaacaacagauuccagaucaagggcguggagcugaagagcggcuacaaggacuggauccuguggaucagcuucgccaucagcugcuuccugcugugcguggcccugcugggcuucaucaugugggccugccagaagggcaacaucagaugcaacaucugcaucuga

SEQ ID NO: 162688 - RNA, 1701 nt, Artificial Sequence
  derived and/or modified CDS sequence (opt4) from hemagglutinin__InfluenzaA__ACO94903
augaagaccaucaucgcccugagcuacauccugugccugguguucgcccagaagcugcccggcaacgacaacagcaccgccacccugugccugggccaccacgccgugcccaacggcaccaucgugaagaccaucaccaacgaccagaucgaggugaccaacgccaccgagcuggugcagagcagcagcaccggcggcaucugcgacagcccccaccagauccuggacggcgagaacugcacccugaucgacgcccugcugggcgacccccagugcgacggcuuccagaacaagaagugggaccuguucguggagagaagcgaggccuacagcaacugcuaccccuacgacgugcccgacuacgccagccugagaagccugguggccagcagcggcacccuggaguucaacaacgagagcuucaacuggaccggcgugacccagaacggcaccagcagcgccugcaagagaagaagcaacaagagcuucuucagcagacugaacuggcugacccaccugaaguucaaguaccccgcccugaacgugaccaugcccaacaacgagaaguucgacaagcuguacaucuggggcgugcaccaccccggcaccgacaacgaccagaucagccuguacgcccaggccagcggcagaaucaccgugagcaccaagagaagccagcagaccgugauccccaacaucggcagcagacccagagugagagacgugcccagcagaaucagcaucuacuggaccaucgugaagcccggcgacauccugcugaucaacagcaccggcaaccugaucgcccccagaggcuacuucaagaucagaagcggcaagagcagcaucaugagaagcgacgcccccaucggcaagugcaacagcgagugcaucacccccaacggcagcauccccaacgacaagcccuuccagaacgugaacagaaucaccuacggcgccugccccagauacgugaagcagaacacccugaagcuggccaccggcaugagaaacgugcccgagaagcagaccagaggcaucuucggcgccaucgccggcuucaucgagaacggcugggagggcaugguggacggcugguacggcuucagacaccagaacagcgagggcaccggccaggccgccgaccugaagagcacccaggccgccaucaaccagaucaacggcaagcugaacagacugaucggcaagaccaacgagaaguuccaccagaucgagaaggaguucagcgagguggagggcagaauccaggaccuggagaaguacguggaggacaccaagaucgaccuguggagcuacaacgccgagcugcugguggcccuggagaaccagcacaccaucgaccugaccgacagcgagaugaacaagcuguucgagagaaccaagaagcagcugagagagaacgccgaggacaugggcaacggcugcuucaagaucuaccacaagugcgacaacgccugcaucggcagcaucagaaacggcaccuacgaccacgacguguacagagacgaggcccugaacaacagauuccagaucaagggcguggagcugaagagcggcuacaaggacuggauccuguggaucagcuucgccaucagcugcuuccugcugugcguggcccugcugggcuucaucaugugggccugccagaagggcaacaucagaugcaacaucugcaucuga

SEQ ID NO: 162689 - RNA, 1701 nt, Artificial Sequence
  derived and/or modified CDS sequence (opt4) from hemagglutinin__InfluenzaA__ACO94925
augaagaccaucaucgcccugagcuacauccugugccugguguucgcccagaagcugcccggcaacgacaacagcaccgccacccugugccugggccaccacgccgugcccaacggcaccguggugaagaccaucaccaacgaccagaucgaggugaccaacgccaccgagcuggugcagagcagcagcaccggcggcaucugcgacagcccccaccagauccuggacggcgagaacugcacccugaucgacgcccugcugggcgacccccagugcgacggcuuccagaacaagaagugggaccuguucguggagagaagcaaggccuacagcaacugcuaccccuacgacgugcccgacuacgccagccugagaagccugguggccagcagcggcacccuggaguucaacaacgagagcuucaacuggaccggcgugacccagaacggcaccagcagcgccugcaagagaagaagcaacaagagcuucuucagcagacugaacuggcugacccaccugaaguucaaguaccccgcccugaacgugaccaugcccaacaacgagaaguucgacaagcuguacaucuggggcgugcaccaccccggcaccgacaacgaccagaucagccuguacgcccaggccagcggcagaaucaccgugagcaccaagagaagccagcagaccgugauccccaacaucggcagcagacccagagugagagacgugcccagcagaaucagcaucuacuggaccaucgugaagcccggcgacauccugcugaucaacagcaccggcaaccugaucgcccccagaggcuacuucaagaucagaagcggcaagagcagcaucaugagaagcgacgcccccaucggcaagugcaacagcgagugcaucacccccaacggcagcauccccaacgacaagcccuuccagaacgugaacagaaucaccuacggcgccugccccagauacgugaagcagaacacccugaagcuggccaccggcaugagaaacgugcccgagaagcagaccagaggcaucuucggcgccaucgccggcuucaucgagaacggcugggagggcaugguggacggcugguacggcuucagacaccagaacagcgagggcaccggccaggccgccgaccugaagagcacccaggccgccaucaaccagaucaacggcaagcugaacagacugaucggcaagaccaacgagaaguuccaccagaucgagaaggaguucagcgagguggagggcagaauccaggaccuggagaaguacguggaggacaccaagaucgaccuguggagcuacaacgccgagcugcugguggcccuggagaaccagcacaccaucgaccugaccgacagcgagaugaacaagcuguucgagagaaccaagaagcagcugagagagaacgccgaggacaugggcaacggcugcuucaagaucuaccacaagugcgacaacgccugcaucggcagcaucagaaacggcaccuacgaccacgacguguacagagacgaggcccugaacaacagauuccagaucaagggcguggagcugaagagcggcuacaaggacuggauccuguggaucagcuucgccaucagcugcuuccugcugugcguggcccugcugggcuucaucaugugggccugccagaagggcaacaucagaugcaacaucugcaucuga

SEQ ID NO: 162690 - RNA, 1701 nt, Artificial Sequence
  derived and/or modified CDS sequence (opt4) from hemagglutinin__InfluenzaA__ACO94936
augaagaccaucaucgcccugagcuacauccugugccugguguucgcccagaagcugcccggcaacgacaacagcaccgccacccugugccugggccaccacgccgugcccaacggcaccaucgugaagaccaucaccaacgaccagaucgaggugaccaacgccaccgagcuggugcagagcagcagcaccggcggcaucugcgacagcccccaccagauccuggacggcgaggacugcacccugaucgacgcccugcugggcgacccccagugcgacggcuuccagaacaagaagugggaccuguucguggagagaagcaaggccuacagcaacugcuaccccuacgacgugcccgacuacgccagccugagaagccugguggccagcagcggcacccuggaguucaacaacgagagcuucgacuggaccggcgugacccagaacggcaccagcagcagcugcaagagaagaagcaacaacagcuucuucagcagacugaacuggcugacccaccugaaguacaaguaccccgcccugaacgugaccaugcccaacaacgagaaguucgacaagcuguacaucuggggcgugcaccaccccggcaccgacagcgaccagaucagccuguacgcccaggccagcggcagaaucaccgugagcaccaagagaagccagcagaccgugauccccaacaucggcagcagacccagagugagagacgugagcagcagaaucagcaucuacuggaccaucgugaagcccggcgacauccugcugaucaacagcaccggcaaccugaucgcccccagaggcuacuucaagaucagaagcggcaagagcagcaucaugagaagcgacgcccccaucggcaagugcaacagcgagugcaucacccccaacggcagcauccccaacgacaagcccuuccagaacgugaacagaaucaccuacggcgccugccccagauacgugaagcagaacacccugaagcuggccaccggcaugagaaacgugcccgagaagcagaccagaggcaucuucggcgccaucgccggcuucaucgagaacggcugggagggcaugguggacggcugguacggcuucagacaccagaacagcgagggcaccggccaggccgccgaccugaagagcacccaggccgccaucaaccagaucaacggcaagcugaacagacugaucggcaagaccaacgagaaguuccaccagaucgagaaggaguucagcgagguggagggcagaauccaggaccuggagaaguacguggaggacaccaagaucgaccuguggagcuacaacgccgagcugcugguggcccuggagaaccagcacaccaucgaccugaccgacagcgagaugaacaagcuguucgagagaaccaagaagcagcugagagagaacgccgaggacaugggcaacggcugcuucaagaucuaccacaagugcgacaacgccugcaucggcagcaucagaaacggcaccuacgaccacgacguguacagagacgaggcccugaacaacagauuccagaucaagggcguggagcugaagagcggcuacaaggacuggauccuguggaucagcuucgccaucagcugcuuccugcugugcguggcccugcugggcuucaucaugugggccugccagaagggcaacaucagaugcaacaucugcaucuga

SEQ ID NO: 162691 - RNA, 1701 nt, Artificial Sequence
  derived and/or modified CDS sequence (opt4) from hemagglutinin__InfluenzaA__ACO94947
augaagaccaucaucgcccugagcuacauccugugccugguguucgcccagaagcugcccggcaacgacaacagcaccgccacccugugccugggccaccacgccgugcccaacggcaccaucgugaagaccaucaccaacgaccagaucgaggugaccaacgccaccgagcuggugcagagcagcagcaccggcggcaucugcgacagcccccaccagauccuggacggcgagaacugcacccugaucgacgcccugcugggcgacccccagugcgacggcuuccagaacaagaagugggaccuguucguggagagaagcaaggccuacagcaacugcuaccccuacgacgugcccgacuacgccagccugagaagccugguggccagcagcggcacccuggaguucaacaacgagagcuucaacuggaccggcgugacccagaacggcaccagcagcgccugcaagagaagaagcaacaagagcuucuucagcagacugaacuggcugacccaccugaaguucaaguaccccgcccugaacgugaccaugcccaacaacgagaaguucgacaagcuguacaucuggggcgugcaccaccccggcaccgacaacgaccagaucagccuguacgcccaggccagcggcagaaucaccgugagcaccaagagaagccagcagaccgugauccccaacaucggcagcagacccagagugagagacgugcccagcagaaucagcaucuacuggaccaucgugaagcccggcgacauccugcugaucaacagcaccggcaaccugaucgcccccagaggcuacuucagaaucagaagcggcaagagcagcaucaugagaagcgacgcccccaucggcaagugcaacagcgagugcaucacccccaacggcagcauccccaacgacaagcccuuccagaacgugaacagaaucaccuacggcgccugccccagauacgugaagcagaacacccugaagcuggccaccggcaugagaaacgugcccgagaagcagaccagaggcaucuucggcgccaucgccggcuucaucgagaacggcugggagggcaugguggacggcugguacggcuucagacaccagaacagcgagggcaccggccaggccgccgaccugaagagcacccaggccgccaucaaccagaucaacggcaagcugaacagacugaucggcaagaccaacgagaaguuccaccagaucgagaaggaguucagcgagguggagggcagaauccaggaccuggagaaguacguggaggacaccaagaucgaccuguggagcuacaacgccgagcugcugguggcccuggagaaccagcacaccaucgaccugaccgacagcgagaugaacaagcuguucgagagaaccaagaagcagcugagagagaacgccgaggacaugggcaacggcugcuucaagaucuaccacaagugcgacaacgccugcaucggcagcaucagaaacggcaccuacgaccacgacguguacagagacgaggcccugaacaacagauuccagaucaagggcguggagcugaagagcggcuacaaggacuggauccuguggaucagcuucgccaucagcugcuuccugcugugcguggcccugcugggcuucaucaugugggccugccagaagggcaacaucagaugcaacaucugcaucuga

SEQ ID NO: 162692 - RNA, 1701 nt, Artificial Sequence
  derived and/or modified CDS sequence (opt4) from hemagglutinin__InfluenzaA__ACO95153
augaagaccaucaucgcccugagcuacauccugugccugguguucgcccagaagcugcccggcaacgacaacagcaccgccacccugugccugggccaccacgccgugcccaacggcaccaucgugaagaccaucaccaacgaccagaucgaggugaccaacgccaccgagcuggugcagagcagcagcaccggcggcaucugcgacagcccccaccagauccuggacggcgagaacugcacccugaucgacgcccugcugggcgacccccagugcgacggcuuccagaacaagaagugggaccuguucguggagagaagcaaggccuacagcaacugcuaccccuacgacgugcccgacuacgccagccugagaagccugguggccagcagcggcacccuggaguucaacaacgagagcuucaacuggaccggcgugacccagaacggcaccagcagcgccugcaagagaagaagcaacaacagcuucuucagcagacugaacuggcugacccaccugaaguucaaguaccccgcccugaacgugaccaugcccaacaacgagaacuucgacaagcuguacaucuggggcgugcaccaccccggcaccgacaacgaccagaucagccuguacgcccaggccagcggcagaaucaccgugagcaccaagagaagccagcagaccgugauccccaacaucggcagcagacccagagugagagacaucagcagcagaaucagcaucuacuggaccaucgugaagcccggcgacauccugcugaucaacagcaccggcaaccugaucgcccccagaggcuacuucaagaucagaagcggcaagagcagcaucaugagaagcgacgcccccaucggcaagugcaacagcgagugcaucacccccaacggcagcauccccaacgacaagcccuuccagaacgugaacagaaucaccuacggcgccugccccagauacgugaagcagaacacccugaagcuggccaccggcaugagaaacgugcccgagacccagaccagaggcaucuucggcgccaucgccggcuucaucgagaacggcugggagggcaugguggacggcugguacggcuucagacaccagaacagcgagggcaccggccaggccgccgaccugaagagcacccaggccgccaucaaccagaucaacggcaagcugaacagacugaucggcaagaccaacgagaaguuccaccagaucgagaaggaguucagcgagguggagggcagaauccaggaccuggagaaguacguggaggacaccaagaucgaccuguggagcuacaacgccgagcugcugguggcccuggagaaccagcacaccaucgaccugaccgacagcgagaugaacaagcuguucgagagaaccaagaagcagcugagagagaacgccgaggacaugggcaacggcugcuucaagaucuaccacaagugcgacaacgccugcaucggcagcaucagaaacggcaccuacgaccacgacguguacagagacgaggcccugaacaacagauuccagaucaagggcguggagcugaagagcggcuacaaggacuggauccuguggaucagcuucgccaucagcugcuuccugcugugcguggcccugcugggcuucaucaugugggccugccagaagggcaacaucagaugcaacaucugcaucuga

SEQ ID NO: 162693 - RNA, 1701 nt, Artificial Sequence; identical to SEQ ID NO: 162658
  derived and/or modified CDS sequence (opt4) from hemagglutinin__InfluenzaA__ACO95171

SEQ ID NO: 162694 - RNA, 1701 nt, Artificial Sequence
  derived and/or modified CDS sequence (opt4) from hemagglutinin__InfluenzaA__ACO95193
augaagaccaucaucgcccugagcuacauccugugccugguguucgcccagaagcugcccggcaacgacaagagcaccgccacccugugccugggccaccacgccgugcccaacggcaccaucgugaagaccaucaccaacgaccagaucgaggugaccaacgccaccgagcuggugcagagcagcagcaccggcggcaucugcgacagcccccaccagauccuggacggcgagaacugcacccugaucgacgcccugcugggcgacccccagugcgacggcuuccagaacaagaagugggaccuguucguggagagaagcaaggccuacagcaacugcuaccccuacgacgugcccgacuacgccagccugagaagccugguggccagcagcggcacccuggaguucaacaacgagaacuucaacuggaccggcgugacccagaacggcaccagcagcgccugcaagagaagaagcaacaacagcuucuucagcagacugaacuggcugacccaccugaaguucaaguaccccgcccugaacgugaccaugcccaacaacgagaaguucgacaagcuguacaucuggggcgugcaccaccccggcaccgacaacgaccagaucagccuguacgcccaggccagcggcagaaucaccgugagcaccaagagaagccagcagaccgugauccccaacaucggcagcagacccagagugagagacaucagcagcagaaucagcaucuacuggaccaucgugaagcccggcgacauccugcugaucaacagcaccggcaaccugaucgcccccagaggcuacuucaagaucagaagcggcaagagcagcaucaugagaagcgacgcccccaucggcaagugcagcagcgagugcaucacccccaacggcagcauccccaacgacaagcccuuccagaacgugaacagaaucaccuacggcgccugccccagauacgugaagcagaacacccugaagcuggccaccggcaugagaaacgugcccgagacccagaccagaggcaucuucggcgccaucgccggcuucaucgagaacggcugggagggcaugguggacggcugguacggcuucagacaccagaacagcgagggcaccggccaggccgccgaccugaagagcacccaggccgccaucaaccagaucaacggcaagcugaacagacugaucggcaagaccaacgagaaguuccaccagaucgagaaggaguucagcgagguggagggcagaauccaggaccuggagaaguacguggaggacaccaagaucgaccuguggagcuacaacgccgagcugcugguggcccuggagaaccagcacaccaucgaccugaccgacagcgagaugaacaagcuguucgagagaaccaagaagcagcugagagagaacgccgaggacaugggcaacggcugcuucaagaucuaccacaagugcgacaacgccugcaucggcagcaucagaaacggcaccuacgaccacgacguguacagagacgaggcccugaacaacagauuccagaucaagggcguggagcugaagagcggcuacaaggacuggauccuguggaucagcuucgccaucagcugcuuccugcugugcguggcccugcugggcuucaucaugugggccugccagaagggcaacaucagaugcaacaucugcaucuga

SEQ ID NO: 162695 - RNA, 1701 nt, Artificial Sequence; identical to SEQ ID NO: 162657
  derived and/or modified CDS sequence (opt4) from hemagglutinin__InfluenzaA__ACO95204

SEQ ID NO: 162696 - RNA, 1701 nt, Artificial Sequence
  derived and/or modified CDS sequence (opt4) from hemagglutinin__InfluenzaA__ACO95215
augaagaccaucaucgcccugagcuacauccugugccugguguucgcccagaagcugcccggcaacgacaacagcaccgccacccugugccugggccaccacgccgugcccaacggcaccaucgugaagaccaucaccaacgaccagaucgaggugaccaacgccaccgagcuggugcagagcagcagcaccggcggcaucugcgacagcccccaccagauccuggacggcgagaacugcacccugaucgacgcccugcugggcgacccccagugcgacggcuuccagaacaagaagugggaccuguucguggagagaagcaaggccuacagcaacugcuaccccuacgacgugcccgacuacgccagccugagaagccugaucgccagcagcggcacccuggaguucaacaacgagagcuucaacuggaccggcgugacccagaacggcaccagcagcgccugcaagagaagaagcaacaacagcuucuucagcagacugaacuggcugacccaccugaaguucaaguaccccgcccugaacgugaccaugcccaacaacgagaaguucgacaagcuguacaucuggggcgugcaccaccccggcaccgacaacgaccagaucagccuguacgcccaggccagcggcagaaucaccgugagcaccaagagaagccagcagaccgugauccccaacaucggcagcagacccagagugagagacaucagcagcagaaucagcaucuacuggaccaucgugaagcccggcgacauccugcugaucaacagcaccggcaaccugaucgcccccagaggcuacuucaagaucagaagcggcaagagcagcaucaugagaagcgacgcccccaucggcaagugcaacagcgagugcaucacccccaacggcagcauccccaacgacaagcccuuccagaacgugaacagaaucaccuacggcgccugccccagauacgugaagcagaacacccugaagcuggccaccggcaugagaaacgugcccgagacccagaccagaggcaucuucggcgccaucgccggcuucaucgagaacggcugggagggcaugguggacggcugguacggcuucagacaccagaacagcgagggcaccggccaggccgccgaccugaagagcacccaggccgccaucaaccagaucaacggcaagcugaacagacugaucggcaagaccaacgagaaguuccaccagaucgagaaggaguucagcgagguggagggcagaauccaggaccuggagaaguacguggaggacaccaagaucgaccuguggagcuacaacgccgagcugcugguggcccuggagaaccagcacaccaucgaccugaccgacagcgagaugaacaagcuguucgagagaaccaagaagcagcugagagagaacgccgaggacaugggcaacggcugcuucaagaucuaccacaagugcgacaacgccugcaucggcagcaucagaaacgagaccuacgaccacgacguguacagagacgaggcccugaacaacagauuccagaucaagagcguggagcugaagagcggcuacaaggacuggauccuguggaucagcuucgccaucagcugcuuccugcugugcguggcccugcugggcuucaucaugugggccugccagaagggcaacaucagaugcaacaucugcaucuga

SEQ ID NO: 162697 - RNA, 1701 nt, Artificial Sequence; identical to SEQ ID NO: 160341
  derived and/or modified CDS sequence (opt4) from hemagglutinin__InfluenzaA__ACO95226

SEQ ID NO: 162698 - RNA, 1701 nt, Artificial Sequence; identical to SEQ ID NO: 160690
  derived and/or modified CDS sequence (opt4) from hemagglutinin__InfluenzaA__ACO95248

SEQ ID NO: 162699 - RNA, 1701 nt, Artificial Sequence
  derived and/or modified CDS sequence (opt4) from hemagglutinin__InfluenzaA__ACO95270
augaagaccaucaucgcccugagcuacauccugugccugguguucacccagaagcugcccggcaacgacaacagcaccgccacccugugccugggccaccacgccgugcccaacggcaccaucgugaagaccaucaccaacgaccagaucgaggugaccaacgccaccgagcuggugcagagcagcagcaccggcgagaucugcgacagcccccaccagauccuggacggcgagaacugcacccugaucgacgcccugcugggcgacccccagugcgacggcuuccagaacaagaagugggaccuguucguggagagaagcaaggccuacagcaacugcuaccccuacgacgugcccgacuacgccagccugagaagccugguggccagcagcggcacccuggaguucaacaacgagagcuucaacuggaccggcgugacccagaacggcaccagcagcgccugcaucagaagaagcaacaacagcuucuucagcagacugaacuggcugacccaccugaaguucaaguaccccgcccugaacgugaccaugcccaacaacgagaaguucgacaagcuguacaucuggggcgugcaccaccccgugaccgacaacaaccagaucuuccuguacgcccaggccagcggcagaaucaccgugagcaccaagagaagccagcagaccgugauccccaacaucggcagcagacccagagugagaaacauccccagcagaaucagcaucuacuggaccaucgugaagcccggcgacauccugcugaucaacagcaccggcaaccugaucgcccccagaggcuacuucaagaucagaagcggcaagagcagcaucaugagaagcgacgcccccaucggcaagugcaacagcgagugcaucacccccaacggcagcauccccaacgacaagcccuuccagaacgugaacagaaucaccuacggcgccugccccagauacgugaagcagaacacccugaagcuggccaccggcaugagaaacgugcccgagaagcagaccagaggcaucuucggcgccaucgccggcuucaucgagaacggcugggagggcaugguggacggcugguacggcuucagacaccagaacagcgagggcaucggccaggccgccgaccugaagagcacccaggccgccaucgaccagaucaacggcaagcugaacagacugaucggcaagaccaacgagaaguuccaccagaucgagaaggaguucagcgagguggagggcagaauccaggaccuggagaaguacguggaggacaccaagaucgaccuguggagcuacaacgccgagcugcugguggcccuggagaaccagcacaccaucgaccugaccgacagcgagaugaacaagcuguucgagaagaccaagaagcagcugagagagaacgccgaggacaugggcaacggcugcuucaagaucuaccacaagugcgacaacgccugcaucggcagcaucagaaacggcaccuacgaccacgacguguacagagacgaggcccugaacaacagauuccagaucaagggcguggagcugaagagcggcuacaaggacuggauccuguggaucagcuucgccaucagcugcuuccugcugugcguggcccugcugggcuucaucaugugggccugccagaagggcaacaucagaugcaacaucugcaucuga

SEQ ID NO: 162700 - RNA, 1701 nt, Artificial Sequence; identical to SEQ ID NO: 162494
  derived and/or modified CDS sequence (opt4) from hemagglutinin__InfluenzaA__ACO95281

SEQ ID NO: 162701 - RNA, 1701 nt, Artificial Sequence
  derived and/or modified CDS sequence (opt4) from hemagglutinin__InfluenzaA__ACO95292
augaagaccaucaucgcccugagcuacauccugugccugguguucgcccagaagcugcccggcaacgacaacagcaccgccacccugugccugggccaccacgccgugcccaacggcaccaucgugaagaccaucaccaacgaccagaucgaggugaccaacgccaccgagcuggugcagagcagcagcaccggcgagaucugcgacagcccccaccagauccuggacggcgagaacugcacccugaucgacgcccugcugggcgacccccagugcgacggcuuccagaacaagaagugggaccuguucguggagagaagcaaggccuacagcaacugcuaccccuacgacgugcccgacuacgccagccugagaagccugguggccagcagcggcacccuggaguucaacaacgagagcuucaacuggaccggcgugacccagaacggcaccagcagcgccugcaucagaagaagcaacaacagcuucuucagcagacugaacuggcugacccaccugaaguucaaguaccccgcccugaacgugaccaugcccaacaacgagcaguucgacaagcuguacaucuggggcgugcaccaccccggcaccgacaacgaccagaucuuccuguacgcccaggccagcggcagaaucaccgugagcaccaagagaagccagcagaccgugauccccaacaucggcagcagacccagagugagaaacauccccagcagaaucagcaucuacuggaccaucgugaagcccggcgacauccugcugaucaacagcaccggcaaccugaucgcccccagaggcuacuucaagauccagagcggcaagagcagcaucaugagaagcgacgcccccaucggcaagugcaacagcgagugcaucacccccaacggcagcauccccaacgacaagcccuuccagaacgugaacagaaucaccuacggcgccugccccagauacgugaagcagaacacccugaagcuggccaccggcaugagaaacgugcccgagaagcagaccagaggcaucuucggcgccaucgccggcuucaucgagaacggcugggagggcaugguggacggcugguacggcuucagacaccagaacagcgagggcagaggccaggccgccgaccugaagagcacccaggccgccaucgaccagaucaacggcaagcugaacagacugaucggcaagaccaacgagaaguuccaccagaucgagaaggaguucagcgagguggagggcagaauccaggaccuggagaaguacguggaggacaccaagaucgaccuguggagcuacaacgccgagcugcugguggcccuggagaaccagcacaccaucgaccugaccgacagcgagaugaacaagcuguucgagaagaccaagaagcagcugagagagaacgccgaggacaugggcaacggcugcuucaagaucuaccacaagugcgacaacgccugcaucggcagcaucagaaacggcaccuacgaccacgacguguacagagacgaggcccugaacaacagauuccagaucaagggcguggagcugaagagcggcuacaaggacuggauccuguggaucagcuucgccaucagcugcuuccugcugugcguggcccugcugggcuucaucaugugggccugccagaagggcaacaucagaugcaacaucugcaucuga

SEQ ID NO: 162702 - RNA, 1701 nt, Artificial Sequence; identical to SEQ ID NO: 162597
  derived and/or modified CDS sequence (opt4) from hemagglutinin__InfluenzaA__ACO95303

SEQ ID NO: 162703 - RNA, 1698 nt, Artificial Sequence
  derived and/or modified CDS sequence (opt4) from hemagglutinin__InfluenzaA__ACO95382
augaaggugaagcugcuggugcugcugugcaccuucaccgccaccuacgccgacaccaucugcaucggcuaccacgccaacaacagcaccgacaccguggacaccgugcuggagaagaacgugaccgugacccacagcgugaaccugcuggagaacagccacaacggcaagcugugccugcugaagggcaucgccccccugcagcugggcaacugcagcguggccggcuggauccugggcaaccccgagugcgagcugcugaucagcaaggagagcuggagcuacaucguggagaagcccaaccccgagaacggcaccugcuaccccggccacuucgccgacuacgaggagcugagagagcagcugagcagcgugagcagcuucgagagauucgagaucuuccccaaggagggcagcuggcccaaccacaccgugaccggcgugagcgccagcugcagccacaacggcgagagcagcuucuacagaaaccugcuguggcugaccggcaagaacggccuguaccccaaccugagcaagagcuacgccaacaacaaggagaaggaggugcuggugcuguggggcgugcaccacccccccaacaucggcgaccagaaggcccuguaccacaccgagaacgccuacgugagcguggugagcagccacuacagcagaaaguucacccccgagaucgccaagagacccaaggugagagaccaggagggcagaaucaacuacuacuggacccugcuggagcccggcgacaccaucaucuucgaggccaacggcaaccugaucgcccccagauacgccuucgcccugagcagaggcuucggcagcggcaucaucaacagcaacgcccccauggacaagugcgacgccaagugccagaccccccagggcgccaucaacagcagccugcccuuccagaacgugcaccccgugaccaucggcgagugccccaaguacgugagaagcgccaagcugagaauggugaccggccugagaaacauccccagcauccagagcagaggccuguucggcgccaucgccggcuucaucgagggcggcuggaccggcaugguggacggcugguacggcuaccaccaccagaacgagcagggcagcggcuacgccgccgaccagaagagcacccagaacgccaucaacggcaucaccaacaaggugaacagcgugaucgagaagaugaacacccaguucaccgccgugggcaaggaguucaacaagcuggagagaagaauggagaaccugaacaagaagguggacgacggcuucaucgacaucuggaccuacaacgccgagcugcuggugcugcuggagaacgagagaacccuggacuuccacgacagcaacgugaagaaccuguacgagaaggugaagagccagcugaagaacaacgccaaggagaucggcaacggcugcuucgaguucuaccacaagugcaacgacgagugcauggagagcgugaagaacggcaccuacgacuaccccaaguacagcgaggagagcaagcugaacagagagaagaucgacggcgugaagcuggagagcaugggcguguaccagauccuggccaucuacagcaccguggccagcagccuggugcugcuggugagccugggcgccaucagcuucuggaugugcagcaacggcagccugcagugcagaaucugcaucuga

SEQ ID NO: 162704 - RNA, 1698 nt, Artificial Sequence
  derived and/or modified CDS sequence (opt4) from hemagglutinin__InfluenzaA__ACO95415
augaaggugaagcugcuggugcugcugugcaccuucaccgccaccuacgccgacaccaucugcaucggcuaccacgccaacaacagcaccgacaccaucgacaccgugcuggagaagaacgugaccgugacccacagcgugaaccugcuggagaacagccacaacggcaagcugugccugcugaagggcaucgccccccugcagcugggcaacugcagcguggccggcuggauccugggcaaccccgagugcgagcugcugaucagcaaggagagcuggagcuacaucguggagaagcccaaccccgagaacggcaccugcuaccccggccacuucgccgacuacgaggagcugagagagcagcugagcagcgugagcagcuucgagagauucgagaucuuccccaaggagagcagcuggcccaaccacaccgugaccggcgugagcgccagcugcagccacaacggcgagagcagcuucuacagaaaccugcuguggcugaccggcaagaacggccuguaccccaaccugagcaagagcuacgccaacaacaagggcaaggaggugcuggugcuguggggcgugcaccacccccccaacaucggcgaccagaacacccuguaccacaccgagaacgccuacgugagcguggugagcagccacuacagcagaaaguucacccccgagaucgccaagagacccaaggugagagaccaggagggcagaaucaacuacuacuggacccugcuggagcccggcgacaccaucaucuucgaggccaacggcaaccugaucgcccccagauacgccuucgcccugagcagaggcuucggcagcggcaucaucaacagcaacgcccccauggacaagugcgacgccaagugccagaccccccagggcgccaucaacagcagccugcccuuccagaacgugcaccccgugaccaucggcgagugccccaaguacgugagaagcgccaagcugagaauggugaccggccugagaaacauccccagcauccagagcagaggccuguucggcgccaucgccggcuucaucgagggcggcuggaccggcaugguggacggcugguacggcuaccaccaccagaacgagcagggcagcggcuacgccgccgaccagaagagcacccagaacgccaucaacggcaucaccaacaaggugaacagcgugaucgagaagaugaacacccaguucaccgccgugggcaaggaguucaacaagcuggagagaagaauggagaaccugaacaagaagguggacgacggcuucaucgacaucuggaccuacaacgccgagcugcuggugcugcuggagaacgagagaacccuggacuuccacgacagcaacgugaagaaccuguacgagaaggugaagagccagcugaagaacaacgccaaggagaucggcaacggcugcuucgaguucuaccacaagugcaacgacgagugcauggagagcgugaagaacggcaccuacgacuaccccaaguacagcgaggagagcaagcugaacagagagaagaucgacggcgugaagcuggagagcaugggcguguaccagauccuggccaucuacagcaccguggccagcagccuggugcugcuggugagccugggcgccaucagcuucuggaugugcagcaacggcagccugcagugcagaaucugcaucuga

SEQ ID NO: 162705 - RNA, 1701 nt, Artificial Sequence
  derived and/or modified CDS sequence (opt4) from hemagglutinin__InfluenzaA__ACO95426
augaagaccaucaucgcccugagcuacauccugugccugguguucgcccagaagcugcccggcaacgacaacagcaccgccacccugugccugggccaccacgccgugcccaacggcaccaucgugaagaccaucaccaacgaccagaucgaggugaccaacgccaccgagcuggugcagagcagcagcaccggcggcaucugcgacagcccccaccagauccuggacggcgagaacugcacccugaucgacgcccugcugggcgacccccagugcgacggcuuccagaacaagaagugggaccuguucguggagagaagcaaggccuacagcaacugcuaccccuacgacgugcccgacuacgccagccugagaagccugguggccagcagcggcacccuggaguucaacaacgagagcuucgacuggaccggcgugacccagaacggcaccagcagcagcugcaagagaagaagcaacaacagcuucuucagcagacugaacuggcugacccaccugaaguacaaguaccccgcccugaacgugaccaugcccaacaacgagaaguucgacaagcuguacaucuggggcgugcaccaccccggcaccgacagcgaccagaucagccuguacgcccaggccagcggcagaaucaccgugagcaccaagagaagccagcagaccgugauccccaacaucggcagcagacccagagugagagacgugagcagcagaaucagcaucuacuggaccaucgugaagcccggcgacauccugcugaucaacagcaccggcaaccugaucgcccccagaggcuacuucaagaucagaagcggcaagagcagcaucaugagaagcgacgcccccaucggcaagugcaacagcgagugcaucacccccaacggcagcauccccaacgacaagcccuuccagaacgugaacagaaucaccuacggcgccugccccagauacgugaagcagaacacccugaagcuggccaccggcaugagaaacgugcccgagaagcagaccagaggcaucuucggcgccaucgccggcuucaucgagaacggcugggagggcaugguggacggcugguacggcuucagacaccagaacagcgagggcaccggccaggccgccgaccugaagagcacccaggccgccaucaaccagaucaacggcaagcugaacagacugaucggcaagaccaacgagaaguuccaccagaucgagaaggaguucagcgagguggagggcagaauccaggaccuggagaaguacguggaggacaccaagaucgaccuguggagcuacaacgccgagcugcugguggcccuggagaaccagcacaccaucgaccugaccgacagcgagaugaacaagcuguucgagagaaccaagaagcagcugagagagaacgccgaggacaugggcaacggcugcuucaagaucuaccacaagugcgacaacgccugcaucggcagcaucagaaacggcaccuacgaccacgacguguacagagacgaggcccugaacaacagauuccagaucaagggcguggagcugaagagcggcuacaaggacuggauccuguggaucagcuucgccaucagcugcuuccugcugugcguggcccugcugggcuucaucaugugggccugccagaagggcaacaucagaugcaacaucugcaucuga

SEQ ID NO: 162706 - RNA, 1701 nt, Artificial Sequence; identical to SEQ ID NO: 161855
  derived and/or modified CDS sequence (opt4) from hemagglutinin__InfluenzaA__ACO95437

SEQ ID NO: 162707 - RNA, 1701 nt, Artificial Sequence
  derived and/or modified CDS sequence (opt4) from hemagglutinin__InfluenzaA__ACO95448
augaagaccaucaucgcccugagcuacauccugugccugguguucgcccagaagcugcccggcaacgacaacagcaccgccacccugugccugggccaccacgccgugcccaacggcaccaucgugaagaccaucaccaacgaccagaucgaggugaccaacgccaccgagcuggugcagagcagcagcaccggcggcaucugcgacagcccccaccagauccuggacggcgagaacugcacccugaucgacgcccugcugggcgacccccagugcgacggcuuccagaacaagaagugggaccuguucguggagagaagcaaggccuacagcaacugcuaccccuacgacgugcccgacuacgccagccugagaagccugaucgccagcagcggcacccuggaguucaacaacgagagcuucaacuggaccggcgugacccagaacggcaccagcagcgccugcaagagaagaagcaacaacagcuucuucagcagacugaacuggcugacccaccugaaguucaaguaccccgcccugaacgugaccaugcccaacaacgaggaguucgacaagcuguacaucuggggcgugcaccaccccggcaccgacaacgaccagaucaaccuguacgcccaggccagcggcagaaucaccgugagcaccaagagaagccagcagaccgugauccccaacaucggcagcagacccagagugagagacauccccagcagaaucagcaucuacuggaccaucgugaagcccggcgacauccugcugaucaacagcaccggcaaccugaucgcccccagaggcuacuucaagaucagaagcggcaagagcagcaucaugagaagcgacgcccccaucggcaagugcaacagcgagugcaucacccccaacggcagcauccccaacgacaagcccuuccagaacgugaacagaaucaccuacggcgccugccccagauacgugaagcagaacacccugaagcuggccaccggcaugagaaacgugcccgagaagcagaccagaggcaucuucggcgccaucgccggcuucaucgagaacggcugggagggcaugguggacggcugguacggcuucagacaccagaacagcgagggcaucggccaggccgccgaccugaagagcacccaggccgccaucgaccagaucaacggcaagcugaacagacugaucggcaagaccaacgagaaguuccaccagaucgagaaggaguucagcgagguggagggcagaauccaggaccuggagaaguacguggaggacaccaagaucgaccuguggagcuacaacgccgagcugcugguggcccuggagaaccagcacaccaucgaccugaccgacagcgagaugaacaagcuguucgagagaaccaagaagcagcugagagagaacgccgaggacaugggcaacggcugcuucaagaucuaccacaagugcgacaacgccugcaucggcagcaucagaaacggcaccuacgaccacgacguguacagagacgaggcccugaacaacagauuccagaucaagggcguggagcugaagagcggcuacaaggacuggauccuguggaucagcuucgccaucagcugcuuccugcugugcguggcccugcugggcuucaucaugugggccugccagaagggcaacaucagaugcaacaucugcaucuga

SEQ ID NO: 162708 - RNA, 1701 nt, Artificial Sequence; identical to SEQ ID NO: 160690
  derived and/or modified CDS sequence (opt4) from hemagglutinin__InfluenzaA__ACO95459

SEQ ID NO: 162709 - RNA, 1701 nt, Artificial Sequence
  derived and/or modified CDS sequence (opt4) from hemagglutinin__InfluenzaA__ACO95470
augaagaccaucaucgcccugagcuacauccugugccugguguucgcccagaagcugcccggcaacgacaacagcaccgccacccugugccugggccaccacgccgugcccaacggcaccaucgugaagaccaucaccaacgaccagaucgaggugaccaacgccaccgagcuggugcagagcagcagcaccggcggcaucugcgacagcccccaccagauccuggacggcgagaacugcacccugaucgacgcccugcugggcgacccccagugcgacggcuuccagaacaagaagugggaccuguucguggagagaagcaaggccuacagcaacugcuaccccuacgacgugcccgacuacgccagccugagaagccugguggccagcagcggcacccuggaguucaacaacgagagcuucaacuggaccggcgugacccagaacggcaccagcagcgccugcaagagaagaagcaacaacagcuucuucagcagacugaacuggcugacccaccugaaguucaaguaccccgcccugaacgugaccaugcccaacaacgagaaguucgacaagcuguacaucuggggcgugcaccaccccggcaccgacaacgaccagaucuuccuguacgcccaggccagcggcagaaucaccgugagcaccaagagaagccagcagaccgugauccccaacaucggcagcagacccagagugagaaacauccccagcagaaucagcaucuacuggaccaucgugaagcccggcgacauccugcugaucaacagcaccggcaaccugaucgcccccagaggcuacuucaagaucagaagcggcaagagcagcaucaugagaagcgacgcccccaucggcagaugcaacagcgagugcaucacccccaacggcagcauccccaacgacaagcccuuccagaacgugaacagaaucaccuacggcgccugccccagauacgugaagcagaacacccugaagcuggccaccggcaugagaaacgugcccgagaagcagaccagaggcaucuucggcgccaucgccggcuucaucgagaacggcugggagggcaugguggacggcugguacggcuucagacaccagaacagcgagggcaucggccaggccgccgaccugaagagcacccaggccgccaucaaccagaucaacggcaagcugaacagacugaucggcaagaccaacgagaaguuccaccagaucgagaaggaguucagcgagguggagggcagaauccaggaccuggagaaguacguggaggacaccaagaucgaccuguggagcuacaacgccgagcugcugguggcccuggagaaccagcacaccaucgaccugaccgacagcgagaugaacaagcuguucgagagaaccaagaagcagcugagagagaacgccgaggacaugggcaacggcugcuucaagaucuaccacaagugcgacaacgccugcaucggcagcaucagaaacggcaccuacgaccacgacguguacagagacgaggcccugaacaacagauuccagaucaagggcguggagcugaagagcggcuacaaggacuggauccuguggaucagcuucgccaucagcugcuuccugcugugcguggcccugcugggcuucaucaugugggccugccagaagggcaacaucagaugcaacaucugcaucuga

SEQ ID NO: 162710 - RNA, 1701 nt, Artificial Sequence
  derived and/or modified CDS sequence (opt4) from hemagglutinin__InfluenzaA__ACO95481
augaagaccaucaucgcccugagcuacauccugugccugguguucgcccagaagcugcccggcaacgacaacagcaccgccacccugugccugggccaccacgccgugcccaacggcaccaucgugaagaccaucaccaacgaccagaucgaggugaccaacgccaccgagcuggugcagagcagcagcaccggcggcaucugcgacagcccccaccagauccuggacggcgagaacugcacccugaucgacgcccugcugggcgacccccagugcgacggcuuccagaacaagaagugggaccuguucguggagagaagcaaggccuacagcaacugcuaccccuacgacgugcccgacuacgccagccugagaagccugguggccagcagcggcacccuggaguucaacaacgagagcuucaacuggaccggcgugacccagaacggcaccagcagcgccugcaagagaagaagcaacaacagcuucuucagcagacugaacuggcugacccaccugaaguucaaguaccccgcccugaacgugaccaugcccaacaacgagaaguucgacaagcuguacaucuggggcgugcaccaccccggcaccgacaacgaccagaucuuccuguacgcccaggccagcggcagaaucaccgugagcaccaagagaagccagcagaccgugauccccaacaucggcagcagacccagagugagaaacauccccagcagaaucagcaucuacuggaccaucgugaagcccggcgacauccugcugaucaacagcaccggcaaccugaucgcccccagaggcuacuucaagaucagaagcggcaagagcagcaucaugagaagcgacgcccccaucggcaagugcaacagcgagugcaucacccccaacggcagcauccccaacgacaagcccuuccagaacgugaacagaaucaccuacggcgccugccccagauacgugaagcagaacacccugaagcuggccaccggcaugagaaaccugcccgagaagcagaccagaggcaucuucggcgccaucgccggcuucaucgagaacggcugggagggcaugguggacggcugguacggcuucagacaccagaacagcgagggcaucggccaggccgccgaccugaagagcacccaggccgccaucaaccagaucaacggcaagcugaacagacugaucggcaagaccaacgagaaguuccaccagaucgagaaggaguucagcgagguggagggcagaauccaggaccuggagaaguacguggaggacaccaagaucgaccuguggagcuacaacgccgagcugcugguggcccuggagaaccagcacaccaucgaccugaccgacagcgagaugaacaagcuguucgagagaaccaagaagcagcugagagagaacgccgaggacaugggcaacggcugcuucaagaucuaccacaagugcgacaacgccugcaucggcagcaucagaaacggcaccuacgaccacgacguguacagagacgaggcccugaacaacagauuccagaucaagggcguggagcugaagagcggcuacaaggacuggauccuguggaucagcuucgccaucagcugcuuccugcugugcguggcccugcugggcuucaucaugugggccugccagaagggcaacaucagaugcaacaucugcaucuga

SEQ ID NO: 162711 - RNA, 1701 nt, Artificial Sequence; identical to SEQ ID NO: 160690
  derived and/or modified CDS sequence (opt4) from hemagglutinin__InfluenzaA__ACO95492

SEQ ID NO: 162712 - RNA, 1701 nt, Artificial Sequence; identical to SEQ ID NO: 160690
  derived and/or modified CDS sequence (opt4) from hemagglutinin__InfluenzaA__ACO95503

SEQ ID NO: 162713 - RNA, 1701 nt, Artificial Sequence; identical to SEQ ID NO: 160690
  derived and/or modified CDS sequence (opt4) from hemagglutinin__InfluenzaA__ACO95514

SEQ ID NO: 162714 - RNA, 1701 nt, Artificial Sequence; identical to SEQ ID NO: 160690
  derived and/or modified CDS sequence (opt4) from hemagglutinin__InfluenzaA__ACO95536

SEQ ID NO: 162715 - RNA, 1701 nt, Artificial Sequence; identical to SEQ ID NO: 160690
  derived and/or modified CDS sequence (opt4) from hemagglutinin__InfluenzaA__ACO95547

SEQ ID NO: 162716 - RNA, 1701 nt, Artificial Sequence
  derived and/or modified CDS sequence (opt4) from hemagglutinin__InfluenzaA__ACP41963
augaaggccauccugguggugcugcuguacaccuucgccaccgccaacgccgacacccugugcaucggcuaccacgccaacaacagcaccgacaccguggacaccgugcuggagaagaacgugaccgugacccacagcgugaaccugcuggaggacaagcacaacggcaagcugugcaagcugagaggcguggccccccugcaccugggcaagugcaacaucgccggcuggauccugggcaaccccgagugcgagagccugagcaccgccagcagcuggagcuacaucguggagaccagcagcagcgacaacggcaccugcuaccccggcgacuucaucgacuacgaggagcugagagagcagcugagcagcgugagcagcuucgagagauucgagaucuuccccaagaccagcagcuggcccaaccacgacagcaacaagggcgugaccgccgccugcccccacgccggcgccaagagcuucuacaagaaccugaucuggcuggugaagaagggcaacagcuaccccaagcugagcaagagcuacaucaacgacaagggcaaggaggugcuggugcuguggggcauccaccaccccagcaccagcgccgaccagcagagccuguaccagaacgccgacgccuacguguucgugggcagcagcagauacagcaagaaguucaagcccgagaucgccaucagacccaaggugagagaccaggagggcagaaugaacuacuacuggacccugguggagcccggcgacaagaucaccuucgaggccaccggcaaccugguggugcccagauacgccuucgccauggagagaaacgccggcagcggcaucaucaucagcgacacccccgugcacgacugcaacaccaccugccagacccccaagggcgccaucaacaccagccugcccuuccagaacauccaccccaucaccaucggcaagugccccaaguacgugaagagcaccaagcugagacuggccaccggccugagaaacgugcccagcauccagagcagaggccuguucggcgccaucgccggcuucaucgagggcggcuggaccggcaugguggacggcugguacggcuaccaccaccagaacgagcagggcagcggcuacgccgccgaccugaagagcacccagaacgccaucgacgagaucaccaacaaggugaacagcgugaucgagaagaugaacacccaguucaccgccgugggcaaggaguucaaccaccuggagaagagaaucgagaaccugaacaagaagguggacgacggcuuccuggacaucuggaccuacaacgccgagcugcuggugcugcuggagaacgagagaacccuggacuaccacgacagcaacgugaagaaccuguacgagaaggugagaagccagcugaagaacaacgccaaggagaucggcaacggcugcuucgaguucuaccacaagugcgacaacaccugcauggagagcgugaagaacggcaccuacgacuaccccaaguacagcgaggaggccaagcugaacagagaggagaucgacggcgugaagcuggagagcaccagaaucuaccagauccuggccaucuacagcaccguggccagcagccuggugcugguggugagccugggcgccaucagcuucuggaugugcagcaacggcagccugcagugcagaaucugcaucuga

SEQ ID NO: 162717 - RNA, 1698 nt, Artificial Sequence; identical to SEQ ID NO: 162703
  derived and/or modified CDS sequence (opt4) from hemagglutinin__InfluenzaA__ACP44192

SEQ ID NO: 162718 - RNA, 1698 nt, Artificial Sequence; identical to SEQ ID NO: 162703
  derived and/or modified CDS sequence (opt4) from hemagglutinin__InfluenzaA__ACP44203

SEQ ID NO: 162719 - RNA, 1698 nt, Artificial Sequence
  derived and/or modified CDS sequence (opt4) from hemagglutinin__InfluenzaA__ACP44225
augaaggugaagcugcuggugcugcugugcaccuucaccgccaccuacgccgacaccaucugcaucggcuaccacgccaacaacagcaccgacaccguggacaccgugcuggagaagaacgugaccgugacccacagcgugaaccugcuggagaacagccacaacggcaagcugugccugcugaagggcaucgccccccugcagcugggcaacugcagcguggccggcuggauccugggcaaccccgagugcggccugcugaucagcaaggagagcuggagcuacaucguggagaagcccaaccccgagaacggcaccugcuaccccggccacuucgccgacuacgaggagcugagagagcagcugagcagcgugagcagcuucgagagauucgagaucuuccccaaggagagcagcuggcccaaccacaccgugaccggcgugagcgccagcugcagccacaacggcgagagcagcuucuacagaaaccugcuguggcugaccggcaagaacggccuguaccccaaccugagcaagagcuacgccaacaacaaggagaaggaggugcuggugcuguggggcgugcaccacccccccaacaucggcgaccagaaggcccuguaccacaccgagaacgccuacgugagcguggugagcagccacuacagcagaaaguucacccccgagaucgccaagagacccaaggugagagaccaggagggcagaaucaacuacuacuggacccugcuggagcccggcgacaccaucaucuucgaggccaacggcaaccugaucgcccccagauacgccuucgcccugagcagaggcuucggcagcggcaucaucaacagcaacgcccccauggacaagugcgacgccaagugccagaccccccagggcgccaucaacagcagccugcccuuccagaacgugcaccccgugaccaucggcgagugccccaaguacgugagaagcgccaagcugagaauggugaccggccugagaaacauccccagcauccagagcagaggccuguucggcgccaucgccggcuucaucgagggcggcuggaccggcaugguggacggcugguacggcuaccaccaccagaacgagcagggcagcggcuacgccgccgaccagaagagcacccagaacgccaucaacggcaucaccaacaaggugaacagcgugaucgagaagaugaacacccaguucaccgccgugggcaaggaguucaacaagcuggagagaagaauggagaaccugaacaagaagguggacgacggcuucaucgacaucuggaccuacaacgccgagcugcuggugcugcuggagaacgagagaacccuggacuuccacgacagcaacgugaagaaccuguacgagaaggugaagagccagcugaagaacaacgccaaggagaucggcaacggcugcuucgaguucuaccacaagugcaacgacgagugcauggagagcgugaagaacggcaccuacgacuaccccaaguacagcaaggagagcaagcugaacagagagaagaucgacggcgugaagcuggagagcaugggcguguaccagauccuggccaucuacagcaccguggccagcagccuggugcugcuggugagccugggcgccaucagcuucuggaugugcagcaacggcagccugcagugcagaaucugcaucuga

SEQ ID NO: 162720 - RNA, 1701 nt, Artificial Sequence
  derived and/or modified CDS sequence (opt4) from hemagglutinin__InfluenzaA__ACP44236
augaagaccaucaucgcccugagcuacauccugugccugguguucgcccagaagcugcccggcaacgacaacagcaccgccacccugugccugggccaccacgccgugcccaacggcaccaucgugaagaccaucaccaacgaccagaucgaggugaccaacgccaccgagcuggugcagagcagcagcaccggcggcaucugcgacagcccccaccagauccuggacggcgagaacugcacccugaucgacgcccugcugggcgacccccagugcgacggcuuccagaacaagaagugggaccuguucguggagagaagcaaggccuacagcaacugcuaccccuacgacgugcccgacuacgccagccugagaagccugguggccagcagcggcacccuggaguucaacaacgagagcuucaacuggaccggcgugacccagaacggcaccagcagcgccugcaagagaagaagcgacaagagcuucuucagcagacugaacuggcugacccaccugaaguucaaguaccccgcccugaacgugaccaugcccaacaacgagaaguucgacaagcuguacaucuggggcgugcaccaccccggcaccgacaacgaccagaucagccuguacgcccaggccagcggcagaaucaccgugagcaccaagagaagccagcagaccgugauccccaacaucggcagcagacccagagugagagacgugcccagcagaaucagcaucuacuggaccaucgugaagcccggcgacauccugcugaucaacagcaccggcaaccugaucgcccccagaggcuacuucaagaucagaagcggcaagagcagcaucaugagaagcgacgcccccaucggcaagugcaacagcgagugcaucacccccaacggcagcauccccaacgacaagcccuuccagaacgugaacagaaucaccuacggcgccugccccagauacgugaagcagaacacccugaagcuggccaccggcaugagaaacgugcccgagaagcagaccagaggcaucuucggcgccaucgccggcuucaucgagaacggcugggagggcaugguggacggcugguacggcuucagacaccagaacagcgagggcaccggccaggccgccgaccugaagagcacccaggccgccaucaaccagaucaacggcaagcugaacagacugaucggcaagaccaacgagaaguuccaccagaucgagaaggaguucagcgagguggagggcagaauccaggaccuggagaaguacguggaggacaccaagaucgaccuguggagcuacaacgccgagcugcugguggcccuggagaaccagcacaccaucgaccugaccgacagcgagaugaacaagcuguucgagagaaccaagaagcagcugagagagaacgccgaggacaugggcaacggcugcuucaagaucuaccacaagugcgacaacgccugcaucggcagcaucagaaacggcaccuacgaccacgacguguacagagacgaggcccugaacaacagauuccagaucaagggcguggagcugaagagcggcuacaaggacuggauccuguggaucagcuucgccaucagcugcuuccugcugugcguggcccugcugggcuucaucaugugggccugccagaagggcaacaucagaugcaacaucugcaucuga

SEQ ID NO: 162721 - RNA, 1701 nt, Artificial Sequence; identical to SEQ ID NO: 162657
  derived and/or modified CDS sequence (opt4) from hemagglutinin__InfluenzaA__ACP44247

SEQ ID NO: 162722 - RNA, 1701 nt, Artificial Sequence; identical to SEQ ID NO: 160690
  derived and/or modified CDS sequence (opt4) from hemagglutinin__InfluenzaA__ACP44258

SEQ ID NO: 162723 - RNA, 1701 nt, Artificial Sequence; identical to SEQ ID NO: 160690
  derived and/or modified CDS sequence (opt4) from hemagglutinin__InfluenzaA__ACP44269

SEQ ID NO: 162724 - RNA, 1701 nt, Artificial Sequence; identical to SEQ ID NO: 162716
  derived and/or modified CDS sequence (opt4) from hemagglutinin__InfluenzaA__ACQ44554

SEQ ID NO: 162725 - RNA, 1701 nt, Artificial Sequence; identical to SEQ ID NO: 162716
  derived and/or modified CDS sequence (opt4) from hemagglutinin__InfluenzaA__ACQ44556

SEQ ID NO: 162726 - RNA, 1701 nt, Artificial Sequence; identical to SEQ ID NO: 162716
  derived and/or modified CDS sequence (opt4) from hemagglutinin__InfluenzaA__ACQ45338

SEQ ID NO: 162727 - RNA, 1701 nt, Artificial Sequence
  derived and/or modified CDS sequence (opt4) from hemagglutinin__InfluenzaA__ACQ55359
augaaggccauccugguggugcugcuguacaccuucgccaccgccaacgccgacacccugugcaucggcuaccacgccaacaacagcaccgacaccguggacaccgugcuggagaagaacgugaccgugacccacagcgugaaccugcuggaggacaagcacaacggcaagcugugcaagcugagaggcguggccccccugcaccugggcaagugcaacaucgccggcuggauccugggcaaccccgagugcgagagccugagcaccgccagcagcuggagcuacaucguggagacccccagcagcgacaacggcaccugcuaccccggcgacuucaucgacuacgaggagcugagagagcagcugagcagcgugagcagcuucgagagauucgagaucuuccccaagaccagcagcuggcccaaccacgacagcaacaagggcgugaccgccgccugcccccacgccggcgccaagagcuucuacaagaaccugaucuggcuggugaagaagggcaacagcuaccccaagcugagcaagagcuacaucaacgacaagggcaaggaggugcuggugcuguggggcauccaccaccccagcaccagcgccgaccagcagagccuguaccagaacgccgacgccuacguguucgugggcagcagcagauacagcaagaaguucaagcccgagaucgccaucagacccaaggugagagaccaggagggcagaaugaacuacuacuggacccugguggagcccggcgacaagaucaccuucgaggccaccggcaaccugguggugcccagauacgccuucgccauggagagaaacgccggcagcggcaucaucaucagcgacacccccgugcacgacugcaacaccaccugccagacccccaagggcgccaucaacaccagccugcccuuccagaacauccaccccaucaccaucggcaagugccccaaguacgugaagagcaccaagcugagacuggccaccggccugagaaacauccccagcauccagagcagaggccuguucggcgccaucgccggcuucaucgagggcggcuggaccggcaugguggacggcugguacggcuaccaccaccagaacgagcagggcagcggcuacgccgccgaccugaagagcacccagaacgccaucgacgagaucaccaacaaggugaacagcgugaucgagaagaugaacacccaguucaccgccgugggcaaggaguucaaccaccuggagaagagaaucgagaaccugaacaagaagguggacgacggcuuccuggacaucuggaccuacaacgccgagcugcuggugcugcuggagaacgagagaacccuggacuaccacgacagcaacgugaagaaccuguacgagaaggugagaagccagcugaagaacaacgccaaggagaucggcaacggcugcuucgaguucuaccacaagugcgacaacaccugcauggagagcgugaagaacggcaccuacgacuaccccaaguacagcgaggaggccaagcugaacagagaggagaucgacggcgugaagcuggagagcaccagaaucuaccagauccuggccaucuacagcaccguggccagcagccuggugcugguggugagccugggcgccaucagcuucuggaugugcagcaacggcagccugcagugcagaaucugcaucuga

SEQ ID NO: 162728 - RNA, 1701 nt, Artificial Sequence; identical to SEQ ID NO: 162716
  derived and/or modified CDS sequence (opt4) from hemagglutinin__InfluenzaA__ACQ55361

SEQ ID NO: 162729 - RNA, 1701 nt, Artificial Sequence
  derived and/or modified CDS sequence (opt4) from hemagglutinin__InfluenzaA__ACQ63223
augaaggccauccugguggugcugcuguacaccuucgccaccgccaacgccgacacccugugcaucggcuaccacgccaacaacagcaccgacaccguggacaccgugcuggagaagaacgugaccgugacccacagcgugaaccugcuggaggacaagcacaacggcaagcugugcaagcugagaggcguggccccccugcaccugggcaagugcaacaucgccggcuggauccugggcaaccccgagugcgagagccugagcaccgccagcagcuggagcuacaucguggagaccagcagcagcgacaacggcaccugcuaccccggcgacuucaucgacuacgaggagcugagagagcagcugagcagcgugagcagcuucgagagauucgagaucuuccccaagaccagcagcuggcccaaccacgacagcaacaagggcgugaccgccgccugcccccacgccggcgccaagagcuucuacaagaaccugaucuggcuggugaagaagggcaacagcuaccccaagcugagcaagagcuacaucaacgacaagggcaaggaggugcuggugcuguggggcauccaccaccccagcaccagcgccgaccagcagagccuguaccagaacgccgacgccuacguguucgugggcaccagcagauacagcaagaaguucaagcccgagaucgccaucagacccaaggugagagaccaggagggcagaaugaacuacuacuggacccugguggagcccggcgacaagaucaccuucgaggccaccggcaaccugguggugcccagauacgccuucgccauggagagaaacgccggcagcggcaucaucaucagcgacacccccgugcacgacugcaacaccaccugccagacccccaagggcgccaucaacaccagccugcccuuccagaacauccaccccaucaccaucggcaagugccccaaguacgugaagagcaccaagcugagacuggccaccggccugagaaacgugcccagcauccagagcagaggccuguucggcgccaucgccggcuucaucgagggcggcuggaccggcaugguggacggcugguacggcuaccaccaccagaacgagcagggcagcggcuacgccgccgaccugaagagcacccagaacgccaucgacgagaucaccaacaaggugaacagcgugaucgagaagaugaacacccaguucaccgccgugggcaaggaguucaaccaccuggagaagagaaucgagaaccugaacaagaagguggacgacggcuuccuggacaucuggaccuacaacgccgagcugcuggugcugcuggagaacgagagaacccuggacuaccacgacagcaacgugaagaaccuguacgagaaggugagaagccagcugaagaacaacgccaaggagaucggcaacggcugcuucgaguucuaccacaagugcgacaacaccugcauggagagcgugaagaacggcaccuacgacuaccccaaguacagcgaggaggccaagcugaacagagaggagaucgacggcgugaagcuggagagcaccagaaucuaccagauccuggccaucuacagcaccguggccagcagccuggugcugguggugagccugggcgccaucagcuucuggaugugcagcaacggcagccugcagugcagaaucugcaucuga

SEQ ID NO: 162730 - RNA, 1701 nt, Artificial Sequence; identical to SEQ ID NO: 162729
  derived and/or modified CDS sequence (opt4) from hemagglutinin__InfluenzaA__ACQ63239

SEQ ID NO: 162731 - RNA, 1701 nt, Artificial Sequence; identical to SEQ ID NO: 162729
  derived and/or modified CDS sequence (opt4) from hemagglutinin__InfluenzaA__ACQ63244

SEQ ID NO: 162732 - RNA, 1701 nt, Artificial Sequence; identical to SEQ ID NO: 162729
  derived and/or modified CDS sequence (opt4) from hemagglutinin__InfluenzaA__ACQ63257

SEQ ID NO: 162733 - RNA, 1701 nt, Artificial Sequence
  derived and/or modified CDS sequence (opt4) from hemagglutinin__InfluenzaA__ACQ65691
augaagaccaucaucgcccugagcuacauccugugccugguguucgcccagaagcugcccggcaacgacaacagcaccgccacccugugccugggccaccacgccgugcccaacggcaccaucgugaagaccaucaccaacgaccagaucgaggugaccaacgccaccgagcuggugcagagcagcagcaccggcggcaucugcgacagcccccaccagauccuggacggcgagaacugcacccugaucgacgcccugcugggcgacccccagugcgacggcuuccagaacaagaagugggaccuguucguggagagaagcaaggccuacagcaacugcuaccccuacgacgugcccgacuacgccagccugagaagccugguggccagcagcggcacccuggaguucaacaacgagagcuucaacuggaccggcgugacccagaacggcaccagcagcagcugcaagagaggcagcgacaacagcuucuucagcagacugaacuggcugacccaccugaaguucaaguaccccgcccugaacgugaccaugcccaacaacgagaaguucgacaagcuguacaucuggggcgugcaccaccccggcaccgacaacgaccagaucuuccccuacgcccaggccagcggcagaaucaccgugagcaccaagagaagccagcagaccgugauccccaacaucggcagcagacccagagugagagacauccccagcagaaucagcaucuacuggaccaucgugaagcccggcgacauccugcugaucaacagcaccggcaaccugaucgcccccagaggcuacuucaagaucagaagcggcaagagcagcaucaugagaagcgacgcccccaucggcaagugcaacagcgagugcaucacccccaacggcagcauccccaacgacaagcccuuccagaacgugaacagaaucaccuacggcgccugccccagauacgugaagcagaacacccugaagcuggccaccggcaugagaaacgugcccgagaagcagaccagaggcaucuucggcgccaucgccggcuucaucgagaacggcugggagggcaugguggacggcugguacggcuucagacaccagaacagcgagggcaucggccaggccgccgaccugaagagcacccaggccgccaucaaccagaucaacggcaagcugaacagacugaucggcaagaccaacgagaaguuccaccagaucgagaaggaguucagcgagguggagggcagaauccaggaccuggagaaguacguggaggacaccaagaucgaccuguggagcuacaacgccgagcugcugguggcccuggagaaccagcacaccaucgaccugaccgacagcgagaugaacaagcuguucgagagaaccaagaagcagcugagagagaacgccgaggacaugggcaacggcugcuucaagaucuaccacaagugcgacaacgccugcaucggcagcaucagaaacggcaccuacgaccacgacguguacagagacgaggcccugaacaacagauuccagaucaagggcguggagcugaagagcggcuacaaggacuggauccuguggaucagcuucaccaucagcugcuuccugcugugcguggcccugcugggcuucaucaugugggccugccagaagggcaacaucagaugcaacaucugcaucuga

SEQ ID NO: 162734 - RNA, 1701 nt, Artificial Sequence; identical to SEQ ID NO: 162494
  derived and/or modified CDS sequence (opt4) from hemagglutinin__InfluenzaA__ACQ65713

SEQ ID NO: 162735 - RNA, 1701 nt, Artificial Sequence
  derived and/or modified CDS sequence (opt4) from hemagglutinin__InfluenzaA__ACQ65724
augaagaccaucaucgcccugagcuacauccugugccugguguucgcccagaagcugcccggcaacgacaacagcaccgccacccugugccugggccaccacgccgugcccaacggcaccaucgugaagaccaucaccaacgaccagaucgaggugaccaacgccaccgagcuggugcagagcagcagcaccggcgagaucugcgacagcccccaccagauccuggacggcgagaacugcacccugaucgacgcccugcugggcgacccccagugcgacggcuuccagaacaagaagugggaccuguucguggagagaagcaaggccuacagcaacugcuaccccuacgacgugcccgacuacgccagccugagaagccugguggccagcagcggcacccuggaguucaacaacgagagcuucaacugggccggcgugacccagaacggcaccagcagcgccugcaucagaagaagcaacaacagcuucuucagcagacugaacuggcugacccaccugaaguucaaguaccccgcccugaacgugaccaugcccaacaacgagcaguucgacaagcuguacaucuggggcgugcaccaccccggcaccgacaacgaccagaucuuccuguacgcccaggccagcggcagaaucaccgugagcaccaagagaagccagcagaccgugauccccaacaucggcagcagacccagagugagaaacauccccagcagaaucagcaucuacuggaccaucgugaagcccggcgacauccugcugaucaacagcaccggcaaccugaucgcccccagaggcuacuucaagaucagaagcggcaagagcagcaucaugagaagcgacgcccccaucggcaagugcaacagcgagugcaucacccccaacggcagcauccccaacgacaagcccuuccagaacgugaacagaaucaccuacggcgccugccccagauacgugaagcagaacacccugaagcuggccaccggcaugagaaacgugcccgagaagcagaccagaggcaucuucggcgccaucgccggcuucaucgagaacggcugggagggcaugguggacggcugguacggcuucagacaccagaacagcgagggcagaggccaggccgccgaccugaagagcacccaggccgccaucgaccagaucaacggcaagcugaacagacugaucggcaagaccaacgagaaguuccaccagaucgagaaggaguucagcgagguggagggcagaauccaggaccuggagaaguacguggaggacaccaagaucgaccuguggagcuacaacgccgagcugcugguggcccuggagaaccagcacaccaucgaccugaccgacagcgagaugaacaagcuguucgagaagaccaagaagcagcugagagagaacgccgaggacaugggcaacggcugcuucaagaucuaccacaagugcgacaacgccugcaucggcagcaucagaaacggcaccuacgaccacgacguguacagagacgaggcccugaacaacagauuccagaucaagggcguggagcugaagagcggcuacaaggacuggauccuguggaucagcuucgccaucagcugcuuccugcugugcguggcccugcugggcuucaucaugugggccugccagaagggcaacaucagaugcaacaucugcaucuga

SEQ ID NO: 162736 - RNA, 1701 nt, Artificial Sequence
  derived and/or modified CDS sequence (opt4) from hemagglutinin__InfluenzaA__ACQ65747
augaagaccaucaucgcccugagcuacauccugugccugguguucgcccagaagcugcccggcaacgacaacagcaccgccacccugugccugggccaccacgccgugcccaacggcaccaucgugaagaccaucaccaacgaccagaucgaggugaccaacgccaccgagcuggugcagagcagcagcaccggcgagaucugcgacagcccccaccagauccuggacggcgagaacugcacccugaucgacgcccugcugggcgacccccagugcgacggcuuccagaacaagaagugggaccuguucguggagagaagcaaggccuacagcaacugcuaccccuacgacgugcccgacuacgccagccugagaagccugguggccagcagcggcacccuggaguucaacaacgagagcuucaacuggaccggcgugacccagaacggcaccagcagcgccugcaucagaagaaccaacaacagcuucuucagcagacugaacuggcugacccaccugaaguucaaguaccccgcccugaacgugaccaugcccaacaacgagaaguucgacaagcuguacaucuggggcgugcaccaccccggcaccgacaacgaccagaucuuccuguacgcccaggccagcggcagaaucaccgugagcaccaagagaagccagcagaccgugauccccaacaucggcagcagacccagagugagaaacauccccagcagaaucagcaucuacuggaccaucgugaagcccggcgacauccugcugaucaacagcaccggcaaccugaucgcccccagaggcuacuucaagaucagaagcggcaagagcagcaucaugagaagcgacgcccccaucggcaagugcaacagcgagugcaucacccccaacggcagcauccccaacgacaagcccuuccagaacgugaacagaaucaccuacggcgccugccccagauacgugaagcagaacacccugaagcuggccaccggcaugagaaacgugcccgagaagcagaccagaggcaucuucggcgccaucgccggcuucaucgagaacggcugggagggcaugauggacggcugguacggcuucagacaccagaacagcgagggcaucggccaggccgccgaccugaagagcacccaggccgccaucgaccagaucaacggcaagcugaacggccugaucggcaagaccaacgagaaguuccaccagaucgagaaggaguucagcgagguggagggcagaauccaggaccuggagaaguacguggaggacaccaagaucgaccuguggagcuacaacgccgagcugcugguggcccuggagaaccagcacaccaucgaccugaccgacagcgagaugaacaagcuguucgagaagaccaagaagcagcugagagagaacgccgaggacaugggcaacggcugcuucaagaucuaccacaagugcgacaacgccugcaucggcagcaucagaaacggcaccuacgaccacgacguguacagagacgaggcccugaacaacagauuccagaucaagggcguggagcugaagagcggcuacaaggacuggauccuguggaucagcuucgccaucagcugcuuccugcugugcguggcccugcugggcuucaucaugugggccugccagaagggcaacaucagaugcaacaucugcaucuga

SEQ ID NO: 162737 - RNA, 1698 nt, Artificial Sequence
  derived and/or modified CDS sequence (opt4) from hemagglutinin__InfluenzaA__ACQ65758
augaaggugaagcugcuggugcugcugugcaccuucaccgccaccuacgccgacaccaucugcaucggcuaccacgccaacaacagcaccgacaccguggacaccgugcuggagaagaacgugaccgugacccacagcgugaaccugcuggagaacagccacaacggcaagcugugccugcugaagggcaucgccccccugcagcugggcaacugcagcguggccggcuggauccugggcaaccccgagugcgagcugcugaucagcaaggagagcuggagcuacgugguggagaagcccaaccccgagaacggcaccugcuaccccggccacuucgccgacuacgaggagcugagagagcagcugagcagcgugagcagcuucgagagauucgagaucuuccccaaggagagcagcuggcccaaccacaccgugaccggcgugagcgccagcugcagccacaacggcgagagcagcuucuacagaaaccugcuguggcugaccggcaagaacggccuguaccccaaccugagcaagagcuacgccaacaacaagggcaaggaggugcuggugcuguggggcgugcaccacccccccaacaucggcgaccagaacacccuguaccacaccgagaacgccuacgugagcguggugagcagccacuacagcagaaaguucacccccgagaucgccaagagacccaaggugagagaccaggagggcagaaucaacuacuacuggacccugcuggagcccggcgacaccaucaucuucgaggccaacggcaaccugaucgcccccagauacgccuucgcccugagcagaggcuucggcagcggcaucaucaacagcaacgcccccauggacaagugcgacgccaagugccagaccccccagggcgccaucaacagcagccugcccuuccagaacgugcaccccgugaccaucggcgagugccccaaguacgugagaagcgccaagcugagaauggugaccggccugagaaacauccccagcauccagagcagaggccuguucggcgccaucgccggcuucaucgagggcggcuggaccggcaugguggacggcugguacggcuaccaccaccagaacgagcagggcagcggcuacgccgccgaccagaagagcacccagaacgccaucaacggcaucaccaacaaggugaacagcgugaucgagaagaugaacacccaguucaccgccgugggcaaggaguucaacaagcuggagagaagaauggagaaccugaacaagaagguggacgacggcuucaucgacaucuggaccuacaacgccgagcugcuggugcugcuggagaacgagagaacccuggacuuccacgacagcaacgugaagaaccuguacgagaaggugaagagccagcugaagaacaacgccaaggagaucggcaacggcugcuucgaguucuaccacaagugcaacgacgagugcauggagagcgugaagaacggcaccuacgacuaccccaaguacagcgaggagagcaagcugaacagagagaagaucgacggcgugaagcuggagagcaugggcguguaccagauccuggccaucuacagcaccguggccagcagccuggugcugcuggugagccugggcgccaucagcuucuggaugugcagcaacggcagccugcagugcagaaucugcaucuga

SEQ ID NO: 162738 - RNA, 1701 nt, Artificial Sequence; identical to SEQ ID NO: 162716
  derived and/or modified CDS sequence (opt4) from hemagglutinin__InfluenzaA__ACQ73386

SEQ ID NO: 162739 - RNA, 1701 nt, Artificial Sequence; identical to SEQ ID NO: 162729
  derived and/or modified CDS sequence (opt4) from hemagglutinin__InfluenzaA__ACQ73387

SEQ ID NO: 162740 - RNA, 1701 nt, Artificial Sequence
  derived and/or modified CDS sequence (opt4) from hemagglutinin__InfluenzaA__ACQ73555
augaagaccaucaucgcccugagcuacauccugugccugguguucgcccagaagcugcccggcaacgacaacagcaccgccacccugugccugggccaccacgccgugcccaacggcaccaucgugaagaccaucaccaacgaccagaucgaggugaccaacgccaccgagcuggugcagagcagcagcaccggcggcaucugcgacagcccccaccagauccuggacggcgagaacugcacccugaucgacgcccugcugggcgacccccagugcgacggcuuccagaacaagaagugggaccuguucguggagagaagcaaggccuacagcaacugcuaccccuacgacgugcccgacuacgccagccugagaagccugguggccagcagcggcacccuggaguucaacaacgagagcuucaacuggaccggcgugacccagaacggcaccagcagcgccugcaagagaagaagcaacaacagcuucuucagcagacugaacuggcugacccaccugaaguucaaguaccccgcccugaacgugaccaagcccaacaacgagaaguucgacaagcuguacaucuggggcgugcaccaccccggcaccgacaacgaccagaucuuccuguacgcccaggccagcggcagaaucaccgugagcaccaagagaagccagcagaccgugauccccaacaucggcagcagacccagagugagaaacauccccagcagaaucagcaucuacuggaccaucgugaagcccggcgacauccugcugaucaacagcaccggcaaccugaucgcccccagaggcuacuucaagaucagaagcggcaagagcagcaucaugagaagcgacgcccccaucggcaagugcaacagcgagugcaucacccccaacggcagcauccccaacgacaagcccuuccagaacgugaacagaaucaccuacggcgccugccccagauacgugaagcagaacacccugaagcuggccaccggcaugagaaacgugcccgagaagcagaccagaggcaucuucggcgccaucgccggcuucaucgagaacggcugggagggcaugguggacggcugguacggcuucagacaccagaacagcgagggcaucggccaggccgccgaccugaagagcacccaggccgccaucaaccagaucaacggcaagcugaacagacugaucggcaagaccaacgagaaguuccaccagaucgagaaggaguucagcgagguggagggcagaauccaggaccuggagaaguacguggaggacaccaagaucgaccuguggagcuacaacgccgagcugcugguggcccuggagaaccagcacaccaucgaccugaccgacagcgagaugaacaagcuguucgagagaaccaagaagcagcugagagagaacgccgaggacaugggcaacggcugcuucaagaucuaccacaagugcgacaacgccugcaucggcagcaucagaaacggcaccuacgaccacgacguguacagagacgaggcccugaacaacagauuccagaucaagggcguggagcugaagagcggcuacaaggacuggauccuguggaucagcuucgccaucagcugcuuccugcugugcguggcccugcugggcuucaucaugugggccugccagaagggcaacaucagaugcaacaucugcaucuga

SEQ ID NO: 162741 - RNA, 1701 nt, Artificial Sequence; identical to SEQ ID NO: 162729
  derived and/or modified CDS sequence (opt4) from hemagglutinin__InfluenzaA__ACQ76294

SEQ ID NO: 162742 - RNA, 1701 nt, Artificial Sequence; identical to SEQ ID NO: 162729
  derived and/or modified CDS sequence (opt4) from hemagglutinin__InfluenzaA__ACQ76314

SEQ ID NO: 162743 - RNA, 1701 nt, Artificial Sequence; identical to SEQ ID NO: 162729
  derived and/or modified CDS sequence (opt4) from hemagglutinin__InfluenzaA__ACQ76317

SEQ ID NO: 162744 - RNA, 1701 nt, Artificial Sequence
  derived and/or modified CDS sequence (opt4) from hemagglutinin__InfluenzaA__ACQ76318
augaaggccauccugguggugcugcuguacaccuucgccaccgccaacgccgacacccugugcaucggcuaccacgccaacaacagcaccgacaccguggacaccgugcuggagaagaacgugaccgugacccacagcgugaaccugcuggaggacaagcacaacggcaagcugugcaagcugagaggcguggccccccugcaccugggcaagugcaacaucgccggcuggauccugggcaaccccgagugcgagagccugagcaccgccagcagcuggagcuacaucguggagacccccagcagcgacaacggcaccugcuaccccggcgacuucaucgacuacgaggagcugagagagcagcugagcagcgugagcagcuucgagagauucgagaucuuccccaagaccagcagcuggcccaaccacgacagcaacaagggcgugaccgccgccugcccccacgccggcgccaagagcuucuacaagaaccugaucuggcuggugaagaagggcaacagcuaccccaagcugagcaagagcuacaucaacgacaagggcaaggaggugcuggugcuguggggcauccaccaccccagcaccagcgccgaccagcagagccuguaccagaacgccgacaccuacguguucgugggcagcagcagauacagcaagaaguucaagcccgagaucgccaucagacccaaggugagagaccaggagggcagaaugaacuacuacuggacccugguggagcccggcgacaagaucaccuucgaggccaccggcaaccugguggugcccagauacgccuucgccauggagagaaacgccggcagcggcaucaucaucagcgacacccccgugcacgacugcaacaccaccugccagacccccaagggcgccaucaacaccagccugcccuuccagaacauccaccccaucaccaucggcaagugccccaaguacgugaagagcaccaagcugagacuggccaccggccugagaaacauccccagcauccagagcagaggccuguucggcgccaucgccggcuucaucgagggcggcuggaccggcaugguggacggcugguacggcuaccaccaccagaacgagcagggcagcggcuacgccgccgaccugaagagcacccagaacgccaucgacgagaucaccaacaaggugaacagcgugaucgagaagaugaacacccaguucaccgccgugggcaaggaguucaaccaccuggagaagagaaucgagaaccugaacaagaagguggacgacggcuuccuggacaucuggaccuacaacgccgagcugcuggugcugcuggagaacgagagaacccuggacuaccacgacagcaacgugaagaaccuguacgagaaggugagaagccagcugaagaacaacgccaaggagaucggcaacggcugcuucgaguucuaccacaagugcgacaacaccugcauggagagcgugaagaacggcaccuacgacuaccccaaguacagcgaggaggccaagcugaacagagaggagaucgacggcgugaagcuggagagcaccagaaucuaccagauccuggccaucuacagcaccguggccagcagccuggugcugguggugagccugggcgccaucagcuucuggaugugcagcaacggcagccugcagugcagaaucugcaucuga

SEQ ID NO: 162745 - RNA, 1701 nt, Artificial Sequence; identical to SEQ ID NO: 162716
  derived and/or modified CDS sequence (opt4) from hemagglutinin__InfluenzaA__ACQ76326

SEQ ID NO: 162746 - RNA, 1701 nt, Artificial Sequence; identical to SEQ ID NO: 162716
  derived and/or modified CDS sequence (opt4) from hemagglutinin__InfluenzaA__ACQ76336

SEQ ID NO: 162747 - RNA, 1701 nt, Artificial Sequence; identical to SEQ ID NO: 162716
  derived and/or modified CDS sequence (opt4) from hemagglutinin__InfluenzaA__ACQ76347

SEQ ID NO: 162748 - RNA, 1701 nt, Artificial Sequence; identical to SEQ ID NO: 162729
  derived and/or modified CDS sequence (opt4) from hemagglutinin__InfluenzaA__ACQ76365

SEQ ID NO: 162749 - RNA, 1701 nt, Artificial Sequence; identical to SEQ ID NO: 162729
  derived and/or modified CDS sequence (opt4) from hemagglutinin__InfluenzaA__ACQ76370

SEQ ID NO: 162750 - RNA, 1701 nt, Artificial Sequence; identical to SEQ ID NO: 162716
  derived and/or modified CDS sequence (opt4) from hemagglutinin__InfluenzaA__ACQ76376

SEQ ID NO: 162751 - RNA, 1701 nt, Artificial Sequence
  derived and/or modified CDS sequence (opt4) from hemagglutinin__InfluenzaA__ACQ76383
augaaggccauccugguggugcugcuguacaccuucgccaccgccaacgccgacacccugugcaucggcuaccacgccaacaacagcaccgacaccguggacaccgugcuggagaagaacgugaccgugacccacagcgugaaccugcuggaggacaagcacaacggcaagcugugcaagcugagaggcguggccccccugcaccugggcaagugcaacaucgccggcuggauccugggcaaccccgagugcgagagccugagcaccgccagcagcuggagcuacaucguggagaccagcagcagcgacaacggcaccugcuaccccggcgacuucaucgacuacgaggagcugagagagcagcugagcagcgugagcagcuucgagagauucgagaucuuccccaagaccagcagcuggcccaaccacgacagcaacaagggcaucaccgccgccugcccccacgccggcgccaagagcuucuacaagaaccugaucuggcuggugaagaagggcaacagcuaccccaagcugagcaagagcuacaucaacgacaagggcaaggaggugcuggugcuguggggcauccaccaccccagcaccagcgccgaccagcagagccuguaccagaacgccgacgccuacguguucgugggcagcagcagauacagcaagaaguucaagcccgagaucgccaucagacccaaggugagagaccaggagggcagaaugaacuacuacuggacccugguggagcccggcgacaagaucaccuucgaggccaccggcaaccugguggugcccagauacgccuucgccauggagagaaacgccggcagcggcaucaucaucagcgacacccccgugcacgacugcaacaccaccugccagacccccaagggcgccaucaacaccagccugcccuuccagaacauccaccccaucaccaucggcaagugccccaaguacgugaagagcaccaagcugagacuggccaccggccugagaaacgugcccagcauccagagcagaggccuguucggcgccaucgccggcuucaucgagggcggcuggaccggcaugguggacggcugguacggcuaccaccaccagaacgagcagggcagcggcuacgccgccgaccugaagagcacccagaacgccaucgacgagaucaccaacaaggugaacagcgugaucgagaagaugaacacccaguucaccgccgugggcaaggaguucaaccaccuggagaagagaaucgagaaccugaacaagaagguggacgacggcuuccuggacaucuggaccuacaacgccgagcugcuggugcugcuggagaacgagagaacccuggacuaccacgacagcaacgugaagaaccuguacgagaaggugagaagccagcugaagaacaacgccaaggagaucggcaacggcugcuucgaguucuaccacaagugcgacaacaccugcauggagagcgugaagaacggcaccuacgacuaccccaaguacagcgaggaggccaagcugaacagagaggagaucgacggcgugaagcuggagagcaccagaaucuaccagauccuggccaucuacagcaccguggccagcagccuggugcugguggugagccugggcgccaucagcuucuggaugugcagcaacggcagccugcagugcagaaucugcaucuga

SEQ ID NO: 162752 - RNA, 1701 nt, Artificial Sequence; identical to SEQ ID NO: 162729
  derived and/or modified CDS sequence (opt4) from hemagglutinin__InfluenzaA__ACQ76389

SEQ ID NO: 162753 - RNA, 1701 nt, Artificial Sequence; identical to SEQ ID NO: 162716
  derived and/or modified CDS sequence (opt4) from hemagglutinin__InfluenzaA__ACQ76401

SEQ ID NO: 162754 - RNA, 1701 nt, Artificial Sequence; identical to SEQ ID NO: 162729
  derived and/or modified CDS sequence (opt4) from hemagglutinin__InfluenzaA__ACQ76405

SEQ ID NO: 162755 - RNA, 1701 nt, Artificial Sequence
  derived and/or modified CDS sequence (opt4) from hemagglutinin__InfluenzaA__ACQ76408
augaaggccauccugguggugaugcuguacaccuucgccaccgccaacgccgacacccugugcaucggcuaccacgccaacaacagcaccgacaccguggacaccgugcuggagaagaacgugaccgugacccacagcgugaaccugcuggaggacaagcacaacggcaagcugugcaagcugagaggcguggccccccugcaccugggcaagugcaacaucgccggcuggauccugggcaaccccgagugcgagagccugagcaccgccagcagcuggagcuacaucguggagaccagcagcagcgacaacggcaccugcuaccccggcgacuucaucgacuacgaggagcugagagagcagcugagcagcgugagcagcuucgagagauucgagaucuuccccaagaccagcagcuggcccaaccacgacagcaacaagggcgugaccgccgccugcccccacgccggcgccaagagcuucuacaagaaccugaucuggcuggugaagaagggcaacagcuaccccaagcugagcaagagcuacaucaacgacaagggcaaggaggugcuggugcuguggggcauccaccaccccagcaccagcgccgaccagcagagccuguaccagaacgccgacgccuacguguucgugggcagcagcagauacagcaagaaguucaagcccgagaucgccaucagacccaaggugagagaccaggagggcagaaugaacuacuacuggacccugguggagcccggcgacaagaucaccuucgaggccaccggcaaccugguggugcccagauacgccuucgccauggagagaaacgccggcagcggcaucaucaucagcgacacccccgugcacgacugcaacaccaccugccagacccccaagggcgccaucaacaccagccugcccuuccagaacauccaccccaucaccaucggcaagugccccaaguacgugaagagcaccaagcugagacuggccaccggccugagaaacgugcccagcauccagagcagaggccuguucggcgccaucgccggcuucaucgagggcggcuggaccggcaugguggacggcugguacggcuaccaccaccagaacgagcagggcagcggcuacgccgccgaccugaagagcacccagaacgccaucgacgagaucaccaacaaggugaacagcgugaucgagaagaugaacacccaguucaccgccgugggcaaggaguucaaccaccuggagaagagaaucgagaaccugaacaagaagguggacgacggcuuccuggacaucuggaccuacaacgccgagcugcuggugcugcuggagaacgagagaacccuggacuaccacgacagcaacgugaagaaccuguacgagaaggugagaagccagcugaagaacaacgccaaggagaucggcaacggcugcuucgaguucuaccacaagugcgacaacaccugcauggagagcgugaagaacggcaccuacgacuaccccaaguacagcgaggaggccaagcugaacagagaggagaucgacggcgugaagcuggagagcaccagaaucuaccagauccuggccaucuacagcaccguggccagcagccuggugcugguggugagccugggcgccaucagcuucuggaugugcagcaacggcagccugcagugcagaaucugcaucuga

SEQ ID NO: 162756 - RNA, 1701 nt, Artificial Sequence
  derived and/or modified CDS sequence (opt4) from hemagglutinin__InfluenzaA__ACQ77601
augaagaccaucaucgcccugagcuacauccugugccuggccuucgcccagaagcugcccggcaacgacaacagcaccgccacccugugccugggccaccacgccgugcccaacggcacccuggugaagaccaucaccaacgaccagaucgaggugaccaacgccaccgagcuggugcagagcagcagcaccggcagaaucugcgacagcccccaccagauccuggacggcgagaacugcacccugaucgacgcccugcugggcgacccccacugcgacggcuuccagaacaaggagugggaccuguucguggagagaagcaaggccuacagcgacugcuaccccuacgacgugcccgacuacgccagccugagaagccugguggccagcagcggcacccuggaguucaacaacgagagcuucaacuggaccggcguggcccagaacggcaccagcagcgccugcaagagaagaagcaucaagagcuucuucagcagacugaacuggcugcaccagcuggagaacagauaccccgcccccaacgugaccaugcccaacaacgacaaguucgacaagcuguacaucuggggcgugcaccaccccagcaccgacagcgaccagaucagcguguacgcccaggccagcggcagagugaccgugagcaccaagagaagccagcagaccgugauccccaacaucggcagcagacccugggugagaggcaucagcagcagaaucagcaucuacuggaccaucgugaagcccggcgacauccugcugaucaacagcaccggcaaccugaucgcccccagaggcuacuucaagaucagaagcggcaagagcagcaucaugagaagcgacgcccccaucggcaagugcaacagcgagugcaucacccccaacggcagcauccccaacgacaagcccuuccagaacgugaacagaaucaccuacggcgccugccccagauacgugaagcagaacacccugaagcuggccaccggcaugagaaacgugcccgagaagcagaccagaggcaucuucggcgccaucgccggcuucaucgagaacggcugggagggcaugauggacggcugguacggcuucagacaccagaacagcgagggcaccggccaggccgccgaccugaagagcacccaggccgccaucaaccagaucaacggcaagcugaacaagcugaucgagaagaccaacgagaaguuccaccagaucgagaaggaguucagcgagguggagggcagaauccaggaccuggagaaguacguggaggacaccaagaucgaccuguggagcuacaacgccgagcugcugguggcccuggagaaccagcacaccaucgaccugaccgacagcgagaugaacaagcuguucgagagaaccagaaagcagcugagagagaacgccgaggacaugggcaacggcugcuucaagaucuaccacaagugcgacaacgccugcaucggcagcaucagaaacggcaccuacgaccacgacguguacagagacgaggcccugaacaacagauuccagaucaagggcguggagcugaagagcggcuacaaggacuggauccuguggaucagcuucgccaucagcugcuuccugcugugcguggugcugcugggcuucaucaugugggccugccagaagggcaacaucagaugcaacaucugcaucuga

SEQ ID NO: 162757 - RNA, 1701 nt, Artificial Sequence
  derived and/or modified CDS sequence (opt4) from hemagglutinin__InfluenzaA__ACQ83310
augaaggccauccugguggugcugcuguacaccuucgccaccgccaacgccgacacccugugcaucggcuaccacgccaacaacagcaccgacaccguggacaccgugcuggagaagaacgugaccgugacccacagcgugaaccugcuggaggacaagcacaacggcaagcugugcaagcugagaggcguggccccccugcaccugggcaagugcaacaucgccggcuggauccugggcaaccccgagugcgagagccugagcaccgccagcagcuggagcuacaucguggagaccagcagcagcgacaacggcaccugcuaccccggcgacuucaucgacuacgaggagcugagagagcagcugagcagcaugagcagcuucgagagauucgagaucuuccccaagaccagcagcuggcccaaccacgacagcaacaagggcgugaccgccgccugcccccacgccggcgccaagagcuucuacaagaaccugaucuggcuggugaagaagggcaacagcuaccccaagcugagcaagagcuacaucaacgacaagggcaaggaggugcuggugcuguggggcauccaccaccccagcaccagcgccgaccagcagagccuguaccagaacgccgacgccuacguguucgugggcagcagcagauacagcaagaagcugaagcccgagaucgccaucagacccaaggugagagaccaggagggcagaaugaacuacuacuggacccugguggagcccggcgacaagaucaccuucgaggccaccggcaaccugguggugcccagauacgccuucgccauggagagaaacgccggcagcggcaucaucaucagcgacacccccgugcacgacugcaacaccaccugccagacccccaagggcgccaucaacaccagccugcccuuccagaacauccaccccaucaccaucggcaagugccccaaguacgugaagagcaccaagcugagacuggccaccggccugagaaacgugcccagcauccagagcagaggccuguucggcgccaucgccggcuucaucgagggcggcuggaccggcaugguggacggcugguacggcuaccaccaccagaacgagcagggcagcggcuacgccgccgaccugaagagcacccagaacgccaucgacgagaucaccaacaaggugaacagcgugaucgagaagaugaacacccaguucaccgccgugggcaaggaguucaaccaccuggagaagagaaucgagaaccugaacaagaagguggacgacggcuuccuggacaucuggaccuacaacgccgagcugcuggugcugcuggagaacgagagaacccuggacuaccacgacagcaacgugaagaaccuguacgagaaggugagaagccagcugaagaacaacgccaaggagaucggcaacggcugcuucgaguucuaccacaagugcgacaacaccugcauggagagcgugaagaacggcaccuacgacuaccccaaguacagcgaggaggccaagcugaacagagaggagaucgacggcgugaagcuggagagcaccagaaucuaccagauccuggccaucuacagcaccguggccagcagccuggugcugguggugagccugggcgccaucagcuucuggaugugcagcaacggcagccugcagugcagaaucugcaucuga

SEQ ID NO: 162758 - RNA, 1701 nt, Artificial Sequence; identical to SEQ ID NO: 162716
  derived and/or modified CDS sequence (opt4) from hemagglutinin__InfluenzaA__ACQ84451

SEQ ID NO: 162759 - RNA, 1701 nt, Artificial Sequence; identical to SEQ ID NO: 162716
  derived and/or modified CDS sequence (opt4) from hemagglutinin__InfluenzaA__ACQ84457

SEQ ID NO: 162760 - RNA, 1701 nt, Artificial Sequence
  derived and/or modified CDS sequence (opt4) from hemagglutinin__InfluenzaA__ACQ84477
augaaggccauccugcuggugcugcuguacaccuucaccgccgccaacgccgacacccugugcaucggcuaccacgccaacaacagcaccgacaccguggacaccgugcuggagaagaacgugaccgugacccacagcgugaaccugcuggaggacagacacaacggcaagcugugcaagcugagaggcguggccccccugcaccugggcaagugcaacaucgccggcuggcugcugggcaaccccgagugcgagcugcuguucaccgccagcagcuggagcuacaucguggagaccagcaacagcgacaacggcaccugcuaccccggcgacuucaucaacuacgaggagcugagagagcagcugagcagcgugagcagcuucgagagauucgagaucuuccccaaggccagcagcuggcccgaccacgagaccaacagaggcgugaccgccgccugccccuacgccggcgccaacagcuucuacagaaaccugaucuggcuggugaagaagggcaacagcuaccccaagcugagcaagagcuacgugaacaacaaggagaaggaggugcuggugcuguggggcauccaccacccccccaccagcaccgaccagcagagccuguaccagaacgccgacgccuacguguucgugggcagcagcaaguacaacaagaaguucaagcccgagaucgccaccagacccaaggugagaggccaggccggcagaaugaacuacuacuggacccugguggagcccggcgacaccaucaccuucgaggccaccggcaaccugguggugcccagauacgccuucgccaugaagagaggcagcggcagcggcaucaucaucagcgacacccccgugcacgacugcaacaccaccugccagacccccaagggcgccaucaacaccagccugcccuuccagaacauccaccccgugaccaucggcgagugccccaaguacgugaagagcaccaagcugagaauggccaccggccugagaaacauccccagcauccagagcagaggccuguucggcgccaucgccggcuucaucgagggcggcuggaccggcaugaucgacggcugguacggcuaccaccaccagaacgagcagggcagcggcuacgccgccgaccagaagagcacccagaacgccaucgacggcaucaccaacaaggugaacagcgugaucgagaagaugaacacccaguucaccgccgugggcaaggaguucaaccaccuggagaagagaaucgagaaccugaacaagaagguggacgacggcuuccuggacguguggaccuacaacgccgagcugcuggugcugcuggagaacgagagaacccuggacuaccacgacagcaacgugaagaaccuguacgagaaggugagaagccagcugaagaacaacgccaaggagaucggcaacggcugcuucgaguucuaccacaagugcgacgacaccugcauggagagcgugaagaacggcaccuacgacuaccccaaguacagcgaggagagcaagcugaacagagaggagaucgacggcgugaagcuggagagcaccagaaucuaccagauccuggccaucuacagcaccguggccagcagccuggugcugcuggugagccugggcgccaucagcuucuggaugugcagcaacggcagccugcagugcagaaucugcaucuga

SEQ ID NO: 162761 - RNA, 1701 nt, Artificial Sequence
  derived and/or modified CDS sequence (opt4) from hemagglutinin__InfluenzaA__ACQ89900
augaaggccauccugguggugcugcuguacaccuucgccaccgccaacgccgacacccugugcaucggcuaccacgccaacaacagcaccgacaccguggacaccgugcuggagaagaacgugaccgugacccacagcgugaaccugcuggaggacaagcacaacggcaagcugugcaagcugagaggcguggccccccugcaccugggcaagugcaacaucgccggcuggauccugggcaaccccgagugcgagagccugagcaccgccagcagcuggagcuacaucguggagaccagcagcagcgacaacggcaccugcuaccccggcgacuucaucgacuacgaggagcugagagagcagcugagcagcgugagcagcuucgagagauucgagaucuuccccaagaccagcagcuggcccaaccacgacagcaacaagggcgugaccgccgccugcccccacgccggcgccaagagcuucuacaagaaccugaucuggcuggugaagaagggcaacagcuaccccaagcugagcaagagcuacaucaacgacaagggcaaggaggugcuggugcuguggggcauccaccaccccagcaccagcgccgaccagcagagccuguaccagaacgccgacgccuacguguucgugggcagcagcagauacagcaagaaguucaagcccgagaucgccaucagacccaaggugagagaccaggagggcagaaugaacuacuacuggacccugguggagcccggcgacaagaucaccuucgaggccaccggcaaccugguggugcccagauacgccuucgccauggagagaaacgccggcagcggcaucaucaucagcgacacccccgugcacgacugcaacaccaccugccagacccccaagggcgccaucaacaccagccugcccuuccagaacauccaccccaucaccaucggcaagugccccaaguacgugaagagcaccaagcugagacuggccaccggccugagaaacgugcccagcauccagagcagaggccuguucggcgccaucgccggcuucaucgagggcggcuggaccggcaugguggacggcugguacggcuaccaccaccagaacgagcagggcagcggcuacgccgccgaccugaagagcacccagaacgccaucgacgagaucaccaacaaggugaacagcgugguggagaagaugaacacccaguucaccgccgugggcaaggaguucaaccaccuggagaagagaaucgagaaccugaacaagaagguggacgacggcuuccuggacaucuggaccuacaacgccgagcugcuggugcugcuggagaacgagagaacccuggacuaccacgacagcaacgugaagaaccuguacgagaaggugagaagccagcugaagaacaacgccaaggagaucggcaacggcugcuucgaguucuaccacaagugcgacaacaccugcauggagagcgugaagaacggcaccuacgacuaccccaaguacagcgaggaggccaagcugaacagagaggagaucgacggcgugaagcuggagagcaccagaaucuaccagauccuggccaucuacagcaccguggccagcagccuggugcugguggugagccugggcgccaucagcuucuggaugugcagcaacggcagccugcagugcagaaucugcaucuga

SEQ ID NO: 162762 - RNA, 1701 nt, Artificial Sequence; identical to SEQ ID NO: 162729
  derived and/or modified CDS sequence (opt4) from hemagglutinin__InfluenzaA__ACQ89902

SEQ ID NO: 162763 - RNA, 1701 nt, Artificial Sequence
  derived and/or modified CDS sequence (opt4) from hemagglutinin__InfluenzaA__ACQ89904
augaaggccauccugguggugcugcuguacaccuucgccaccgccaacgccgacacccugugcaucggcuaccacgccaacaacagcaccgacaccguggacaccgugcuggagaagaacgugaccgugacccacagcgugaaccugcuggaggacaagcacaacggcaagcugugcaagcugagaggcguggccccccugcaccugggcaagugcaacaucgccggcuggauccugggcaaccccgagugcgagagccugagcaccgccagcagcuggagcuacaucguggagaccagcagcagcgacaagggcaccugcuaccccggcgacuucaucgacuacgaggagcugagagagcagcugagcagcgugagcagcuucgagagauucgagaucuuccccaagaccagcagcuggcccaaccacgacagcaacaagggcgugaccgccgccugcccccacgccggcgccaagagcuucuacaagaaccugaucuggcuggugaagaagggcaacagcuaccccaagcugagcaagagcuacaucaacgacaagggcaaggaggugcuggugcuguggggcauccaccaccccagcaccagcgccgaccagcagagccuguaccagaacgccgacgccuacguguucgugggcaccagcagauacagcaagaaguucaagcccgagaucgccaucagacccaaggugagagaccaggagggcagaaugaacuacuacuggacccugguggagcccggcgacaagaucaccuucgaggccaccggcaaccugguggugcccagauacgccuucgccauggagagaaacgccggcagcggcaucaucaucagcgacacccccgugcacgacugcaacaccaccugccagacccccaagggcgccaucaacaccagccugcccuuccagaacauccaccccaucaccaucggcaagugccccaaguacgugaagagcaccaagcugagacuggccaccggccugagaaacgugcccagcauccagagcagaggccuguucggcgccaucgccggcuucaucgagggcggcuggaccggcaugguggacggcugguacggcuaccaccaccagaacgagcagggcagcggcuacgccgccgaccugaagagcacccagaacgccaucgacgagaucaccaacaaggugaacagcgugaucgagaagaugaacacccaguucaccgccgugggcaaggaguucaaccaccuggagaagagaaucgagaaccugaacaagaagguggacgacggcuuccuggacaucuggaccuacaacgccgagcugcuggugcugcuggagaacgagagaacccuggacuaccacgacagcaacgugaagaaccuguacgagaaggugagaagccagcugaagaacaacgccaaggagaucggcaacggcugcuucgaguucuaccacaagugcgacaacaccugcauggagagcgugaagaacggcaccuacgacuaccccaaguacagcgaggaggccaagcugaacagagaggagaucgacggcgugaagcuggagagcaccagaaucuaccagauccuggccaucuacagcaccguggccagcagccuggugcugguggugagccugggcgccaucagcuucuggaugugcagcaacggcagccugcagugcagaaucugcaucuga

SEQ ID NO: 162764 - RNA, 1701 nt, Artificial Sequence; identical to SEQ ID NO: 162761
  derived and/or modified CDS sequence (opt4) from hemagglutinin__InfluenzaA__ACQ89905

SEQ ID NO: 162765 - RNA, 1701 nt, Artificial Sequence; identical to SEQ ID NO: 162716
  derived and/or modified CDS sequence (opt4) from hemagglutinin__InfluenzaA__ACQ99607

SEQ ID NO: 162766 - RNA, 1701 nt, Artificial Sequence; identical to SEQ ID NO: 162716
  derived and/or modified CDS sequence (opt4) from hemagglutinin__InfluenzaA__ACQ99608

SEQ ID NO: 162767 - RNA, 1701 nt, Artificial Sequence; identical to SEQ ID NO: 162716
  derived and/or modified CDS sequence (opt4) from hemagglutinin__InfluenzaA__ACQ99609

SEQ ID NO: 162768 - RNA, 1701 nt, Artificial Sequence; identical to SEQ ID NO: 162716
  derived and/or modified CDS sequence (opt4) from hemagglutinin__InfluenzaA__ACQ99611

SEQ ID NO: 162769 - RNA, 1701 nt, Artificial Sequence
  derived and/or modified CDS sequence (opt4) from hemagglutinin__InfluenzaA__ACQ99614
augaaggccauccugguggugcugcuguacaccuucgccaccgccaacgccgacacccugugcaucggcuaccacgccaacaacagcaccgacaccguggacaccgugcuggagaagaacgugaccgugacccacagcgugaaccugcuggaggacaagcacaacggcaagcugugcaagcugagaggcguggccccccugcaccugggcaagugcaacaucgccggcuggauccugggcaaccccgagugcgagagccugagcaccgccagcagcuggagcuacaucguggagaccagcagcagcgacaacggcaccugcuaccccggcgacuucaucgacuacgaggagcugagagagcagcugagcagcgugagcagcuucgagagauucgagaucuuccccaagaccagcagcuggcccaaccacgacagcaacaagggcgugaccgccgccugcccccacgccggcgccaagagcuucuacaagaaccugaucuggcuggugaagaagggcaacagcuaccccaagcugagcaagagcuacaucaacgacaagggcaaggaggugcuggugcuguggggcauccaccaccccagcaccagcgccgaccagcagagccuguaccagaacgccgacgccuacguguucgugggcagcagcagauacagcaagaaguucaagcccgagaucgccaucagacccaaggugagagaccaggagggcagaaugaacuacuacuggacccugguggagcccggcgacaagaucaccuucgaggccaccggcaaccugguggugcccagauacgccuucgccauggagagaaacgccggcagcggcaucaucaucagcgacacccccgugcacgacugcaacaccaccugccagacccccaagggcgccaucaacaccagccugcccuuccagaacauccaccccaucaccaucggcaagugccccaaguacgugaagagcaccaagcugagacuggccaccggccugagaaacgugcccagcauccagagcagaggccuguucggcgccaucgccggcuucaucgagggcggcuggaccggcaugguggacggcugguacggcuaccaccaccagaacgagcagggcagcggcuacgccgccgaccugaagagcacccagaacgccaucgacgagaucaccaacaaggugaacagcgugaucgagaagaugaacacccaguucaccgccgugggcaaggaguucaaccaccuggagaagagaaucgagaaccugaacaagaagguggacgacggcuuccuggacaucuggaccuacaacgccgagcugcugauccugcuggagaacgagagaacccuggacuaccacgacagcaacgugaagaaccuguacgagaaggugagaagccagcugaagaacaacgccaaggagaucggcaacggcugcuucgaguucuaccacaagugcgacaacaccugcauggagagcgugaagaacggcaccuacgacuaccccaaguacagcgaggaggccaagcugaacagagaggagaucgacggcgugaagcuggagagcaccagaaucuaccagauccuggccaucuacagcaccguggccagcagccuggugcugguggugagccugggcgccaucagcuucuggaugugcagcaacggcagccugcagugcagaaucugcaucuga

SEQ ID NO: 162770 - RNA, 1701 nt, Artificial Sequence; identical to SEQ ID NO: 162769
  derived and/or modified CDS sequence (opt4) from hemagglutinin__InfluenzaA__ACQ99616

SEQ ID NO: 162771 - RNA, 1701 nt, Artificial Sequence; identical to SEQ ID NO: 162716
  derived and/or modified CDS sequence (opt4) from hemagglutinin__InfluenzaA__ACQ99617

SEQ ID NO: 162772 - RNA, 1701 nt, Artificial Sequence; identical to SEQ ID NO: 162716
  derived and/or modified CDS sequence (opt4) from hemagglutinin__InfluenzaA__ACQ99618

SEQ ID NO: 162773 - RNA, 1701 nt, Artificial Sequence; identical to SEQ ID NO: 162716
  derived and/or modified CDS sequence (opt4) from hemagglutinin__InfluenzaA__ACQ99619

SEQ ID NO: 162774 - RNA, 1701 nt, Artificial Sequence; identical to SEQ ID NO: 162716
  derived and/or modified CDS sequence (opt4) from hemagglutinin__InfluenzaA__ACQ99620

SEQ ID NO: 162775 - RNA, 1701 nt, Artificial Sequence; identical to SEQ ID NO: 162769
  derived and/or modified CDS sequence (opt4) from hemagglutinin__InfluenzaA__ACQ99621

SEQ ID NO: 162776 - RNA, 1701 nt, Artificial Sequence; identical to SEQ ID NO: 162716
  derived and/or modified CDS sequence (opt4) from hemagglutinin__InfluenzaA__ACQ99622

SEQ ID NO: 162777 - RNA, 1701 nt, Artificial Sequence
  derived and/or modified CDS sequence (opt4) from hemagglutinin__InfluenzaA__ACR01014
augaaggccauccugguggugcugcuguacaccuucgccaccgccaacgccgacacccugugcaucggcuaccacgccaacaacagcaccgacaccguggacaccgugcuggagaagaacgugaccgugacccacagcgugaaccugcuggaggacaagcacaacggcaagcugugcaagcugagaggcguggccccccugcaccugggcaagugcaacaucgccggcuggauccugggcaaccccgagugcgagagccugagcaccgccagcagcuggagcuacaucguggagaccagcagcagcgacaacggcaccugcuaccccggcgacuucaucgacuacgaggagcugagagagcagcugagcagcgugagcagcuucgagagauucgagaucuuccccaagaccagcagcuggcccaaccacgacagcaacaagggcgugaccgccgccugcccccacgccggcgccaagagcuucuacaagaaccugaucuggcuggugaagaagggcaacagcuaccccaagcugagcaagagcuacaucaacgacaagggcaaggaggugcuggugcuguggggcauccaccaccccagcaccagcgccgaccagcagagccuguaccagaacgccgacgccuacguguucgugggcagcagcagauacagcaagaaguucaagcccgagaucgccaucagacccaaggugagagaccaggagggcagaaugaacuacuacuggacccugguggagcccggcgacaagaucaccuucgaggccaccggcaaccugguggugcccagauacgccuucgccauggagagaaacgccggcagcggcaucaucaucagcgacacccccgugcacgacugcaacaccaccugccagacccccaagggcgccaucaacaccagccugcccuuccagaacauccaccccaucaccaucggcaagugccccaaguacgugaagagcaccaagcugagacuggccaccggccugagaaacgugcccagcauccagagcagaggccuguucggcgccaucgccggcuucaucgagggcggcuggaccggcaugguggacggcugguacggcuaccaccaccagaacgagcagggcagcggcuacgccgccgaccugaagagcacccagaacgccaucgacgagaucaccaacaaggugaacagcgugaucgagaagaugaacacccaguucaccgccgugggcaaggaguucaaccaccuggagaagagaauggagaaccugaacaagaagguggacgacggcuuccuggacaucuggaccuacaacgccgagcugcuggugcugcuggagaacgagagaacccuggacuaccacgacagcaacgugaagaaccuguacgagaaggugagaagccagcugaagaacaacgccaaggagaucggcaacggcugcuucgaguucuaccacaagugcgacaacaccugcauggagagcgugaagaacggcaccuacgacuaccccaaguacagcgaggaggccaagcugaacagagaggagaucgacggcgugaagcuggagagcaccagaaucuaccagauccuggccaucuacagcaccguggccagcagccuggugcugguggugagccugggcgccaucagcuucuggaugugcagcaacggcagccugcagugcagaaucugcaucuga

SEQ ID NO: 162778 - RNA, 1701 nt, Artificial Sequence; identical to SEQ ID NO: 162729
  derived and/or modified CDS sequence (opt4) from hemagglutinin__InfluenzaA__ACR08419

SEQ ID NO: 162779 - RNA, 1701 nt, Artificial Sequence
  derived and/or modified CDS sequence (opt4) from hemagglutinin__InfluenzaA__ACR08429
augaaggccauccugguggugcugcuguacaccuucgccaccgccaacgccgacacccugugcaucggcuaccacgccaacaacagcaccgacaccguggacaccgugcuggagaagaacgugaccgugacccacagcgugaaccugcuggaggacaagcacaacggcaagcugugcaagcugagaggcguggccccccugcaccugggcaagugcaacaucgccggcuggauccugggcaaccccgagugcgagagccugagcaccgccagcagcuggagcuacaucguggagaccagcagcagcgacaacggcaccugcuaccccggcgacuucaucgacuacgaggagcugagagagcagcugagcagcgugagcagcuucgagagauucgagaucuuccccaagaccagcagcuggcccaaccacgacagcaacaagggcgugaccgccgccugcccccacgccggcgccaagagcuucuacaagaaccugaucuggcuggugaagaagggcaacagcuaccccaagcugagcaagagcuacaucaacgacaagggcaaggaggugcuggugcuguggggcauccaccaccccagcaccagcgccgaccagcagagccuguaccagaacgccgacgccuacguguucgugggcaccagcagauacagcaagaaguucaagcccgagaucgccaucagacccaaggugagagaccaggagggcagaaugaacuacuacuggacccugguggagcccggcgacaagaucaccuucgaggccaccggcaaccugguggugcccagauacgccuucgccauggagagaaacaccggcagcggcaucaucaucagcgacacccccgugcacgacugcaacaccaccugccagacccccaagggcgccaucaacaccagccugcccuuccagaacauccaccccaucaccaucggcaagugccccaaguacgugaagagcaccaagcugagacuggccaccggccugagaaacgugcccagcauccagagcagaggccuguucggcgccaucgccggcuucaucgagggcggcuggaccggcaugguggacggcugguacggcuaccaccaccagaacgagcagggcagcggcuacgccgccgaccugaagagcacccagaacgccaucgacgagaucaccaacaaggugaacagcgugaucgagaagaugaacacccaguucaccgccgugggcaaggaguucaaccaccuggagaagagaaucgagaaccugaacaagaagguggacgacggcuuccuggacaucuggaccuacaacgccgagcugcuggugcugcuggagaacgagagaacccuggacuaccacgacagcaacgugaagaaccuguacgagaaggugagaagccagcugaagaacaacgccaaggagaucggcaacggcugcuucgaguucuaccacaagugcgacaacaccugcauggagagcgugaagaacggcaccuacgacuaccccaaguacagcgaggaggccaagcugaacagagaggagaucgacggcgugaagcuggagagcaccagaaucuaccagauccuggccaucuacagcaccguggccagcagccuggugcugguggugagccugggcgccaucagcuucuggaugugcagcaacggcagccugcagugcagaaucugcaucuga

SEQ ID NO: 162780 - RNA, 1701 nt, Artificial Sequence; identical to SEQ ID NO: 162729
  derived and/or modified CDS sequence (opt4) from hemagglutinin__InfluenzaA__ACR08439

SEQ ID NO: 162781 - RNA, 1701 nt, Artificial Sequence; identical to SEQ ID NO: 162729
  derived and/or modified CDS sequence (opt4) from hemagglutinin__InfluenzaA__ACR08449

SEQ ID NO: 162782 - RNA, 1701 nt, Artificial Sequence
  derived and/or modified CDS sequence (opt4) from hemagglutinin__InfluenzaA__ACR08459
augaaggccauccugguggugcugcuguacaccuucgccaccgccaacgccgacacccugugcaucggcuaccacgccaacaacagcaccgacaccguggacaccgugcuggagaagaacgugaccgugacccacagcgugaaccugcuggaggacaagcacaacggcaagcugugcaagcugagaggcguggccccccugcaccugggcaagugcaacaucgccggcuggauccugggcaaccccgagugcgagagccugagcaccgccagcagcuggagcuacaucguggagaccagcagcagcgacaacggcaccugcuaccccggcgacuucaucgacuacgaggagcugagagagcagcugagcagcgugagcagcuucgagagauucgagaucuuccccaagaccagcagcuggcccaaccacgacagcaacaagggcgugaccgccgccugcccccacgccggcgccaagagcuucuacaagaaccugaucuggcuggugaagaagggcaacagcuaccccaagcugagcaagagcuacaucaacgacaagggcaaggaggugcuggugcuguggggcauccaccaccccagcaccagcgccgaccagcagagccuguaccagaacgccgacgccuacguguucgugggcagcagcagauacagcaagaaguucaagcccgagaucgccaucagacccaaggugagagaccaggagggcagaaugaacuacuacuggacccugguggagcccggcgacaagaucaccuucgaggccaccggcaaccugguggugcccagauacgccuucgccauggagagaaacgccggcagcggcaucaucaucagcgacacccccgugcacgacugcgacaccaccugccagacccccaagggcgccaucaacaccagccugcccuuccagaacauccaccccaucaccaucggcaagugccccaaguacgugaagagcaccaagcugagacuggccaccggccugagaaacgugcccagcauccagagcagaggccuguucggcgccaucgccggcuucaucgagggcggcuggaccggcaugguggacggcugguacggcuaccaccaccagaacgagcagggcagcggcuacgccgccgaccugaagagcacccagaacgccaucgacgagaucaccaacaaggugaacagcgugaucgagaagaugaacacccaguucaccgccgugggcaaggaguucaaccaccuggagaagagaaucgagaaccugaacaagaagguggacgacggcuuccuggacaucuggaccuacaacgccgagcugcuggugcugcuggagaacgagagaacccuggacuaccacgacagcaacgugaagaaccuguacgagaaggugagaagccagcugaagaacaacgccaaggagaucggcaacggcugcuucgaguucuaccacaagugcgacaacaccugcauggagagcgugaagaacggcaccuacgacuaccccaaguacagcgaggaggccaagcugaacagagaggagaucgacggcgugaagcuggagagcaccagaaucuaccagauccuggccaucuacagcaccguggccagcagccuggugcugguggugagccugggcgccaucagcuucuggaugugcagcaacggcagccugcagugcagaaucugcaucuga

SEQ ID NO: 162783 - RNA, 1701 nt, Artificial Sequence; identical to SEQ ID NO: 162716
  derived and/or modified CDS sequence (opt4) from hemagglutinin__InfluenzaA__ACR08528

SEQ ID NO: 162784 - RNA, 1701 nt, Artificial Sequence; identical to SEQ ID NO: 162716
  derived and/or modified CDS sequence (opt4) from hemagglutinin__InfluenzaA__ACR08530

SEQ ID NO: 162785 - RNA, 1701 nt, Artificial Sequence; identical to SEQ ID NO: 162782
  derived and/or modified CDS sequence (opt4) from hemagglutinin__InfluenzaA__ACR08531

SEQ ID NO: 162786 - RNA, 1701 nt, Artificial Sequence; identical to SEQ ID NO: 162729
  derived and/or modified CDS sequence (opt4) from hemagglutinin__InfluenzaA__ACR08533

SEQ ID NO: 162787 - RNA, 1701 nt, Artificial Sequence; identical to SEQ ID NO: 162782
  derived and/or modified CDS sequence (opt4) from hemagglutinin__InfluenzaA__ACR08535

SEQ ID NO: 162788 - RNA, 1701 nt, Artificial Sequence; identical to SEQ ID NO: 162729
  derived and/or modified CDS sequence (opt4) from hemagglutinin__InfluenzaA__ACR08536

SEQ ID NO: 162789 - RNA, 1701 nt, Artificial Sequence; identical to SEQ ID NO: 162782
  derived and/or modified CDS sequence (opt4) from hemagglutinin__InfluenzaA__ACR08537

SEQ ID NO: 162790 - RNA, 1701 nt, Artificial Sequence; identical to SEQ ID NO: 162782
  derived and/or modified CDS sequence (opt4) from hemagglutinin__InfluenzaA__ACR08538

SEQ ID NO: 162791 - RNA, 1701 nt, Artificial Sequence; identical to SEQ ID NO: 162729
  derived and/or modified CDS sequence (opt4) from hemagglutinin__InfluenzaA__ACR08539

SEQ ID NO: 162792 - RNA, 1701 nt, Artificial Sequence; identical to SEQ ID NO: 162729
  derived and/or modified CDS sequence (opt4) from hemagglutinin__InfluenzaA__ACR08540

SEQ ID NO: 162793 - RNA, 1701 nt, Artificial Sequence; identical to SEQ ID NO: 162716
  derived and/or modified CDS sequence (opt4) from hemagglutinin__InfluenzaA__ACR08542

SEQ ID NO: 162794 - RNA, 1701 nt, Artificial Sequence; identical to SEQ ID NO: 162716
  derived and/or modified CDS sequence (opt4) from hemagglutinin__InfluenzaA__ACR08543

SEQ ID NO: 162795 - RNA, 1701 nt, Artificial Sequence; identical to SEQ ID NO: 162755
  derived and/or modified CDS sequence (opt4) from hemagglutinin__InfluenzaA__ACR08544

SEQ ID NO: 162796 - RNA, 1701 nt, Artificial Sequence; identical to SEQ ID NO: 162782
  derived and/or modified CDS sequence (opt4) from hemagglutinin__InfluenzaA__ACR08545

SEQ ID NO: 162797 - RNA, 1701 nt, Artificial Sequence; identical to SEQ ID NO: 162716
  derived and/or modified CDS sequence (opt4) from hemagglutinin__InfluenzaA__ACR08546

SEQ ID NO: 162798 - RNA, 1701 nt, Artificial Sequence; identical to SEQ ID NO: 162729
  derived and/or modified CDS sequence (opt4) from hemagglutinin__InfluenzaA__ACR08547

SEQ ID NO: 162799 - RNA, 1701 nt, Artificial Sequence; identical to SEQ ID NO: 162782
  derived and/or modified CDS sequence (opt4) from hemagglutinin__InfluenzaA__ACR08548

SEQ ID NO: 162800 - RNA, 1701 nt, Artificial Sequence; identical to SEQ ID NO: 162729
  derived and/or modified CDS sequence (opt4) from hemagglutinin__InfluenzaA__ACR08549

SEQ ID NO: 162801 - RNA, 1701 nt, Artificial Sequence; identical to SEQ ID NO: 162729
  derived and/or modified CDS sequence (opt4) from hemagglutinin__InfluenzaA__ACR08550

SEQ ID NO: 162802 - RNA, 1701 nt, Artificial Sequence; identical to SEQ ID NO: 162729
  derived and/or modified CDS sequence (opt4) from hemagglutinin__InfluenzaA__ACR08551

SEQ ID NO: 162803 - RNA, 1701 nt, Artificial Sequence; identical to SEQ ID NO: 162716
  derived and/or modified CDS sequence (opt4) from hemagglutinin__InfluenzaA__ACR08552

SEQ ID NO: 162804 - RNA, 1701 nt, Artificial Sequence; identical to SEQ ID NO: 162755
  derived and/or modified CDS sequence (opt4) from hemagglutinin__InfluenzaA__ACR08553

SEQ ID NO: 162805 - RNA, 1701 nt, Artificial Sequence; identical to SEQ ID NO: 162755
  derived and/or modified CDS sequence (opt4) from hemagglutinin__InfluenzaA__ACR08554

SEQ ID NO: 162806 - RNA, 1701 nt, Artificial Sequence; identical to SEQ ID NO: 162716
  derived and/or modified CDS sequence (opt4) from hemagglutinin__InfluenzaA__ACR09365

SEQ ID NO: 162807 - RNA, 1701 nt, Artificial Sequence; identical to SEQ ID NO: 162716
  derived and/or modified CDS sequence (opt4) from hemagglutinin__InfluenzaA__ACR09366

SEQ ID NO: 162808 - RNA, 1701 nt, Artificial Sequence; identical to SEQ ID NO: 162716
  derived and/or modified CDS sequence (opt4) from hemagglutinin__InfluenzaA__ACR09367

SEQ ID NO: 162809 - RNA, 1701 nt, Artificial Sequence; identical to SEQ ID NO: 162716
  derived and/or modified CDS sequence (opt4) from hemagglutinin__InfluenzaA__ACR09368

SEQ ID NO: 162810 - RNA, 1701 nt, Artificial Sequence; identical to SEQ ID NO: 162716
  derived and/or modified CDS sequence (opt4) from hemagglutinin__InfluenzaA__ACR09369

SEQ ID NO: 162811 - RNA, 1701 nt, Artificial Sequence; identical to SEQ ID NO: 162716
  derived and/or modified CDS sequence (opt4) from hemagglutinin__InfluenzaA__ACR09370

SEQ ID NO: 162812 - RNA, 1701 nt, Artificial Sequence; identical to SEQ ID NO: 162716
  derived and/or modified CDS sequence (opt4) from hemagglutinin__InfluenzaA__ACR09371

SEQ ID NO: 162813 - RNA, 1701 nt, Artificial Sequence; identical to SEQ ID NO: 162716
  derived and/or modified CDS sequence (opt4) from hemagglutinin__InfluenzaA__ACR09373

SEQ ID NO: 162814 - RNA, 1701 nt, Artificial Sequence; identical to SEQ ID NO: 162716
  derived and/or modified CDS sequence (opt4) from hemagglutinin__InfluenzaA__ACR09374

SEQ ID NO: 162815 - RNA, 1701 nt, Artificial Sequence
  derived and/or modified CDS sequence (opt4) from hemagglutinin__InfluenzaA__ACR09375
augaaggccauccugguggugcugcuguacaccuucgccaccgccaacgccgacacccugugcaucggcuaccacgccaacaacagcaccgacaccguggacaccgugcuggagaagaacgugaccgugacccacagcgugaaccugcuggaggacaagcacaacggcaagcugugcaagcugagaggcguggccccccugcaccugggcaagugcaacaucgccggcuggauccugggcaaccccgagugcgagagccugagcaccgccagcagcuggagcuacaucguggagaccagcagcagcgacaacggcaccugcuaccccggcgacuucaucgacuacgaggagcugagagagcagcugagcagcgugagcagcuucgagagauucgagaucuuccccaagaccagcagcuggcccaaccacgacagcaacaagggcgugaccgccgccugcccccacgccggcgccaagagcuucuacaagaaccugaucuggcuggugaagaagggcaacagcuaccccaagcugagcaagagcuacaucaacgacaagggcaaggaggugcuggugcuguggggcauccaccaccccagcaccagcgccgaccagcagagccuguaccagaacgccgacgccuacguguucgugggcagcagcagauacagcaagaaguucaagcccgagaucgccaucagacccaaggugagagaccaggagggcagaaugaacuacuacuggacccugguggagcccggcgacaagaucaccuucgaggccaccggcaaccugguggugcccagauacgccuucgccauggagaagaacgccggcagcggcaucaucaucagcgacacccccgugcacgacugcaacaccaccugccagacccccaagggcgccaucaacaccagccugcccuuccagaacauccaccccaucaccaucggcaagugccccaaguacgugaagagcaccaagcugagacuggccaccggccugagaaacgugcccagcauccagagcagaggccuguucggcgccaucgccggcuucaucgagggcggcuggaccggcaugguggacggcugguacggcuaccaccaccagaacgagcagggcagcggcuacgccgccgaccugaagagcacccagaacgccaucgacgagaucaccaacaaggugaacagcgugaucgagaagaugaacacccaguucaccgccgugggcaaggaguucaaccaccuggagaagagaaucgagaaccugaacaagaagguggacgacggcuuccuggacaucuggaccuacaacgccgagcugcuggugcugcuggagaacgagagaacccuggacuaccacgacagcaacgugaagaaccuguacgagaaggugagaagccagcugaagaacaacgccaaggagaucggcaacggcugcuucgaguucuaccacaagugcgacaacaccugcauggagagcgugaagaacggcaccuacgacuaccccaaguacagcgaggaggccaagcugaacagagaggagaucgacggcgugaagcuggagagcaccagaaucuaccagauccuggccaucuacagcaccguggccagcagccuggugcugguggugagccugggcgccaucagcuucuggaugugcagcaacggcagccugcagugcagaaucugcaucuga

SEQ ID NO: 162816 - RNA, 1701 nt, Artificial Sequence; identical to SEQ ID NO: 162716
  derived and/or modified CDS sequence (opt4) from hemagglutinin__InfluenzaA__ACR09376

SEQ ID NO: 162817 - RNA, 1701 nt, Artificial Sequence; identical to SEQ ID NO: 162716
  derived and/or modified CDS sequence (opt4) from hemagglutinin__InfluenzaA__ACR09377

SEQ ID NO: 162818 - RNA, 1701 nt, Artificial Sequence; identical to SEQ ID NO: 162716
  derived and/or modified CDS sequence (opt4) from hemagglutinin__InfluenzaA__ACR09395

SEQ ID NO: 162819 - RNA, 1701 nt, Artificial Sequence; identical to SEQ ID NO: 162716
  derived and/or modified CDS sequence (opt4) from hemagglutinin__InfluenzaA__ACR09396

SEQ ID NO: 162820 - RNA, 1701 nt, Artificial Sequence
  derived and/or modified CDS sequence (opt4) from hemagglutinin__InfluenzaA__ACR10186
augaaggccauccugguggugcugcuguacaccuucgccaccgccaacgccgacacccugugcaucggcuaccacgccaacaacagcaccgacaccguggacaccgugcuggagaagaacgugaccgugacccacagcgugaaccugcuggaggacaagcacaacggcaagcugugcaagcugagaggcguggccccccugcaccugggcaagugcaacaucgccggcuggauccugggcaaccccgagugcgagagccugagcaccgccagcagcuggagcuacaucguggagaccagcagcagcgacaacggcaccugcuaccccggcgacuucaucgacuacgaggagcugagagagcagcugagcagcgugagcagcuucgagagauucgagaucuuccccaagaccagcagcuggcccaaccacgacagcaacaagggcgugaccgccgccugcccccacgccggcgccaagagcuucuacaagaaccugaucuggcuggugaagaagggcaacagcuaccccaagcugagcaagagcuacaucaacgacaagggcaaggaggugcuggugcuguggggcauccaccaccccagcaccagcgccgaccagcagagccuguaccagaacgccgacgccuacguguucgugggcaccagcagauacagcaagaaguucaagcccgagaucgccaucagacccaaggugagagaccaggagggcagaaugaacuacuacuggacccugguggagcccggcgacaagaucaccuucgaggccaccggcaaccugguggugcccagauacgccuucgccauggagagaaacgccggcagcggcaucaucaucagcgacacccccgugcacgacugcaacaccaccugccagacccccaagggcgccaucaacaccagccugcccuuccagaacauccaccccaucaccaucggcaagugccccaaguacgugaagagcaccaagcugagacuggccaccggccugagaaacgugcccagcauccagagcagaggccuguucggcgccaucgccggcuucaucgagggcggcuggaccggcaugguggacggcugguacggcuaccaccaccagaacgagcagggcagcggcuacgccgccgaccugaagagcacccagaacgccaucgacgagaucaccaacaaggugaacagcgugaucgagaagaugaacacccaguucaccgccgugggcaaggaguucaaccaccuggagaagagaaucgagaaccugaacaagaagaucgacgacggcuuccuggacaucuggaccuacaacgccgagcugcuggugcugcuggagaacgagagaacccuggacuaccacgacagcaacgugaagaaccuguacgagaaggugagaagccagcugaagaacaacgccaaggagaucggcaacggcugcuucgaguucuaccacaagugcgacaacaccugcauggagagcgugaagaacggcaccuacgacuaccccaaguacagcgaggaggccaagcugaacagagaggagaucgacggcgugaagcuggagagcaccagaaucuaccagauccuggccaucuacagcaccguggccagcagccuggugcugguggugagccugggcgccaucagcuucuggaugugcagcaacggcagccugcagugcagaaucugcaucuga

SEQ ID NO: 162821 - RNA, 1701 nt, Artificial Sequence; identical to SEQ ID NO: 162820
  derived and/or modified CDS sequence (opt4) from hemagglutinin__InfluenzaA__ACR10222

SEQ ID NO: 162822 - RNA, 1701 nt, Artificial Sequence
  derived and/or modified CDS sequence (opt4) from hemagglutinin__InfluenzaA__ACR10223
augaaggccauccugguggugcugcuguacaccuucaccaccgccaacgccgacacccugugcaucggcuaccacgccaacaacagcaccgacaccguggacaccgugcuggagaagaacgugaccgugacccacagcgugaaccugcuggaggacaagcacaacggcaagcugugcaagcugagaggcguggccccccugcaccugggcaagugcaacaucgccggcuggauccugggcaaccccgagugcgagagccugagcaccgccagcagcuggagcuacaucguggagaccagcagcagcgacaacggcaccugcuaccccggcgacuucaucgacuacgaggagcugagagagcagcugagcagcgugagcagcuucgagagauucgagaucuuccccaagaccagcagcuggcccaaccacgacagcaacaagggcgugaccgccgccugcccccacgccggcgccaagagcuucuacaagaaccugaucuggcuggugaagaagggcaacagcuaccccaagcugagcaagagcuacaucaacgacaagggcaaggaggugcuggugcuguggggcauccaccaccccagcaccagcgccgaccagcagagccuguaccagaacgccgacgccuacguguucgugggcagcagcagauacagcaagaaguucaagcccgagaucgccaucagacccaaggugagagaccaggagggcagaaugaacuacuacuggacccugguggagcccggcgacaagaucaccuucgaggccaccggcaaccugguggugcccagauacgccuucgccauggagagaaacgccggcagcggcaucaucaucagcgacacccccgugcacgacugcaacaccaccugccagacccccaagggcgccaucaacaccagccugcccuuccagaacauccaccccaucaccaucggcaagugccccaaguacgugaagagcaccaagcugagacuggccaccggccugagaaacgugcccagcauccagagcagaggccuguucggcgccaucgccggcuucaucgagggcggcuggaccggcaugguggacggcugguacggcuaccaccaccagaacgagcagggcagcggcuacgccgccgaccugaagagcacccagaacgccaucgacgagaucaccaacaaggugaacagcgugaucgagaagaugaacacccaguucaccgccgugggcaaggaguucaaccaccuggagaagagaaucgagaaccugaacaagaagguggacgacggcuuccuggacaucuggaccuacaacgccgagcugcuggugcugcuggagaacgagagaacccuggacuaccacgacagcaacgugaagaaccuguacgagaaggugagaagccagcugaagaacaacgccaaggagaucggcaacggcugcuucgaguucuaccacaagugcgacaacaccugcauggagagcgugaagaacggcaccuacgacuaccccaaguacagcgaggaggccaagcugaacagagaggagaucgacggcgugaagcuggagagcaccagaaucuaccagauccuggccaucuacagcaccguggccagcagccuggugcugguggugagccugggcgccaucagcuucuggaugugcagcaacggcagccugcagugcagaaucugcaucuga

SEQ ID NO: 162823 - RNA, 1701 nt, Artificial Sequence
  derived and/or modified CDS sequence (opt4) from hemagglutinin__InfluenzaA__ACR15183
augaagaccaucaucgcccugagcuacauccugugccugguguucgcccagaagcugcccggcaacgacaacagcaccgccacccugugccugggccaccacgccgugcccaacggcaccaucgugaagaccaucaccaacgaccagaucgaggugaccaacgccaccgagcuggugcagagcagcagcaccggcggcaucugcgacagcccccaccagauccuggacggcgagaacugcacccugaucgacgcccugcugggcgacccccagugcgacggcuuccagaacaagaagugggaccuguucguggagagaagcaaggccuacagcaacugcuaccccuacgacgugcccgacuacgccagccugagaagccugguggccagcagcggcacccuggaguucaacaacgagagcuucaacuggaccggcgugacccagaacggcaccagcagcgccugcaagagaggcagcgacaacagcuucuucagcagacugaacuggcugacccaccugaaguucaaguaccccgcccugaacgugaccaugcccaacaacgagaaguucgacaagcuguacaucuggggcgugcaccaccccggcaccgacaacgaccagaucuuccccuacgcccaggccagcggcagaaucaccgugagcaccaagagaagccagcagaccgugauccccaacaucggcagcagacccagagugagaaacauccccagcagaaucagcaucuacuggaccaucgugaagcccggcgacauccugcugaucaacagcaccggcaaccugaucgcccccagaggcuacuucaagaucagaagcggcaagagcagcaucaugagaagcgacgcccccaucggcaagugcaacagcgagugcaucacccccaacggcagcauccccaacgacaagcccuuccagaacgugaacagaaucaccuacggcgccugccccagauacgugaagcagaacacccugaagcuggccaccggcaugagaaacgugcccgagaagcagaccagaggcaucuucggcgccaucgccggcuucaucgagaacggcugggagggcaugguggacggcugguacggcuucagacaccagaacagcgagggcaucggccaggccgccgaccugaagagcacccaggccgccaucaaccagaucaacggcaagcugaacagacugaucggcaagaccaacgagaaguuccaccagaucgagaaggaguucagcgagguggagggcagaauccaggaccuggagaaguacguggaggacaccaagaucgaccuguggagcuacaacgccgagcugcugguggcccuggagaaccagcacaccaucgaccugaccgacagcgagaugaacaagcuguucgagagaaccaagaagcagcugagagagaacgccgaggacaugggcaacggcugcuucaagaucuaccacaagugcgacaacgccugcaucggcagcaucagaaacggcaccuacgaccacgacguguacagagacgaggcccugaacaacagauuccagaucaagggcguggagcugaagagcggcuacaaggacuggauccuguggaucagcuucgccaucagcugcuuccugcugugcguggcccugcugggcuucaucaugugggccugccagaagggcaacaucagaugcaacaucugcaucuga

SEQ ID NO: 162824 - RNA, 1698 nt, Artificial Sequence
  derived and/or modified CDS sequence (opt4) from hemagglutinin__InfluenzaA__ACR15194
augaaggugaagcugcuggugcugcugugcaccuucaccgccaccuacgccgacaccaucugcaucggcuaccacgccaacaacagcaccgacaccguggacaccgugcuggagaagaacgugaccgugacccacagcgugaaccugcuggagaacagccacaacggcaagcugugccugcugaagggcaucgccccccugcagcugggcaacugcagcguggccggcuggauccugggcaaccccgagugcgagcugcugaucagcaaggagagcuggagcuacaucguggagaagcccaaccccgagaacggcaccugcuaccccggccacuucgccgacuacgaggagcugagagagcagcugagcagcgugagcagcuucgagagauucgagaucuuccccaaggagagcagcuggcccaaccacaccgugaccggcgugagcgccagcugcagccacaacggcgagagcagcuucuacagaaaccugcuguggcugaccggcaagaacggccuguaccccaaccugagcaagagcuacgccaacaacaaggagaaggaggugcuggugcuguggggcgugcaccacccccccaacaucggcaaccagaaggcccuguaccacaccgagaacgccuacgugagcguggugagcagccacuacagcagaaaguucacccccgagaucgccaagagacccaaggugagagaccaggagggcagaaucaacuacuacuggacccugcuggagcccggcgacaccaucaucuucgaggccaacggcaaccugaucgcccccagauacgccuucgcccugagcagaggccugggcagcggcaucaucaacagcaacgcccccauggacaagugcgacgccaagugccagaccccccagggcgccaucaacagcagccugcccuuccagaacgugcaccccgugaccaucggcgagugccccaaguacgugagaagcgccaagcugagaauggugaccggccugagaaacauccccagcauccagagcagaggccuguucggcgccaucgccggcuucaucgagggcggcuggaccggcaugguggacggcugguacggcuaccaccaccagaacgagcagggcagcggcuacgccgccgaccagaagagcacccagaacgccaucaacggcaucaccaacaaggugaacagcgugaucgagaagaugaacacccaguucaccgccgugggcaaggaguucaacaagcuggagagaagaauggagaaccugaacaagaagguggacgacggcuucaucgacaucuggaccuacaacgccgagcugcuggugcugcuggagaacgagagaacccuggacuuccacgacagcaacgugaagaaccuguacgagaaggugaagagccagcugaagaacaacgccaaggagaucggcaacagaugcuucgaguucuaccacaagugcaacgacgagugcauggagagcgugaagaacggcaccuacgacuaccccaaguacagcgaggagagcaagcugaacagagagaagaucgacggcgugaagcuggagagcaugggcguguaccagauccuggccaucuacagcaccguggccagcagccuggugcugcuggugagccugggcgccaucagcuucuggaugugcagcaacggcagccugcagugcagaaucugcaucuga

SEQ ID NO: 162825 - RNA, 1698 nt, Artificial Sequence; identical to SEQ ID NO: 160930
  derived and/or modified CDS sequence (opt4) from hemagglutinin__InfluenzaA__ACR15216

SEQ ID NO: 162826 - RNA, 1701 nt, Artificial Sequence
  derived and/or modified CDS sequence (opt4) from hemagglutinin__InfluenzaA__ACR15227
augaagaccaucaucgcccugagcuacauccugugccugguguucgcccagaagcugcccggcaacgacaacagcaccgccacccugugccugggccaccacgccgugcccaacggcaccaucgugaagaccaucaccaacgaccagaucgaggugaccaacgccaccgagcuggugcagagcagcagcaccggcggcaucugcgacagcccccaccagauccuggacggcgagaacugcacccugaucgacgcccugcugggcgacccccagugcgacggcuuccagaacaagaagugggaccuguucguggagagaagcaaggccuacagcaacugcuaccccuacgacgugcccgacuacgccagccugagaagccugguggccagcagcggcacccuggaguucaacaacgagagcuucaacuggaccggcgugacccagaacggcaccagcagcgccugccagagaagaagcaacaagagcuucuucagcagacugaacuggcugacccaccugaaguucaaguaccccgcccugaacgugaccaugcccaacaacgagaaguucgacaagcuguacaucuggggcgugcaccaccccggcaccgacaacgaccagaucagccuguacgcccagaccagcggcagaaucaccgugagcaccaagagaagccagcagaccgugauccccaacaucggcagcagacccagagugagagacgugcccagcagaaucagcaucuacuggaccaucgugaagcccggcgacauccugcugaucaacagcaccggcaaccugaucgcccccagaggcuacuucaagaucagaagcggcaagagcagcaucaugagaagcgacgcccccaucggcaagugcaacagcgagugcaucacccccaacggcagcauccccaacgacaagcccuuccagaacgugaacagaaucaccuacggcgccugccccagauacgugaagcagaacacccugaagcuggccaccggcaugagaaacgugcccgagagacagaccagaggcaucuucggcgccaucgccggcuucaucgagaacggcugggagggcaugauggacggcugguacggcuucagacaccagaacagcgagggcaccggccaggccgccgaccugaagagcacccaggccgccaucaaccagaucaacggcaagcugaacagacugaucggcaagaccaacgagaaguuccaccagaucgagaaggaguucagcgagguggagggcagaauccaggaccuggagaaguacguggaggacaccaagaucgaccuguggagcuacaacgccgagcugcugguggcccuggagaaccagcacaccaucgaccugaccgacagcgagaugaacaagcuguucgagagaaccaagaagcagcugagagagaacgccgaggacaugggcaacggcugcuucaagaucuaccacaagugcgacaacgccugcaucggcagcaucagaaacggcaccuacgaccacgacguguacagagacgaggcccugaacaacagauuccagaucaagggcguggagcugaagagcggcuacaaggacuggauccuguggaucagcuucgccaucagcugcuuccugcugugcguggcccugcugggcuucaucaugugggccugccagaagggcaacaucagaugcaacaucugcaucuga

SEQ ID NO: 162827 - RNA, 1698 nt, Artificial Sequence
  derived and/or modified CDS sequence (opt4) from hemagglutinin__InfluenzaA__ACR15238
augaaggugaagcugcuggugcugcugugcaccuucaccgccaccuacgccgacaccaucugcaucggcuaccacgccaacaacagcaccgacaccguggacaccgugcuggagaagaacgugaccgugacccacagcgugaaccugcuggagaacagccacaacggcaagcugugccugcugaagggcaucgccccccugcagcugggcaacugcagcguggccggcuggauccugggcaaccccgagugcgagcugcugaucagcaaggagagcuggagcuacaucguggagaagcccaaccccgagaacggcaccugcuaccccggccacuucgccgacuacgaggagcugagagagcagcugagcagcgugagcagcuucgagagauucgagaucuuccccaaggagagcagcuggcccaaccacaccgugaccggcgugagcgccagcugcagccacaacggcgagagcagcuucuacagaaaccugcuguggcugaccggcaagaacggccuguaccccaaccugagcaagagcuacgccaacaacaaggagaaggaggugcuggugcuguggggcgugcaccacccccccaacaucggcgugcagaaggcccuguaccacaccgagaacgccuacgugagcguggugagcagccacuacagcagaaaguucacccccgagaucgccaagagacccaaggugagagaccaggagggcagaaucaacuacuacuggacccugcuggagcccggcgacaccaucaucuucgaggccaacggcaaccugaucgcccccagauacgccuucgcccugagcagaggcuucggcagcggcaucaucaacagcaacgcccccauggacaagugcgacgccaagugccagaccccccagggcgccaucaacagcagccugcccuuccagaacgugcaccccgugaccaucggcgagugccccaaguacgugagaagcgccaagcugagaauggugaccggccugagaaacauccccagcauccagagcagaggccuguucggcgccaucgccggcuucaucgagggcggcuggaccggcaugguggacggcugguacggcuaccagcaccagaacgagcagggcagcggcuacgccgccgaccagaagagcacccagaacgccaucaacggcaucaccaacaaggugaacagcgugaucgagaagaugaacacccaguucaccgccgugggcaaggaguucaacaagcuggagagaagaauggagaaccugaacaagaagguggacgacggcuucaucgacaucuggaccuacaacgccgagcugcuggugcugcuggagaacgagagaacccuggacuuccacgacagcaacgugaagaaccuguacgagaaggugaagagccagcugaagaacaacgccaaggagaucggcaacggcugcuucgaguucuaccacaagugcaacgacgagugcauggagagcgugaagaacggcaccuacgacuaccccaaguacagcgaggagagcaagcugaacagagagaagaucgacggcgugaagcuggagagcaugggcguguaccagauccuggccaucuacagcaccguggccagcagccuggugcugcuggugagccugggcgccaucagcuucuggaugugcagcaacggcagccugcagugcagaaucugcaucuga

SEQ ID NO: 162828 - RNA, 1701 nt, Artificial Sequence
  derived and/or modified CDS sequence (opt4) from hemagglutinin__InfluenzaA__ACR15249
augaagaccaucaucgcccugagcuacauccugugccugguguucgcccagaagcugcccggcaacgacaacagcaccgccacccugugccugggccaccacgccgugcccaacggcaccaucgugaagaccaucaccaacgaccagaucgaggugaccaacgccaccgagcuggugcagagcagcagcaccggcgagaucugcgacagcccccaccagauccuggacggcgagaacugcacccugaucgacgcccugcugggcgacccccagugcgacggcuuccagaacaagaagugggaccuguucguggagagaagcaaggccuacagcaacugcuaccccuacgacgugcccgacuacgccagccugagaagccugguggccagcagcggcacccuggaguucaacaacgagagcuucaacuggaccggcgugacccagaacggcaccagcagcgccugcaucagaagaagcaacaacagcuucuucagcagacugaacuggcugacccacagcaaguucaaguaccccgcccugaacgugaccaugcccaacaacgagaaguucgacaagcuguacaucuggggcgugcaccaccccggcaccgacaacgaccagaucuuccuguacgcccaggccagcggcagaaucaccgugagcaccaagagaagccagcagaccgugauccccaacaucggcagcagacccagagugagaaacauccccagcagaaucagcaucuacuggaccaucgugaagcccggcgacauccugcugaucaacagcaccggcaaccugaucgcccccagaggcuacuucaagaucagaagcggcaagagcagcaucaugagaagcgacgcccccaucggcaagugcaacagcgagugcaucacccccaacggcagcauccccaacgacaagcccuuccagaacgugaacagaaucaccuacggcgccugccccagauacgugaagcagaacacccugaagcuggccaccggcaugagaaacgugcccgagaagcagaccagaggcaucuucggcgccaucgccggcuucaucgagaacggcugggagggcaugguggacggcugguacggcuucagacaccagaacagcgagggcaucggccaggccgccgaccugaagagcacccaggccgccaucgaccagaucaacggcaagcugaacagacugaucggcaagaccaacgagaaguuccaccagaucgagaaggaguucagcgagguggagggcagaauccaggaccuggagaaguacguggaggacaccaagaucgaccuguggagcuacaacgccgagcugcugguggcccuggagaaccagcacaccaucgaccugaccgacagcgagaugaacaagcuguucgagaagaccaagaagcagcugagagagaacgccgaggacaugggcaacggcugcuucaagaucuaccacaagugcgacaacgccugcaucggcagcaucagaaacggcaccuacgaccacgacguguacagagacgaggcccugaacaacagauuccagaucaagggcguggagcugaagagcggcuacaaggacuggauccuguggaucagcuucgccaucagcugcuuccugcugugcguggcccugcugggcuucaucaugugggccugccagaagggcaacaucagaugcaacaucugcaucuga

SEQ ID NO: 162829 - RNA, 1701 nt, Artificial Sequence
  derived and/or modified CDS sequence (opt4) from hemagglutinin__InfluenzaA__ACR15282
augaagaccaucaucgcccugagcuacauccugugccugguguucgcccagaagcugcccggcaacgacaacagcaccgccacccugugccugggccaccacgccgugcccaacggcaccaucgugaagaccaucaugaacgaccagaucgaggugaccaacgccaccgagcuggugcagagcagcagcaccggcgagaucugcgacagcccccaccagauccuggacggcgagaacugcacccugaucgacgcccugcugggcgacccccagugcgacggcuuccagaacaagaagugggaccuguucguggagagaagcaaggccuacagcaacugcuaccccuacgacgugcccgacuacgccagccugagaagccugguggccagcagcggcacccuggaguucaacaacgagagcuucaacuggaccggcgugacccagaacggcaccagcagcgccugcaucagaagaagcaacaacagcuucuucagcagacugaacuggcugacccacagcaaguucaaguaccccgcccugaacgugaccaugcccaacaacgagaaguucgacaagcuguacaucuggggcgugcaccaccccggcaccgacaacgaccagaucuuccuguacgcccaggccagcggcagaaucaccgugagcaccaagagaagccagcagaccgugauccccaacaucggcagcagacccagagugagaaacauccccagcagaaucagcaucuacuggaccaucgugaagcccggcgacauccugcugaucaacagcaccggcaaccugaucgcccccagaggcuacuucaagaucagaagcggcaagagcagcaucaugagaagcgacgcccccaucggcaagugcaacagcgagugcaucacccccaacggcagcauccccaacgacaagcccuuccagaacgugaacagaaucaccuacggcgccugccccagauacgugaagcagaacacccugaagcuggccaccggcaugagaaacgugcccgagaagcagaccagaggcaucuucggcgccaucgccggcuucaucgagaacggcugggagggcaugguggacggcugguacggcuucagacaccagaacagcgagggcaucggccaggccgccgaccugaagagcacccaggccgccaucgaccagaucaacggcaagcugaacagacugaucggcaagaccaacgagaaguuccaccagaucgagaaggaguucagcgagguggagggcagaauccaggaccuggagaaguacguggaggacaccaagaucgaccuguggagcuacaacgccgagcugcugguggcccuggagaaccagcacaccaucgaccugaccgacagcgagaugaacaagcuguucgagaagaccaagaagcagcugagagagaacgccgaggacaugggcaacggcugcuucaagaucuaccacaagugcgacaacgccugcaucggcagcaucagaaacggcaccuacgaccacgacguguacagagacgaggcccugaacaacagauuccagaucaagggcguggagcugaagagcggcuacaaggacuggauccuguggaucagcuucgccaucagcugcuuccugcugugcguggcccugcugggcuucaucaugugggccugccagaagggcaacaucagaugcaacaucugcaucuga

SEQ ID NO: 162830 - RNA, 1701 nt, Artificial Sequence
  derived and/or modified CDS sequence (opt4) from hemagglutinin__InfluenzaA__ACR15293
augaagaccaucaucgcccugagcuacauccugugccugguguucgcccagaagcugcccggcaacgacaacagcaccgccacccugugccugggccaccacgccgugcccaacggcaccaucgugaagaccaucaccaacgaccagaucgaggugaccaacgccaccgagcuggugcagagcagcagcaccggcggcaucugcgacagcccccaccagauccuggacggcgagaacugcacccugaucgacgcccugcugggcgacccccagugcgacggcuuccagaacaagaagugggaccuguucguggagagaagcaaggccuacagcaacugcuaccccuacgacgugcccgacuacgccagccugagaagccugaucgccagcagcggcacccuggaguucaacaacgagaacuucaacuggaccggcgugacccagaacggcaccagcagcgccugcaagagaggcagcgacaacagcuucuucagcagacugaacuggcugacccaccugaaguucaaguaccccgcccugaaggugaccaugcccaacaacgagaaguucgacaagcuguacaucuggggcgugcaccaccccggcaccgacaacgaccagaucuuccuguacgcccaggccagcggcagaaucaccgugagcaccaagagaagccagcagaccgugauccccaacaucggcagcagacccagagugagaaacauccccagcagaaucagcaucuacuggaccaucgugaagcccggcgacauccugcugaucaacagcaccggcaaccugaucgcccccagaggcuacuucaagaucagaagcggcaagagcagcaucaugagaagcgacgcccccaucggcaagugcaacagcgagugcaucacccccaacggcagcauccccaacgacaagcccuuccagaacgugaacagaaucaccuacggcgccugccccagauacgugaagcagaacacccugaagcuggccaccggcaugagaaacgugcccgagaagcagaccagaggcaucuucggcgccaucgccggcuucaucgagaacggcugggagggcaugguggacggcugguacggcuucagacaccagaacagcgagggcaucggccaggccgccgaccugaagagcacccaggccgccaucaaccagaucaacggcaagcugaacagacugaucggcaagaccaacgagaaguuccaccagaucgagaaggaguucagcgagguggagggcagaauccaggaccuggagaaguacguggaggacaccaagaucgaccuguggagcuacaacgccgagcugcugguggcccuggagaaccagcacaccaucgaccugaccgacagcgagaugaacaagcuguucgagagaaccaagaagcagcugagagagaacgccgaggacaugggcaacggcugcuucaagaucuaccacaagugcgacaacgccugcaucggcagcaucagaaacggcaccuacgaccacgacguguacagagacgaggcccugaacaacagauuccagaucaagggcguggagcugaagagcggcuacaaggacuggauccuguggaucagcuucgccaucagcugcuuccugcugugcguggcccugcugggcuucaucaugugggccugccagaagggcaacaucagaugcaacaucugcaucuga

SEQ ID NO: 162831 - RNA, 1698 nt, Artificial Sequence
  derived and/or modified CDS sequence (opt4) from hemagglutinin__InfluenzaA__ACR15304
augaaggccaagcugcuggugcugcugugcaccuucaccgccaccuacgccgacaccaucugcaucggcuaccacgccaacaacagcaccgacaccguggacaccgugcuggagaagaacgugaccgugacccacagcgugaaccugcuggaggacagccacaacggcaagcugugccugcugaagggcaucgccccccugcagcugggcaacugcagcguggccggcuggauccugggcaaccccgagugcgagcugcugaucagcaaggagagcuggagcuacaucguggagacccccaaccccgagaacggcaccugcuaccccggcuacuucgccgacuacgaggagcugagagagcagcugagcagcgugagcagcuucgagagauucgagaucuuccccaaggagagcagcuggcccaaccacaccgugaccggcgugagcgccagcugcagccacaacggcaagagcagcuucuacagaaaccugcuguggcugaccggcaagaacggccuguaccccaaccugagcaagagcuacgccaacaacaaggagaaggaggugcuggugcuguggggcgugcaccacccccccaacaccggcaaccagagagcccuguaccacaccgagaacgccuacgugagcguggugagcagccacuacagcagaagauucacccccgagaucgccaagagacccaaggugagagaccaggagggcagaaucaacuacuacuggacccugcuggagcccggcgacaccaucaucuucgaggccaacggcaaccugaucgcccccugguacgccuucgcccugagcagaggcuucggcagcggcaucaucaccagcaacgcccccauggacgagugcgacgccaagugccagaccccccagggcgccaucaacagcagccugcccuuccagaacgugcaccccgugaccaucggcgagugccccaaguacgugagaagcgccaagcugagaauggugaccggccugagaaacauccccagcauccagagcagaggccuguucggcgccaucgccggcuucaucgagggcggcuggaccggcaugguggacggcugguacggcuaccaccaccagaacgagcagggcagcggcuacgccgccgaccagaagagcacccagaacgccaucaacggcaucaccaacaaggugaacagcgugaucgagaagaugaacacccaguucaccgccgugggcaaggaguucaacagacuggagagaagaauggagaaccugaacaagaagguggacgacggcuuccuggacaucuggaccuacaacgccgagcugcuggugcugcuggagaacgagagaacccuggacuuccacgacagcaacgugaagaaccuguacgagaaggugaagagccagcugaagaacaacgccaaggagaucggcaacggcugcuucgaguucuaccacaagugcaacaacgagugcauggagagcgugaagaacggcaccuacgacuaccccaaguacagcgaggagagcaagcugaacagagagaagaucgacggcgugaagcuggagagcaugggcguguaccagauccuggccaucuacagcaccguggccagcagccuggugcugcuggugagccugggcgccaucagcuucuggaugugcagcaacggcagccugcagugcagaaucugcaucuga

SEQ ID NO: 162832 - RNA, 1698 nt, Artificial Sequence
  derived and/or modified CDS sequence (opt4) from hemagglutinin__InfluenzaA__ACR15315
augaaggccaagcugcuggugcugcugugcaccuucaccgccaccuacgccgacaccaucugcaucggcuaccacgccaacaacagcaccgacaccguggacaccgugcuggagaagaacgugaccgugacccacagcgugaaccugcuggaggacagccacaacggcaagcugugccugcugaagggcaucgccccccugcagcugggcaacugcagcguggccggcuggauccugggcaaccccgagugcgagcugcugaucagcaaggagagcuggagcuacaucguggagacccccaaccccgagaacggcaccugcuaccccggcuacuucgccgacuacgaggagcugagagagcagcugagcagcgugagcagcuucgagagauucgagaucuuccccaagggcagcagcuggcccaaccacaccgugaccggcgugagcgccagcugcagccacaacggcaagagcagcuucuacagaaaccugcuguggcugaccggcaagaacggccuguaccccaaccugagcaugagcuacgugaacaacaaggagaaggaggugcuggugcuguggggcgugcaccacccccccaacaucagagaccagagagcccuguaccacaccgagaacgccuacgugagcguggugagcagccacuacagcagaagauucacccccgagaucgccaagagacccaaggugagagaccaggagggcagaaucaacuacuacuggacccugcuggagcccggcgacaccaucaucuucgaggccaacggcaaccugaucgcccccugguacgccuucgcccugagcagaggcuucggcagcggcaucaucaccagcaacgcccccaugggcgagugcgacgccaagugccagaccccccagggcgccaucaacagcagccugcccuuccagaacgugcaccccgugaccaucggcgagugccccaaguacgugagaagcgccaagcugagaauggugaccggccugagaaacauccccagcauccagagcagaggccuguucggcgccaucgccggcuucaucgagggcggcuggaccggcaugguggacggcugguacggcuaccaccaccagaacgagcagggcagcggcuacgccgccgaccagaagagcacccagaacgccaucaacggcaucaccaacaaggugaacagcgugaucgagaagaugaacacccaguucaccgccgugggcaaggaguucaacaagcuggagagaagaauggagaaccugaacaagaagguggacgacggcuuccuggacaucuggaccuacaacgccgagcugcuggugcugcuggagaacgagagaacccuggacuuccacgacagcaacgugaagaaccuguacgagaaggugaagagccagcugaagaacaacgccaaggagaucggcaacggcugcuucgaguucuaccacaagugcaacaacgagugcauggagagcgugaagaacggcaccuacgacuaccccaaguacagcgaggagagcaagcugaacagagagaagaucgacggcgugaagcuggagagcaugggcguguaccagauccuggccaucuacagcaccguggccagcagccuggugcugcuggugagccugggcgccaucagcuucuggaugugcagcaacggcagccugcagugcagaaucugcaucuga

SEQ ID NO: 162833 - RNA, 1698 nt, Artificial Sequence
  derived and/or modified CDS sequence (opt4) from hemagglutinin__InfluenzaA__ACR15326
augaaggccaagcugcuggugcugcugugcaccuucaccgccaccuacgccgacaccaucugcaucggcuaccacgccaacaacagcaccgacaccguggacaccgugcuggagaagaacgugaccgugacccacagcgugaaccugcuggaggacagccacaacggcaagcugugccugcugaagggcaucgccccccugcagcugggcaacugcagcguggccggcuggauccugggcaaccccgagugcgagcugcugaucagcaaggagagcuggagcuacaucguggagacccccaaccccgagaacggcaccugcuaccccggcuacuucgccgacuacgaggagcugagagagcagcugagcagcgugagcagcuucgagagauucgagaucuuccccaagggcagcagcuggcccaaccacaccgugaccggcgugagcgccagcugcagccacaacggcaagagcagcuucuacagaaaccugcuguggcugaccggcaagaacggccuguaccccaaccugagcaugagcuacgugaacaacaaggagaaggaggugcuggugcuguggggcgugcaccacccccccaacaucggcaaccagagagcccuguaccacaccgagaacgccuacgugagcguggugagcagccacuacagcagaagauucacccccgagaucgccaagagacccaaggugagagaccaggagggcagaaucaacuacuacuggacccugcuggagcccggcgacaccaucaucuucgaggccaacggcaaccugaucgcccccugguacgccuucgcccugagcagaggcuucggcagcggcaucaucaccagcaacgcccccaugggcgagugcgacgagaagugccagaccccccagggcgccaucaacagcagccugcccuuccagaacgugcaccccgugaccaucggcgagugccccaaguacgugagaagcgccaagcugagaauggugaccggccugagaaacauccccagcauccagagcagaggccuguucggcgccaucgccggcuucaucgagggcggcuggaccggcaugguggacggcugguacggcuaccaccaccagaacgagcagggcagcggcuacgccgccgaccagaagagcacccagaacgccaucaacggcaucaccaacaaggugaacagcgugaucgagaagaugaacacccaguucaccgccgugggcaaggaguucaacaagcuggagagaagaauggagaaccugaacaagaagguggacgacggcuuccuggacaucuggaccuacaacgccgagcugcuggugcugcuggagaacgagagaacccuggacuuccacgacagcaacgugaagaaccuguacgagaaggugaagagccagcugaagaacaacgccaaggagaucggcaacggcugcuucgaguucuaccacaagugcaacaacgagugcauggagagcgugaagaacggcaccuacgacuaccccaaguacagcgaggagagcaagcugaacagagagaagaucgacggcgugaagcuggagagcaugggcguguaccagauccuggccaucuacagcaccguggccagcagccuggugcugcuggugagccugggcgccaucagcuucuggaugugcagcaacggcagccugcagugcagaaucugcaucuga

SEQ ID NO: 162834 - RNA, 1698 nt, Artificial Sequence
  derived and/or modified CDS sequence (opt4) from hemagglutinin__InfluenzaA__ACR15359
augaaggugaagcugcuggugcugcugugcaccuucaccgccaccuacgccgacaccaucugcaucggcuaccacgccaacaacagcaccgacaccguggacaccgugcuggagaagaacgugaccgugacccacagcgugaaccugcuggagaacagccacaacggcaagcugugccugcugaagggcaucgccccccugcagcugggcaacugcagcguggccggcuggauccugggcaaccccgagugcggccugcugaucagcaaggagagcuggagcuacaucguggagaagcccaaccccgagaacggcaccugcuaccccggccacuucgccgacuacgaggagcugagagagcagcugagcagcgugagcagcuucgagagauucgagaucuuccccaaggagagcagcuggcccaaccacaccgugaccggcgugagcgccagcugcagccacaacggcgagagcagcuucuacagaaaccugcuguggcugaccggcaagaacggccuguaccccaaccugagcaagagcuacgccaacaacaaggagaaggaggugcuggugcuguggggcgugcaccacccccccaacaucggcgaccagaaggcccuguaccacaccgagaacgccuacgugagcguggugagcagccacuacagcagaaaguucacccccgagaucgccaagagacccaaggugagagaccaggagggcagaaucaacuacuacuggacccugcuggagcccggcgacaccaucaucuucgaggccaacggcaaccugaucgcccccagauacgccuucgcccugagcagaggcuucggcagcggcaucaucaacagcaacgcccccauggacaagugcgacgccaagugccagaccccccagggcgccaucaacagcagccugcccuuccagaacgugcaccccgugaccaucggcgagugccccaaguacgugagaagcgccaagcugagaauggugaccggccugagaaacauccccagcauccagagcagaggccuguucggcgccaucgccggcuucaucgagggcggcuggaccggcaugguggacggcugguacggcuaccaccaccagaacgagcagggcagcggcuacgccgccgaccagaagagcacccagaacgccaucaacggcaucaccaacaaggugaacagcgugaucgagaagaugaacacccaguucaccgccgugggcaaggaguucaacaagcuggagagaagaauggagaaccugaacaagaagguggacgacggcuucaucgacaucuggaccuacaacgccgagcugcuggugcugcuggagaacgagagaacccuggacuuccacgacagcaacgugaagaaccuguacgagaaggugaagagccagcugaagaacaacgccaaggagaucggcaacggcugcuucgaguucuaccacaagugcaacgacgagugcauggagagcgugaagaacggcaccuacgacuaccccaaguacagcgaggagagcaagcugaacagagagaagaucgacggcgugaagcuggagagcaugggcguguaccagauccuggccaucuacagcaccguggccagcagccuggugcugcuggugagccugggcgccaucagcuucuggaugugcagcaacggcagccugcagugcagaaucugcaucuga

SEQ ID NO: 162835 - RNA, 1698 nt, Artificial Sequence
  derived and/or modified CDS sequence (opt4) from hemagglutinin__InfluenzaA__ACR15370
augaaggugaagcugcuggugcugcugugcacccugaccgccaccuacgccgacaccaucugcaucggcuaccacgccaacaacagcaccgacaccguggacaccgugcuggagaagaacgugaccgugacccacagcgugaaccugcuggagaacagccacaacggcaagcugugccugcugaagggcaucgccccccugcagcugggcaacugcagcguggccggcuggauccugggcaaccccgagugcgagcugcugaucagcaaggagagcuggagcuacaucguggagaagcccaaccccgagaacggcaccugcuaccccggccacuucgccgacuacgaggagcugagagagcagcugagcagcgugagcagcuucgagagauucgagaucuuccccaaggagagcagcuggcccaaccacaccgugaccggcgugagcgccagcugcagccacaacggcgagagcagcuucuacagaaaccugcuguggcugaccggcaagaacggccuguaccccaaccugagcaagagcuacgccaacaacaaggagaaggaggugcuggugcuguggggcgugcaccacccccccaacaucggcgaccagaaggcccuguaccacaccgagaacgccuacgugagcguggugagcagccacuacagcagaaaguucacccccgagaucgccaagagacccaaggugagagaccaggagggcagaaucaacuacuacuggacccugcuggagcccggcgacaccaucaucuucgaggccaacggcaaccugaucgcccccagauacgccuucgcccugagcagaggcuucggcagcggcaucaucaacagcaacgcccccauggacaagugcgacgccaagugccagaccccccagggcgccaucaacagcagccugcccuuccagaacgugcaccccgugaccaucggcgagugccccaaguacgugagaagcgccaagcugagaauggugaccggccugagaaacauccccagcauccagagcagaggccuguucggcgccaucgccggcuucaucgagggcggcuggaccggcaugguggacggcugguacggcuaccaccaccagaacgagcagggcagcggcuacgccgccgaccagaagagcacccagaacgccaucaacggcaucaccaacaaggugaacagcgugaucgagaagaugaacacccaguucaccgccgugggcaaggaguucaacaagcuggagagaagaauggagaaccugaacaagaagguggacgacggcuucaucgacaucuggaccuacaacgccgagcugcuggugcugcuggagaacgagagaacccuggacuuccacgacagcaacgugaagaaccuguacgagaaggugaagagccagcugaagaacaacgccaaggagaucggcaacggcugcuucgaguucuaccacaagugcaacgacgagugcauggagagcgugaagaacggcaccuacgacuaccccaaguacagcgaggagagcaagcugaacagagagaagaucgacggcgugaagcuggagagcaugggcguguaccagauccuggccaucuacagcaccguggccagcagccugauccugcuggugagccugggcgccaucagcuucuggaugugcagcaacggcagccugcagugcagaaucugcaucuga

SEQ ID NO: 162836 - RNA, 1701 nt, Artificial Sequence; identical to SEQ ID NO: 162361
  derived and/or modified CDS sequence (opt4) from hemagglutinin__InfluenzaA__ACR15381

SEQ ID NO: 162837 - RNA, 1701 nt, Artificial Sequence; identical to SEQ ID NO: 162368
  derived and/or modified CDS sequence (opt4) from hemagglutinin__InfluenzaA__ACR15392

SEQ ID NO: 162838 - RNA, 1701 nt, Artificial Sequence; identical to SEQ ID NO: 161988
  derived and/or modified CDS sequence (opt4) from hemagglutinin__InfluenzaA__ACR15403

SEQ ID NO: 162839 - RNA, 1701 nt, Artificial Sequence; identical to SEQ ID NO: 161988
  derived and/or modified CDS sequence (opt4) from hemagglutinin__InfluenzaA__ACR15414

SEQ ID NO: 162840 - RNA, 1698 nt, Artificial Sequence; identical to SEQ ID NO: 162834
  derived and/or modified CDS sequence (opt4) from hemagglutinin__InfluenzaA__ACR15425

SEQ ID NO: 162841 - RNA, 1698 nt, Artificial Sequence
  derived and/or modified CDS sequence (opt4) from hemagglutinin__InfluenzaA__ACR15436
augaaggugaagcugcuggugcugcugugcaccuucaccgccaccuacgccgacaccaucugcaucggcuaccacgccaacaacagcaccgacaccguggacaccgugcuggagaagaacgugaccgugacccacagcgugaaccugcuggagaacagccacaacggcaagcugugccugcugaagggcaucgccccccugcagcugggcaacugcagcguggccggcuggauccugggcaaccccgagugcgagcugcugaucagcaaggagagcuggagcuacaucguggagaagcccaaccccgagaacggcaccugcuaccccggccacuucgccgacuacgaggagcugagagagcagcugagcagcgugagcagcuucgagagauucgagaucuuccccaaggagagcagcuggcccaaccacaccgugaccggcgugagcgccagcugcagccacaacggcgagagcagcuucuacagaaaccugcuguggcugaccggcaagaacggccuguaccccaaccugagcaagagcuacgccaacaacaagggcaaggaggugcuggugcuguggggcgugcaccacccccccaacaucggcgaccagaacacccuguaccacaccgagaacgccuacgugagcguggugagcagccacuacagcagaaaguucacccccgagaucgccaagagacccaaggugagagaccaggagggcagaaucaacuacuacuggacccugcuggagcccggcgacaccaucaucuucgaggccaacggcaaccugaucgcccccagauacgccuucgcccugagcagaggcuucggcagcggcaucaucaacagcaacgcccccauggacaagugcgacgccaagugccagaccccccagggcgccaucaacagcagccugcccuuccagaacgugcaccccgugaccaucggcgagugccccaaguacgugagaagcgccaagcugagaauggugaccggccugagaaacauccccagcauccagagcagaggccuguucggcgccaucgccggcuucaucgagggcggcuggaccggcaugguggacggcugguacggcuaccaccaccagaacgagcagggcagcggcuacgccgccgaccagaagagcacccagaacgccaucaacggcaucaccaacaaggugaacagcgugaucgagaagaugaacacccaguucaccgccgugggcaaggaguucaacaagcuggagagaagaauggagaaccugaacaagaagguggacgacggcuucaucgacaucuggaccuacaacgccgagcugcuggugcugcuggagaacgagagaacccuggacuuccacgacagcaacgugaagaaccuguacgagaaggugaagagccagcugaagaacaacgccaaggagaucggcaacggcugcuucgaguucuaccacaagugcaacgacgagugcauggagagcgugaagaacggcaccuacgacuaccccaaguacagcgaggagagcaagcugaacagagagaagaucgacggcgugaagcuggagagcaugggcguguaccagauccuggccaucuacagcaccguggccagcagccuggugcugcuggugagccugggcgccaucagcuucuggaugugcagcaacggcagccugcagugcagaaucugcaucuga

SEQ ID NO: 162842 - RNA, 1698 nt, Artificial Sequence
  derived and/or modified CDS sequence (opt4) from hemagglutinin__InfluenzaA__ACR15458
augaaggugaagcugcuggugcugcugugcaccuucaccgccaccuacgccgacaccaucugcaucggcuaccacgccaacaacagcaccgacaccguggacaccgugcuggagaagaacgugaccgugacccacagcgugaaccugcuggagaacagccacaacggcaagcugugccugcugaagggcaucgccccccugcagcugggcaacugcagcguggccggcuggauccugggcaaccccgagugcgagcugcugaucagcaaggagagcuggagcuacaucguggagaaccccaaccccgagaacggcaccugcuaccccggccacuucgccgacuacgaggagcugagagagcagcugagcagcgugagcagcuucgagagauucgagaucuuccccaaggagagcagcuggcccaaccacaccgugaccggcgugagcgccagcugcagccacaacggcgagagcagcuucuacagaaaccugcuguggcugaccggcaagaacggccuguaccccaaccugagcaagagcuacgccaacaacaaggagaaggaggugcuggugcuguggggcgugcaccacccccccaacaucggcgaccagaaggcccuguaccacaccgagaacgccuacgugagcguggugagcagccacuacagcagaaaguucacccccgagaucgccaagagacccaaggugagagaccaggagggcagaaucaacuacuacuggacccugcuggagcccggcgacaccaucaucuucgaggccaacggcaaccugaucgcccccagauacgccuucgcccugagcagaggcuucggcagcggcaucaucaacagcaacgcccccauggacaagugcgacgccaagugccagaccccccagggcgccaucaacagcagccugcccuuccagaacgugcaccccgugaccaucggcgagugccccaaguacgugagaagcgccaagcugagaauggugaccggccugagaaacauccccagcauccagagcagaggccuguucggcgccaucgccggcuucaucgagggcggcuggaccggcaugguggacggcugguacggcuaccaccaccagaacgagcagggcagcggcuacgccgccgaccagaagagcacccagaacgccaucaacggcaucaccaacaaggugaacagcgugaucgagaagaugaacacccaguucaccgccgugggcaaggaguucaacaagcuggagagaagaauggagaaccugaacaagaagguggacgacggcuucaucgacaucuggaccuacaacgccgagcugcuggugcugcuggagaacgagagaacccuggacuuccacgacagcaacgugaagaaccuguacgagaaggugaagagccagcugaagaacaacgccaaggagaucggcaacggcugcuucgaguucuaccacaagugcaacgacgagugcauggagagcgugaagaacggcaccuacgacuaccccaaguacagcgaggagagcaagcugaacagagagaagaucgacggcgugaagcuggagagcaugggcguguaccagauccuggccaucuacagcaccguggccagcagccuggugcugcuggugagccugggcgccaucagcuucuggaugugcagcaacggcagccugcagugcagaaucugcaucuga

SEQ ID NO: 162843 - RNA, 1698 nt, Artificial Sequence
  derived and/or modified CDS sequence (opt4) from hemagglutinin__InfluenzaA__ACR15469
augaaggugaagcugcuggugcugcugugcaccuucaccgccaccuacgccgacaccaucugcaucggcuaccacgccaacaacagcaccgacaccguggacaccgugcuggagaagaacgugaccgugacccacagcgugaaccugcuggaggacagccacaacggcaagcugugccugcugaagggcaucgccccccugcagcugggcaacugcagcguggccggcuggauccugggcaaccccgagugcgagcugcugaucagcaaggagagcuggagcuacaucguggagaagcccgaccccgagaacggcaccugcuaccccggccacuucgccgacuacgaggagcugagagagcagcugagcagcgugagcagcuucgagagauucgagaucuuccccaaggagagcagcuggcccaaccacaccgugaccggcgugagcgccagcugcagccacaacggcgagagcagcuucuacagaaaccugcuguggcugaccggcaagaacggccuguaccccaaccugagcaagagcuacgccaacaacaaggagaaggaggugcuggugcuguggggcgugcaccacccccccaacaucggcgaccagaacacccuguaccacaccgagaacgccuacgugagcguggugagcagccacuacagcagaaaguucacccccgagaucgccaagagacccaaggugagagaccaggagggcagaaucaacuacuacuggacccugcuggagcccggcgacaccaucaucuucgaggccaacggcaaccugaucgcccccagauacgccuucgcccugagcagaggcuucggcagcggcaucaucaacagcaacgcccccauggacaagugcgacgccaagugccagaccccccagggcgccaucaacagcagccugcccuuccagaacgugcaccccgugaccaucggcgagugccccaaguacgugagaagcgccaagcugagaauggugaccggccugagaaacauccccagcauccagagcagaggccuguucggcgccaucgccggcuucaucgagggcggcuggaccggcaugguggacggcugguacggcuaccaccaccagaacgagcagggcagcggcuacgccgccgaccagaagagcacccagaacgccaucaacggcaucaccaacaaggugaacagcgugaucgagaagaugaacacccaguucaccgccgugggcaaggaguucaacaagcuggagagaagaauggagaaccugaacaagaagguggacgacggcuucaucgacaucuggaccuacaacgccgagcugcuggugcugcuggagaacgagagaacccuggacuuccacgacagcaacgugaagaaccuguacgagaaggugaagagccagcugaagaacaacgccaaggagaucggcaacggcugcuucgaguucuaccacaagugcaacgacgagugcauggagagcgugaagaacggcaccuacgacuaccccaaguacagcgaggagagcaagcugaacagagagaagaucgacggcgugaagcuggagagcaugggcguguaccagauccuggccaucuacagcaccguggccagcagccuggugcugcuggugagccugggcgccaucagcuucuggaugugcagcaacggcagccugcagugcagaaucugcaucuga

SEQ ID NO: 162844 - RNA, 1698 nt, Artificial Sequence; identical to SEQ ID NO: 162841
  derived and/or modified CDS sequence (opt4) from hemagglutinin__InfluenzaA__ACR15480

SEQ ID NO: 162845 - RNA, 1698 nt, Artificial Sequence
  derived and/or modified CDS sequence (opt4) from hemagglutinin__InfluenzaA__ACR15491
augaaggugaagcugcuggugcugcugugcaccuucaccgccaccuacgccgacaccaucugcaucggcuaccacgccaacaacagcaccgacaccguggacaccgugcuggagaagaacgugaccgugacccacagcgugaaccugcuggagaacagccacaacggcaagcugugccugcugaagggcaucgccccccugcagcugggcaacugcagcguggccggcuggauccugggcaaccccgagugcgagcugcugaucagcaaggagagcuggagcuacaucguggagaagcccaaccccgagaacggcaccugcuaccccggccacuucgccgacuacgaggagcugagagagcagcugagcagcgugagcagcuucgagagauucgagaucuuccccaaggagagcagcuggcccaaccacaccgugaccggcgugagcgccagcugcagccacaacggcgagagcagcuucuacagaaaccugcuguggcugaccggcagaaacggccuguaccccaaccugagcaagagcuacgccaacaacaaggagaaggaggugcuggugcuguggggcgugcaccacccccccaacaucguggaccagaagacccuguacagaaccgagaacgccuacgugagcguggugagcagccacuacagcagaaaguucacccccgagaucgccaagagacccaaggugagagaccaggagggcagaaucaacuacuacuggacccugcuggagcccggcgacaccaucaucuucgaggccaacggcaaccugaucgcccccagauacgccuucgcccugagcagaggcuucggcagcggcaucaucaacagcaacgcccccauggacaagugcgacgccaagugccagaccccccagggcgccaucaacagcagccugcccuuccagaacgugcaccccgugaccaucggcgagugccccaaguacgugagaagcgccaagcugagaauggugaccggccugagaaacauccccagcauccagagcagaggccuguucggcgccaucgccggcuucaucgagggcggcuggaccggcaugguggacggcugguacggcuaccaccaccagaacgagcagggcagcggcuacgccgccgaccagaagagcacccagaacgccaucaacggcaucaccaacaaggugaacagcgugaucgagaagaugaacacccaguucaccgccgugggcaaggaguucaacaagcuggagagaagaauggagaaccugaacaagaagguggacgacggcuucaucgacaucuggaccuacaacgccgagcugcuggugcugcuggagaacgagagaacccuggacuuccacgacagcaacgugaagaaccuguacgagaaggugaagagccagcugaagaacaacgccaaggagaucggcaacggcugcuucgaguucuaccacaagugcaacgacgagugcauggagagcgugaagaacggcaccuacgacuaccccaaguacagcgaggagagcaagcugaacagagagaagaucgacggcaucaagcuggagagcaugggcguguaccagauccuggccaucuacagcaccguggccagcagccuggugcugcuggugagccugggcgccaucagcuucuggaugugcagcaacggcagccugcagugcagaaucugcaucuga

SEQ ID NO: 162846 - RNA, 1698 nt, Artificial Sequence
  derived and/or modified CDS sequence (opt4) from hemagglutinin__InfluenzaA__ACR15502
augaaggugaagcugcuggugcugcugugcaccuucaccgccaccuacgccgacaccaucugcaucggcuaccacgccaacaacgccaccgacaccguggacaccgugcuggagaagaacgugaccgugacccacagcgugaaccugcuggagaacagccacaacggcaagcugugccugcugaagggcaucgccccccugcagcugggcaacugcagcguggccggcuggauccugggcaaccccgagugcgagcugcugaucagcaaggagagcuggagcuacaucguggagaagcccaaccccgagaacggcaccugcuaccccggccacuucgccgacuacgaggagcugagagagcagcugagcagcgugagcagcuucgagagauucgagaucuuccccaaggagagcagcuggcccaaccacaccgugaccggcgugagcgccagcugcagccacaacggcgagagcagcuucuacagaaaccugcuguggcugaccggcaagaacggccuguaccccaaccugagcaagagcuacgccaacaacaagggcaaggaggugcuggugcuguggggcgugcaccacccccccaacaucggcgaccagaacacccuguaccacaccgagaacgccuacgugagcguggugagcagccacuacagcagaaaguucacccccgagaucgccaagagacccaaggugagagaccaggagggcagaaucaacuacuacuggacccugcuggagcccggcgacaccaucaucuucgaggccaacggcaaccugaucgcccccagauacgccuucgcccugagcagaggcuucggcagcggcaucaucaacagcaacgcccccauggacaagugcgacgccaagugccagaccccccagggcgccaucaacagcagccugcccuuccagaacgugcaccccgugaccaucggcgagugccccaaguacgugagaagcgccaagcugagaauggugaccggccugagaaacauccccagcauccagagcagaggccuguucggcgccaucgccggcuucaucgagggcggcuggaccggcaugguggacggcugguacggcuaccaccaccagaacgagcagggcagcggcuacgccgccgaccagaagagcacccagaacgccaucaacggcaucaccaacaaggugaacagcgugaucgagaagaugaacacccaguucaccgccgugggcaaggaguucaacaagcuggagagaagaauggagaaccugaacaagaagguggacgacggcuucaucgacaucuggaccuacaacgccgagcugcuggugcugcuggagaacgagagaacccuggacuuccacgacagcaacgugaagaaccuguacgagaaggugaagagccagcugaagaacaacgccaaggagaucggcaacggcugcuucgaguucuaccacaagugcaacgacgagugcauggagagcgugaagaacggcaccuacgacuaccccaaguacagcgaggagagcaagcugaacagagagaagaucgacggcgugaagcuggagagcaugggcguguaccagauccuggccaucuacagcaccguggccagcagccuggugcugcuggugagccugggcgccaucagcuucuggaugugcagcaacggcagccugcagugcagaaucugcaucuga

SEQ ID NO: 162847 - RNA, 1698 nt, Artificial Sequence; identical to SEQ ID NO: 162703
  derived and/or modified CDS sequence (opt4) from hemagglutinin__InfluenzaA__ACR15513

SEQ ID NO: 162848 - RNA, 1701 nt, Artificial Sequence
  derived and/or modified CDS sequence (opt4) from hemagglutinin__InfluenzaA__ACR15524
augaagaccaucaucgcccugagcuacauccugugccugguguucgcccagaagcugcccggcaacgacaacagcaccgccacccugugccugggccaccacgccgugcccaacggcaccaucgugaagaccaucaccaacgaccagaucgaggugaccaacgccaccgagcuggugcagagcagcagcaccggcggcaucugcgacagcccccaccagauccuggacggcgagaacugcacccugaucgacgcccugcugggcgacccccagugcgacggcuuccagaacaagaagugggaccuguucguggagagaagcaaggccuacagcaacugcuaccccuacgacgugcccgacuacgccagccugagaagccugguggccagcagcggcacccuggaguucaacaacgagagcuucaacuggaccggcgugacccagaacggcaccagcagcgccugcaagagaagaagcaacaagagcuucuucagcagacugaacuggcugacccaccugaaguucaaguaccccgcccugaacgugaccaugcccaacaacgagaaguucgacaagcuguacaucuggggcgugcaccaccccggcaccgacaacgaccagaucagccuguacgcccaggccagcggcagaaucaccgugagcaccaagagaagccagcagaccgugauccccaacaucggcagcagacccagagugagagacgugcccagcagaaucagcaucuacuggaccaucgugaagagcggcgacauccugcugaucaacagcaccggcaaccugaucgcccccagaggcuacuucaagaucagaagcggcaagagcagcaucaugagaagcgacgcccccaucggcaagugcaacagcgagugcaucacccccaacggcagcauccccaacgacaagcccuuccagaacgugaacagaaucaccuacggcgccugccccagauacgugaagcagaacacccugaagcuggccaccggcaugagaaacgugcccgagaagcagaccagaggcaucuucggcgccaucgccggcuucaucgagaacggcugggagggcaugguggacggcugguacggcuucagacaccagaacagcgagggcaccggccaggccgccgaccugaagagcacccaggccgccaucaaccagaucaacggcaagcugaacagacugaucggcaagaccaacgagaaguuccaccagaucgagaaggaguucagcgagguggagggcagaauccaggaccuggagaaguacguggaggacaccaagaucgaccuguggagcuacaacgccgagcugcugguggcccuggagaaccagcacaccaucgaccugaccgacagcgagaugaacaagcuguucgagagaaccaagaagcagcugagagagaacgccgaggacaugggcaacggcugcuucaagaucuaccacaagugcgacaacgccugcaucggcagcaucagaaacggcaccuacgaccacgacguguacagagacgaggcccugaacaacagauuccagaucaagggcguggagcugaagagcggcuacaaggacuggauccuguggaucagcuucgccaucagcugcuuccugcugugcguggugcugcugggcuucaucaugugggccugccagaagggcaacaucagaugcaacaucugcaucuga

SEQ ID NO: 162849 - RNA, 1701 nt, Artificial Sequence; identical to SEQ ID NO: 162657
  derived and/or modified CDS sequence (opt4) from hemagglutinin__InfluenzaA__ACR15535

SEQ ID NO: 162850 - RNA, 1701 nt, Artificial Sequence
  derived and/or modified CDS sequence (opt4) from hemagglutinin__InfluenzaA__ACR15546
augaagaccaucaucgcccugagcuacauccugugccugguguucgcccagaagcugcccggcaacgacaacagcaccgccacccugugccugggccaccacgccgugcccaacggcaccaucgugaagaccaucaccaacgaccagaucgaggugaccaacgccaccgagcuggugcagagcagcagcaccggcggcaucugcgacagcccccaccacauccuggacggcgagaacugcacccugaucgacgcccugcugggcgacccccagugcgacggcuuccagaacaagaagugggaccuguucguggagagaagcaaggccuacagcaacugcuaccccuacgacgugcccgacuacgccagccugagaagccugguggccagcagcggcacccuggaguucaacaacgagagcuucaacuggaccggcgugacccagaacggcaccagcagcgccugcaagagaagaagcaacaacagcuucuucagcagacugaacuggcugacccaccugaaguucaaguaccccgcccugaacgugaccaugcccaacaacgagaaguucgacaagcuguacaucuggggcgugcaccaccccggcaccgacaacgaccagaucagccuguacgcccaggccagcggcagaaucaccgugagcaccaagagaagccagcagaccgugauccccaacaucggcagcagacccagagugagagacaucagcagcagaaucagcaucuacuggaccaucgugaagcccggcgacauccugcugaucaacagcaccggcaaccugaucgcccccagaggcuacuucaagaucagaagcggcaagagcagcaucaugagaagcgacgcccccaucggcaagugcaacagcgagugcaucacccccaacggcagcauccccaacgacaagcccuuccagaacgugaacagaaucaccuacggcgccugccccagauacgugaagcagaacacccugaagcuggccaccggcaugagaaacgugcccgagacccagaccagaggcaucuucggcgccaucgccggcuucaucgagaacggcugggagggcaugguggacggcugguacggcuucagacaccagaacagcgagggcaccggccaggccgccgaccugaagagcacccaggccgccaucaaccagaucaacggcaagcugaacagacugaucggcaagaccaacgagaaguuccaccagaucgagaaggaguucagcgagguggagggcagaauccaggaccuggagaaguacguggaggacaccaagaucgaccuguggagcuacaacgccgagcugcugguggcccuggagaaccagcacaccaucgaccugaccgacagcgagaugaacaagcuguucgagagaaccaagaagcagcugagagagaacgccgaggacaugggcaacggcugcuucaagaucuaccacaagugcgacaacgccugcaucggcagcaucagaaacgagaccuacgaccacgacguguacagagacgaggcccugaacaacagauuccagaucaagggcguggagcugaagagcggcuacaaggacuggauccuguggaucagcuucgccaucagcugcuuccugcugugcguggcccugcugggcuucaucaugugggccugccagaagggcaacaucagaugcaacaucugcaucuga

SEQ ID NO: 162851 - RNA, 1701 nt, Artificial Sequence; identical to SEQ ID NO: 162432
  derived and/or modified CDS sequence (opt4) from hemagglutinin__InfluenzaA__ACR15557

SEQ ID NO: 162852 - RNA, 1701 nt, Artificial Sequence; identical to SEQ ID NO: 160690
  derived and/or modified CDS sequence (opt4) from hemagglutinin__InfluenzaA__ACR15568

SEQ ID NO: 162853 - RNA, 1701 nt, Artificial Sequence
  derived and/or modified CDS sequence (opt4) from hemagglutinin__InfluenzaA__ACR15579
augaagaccaucaucgcccugagcuacauccugugccugguguucgcccagaagcugcccggcaacgacaacagcaccgccacccugugccugggccaccacgccgugcccaacggcaccaucgugaagaccaucaccaacgaccagaucgaggugaccaacgccaccgagcuggugcagagcagcagcaccggcggcaucugcgacagcccccaccagauccuggacggcgagaacugcacccugaucgacgcccugcugggcgacccccagugcgacggcuuccagaacaagaagugggaccuguucguggagagaagcaaggccuacagcaacugcuaccccuacgacgugcccgacuacgccagccugagaagccugguggccagcagcggcacccuggaguucaacaacgagagcuucaacuggaccggcgugacccagaacggcaccagcagcgccugcaagagaagaagcaacaacagcuucuucagcagacugaacuggcugacccaccugaaguucaaguaccccgcccugaacgugaccaugcccaacaacgagaaguucgacaagcuguacaucuggggcgugcaccaccccggcaccgacaacgaccagaucuuccuguacgcccaggccagcggcagaaucaccgugagcaccaagagaagccagcagaccgugauccccaacaucggcagcagacccagagugagaaacauccccagcagaaucagcaucuacuggaccaucgugaaccccggcgacauccugcugaucaacagcaccggcaaccugaucgcccccagaggcuacuucaagaucagaagcggcaagagcagcaucaugagaagcgacgcccccaucggcaagugcaacagcgagugcaucacccccaacggcagcauccccaacgacaagcccuuccagaacgugaacagaaucaccuacggcgccugccccagauacgugaagcagaacacccugaagcuggccaccggcaugagaaacgugcccgagaagcagaccagaggcaucuucggcgccaucgccggcuucaucgagaacggcugggagggcaugguggacggcugguacggcuucagacaccagaacagcgagggcaucggccaggccgccgaccugaagagcacccaggccgccaucaaccagaucaacggcaagcugaacagacugaucggcaagaccaacgagaaguuccaccagaucgagaaggaguucagcgagguggagggcagaauccaggaccuggagaaguacguggaggacaccaagaucgaccuguggagcuacaacgccgagcugcugguggcccuggagaaccagcacaccaucgaccugaccgacagcgagaugaacaagcuguucgagagaaccaagaagcagcugagagagaacgccgaggacaugggcaacggcugcuucaagaucuaccacaagugcgacaacgccugcaucggcagcaucagaaacggcaccuacgaccacgacguguacagagacgaggcccugaacaacagauuccagaucaagggcguggagcugaagagcggcuacaaggacuggauccuguggaucagcuucgccaucagcugcuuccugcugugcguggcccugcugggcuucaucaugugggccugccagaagggcaacaucagaugcaacaucugcaucuga

SEQ ID NO: 162854 - RNA, 1701 nt, Artificial Sequence
  derived and/or modified CDS sequence (opt4) from hemagglutinin__InfluenzaA__ACR15590
augaagaccaucaucgcccugagcuacauccugugccugguguucacccagaagcugcccggcaacgacaacagcaccgccacccugugccugggccaccacgccgugcccaacggcaccaucgugaagaccaucaccaacgaccagaucgaggugaccaacgccaccgagcuggugcagagcagcagcaccggcggcaucugcgacagcccccaccagauccuggacggcgagaacugcacccugaucgacgcccugcugggcgacccccagugcgacggcuuccagaacaagaagugggaccuguucguggagagaagcaaggccuacagcaacugcuaccccuacgacgugcccgacuacgccagccugagaagccugguggccagcagcggcacccuggaguucaacaacgagagcuucaacuggaccggcgugacccagaacggcaccagcagcgccugcaagagaagaagcaacaacagcuucuucagcagacugaacuggcugacccaccugaaguucaaguaccccgcccugaacgugaccaugcccaacaacgagaaguucgacaagcuguacaucuggggcgugcaccaccccggcaccgacaacgaccagaucuuccuguacgcccaggccagcggcagaaucaccgugagcaccaagagaagccagcagaccgugauccccaacaucggcagcagacccagagugagaaacauccccagcagaaucagcaucuacuggaccaucgugaagcccggcgacauccugcugaucaacagcaccggcaaccugaucgcccccagaggcuacuucaagaucagaagcggcaagagcagcaucaugagaagcgacgcccccaucggcaagugcaacagcgagugcaucacccccaacggcagcauccccaacgacaagcccuuccagaacgugaacagaaucaccuacggcgccugccccagauacgugaagcagaacacccugaagcuggccaccggcaugagaaacgugcccgagaagcagaccagaggcaucuucggcgccaucgccggcuucaucgagaacggcugggagggcaugguggacggcugguacggcuucagacaccagaacagcgagggcaucggccaggccgccgaccugaagagcacccaggccgccaucaaccagaucaacggcaagcugaacagacugaucggcaagaccaacgagaaguuccaccagaucgagaaggaguucagcgagguggagggcagaauccaggaccuggagaaguacguggaggacaccaagaucgaccuguggagcuacaacgccgagcugcugguggcccuggagaaccagcacaccaucgaccugaccgacagcgagaugaacaagcuguucgagagaaccaagaagcagcugagagagaacgccgaggacaugggcaacggcugcuucaagaucuaccacaagugcgacaacgccugcaucggcagcaucagaaacggcaccuacgaccacgacguguacagagacgaggcccugaacaacagauuccagaucaagggcguggagcugaagagcggcuacaaggacuggauccuguggaucagcuucgccaucagcugcuuccugcugugcguggcccugcugggcuucaucaugugggccugccagaagggcaacaucagaugcaacaucugcaucuga

SEQ ID NO: 162855 - RNA, 1701 nt, Artificial Sequence; identical to SEQ ID NO: 160690
  derived and/or modified CDS sequence (opt4) from hemagglutinin__InfluenzaA__ACR15601

SEQ ID NO: 162856 - RNA, 1701 nt, Artificial Sequence
  derived and/or modified CDS sequence (opt4) from hemagglutinin__InfluenzaA__ACR18920
augaaggccauccugguggugcugcuguacaccuucgccaccgccaacgccgacacccugugcaucggcuaccacgccaacaacagcaccgacaccguggacaccgugcuggagaagaacgugaccgugacccacagcgugaaccugcuggaggacaagcacaacggcaagcugugcaagcugagaggcguggccccccugcaccugggcaagugcaacaucgccggcuggauccugggcaaccccgagugcgagagccugagcaccgccagcagcuggagcuacaucguggagaccagcagcagcgacaacggcaccugcuaccccggcgacuucaucgacuacgaggagcugagagagcagcugagcagcgugagcagcuucgagagauucgagaucuuccccaagaccagcagcuggcccaaccacgacagcaacaagggcgugaccgccgccugcccccacgccggcgccaagagcuucuacaagaaccugaucuggcuggugaagaagggcaacagcuaccccaagcugagcaagagcuacaucaacgacaagggcaaggaggugcuggugcuguggggcauccaccaccccagcaccagcgccgaccagcagagccuguaccagaacgccgacgccuacguguucgugggcagcagcagauacagcaagaaguucaagcccgagaucgccaucagacccaaggugagagaccaggagggcagaaugaacuacuacuggacccugguggagcccggcgacaagaucaccuucgaggccaccggcaaccugguggugcccagauacgccuucgccauggagagaaacgccggcagcggcaucaucaucagcgacacccccgugcacgacugcaacaccaccugccagacccccaagggcgccaucaacaccagccugcccuuccagaacauccaccccaucaccaucggcaagugccccaaguacgugaagagcaccaagcugagacuggccaccggccugagaaacgugcccagcauccagagcagaggccuguucggcgccaucgccggcuucaucgagggcggcuggaccggcaugguggacggcugguacggcuaccaccaccagaacgagcagggcagcggcuacgccgccgaccugaagagcacccagaacgccaucgacgagaucaccaacaaggugaacagcgugaucgagaagaugaacauccaguucaccgccgugggcaaggaguucaaccaccuggagaagagaaucgagaaccugaacaagaagguggacgacggcuuccuggacaucuggaccuacaacgccgagcugcuggugcugcuggagaacgagagaacccuggacuaccacgacagcaacgugaagaaccuguacgagaaggugagaagccagcugaagaacaacgccaaggagaucggcaacggcugcuucgaguucuaccacaagugcgacaacaccugcauggagagcgugaagaacggcaccuacgacuaccccaaguacagcgaggaggccaagcugaacagagaggagaucgacggcgugaagcuggagagcaccagaaucuaccagauccuggccaucuacagcaccguggccagcagccuggugcugguggugagccugggcgccaucagcuucuggaugugcagcaacggcagccugcagugcagaaucugcaucuga

SEQ ID NO: 162857 - RNA, 1701 nt, Artificial Sequence; identical to SEQ ID NO: 162729
  derived and/or modified CDS sequence (opt4) from hemagglutinin__InfluenzaA__ACR18975

SEQ ID NO: 162858 - RNA, 1701 nt, Artificial Sequence; identical to SEQ ID NO: 162716
  derived and/or modified CDS sequence (opt4) from hemagglutinin__InfluenzaA__ACR18976

SEQ ID NO: 162859 - RNA, 1701 nt, Artificial Sequence; identical to SEQ ID NO: 162716
  derived and/or modified CDS sequence (opt4) from hemagglutinin__InfluenzaA__ACR18977

SEQ ID NO: 162860 - RNA, 1701 nt, Artificial Sequence; identical to SEQ ID NO: 162729
  derived and/or modified CDS sequence (opt4) from hemagglutinin__InfluenzaA__ACR18978

SEQ ID NO: 162861 - RNA, 1701 nt, Artificial Sequence; identical to SEQ ID NO: 162716
  derived and/or modified CDS sequence (opt4) from hemagglutinin__InfluenzaA__ACR18979

SEQ ID NO: 162862 - RNA, 1701 nt, Artificial Sequence; identical to SEQ ID NO: 162782
  derived and/or modified CDS sequence (opt4) from hemagglutinin__InfluenzaA__ACR18981

SEQ ID NO: 162863 - RNA, 1701 nt, Artificial Sequence; identical to SEQ ID NO: 162716
  derived and/or modified CDS sequence (opt4) from hemagglutinin__InfluenzaA__ACR18982

SEQ ID NO: 162864 - RNA, 1701 nt, Artificial Sequence; identical to SEQ ID NO: 162729
  derived and/or modified CDS sequence (opt4) from hemagglutinin__InfluenzaA__ACR18988

SEQ ID NO: 162865 - RNA, 1701 nt, Artificial Sequence
  derived and/or modified CDS sequence (opt4) from hemagglutinin__InfluenzaA__ACR18991
augaaggccauccugguggugcugcuguacaccuucgccaccgccaacgccgacacccugugcaucggcuaccacgccaacaacagcaccgacaccguggacaccgugcuggagaagaacgugaccgugacccacagcgugaaccugcuggaggacaagcacaacagaaagcugugcaagcugagaggcguggccccccugcaccugggcaagugcaacaucgccggcuggauccugggcaaccccgagugcgagagccugagcaccgccagcagcuggagcuacaucguggagaccagcagcagcgacaacggcaccugcuaccccggcgacuucaucgacuacgaggagcugagagagcagcugagcagcgugagcagcuucgagagauucgagaucuuccccaagaccagcagcuggcccaaccacgacagcaacaagggcgugaccgccgccugcccccacgccggcgccaagagcuucuacaagaaccugaucuggcuggugaagaagggcaacagcuaccccaagcugagcaagagcuacaucaacgacaagggcaaggaggugcuggugcuguggggcauccaccaccccagcaccagcgccgaccagcagagccuguaccagaacgccgacgccuacguguucgugggcagcagcagauacagcaagaaguucaagcccgagaucgccaucagacccaaggugagagaccaggagggcagaaugaacuacuacuggacccugguggagcccggcgacaagaucaccuucgaggccaccggcaaccugguggugcccagauacgccuucgccauggagagaaacgccggcagcggcaucaucaucagcgacacccccgugcacgacugcaacaccaccugccagacccccaagggcgccaucaacaccagccugcccuuccagaacauccaccccaucaccaucggcaagugccccaaguacgugaagagcaccaagcugagacuggccaccggccugagaaacgugcccagcauccagagcagaggccuguucggcgccaucgccggcuucaucgagggcggcuggaccggcaugguggacggcugguacggcuaccaccaccagaacgagcagggcagcggcuacgccgccgaccugaagagcacccagaacgccaucgacgagaucaccaacaaggugaacagcgugaucgagaagaugaacacccaguucaccgccgugggcaaggaguucaaccaccuggagaagagaaucgagaaccugaacaagaagguggacgacggcuuccuggacaucuggaccuacaacgccgagcugcuggugcugcuggagaacgagagaacccuggacuaccacgacagcaacgugaagaaccuguacgagaaggugagaagccagcugaagaacaacgccaaggagaucggcaacggcugcuucgaguucuaccacaagugcgacaacaccugcauggagagcgugaagaacggcaccuacgacuaccccaaguacagcgaggaggccaagcugaacagagaggagaucgacggcgugaagcuggagagcaccagaaucuaccagauccuggccaucuacagcaccguggccagcagccuggugcugguggugagccugggcgccaucagcuucuggaugugcagcaacggcagccugcagugcagaaucugcaucuga

SEQ ID NO: 162866 - RNA, 1701 nt, Artificial Sequence; identical to SEQ ID NO: 162716
  derived and/or modified CDS sequence (opt4) from hemagglutinin__InfluenzaA__ACR18993

SEQ ID NO: 162867 - RNA, 1701 nt, Artificial Sequence; identical to SEQ ID NO: 162755
  derived and/or modified CDS sequence (opt4) from hemagglutinin__InfluenzaA__ACR18995

SEQ ID NO: 162868 - RNA, 1701 nt, Artificial Sequence; identical to SEQ ID NO: 162777
  derived and/or modified CDS sequence (opt4) from hemagglutinin__InfluenzaA__ACR23302

SEQ ID NO: 162869 - RNA, 1701 nt, Artificial Sequence; identical to SEQ ID NO: 162729
  derived and/or modified CDS sequence (opt4) from hemagglutinin__InfluenzaA__ACR33743

SEQ ID NO: 162870 - RNA, 1701 nt, Artificial Sequence; identical to SEQ ID NO: 162716
  derived and/or modified CDS sequence (opt4) from hemagglutinin__InfluenzaA__ACR38821

SEQ ID NO: 162871 - RNA, 1701 nt, Artificial Sequence; identical to SEQ ID NO: 162716
  derived and/or modified CDS sequence (opt4) from hemagglutinin__InfluenzaA__ACR38822

SEQ ID NO: 162872 - RNA, 1701 nt, Artificial Sequence; identical to SEQ ID NO: 162716
  derived and/or modified CDS sequence (opt4) from hemagglutinin__InfluenzaA__ACR38823

SEQ ID NO: 162873 - RNA, 1701 nt, Artificial Sequence; identical to SEQ ID NO: 162782
  derived and/or modified CDS sequence (opt4) from hemagglutinin__InfluenzaA__ACR38824

SEQ ID NO: 162874 - RNA, 1701 nt, Artificial Sequence
  derived and/or modified CDS sequence (opt4) from hemagglutinin__InfluenzaA__ACR38825
augaaggccauccugguggugcugcuguacaccuucgccaccgccaacgccgacacccugugcaucggcuaccacgccaacaacagcaccgacaccguggacaccgugcuggagaagaacgugaccgugacccacagcgugaaccugcuggaggacaagcacaacggcaagcugugcaagcugagaggcguggccccccugcaccugggcaagugcaacaucgccggcuggauccugggcaaccccgagugcgagagccugagcaccgccagcagcuggagcuacaucguggagaccagcagcagcgacaacggcaccugcuaccccggcgacuucaucgacuacgaggagcugagagagcagcugagcagcgugagcagcuucgagagauucgagaucuuccccaagaccagcagcuggcccaaccacgacagcaacaagggcgugaccgccgccugcccccacgccggcgccaagagcuucuacaagaaccugaucuggcuggugaagaagggcaacagcuaccccaagcugagcaagagcuacaucaacgacaagggcaaggaggugcuggugcuguggggcauccaccaccccagcaccagcgccgaccagcagagccuguaccagaacgccgacgccuacguguucgugggcaccagcagauacagcaagaaguucaagcccgagaucgccaucagacccaaggugagaggccaggagggcagaaugaacuacuacuggacccugguggagcccggcgacaagaucaccuucgaggccaccggcaaccugguggugcccagauacgccuucgccauggagagaaacgccggcagcggcaucaucaucagcgacacccccgugcacgacugcaacaccaccugccagacccccaagggcgccaucaacaccagccugcccuuccagaacauccaccccaucaccaucggcaagugccccaaguacgugaagagcaccaagcugagacuggccaccggccugagaaacgugcccagcauccagagcagaggccuguucggcgccaucgccggcuucaucgagggcggcuggaccggcaugguggacggcugguacggcuaccaccaccagaacgagcagggcagcggcuacgccgccgaccugaagagcacccagaacgccaucgacgagaucaccaacaaggugaacagcgugaucgagaagaugaacacccaguucaccgccgugggcaaggaguucaaccaccuggagaagagaaucgagaaccugaacaagaagaucgacgacggcuuccuggacaucuggaccuacaacgccgagcugcuggugcugcuggagaacgagagaacccuggacuaccacgacagcaacgugaagaaccuguacgagaaggugagaagccagcugaagaacaacgccaaggagaucggcaacggcugcuucgaguucuaccacaagugcgacaacaccugcauggagagcgugaagaacggcaccuacgacuaccccaaguacagcgaggaggccaagcugaacagagaggagaucgacggcgugaagcuggagagcaccagaaucuaccagauccuggccaucuacagcaccguggccagcagccuggugcugguggugagccugggcgccaucagcuucuggaugugcagcaacggcagccugcagugcagaaucugcaucuga

SEQ ID NO: 162875 - RNA, 1701 nt, Artificial Sequence; identical to SEQ ID NO: 162729
  derived and/or modified CDS sequence (opt4) from hemagglutinin__InfluenzaA__ACR38826

SEQ ID NO: 162876 - RNA, 1701 nt, Artificial Sequence; identical to SEQ ID NO: 162716
  derived and/or modified CDS sequence (opt4) from hemagglutinin__InfluenzaA__ACR38827

SEQ ID NO: 162877 - RNA, 1701 nt, Artificial Sequence; identical to SEQ ID NO: 162782
  derived and/or modified CDS sequence (opt4) from hemagglutinin__InfluenzaA__ACR38828

SEQ ID NO: 162878 - RNA, 1701 nt, Artificial Sequence; identical to SEQ ID NO: 162716
  derived and/or modified CDS sequence (opt4) from hemagglutinin__InfluenzaA__ACR38829

SEQ ID NO: 162879 - RNA, 1701 nt, Artificial Sequence; identical to SEQ ID NO: 162755
  derived and/or modified CDS sequence (opt4) from hemagglutinin__InfluenzaA__ACR38830

SEQ ID NO: 162880 - RNA, 1701 nt, Artificial Sequence; identical to SEQ ID NO: 162729
  derived and/or modified CDS sequence (opt4) from hemagglutinin__InfluenzaA__ACR39354

SEQ ID NO: 162881 - RNA, 1701 nt, Artificial Sequence; identical to SEQ ID NO: 162729
  derived and/or modified CDS sequence (opt4) from hemagglutinin__InfluenzaA__ACR39393

SEQ ID NO: 162882 - RNA, 1701 nt, Artificial Sequence; identical to SEQ ID NO: 162729
  derived and/or modified CDS sequence (opt4) from hemagglutinin__InfluenzaA__ACR39403

SEQ ID NO: 162883 - RNA, 1701 nt, Artificial Sequence; identical to SEQ ID NO: 162729
  derived and/or modified CDS sequence (opt4) from hemagglutinin__InfluenzaA__ACR39413

SEQ ID NO: 162884 - RNA, 1701 nt, Artificial Sequence; identical to SEQ ID NO: 162729
  derived and/or modified CDS sequence (opt4) from hemagglutinin__InfluenzaA__ACR39423

SEQ ID NO: 162885 - RNA, 1701 nt, Artificial Sequence; identical to SEQ ID NO: 162729
  derived and/or modified CDS sequence (opt4) from hemagglutinin__InfluenzaA__ACR39433

SEQ ID NO: 162886 - RNA, 1701 nt, Artificial Sequence; identical to SEQ ID NO: 162729
  derived and/or modified CDS sequence (opt4) from hemagglutinin__InfluenzaA__ACR39443

SEQ ID NO: 162887 - RNA, 1701 nt, Artificial Sequence
  derived and/or modified CDS sequence (opt4) from hemagglutinin__InfluenzaA__ACR39453
auggaggccauccugguggugcugcuguacaccuucgccaccgccaacgccgacacccugugcaucggcuaccacgccaacaacagcaccgacaccguggacaccgugcuggagaagaacgugaccgugacccacagcgugaaccugcuggaggacaagcacaacggcaagcugugcaagcugagaggcguggccccccugcaccugggcaagugcaacaucgccggcuggauccugggcaaccccgagugcgagagccugagcaccgccagcagcuggagcuacaucguggagaccagcagcagcgacaacggcaccugcuaccccggcgacuucaucgacuacgaggagcugagagagcagcugagcagcgugagcagcuucgagagauucgagaucuuccccaagaccagcagcuggcccaaccacgacagcaacaagggcgugaccgccgccugcccccacgccggcgccaagagcuucuacaagaaccugaucuggcuggugaagaagggcaacagcuaccccaagcugagcaagagcuacaucaacgacaagggcaaggaggugcuggugcuguggggcauccaccaccccagcaccagcgccgaccagcagagccuguaccagaacgccgacgccuacguguucgugggcaccagcagauacagcaagaaguucaagcccgagaucgccaucagacccaaggugagagaccaggagggcagaaugaacuacuacuggacccugguggagcccggcgacaagaucaccuucgaggccaccggcaaccugguggugcccagauacgccuucgccauggagagaaacgccggcagcggcaucaucaucagcgacacccccgugcacgacugcaacaccaccugccagacccccaagggcgccaucaacaccagccugcccuuccagaacauccaccccaucaccaucggcaagugccccaaguacgugaagagcaccaagcugagacuggccaccggccugagaaacgugcccagcauccagagcagaggccuguucggcgccaucgccggcuucaucgagggcggcuggaccggcaugguggacggcugguacggcuaccaccaccagaacgagcagggcagcggcuacgccgccgaccugaagagcacccagaacgccaucgacgagaucaccaacaaggugaacagcgugaucgagaagaugaacacccaguucaccgccgugggcaaggaguucaaccaccuggagaagagaaucgagaaccugaacaagaagguggacgacggcuuccuggacaucuggaccuacaacgccgagcugcuggugcugcuggagaacgagagaacccuggacuaccacgacagcaacgugaagaaccuguacgagaaggugagaagccagcugaagaacaacgccaaggagaucggcaacggcugcuucgaguucuaccacaagugcgacaacaccugcauggagagcgugaagaacggcaccuacgacuaccccaaguacagcgaggaggccaagcugaacagagaggagaucgacggcgugaagcuggagagcaccagaaucuaccagauccuggccaucuacagcaccguggccagcagccuggugcugguggugagccugggcgccaucagcuucuggaugugcagcaacggcagccugcagugcagaaucugcaucuga

SEQ ID NO: 162888 - RNA, 1701 nt, Artificial Sequence; identical to SEQ ID NO: 162729
  derived and/or modified CDS sequence (opt4) from hemagglutinin__InfluenzaA__ACR39463

SEQ ID NO: 162889 - RNA, 1701 nt, Artificial Sequence; identical to SEQ ID NO: 162729
  derived and/or modified CDS sequence (opt4) from hemagglutinin__InfluenzaA__ACR39473

SEQ ID NO: 162890 - RNA, 1701 nt, Artificial Sequence; identical to SEQ ID NO: 162729
  derived and/or modified CDS sequence (opt4) from hemagglutinin__InfluenzaA__ACR39483

SEQ ID NO: 162891 - RNA, 1701 nt, Artificial Sequence; identical to SEQ ID NO: 162729
  derived and/or modified CDS sequence (opt4) from hemagglutinin__InfluenzaA__ACR39493

SEQ ID NO: 162892 - RNA, 1701 nt, Artificial Sequence; identical to SEQ ID NO: 162729
  derived and/or modified CDS sequence (opt4) from hemagglutinin__InfluenzaA__ACR40288

SEQ ID NO: 162893 - RNA, 1701 nt, Artificial Sequence; identical to SEQ ID NO: 162729
  derived and/or modified CDS sequence (opt4) from hemagglutinin__InfluenzaA__ACR40298

SEQ ID NO: 162894 - RNA, 1701 nt, Artificial Sequence
  derived and/or modified CDS sequence (opt4) from hemagglutinin__InfluenzaA__ACR40308
augaaggccauccugguggugcugcuguacaccuucgccaccgccaacgccgacacccugugcaucggcuaccacgccaacaacagcaccgacaccguggacaccgugcuggagaagaacgugaccgugacccacagcgugaaccugcuggaggacaagcacaacggcaagcugugcaagcugagaggcguggccccccugcaccugggcaagugcaacaucgccggcuggauccugggcaaccccgagugcgagagccugagcaccgccagcagcuggagcuacaucguggagaccagcagcagcgacaacggcaccugcuaccccggcgacuucaucgacuacgaggagcugagagagcagcugagcagcgugagcagcuucgagagauucgagaucuuccccaagaccagcagcuggcccaaccacgacagcaacaagggcgugaccgccgccugcccccacgccggcgccaagagcuucuacaagaaccugaucuggcuggugaagaagggcaacagcuaccccaagcugagcaagagcuacaucaacgacaagggcaaggaggugcuggugcuguggggcauccaccaccccagcaccagcgccgaccagcagagccuguaccagaacgccgacgccuacguguucgugggcagcagcagauacagcaagaaguucaagcccgagaucgccaucagacccaaggugagagaccaggagggcagaaugaacuacuacuggacccugguggagcccggcgacaagaucaccuucgaggccaccggcaaccugguggugcccagauacgccuucgccauggagagaaacgccggcagcggcaucaucaucagcgacacccccgugcacgacugcaacaccaccugccagacccccaagggcgccaucaacaccagccugcccuuccagaacaucuaccccaucaccaucggcaagugccccaaguacgugaagagcaccaagcugagacuggccaccggccugagaaacgugcccagcauccagagcagaggccuguucggcgccaucgccggcuucaucgagggcggcuggaccggcaugguggacggcugguacggcuaccaccaccagaacgagcagggcagcggcuacgccgccgaccugaagagcacccagaacgccaucgacgagaucaccaacaaggugaacagcgugaucgagaagaugaacacccaguucaccgccgugggcaaggaguucaaccaccuggagaagagaaucgagaaccugaacaagaagguggacgacggcuuccuggacaucuggaccuacaacgccgagcugcuggugcugcuggagaacgagagaacccuggacuaccacgacagcaacgugaagaaccuguacgagaaggugagaagccagcugaagaacaacgccaaggagaucggcaacggcugcuucgaguucuaccacaagugcgacaacaccugcauggagagcgugaagaacggcaccuacgacuaccccaaguacagcgaggaggccaagcugaacagagaggagaucgacggcgugaagcuggagagcaccagaaucuaccagauccuggccaucuacagcaccguggccagcagccuggugcugguggugagccugggcgccaucagcuucuggaugugcagcaacggcagccugcagugcagaaucugcaucuga

SEQ ID NO: 162895 - RNA, 1701 nt, Artificial Sequence; identical to SEQ ID NO: 162729
  derived and/or modified CDS sequence (opt4) from hemagglutinin__InfluenzaA__ACR40318

SEQ ID NO: 162896 - RNA, 1701 nt, Artificial Sequence; identical to SEQ ID NO: 162729
  derived and/or modified CDS sequence (opt4) from hemagglutinin__InfluenzaA__ACR40328

SEQ ID NO: 162897 - RNA, 1701 nt, Artificial Sequence; identical to SEQ ID NO: 162729
  derived and/or modified CDS sequence (opt4) from hemagglutinin__InfluenzaA__ACR40338

SEQ ID NO: 162898 - RNA, 1701 nt, Artificial Sequence; identical to SEQ ID NO: 162729
  derived and/or modified CDS sequence (opt4) from hemagglutinin__InfluenzaA__ACR40348

SEQ ID NO: 162899 - RNA, 1701 nt, Artificial Sequence; identical to SEQ ID NO: 162729
  derived and/or modified CDS sequence (opt4) from hemagglutinin__InfluenzaA__ACR40358

SEQ ID NO: 162900 - RNA, 1701 nt, Artificial Sequence; identical to SEQ ID NO: 162729
  derived and/or modified CDS sequence (opt4) from hemagglutinin__InfluenzaA__ACR40378

SEQ ID NO: 162901 - RNA, 1701 nt, Artificial Sequence; identical to SEQ ID NO: 162729
  derived and/or modified CDS sequence (opt4) from hemagglutinin__InfluenzaA__ACR40388

SEQ ID NO: 162902 - RNA, 1701 nt, Artificial Sequence; identical to SEQ ID NO: 162716
  derived and/or modified CDS sequence (opt4) from hemagglutinin__InfluenzaA__ACR46986

SEQ ID NO: 162903 - RNA, 1701 nt, Artificial Sequence; identical to SEQ ID NO: 162716
  derived and/or modified CDS sequence (opt4) from hemagglutinin__InfluenzaA__ACR46988

SEQ ID NO: 162904 - RNA, 1701 nt, Artificial Sequence; identical to SEQ ID NO: 162716
  derived and/or modified CDS sequence (opt4) from hemagglutinin__InfluenzaA__ACR46989

SEQ ID NO: 162905 - RNA, 1701 nt, Artificial Sequence; identical to SEQ ID NO: 162716
  derived and/or modified CDS sequence (opt4) from hemagglutinin__InfluenzaA__ACR46990

SEQ ID NO: 162906 - RNA, 1701 nt, Artificial Sequence; identical to SEQ ID NO: 162716
  derived and/or modified CDS sequence (opt4) from hemagglutinin__InfluenzaA__ACR46992

SEQ ID NO: 162907 - RNA, 1701 nt, Artificial Sequence; identical to SEQ ID NO: 162716
  derived and/or modified CDS sequence (opt4) from hemagglutinin__InfluenzaA__ACR46993

SEQ ID NO: 162908 - RNA, 1701 nt, Artificial Sequence; identical to SEQ ID NO: 162716
  derived and/or modified CDS sequence (opt4) from hemagglutinin__InfluenzaA__ACR46994

SEQ ID NO: 162909 - RNA, 1701 nt, Artificial Sequence
  derived and/or modified CDS sequence (opt4) from hemagglutinin__InfluenzaA__ACR47006
augaaggccauccugguggugcugcuguacaccuucgccaccgccaacgccgacacccugugcaucggcuaccacgccaacaacagcaccgacaccguggacaccgugcuggagaagaacgugaccgugacccacagcgugaacauccuggaggacaagcacaacggcaagcugugcaagcugagaggcguggccccccugcaccugggcaagugcaacaucgccggcuggauccugggcaaccccgagugcgagagccugagcaccgccagcagcuggagcuacaucguggagaccagcagcagcgacaacggcaccugcuaccccggcgacuucaucgacuacgaggagcugagagagcagcugagcagcgugagcagcuucgagagauucgagaucuuccccaagaccagcagcuggcccaaccacgacagcaacaagggcgugaccgccgccugcccccacgccggcgccaagagcuucuacaagaaccugaucuggcuggugaagaagggcaacagcuaccccaagcugagcaagagcuacaucaacgacaagggcaaggaggugcuggugcuguggggcauccaccaccccagcaccagcgccgaccagcagagccuguaccagaacgccgacgccuacguguucgugggcagcagcagauacagcaagaaguucaagcccgagaucgccaucagacccaaggugagagaccaggagggcagaaugaacuacuacuggacccugguggagcccggcgacaagaucaccuucgaggccaccggcaaccugguggugcccagauacgccuucgccauggagagaaacgccggcagcggcaucaucaucagcgacacccccgugcacgacugcaacaccaccugccagacccccaagggcgccaucaacaccagccugcccuuccagaacauccaccccaucaccaucggcaagugccccaaguacgugaagagcaccaagcugagacuggccaccggccugagaaacgugcccagcauccagagcagaggccuguucggcgccaucgccggcuucaucgagggcggcuggaccggcaugguggacggcugguacggcuaccaccaccagaacgagcagggcagcggcuacgccgccgaccugaagagcacccagaacgccaucgacgagaucaccaacaaggugaacagcgugaucgagaagaugaacacccaguucaccgccgugggcaaggaguucaaccaccuggagaagagaaucgagaaccugaacaagaagguggacgacggcuuccuggacaucuggaccuacaacgccgagcugcuggugcugcuggagaacgagagaacccuggacuaccacgacagcaacgugaagaaccuguacgagaaggugagaagccagcugaagaacaacgccaaggagaucggcaacggcugcuucgaguucuaccacaagugcgacaacaccugcauggagagcgugaagaacggcaccuacgacuaccccaaguacagcgaggaggccaagcugaacagagaggagaucgacggcgugaagcuggagagcaccagaaucuaccagauccuggccaucuacagcaccguggccagcagccuggugcugguggugagccugggcgccaucagcuucuggaugugcagcaacggcagccugcagugcagaaucugcaucuga

SEQ ID NO: 162910 - RNA, 1701 nt, Artificial Sequence; identical to SEQ ID NO: 162729
  derived and/or modified CDS sequence (opt4) from hemagglutinin__InfluenzaA__ACR49281

SEQ ID NO: 162911 - RNA, 1701 nt, Artificial Sequence
  derived and/or modified CDS sequence (opt4) from hemagglutinin__InfluenzaA__ACR49282
augaaggccauccugguggugcugcuguacaccuucgccaccgccaacgccgacacccugugcaucggcuaccacgccaacaacagcaccgacaccguggacaccgugcuggagaagaacgugaccgugacccacagcguggaccugcuggaggacaagcacaacggcaagcugugcaagcugagaggcguggccccccugcaccugggcaagugcaacaucgccggcuggauccugggcaaccccgagugcgagagccugagcaccgccagcagcuggagcuacaucguggagaccagcagcagcgacaacggcaccugcuaccccggcgacuucaucgacuacgaggagcugagagagcagcugagcagcgugagcagcuucgagagauucgagaucuuccccaagaccagcagcuggcccaaccacgacagcaacaagggcgugaccgccgccugcccccacgccggcgccaagagcuucuacaagaaccugaucuggcuggugaagaagggcaacagcuaccccaagcugagcaagagcuacaucaacgacaagggcaaggaggugcuggugcuguggggcauccaccaccccagcaccagcgccgaccagcagagccuguaccagaacgccgacgccuacguguucgugggcagcagcagauacagcaagaaguucaagcccgagaucgccaucagacccaaggugagagaccaggagggcagaaugaacuacuacuggacccugguggagcccggcgacaagaucaccuucgaggccaccggcaaccugguggugcccagauacgccuucgccauggagagaaacgccggcagcggcaucaucaucagcgacacccccgugcacgacugcaacaccaccugccagacccccaagggcgccaucaacaccagccugcccuuccagaacauccaccccaucaccaucggcaagugccccaaguacgugaagagcaccaagcugagacuggccaccggccugagaaacgugcccagcauccagagcagaggccuguucggcgccaucgccggcuucaucgagggcggcuggaccggcaugguggacggcugguacggcuaccaccaccagaacgagcagggcagcggcuacgccgccgaccugaagagcacccagaacgccaucgacgagaucaccaacaaggugaacagcgugaucgagaagaugaacacccaguucaccgccgugggcaaggaguucaaccaccuggagaagagaaucgagaaccugaacaagaagguggacgacggcuuccuggacaucuggaccuacaacgccgagcugcuggugcugcuggagaacgagagaacccuggacuaccacgacagcaacgugaagaaccuguacgagaaggugagaagccagcugaagaacaacgccaaggagaucggcaacggcugcuucgaguucuaccacaagugcgacaacaccugcauggagagcgugaagaacggcaccuacgacuaccccaaguacagcgaggaggccaagcugaacagagaggagaucgacggcgugaagcuggagagcaccagaaucuaccagauccuggccaucuacagcaccguggccagcagccuggugcugguggugagccugggcgccaucagcuucuggaugugcagcaacggcagccugcagugcagaaucugcaucuga

SEQ ID NO: 162912 - RNA, 1701 nt, Artificial Sequence; identical to SEQ ID NO: 162716
  derived and/or modified CDS sequence (opt4) from hemagglutinin__InfluenzaA__ACR49283

SEQ ID NO: 162913 - RNA, 1701 nt, Artificial Sequence; identical to SEQ ID NO: 162716
  derived and/or modified CDS sequence (opt4) from hemagglutinin__InfluenzaA__ACR49288

SEQ ID NO: 162914 - RNA, 1701 nt, Artificial Sequence; identical to SEQ ID NO: 162755
  derived and/or modified CDS sequence (opt4) from hemagglutinin__InfluenzaA__ACR49290

SEQ ID NO: 162915 - RNA, 1701 nt, Artificial Sequence; identical to SEQ ID NO: 162729
  derived and/or modified CDS sequence (opt4) from hemagglutinin__InfluenzaA__ACR49291

SEQ ID NO: 162916 - RNA, 1701 nt, Artificial Sequence; identical to SEQ ID NO: 162755
  derived and/or modified CDS sequence (opt4) from hemagglutinin__InfluenzaA__ACR49293

SEQ ID NO: 162917 - RNA, 1701 nt, Artificial Sequence; identical to SEQ ID NO: 162755
  derived and/or modified CDS sequence (opt4) from hemagglutinin__InfluenzaA__ACR49295

SEQ ID NO: 162918 - RNA, 1701 nt, Artificial Sequence; identical to SEQ ID NO: 162769
  derived and/or modified CDS sequence (opt4) from hemagglutinin__InfluenzaA__ACR50993

SEQ ID NO: 162919 - RNA, 1701 nt, Artificial Sequence; identical to SEQ ID NO: 162729
  derived and/or modified CDS sequence (opt4) from hemagglutinin__InfluenzaA__ACR50995

SEQ ID NO: 162920 - RNA, 1701 nt, Artificial Sequence; identical to SEQ ID NO: 162729
  derived and/or modified CDS sequence (opt4) from hemagglutinin__InfluenzaA__ACR51005

SEQ ID NO: 162921 - RNA, 1701 nt, Artificial Sequence; identical to SEQ ID NO: 162729
  derived and/or modified CDS sequence (opt4) from hemagglutinin__InfluenzaA__ACR51015

SEQ ID NO: 162922 - RNA, 1701 nt, Artificial Sequence; identical to SEQ ID NO: 162729
  derived and/or modified CDS sequence (opt4) from hemagglutinin__InfluenzaA__ACR51025

SEQ ID NO: 162923 - RNA, 1701 nt, Artificial Sequence; identical to SEQ ID NO: 162729
  derived and/or modified CDS sequence (opt4) from hemagglutinin__InfluenzaA__ACR51035

SEQ ID NO: 162924 - RNA, 1701 nt, Artificial Sequence; identical to SEQ ID NO: 162729
  derived and/or modified CDS sequence (opt4) from hemagglutinin__InfluenzaA__ACR51045

SEQ ID NO: 162925 - RNA, 1701 nt, Artificial Sequence; identical to SEQ ID NO: 162729
  derived and/or modified CDS sequence (opt4) from hemagglutinin__InfluenzaA__ACR51055

SEQ ID NO: 162926 - RNA, 1701 nt, Artificial Sequence; identical to SEQ ID NO: 162716
  derived and/or modified CDS sequence (opt4) from hemagglutinin__InfluenzaA__ACR51065

SEQ ID NO: 162927 - RNA, 1701 nt, Artificial Sequence; identical to SEQ ID NO: 162729
  derived and/or modified CDS sequence (opt4) from hemagglutinin__InfluenzaA__ACR52368

SEQ ID NO: 162928 - RNA, 1701 nt, Artificial Sequence; identical to SEQ ID NO: 162729
  derived and/or modified CDS sequence (opt4) from hemagglutinin__InfluenzaA__ACR52378

SEQ ID NO: 162929 - RNA, 1701 nt, Artificial Sequence; identical to SEQ ID NO: 162729
  derived and/or modified CDS sequence (opt4) from hemagglutinin__InfluenzaA__ACR52398

SEQ ID NO: 162930 - RNA, 1701 nt, Artificial Sequence; identical to SEQ ID NO: 162729
  derived and/or modified CDS sequence (opt4) from hemagglutinin__InfluenzaA__ACR52408

SEQ ID NO: 162931 - RNA, 1701 nt, Artificial Sequence; identical to SEQ ID NO: 162729
  derived and/or modified CDS sequence (opt4) from hemagglutinin__InfluenzaA__ACR52418

SEQ ID NO: 162932 - RNA, 1701 nt, Artificial Sequence; identical to SEQ ID NO: 162729
  derived and/or modified CDS sequence (opt4) from hemagglutinin__InfluenzaA__ACR52428

SEQ ID NO: 162933 - RNA, 1701 nt, Artificial Sequence; identical to SEQ ID NO: 162729
  derived and/or modified CDS sequence (opt4) from hemagglutinin__InfluenzaA__ACR52438

SEQ ID NO: 162934 - RNA, 1701 nt, Artificial Sequence; identical to SEQ ID NO: 162729
  derived and/or modified CDS sequence (opt4) from hemagglutinin__InfluenzaA__ACR52448

SEQ ID NO: 162935 - RNA, 1701 nt, Artificial Sequence; identical to SEQ ID NO: 162729
  derived and/or modified CDS sequence (opt4) from hemagglutinin__InfluenzaA__ACR52458

SEQ ID NO: 162936 - RNA, 1701 nt, Artificial Sequence; identical to SEQ ID NO: 162729
  derived and/or modified CDS sequence (opt4) from hemagglutinin__InfluenzaA__ACR52468

SEQ ID NO: 162937 - RNA, 1701 nt, Artificial Sequence; identical to SEQ ID NO: 162729
  derived and/or modified CDS sequence (opt4) from hemagglutinin__InfluenzaA__ACR52478

SEQ ID NO: 162938 - RNA, 1701 nt, Artificial Sequence; identical to SEQ ID NO: 162729
  derived and/or modified CDS sequence (opt4) from hemagglutinin__InfluenzaA__ACR52488

SEQ ID NO: 162939 - RNA, 1701 nt, Artificial Sequence; identical to SEQ ID NO: 162729
  derived and/or modified CDS sequence (opt4) from hemagglutinin__InfluenzaA__ACR54045

SEQ ID NO: 162940 - RNA, 1701 nt, Artificial Sequence
  derived and/or modified CDS sequence (opt4) from hemagglutinin__InfluenzaA__ACR54047
augaaggccauccugguggugcugcuguacaccuucgccaccgccaacgccgacacccugugcaucggcuaccacgccaacaacagcaccgacaccguggacaccgugcuggagaagaacgugaccgugacccacagcgugaaccugcuggaggacaagcacaacggcaagcugugcaagcugagaggcguggccccccugcaccugggcaagugcaacaucgccggcuggauccugggcaaccccgagugcgagagccugagcaccgccagcagcuggagcuacaucguggagaccagcagcagcgacaacggcaccugcuaccccggcgacuucaucgacuacgaggagcugagagagcagcugagcagcgugagcagcuucgagagauucgagaucuuccccaagaccagcagcuggcccaaccacgacagcaacaagggcgugaccgccgccugcccccacgccggcgccaagagcuucuacaagaaccugaucuggcuggugaagaagggcaacagcuaccccaagcugagcaagagcuacaucaacgacaagggcaaggaggugcuggugcuguggggcauccaccaccccagcaccagcgccgaccagcagagccuguaccagaacgccgacgccuacguguucgugggcagcagcagauacagcaagaaguucaagcccgagaucgccaucagacccaaggugagagaccaggagggcagaaugaacuacuacuggacccugguggagcccggcgacaagaucaccuucgaggccaccggcaaccugguggugcccagauacgccuucgccauggagagaaacgccggcagcggcaucaucaucagcgacacccccgugcacgacugcaacaccaccugccagacccccaagggcgccaucaacaccagccugcccuuccagaacauccaccccaucaccaucggcaagugccccaaguacgugaagagcaccaagcugagacuggccaccggccugagaaacgugcccagcauccagagcagaggccuguucggcgccaucgccggcuucaucgagggcggcuggaccggcaugguggacggcugguacggcuaccaccaccagaacgagcagggcagcggcuacgccgccgaccugaagagcacccagaacgccaucgacgagaucaccaacaaggugaacagcgugaucgagaagaugaacacccaguucaccgccgugggcaaggaguucaaccaccuggagaagagaaucgagaaccugaacaagaagguggacgacggcuuccuggacaucuggaccuacaacgccgagcugcuggugcugcuggagaacgagagaacccuggacuaccacgacagcaacgugaagaaccuguacgagaaggugagaagccagcugaagaacaacgccaaggagaucggcaacggcugcuucgaguucuaccacaagugcgacaacaccugcauggagagcgugaagaacggcaccuacgacuaccccaaguacagcgaggaggccaagcugaacagagaggagaucgacggcaucaagcuggagagcaccagaaucuaccagauccuggccaucuacagcaccguggccagcagccuggugcugguggugagccugggcgccaucagcuucuggaugugcagcaacggcagccugcagugcagaaucugcaucuga

SEQ ID NO: 162941 - RNA, 1701 nt, Artificial Sequence
  derived and/or modified CDS sequence (opt4) from hemagglutinin__InfluenzaA__ACR54964
augaaggccauccugguggugcugcuguacaccuucgccaccgccaacgccgacacccugugcaucggcuaccacgccaacaacagcaccgacaccguggacaccgugcuggagaagaacgugaccgugacccacagcgugaaccugcuggaggacaagcacaacggcaagcugugcaagcugagaggcguggccccccugcaccugggcaagugcaacaucgccggcuggauccugggcaaccccgagugcgagagccugagcaccgccagcagcuggagcuacaucguggagaccagcagcagcgacaacggcaccugcuaccccggcgacuucaucgacuacgaggagcugagagagcagcugagcagcgugagcagcuucgagagauucgagaucuuccccaagaccagcagcuggcccaaccacgacagcaacaagggcgugaccgccgccugcccccacgccggcgccaagagcuucuacaagaaccugaucuggcuggugaagaagggcaacagcuaccccaagcugagcaagagcuacaucaacgacaagggcaaggaggugcuggugcuguggggcauccaccaccccagcaccagcgccgaccagcagagccuguaccagaacgccgacgccuacguguucgugggcaccagcagauacagcaagaaguucaagcccgagaucgccaucagacccaaggugagagaccaggagggcagaaugaacuacuacuggacccugguggagcccggcgacaagaucaccuucgaggccaccggcaaccugguggugcccagauacgccuucgccauggagagaaacgccggcagcggcaucaucaucagcgacacccccgugcacgacugcaacaccaccugccagacccccaagggcgccaucaacaccagccugcccuuccagaacauccaccccaucaccaucggcaagugccccaaguacgugaagagcaccaagcugagacuggccaccggccugagaaacgugcccagcauccagagcagaggccuguucggcgccaucgccggcuucaucgagggcggcuggaccggcaugguggacggcugguacggcuaccaccaccagaacgagcagggcagcggcuacgccgccgaccugaagagcacccagaacgccaucgacgagaucaccaacaaggugaacagcgugaucgagaagaugaacacccaguucaucgccgugggcaaggaguucaaccaccuggagaagagaaucgagaaccugaacaagaagguggacgacggcuuccuggacaucuggaccuacaacgccgagcugcuggugcugcuggagaacgagagaacccuggacuaccacgacagcaacgugaagaaccuguacgagaaggugagaagccagcugaagaacaacgccaaggagaucggcaacggcugcuucgaguucuaccacaagugcgacaacaccugcauggagagcgugaagaacggcaccuacgacuaccccaaguacagcgaggaggccaagcugaacagagaggagaucgacggcgugaagcuggagagcaccagaaucuaccagauccuggccaucuacagcaccguggccagcagccuggugcugguggugagccugggcgccaucagcuucuggaugugcagcaacggcagccugcagugcagaaucugcaucuga

SEQ ID NO: 162942 - RNA, 1701 nt, Artificial Sequence; identical to SEQ ID NO: 162820
  derived and/or modified CDS sequence (opt4) from hemagglutinin__InfluenzaA__ACR54974

SEQ ID NO: 162943 - RNA, 1701 nt, Artificial Sequence; identical to SEQ ID NO: 162729
  derived and/or modified CDS sequence (opt4) from hemagglutinin__InfluenzaA__ACR54984

SEQ ID NO: 162944 - RNA, 1701 nt, Artificial Sequence; identical to SEQ ID NO: 162716
  derived and/or modified CDS sequence (opt4) from hemagglutinin__InfluenzaA__ACR54994

SEQ ID NO: 162945 - RNA, 1701 nt, Artificial Sequence; identical to SEQ ID NO: 162716
  derived and/or modified CDS sequence (opt4) from hemagglutinin__InfluenzaA__ACR55004

SEQ ID NO: 162946 - RNA, 1701 nt, Artificial Sequence; identical to SEQ ID NO: 162909
  derived and/or modified CDS sequence (opt4) from hemagglutinin__InfluenzaA__ACR56380

SEQ ID NO: 162947 - RNA, 1701 nt, Artificial Sequence; identical to SEQ ID NO: 162782
  derived and/or modified CDS sequence (opt4) from hemagglutinin__InfluenzaA__ACR56390

SEQ ID NO: 162948 - RNA, 1701 nt, Artificial Sequence; identical to SEQ ID NO: 162729
  derived and/or modified CDS sequence (opt4) from hemagglutinin__InfluenzaA__ACR56400

SEQ ID NO: 162949 - RNA, 1701 nt, Artificial Sequence; identical to SEQ ID NO: 162729
  derived and/or modified CDS sequence (opt4) from hemagglutinin__InfluenzaA__ACR56410

SEQ ID NO: 162950 - RNA, 1701 nt, Artificial Sequence; identical to SEQ ID NO: 162729
  derived and/or modified CDS sequence (opt4) from hemagglutinin__InfluenzaA__ACR56420

SEQ ID NO: 162951 - RNA, 1701 nt, Artificial Sequence; identical to SEQ ID NO: 162729
  derived and/or modified CDS sequence (opt4) from hemagglutinin__InfluenzaA__ACR56430

SEQ ID NO: 162952 - RNA, 1701 nt, Artificial Sequence; identical to SEQ ID NO: 162729
  derived and/or modified CDS sequence (opt4) from hemagglutinin__InfluenzaA__ACR56440

SEQ ID NO: 162953 - RNA, 1698 nt, Artificial Sequence
  derived and/or modified CDS sequence (opt4) from hemagglutinin__InfluenzaA__ACR58541
augaaggugaagcugcuggugcugcugugcaccuucaccgccaccuacgccgacaccaucugcaucggcuaccacgccaacaacagcaccgacaccguggacaccgugcuggagaagaacgugaccgugacccacagcgugaaccugcuggagaacagccacaacggcaagcugugccugcugaagggcaucgccccccugcagcugggcaacugcagcguggccggcuggauccugggcaaccccgagugcgagcugcugaucagcaaggagagcuggagcuacaucguggagaagcccaaccccgagaacggcaccugcuaccccggccacuucgccgacuacgaggagcugagagagcagcugagcagcgugagcagcuucgagagauucgagaucuuccccaaggagagcagcuggcccaaccacaccgugaccggcgugagcgccagcugcagccacaacggcgagagcagcuucuacagaaaccugcuguggcugaccagaaagaacggccuguaccccaaccugagcaagagcuacgccaacaacaaggagaaggaggugcuggugcuguggggcgugcaccacccccccaacaucggcgaccagaaggcccuguaccacaccgagaacgccuacgugagcguggugagcagccacuacagcagaaaguucacccccgagaucgccaagagacccaaggugagagaccaggagggcagaaucaacuacuacuggacccugcuggagcccggcgacaccaucaucuucgaggccaacggcaaccugaucgcccccagauacgccuucgcccugagcagaggcuucggcagcggcaucaucaacagcaacgcccccauggacaagugcgacgccaagugccagaccccccagggcgccaucaacagcagccugcccuuccagaacgugcaccccgugaccaucggcgagugccccaaguacgugagaagcgccaagcugagaauggugaccggccugagaaacauccccagcauccagagcagaggccuguucggcgccaucgccggcuucaucgagggcggcuggaccggcaugguggacggcugguacggcuaccaccaccagaacgagcagggcagcggcuacgccgccgaccagaagagcacccagaacgccaucaacggcaucaccaacaaggugaacagcgugaucgacaagaugaacacccaguucaccgccgugggcaaggaguucaacaagcuggagagaagaauggagaaccugaacaagaagguggacgacggcuucaucgacaucuggaccuacaacgccgagcugcuggugcugcuggagaacgagagaacccuggacuuccacgacagcaacgugaagaaccuguacgagaaggugaagagccagcugaagaacaacgccaaggagaucggcaacggcugcuucgaguucuaccacaagugcaacgacgagugcauggagagcgugaagaacggcaccuacgacuaccccaaguacagcgaggagagcaagcugaacagagagaagaucgacggcgugaagcuggagagcaugggcguguaccagauccuggccaucuacagcaccguggccagcagccuggugcugcuggugagccugggcgccaucagcuucuggaugugcagcaacggcagccugcagugcagaaucugcaucuga

SEQ ID NO: 162954 - RNA, 1698 nt, Artificial Sequence; identical to SEQ ID NO: 161974
  derived and/or modified CDS sequence (opt4) from hemagglutinin__InfluenzaA__ACR61655

SEQ ID NO: 162955 - RNA, 1698 nt, Artificial Sequence; identical to SEQ ID NO: 161990
  derived and/or modified CDS sequence (opt4) from hemagglutinin__InfluenzaA__ACR61666

SEQ ID NO: 162956 - RNA, 1701 nt, Artificial Sequence; identical to SEQ ID NO: 162494
  derived and/or modified CDS sequence (opt4) from hemagglutinin__InfluenzaA__ACR61677

SEQ ID NO: 162957 - RNA, 1701 nt, Artificial Sequence; identical to SEQ ID NO: 162494
  derived and/or modified CDS sequence (opt4) from hemagglutinin__InfluenzaA__ACR61688

SEQ ID NO: 162958 - RNA, 1701 nt, Artificial Sequence; identical to SEQ ID NO: 162494
  derived and/or modified CDS sequence (opt4) from hemagglutinin__InfluenzaA__ACR61699

SEQ ID NO: 162959 - RNA, 1701 nt, Artificial Sequence; identical to SEQ ID NO: 162716
  derived and/or modified CDS sequence (opt4) from hemagglutinin__InfluenzaA__ACR67170

SEQ ID NO: 162960 - RNA, 1701 nt, Artificial Sequence; identical to SEQ ID NO: 162755
  derived and/or modified CDS sequence (opt4) from hemagglutinin__InfluenzaA__ACR67171

SEQ ID NO: 162961 - RNA, 1701 nt, Artificial Sequence; identical to SEQ ID NO: 162716
  derived and/or modified CDS sequence (opt4) from hemagglutinin__InfluenzaA__ACR67172

SEQ ID NO: 162962 - RNA, 1701 nt, Artificial Sequence; identical to SEQ ID NO: 162716
  derived and/or modified CDS sequence (opt4) from hemagglutinin__InfluenzaA__ACR67177

SEQ ID NO: 162963 - RNA, 1701 nt, Artificial Sequence; identical to SEQ ID NO: 162716
  derived and/or modified CDS sequence (opt4) from hemagglutinin__InfluenzaA__ACR67181

SEQ ID NO: 162964 - RNA, 1701 nt, Artificial Sequence
  derived and/or modified CDS sequence (opt4) from hemagglutinin__InfluenzaA__ACR67183
augaaggccauccugguggugcugcuguacaccuucgccaccgccaacgccgacacccugugcaucggcuaccacgccaacaacagcaccgacaccguggacaccgugcuggagaagaacgugaccgugacccacagcgugaaccugcuggaggacaagcacaacggcaagcugugcaagcugagaggcguggccccccugcaccugggcaagugcaacaucgccggcuggauccugggcaaccccgagugcgagagccugagcaccgccagcagcuggagcuacaucguggagaccagcagcagcgacaacggcaccugcuaccccggcgacuucaucgacuacgaggagcugagagagcagcugagcagcgugagcagcuucgagagauucgagaucuuccccaagaccagcagcuggcccaaccacgacagcaacaagggcgugaccgccgccugcccccacgccggcgccaagagcuucuacaagaaccugaucuggcuggugaagaagggcaacagcuaccccaagcugagcaagagcuacaucaacgacaagggcaaggaggugcuggugcuguggggcauccaccaccccagcaccagcgccgaccagcagagccuguaccagaacgccgacgccuacguguucgugggcagcagcagauacagcaagaaguucaagcccgagaucgccaucagacccaaggugagagacagagagggcagaaugaacuacuacuggacccugguggagcccggcgacaagaucaccuucgaggccaccggcaaccugguggugcccagauacgccuucgccauggagagaaacgccggcagcggcaucaucaucagcgacacccccgugcacgacugcaacaccaccugccagacccccaagggcgccaucaacaccagccugcccuuccagaacauccaccccaucaccaucggcaagugccccaaguacgugaagagcaccaagcugagacuggccaccggccugagaaacgugcccagcauccagagcagaggccuguucggcgccaucgccggcuucaucgagggcggcuggaccggcaugguggacggcugguacggcuaccaccaccagaacgagcagggcagcggcuacgccgccgaccugaagagcacccagaacgccaucgacgagaucaccaacaaggugaacagcgugaucgagaagaugaacacccaguucaccgccgugggcaaggaguucaaccaccuggagaagagaaucgagaaccugaacaagaagguggacgacggcuuccuggacaucuggaccuacaacgccgagcugcuggugcugcuggagaacgagagaacccuggacuaccacgacagcaacgugaagaaccuguacgagaaggugagaagccagcugaagaacaacgccaaggagaucggcaacggcugcuucgaguucuaccacaagugcgacaacaccugcauggagagcgugaagaacggcaccuacgacuaccccaaguacagcgaggaggccaagcugaacagagaggagaucgacggcgugaagcuggagagcaccagaaucuaccagauccuggccaucuacagcaccguggccagcagccuggugcugguggugagccugggcgccaucagcuucuggaugugcagcaacggcagccugcagugcagaaucugcaucuga

SEQ ID NO: 162965 - RNA, 1701 nt, Artificial Sequence; identical to SEQ ID NO: 162729
  derived and/or modified CDS sequence (opt4) from hemagglutinin__InfluenzaA__ACR67184

SEQ ID NO: 162966 - RNA, 1701 nt, Artificial Sequence; identical to SEQ ID NO: 162716
  derived and/or modified CDS sequence (opt4) from hemagglutinin__InfluenzaA__ACR67185

SEQ ID NO: 162967 - RNA, 1701 nt, Artificial Sequence; identical to SEQ ID NO: 162909
  derived and/or modified CDS sequence (opt4) from hemagglutinin__InfluenzaA__ACR67186

SEQ ID NO: 162968 - RNA, 1701 nt, Artificial Sequence; identical to SEQ ID NO: 162716
  derived and/or modified CDS sequence (opt4) from hemagglutinin__InfluenzaA__ACR67187

SEQ ID NO: 162969 - RNA, 1701 nt, Artificial Sequence; identical to SEQ ID NO: 162755
  derived and/or modified CDS sequence (opt4) from hemagglutinin__InfluenzaA__ACR67188

SEQ ID NO: 162970 - RNA, 1701 nt, Artificial Sequence; identical to SEQ ID NO: 162755
  derived and/or modified CDS sequence (opt4) from hemagglutinin__InfluenzaA__ACR67189

SEQ ID NO: 162971 - RNA, 1701 nt, Artificial Sequence
  derived and/or modified CDS sequence (opt4) from hemagglutinin__InfluenzaA__ACR67190
auggaggccauccugguggugcugcuguacaccuucgccaccgccaacgccgacacccugugcaucggcuaccacgccaacaacagcaccgacaccguggacaccgugcuggagaagaacgugaccgugacccacagcgugaaccugcuggaggacaagcacaacggcaagcugugcaagcugagaggcguggccccccugcaccugggcaagugcaacaucgccggcuggauccugggcaaccccgagugcgagagccugagcaccgccagcagcuggagcuacaucguggagaccagcagcagcgacaacggcaccugcuaccccggcgacuucaucgacuacgaggagcugagagagcagcugagcagcgugagcagcuucgagagauucgagaucuuccccaagaccagcagcuggcccaaccacgacagcaacaagggcgugaccgccgccugcccccacgccggcgccaagagcuucuacaagaaccugaucuggcuggugaagaagggcaacagcuaccccaagcugagcaagagcuacaucaacgacaagggcaaggaggugcuggugcuguggggcauccaccaccccagcaccagcgccgaccagcagagccuguaccagaacgccgacgccuacguguucgugggcagcagcagauacagcaagaaguucaagcccgagaucgccaucagacccaaggugagagaccaggagggcagaaugaacuacuacuggacccugguggagcccggcgacaagaucaccuucgaggccaccggcaaccugguggugcccagauacgccuucgccauggagagaaacgccggcagcggcaucaucaucagcgacacccccgugcacgacugcaacaccaccugccagacccccaagggcgccaucaacaccagccugcccuuccacaacauccaccccaucaccaucggcaagugccccaaguacgugaagagcaccaagcugagacuggccaccggccugagaaacgugcccagcauccagagcagaggccuguucggcgccaucgccggcuucaucgagggcggcuggaccggcaugguggacggcugguacggcuaccaccaccagaacgagcagggcagcggcuacgccgccgaccugaagagcacccagaacgccaucgacgagaucaccaacaaggugaacagcgugaucgagaagaugaacacccaguucaccgccgugggcaaggaguucaaccaccuggagaagagaaucgagaaccugaacaagaagguggacgacggcuuccuggacaucuggaccuacaacgccgagcugcuggugcugcuggagaacgagagaacccuggacuaccacgacagcaacgugaagaaccuguacgagaaggugagaagccagcugaagaacaacgccaaggagaucggcaacggcugcuucgaguucuaccacaagugcgacaacaccugcauggagagcgugaagaacggcaccuacgacuaccccaaguacagcgaggaggccaagcugaacagagaggagaucgacggcgugaagcuggagagcaccagaaucuaccagauccuggccaucuacagcaccguggccagcagccuggugcugguggugagccugggcgccaucagcuucuggaugugcagcaacggcagccugcagugcagaaucugcaucuga

SEQ ID NO: 162972 - RNA, 1701 nt, Artificial Sequence; identical to SEQ ID NO: 162716
  derived and/or modified CDS sequence (opt4) from hemagglutinin__InfluenzaA__ACR67192

SEQ ID NO: 162973 - RNA, 1701 nt, Artificial Sequence
  derived and/or modified CDS sequence (opt4) from hemagglutinin__InfluenzaA__ACR67193
augaaggccauccugguggugcugcuguacaccuucgccaccgccaacgccgacacccugugcaucggcuaccacgccaacaacagcaccgacaccguggacaccgugcuggagaagaacgugaccgugacccacagcgugaacauccuggaggacaagcacaacggcaagcugugcaagcugagaggcguggccccccugcaccugggcaagugcaacaucgccggcuggauccugggcaaccccgagugcgagagccugagcaccgccagcagcuggagcuacaucguggagaccagcagcagcgacaacggcaccugcuaccccggcgacuucaucgacuacgaggagcugagagagcagcugagcagcgugagcagcuucgagagauucgagaucuuccccaagaccagcagcuggcccaaccacgacagcaacaagggcgugaccgccgccugcccccacgccggcgccaagagcuucuacaagaaccugaucuggcuggugaagaagggcaacagcuaccccaagcugagcaagagcuacaucaacgacaagggcaaggaggugcuggugcuguggggcauccaccaccccagcaccagcgccgaccagcagagccuguaccagaacgccgacgccuacguguucgugggcagcagcagauacagcaagaaguucaagcccgagaucgccaucagacccaaggugagagaccaggagggcagaaugaacuacuacuggacccugguggagcccggcgacaagaucaccuucgaggccaccggcaaccugguggugcccagauacgccuucgccauggagagaaacgccggcagcggcaucaucaucagcgacacccccgugcacgagugcaacaccaccugccagacccccaagggcgccaucaacaccagccugcccuuccagaacauccaccccaucaccaucggcaagugccccaaguacgugaagagcaccaagcugagacuggccaccggccugagaaacgugcccagcauccagagcagaggccuguucggcgccaucgccggcuucaucgagggcggcuggaccggcaugguggacggcugguacggcuaccaccaccagaacgagcagggcagcggcuacgccgccgaccugaagagcacccagaacgccaucgacgagaucaccaacaaggugaacagcgugaucgagaagaugaacacccaguucaccgccgugggcaaggaguucaaccaccuggagaagagaaucgagaaccugaacaagaagguggacgacggcuuccuggacaucuggaccuacaacgccgagcugcuggugcugcuggagaacgagagaacccuggacuaccacgacagcaacgugaagaaccuguacgagaaggugagaagccagcugaagaacaacgccaaggagaucggcaacggcugcuucgaguucuaccacaagugcgacaacaccugcauggagagcgugaagaacggcaccuacgacuaccccaaguacagcgaggaggccaagcugaacagagaggagaucgacggcgugaagcuggagagcaccagaaucuaccagauccuggccaucuacagcaccguggccagcagccuggugcugguggugagccugggcgccaucagcuucuggaugugcagcaacggcagccugcagugcagaaucugcaucuga

SEQ ID NO: 162974 - RNA, 1701 nt, Artificial Sequence; identical to SEQ ID NO: 162716
  derived and/or modified CDS sequence (opt4) from hemagglutinin__InfluenzaA__ACR67195

SEQ ID NO: 162975 - RNA, 1701 nt, Artificial Sequence; identical to SEQ ID NO: 162716
  derived and/or modified CDS sequence (opt4) from hemagglutinin__InfluenzaA__ACR67197

SEQ ID NO: 162976 - RNA, 1701 nt, Artificial Sequence; identical to SEQ ID NO: 162973
  derived and/or modified CDS sequence (opt4) from hemagglutinin__InfluenzaA__ACR67198

SEQ ID NO: 162977 - RNA, 1701 nt, Artificial Sequence; identical to SEQ ID NO: 162716
  derived and/or modified CDS sequence (opt4) from hemagglutinin__InfluenzaA__ACR67199

SEQ ID NO: 162978 - RNA, 1701 nt, Artificial Sequence; identical to SEQ ID NO: 162729
  derived and/or modified CDS sequence (opt4) from hemagglutinin__InfluenzaA__ACR67244

SEQ ID NO: 162979 - RNA, 1701 nt, Artificial Sequence
  derived and/or modified CDS sequence (opt4) from hemagglutinin__InfluenzaA__ACR67254
augaaggccauccugguggugcugcuguacaccuucgccaccgccaacgccgacacccugugcaucggcuaccacgccaacaacagcaccgacaccguggacaccgugcuggagaagaacgugaccgugacccacagcgugaaccugcuggaggacaagcacaacggcaagcugugcaagcugagaggcguggccccccugcaccugggcaagugcaacaucgccggcuggauccugggcaaccccgagugcgagagccugagcaccgccagcagcuggagcuacaucguggagaccagcagcagcgacaacggcaccugcuaccccggcgacuucaucgacuacgaggagcugagagagcagcugagcagcgugagcagcuucgagagauucgagaucuuccccaagaccagcagcuggcccaaccacgacagcaacaagggcgugaccgccgccugcccccacgccggcgccaagagcuucuacaagaaccugaucuggcuggugaagaagggcaacagcuaccccaagcugagcaagagcuacaucaacgacaagggcaaggaggugcuggugcuguggggcauccaccaccccagcaccagcgccgaccagcagagccuguaccagaacgccgacgccuacguguucgugggcagcagcagauacagcaagaaguucaagcccgagaucgccaucagacccaaggugagagaccaggagggcagaaugaacuacuacuggacccugguggagcccggcgacaagaucaccuucgaggccaccggcaaccugguggugcccagauacgccuucgccauggagagaaacgugggcagcggcaucaucaucagcgacacccccgugcacgacugcaacaccaccugccagacccccaagggcgccaucaacaccagccugcccuuccagaacauccaccccaucaccaucggcaagugccccaaguacgugaagagcaccaagcugagacuggccaccggccugagaaacgugcccagcauccagagcagaggccuguucggcgccaucgccggcuucaucgagggcggcuggaccggcaugguggacggcugguacggcuaccaccaccagaacgagcagggcagcggcuacgccgccgaccugaagagcacccagaacgccaucgacgagaucaccaacaaggugaacagcgugaucgagaagaugaacacccaguucaccgccgugggcaaggaguucaaccaccuggagaagagaaucgagaaccugaacaagaagguggacgacggcuuccuggacaucuggaccuacaacgccgagcugcuggugcugcuggagaacgagagaacccuggacuaccacgacagcaacgugaagaaccuguacgagaaggugagaagccagcugaagaacaacgccaaggagaucggcaacggcugcuucgaguucuaccacaagugcgacaacaccugcauggagagcgugaagaacggcaccuacgacuaccccaaguacagcgaggaggccaagcugaacagagaggagaucgacggcgugaagcuggagagcaccagaaucuaccagauccuggccaucuacagcaccguggccagcagccuggugcugguggugagccugggcgccaucagcuucuggaugugcagcaacggcagccugcagugcagaaucugcaucuga

SEQ ID NO: 162980 - RNA, 1701 nt, Artificial Sequence; identical to SEQ ID NO: 162729
  derived and/or modified CDS sequence (opt4) from hemagglutinin__InfluenzaA__ACR77438

SEQ ID NO: 162981 - RNA, 1701 nt, Artificial Sequence; identical to SEQ ID NO: 162729
  derived and/or modified CDS sequence (opt4) from hemagglutinin__InfluenzaA__ACR77448

SEQ ID NO: 162982 - RNA, 1701 nt, Artificial Sequence
  derived and/or modified CDS sequence (opt4) from hemagglutinin__InfluenzaA__ACR77458
augaaggccauccugguggugcugcuguacaccuucgccaccgccaacgccgacacccugugcaucggcuaccacgccaacaacagcaccgacaccguggacaccgugcuggagaagaacgugaccgugacccacagcgugaaccugcuggaggacaagcacaacggcaagcugugcaagcugagaggcguggccccccugcaccuggacaagugcaacaucgccggcuggauccugggcaaccccgagugcgagagccugagcaccgccagcagcuggagcuacaucguggagaccagcagcagcgacaacggcaccugcuaccccggcgacuucaucgacuacgaggagcugagagagcagcugagcagcgugagcagcuucgagagauucgagaucuuccccaagaccagcagcuggcccaaccacgacagcaacaagggcgugaccgccgccugcccccacgccggcgccaagagcuucuacaagaaccugaucuggcuggugaagaagggcaacagcuaccccaagcugagcaagagcuacaucaacgacaagggcaaggaggugcuggugcuguggggcauccaccaccccagcaccagcgccgaccagcagagccuguaccagaacgccgacgccuacguguucgugggcaccagcagauacagcaagaaguucaagcccgagaucgccaucagacccaaggugagagaccaggagggcagaaugaacuacuacuggacccugguggagcccggcgacaagaucaccuucgaggccaccggcaaccugguggugcccagauacgccuucgccauggagagaaacgccggcagcggcaucaucaucagcgacacccccgugcacgacugcaacaccaccugccagacccccaagggcgccaucaacaccagccugcccuuccagaacauccaccccaucaccaucggcaagugccccaaguacgugaagagcaccaagcugagacuggccaccggccugagaaacgugcccagcauccagagcagaggccuguucggcgccaucgccggcuucaucgagggcggcuggaccggcaugguggacggcugguacggcuaccaccaccagaacgagcagggcagcggcuacgccgccgaccugaagagcacccagaacgccaucgacgagaucaccaacaaggugaacagcgugaucgagaagaugaacacccaguucaccgccgugggcaaggaguucaaccaccuggagaagagaaucgagaaccugaacaagaagguggacgacggcuuccuggacaucuggaccuacaacgccgagcugcuggugcugcuggagaacgagagaacccuggacuaccacgacagcaacgugaagaaccuguacgagaaggugagaagccagcugaagaacaacgccaaggagaucggcaacggcugcuucgaguucuaccacaagugcgacaacaccugcauggagagcgugaagaacggcaccuacgacuaccccaaguacagcgaggaggccaagcugaacagagaggagaucgacggcgugaagcuggagagcaccagaaucuaccagauccuggccaucuacagcaccguggccagcagccuggugcugguggugagccugggcgccaucagcuucuggaugugcagcaacggcagccugcagugcagaaucugcaucuga

SEQ ID NO: 162983 - RNA, 1701 nt, Artificial Sequence; identical to SEQ ID NO: 162729
  derived and/or modified CDS sequence (opt4) from hemagglutinin__InfluenzaA__ACR77468

SEQ ID NO: 162984 - RNA, 1701 nt, Artificial Sequence; identical to SEQ ID NO: 162729
  derived and/or modified CDS sequence (opt4) from hemagglutinin__InfluenzaA__ACR77478

SEQ ID NO: 162985 - RNA, 1701 nt, Artificial Sequence; identical to SEQ ID NO: 162729
  derived and/or modified CDS sequence (opt4) from hemagglutinin__InfluenzaA__ACR77488

SEQ ID NO: 162986 - RNA, 1701 nt, Artificial Sequence; identical to SEQ ID NO: 162729
  derived and/or modified CDS sequence (opt4) from hemagglutinin__InfluenzaA__ACR77498

SEQ ID NO: 162987 - RNA, 1701 nt, Artificial Sequence; identical to SEQ ID NO: 162716
  derived and/or modified CDS sequence (opt4) from hemagglutinin__InfluenzaA__ACR83525

SEQ ID NO: 162988 - RNA, 1701 nt, Artificial Sequence
  derived and/or modified CDS sequence (opt4) from hemagglutinin__InfluenzaA__ACR83538
augaaggccauccugguggugcugcuguacaccuucgccaccgccaacgccgacacccugugcaucggcuaccacgccaacaacagcaccgacaccguggacaccgugcuggagaagaacgugaccgugacccacagcgugaaccugcuggaggacaagcacaacggcaagcugugcaagcugagaggcguggccccccugcaccugggcaagugcaacaucgccggcuggauccugggcaaccccgagugcgagagccugagcaccgccagcagcuggagcuacaucguggagaccagcagcagcgacaacggcaccugcuaccccggcgacuucaucgacuacgaggagcugagagagcagcugagcagcgugagcagcuucgagagauucgagaucuuccccaagaccagcagcuggcccaaccacgacagcaacaagggcgugaccgccgccugcccccacgccggcgccaagagcuucuacaagaaccugaucuggcuggugaagaagggcaacagcuaccccaagcugagcaagagcuacaucaacgacaagggcaaggaggugcuggugcuguggggcauccaccaccccagcaccagcgccgaccagcagagccuguaccagaacgccgacgccuacguguucgugggcaccagcagauacagcaagaaguucaagcccgagaucgccaucagacccaaggugagagaccaggagggcagaaugaacuacuacuggacccugguggagcccggcgacaagaucaccuucgaggccaccggcaaccugguggugcccagauacgccuucgccauggagagaaacgccggcagcggcaucaucaucagcgacacccccgugcacgacugcaacaccaccugccagacccccaagggcgccaucaacaccagccugcccuuccagaacauccaccccaucaccaucggcaagugccccaaguacgugaagagcaccaagcugagacuggccaccggccugagaaacgugcccagcauccugagcagaggccuguucggcgccaucgccggcuucaucgagggcggcuggaccggcaugguggacggcugguacggcuaccaccaccagaacgagcagggcagcggcuacgccgccgaccugaagagcacccagaacgccaucgacgagaucaccaacaaggugaacagcgugaucgagaagaugaacacccaguucaccgccgugggcaaggaguucaaccaccuggagaagagaaucgagaaccugaacaagaagguggacgacggcuuccuggacaucuggaccuacaacgccgagcugcuggugcugcuggagaacgagagaacccuggacuaccacgacagcaacgugaagaaccuguacgagaaggugagaagccagcugaagaacaacgccaaggagaucggcaacggcugcuucgaguucuaccacaagugcgacaacaccugcauggagagcgugaagaacggcaccuacgacuaccccaaguacagcgaggaggccaagcugaacagagaggagaucgacggcgugaagcuggagagcaccagaaucuaccagauccuggccaucuacagcaccguggccagcagccuggugcugguggugagccugggcgccaucagcuucuggaugugcagcaacggcagccugcagugcagaaucugcaucuga

SEQ ID NO: 162989 - RNA, 1701 nt, Artificial Sequence; identical to SEQ ID NO: 162729
  derived and/or modified CDS sequence (opt4) from hemagglutinin__InfluenzaA__ACS14666

SEQ ID NO: 162990 - RNA, 1701 nt, Artificial Sequence; identical to SEQ ID NO: 162729
  derived and/or modified CDS sequence (opt4) from hemagglutinin__InfluenzaA__ACS14676

SEQ ID NO: 162991 - RNA, 1701 nt, Artificial Sequence; identical to SEQ ID NO: 162729
  derived and/or modified CDS sequence (opt4) from hemagglutinin__InfluenzaA__ACS14686

SEQ ID NO: 162992 - RNA, 1701 nt, Artificial Sequence; identical to SEQ ID NO: 162729
  derived and/or modified CDS sequence (opt4) from hemagglutinin__InfluenzaA__ACS14696

SEQ ID NO: 162993 - RNA, 1701 nt, Artificial Sequence; identical to SEQ ID NO: 162729
  derived and/or modified CDS sequence (opt4) from hemagglutinin__InfluenzaA__ACS14706

SEQ ID NO: 162994 - RNA, 1701 nt, Artificial Sequence; identical to SEQ ID NO: 162729
  derived and/or modified CDS sequence (opt4) from hemagglutinin__InfluenzaA__ACS14716

SEQ ID NO: 162995 - RNA, 1701 nt, Artificial Sequence; identical to SEQ ID NO: 162729
  derived and/or modified CDS sequence (opt4) from hemagglutinin__InfluenzaA__ACS14726

SEQ ID NO: 162996 - RNA, 1701 nt, Artificial Sequence; identical to SEQ ID NO: 162729
  derived and/or modified CDS sequence (opt4) from hemagglutinin__InfluenzaA__ACS14736

SEQ ID NO: 162997 - RNA, 1701 nt, Artificial Sequence; identical to SEQ ID NO: 162909
  derived and/or modified CDS sequence (opt4) from hemagglutinin__InfluenzaA__ACS27189

SEQ ID NO: 162998 - RNA, 1701 nt, Artificial Sequence; identical to SEQ ID NO: 162729
  derived and/or modified CDS sequence (opt4) from hemagglutinin__InfluenzaA__ACS27199

SEQ ID NO: 162999 - RNA, 1701 nt, Artificial Sequence; identical to SEQ ID NO: 162729
  derived and/or modified CDS sequence (opt4) from hemagglutinin__InfluenzaA__ACS27209

SEQ ID NO: 163000 - RNA, 1701 nt, Artificial Sequence; identical to SEQ ID NO: 162782
  derived and/or modified CDS sequence (opt4) from hemagglutinin__InfluenzaA__ACS27219

SEQ ID NO: 163001 - RNA, 1701 nt, Artificial Sequence; identical to SEQ ID NO: 162729
  derived and/or modified CDS sequence (opt4) from hemagglutinin__InfluenzaA__ACS27229

SEQ ID NO: 163002 - RNA, 1701 nt, Artificial Sequence
  derived and/or modified CDS sequence (opt4) from hemagglutinin__InfluenzaA__ACS27239
augaaggccauccugguggugcugcuguacaccuucgccaccgccaacgccgacacccugugcaucggcuaccacgccaacaacagcaccgacaccguggacaccgugcuggagaagaacgugaccgugacccacagcgugaaccugcuggaggacaagcacaacggcaagcugugcaagcugagaggcguggccccccugcaccugggcaagugcaacaucgccggcuggauccugggcaaccccgagugcgagagccugagcaccgccagcagcuggagcuacaucguggagaccagcagcagcgacaacggcaccugcuaccccggcgacuucaucgacuacgaggagcugagagagcagcugagcagcaugagcagcuucgagagauucgagaucuuccccaagaccagcagcuggcccaaccacgacagcaacaagggcgugaccgccgccugcccccacgccggcgccaagagcuucuacaagaaccugaucuggcuggugaagaagggcaacagcuaccccaagcugagcaagagcuacaucaacgacaagggcaaggaggugcuggugcuguggggcauccaccaccccagcaccagcgccgaccagcagagccuguaccagaacgccgacgccuacguguucgugggcagcagcagauacagcaagaaguucaagcccgagaucgccaucagacccaaggugagagaccaggagggcagaaugaacuacuacuggacccugguggagcccggcgacaagaucaccuucgaggccaccggcaaccugguggugcccagauacgccuucgccauggagagaaacgccggcagcggcaucaucaucagcgacacccccgugcacgacugcaacaccaccugccagacccccaagggcgccaucaacaccagccugcccuuccagaacauccaccccaucaccaucggcaagugccccaaguacgugaagagcaccaagcugagacuggccaccggccugagaaacgugcccagcauccagagcagaggccuguucggcgccaucgccggcuucaucgagggcggcuggaccggcaugguggacggcugguacggcuaccaccaccagaacgagcagggcagcggcuacgccgccgaccugaagagcacccagaacgccaucgacgagaucaccaacaaggugaacagcgugaucgagaagaugaacacccaguucaccgccgugggcaaggaguucaaccaccuggagaagagaaucgagaaccugaacaagaagguggacgacggcuuccuggacaucuggaccuacaacgccgagcugcuggugcugcuggagaacgagagaacccuggacuaccacgacagcaacgugaagaaccuguacgagaaggugagaagccagcugaagaacaacgccaaggagaucggcaacggcugcuucgaguucuaccacaagugcgacaacaccugcauggagagcgugaagaacggcaccuacgacuaccccaaguacagcgaggaggccaagcugaacagagaggagaucgacggcgugaagcuggagagcaccagaaucuaccagauccuggccaucuacagcaccguggccagcagccuggugcugguggugagccugggcgccaucagcuucuggaugugcagcaacggcagccugcagugcagaaucugcaucuga

SEQ ID NO: 163003 - RNA, 1701 nt, Artificial Sequence; identical to SEQ ID NO: 162729
  derived and/or modified CDS sequence (opt4) from hemagglutinin__InfluenzaA__ACS27249

SEQ ID NO: 163004 - RNA, 1701 nt, Artificial Sequence; identical to SEQ ID NO: 162729
  derived and/or modified CDS sequence (opt4) from hemagglutinin__InfluenzaA__ACS27775

SEQ ID NO: 163005 - RNA, 1701 nt, Artificial Sequence; identical to SEQ ID NO: 162716
  derived and/or modified CDS sequence (opt4) from hemagglutinin__InfluenzaA__ACS34705

SEQ ID NO: 163006 - RNA, 1701 nt, Artificial Sequence; identical to SEQ ID NO: 162716
  derived and/or modified CDS sequence (opt4) from hemagglutinin__InfluenzaA__ACS34966

SEQ ID NO: 163007 - RNA, 1701 nt, Artificial Sequence
  derived and/or modified CDS sequence (opt4) from hemagglutinin__InfluenzaA__ACS34967
augaaggccauccugguggugcugcuguacaccuucgccaccgccaacgccgacacccugugcaucggcuaccacgccaacaacagcaccgacaccguggacaccgugcuggagaagaacgugaccgugacccacagcgugaaccugcuggaggacaagcacaacggcaagcugugcaagcugagaggcguggccccccugcaccugggcaagugcaacaucgccggcuggauccugggcaaccccgagugcgagagccugagcaccgccagcagcuggagcuacaucguggagaccagcagcagcgacaacggcaccugcuaccccggcgacuucaucgacuacgaggagcugagagagcagcugagcagcgugagcagcuucgagagauucgagaucuuccccaagaccagcagcuggcccaaccacgacagcaacaagggcgugaccgccgccugcccccacgccggcgccaagagcuucuacaagaaccugaucuggcuggugaagaagggcaacagcuaccccaagcugagcaagagcuacaucaacgacaagggcaaggaggugcuggugcuguggggcauccaccaccccagcaccagcgccgaccagcagagccuguaccagaacgccgacgccuacguguucgugggcagcagcagauacagcaagaaguucaagcccgagaucgccaucagacccaaggugagagaccaggagggcagaaugaacuacuacuggacccugguggagcccggcgacaagaucaccuucgaggccaccggcaaccugguggugcccagauacgccuucgccauggagagaaacgccggcagcggcaucaucaucagcgacacccccgugcacgacugcaacaccaccugccagacccccaagggcgccaucaacaccagccugcccuuccagaacauccaccccaucaccaucggcaagugccccaaguacgugaagagcaccaagagcagacuggccaccggccugagaaacgugcccagcauccagagcagaggccuguucggcgccaucgccggcuucaucgagggcggcuggaccggcaugguggacggcugguacggcuaccaccaccagaacgagcagggcagcggcuacgccgccgaccugaagagcacccagaaggccaucgacgagaucaccaacaaggugaacagcgugaucgagaagaugaacacccaguucaccgccgugggcaaggaguucaaccaccuggagaagagaaucgagaaccugaacaagaagguggacgacggcuuccuggacaucuggaccuacaacgccgagcugcuggugcugcuggagaacgagagaacccuggacuaccacgacagcaacgugaagaaccuguacgagaaggugagaagccagcugaagaacaacgccaaggagaucggcaacggcugcuucgaguucuaccacaagugcgacaacaccugcauggagagcgugaagaacggcaccuacgacuaccccaaguacagcgaggaggccaagcugaacagagaggagaucgacggcgugaagcuggagagcaccagaaucuaccagauccuggccaucuacagcaccguggccagcagccuggugcugguggugagccugggcgccaucagcuucuggaugugcagcaacggcagccugcagugcagaaucugcaucuga

SEQ ID NO: 163008 - RNA, 1701 nt, Artificial Sequence
  derived and/or modified CDS sequence (opt4) from hemagglutinin__InfluenzaA__ACS34968
augaaggccauccugguggugcugcuguacaccuucgccaccgccaacgccgacacccugugcaucggcuaccacgccaacaacagcaccgacaccguggacaccgugcuggagaagaacgugaccgugacccacagcgugaaccugcuggaggacaagcacaacggcaagcugugcaagcugagaggcguggccccccugcaccugggcaagugcaacaucgccggcuggauccugggcaaccccgagugcgagagccugagcaccgccagcagcuggagcuacaucguggagagcagcagcagcgacaacggcaccugcuaccccggcgacuucaucgacuacgaggagcugagagagcagcugagcagcgugagcagcuucgagagauucgagaucuuccccaagaccagcagcuggcccaaccacgacagcaacaagggcgugaccgccgccugcccccacgccggcgccaagagcuucuacaagaaccugaucuggcuggugaagaagggcaacagcuaccccaagcugagcaagagcuacaucaacgacaagggcaaggaggugcuggugcuguggggcauccaccaccccagcaccagcgccgaccagcagagccuguaccagaacgccgacgccuacguguucgugggcagcagcagauacagcaagaaguucaagcccgagaucgccaucagacccaaggugagagaccaggagggcagaaugaacuacuacuggacccugguggagcccggcgacaagaucaucuucgaggccaccggcaaccugguggugcccagauacgccuucgccauggagagaaacgccggcagcggcaucaucaucagcgacacccccgugcacgacugcaacaccaccugccagacccccaagggcgccaucaacaccagccugcccuuccagaacauccaccccaucaccaucggcaagugccccaaguacgugaagagcaccaagcugagacuggccaccggccugagaaacgugcccagcauccagagcagaggccuguucggcgccaucgccggcuucaucgagggcggcuggaccggcaugguggacggcugguacggcuaccaccaccagaacgagcagggcagcggcuacgccgccgaccugaagagcacccagaacgccaucgacgagaucaccaacaaggugaacagcgugaucgagaagaugaacacccaguucaccgccgugggcaaggaguucaaccaccuggagaagagaaucgagaaccugaacaagaagguggacgacggcuuccuggacaucuggaccuacaacgccgagcugcuggugcugcuggagaacgagagaacccuggacuaccacgacagcaacgugaagaaccuguacgagaaggugagaagccagcugaagaacaacgccaaggagaucggcaacggcugcuucgaguucuaccacaagugcgacaacaccugcauggagagcgugaagaacggcaccuacgacuaccccaaguacagcgaggaggccaagcugaacagagaggagaucgacggcgugaagcuggagagcaccagaaucuaccagauccuggccaucuacagcaccguggccagcagccuggugcugguggugagccugggcgccaucagcuucuggaugugcagcaacggcagccugcagugcagaaucugcaucuga

SEQ ID NO: 163009 - RNA, 1701 nt, Artificial Sequence
  derived and/or modified CDS sequence (opt4) from hemagglutinin__InfluenzaA__ACS36632
augaaggccauccugguggugcugcuguacaccuucgccaccgccaacgccgacacccugugcaucggcuaccacgccaacaacagcaccgacaccguggacaccgugcuggagaagaacgugaccgugacccacagcgugaaccugcuggaggacaagcacaacggcaagcugugcaagcugagaggcguggccccccugcaccugggcaagugcaacaucgccggcuggauccugggcaaccccgagugcgagagccugagcaccgccagcagcuggagcuacaucguggagaccagcagcagcgacaacggcaccugcuaccccggcgacuucaucgacuacgaggagcugagagagcagcugagcagcgugagcagcuucgagagauucgagaucuuccccaagaccagcagcuggcccaaccacgacagcaacaagggcgugaccgccgccugcccccacgccggcgccaagagcuucuacaagaaccugaucuggcuggugaagaagggcaacagcuaccccaagcugagcaagagcuacaucaacgacaagggcaaggaggugcuggugcuguggggcauccaccaccccagcaccagcgccgaccagcagagccuguaccagaacgccgacgccuacguguucgugggcagcagcagauacagcaagaaguucaagcccgagaucgccaucagacccaaggugagagaccaggagggcagaaugaacuacuacuggacccugguggagcccggcgacaagaucaccuucgaggccaccggcaaccugguggugcccagauacgccuucgccauggagagaaacgccggcagcggcaucaucaucagcgacacccccgugcacgacugcaacaccaccugccagacccccaagggcgccaucaacaccagccugcccuuccagaacauccaccccaucaccaucggcaagugccccaaguacgugaagagcaccaagcugagacuggccaccggccugagaaacgugcccagcauccagagcagaggccuguucggcgccaucgccggcuucaucgagggcggcuggaccggcaugguggacggcugguacggcuaccaccaccagaacgagcagggcagcggcuacgccgccgaccugaagagcacccagaaggccaucgacgagaucaccaacaaggugaacagcgugaucgagaagaugaacacccaguucaccgccgugggcaaggaguucaaccaccuggagaagagaaucgagaaccugaacaagaagguggacgacggcuuccuggacaucuggaccuacaacgccgagcugcuggugcugcuggagaacgagagaacccuggacuaccacgacagcaacgugaagaaccuguacgagaaggugagaagccagcugaagaacaacgccaaggagaucggcaacggcugcuucgaguucuaccacaagugcgacaacaccugcauggagagcgugaagaacggcaccuacgacuaccccaaguacagcgaggaggccaagcugaacagagaggagaucgacggcgugaagcuggagagcaccagaaucuaccagauccuggccaucuacagcaccguggccagcagccuggugcugguggugagccugggcgccaucagcuucuggaugugcagcaacggcagccugcagugcagaaucugcaucuga

SEQ ID NO: 163010 - RNA, 1701 nt, Artificial Sequence
  derived and/or modified CDS sequence (opt4) from hemagglutinin__InfluenzaA__ACS36645
augaaggccauccugguggugcugcuguacaccuucgccaccgccaacgccgacacccugugcaucggcuaccacgccaacaacagcaccgacaccguggacaccgugcuggagaagaacgugaccgugacccacagcgugaaccugcuggaggacaagcacaacggcaagcugugcaagcugagaggcguggccccccugcaccugggcaagugcaacaucgccggcuggauccugggcaaccccgagugcgagagccugagcaccgccagcagcuggagcuacaucguggagaccagcagcagcgacaacggcaccugcuaccccggcgacuucaucgacuacgaggagcugagagagcagcugagcagcgugagcagcuucgagagauucgagaucuuccccaagaccagcagcuggcccaaccacgacagcaacaagggcgugaccgccgccugcccccacgccggcaccaagagcuucuacaagaaccugaucuggcuggugaagaagggcaacagcuaccccaagcugagcaagagcuacaucaacgacaagggcaaggaggugcuggugcuguggggcauccaccaccccagcaccagcgccgaccagcagagccuguaccagaacgccgacgccuacguguucgugggcagcagcagauacagcaagaaguucaagcccgagaucgccaucagacccaaggugagagaccaggagggcagaaugaacuacuacuggacccugguggagcccggcgacaagaucaccuucgaggccaccggcaaccugguggugcccagauacgccuucgccauggagagaaacgccggcagcggcaucaucaucagcgacacccccgugcacgacugcaacaccaccugccagacccccaagggcgccaucaacaccagccugcccuuccagaacauccaccccaucaccaucggcaagugccccaaguacgugaagagcaccaagcugagacuggccaccggccugagaaacgugcccagcauccagagcagaggccuguucggcgccaucgccggcuucaucgagggcggcuggaccggcaugguggacggcugguacggcuaccaccaccagaacgagcagggcagcggcuacgccgccgaccugaagagcacccagaacgccaucgacgagaucaccaacaaggugaacagcgugaucgagaagaugaacacccaguucaccgccgugggcaaggaguucaaccaccuggagaagagaaucgagaaccugaacaagaagguggacgacggcuuccuggacaucuggaccuacaacgccgagcugcuggugcugcuggagaacgagagaacccuggacuaccacgacagcaacgugaagaaccuguacgagaaggugagaagccagcugaagagcaacgccaaggagaucggcaacggcugcuucgaguucuaccacaagugcgacaacaccugcauggagagcgugaagaacggcaccuacgacuaccccaaguacagcgaggaggccaagcugaacagagaggagaucgacggcaucaagcuggagagcaccagaaucuaccagauccuggccaucuacagcaccguggccagcagccuggugcugguggugagccugggcgccaucagcuucuggaugugcagcaacggcagccugcagugcagaaucugcaucuga

SEQ ID NO: 163011 - RNA, 1701 nt, Artificial Sequence
  derived and/or modified CDS sequence (opt4) from hemagglutinin__InfluenzaA__ACS45035
augaaggccauccugguggugcugcuguacaccuucgccaccgccaacgccgacacccugugcaucggcuaccacgccaacaacagcaccgacaccguggacaccgugcuggagaagaacgugaccgugacccacagcgugaaccugcuggaggacaagcacaacggcaagcugugcaagcugagaggcguggccccccugcaccugggcaagugcaacaucgccggcuggauccugggcaaccccgagugcgagagccugagcaccgccagcagcuggagcuacaucguggagacccccagcagcgacaacggcaccugcuaccccggcgacuucaucgacuacgaggagcugagagagcagcugagcagcgugagcagcuucgagagauucgagaucuuccccaagaccagcagcuggcccaaccacgacagcaacaagggcgugaccgccgccugcccccacgccggcgccaagagcuucuacaagaaccugaucuggcuggugaagaagggcaacagcuaccccaagcugagcaagagcuacaucaacgacaagggcaaggaggugcuggugcuguggggcauccaccaccccagcaccagcgccgaccagcagagcaucuaccagaacgccgacaccuacguguucgugggcagcagcagauacagcaagaaguucaagcccgagaucgccaucagacccaaggugagagaccaggagggcagaaugaacuacuacuggacccugguggagcccggcgacaagaucaccuucgaggccaccggcaaccugguggugcccagauacgccuucgccauggagagaaacgccggcagcggcaucaucaucagcgacacccccgugcacgacugcaacaccaccugccagacccccaagggcgccaucaacaccagccugcccuuccagaacauccaccccaucaccaucggcaagugccccaaguacgugaagagcaccaagcugagacuggccaccggccugagaaacauccccagcauccagagcagaggccuguucggcgccaucgccggcuucaucgagggcggcuggaccggcaugguggacggcugguacggcuaccaccaccagaacgagcagggcagcggcuacgccgccgaccugaagagcacccagaacgccaucgacgagaucaccaacaaggugaacagcgugaucgagaagaugaacacccaguucaccgccgugggcaaggaguucaaccaccuggagaagagaaucgagaaccugaacaagaagguggacgacggcuuccuggacaucuggaccuacaacgccgagcugcuggugcugcuggagaacgagagaacccuggacuaccacgacagcaacgugaagaaccuguacgagaaggugagaagccagcugaagaacaacgccaaggagaucggcaacggcugcuucgaguucuaccacaagugcgacaacaccugcauggagagcgugaagaacggcaccuacgacuaccccaaguacagcgaggaggccaagcugaacagagaggagaucgacggcgugaagcuggagagcaccagaaucuaccagauccuggccaucuacagcaccguggccagcagccuggugcugguggugagccugggcgccaucagcuucuggaugugcagcaacggcagccugcagugcagaaucugcaucuga

SEQ ID NO: 163012 - RNA, 1701 nt, Artificial Sequence; identical to SEQ ID NO: 162729
  derived and/or modified CDS sequence (opt4) from hemagglutinin__InfluenzaA__ACS50084

SEQ ID NO: 163013 - RNA, 1701 nt, Artificial Sequence; identical to SEQ ID NO: 162971
  derived and/or modified CDS sequence (opt4) from hemagglutinin__InfluenzaA__ACS50095

SEQ ID NO: 163014 - RNA, 1701 nt, Artificial Sequence
  derived and/or modified CDS sequence (opt4) from hemagglutinin__InfluenzaA__ACS54258
augaaggccauccugguggugcugcuguacaccuucgccaccgccaacgccgacacccugugcaucggcuaccacgccaacaacagcaccgacaccguggacaccgugcuggagaagaacgugaccgugacccacagcgugaaccugcuggaggacaagcacaacggcaagcugugcaagcugagaggcguggccccccugcaccugggcaagugcaacaucgccggcuggauccugggcaaccccgagugcgagagccugagcaccgccagcagcuggagcuacaucguggagaccagcagcagcgacaacggcaccugcuaccccggcgacuucaucgacuacgaggagcugagagagcagcugagcagcgugagcagcuucgagagauucgagaucuuccccaagaccagcagcuggcccaaccacgacagcaacaagggcgugaccgccgccugcccccacgccggcgccaagagcuucuacaagaaccugaucuggcuggugaagaagggcaacagcuaccccaagcugagcaagagcuacaucaacgacaagggcaaggaggugcuggugcuguggggcauccaccaccccagcaccagcgccgaccagcagagccuguaccagaacgccgacgccuacguguucgugggcaccagcagauacagcaagaaguucaagcccgagaucgccaucagacccaaggugagagaccaggagggcagaaugaacuacuacuggacccugguggagcccggcgacaagaucaccuucgaggccaccggcaaccugguggugcccagauacgccuucgccauggagagaaacgccggcagcggcaucaucaucagcgacacccccgugcacgacugcaacaccaccugccagacccccaagggcgccaucaacaccagccugcccuuccagaacauccaccccaucaccaucggcaagugccccaaguacgugaagagcaccaagcugagacuggccaccggccugagaaacgugcccagcauccagagcagaggccuguucggcgccaucgccggcuucaucgagggcggcuggaccggcaugguggacggcugguacggcuaccaccaccagaacgagcagggcagcggcuacgccgccgaccugaagagcacccagaacgccaucgacgagaucaccaacaaggugaacagcgugaucgagaagaugaacacccaguucaccgccgugggcaaggaguucaaccaccuggagaagagaaucgagaaccugaacaagaagguggacgacggcuuccuggacaucuggaccuacaacgccgagcugcuggugcugcuggagaacgagagaacccuggacuaccacgacagcaacgugaagaaccuguacgagaaggugagaagccagcugaagaacaacgccaaggagaucggcaacggcugcuucgaguucuaccacaagugcgacaacaccugcauggagagcgugaagaacggcaccuacuacuaccccaaguacagcgaggaggccaagcugaacagagaggagaucgacggcgugaagcuggagagcaccagaaucuaccagauccuggccaucuacagcaccguggccagcagccuggugcugguggugagccugggcgccaucagcuucuggaugugcagcaacggcagccugcagugcagaaucugcaucuga

SEQ ID NO: 163015 - RNA, 1701 nt, Artificial Sequence; identical to SEQ ID NO: 162744
  derived and/or modified CDS sequence (opt4) from hemagglutinin__InfluenzaA__ACS54259

SEQ ID NO: 163016 - RNA, 1701 nt, Artificial Sequence; identical to SEQ ID NO: 162716
  derived and/or modified CDS sequence (opt4) from hemagglutinin__InfluenzaA__ACS54260

SEQ ID NO: 163017 - RNA, 1701 nt, Artificial Sequence; identical to SEQ ID NO: 162729
  derived and/or modified CDS sequence (opt4) from hemagglutinin__InfluenzaA__ACS54261

SEQ ID NO: 163018 - RNA, 1701 nt, Artificial Sequence; identical to SEQ ID NO: 162729
  derived and/or modified CDS sequence (opt4) from hemagglutinin__InfluenzaA__ACS54263

SEQ ID NO: 163019 - RNA, 1701 nt, Artificial Sequence; identical to SEQ ID NO: 162729
  derived and/or modified CDS sequence (opt4) from hemagglutinin__InfluenzaA__ACS54301

SEQ ID NO: 163020 - RNA, 1701 nt, Artificial Sequence; identical to SEQ ID NO: 162716
  derived and/or modified CDS sequence (opt4) from hemagglutinin__InfluenzaA__ACS66821

SEQ ID NO: 163021 - RNA, 1701 nt, Artificial Sequence
  derived and/or modified CDS sequence (opt4) from hemagglutinin__InfluenzaA__ACS68822
augaaggccauccugguggugcugcuguacaccuucgccaccgccaacgccgacacccugugcaucggcuaccacgccaacaacagcaccgacaccguggacaccgugcuggagaagaacgugaccgugacccacagcgugaaccugcuggaggacaagcacaacggcaagcugugcaagcugagaggcguggccccccugcaccugggcaagugcaacaucgccggcuggauccugggcaaccccgagugcgagagccugagcaccgccagcagcuggagcuacaucguggagaccagcagcagcgacaacggcaccugcuaccccggcgacuucaucgacuacgagggccugagagagcagcugagcagcgugagcagcuucgagagauucgagaucuuccccaagaccagcagcuggcccaaccacgacagcaacaagggcgugaccgccgccugcccccacgccggcgccaagagcuucuacaagaaccugaucuggcuggugaagaagggcaacagcuaccccaagcugagcaagagcuacaucaacgacaagggcaaggaggugcuggugcuguggggcauccaccaccccagcaccagcgccgaccagcagagccuguaccagaacgccgacgccuacguguucgugggcaccagcagauacagcaagaaguucaagcccgagaucgccaucagacccaaggugagagaccaggagggcagaaugaacuacuacuggacccugguggagcccggcgacaagaucaccuucgaggccaccggcaaccugguggugcccagauacgccuucgccauggagagaaacgccggcagcggcaucaucaucagcgacacccccgugcacgacugcaacaccaccugccagacccccaagggcgccaucaacaccagccugcccuuccagaacauccaccccaucaccaucggcaagugccccaaguacgugaagagcaccaagcugagacuggccaccggccugagaaacgugcccagcauccagagcagaggccuguucggcgccaucgccggcuucaucgagggcggcuggaccggcaugguggacggcugguacggcuaccaccaccagaacgagcagggcagcggcuacgccgccgaccugaagagcacccagaacgccaucgacgagaucaccaacaaggugaacagcgugaucgagaagaugaacacccaguucaccgccgugggcaaggaguucaaccaccuggagaagagaaucgagaaccugaacaagaagaucgacgacggcuuccuggacaucuggaccuacaacgccgagcugcuggugcugcuggagaacgagagaacccuggacuaccacgacagcaacgugaagaaccuguacgagaaggugagaagccagcugaagaacaacgccaaggagaucggcaacggcugcuucgaguucuaccacaagugcgacaacaccugcauggagagcgugaagaacggcaccuacgacuaccccaaguacagcgaggaggccaagcugaacagagaggagaucgacggcgugaagcuggagagcaccagaaucuaccagauccuggccaucuacagcaccguggccagcagccuggugcugguggugagccugggcgccaucagcuucuggaugugcagcaacggcagccugcagugcagaaucugcaucuga

SEQ ID NO: 163022 - RNA, 1701 nt, Artificial Sequence; identical to SEQ ID NO: 162729
  derived and/or modified CDS sequence (opt4) from hemagglutinin__InfluenzaA__ACS75821

SEQ ID NO: 163023 - RNA, 1701 nt, Artificial Sequence; identical to SEQ ID NO: 162729
  derived and/or modified CDS sequence (opt4) from hemagglutinin__InfluenzaA__ACS77926

SEQ ID NO: 163024 - RNA, 1701 nt, Artificial Sequence; identical to SEQ ID NO: 162729
  derived and/or modified CDS sequence (opt4) from hemagglutinin__InfluenzaA__ACS77936

SEQ ID NO: 163025 - RNA, 1701 nt, Artificial Sequence; identical to SEQ ID NO: 162822
  derived and/or modified CDS sequence (opt4) from hemagglutinin__InfluenzaA__ACS77946

SEQ ID NO: 163026 - RNA, 1701 nt, Artificial Sequence; identical to SEQ ID NO: 162729
  derived and/or modified CDS sequence (opt4) from hemagglutinin__InfluenzaA__ACS77956

SEQ ID NO: 163027 - RNA, 1701 nt, Artificial Sequence; identical to SEQ ID NO: 162729
  derived and/or modified CDS sequence (opt4) from hemagglutinin__InfluenzaA__ACS77966

SEQ ID NO: 163028 - RNA, 1701 nt, Artificial Sequence; identical to SEQ ID NO: 162729
  derived and/or modified CDS sequence (opt4) from hemagglutinin__InfluenzaA__ACS77976

SEQ ID NO: 163029 - RNA, 1701 nt, Artificial Sequence; identical to SEQ ID NO: 162971
  derived and/or modified CDS sequence (opt4) from hemagglutinin__InfluenzaA__ACS77986

SEQ ID NO: 163030 - RNA, 1701 nt, Artificial Sequence
  derived and/or modified CDS sequence (opt4) from hemagglutinin__InfluenzaA__ACS77996
augaaggccacccugguggugcugcuguacaccuucgccaccgccaacgccgacacccugugcaucggcuaccacgccaacaacagcaccgacaccguggacaccgugcuggagaagaacgugaccgugacccacagcgugaaccugcuggaggacaagcacaacggcaagcugugcaagcugagaggcguggccccccugcaccugggcaagugcaacaucgccggcuggauccugggcaaccccgagugcgagagccugagcaccgccagcagcuggagcuacaucguggagaccagcagcagcgacaacggcaccugcuaccccggcgacuucaucgacuacgaggagcugagagagcagcugagcagcgugagcagcuucgagagauucgagaucuuccccaagaccagcagcuggcccaaccacgacagcaacaagggcgugaccgccgccugcccccacgccggcgccaagagcuucuacaagaaccugaucuggcuggugaagaagggcaacagcuaccccaagcugagcaagagcuacaucaacgacaagggcaaggaggugcuggugcuguggggcauccaccaccccagcaccagcgccgaccagcagagccuguaccagaacgccgacgccuacguguucgugggcaccagcagauacagcaagaaguucaagcccgagaucgccaucagacccaaggugagagaccaggagggcagaaugaacuacuacuggacccugguggagcccggcgacaagaucaccuucgaggccaccggcaaccugguggugcccagauacgccuucgccauggagagaaacgccggcagcggcaucaucaucagcgacacccccgugcacgacugcaacaccaccugccagacccccaagggcgccaucaacaccagccugcccuuccagaacauccaccccaucaccaucggcaagugccccaaguacgugaagagcaccaagcugagacuggccaccggccugagaaacgugcccagcauccagagcagaggccuguucggcgccaucgccggcuucaucgagggcggcuggaccggcaugguggacggcugguacggcuaccaccaccagaacgagcagggcagcggcuacgccgccgaccugaagagcacccagaacgccaucgacgagaucaccaacaaggugaacagcgugaucgagaagaugaacacccaguucaccgccgugggcaaggaguucaaccaccuggagaagagaaucgagaaccugaacaagaagguggacgacggcuuccuggacaucuggaccuacaacgccgagcugcuggugcugcuggagaacgagagaacccuggacuaccacgacagcaacgugaagaaccuguacgagaaggugagaagccagcugaagaacaacgccaaggagaucggcaacggcugcuucgaguucuaccacaagugcgacaacaccugcauggagagcgugaagaacggcaccuacgacuaccccaaguacagcgaggaggccaagcugaacagagaggagaucgacggcgugaagcuggagagcaccagaaucuaccagauccuggccaucuacagcaccguggccagcagccuggugcugguggugagccugggcgccaucagcuucuggaugugcagcaacggcagccugcagugcagaaucugcaucuga

SEQ ID NO: 163031 - RNA, 1701 nt, Artificial Sequence; identical to SEQ ID NO: 162729
  derived and/or modified CDS sequence (opt4) from hemagglutinin__InfluenzaA__ACS78006

SEQ ID NO: 163032 - RNA, 1701 nt, Artificial Sequence; identical to SEQ ID NO: 162729
  derived and/or modified CDS sequence (opt4) from hemagglutinin__InfluenzaA__ACS78016

SEQ ID NO: 163033 - RNA, 1701 nt, Artificial Sequence
  derived and/or modified CDS sequence (opt4) from hemagglutinin__InfluenzaA__ACS78026
augaaggccauccugguggugcugcuguacaccuucgccaccgccaacgccgacacccugugcaucggcuaccacgccaacaacagcaccgacaccguggacaccgugcuggagaagaacgugaccgugacccacagcgugaaccugcuggaggacaagcacaacggcaagcugugcaagcugagaggcguggccccccugcaccugggcaagugcaacaucgccggcuggauccugggcaaccccgagugcgagagccugagcaccgccagcagcuggagcuacaucguggagaccagcagcagcgacaacggcaccugcuaccccggcgacuucaucgacuacgaggagcugagagagcagcugagcagcgugagcagcuucgagagauucgagaucuuccccaagaucagcagcuggcccaaccacgacagcaacagaggcgugaccgccgccugcccccacgccggcgccaagagcuucuacaagaaccugaucuggcuggugaagaagggcaacagcuaccccaagcugaucaagagcuacaucaacgacaagggcaaggaggugcuggugcuguggggcauccaccaccccagcaccagcgccgaccagcagagccuguaccagaacgccgacgccuacguguucgugggcagcagcagauacagcaagaaguucaagcccgagaucgccaucagacccaaggugagagaccaggagggcagaaugaacuacuacuggacccugguggagcccggcgacaagaucaccuucgaggccaccggcaaccugguggugcccagauacgccuucgccauggagagaaacgccggcagcggcaucaucaucagcgacacccccgugcacgacugcaacaccaccugccagacccccaagggcgccaucaacaccagccugcccuuccagaacauccaccccaucaccaucggcaagugccccaaguacgugaagagcaccaagcugagacuggccaccggccugagaaacgugcccagcauccagagcagaggccuguucggcgccaucgccggcuucaucgagggcggcuggaccggcaugguggacggcugguacggcuaccaccaccagaacgagcagggcagcggcuacgccgccgaccugaagagcacccagaacgccaucgacgagaucaccaacaaggugaacagcgugaucgagaagaugaacacccaguucaccgccgugggcaaggaguucaaccaccuggagaagagaaucgagaaccugaacaagaagguggacgacggcuuccuggacaucuggaccuacaacgccgagcugcuggugcugcuggagaacgagagaacccuggacuaccacgacagcaacgugaagaaccuguacgagaaggugagaagccagcugaagaacaacgccaaggagaucggcaacggcugcuucgaguucuaccacaagugcgacaacaccugcauggagagcgugaagaacggcaccuacgacuaccccaaguacagcgaggaggccaagcugaacagagaggagaucgacggcgugaagcuggagagcaccagaaucuaccagauccuggccaucuacagcaccguggccagcagccuggugcugguggugagccugggcgccaucagcuucuggaugugcagcaacggcagccugcagugcagaaucugcaucuga

SEQ ID NO: 163034 - RNA, 1701 nt, Artificial Sequence; identical to SEQ ID NO: 162971
  derived and/or modified CDS sequence (opt4) from hemagglutinin__InfluenzaA__ACS78036

SEQ ID NO: 163035 - RNA, 1701 nt, Artificial Sequence; identical to SEQ ID NO: 162971
  derived and/or modified CDS sequence (opt4) from hemagglutinin__InfluenzaA__ACS78046

SEQ ID NO: 163036 - RNA, 1701 nt, Artificial Sequence; identical to SEQ ID NO: 162744
  derived and/or modified CDS sequence (opt4) from hemagglutinin__InfluenzaA__ACS92569

SEQ ID NO: 163037 - RNA, 1701 nt, Artificial Sequence; identical to SEQ ID NO: 162744
  derived and/or modified CDS sequence (opt4) from hemagglutinin__InfluenzaA__ACS92579

SEQ ID NO: 163038 - RNA, 1701 nt, Artificial Sequence; identical to SEQ ID NO: 162729
  derived and/or modified CDS sequence (opt4) from hemagglutinin__InfluenzaA__ACS92589

SEQ ID NO: 163039 - RNA, 1701 nt, Artificial Sequence
  derived and/or modified CDS sequence (opt4) from hemagglutinin__InfluenzaA__ACS92612
augaaggccauccugguggugcugcuguacaccuucgccaccgccaacgccgacacccugugcaucggcuaccacgccaacaacagcaccgacaccguggacaccgugcuggagaagaacgugaccgugacccacagcgugaaccugcuggaggacaagcacaacggcaagcugugcaagcugagaggcguggccccccugcaccugggcaagugcaacaucgccggcuggauccugggcaaccccgagugcgagagccugagcaccgccagcagcuggagcuacaucguggagaccagcagcagcgacaacggcaccugcuaccccggcgacuucaucgacuacgaggagcugagagagcagcugagcagcgugagcagcuucgagagauucgagaucuuccccaagaccagcagcuggcccauccacgacagcaacaagggcgugaccgccgccugcccccacgccggcgccaagagcuucuacaagaaccugaucuggcuggugaagaagggcaacagcuaccccaagcugagcaagagcuacaucaacgacaagggcaaggaggugcuggugcuguggggcauccaccaccccagcaccagcgccgaccagcagagccuguaccagaacgccgacgccuacguguucgugggcagcagcagauacagcaagaaguucaagcccgagaucgccaucagacccaaggugagagaccaggagggcagaaugaacuacuacuggacccugguggagcccggcgacaagaucaccuucgaggccaccggcaaccugguggugcccagauacgccuucgccauggagagaaacgccggcagcggcaucaucaucagcgacacccccgugcacgacugcgacaccaccugccagacccccaagggcgccaucaacaccagccugcccuuccagaacauccaccccaucaccaucggcaagugccccaaguacgugaagagcaccaagcugagacuggccaccggccugagaaacauccccagcauccagagcagaggccuguucggcgccaucgccggcuucaucgagggcggcuggaccggcaugguggacggcugguacggcuaccaccaccagaacgagcagggcagcggcuacgccgccgaccugaagagcacccagaacgccaucgacgagaucaccaacaaggugaacagcgugaucgagaagaugaacacccaguucaccgccgugggcaaggaguucaaccaccuggagaagagaaucgagaaccugaacaagaagguggacgacggcuuccuggacaucuggaccuacaacgccgagcugcuggugcugcuggagaacgagagaacccuggacuaccacgacagcaacgugaagaaccuguacgagaaggugagaagccagcugaagaacaacgccaaggagaucggcaacggcugcuucgaguucuaccacaagugcgacaacaccugcauggagagcgugaagaacggcaccuacgacuaccccaaguacagcgaggaggccaagcugaacagagaggagaucgacggcgugaagcuggagagcaccagaaucuaccagauccuggccaucuacagcaccguggccagcagccuggugcugguggugagccugggcgccaucagcuucuggaugugcagcaacggcagccugcagugcagaaucugcaucuga

SEQ ID NO: 163040 - RNA, 1701 nt, Artificial Sequence; identical to SEQ ID NO: 162729
  derived and/or modified CDS sequence (opt4) from hemagglutinin__InfluenzaA__ACT10307

SEQ ID NO: 163041 - RNA, 1701 nt, Artificial Sequence; identical to SEQ ID NO: 162729
  derived and/or modified CDS sequence (opt4) from hemagglutinin__InfluenzaA__ACT10314

SEQ ID NO: 163042 - RNA, 1701 nt, Artificial Sequence
  derived and/or modified CDS sequence (opt4) from hemagglutinin__InfluenzaA__ACT11057
augaaggccauccugguggugcugcuguacaccuucgccaccgccaacgccgacacccugugcaucggcuaccacgccaacaacagcaccgacaccguggacaccgugcuggagaagaacgugaccgugacccacagcgugaacauccuggaggacaagcacaacggcaagcugugcaagcugagaggcguggccccccugcaccugggcaagugcaacaucgccggcuggauccugggcaaccccgagugcgagagccugagcaccgccagcagcuggagcuacaucguggagaccagcagcagcgacaacggcaccugcuaccccggcgacuucaucgacuacgaggagcugagagagcagcugagcagcgugagcagcuucgagagauucgagaucuuccccaagaccagcagcuggcccaaccacgacagcaacaagggcgugaccgccgccugcccccacgccggcgccaagagcuucuacaagaaccugaucuggcuggugaagaagggcaacagcuaccccaagcugagcaagagcuacaucaacgacaagggcaaggaggugcuggugcuguggggcauccaccaccccagcaccagcgccgaccagcagagccuguaccagaacgccgacgccuacguguucgugggcagcagcagauacagcaagaaguucaagcccgagaucgccaucagacccaaggugagagaccaggagggcagaaugaacuacuacuggacccugguggagcccggcgacaagaucaccuucgaggccaccggcaaccugguggugcccagauacgccuucgccauggagagaaacgccggcagcggcaucaucaucagcgacacccccgugcacgacugcaacaccaccugccagacccccaagggcgccaucaacaccagccugcccuuccagaacauccaccccaucaccaucggcaagugccccaaguacgugaagagcaccaagcugagacuggccaccggccugagaaacgugcccagcauccagagcagaggccuguucggcgccaucgccggcuucaucgagggcggcuggaccggcaugguggacggcugguacggcuaccaccaccagaacgagcagggcagcggcuacgccgccgaccugaagagcacccagaacgccaucgacgagaucaccaacaaggugaacagcgugaucgagaagaugaacacccaguucaccgccgugggcaaggaguucaaccaccuggagaagagaaucgagaaccugaacaagaagguggacgacggcuuccuggacaucuggaccuacaacgccgagcugcuggugcugcuggagaacgagagaacccuggacuaccacgacagcaacgugaagaaccuguacgagaaggugagaagccagcugaagaacaacgccaaggaggugggcaacggcugcuucgaguucuaccacaagugcgacaacaccugcauggagagcgugaagaacggcaccuacgacuaccccaaguacagcgaggaggccaagcugaacagagaggagaucgacggcgugaagcuggagagcaccagaaucuaccagauccuggccaucuacagcaccguggccagcagccuggugcugguggugagccugggcgccaucagcuucuggaugugcagcaacggcagccugcagugcagaaucugcaucuga

SEQ ID NO: 163043 - RNA, 1704 nt, Artificial Sequence
  derived and/or modified CDS sequence (opt4) from hemagglutinin__InfluenzaA__ACT15312
auggagaagaucgugcugcugcuggccaucgugagcaucgugaagagcgaccagaucugcaucggcuaccacgccaacaacagcaccgagcagguggacaccaucauggagaagaacgugaccgugacccacgcccaggacauccuggagaagacccacaacggcaagcugugcaaccuggacggcgugaagccccugauccugagagacugcagcguggccggcuggcugcugggcaaccccaugugcgacgaguuccugaacgugcccgaguggagcuacaucguggagaagaucaaccccgccaacgaccugugcuaccccggcaacuucaacgacuacgaggagcugaagcaccugcugagcagaaucaaccacuucgagaagauccagaucauccccaagaacagcuggagcgaccacgaggccagcggcgugagcagcgccugccccuaccagggcagaagcagcuucuucagaaacgugguguggcugaccaagaagaacaacgccuaccccaccaucaagagaagcuacaacaacaccaaccaggaggaccugcuggugcuguggggcauccaccaccccaacgacgccgccgagcagaccagacuguaccagaaccccaccaccuacaucagcgugggcaccagcacccugaaccagagacuggugcccaagaucgccaccagaagcaaggugaacggccagagcggcagaauggaguucuucuggaccauccugaagagcaacgacgccaucaacuucgagagcaacggcaacuucaucgcccccgagaacgccuacaagaucgugaagaagggcgacagcaccaucaugaagagcgagcuggaguacggcaacugcaacaccaagugccagacccccaucggcgccaucaacagcagcaugcccuuccacaacauccacccccugaccaucggcgagugccccaaguacgugaagagcaacagacuggugcuggccaccggccugagaaacagcccccagggcgagagaagaagaaagaagagaggccuguucggcgccaucgccggcuucaucgagggcggcuggcagggcaugguggacggcugguacggcuaccaccacagcaacgagcagggcagcggcuacgccgccgacaaggagagcacccagaaggccaucgacggcgugaccaacaaggugaacagcaucaucgacaagaugaacacccaguucgaggccgugggcagagaguucaacaaccuggagagaagaaucgagaaccugaacaagaagauggaggacggcuuccuggacguguggaccuacaacgccgagcugcuggugcugauggagaacgagagaacccuggacuuccacgacagcaacgugaagaaccuguacgacaaggugagacugcagcugagagacaacgccaaggagcugggcaacggcugcuucgaguucuaccacagaugcgacaacgagugcauggagagcgugagaaacggcaccuacgacuacccccaguacagcgaggaggccagacugaagagagaggagaucagcggcgugaagcuggagagcaucggcaccuaccagauccugagcaucuacagcaccguggccagcagccuggcccuggccaucaugguggccggccuguuccuguggaugugcagcaacggcagccugcagugcagaaucugcaucuga

SEQ ID NO: 163044 - RNA, 1704 nt, Artificial Sequence
  derived and/or modified CDS sequence (opt4) from hemagglutinin__InfluenzaA__ACT15314
auggagaagaucgugcugcugcuggccaucgugagccuggugaagagcgaccagaucugcaucggcuaccacgccaacaacagcaccgagcagguggacaccaucauggagaagaacgugaccgugacccacgcccaggacauccuggagaagacccacaacggcaagcugugcaaccuggacggcgugaagccccugauccugagagacugcagcguggccggcuggcugcugggcaaccccaugugcgacgaguuccugaacgugcccgaguggagcuacaucguggagaagaucaaccccgccaacgaccugugcuaccccggcaacuucaacgacuacgaggagcugaagcaccugcugagcagaaucaaccacuucgagaagauccagaucauccccaagaacagcuggagcgaccacgaggccagcggcgugagcagcgccugccccuaccagggcagaagcagcuucuucagaaacgugguguggcugaccaagaagaacaacgccuaccccaccaucaagagaagcuacaacaacaccaaccaggaggaccugcuggugcuguggggcauccaccaccccaacgacgccgccgagcagaccagacuguaccagaaccccaccaccuacaucagcgugggcaccagcacccugaaccagagacuggugcccaagaucaccaccagaagcaaggugaacggccagagcggcagaauggaguucuucuggaccauccugaagagcaacgacgccaucaacuucgagagcaacggcaacuucaucgcccccgagaacgccuacaagaucgugaagaagggcgacagcaccaucaugaagagcgagcuggaguacggcaacugcaacaccaagugccagacccccaucggcgccaucaacagcagcaugcccuuccacaacauccacccccugaccaucggcgagugccccaaguacgugaagagcaacagacuggugcuggccaccggccugagaaacagcccccagggcgagagaagaagaaagaagagaggccuguucggcgccaucgccggcuucaucgagggcggcuggcagggcaugguggacggcugguacggcuaccaccacagcaacgagcagggcagcggcuacgccgccgacaaggagagcacccagaaggccaucgacggcgugaccaacaaggugaacagcaucaucgacaagaugaacacccaguucgaggccgugggcagagaguucaacaaccuggagagaagaaucgagaaccugaacaagaagauggaggacggcuuccuggacguguggaccuacaacgccgagcugcuggugcugauggagaacgagagaacccuggacuuccacgacagcaacgugaagaaccuguacgacaaggugagacugcagcugagagacaacgccaaggagcugggcaacggcugcuucgaguucuaccacagaugcgacaacgagugcauggagagcgugagaaacggcaccuacgacuacccccaguacagcgaggaggccagacugaagagagaggagaucagcggcgugaagcuggagagcaucggcaccuaccagauccugagcaucuacagcaccguggccagcagccuggcccuggccaucaugguggccggccuguuccuguggaugugcagcaacggcagccugcagugcagaaucugcaucuga

SEQ ID NO: 163045 - RNA, 1704 nt, Artificial Sequence
  derived and/or modified CDS sequence (opt4) from hemagglutinin__InfluenzaA__ACT15316
auggagaagaucgugcugcugcuggccaucgugagccuggugaagagcgaccagaucugcaucggcuaccacgccaacaacagcaccgagcagguggacaccaucauggagaagaacgugaccgugacccacgcccaggacauccuggagaagacccacaacggcaagcugugcaaccuggacggcgugaagccccugauccugagagacugcagcguggccggcuggcugcugggcaaccccaugugcgacgaguuccugaacgugcccgaguggagcuacaucguggagaagaucaaccccgccaacgaccugugcuaccccggcaacuucaacgacuacgaggagcugaagcaccugcugagcagaaucaaccacuucgagaagauccagaucauccccaagaacagcuggagcgaccacgaggccagcggcgugagcagcgccugccccuaccagggcagaagcagcuucuucagaaacgugguguggcugaccaagaaggacaacgccuaccccaccaucaagagaagcuacaacaacaccaaccaggaggaccugcuggugcuguggggcauccaccaccccaacgacgccgccgagcagaccagacuguaccagaaccccaccaccuacaucagcgugggcaccagcacccugaaccagagacugauccccaagaucgccaccagaagcaaggugaacggccagagcggcagaauggaguucuucuggaccauccugaagagcaacgacgccaucaacuucgagagcaacggcaacuucaucgcccccgagaacgccuacaagaucgugaagaagggcgacagcaccaucaugaagagcgagcuggaguacggcaacugcaacaccaagugccagacccccaucggcgccaucaacagcagcaugcccuuccacaacauccacccccugaccaucggcgagugccccaaguacgugaagagcaacagacuggugcuggccaccggccugagaaacagcccccagggcgagagaagaagaaagaagagaggccuguucggcgccaucgccggcuucaucgagggcggcuggcagggcaugguggacggcugguacggcuaccaccacagcaacgagcagggcagcggcuacgccgccgacaaggagagcacccagaaggccaucgacggcgugaccaacaaggugaacagcaucaucgacaagaugaacacccaguucgaggccgugggcagagaguucaacaaccuggagagaagaaucgagaaccugaacaagaagauggaggacggcuuccuggacguguggaccuacaacgccgagcugcuggugcugauggagaacgagagaacccuggacuuccacgacagcaacgugaagaaccuguacgacaaggugagacugcagcugagagacaacgccaaggagcugggcaacggcugcuucgaguucuaccacagaugcgacaacgagugcauggagagcgugagaaacggcaccuacgacuacccccaguacagcgaggaggccagacugaagagagaggagaucagcggcgugaagcuggagagcaucggcaccuaccagauccugagcaucuacagcaccguggccagcagccuggcccuggccaucaugguggccggccuguuccuguggaugugcagcaacggcagccugcagugcagaaucugcaucuga

SEQ ID NO: 163046 - RNA, 1704 nt, Artificial Sequence
  derived and/or modified CDS sequence (opt4) from hemagglutinin__InfluenzaA__ACT15320
auggagaagaucgugcugcugcuggccaucgugagccuggugaagagcgaccagaucugcaucggcuaccacgccaacaacagcaccgagcagguggacaccaucauggagaagaacgugaccgugacccacgcccaggacauccuggagaagacccacaacggcaagcugugcaaccuggacggcgugaagccccugauccugagagacugcagcguggccggcuggcugcugggcaaccccaugugcgacgaguuccugaacgugcccgaguggagcuacaucguggagaagaucaaccccgccaacgaccugugcuaccccggcaacuucaacgacuacgaggagcugaagcaccugcugagcagaaucaaccacuucgagaagauccagaucauccccaagaacagcuggagcgaccacgaggccagcggcaugagcagcgccugccccuaccagggcagaagcagcuucuucagaaacgugguguggcugaccaagaaggacaacgccuaccccaccaucaagagaagcuacaacaacaccaaccaggaggaccugcuggugcuguggggcauccaccaccccaacgacgccgccgagcagaccagacuguaccagaaccccaccaccuacaucagcgugggcaccagcacccugaaccagagacuggugcccaagaucgccaccagaagcaaggugaacggccagagcggcagaauggaguucuucuggaccauccugaagagcaacgacgccaucaacuucgagagcaacggcaacuucaucgcccccgagaacgccuacaagaucgugaagaagggcgacagcaccaucaugaagagcgagcuggaguacggcaacugcaacaccaagugccagacccccaucggcgccaucaacagcagcaugcccuuccacaacauccacccccugaccaucggcgagugccccaaguacgugaagagcaacagacuggugcuggccaccggccugagaaacagcccccagggcgagagaagaagaaagaagagaggccuguucggcgccaucgccggcuucaucgagggcggcuggcagggcaugguggacggcugguacggcuaccaccacagcaacgagcagggcagcggcuacgccgccgacaaggagagcacccagaaggccaucgacggcgugaccaacaaggugaacagcaucaucgacaagaugaacacccaguucgaggccgugggcagagaguucaacaaccuggagagaagaaucgagaaccugaacaagaagauggaggacggcuuccuggacguguggaccuacaacgccgagcugcuggugcugauggagaacgagagaacccuggacuuccacgacagcaacgugaagaaccuguacgacaaggugagacugcagcugagagacaacgccaaggagcugggcaacggcugcuucgaguucuaccacagaugcgacaacgagugcauggagagcgugagaaacggcaccuacgacuacccccaguacagcgaggaggccagacugaagagagaggagaucagcggcgugaagcuggagagcaucggcaccuaccagauccugagcaucuacagcaccguggccagcagccuggcccuggccaucaugguggccggccuguuccuguggaugugcagcaacggcagccugcagugcagaaucugcaucuga

SEQ ID NO: 163047 - RNA, 1704 nt, Artificial Sequence
  derived and/or modified CDS sequence (opt4) from hemagglutinin__InfluenzaA__ACT15322
auggagaagaucgugcugcugcuggccaucgugagccuggugaagagcgaccagaucugcaucggcuaccacgccaacaacagcaccgagcagguggacaccaucauggagaagaacgugaccgugacccacgcccaggacauccuggagaagacccacaacggcaagcugugcaaccuggacggcgugaagccccugauccugagagacugcagcguggccggcuggcugcugggcaaccccaugugcgacgaguuccugaacgugcccgaguggagcuacaucguggagaagaucaaccccgccaacgaccugugcuaccccggcaacuucaacgacuacgaggagcugaagcaccugcugagcagaaucaaccacuucgagaagauccagaucauccccaagaacagcuggagcgaccacgaggccagcggcgugagcagcgccugccccuaccagggcagaagcagcuucuucagaaacgugguguggcugaccaagaaggacaacgccuaccccaccaucaagagaagcuacaacaacaccaaccaggaggaccugcuggugcuguggggcauccaccaccccaacgacgccgccgagcagaccagacuguaccagaaccccaccaccuacaucagcgugggcaccagcacccugaaccagagacuggugcccaagaucgccaccagaagcaaggugaacggccagagcggcagaauggaguucuucuggaccauccugaagagcaacgacgccaucaacuucgagagcaacggcaacuucaucgcccccgagaacgccuacaagaucgugaagaagggcgacagcaccaucaugaagagcgagcuggaguacggcaacugcaacaccaagugccagacccccaucggcgccaucaacagcagcaugcccuuccacaacauccacccccugaccaucggcgagugccccaaguacgugaagagcaacagacuggugcuggccaccggccugagaaacagcccccagggcgagagaagaagaaagaagagaggccuguucggcgccaucgccggcuucaucgagggcggcuggcagggcaugguggacggcugguacggcuaccaccacagcaacgagcagggcagcggcuacgccgccgacaaggagagcacccagaaggccaucgacggcgugaccaacaaggugaacagcaucaucgacaagaugaacacccaguucgaggccgugggcagagaguucaacaaccuggagagcagaaucgagaaccugaacaagaagauggaggacggcuuccuggacguguggaccuacaacgccgagcugcuggugcugauggagaacgagagaacccuggacuuccacgacagcaacgugaagaaccuguacgacaaggugagacugcagcugagagacaacgccaaggagcugggcaacggcugcuucgaguucuaccacagaugcgacaacgagugcauggagagcgugagaaacggcaccuacgacuacccccaguacagcgaggaggccagacugaagagagaggagaucagcggcgugaagcuggagagcaucggcaccuaccagauccugagcaucuacagcaccguggccagcagccuggcccuggccaucaugguggccggccuguuccuguggaugugcagcaacggcagccugcagugcagaaucugcaucuga

SEQ ID NO: 163048 - RNA, 1704 nt, Artificial Sequence
  derived and/or modified CDS sequence (opt4) from hemagglutinin__InfluenzaA__ACT15326
auggagaagaucgugcugcugcuggccaucgugagccuggugaagagcgaccagaucugcaucggcuaccacgccaacaacagcaccgagcagguggacaccaucauggagaagaacgugaccgugacccacgcccaggacauccuggagaagacccacaacggcaagcugugcaaccuggacggcgugaagccccugauccugagagacugcagcguggccggcuggcugcugggcaaccccaugugcgacgaguuccugaacgugcccgaguggagcuacaucguggagaagaucaaccccgccaacgaccugugcuaccccggcaacuucaacgacuacgaggagcugaagcaccugcugagcagaaucaaccacuucgagaagauccagaucauccccaagaacagcuggagcgaccacgaggccagcggcgugagcagcgccugccccuaccagggcagaagcagcuucuucagaaacgugguguggcugaccaagaaggacaacgccuaccccaccaucaagagaagcuacaacaacaccaaccaggaggaccugcuggugcuguggggcauccaccaccccaacgacgccgccgagcagaccagacuguaccagaaccccaccaccuacaucagcgugggcaccagcacccugaaccagagacugauccccaagaucgccaccagaagcaaggugaacggccagagcggcagaauggaguucuucuggaccauccugaagcccaacgacgccaucaacuucgagagcaacggcaacuucaucgcccccgagaacgccuacaagaucgugaagaagggcgacagcaccaucaugaagagcgagcuggaguacggcaacugcaacaccaagugccagacccccaucggcgccaucaacagcagcaugcccuuccacaacauccacccccugaccaucggcgagugccccaaguacgugaagagcaacagacuggugcuggccaccggccugagaaacagcccccagggcgagagaagaagaaagaagagaggccuguucggcgccaucgccggcuucaucgagggcggcuggcagggcaugguggacggcugguacggcuaccaccacagcaacgagcagggcagcggcuacgccgccgacaaggagagcacccagaaggccaucgacggcgugaccaacaaggugaacagcaucaucgacaagaugaacacccaguucgaggccgugggcagagaguucaacaaccuggagagaagaaucgagaaccugaacaagaagauggaggacggcuuccuggacguguggaccuacaacgccgagcugcuggugcugauggagaacgagagaacccuggacuuccacgacagcaacgugaagaaccuguacgacaaggugagacugcagcugagagacaacgccaaggagcugggcaacggcugcuucgaguucuaccacagaugcgacaacgagugcauggagagcgugagaaacggcaccuacgacuacccccaguacagcgaggaggccagacugaagagagaggagaucagcggcgugaagcuggagagcaucggcaccuaccagauccugagcaucuacagcaccguggccagcagccuggcccuggccaucaugguggccggccuguuccuguggaugugcagcaacggcagccugcagugcagaaucugcaucuga

SEQ ID NO: 163049 - RNA, 1704 nt, Artificial Sequence
  derived and/or modified CDS sequence (opt4) from hemagglutinin__InfluenzaA__ACT15328
auggagaagaucgugcugcugcuggccaucgugagccuggugaagagcgaccagaucugcaucggcuaccacgccaacaacagcaccgagcagguggacaccaucauggagaagaacgugaccgugacccacgcccaggacauccuggagaagacccacaacggcaagcugugcaaccuggacggcgugaagccccugauccugagagacugcagcguggccggcuggcugcugggcaaccccaugugcgacgaguuccugaacgugcccgaguggagcuacaucguggagaagaucaaccccgccaacgaccugugcuaccccggcaacuucaacgacuacgaggagcugaagcaccugcugagcagaaucaaccacuucgagaagauccagaucauccccaagaacagcuggagcgaccacgaggccagcggcgugagcagcgccugccccuaccagggcagaagcagcuucuucagaaacgugguguggcugaccaagaaggacaacgccuaccccaccaucaagagaagcuacaacaacaccaaccaggaggaccugcuggugcuguggggcauccaccaccccaacgacgccgccgagcagaccagacuguaccagaaccccaccaccuacaucagcgugggcaccagcacccugaaccagagacuggugcccaagaucgccaccagaagcaaggugaacggccagaacggcagaauggaguucuucuggaccauccugaagagcaacgacgccaucaacuucgagagcaacggcaacuucaucgcccccgagaacgccuacaagaucgugaagaagggcgacagcaccaucaugaagagcgagcuggaguacggcaacugcaacaccaagugccagacccccaucggcgccaucaacagcagcaugcccuuccacaacauccacccccugaccaucggcgagugccccaaguacgugaagagcaacagacuggugcuggccaccggccugagaaacagcccccagggcgagagaagaagaaagaagagaggccuguucggcgccaucgccggcuucaucgagggcggcuggcagggcaugguggacggcugguacggcuaccaccacagcaacgagcagggcagcggcuacgccgccgacaaggagagcacccagaaggccaucgacggcgugaccaacaaggugaacagcaucaucgacaagaugaacacccaguucgaggccgugggcagagaguucaacaaccuggagagaagaaucgagaaccugaacaagaagauggaggacggcuuccuggacguguggaccuacaacgccgagcugcuggugcugauggagaacgagagaacccuggacuuccacgacagcaacgugaagaaccuguacgacaaggugagacugcagcugagagacaacgccaaggagcugggcaacggcugcuucgaguucuaccacagaugcgacaacgagugcauggagagcgugagaaacggcaccuacgacuacccccacuacagcgaggaggccagacugaagagagaggagaucagcggcgugaagcuggagagcaucggcaccuaccagauccugagcaucuacagcaccguggccagcagccuggcccuggccaucaugguggccggccuguuccuguggaugugcagcaacggcagccugcagugcagaaucugcaucuga

SEQ ID NO: 163050 - RNA, 1704 nt, Artificial Sequence
  derived and/or modified CDS sequence (opt4) from hemagglutinin__InfluenzaA__ACT15330
auggagaagaucgugcugcugcuggccaucgugagccuggugaagagcgaccagaucugcaucggcuaccacgccaacaacagcaccgagcagguggacaccaucauggagaagaacgugaccgugacccacgcccaggacauccuggagaagacccacaacggcaagcugugcaaccuggacggcgugaagccccugauccugagagacugcagcguggccggcuggcugcugggcaaccccaugugcgacgaguuccugaacgugcccgaguggagcuacaucguggagaagaucaaccccgccaacgaccugugcuaccccggcaacuucaacgacuacgaggagcugaagcaccugcugagcagaaucaaccacuucgagaagauccagaucauccccaagaacagcuggagcgaccacgaggccagcggcgugagcagcgccugccccuaccagggcagaagcagcuucuucagaaacgugguguggcugaccaagaaggacaacgccuaccccaccaucaagagaagcuacaacaacaccaaccaggaggaccugcuggugcuguggggcauccaccaccccaacgacgccgccgagcagaccagacuguaccagaaccccaccaccuacaucagcgugggcaccagcacccugaaccagagacuggugcccaagaucgccaccagaagcaaggugaacggccagagcggcagaauggaguucuucuggaccauccugaagagcaacgacgccaucaacuucgagagcaacggcaacuucaucgcccccgagaacgccuacaagaucgugaagaagggcgacagcaccaucaugaagagcgagcuggaguacggcaacugcaacaccaagugccagacccccaucggcgccaucaacagcagcaugcccuuccacaacauccacccccugaccaucggcgagugccccaaguacgugaagagcaacagacuggugcuggccaccggccugagaaacagcccccagggcgagagaagaagaaagaagagaggccuguucggcgccaucgccggcuucaucgagggcggcuggcagggcaugguggacggcugguacggcuaccaccacagcaacgagcagggcagcggcuacgccgccgacaaggagagcacccagaaggccaucgacggcgugaccaacaaggugaacagcaucaucgacaagaugaacacccaguucgaggccgugggcagagaguucaacaaccuggagagaagaaucgagaaccugaacaagaagauggaggacggcuuccuggacguguggaccuacaacgccgagcugcuggugcugauggagaacgagagaacccuggacuuccacgacagcaacgugaagaaccuguacgacaaggugagacugcagcugagagacaacgccaaggagcugggcaacggcugcuucgaguucuaccacagaugcgacaacgagugcauggagagcgugagaaacggcaccuacgacuacccccacuacagcgaggaggccagacugaagagagaggagaucagcggcgugaagcuggagagcaucggcaccuaccagauccugagcaucuacagcaccguggccagcagccuggcccuggccaucaugguggccggccuguuccuguggaugugcagcaacggcagccugcagugcagaaucugcaucuga

SEQ ID NO: 163051 - RNA, 1707 nt, Artificial Sequence
  derived and/or modified CDS sequence (opt4) from hemagglutinin__InfluenzaA__ACT15332
auggagaagaucgugcugcugcuggccaucgugagccuggugaagagcgaccagaucugcaucggcuaccacgccaacaacagcaccgagcagguggacaccaucauggagaagaacgugaccgugacccacgcccaggacauccuggagaagacccacaacggcaagcugugcgaccuggacggcgugaagccccugauccugagagacugcagcguggccggcuggcugcugggcaaccccaugugcgacgaguuccugaacgugcccgaguggagcuacaucguggagaagaucaaccccgccaacgaccugugcuaccccggcgacuucaacgacuacgaggagcugaagcaccugcugagcagaaucaaccacuucgagaagauccagaucauccccaagagcagcuggagcgaccacgaggccagcagcggcgugagcagcgccugccccuaccagggcagaagcagcuucuucagaaacgugguguggcugaucaagaaggacaacgccuaccccaccaucaagagaagcuacaacaacaccaaccaggaggaccugcuggugcuguggggcauccaccaccccaacgacgccgccgagcagaccagacuguaccacaaccccaccaccuacaucagcgugggcaccagcacccugaaccagagacuggugcccaagaucgccaccagaagcaagaucaacggccagagcggcagaauggaguucuucuggaccauccugaagcccaacgacgccaucaacuucgagagcaacggcaacuucaucgcccccgagaacgccuacaagaucgugaagaagggcgacagcaccaucaugaagagcgagcuggaguacggcaacugcaacaccaagugccagacccccaucggcgccaucaacagcagcaugcccuuccacaacauccacccccugaccaucggcgagugccccaaguacgugaagagcagcagacuggugcuggccaccggccugagaaacagcccccagggcaagagcagaagaaagaagagaggccuguucggcgccaucgccggcuucaucgagggcggcuggcagggcaugguggacggcugguacggcuaccaccacagcaacgagcagggcagcggcuacgccgccgacaaggagagcacccagagagccaucgacggcgugaccaacaaggugaacagcaucaucgacaagaugaacacccaguucgaggccgugggcagagaguucaacaaccuggagagaagaaucgagaaccugaacaagaagauggaggacggcuuccuggacguguggaccuacaacgccgagcugcuggugcugauggagaacgagagaacccuggacuuccacgacagcaacgugaagaaccuguacgacaaggugagacugcagcugagagacaacgccaaggagcugggcaacggcugcuucgaguucuaccacagaugcgacaacgagugcauggagagcgugagaaacggcaccuacgacuacccccaguacagcgaggaggccagacugaagagagaggagaucagcggcgugaagcuggagagcaucggcaucuaccagauccugagcaucuacagcaccguggccagcagccuggcccuggccaucaugguggccggccuguuccuguggaugugcagcaacggcagccugcagugcagaaucugcaucuga

SEQ ID NO: 163052 - RNA, 1704 nt, Artificial Sequence
  derived and/or modified CDS sequence (opt4) from hemagglutinin__InfluenzaA__ACT15336
auggagaagaucgugcugcugcuggccaucgugagccuggugaagagcgaccagaucugcaucggcuaccacgccaacaacagcaccgagcagguggacaccaucauggagaagaacgugaccgugacccacgcccaggacauccuggagaagacccacaacggcaagcugugcaaccuggacggcgugaagccccugauccugagagacugcagcguggccggcuggcugcugggcaaccccaugugcgacgaguuccugaacgugcccgaguggagcuacaucguggagaagaucaaccccgccaacgaccugugcuaccccggcaacuucaacgacuacgaggagcugaagcaccugcugagcagaaucaaccacuucgagaagauccagaucauccccaagaacagcuggagcgaccacgaggccagcggcgugagcagcgccugccccuaccagggcagaagcagcuucuucagaaacgugguguggcugaccaagaaggacaacgccuaccccaccaucaagagaagcuacaacaacaccaaccaggaggaccugcuggugcuguggggcauccaccaccccaacgacgccgccgagcagaccagacuguaccagaaccccaccaccuacaucagcgugggcaccagcacccugaaccagagacuggugcccaagaucgccaccagaagcaaggugaacggccagagcggcagaauggaguucuucuggaccauccugaagagcaacgacgccaucaacuucgagagcaacggcaacuucaucgcccccgagaacgccuacaagaucgugaagaagggcgacagcaccaucaugaagagcgagcuggaguacggcaacugcaacaccaagugccagacccccaucggcgccaucaacagcagcaugcccuuccacaacauccacccccugaccaucggcgagugccccaaguacgugaagagcaacagacuggugcuggccaccggccugagaaacagcccccagggcgagagaagaagaaagaagagaggccuguucggcgccaucgccggcuucaucgagggcggcuggcagggcaugguggacggcugguacggcuaccaccacagcaacgagcagggcagcggcuacgccgccgacaaggagagcacccagaaggccaucgacggcgugaccaacaaggugaacagcaucaucgacaagaugaacacccaguucgaggccgugggcagagaguucaacaaccuggagagaagaaucgagaaccugaacaagaagauggaggacggcuuccuggacguguggaccuacaacgccgagcugcuggugcugauggagaacgagagaacccuggacuuccacgacagcaacgugaagaaccuguacgacaaggugagacugcagcugagagacaacgccaaggagcugggcaacggcugcuucgaguucuaccacagaugcgacaacgagugcauggagagcgugagaaacggcaccuacgacuacccccaguacagcgaggaggccagacugaagagagaggagaucagcggcgugaagcuggagagcaucggcaccuaccagauccugagcaucuacagcaccguggccagcagccuggcccuggccaucaugguggccggccuguuccuguggaugugcagcaacggcagccugcagugcagaaucugcaucuga

SEQ ID NO: 163053 - RNA, 1704 nt, Artificial Sequence
  derived and/or modified CDS sequence (opt4) from hemagglutinin__InfluenzaA__ACT15338
auggagaagaucgugcugcugcuggccaucgugagccuggugaagagcgaccagaucugcaucggcuaccacgccaacaacagcaccgagcagguggacaccaucauggagaagaacgugaccgugacccacgcccaggacauccuggagaagacccacaacggcaagcugugcaaccuggacggcgugaagccccugauccugagagacugcagcguggccggcuggcugcugggcaaccccaugugcgacgaguuccugaacgugcccgaguggagcuacaucguggagaagaucaaccccgccaacgaccugugcuaccccggcaacuucaacgacuacgaggagcugaagcaccugcugagcagaaucaaccacuucgagaagauccagaucauccccaagaacagcuggagcgaccacgaggccagcggcgugagcagcgccugccccuaccagggcagaagcagcuucuucagaaacgugguguggcugaccaagaagaacaacgccuaccccaccaucaagagaagcuacaacaacaccaaccaggaggaccugcuggugcuguggggcauccaccaccccaacgacgccaccgagcagaccagacuguaccagaaccccaccaccuacaucagcgugggcaccagcacccugaaccagagacugauccccaagaucgccaccagaagcaaggugaacggccagagcggcagaauggaguucuucuggaccauccugaagagcaacgacgccaucaacuucgagagcaacggcaacuucaucgcccccgagaacgccuacaagaucgugaagaagggcgacagcaccaucaugaagagcgagcuggaguacggcaacugcaacaccaagugccagacccccaucggcgccaucaacagcagcaugcccuuccacaacauccacccccugaccaucggcgagugccccaaguacgugaagagcaacagacuggugcuggccaccggccugagaaacagcccccaggagggcagaagaagaaagaagagaggccuguucggcgccaucgccggcuucaucgagggcggcuggcagggcaugguggacggcugguacggcuaccaccacagcaacgagcagggcagcggcuacgccgccgacaaggagagcacccagaaggccaucgacggcgugaccaacaaggugaacagcaucaucgacaagaugaacacccaguucgaggccgugggcagagaguucaacaaccuggagagaagaaucgagaaccugaacaagaagauggaggacggcuuccuggacguguggaccuacaacgccgagcugcuggugcugauggagaacgagagaacccuggacuuccacgacagcaacgugaagaaccuguacgacaaggugagacugcagcugagagacaacgccaaggagcugggcaacggcugcuucgaguucuaccacagaugcgacaacgagugcauggagagcgugagaaacggcaccuacgacuacccccaguacagcgaggaggccagacugaagagagaggagaucagcggcgugaagcuggagagcaucggcaccuaccagauccugagcaucuacagcaccguggccagcagccuggcccuggccaucaugguggccggccuguuccuguggaugugcagcaacggcagccugcagugcagaaucugcaucuga

SEQ ID NO: 163054 - RNA, 1704 nt, Artificial Sequence
  derived and/or modified CDS sequence (opt4) from hemagglutinin__InfluenzaA__ACT15340
auggagaagaucgugcugcugcuggccaucgugagccuggugaagagcgaccagaucugcaucggcuaccacgccaacaacagcaccgagcagguggacaccaucauggagaagaacgugaccgugacccacgcccaggacauccuggagaagacccacaacggcaagcugugcaaccuggacggcgugaagccccugauccugagagacugcagcguggccggcuggcugcugggcaaccccaugugcgacgaguuccugaacgugcccgaguggagcuacaucguggagaagaucaaccccgccaacgaccugugcuaccccggcaacuucaacgacuacgaggagcugaagcaccugcugagcagaaucaaccacuucgagaagauccagaucauccccaagaacagcuggagcgaccacgaggccagcggcgugagcagcgccugccccuaccagggcagaagcagcuucuucagaaacgugguguggcugaccaagaagaacaacgccuaccccaccaucaagagaagcuacaacaacaccaaccaggaggaccugcuggugcuguggggcauccaccaccccaacgacgccgaggagcagaccagacuguaccagaaccccaccaccuacaucagcgugggcaccagcacccugaaccagagacuggugcccaagaucgccaccagaagcaaggugaacggccagagcggcagaauggaguucuucuggaccauccugaagagcaacgacgccaucaacuucgagagcaacggcaacuucaucgcccccgagaacgccuacaagaucgugaagaagggcgacagcaccaucaugaagagcgagcuggaguacggcaacugcaacaccaagugccagacccccaucggcgccaucaacagcagcaugcccuuccacaacauccacccccugaccaucggcgagugccccaaguacgugaagagcaacagacuggugcuggccaccggccugagaaacagcccccagggcgagagaagaagaaagaagagaggccuguucggcgccaucgccggcuucaucgagggcggcuggcagggcaugguggacggcugguacggcuaccaccacagcaacgagcagggcagcggcuacgccgccgacaaggagagcacccagaaggccaucgacggcgugaccaacaaggugaacagcaucaucgacaagaugaacacccaguucgaggccgugggcagagaguucaacgcccuggagagaagaaucgagaaccugaacaagaagauggaggacggcuuccuggacguguggaccuacaacgccgagcugcuggugcugauggagaacgagagaacccuggacuuccacgacagcaacgugaagaaccuguacgacaaggugagacugcagcugagagacaacgccaaggagcugggcaacggcugcuucgaguucuaccacagaugcgacaacgagugcauggagagcgugagaaacggcaccuacgacuacccccaguacagcgaggaggccagacugaagagagaggagaucagcggcgugaagcuggagagcaucggcaccuaccagauccugagcaucuacagcaccguggccagcagccuggcccuggccaucaugguggccggccuguuccuguggaugugcagcaacggcagccugcagugcagaaucugcaucuga

SEQ ID NO: 163055 - RNA, 1704 nt, Artificial Sequence
  derived and/or modified CDS sequence (opt4) from hemagglutinin__InfluenzaA__ACT15342
auggagaagaucgugcugcugcuggccaucgugagccuggugaagagcgaccagaucugcaucggcuaccacgccaacaacagcaccgagcagguggacaccaucauggagaagaacgugaccgugacccacgcccaggacauccuggagaagacccacaacggcaagcugugcaaccuggacggcgugaagccccugauccugagagacugcagcguggccggcuggcugcugggcaaccccaugugcgacgaguuccugaacgugcccgaguggagcuacaucguggagaagaucaaccccgccaacgaccugugcuaccccggcagcuucaacgacuacgaggagcugaagcaccugcugagcagaaucaaccacuucgagaagauccagaucauccccaagaacagcuggagcgaccacgaggccagcggcgugagcagcgccugccccuaccagggcagaagcagcuucuucagaaacgugguguggcugaccaagaaggacaacgccuaccccaccaucaagagaagcuacaacaacaccaaccaggaggaccugcuggugcuguggggcauccaccaccccaacgacgccgccgagcagaccagacuguaccagaaccccaccaccuacaucagcgugggcaccagcacccugaaccagagacuggugcccaagaucgccaccagaagcaaggugaacggccagagcggcagaauggaguucuucuggaccauccugaagcccaacgacgccaucaacuucgagagcaacggcaacuucaucgcccccgagaacgccuacaagaucgugaagaagggcgacagcaccaucaugaagagcgagcuggaguacggcaacugcaacaccaagugccagacccccaucggcgccaucaacagcagcaugcccuuccacaacauccacccccugaccaucggcgagugccccaaguacgugaagagcaacagacugauccuggccaccggccugagaaacagcccccagggcgagagaagaagaaagaagagaggccuguucggcgccaucgccggcuucaucgagggcggcuggcagggcaugguggacggcugguacggcuaccaccacagcaacgagcagggcagcggcuacgccgccgacaaggagagcacccagaaggccaucgacggcgugaccaacaaggugaacagcaucaucgacaagaugaacacccaguucgaggccgugggcagagaguucaacaaccuggagagaagaaucgagaaccugaacaagaagauggaggacggcuuccuggacguguggaccuacaacgccgagcugcuggugcugauggagaacgagagaacccuggacuuccacgacagcaacgugaagaaccuguacgacaaggugagacugcagcugagagacaacgccaaggagcugggcaacggcugcuucgaguucuaccacagaugcgacaacgagugcauggagagcgugagaaacggcaccuacgacuacccccaguacagcgaggaggccagacugaagagagaggagaucagcggcgugaagcuggagagcaucggcaccuaccagauccugagcaucuacagcaccguggccagcagccuggcccuggccaucaugguggccggccuguuccuguggaugugcagcaacggcagccugcagugcagaaucugcaucuga

SEQ ID NO: 163056 - RNA, 1704 nt, Artificial Sequence; identical to SEQ ID NO: 163052
  derived and/or modified CDS sequence (opt4) from hemagglutinin__InfluenzaA__ACT15343

SEQ ID NO: 163057 - RNA, 1704 nt, Artificial Sequence
  derived and/or modified CDS sequence (opt4) from hemagglutinin__InfluenzaA__ACT15345
auggagaagaucgugcugcugcuggccaucgugagccuggugaagagcgaccagaucugcaucggcuaccacgccaacaacagcaccgagcagguggacaccaucauggagaagaacgugaccgugacccacgcccaggacauccuggagaagacccacaacggcaagcugugcaaccuggacggcgugaagccccugauccugagagacugcagcguggccggcuggcugcugggcaaccccaugugcgacgaguuccugaacgugcccgaguggagcuacaucguggagaagaucaaccccgccaacgaccugugcuaccccggcaacuucaacgacuacgaggagcugaagcaccugcugagcagaaucaaccacuucgagaagauccagaucauccccaagaacagcuggagcgaccacgaggccagcggcgugagcagcagcugccccuaccagggcagaagcagcuucuucagaaacgugguguggcugaccaagaaggacaacgccuaccccaccaucaagagaagcuacaacaacaccaaccaggaggaccugcuggugcuguggggcauccaccaccccaacgacgccgccgagcagaccagacuguaccagaaccccaccaccuacaucagcgugggcaccagcacccugaaccagagacuggugcccaagaucgccaccagaagcaaggugaacggccagagcggcagaauggaguucuucuggaccauccugaagagcaacgacgccaucaacuucggcagcaacggcaacuucaucgcccccgagaacgccuacaagaucgugaagaagggcgacagcaccaucaugaagagcgagcuggaguacggcaacugcaacaccaagugccagacccccaucggcgccaucaacagcagcaugcccuuccacaacauccacccccugaccaucggcgagugccccaaguacgugaagagcaacagacuggugcuggccaccggccugagaaacagcccccagggcgagagaagaagaaagaagagaggccuguucggcgccaucgccggcuucaucgagggcggcuggcagggcaugguggacggcugguacggcuaccaccacagcaacgagcagggcagcggcuacgccgccgacaaggagagcacccagaaggccaucgacggcgugaccaacaaggugaacagcaucaucgacaagaugaacacccaguucgaggccgugggcagagaguucaacaaccuggagagaagaaucgagaaccugaacaagaagauggaggacggcuuccuggacguguggaccuacaacgccgagcugcuggugcugauggagaacgagagaacccuggacuuccacgacagcaacgugaagaaccuguacgacaaggugagacugcagcugagagacaacgccaaggagcugggcaacggcugcuucgaguucuaccacagaugcgacaacgagugcauggagagcgugagaaacggcaccuacgacuacccccaguacagcgaggaggccagacugaagagagaggagaucagcggcgugaagcuggagagcaucggcaccuaccagauccugagcaucuacagcaccguggccagcagccuggcccuggccaucaugguggccggccuguuccuguggaugugcagcaacggcagccugcagugcagaaucugcaucuga

SEQ ID NO: 163058 - RNA, 1707 nt, Artificial Sequence
  derived and/or modified CDS sequence (opt4) from hemagglutinin__InfluenzaA__ACT15347
auggagaagaucgugcugcugcuggccaucgugagccuggugaagagcgaccagaucugcaucggcuaccacgccaacaacagcaccgagcagguggacaccaucauggagaagaacgugaccgugacccacgcccaggacauccuggagaagacccacaacggcaagcugugcgaccuggacggcgugaagccccugauccugagagacugcagcguggccggcuggcugcugggcaaccccaugugcgacgaguuccugaacgugcccgaguggagcuacaucguggagaagaucaaccccgccaacgaccugugcuaccccggcgacuucaacgacuacgaggagcugaagcaccugcugagcagaaucaaccacuucgagaagauccagaucauccccaagagcagcuggagcgaccacgaggccagcagcggcgugagcagcgccugccccuaccagggcagaagcagcuucuucagaaacgugguguggcugaucaagaaggacaacgccuaccccaccaucaagagaagcuacaacaacaccaaccaggaggaccugcuggugcuguggggcauccaccaccccaacgacgccgccgagcagaccagacuguaccacaaccccaccaccuacaucagcgugggcaccagcacccugaaccagagacuggugcccaagaucgccaccagaagcaaggugaacggccagagcggcagaauggaguucuucuggaccauccugaagcccaacgacgccaucaacuucgagagcaacggcaacuucaucgcccccgagaacgccuacaagaucgugaagaagggcgacagcaccaucaugaagagcgagcuggaguacggcaacugcaacaccaagugccagacccccaucggcgccaucaacagcagcaugcccuuccacaacauccacccccugaccaucggcgagugccccaaguacgugaagagcagcagacuggugcuggccaccggccugagaaacagcccccagggcaagaacagaagaaagaagagaggccuguucggcgccaucgccggcuucaucgagggcggcuggcagggcaugguggacggcugguacggcuaccaccacagcaacgagcagggcagcggcuacgccgccgacaaggagagcacccagagagccaucgacggcgugaccaacaaggugaacagcaucaucgacaagaugaacacccaguucgaggccgugggcagagaguucaacaaccuggagagaagaaucgagaaccugaacaagaagauggaggacggcuuccuggacguguggaccuacaacgccgagcugcuggugcugauggagaacgagagaacccuggacuuccacgacagcaacgugaagaaccuguacgacaaggugagacugcagcugagagacaacgccaaggagcugggcaacggcugcuucgaguucuaccacagaugcgacaacgagugcauggagagcgugagaaacggcaccuacgacuacccccaguacagcgaggaggccagacugaagagagaggagaucagcggcgugaagcuggagagcaucggcaucuaccagauccugagcaucuacagcaccguggccagcagccuggcccuggccaucaugguggccggccuguuccuguggaugugcagcaacggcagccugcagugcagaaucugcaucuga

SEQ ID NO: 163059 - RNA, 1704 nt, Artificial Sequence
  derived and/or modified CDS sequence (opt4) from hemagglutinin__InfluenzaA__ACT15349
auggagaagaucgugcugcugcuggccaucgugagccuggugaagagcgaccagaucugcaucggcuaccacgccaacaacagcaccgagcagguggacaccaucauggagaagaacgugaccgugacccacgcccaggacauccuggagaagacccacaacggcaagcugugcaaccuggacggcgugaagccccugauccugagagacugcagcguggccggcuggcugcugggcaaccccaugugcgacgaguuccugaacgugcccgaguggagcuacaucguggagaagaucaaccccgccaacgaccugugcuaccccggcaacuucaacgacuacgaggagcugaagcaccugcugagcagaaucaaccacuucgagaagauccagaucauccccaagaacagcuggagcgaccacgaggccagcggcgugagcagcgccugccccuaccagggcagaagcagcuucuucagaaacgugguguggcugaccaagaaggacaacgccuaccccaccaucaagagaagcuacaacaacaccaaccaggaggaccugcuggugcuguggggcauccaccaccccaacgacgccaccgagcagaccagacuguaccagaaccccaccaccuacaucagcgugggcaccagcacccugaaccagagacugauccccaagaucgccaccagaagcaaggugaacggccagagcggcagaauggaguucuucuggaccauccugaagagcaacgacgccaucaacuucgagagcaacggcaacuucaucgcccccgagaacgccuacaagaucgugaagaagggcgacagcaccaucaugaagagcgagcuggaguacggcaacugcaacaccaagugccagacccccaucggcgccaucaacagcagcaugcccuuccacaacauccacccccugaccaucggcgagugccccaaguacgugaagagcaacagacuggugcuggccaccggccugagaaacagcccccaggaggagagaagaagaaagaagagaggccuguucggcgccaucgccggcuucaucgagggcggcuggcagggcaugguggacggcugguacggcuaccaccacagcaacgagcagggcagcggcuacgccgccgacaaggagagcacccagaaggccaucgacggcgugaccaacaaggugaacagcaucaucgacaagaugaacacccaguucgaggccgugggcagagaguucaacaaccuggagagaagaaucgagaaccugaacaagaagauggaggacggcuuccuggacguguggaccuacaacgccgagcugcuggugcugauggagaacgagagaacccuggacuuccacgacagcaacgugaagaaccuguacgacaaggugagacugcagcugagagacaacgccaaggagcugggcaacggcugcuucgaguucuaccacagaugcgacaacgagugcauggagagcgugagaaacggcaccuacgacuacccccaguacagcgaggaggccagacugaagagagaggagaucagcggcgugaagcuggagagcaucggcaccuaccagauccugagcaucuacagcaccguggccagcagccuggcccuggccaucaugguggccggccuguuccuguggaugugcagcaacggcagccugcagugcagaaucugcaucuga

SEQ ID NO: 163060 - RNA, 1707 nt, Artificial Sequence
  derived and/or modified CDS sequence (opt4) from hemagglutinin__InfluenzaA__ACT15351
auggagaagaucgugcugcugcuggccaucgugagccuggugaagagcgaccagaucugcaucggcuaccacgccaacaacagcaccgagcagguggacaccaucauggagaagaacgugaccgugacccacgcccaggacauccuggagaagacccacaacggcaagcugugcgaccuggacggcgugaagccccugauccugagagacugcagcguggccggcuggcugcugggcaaccccaugugcgacgaguuccugaacgugcccgaguggagcuacaucguggagaagaucaaccccgccaacgaccugugcuaccccggcgacuucaacgacuacgaggagcugaagcaccugcugagcagaaucaaccacuucgagaagauccagaucauccccaagagcagcuggagcgaccacgaggccagcagcggcgugagcagcgccugccccuaccagggcggcagcagcuucuucagaaacgugguguggcugaucaagaaggacaacgccuaccccaccaucaagagaagcuacaacaacaccaaccaggaggaccugcuggugcuguggggcauccaccaccccaacgacgccgccgagcagaccagacuguaccacaaccccaccaccuacaucagcgugggcaccagcacccugaaccagagacuggugcccaagaucgccaccagaagcaaggugaacggccagagcggcagaauggaguucuucuggaccauccugaagcccaacgacgccaucaacuucgagagcaacggcaacuucaucgcccccgagaacgccuacaagaucgugaagaagggcgacagcaccaucaugaagagcgagcuggaguacggcaacugcaacaccaagugccagacccccaucggcgccaucaacagcagcaugcccuuccacaacauccacccccugaccaucggcgagugccccaaguacgugaagagcagcagacuggugcuggccaccggccugagaaacagcccccagggcaagagcagaagaaagaagagaggccuguucggcgccaucgccggcuucaucgagggcggcuggcagggcaugguggacggcugguacggcuaccaccacagcaacgagcagggcagcggcuacgccgccgacaaggagagcacccagagagccaucgacggcgugaccaacaaggugaacagcaucaucgacaagaugaacacccaguucgaggccgugggcagagaguucaacaagcuggagagaagaaucgagaaccugaacaagaagauggaggacggcuuccuggacguguggaccuacaacgccgagcugcuggugcugauggagaacgagagaacccuggacuuccacgacagcaacgugaagaaccuguacgacaaggugagacugcagcugagagacaacgccaaggagcugggcaacggcugcuucgaguucuaccacagaugcgacaacgagugcauggagagcgugagaaacggcaccuacgacuacccccaguacagcgaggaggccagacugaagagagaggagaucagcggcgugaagcuggagagcaucggcaucuaccagauccugagcaucuacagcaccguggccagcagccuggcccuggccaucaugguggccggccuguuccuguggaugugcagcaacggcagccugcagugcagaaucugcaucuga

SEQ ID NO: 163061 - RNA, 1704 nt, Artificial Sequence
  derived and/or modified CDS sequence (opt4) from hemagglutinin__InfluenzaA__ACT15353
auggagaagaucgugcugcugcuggccaucgugagccuggugaagagcgaccagaucugcaucggcuaccacgccaacaacagcaccgagcagguggacaccaucauggagaagaacgugaccgugacccacgcccaggacauccuggagaagacccacaacggcaagcugugcaaccuggacggcgugaagccccugauccugagagacugcagcguggccggcuggcugcugggcaaccccaugugcgacgaguuccugaacgugcccgaguggagcuacaucguggagaagaucaaccccgccaacgaccugugcuaccccggcaacuucaacgacuacgaggagcugaagcaccugcugagcagaaucaaccacuucgagaagauccagaucauccccaagaacagcuggagcgaccacgaggccagcggcgugagcagcgccugccccuaccagggcagaagcagcuucuucagaaacgugguguggcugaccaagaagaacagcgccuaccccaccaucaagagaagcuacaacaacaccaaccaggaggaccugcuggugcuguggggcauccaccaccccaacgacgccgccgagcagaccagacuguaccagaaccccaccaccuacaucagcgugggcaccagcacccugaaccagagacuggugcccaagaucgccaccagaagcaaggugaacggccagagcggcagaauggaguucuucuggaccauccugaagagcaacgacgccaucaacuucgagagcaacggcaacuucaucgcccccgagaacgccuacaagaucgugaagaagggcgacagcaccaucaugaagagcgagcuggaguacagcaacugcaacaccaagugccagacccccaucggcgccaucaacagcagcaugcccuuccacaacauccacccccugaccaucggcgagugccccaaguacgugaagagcaacagacuggugcuggccaccggccugagaaacagcccccagggcgagagaagaagaaagaagagaggccuguucggcgccaucgccggcuucaucgagggcggcuggcagggcaugguggacggcugguacggcuaccaccacagcaacgagcagggcagcggcuacgccgccgacaaggagagcacccagaaggccaucgacggcgugaccaacaaggugaacagcaucaucgacaagaugaacacccaguucgaggccgugggcagagaguucaacaaccuggagagaagaaucgagaaccugaacaagaagauggaggacggcuuccuggacguguggaccuacaacgccgagcugcuggugcugauggagaacgagagaacccuggacuuccacgacagcaacgugaagaaccuguacgacaaggugagacugcagcugagagacaacgccaaggagcugggcaacggcugcuucgaguucuaccacagaugcgacaacgagugcauggagagcgugagaaacggcaccuacgacuacccccaguacagcgaggaggccagacugaagagagaggagaucagcggcgugaagcuggagagcaucggcaccuaccagauccugagcaucuacagcaccguggccagcagccuggcccuggccaucaugguggccggccuguuccuguggaugugcagcaacggcagccugcagugcagaaucugcaucuga

SEQ ID NO: 163062 - RNA, 1707 nt, Artificial Sequence
  derived and/or modified CDS sequence (opt4) from hemagglutinin__InfluenzaA__ACT15355
auggagaagaucgugcugcugcuggccaucgugagccuggugaagagcgaccagaucugcaucggcuaccacgccaacaacagcaccgagcagguggacaccaucauggagaagaacgugaccgugacccacgcccaggacauccuggagaagacccacaacggcaagcugugcgaccuggacggcgugaagccccugauccugagagacugcagcguggccggcuggcugcugggcaaccccaugugcgacgaguuccugaacgugcccgaguggagcuacaucguggagaagaucaaccccgccaacgaccugugcuaccccggcgacuucaacgacuacgaggagcugaagcaccugcugagcagaaucaaccacuucgagaagauccagaucauccccaagagcagcuggagcgaccacgaggccagcagcggcgugagcagcgccugccccuaccagggcagaagcagcuucuucagaaacgugguguggcugaucaagaaggacaacgccuaccccaccaucaagagaagcuacaacaacaccaaccaggaggaccugcuggugcuguggggcauccaccaccccaacgacgccgccgagcagaccagacuguaccacaaccccaccaccuacaucagcgugggcaccagcacccugaaccagagacuggugcccaagaucgccaccagaagcaaggugaacggccagagcggcagaauggaguucuucuggaccauccugaagcccaacgacgccaucaacuucgagagcaacggcaacuucaucgcccccgagaacgccuacaagaucgugaagaagggcgacagcaccaucaugaagagcgagcuggaguacggcaacugcaacaccaagugccagacccccaucggcgccaucaacagcagcaugcccuuccacaacauccacccccugaccaucggcgagugccccaaguacgugaagagcagcagacuggugcuggccaccggccugagaaacagcccccagggcaagagcagaagaaagaagagaggccuguucggcgccaucgccggcuucaucgagggcggcuggcagggcaugguggacggcugguacggcuaccaccacagcaacgagcagggcagcggcuacgccgccgacaaggagagcacccagagagccaucgacggcgugaccaacaaggugaacagcaucaucgacaagaugaacacccaguucgaggccgugggcagagaguucaacaaccuggagagaagaaucgagaaccugaacaagaagauggaggacggcuuccuggacguguggaccuacaacgccgagcugcuggugcugauggagaacgagagaacccuggacuuccacgacagcaacgugaagaaccuguacgacaaggugagacugcagcugagagacaacgccaaggagcugggcaacggcugcuucgaguucuaccacagaugcgacaacgagugcauggagagcgugagaaacggcaccuacgacuacccccaguacagcgaggaggccagacugaagagagaggagaucagcggcgugaagcuggagagcaucggcaucuaccagauccugagcaucuacagcaccguggccagcagccuggcccuggccaucaugguggccggccuguuccuguggaugugcagcaacggcagccugcagugcagaaucugcaucuga

SEQ ID NO: 163063 - RNA, 1704 nt, Artificial Sequence
  derived and/or modified CDS sequence (opt4) from hemagglutinin__InfluenzaA__ACT15357
auggagaagaucgugcugcugcuggccaucgugagccuggugaagagcgaccagaucugcaucggcuaccacgccaacaacagcaccgagcagguggacaccaucauggagagaaacgugaccgugacccacgcccaggacauccuggagaagacccacaacggcaagcugugcaaccuggacggcgugaagccccugauccugagagacugcagcguggccggcuggcugcugggcaaccccaugugcgacgaguuccugaacgugcccgaguggagcuacaucguggagaagaucaaccccgccaacgaccugugcuaccccggcaacuucaacgacuacgaggagcugaagcaccugcugagcagaaucaaccacuucgagaagauccagaucauccccaagaacagcuggagcgaccacgaggccagcggcgugagcagcgccugccccuaccagggcagaagcagcuucuucagaaacgugguguggcugacccagaaggacaacgccuaccccaccaucaagagaagcuacaacaacaccaaccaggaggaccugcuggugcuguggggcauccaccaccccaacgacgccgccgagcagaccagacuguaccagaaccccaccaccuacaucagcgugggcaccagcacccugaaccagagacugauccccaagaucgccaccagaagcaaggugaacggccagagcggcagaauggaguucuucuggaccauccugaagagcaacgacgccaucaacuucgagagcaacggcaacuucaucgcccccgagaacgccuacaagaucgugaagaagggcgacagcaccaucaugaagagcgagcuggaguacggcaacugcaacaccaagugccagacccccaucggcgccaucaacagcagcaugcccuuccacaacauccacccccugaccaucggcgagugccccaaguacgugaagagcaacagacuggugcuggccaccggccugagaaacagcccccagggcgagagaagaagaaagaagagaggccuguucggcgccaucgccggcuucaucgagggcggcuggcagggcaugguggacggcugguacggcuaccaccacagcaacgagcagggcagcggcuacgccgccgacaaggagagcacccagaaggccaucgacggcgugaccaacaaggugaacagcaucaucgacaagaugaacacccaguucgaggccgugggcagagaguucaacaaccuggagagaagaaucgagaaccugaacaagaagauggaggacggcuuccuggacguguggaccuacaacgccgagcugcuggugcugauggagaacgagagaacccuggacuuccacgacagcaacgugaagaaccuguacgacaaggugagacugcagcugagagacaacgccaaggagcugggcaacggcugcuucgaguucuaccacagaugcgacaacgagugcauggagagcgugagaaacggcaccuacgacuacccccaguacagcgaggaggccagacugaagagagaggagaucagcggcgugaagcuggagagcaucggcaccuaccagauccugagcaucuacagcaccguggccagcagccuggcccuggccaucaugguggccggccuguuccuguggaugugcagcaacggcagccugcagugcagaaucugcaucuga

SEQ ID NO: 163064 - RNA, 1701 nt, Artificial Sequence
  derived and/or modified CDS sequence (opt4) from hemagglutinin__InfluenzaA__ACT20200
augaaggccauccugguggugcugcuguacaccuucgccaccgccaacgccgacacccugugcaucggcuaccacgccaacaacagcaccgacaccguggacaccgugcuggagaagaacgugaccgugacccacagcgugaaccugcuggaggacaagcacaacggcaagcugugcaagcugagaggcguggccccccugcaccugggcaagugcaacaucgccggcuggauccugggcaaccccgagugcgagagccugagcaccgccagcagcuggagcuacaucguggagaccagcagcagcgacaacggcaccugcuaccccggcgacuucaucgacuacgaggagcugagagagcagcugagcagcgugagcagcuucgagagauucgagaucuuccccaagaccagcagcuggcccaaccacgacagcaacaagggcgugaccgccgccugcccccacgccggcgccaagagcuucuacaagaaccugaucuggcuggugaagaagggcaacagcuaccccaagcugagcaagagcuacaucaacgacaagggcaaggaggugcuggugcuguggggcauccaccaccccagcaccagcgccgaccagcagagccuguaccagaacgccgacgccuacguguucgugggcagcagcagauacagcaagaaguucaagcccgagaucgccaucagacccaaggugagagaccaggagggcagaaugaacuacuacuggacccugguggagcccggcgacaagaucaccuucgaggccaccggcaaccugguggugcccagauacgccuucgccauggagagaaacgccggcagcggcaucaucaucagcgacacccccgugcacgacugcaacaccaccugccagacccccaagggcgccaucaacaccagccugcccuuccagaacauccaccccaucaccaucggcaagugccccaaguacgugaagagcaccaagcugagacuggccaccggccugagaaacgugcccagcauccagagcagaggccuguucggcgccaucgccggcuucaucgagggcggcuggaccggcaugguggacggcugguacggcuaccaccaccagaacgagcagggcagcggcuacgccgccgaccugaagagcacccagaacgccaucgacgagaucaccaacaaggugaacagcgugaucgagaagaugaacacccaguucaccgccgugggcaaggaguucaaccaccuggagaagagaaucgagaaccugaacaagaagguggacgacggcuuccuggacaucuggaccuacaacgccgagcugcuggugcugcuggagaacgagagaacccuggacuaccacgacagcaacgugaagaaccuguacgagaaggugagaaaccagcugaagaacaacgccaaggagaucggcaacggcugcuucgaguucuaccacaagugcgacaacaccugcauggagagcgugaagaacggcaccuacgacuaccccaaguacagcgaggaggccaagcugaacagagaggagaucgacggcgugaagcuggagagcaccagaaucuaccagauccuggccaucuacagcaccguggccagcagccuggugcugguggugagccugggcgccaucagcuucuggaugugcagcaacggcagccugcagugcagaaucugcaucuga

SEQ ID NO: 163065 - RNA, 1701 nt, Artificial Sequence
  derived and/or modified CDS sequence (opt4) from hemagglutinin__InfluenzaA__ACT21466
augaagaccaucaucgcccugagcuacauccugugccugguguucgcccagaagcugcccggcaacgacaacagcaccgccacccccugccugggccaccacgccgugcccaacggcacccuggugaagaccaucaccaacgaccagaucgaggugaccaacgccaccgagcuggugcagagcagcagcaccggcaagaucugcgacagcccccacagaauccuggacggcaagaacugcacccugaucgacgcccugcugggcgacccccacugcgacggcuucaagaacaaggagugggaccuguucguggagagaagcaccgccuacagcaacugcuaccccuacgacgugcccgacuacgccagccugagaagccugguggccagcagcggcacccuggaguucaccaacgagggcuucaacuggaccggcguggcccaggacggcaccagcuacgccugcaagagaggcagcgugaagagcuucuucagcagacugaacuggcugcacaagcuggaguacaaguaccccgcccugaacgugaccaugcccaacaacgacaaguucgacaagcuguacaucuggggcgugcaccaccccagcaccgacagcgaccagaccagccuguacgugcaggccagcggcagagugaccgugagcaccaagagaagccagcagaccgugauccccaacaucggcagcagacccugggugagaggcaucagcagcagaaucagcaucuacuggaccaucgugaagcccggcgacauccugcugaucaacagcaccggcaaccugaucgcccccagaggcuacuucaagaucagaagcggcaagagcagcaucaugagaagcgacgcccccaucgacaacugcaacagcgagugcaucacccccaacggcagcauccccaacgacaagcccuuccagaacgugaacagaaucaccuacggcgccugccccagauacgugaagcagaacacccugaagcuggccaccggcaugagaaacgugcccgagaagcagaccagaggcaucuucggcgccaucgccggcuucaucgagaacggcugggagggcaugguggacggcugguacggcuucagacaccagaacagcgagggcaccggccaggccgccgaccugaagagcacccaggccgccaucaaccagaucaacggcaagcugaacagacugaucgagaagaccaacgagaaguuccaccagaucgagaaggaguucagcgagguggagggcagaauccaggaccuggagaaguacguggaggacaccaagaucgaccuguggagcuacaacgccgagcugcugguggcccuggagaaccagcacaccaucgaccugaccgacagcgagaugaacaagcuguucgagaagaccagaaagcagcugagagagaacgccgaggacaugggcaacggcugcuucaagaucuaccacaagugcgacaacgccugcaucggcagcaucagaaacggcaccuacgaccacgacguguacagagacgaggcccugaacaacagauuccagaucaagggcguggagcugaagagcggcuacaaggacuggauccuguggaucagcuucgccaucagcugcuuccugcugugcguggugcugcugggcuucaucaugugggccugccagaagggcaacaucagaugcaacaucugcaucuga

SEQ ID NO: 163066 - RNA, 1701 nt, Artificial Sequence
  derived and/or modified CDS sequence (opt4) from hemagglutinin__InfluenzaA__ACT21467
augaagaccaucaucgcccugagcuacauccugugccugguguucgcccagaagcugcccggcagcgacaacagcaccgccacccugugccugggccaccacgccgugcccaacggcacccuggugaagaccaucaccaacgaccagaucgaggugaccaacgccaccgagcuggugcagagcagcagcaccggcaagaucugcgacagcccccacagaauccuggacggcaagaacugcacccugaucgacgcccugcugggcgacccccacugcgacggcuucaagaacaaggagugggaccuguucguggagagaagcaccgccuacagcaacugcuaccccuacgacgugcccgacuacgccagccugagaagccugguggccagcagcggcacccuggaguucaccaacgagggcuucaacuggaccggcguggcccaggacggcaccagcuacgccugcaagagaggcagcgugaagagcuucuucagcagacugaacuggcugcacaagcuggaguacaaguaccccgcccugaacgugaccaugcccaacaacgacaaguucgacaagcuguacaucuggggcgugcaccaccccagcaccgacagcgaccagaccagccuguacgugcaggccagcggcagagugaccgugagcaccaagagaagccagcagaccgugauccccaacaucggcagcagacccugggugagaggcaucagcagcagaaucagcguguacuggaccaucgugaagcccagagacauccugcugaucaacagcaccggcaaccugaucgcccccagaggcuacuucaagaucagaagcggcaagagcagcaucaugagaagcgacgcccccaucgacaacugcaacagcgagugcaucacccccaacggcagcauccccaacgacaagcccuuccagaacgugaacagaaucaccuacggcgccugccccagauacgugaagcagaacacccugaagcuggccaccggcaugagaaacgugcccgagaagcagaccagaggcaucuucggcgccaucgccggcuucaucgagaacggcugggagggcaugguggacggcugguacggcuucagacaccagaacagcgagggcaccggccaggccgccgaccugaagagcacccaggccgccaucaacagaaucaacggcaagcugaacagacugaucgagaagaccaacgagaaguuccaccagaucgagaaggaguucagcgagguggagggcagaauccaggaccuggagaaguacguggaggacaccaagaucgaccuguggagcuacaacgccgagcugcugguggcccuggagaaccagcacaccaucgaccugaccgacagcgagaugaacaagcuguucgagaagaccagaaagcagcugagagagaacgccgaggacaugggcaacggcugcuucaagaucuaccacaagugcgacaacgccugcaucggcagcaucagaaacggcaccuacgaccacgacguguacagagacgaggcccugaacaacagauuccagaucaagggcguggagcugaagagcggcuacaaggacuggauccuguggaucagcuucgccaucagcugcuuccugcugugcguggugcugcugggcuucaucaugugggccugccagaagggcaacaucagaugcaacaucugcaucuga

SEQ ID NO: 163067 - RNA, 1701 nt, Artificial Sequence
  derived and/or modified CDS sequence (opt4) from hemagglutinin__InfluenzaA__ACT21468
augaagaccaucaucgcccugagcuacauccugugccugguguucgcccagaagcugcccggcaacgacaacagcaccgccacccugugccugggccaccacgccgugcccaacggcacccuggugaagaccaucaccaacgaccagaucgaggugaccaacgccaccgagcuggugcagagcagcagcaccggcaagaucugcgacagcccccacagaauccuggacggcaagaacugcacccugaucgacgcccugcugggcgacccccacugcgacggcuucaagaacaaggagugggaccuguucguggagagaagcaccgccuacagcaacugcuaccccuacgacgugcccgacuacgccagccugagaagccugguggccagcagcggcacccuggaguucaccaacgagggcuucaacuggaccggcguggcccaggacggcaccagcuacgccugcaagagaggcagcgugaagagcuucuucagcagacugaacuggcugcacaagcuggaguacaaguaccccgcccugaacgugaccaugcccaacaacgacaaguucgacaagcuguacaucuggggcgugcaccaccccagcaccgacagcgaccagaccagccuguacgugcaggccagcggcagagugaccgugagcaccaagagaagccagcagaccgugauccccaacaucggcagcagacccugggugagaggcaucagcagcagaaucagcaucuacuggaccaucgugaagcccggcgacauccugcugaucaacagcaccggcaaccugaucgcccccagaggcuacuucaagaucagaagcggcaagagcagcaucaugagaagcgacgcccccaucgacaacugcaacagcgagugcaucacccccaacggcagcauccccaacgacaagcccuuccagaacgugaacagaaucaccuacggcgccugccccagauacgugaagcagaacacccugaagcuggccaccggcaugagaaacgugcccgagaagcagaccagaggcaucuucggcgccaucgccggcuucaucgagaacggcugggagggcaugguggacggcugguacggcuucagacaccagaacagcgagggcaccggccaggccgccgaccugaagagcacccaggccgccaucaaccagaucaacggcaagcugaacagacugaucgagaagaccaacgagaaguuccaccagaucgagaaggaguucagcgagguggagggcagaauccaggaccuggagaaguacguggaggacaccaagaucgaccuguggagcuacaacgccgagcugcugguggcccuggagaaccagcacaccaucgaccugaccgacagcgagaugaacaagcuguucgagaagaccagaaagcagcugagagagaacguggaggacaugggcaacggcugcuucaagaucuaccacaagugcgacaacgccugcaucggcagcaucagaaacggcaccuacgaccacgacguguacagagacgaggcccugaacaacagauuccagaucaagggcguggagcugaagagcggcuacaaggacuggauccuguggaucagcuucgccaucagcugcuuccugcugugcguggugcugcugggcuucaucaugugggccugccagaagggcaacaucagaugcaacaucugcaucuga

SEQ ID NO: 163068 - RNA, 1701 nt, Artificial Sequence
  derived and/or modified CDS sequence (opt4) from hemagglutinin__InfluenzaA__ACT21469
augaagaccaucaucgcccugagcuacaucagcagacugguguucgcccagaagcugcccggcaacgacaacagcaccgccacccugugccugggccaccacgccgugcccaacggcacccuggugaagaccaucaccaacgaccagaucgaggugaccaacgccaccgagcuggugcagagcagcagcaccggcagaaucugcgacagcccccacagaauccuggacggcgagaacugcacccugaucgacgcccugcugggcgacccccacugcgacggcuuccagaacaaggagugggaccuguucguggagagaagcaaggccuacagcaacugcuaccccuacgacgugcccgacuacgccagccugagaagccugguggccagcagcggcacccuggaguucaacaacgagagcuucaacuggaccggcguggcccaggacggcaccagcuacgccugcaagagaagaagcaucaagagcuucuucagcagacugaacuggcugcaccagcugaaguacaaguaccccgcccugaacgugaccaugcccaacaacgacaaguucgacaagcuguacaucuggggcgugcaccaccccagcaccgacagcgaccagaccagccuguacgcccaggccagcggcagagugaccgugagcaccaagagaagccagcagaccgugauccccaacaucggcagcagacccugggugagaggcgugagcagcagaaucagcaucuacuggaccaucgugaagcccggcgacauccugcugaucaacagcaccggcaaccugaucgcccccagaggcuacuucaagaucagaagcggcaagagcagcaucaugagaagcgacgcccccaucggcaagugcaacagcgagugcaucacccccaacggcagcauccccaacgacaagcccuuccagaacgugaacagaaucaccuacggcgccugccccagauacgugaagcagaacacccugaagcuggccaccggcaugagaaacgugcccgagaagcagaccagaggcaucuucggcgccaucgccggcuucaucgagaacggcugggagggcaugguggacggcugguacggcuucagacaccagaacagcgagggcaccggccaggccgccgaccugaagagcacccaggccgccaucaaccagaucaacggcaagcugaacagacugaucgagaagaccaacgagaaguuccaccagaucgagaaggaguucagcgagguggagggcagaauccaggaccuggagaaguacguggaggacaccaagaucgaccuguggagcuacaacgccgagcugcugguggcccuggagaaccagcacaccaucgaccugaccgacagcgagaugaacaagcuguucgagagaaccagaaagcagcugagagagaacgccgaggacaugggcaacggcugcuucaagaucuaccacaagugcgacaacgccugcaucggcagcaucagaaacggcaccuacgaccacgacguguacagagacgaggcccugaacaacagauuccagaucaagggcguggagcugaagagcggcuacaaggacuggauccuguggaucagcuucgccaucagcugcuuccugcugugcguggugcugcugggcuucaucaugugggccugccagaagggcaacaucagaugcaacaucugcaucuga

SEQ ID NO: 163069 - RNA, 1701 nt, Artificial Sequence
  derived and/or modified CDS sequence (opt4) from hemagglutinin__InfluenzaA__ACT21471
augaagaccaucaucgcccugagcuacaucagcugccugguguucgcccagaagcugcccggcaacgacaacagcaccgccacccugugccugggccaccacgccgugcccaacggcacccuggugaagaccaucaccaacgaccagaucgaggugaccaacgccaccgagcuggugcagagcagcagcaccggcagaaucugcgacagcccccacagaauccuggacggcgagaacugcacccugaucgacgcccugcugggcgacccccacugcgacggcuuccagaacaaggagugggaccuguucguggagagaagcaaggccuacagcaacugcuaccccuacgacgugcccgacuacgccagccugagaagccugguggccagcagcggcacccuggaguucaacaacgagagcuucaacuggaccggcguggcccaggacggcaccagcuacgccugcaagagaagaagcaucaagagcuucuucagcagacugaacuggcugcaccagcugaaguacaaguaccccgcccugaacgugaccaugcccaacaacgacaaguucgacaagcuguacaucuggggcgugcaccaccccagcaccgacagcgaccagaccagccuguacgcccaggccagcggcagagugaccgugagcaccaagagaagccagcagaccgugauccccaacaucggcagcagacccugggugagaggcgugagcagcagaaucagcaucuacuggaccaucgugaagcccggcgacauccugcugaucaacagcaccggcaaccugaucgcccccagaggcuacuucaagaucagaagcggcaagagcagcaucaugagaagcgacgcccccaucggcaagugcaacagcgagugcaucacccccaacggcagcauccccaacgacaagcccuuccagaacgugaacagaaucaccuacggcgccugccccagauacgugaagcagaacacccugaagcuggccaccggcaugagaaacgugcccgagaagcagaccagaggcaucuucggcgccaucgccggcuucaucgagaacggcugggagggcaugguggacggcugguacggcuucagacaccagaacagcgagggcaccggccaggccgccgaccugaagagcacccaggccgccaucaaccagaucaacggcaagcugaacagacugaucgagaagaccaacgagaaguuccaccagaucgagaaggaguucagcgagguggagggcagaauccaggaccuggagaaguacguggaggacaccaagaucgaccuguggagcuacaacgccgagcugcugguggcccuggagaaccagcacaccaucgaccugaccgacagcgagaugaacaagcuguucgagagaaccagaaagcagcugagagagaacgccgaggacaugggcaacggcugcuucaagaucuaccacaagugcgacaacgccugcaucggcagcaucagaaacggcaccuacgaccacgacguguacagagacgaggcccugaacaacagauuccagaucaagggcguggagcugaagagcggcuacaaggacuggauccuguggaucagcuucgccaucagcugcuuccugcugugcguggugcugcugggcuucaucaugugggccugccagaagggcaacaucagaugcaacaucugcaucuga

SEQ ID NO: 163070 - RNA, 1701 nt, Artificial Sequence
  derived and/or modified CDS sequence (opt4) from hemagglutinin__InfluenzaA__ACT21472
augaagaccaucaucgcccugagcuacaucagcugccugguguucgcccagaagcugcccggcaacgacaacagcaccgccacccugugccugggccaccacgccgugcccaacggcacccuggugaagaccaucaccaacgaccagaucgaggugaccaacgccaccgagcuggugcagagcagcagcaccggcagaaucugcgacagcccccacagaauccuggacggcgagaacugcacccugaucgacgcccugcugggcgacccccacugcgacggcuuccagaacaaggagugggaccuguucguggagagaagcaaggccuacagcaacugcuaccccuacgacgugcccgacuacgccagccugagaagccugguggccagcagcggcacccuggaguucaacaacgagagcuucaacuggaccggcguggcccaggacggcaccagcuacgccugcaagagaagaagcaucaagagcuucuucagcacccugaacuggcugcaccagcugaaguacaaguaccccgcccugaacgugaccaugcccaacaacgacaaguucgacaagcuguacaucuggggcgugcaccaccccagcaccgacagcgaccagaccagccuguacgcccaggccagcggcagagugaccgugagcaccaagagaagccagcagaccgugauccccaacaucggcagcagacccugggugagaggcgugagcagcagaaucagcaucuacuggaccaucgugaagcccggcgacauccugcugaucaacagcaccggcaaccugaucgcccccagaggcuacuucaagaucagaagcggcaagagcagcaucaugagaagcgacgcccccaucggcaagugcaacagcgagugcaucacccccaacggcagcauccccaacgacaagcccuuccagaacgugaacagaaucaccuacggcgccugccccagauacgugaagcagaacacccugaagcuggccaccggcaugagaaacgugcccgagaagcagaccagaggcaucuucggcgccaucgccggcuucaucgagaacggcugggagggcaugguggacggcugguacggcuucagacaccagaacagcgagggcaccggccaggccgccgaccugaagagcacccaggccgccaucaaccagaucaacggcaagcugaacagacugaucgagaagaccaacgagaaguuccaccagaucgagaaggaguucagcgagguggagggcagaauccaggaccuggagaaguacguggaggacaccaagaucgaccuguggagcuacaacgccgagcugcugguggcccuggagaaccagcacaccaucgaccugaccgacagcgagaugaacaagcuguucgagagaaccagaaagcagcugagagagaacgccgaggacaugggcaacggcugcuucaagaucuaccacaagugcgacaacgccugcaucggcagcaucagaaacggcaccuacgaccacgacguguacagagacgaggcccugaacaacagauuccagaucaagggcguggagcugaagagcggcuacaaggacuggauccuguggaucagcuucgccaucagcugcuuccugcugugcguggugcugcugggcuucaucaugugggccugccagaagggcaacaucagaugcaacaucugcaucuga

SEQ ID NO: 163071 - RNA, 1701 nt, Artificial Sequence
  derived and/or modified CDS sequence (opt4) from hemagglutinin__InfluenzaA__ACT21507
augaagaccaucaucgcccugagcuacauccugugccugguguucgcccagaagcugcccggcaacgacaacagcaccgccacccugugccugggccaccacgccgugcccaacggcaccaucgugaagaccaucaccaacgaccagaucgaggugaccaacgccaccgagcuggugcagagcagcagcaccggcggcaucugcgacagcccccaccagauccuggacggcgagaacagaacccugaucgacgcccugcugggcgacccccagugcgacggcuuccagaacaagaagugggaccuguucguggagagaagcaaggccuacagcaacugcuaccccuacgacgugcccgacuacgccagccugagaagccugguggccagcagcggcacccuggaguucaacaacgagagcuucaacuggaccggcgugacccagaacggcaccagcagcgccugcaagggcagaagcaacaacagcuucuucagcagacugaacuggcugacccaccugaaguucaaguaccccgcccugaacgugaccaugcccaacaacgagaaguucgacaagcuguacaucuggggcgugcaccaccccggcaccgacaacgaccagaucagccuguacgcccaggccagcggcagaaucaccgugagcaccaagagaagccagcagaccgugauccccaacaucggcagcagacccagagugagagacauccccagcagaaucagcaucuacuggaccaucgugaagcccggcgacauccugcugaucaacagcaccggcaaccugaucgcccccagaggcuacuucaagaucagaagcggcaagagcagcaucaugagaagcgacgcccccaucggcaagugcaacagcgagugcaucacccccaacggcagcauccccaacgacaagcccuuccagaacgugaacagaaucaccuacggcgccugccccagauacgugaagcagaacacccugaagcuggccaccggcaugagaaacgugcccgagaagcagaccagaggcaucuucggcgccaucgccggcuucaucgagaacggcugggagggcaugguggacggcugguacggcuucagacaccagaacagcgagggcaucggccaggccgccgaccugaagagcacccaggccgccaucaaccagaucaacggcaagcugaacagacugaucggcaagaccaacgagaaguuccaccagaucgagaaggaguucagcgagguggagggcagaauccaggaccuggagaaguacguggaggacaccagaaucgaccuguggagcuacaacgccgagcugcugguggcccuggagagccagcacaccaucgaccugaccgacagcgagaugaacaagcuguucgagagaaccaagaagcagcugagagagaacgccgaggacaugggcaacggcugcuucaagaucuaccacaagugcgacaacgccugcaucggcagcaucagaaacggcaccuacgaccacgacguguacagagacgaggcccugaacaagagauuccagaucaagggcguggagcugaagagcggcuacaaggacuggauccuguggaucagcuucgccaucagcugcuuccugcugugcguggcccugcugggcuucaucaugugggccugccagaagggcaacaucagaugcaacaucugcaucuga

SEQ ID NO: 163072 - RNA, 1701 nt, Artificial Sequence
  derived and/or modified CDS sequence (opt4) from hemagglutinin__InfluenzaA__ACT21508
augaagaccaucaucgcccugagcuacauccugugccugguguucgcccagaagcugcccggcaacgacaacagcaccgccacccugugccugggccaccacgccgugcccaacggcaccaucgugaagaccaucaccaacgaccagaucgaggugaccaacgccaccgagcuggugcagagcagcagcaccggcggcaucugcgacagcccccaccagauccuggacggcgagaacugcacccugaucgacgcccugcugggcgacccccagugcgacggcuuccagaacaagaagugggaccuguucguggagagaagcaaggccuacagcaacugcuaccccuacgacgugcccgacuacgccagccugagaagccugguggccagcagcggcacccuggaguucaacaacgagagcuucaacuggaccggcgugacccagaacggcaccagcagcgccugcaagagaagaagcaacaacagcuucuucagcagacugaacuggcugacccaccugaaguucaaguaccccgcccugaacgugaccaugcccaacaacgagaaguucgacaagcuguacaucuggggcgugcaccaccccggcaccgacaacgaccagaucagccuguacgcccaggccagcggcagaaucaccgugagcaccaagagaagccagcagaccgugauccccaacaucggcagcagacccagagugagagacauccccagcagaaucagcaucuacuggaccaucgugaagcccggcgacauccugcugaucaacagcaccggcaaccugaucgcccccagaggcuacuucaagaucagaagcggcaagagcagcaucaugagaagcgacgcccccaucggcaagugcaacagcgagugcaucacccccaacggcagcauccccaacgacaagcccuuccagaacgugaacagaaucaccuacggcgccugccccagauacgugaagcaggacacccugaagcuggccaccggcaugagaaacgugcccgagaagcagaccagaggcaucuucggcgccaucgccggcuucaucgagaacggcugggagggcaugguggacggcugguacggcuucagacaccagaacagcgagggcaucggccaggccgccgaccugaagagcacccaggccgccaucaaccagaucaacggcaagcugaacagacugaucggcaagaccaacgagaaguuccaccagaucgagaaggaguucagcgagguggagggcagaauccaggaccuggagaaguacguggaggacaccaagaucgaccuguggagcuacaacgccgagcugcugguggcccuggagaaccagcacaccaucgaccugaccgacagcgagaugaacaagcuguucgagagaaccaagaagcagcugagagagaacgccgaggacaugggcaacggcugcuucaagaucuaccacaagugcgacaacgccugcaucggcagcaucagaaacggcaccuacgaccacgacguguacagagacgaggcccugaacaacagauuccagaucaagggcguggagcugaagagcggcuacaaggacuggauccuguggaucagcuucgccaucagcugcuuccugcugugcguggcccugcugggcuucaucaugugggccugccagaagggcaacaucagaugcaacaucugcaucuga

SEQ ID NO: 163073 - RNA, 1701 nt, Artificial Sequence
  derived and/or modified CDS sequence (opt4) from hemagglutinin__InfluenzaA__ACT21509
augaagaccaucaucgcccugagcuacauccugugccugguguucgcccagaagcugcccggcaacgacaacagcaccgccacccugugccugggccaccacgccgugcccaacggcaccaucgugaagaccaucaccaacgaccagaucgaggugaccaacgccaccgagcuggugcagagcagcagcaccggcggcaucugcgacagcccccaccagauccuggacggcgagaacugcacccugaucgacgcccugcugggcgacccccagugcgacggcuuccagaacaagaagugggaccuguucguggagagaagcaaggccuacagcaacugcuaccccuacgacgugcccgacuacgccagccugagaagccugguggccagcagcggcacccuggaguucaacaacgagagcuucaacuggaccggcgugacccagaacggcaccagcagcgccugcaagagaagaagcaacaacagcuucuucagcagacugaacuggcugacccaccugaaguucaaguaccccgcccugaacgugaccaugcccaacaacgagaaguucgacaagcuguacaucuggggcgugcaccaccccggcaccgacaacgaccagaucagccuguacgcccaggccagcggcagaaucaccgugagcaccaagagaagccagcagaccgugauccccaacaucggcagcagacccagagugagagacauccccagcagaaucagcaucuacuggaccaucgugaagcccggcgacauccugcugaucaacagcaccggcaaccugaucgcccccagaggcuacuucaagaucagaagcggcaagagcagcaucaugagaagcgacgcccccaucggcaagugcaacagcgagugcaucacccccaacggcagcauccccaacgacaagcccuuccagaacgugaacagaaucaccuacggcgccugccccagauacgugaagcagaacacccugaagcuggccaccggcaugagaaacgugcccgagacccagaccagaggcaucuucggcgccaucgccggcuucaucgagaacggcugggagggcaugguggacggcugguacggcuucagacaccagaacagcgagggcaccggccaggccgccgaccugaagagcacccaggccgccaucaaccagaucaacggcaagcccaacagacugaucggcaagaccaacgagaaguuccaccagaucgagaaggaguucagcgagguggagggcagaauccaggaccuggagaaguacguggaggacaccaagaucgaccuguggagcuacaacgccgagcugcugguggcccuggagaaccagcacaccaucgaccugaccgacagcgagaugaacaagcuguucgagaagaccaagaagcagcugagagagaacgccgaggacaugggcaacggcugcuucaagaucuaccacaagugcgacaacgccugcaucggcagcaucagaaacgagaccuacgaccacgacguguacagagacgaggcccugaacaacagauuccagaucaagggcguggagcugaagagcggcuacaaggacuggauccuguggaucagcuucgccaucagcugcuuccugcugugcguggcccugcugggcuucaucaugugggccugccagaagggcaacaucagaugcaacaucugcaucuga

SEQ ID NO: 163074 - RNA, 1701 nt, Artificial Sequence
  derived and/or modified CDS sequence (opt4) from hemagglutinin__InfluenzaA__ACT21510
augaagaccaucaucgcccugagcuacauccugugccccguguucgcccagaagcugcccggcaacgacaacagcaccgccacccugugccugggccaccacgccgugcccaacggcaccaucgugaagaccaucaccaacgaccagaucgaggugaccaacgccaccgagcuggugcagagcagcagcaccggcggcaucugcgacagcccccaccagauccuggacggcgagaacugcacccugaucgacgcccugcugggcgacccccagugcgacggcuuccagaacaagaagugggaccuguucguggagagaagcaaggccuacagcaacugcuaccccuacgacgugcccgacuacgccagccugagaagccugguggccagcagcggcacccuggaguucaacaacgagagcuucaacuggaccggcgugacccagaacggcaccagcagcgccugcaagagaagaagcaacaacagcuucuucagcagacugaacuggcugacccaccugaaguucaaguaccccgcccugaacgugaccaugcccaacaacgagaaguucgacaagcuguacaucuggggcgugcaccaccccggcaccgacaacgaccagaucagccuguacgcccaggccagcggcagaaucaccgugagcaccaagagaagccagcagaccgugauccccaacaucggcagcagacccagagugagagacauccccagcagaaucagcaucuacuggaccaucgugaagcccggcgacauccugcugaucaacagcaccggcaaccugaucgcccccagaggcuacuucaagaucagaagcggcaagagcagcaucaugagaagcgacgcccccaucggcaagugcaacagcgagugcaucacccccaacggcagcauccccaacgacaagcccuuccaggacgugaacagaaucaccuacggcgccugccccagauacgugaagcagaacacccugaagcuggccaccggcaugagaaacgugcccgagaagcagaccagaggcaucuucggcgccaucgccggcuucaucgagaacggcugggagggcaugguggacggcugguacggcuucagacaccagaacagcgagggcaucggccaggccgccgaccugaagagcacccaggccgccaucaaccagaucaacggcaagcugaacagacugaucggcaagaccaacgagaaguuccaccagaucgagaaggaguucagcgagguggagggcagaauccaggaccuggagaaguacguggaggacaccaagaucgaccuguggagcuacaacgccgagcugcugguggcccuggagaaccagcacaccaucgaccugaccgacagcgagaugaacaagcuguucgagagaaccgagaagcagcugagagagaacgccgaggacaugggcaacggcugcuucaagaucuaccacaagugcgacaacgccggcaucggcagcaucagaaacggcaccuacgaccacgacguguacagagacgaggcccugaacaacagauuccagaucaagggcguggagcugaagagcggcuacaaggacuggauccuguggaucagcuucgccaucagcugcuuccugcugugcguggcccugcugggcuucaucaugugggccugccagaagggcaacaucagaugcaacaucugcaucuga

SEQ ID NO: 163075 - RNA, 1701 nt, Artificial Sequence; identical to SEQ ID NO: 162973
  derived and/or modified CDS sequence (opt4) from hemagglutinin__InfluenzaA__ACT21572

SEQ ID NO: 163076 - RNA, 1701 nt, Artificial Sequence; identical to SEQ ID NO: 162729
  derived and/or modified CDS sequence (opt4) from hemagglutinin__InfluenzaA__ACT22031

SEQ ID NO: 163077 - RNA, 1701 nt, Artificial Sequence; identical to SEQ ID NO: 162729
  derived and/or modified CDS sequence (opt4) from hemagglutinin__InfluenzaA__ACT22032

SEQ ID NO: 163078 - RNA, 1701 nt, Artificial Sequence; identical to SEQ ID NO: 162729
  derived and/or modified CDS sequence (opt4) from hemagglutinin__InfluenzaA__ACT22033

SEQ ID NO: 163079 - RNA, 1701 nt, Artificial Sequence; identical to SEQ ID NO: 162729
  derived and/or modified CDS sequence (opt4) from hemagglutinin__InfluenzaA__ACT22034

SEQ ID NO: 163080 - RNA, 1701 nt, Artificial Sequence; identical to SEQ ID NO: 162744
  derived and/or modified CDS sequence (opt4) from hemagglutinin__InfluenzaA__ACT22035

SEQ ID NO: 163081 - RNA, 1701 nt, Artificial Sequence
  derived and/or modified CDS sequence (opt4) from hemagglutinin__InfluenzaA__ACT22036
augaaggccauccugguggugcugcuguacaccuucgccaccgccaacgccgacacccugugcaucggcuaccacgccaacaacagcaccgacaccguggacaccgugcuggagaagaacgugaccgugacccacagcgugaaccugcuggaggacaagcacaacggcaagcugugcaagcugagaggcguggccccccugcaccugggcaagugcaacaucgccggcuggauccugggcaaccccgagugcgagagccugagcaccgccagcagcuggagcuacaucguggagaccagcagcagcgacaacggcaccugcuaccccggcgacuucaucgacuacgaggagcugagagagcagcugagcagcgugagcagcuucgagagauucgagaucuuccccaagaccagcagcuggcccaaccacgacagcaacaagggcgugaccgccgccugcccccacgccggcgccaagagcuucuacaagaaccugaucuggcugaucaagaagggcaacagcuaccccaagcugagcaagagcuacaucaacgacaagggcaaggaggugcuggugcuguggggcauccaccaccccagcaccagcgccgaccagcagagccuguaccagaacgccgacgccuacguguucgugggcagcagcagauacagcaagaaguucaagcccgagaucgccaucagacccaaggugagagaccaggagggcagaaugaacuacuacuggacccugguggagcccggcgacaagaucaccuucgaggccaccggcaaccugguggugcccagauacgccuucgccauggagagaaacgccggcagcggcaucaucaucagcgacacccccgugcacgacugcaacaccaccugccagacccccaagggcgccaucaacaccagccugcccuuccagaacauccaccccaucaccaucggcaagugccccaaguacgugaagagcaccaagcugagacuggccaccggccugagaaacgugcccagcauccagagcagaggccuguucggcgccaucgccggcuucaucgagggcggcuggaccggcaugguggacggcugguacggcuaccaccaccagaacgagcagggcagcggcuacgccgccgaccugaagagcacccagaacgccaucgacgagaucaccaacaaggugaacagcgugaucgagaagaugaacacccaguucaccgccgugggcaaggaguucaaccaccuggagaagagaaucgagaaccugaacaagaagguggacgacggcuuccuggacaucuggaccuacaacgccgagcugcuggugcugcuggagaacgagagaacccuggacuaccacgacagcaacgugaagaaccuguacgagaaggugagaagccagcugaagaacaacgccaaggagaucggcaacggcugcuucgaguucuaccacaagugcgacaacaccugcauggagagcgugaagaacggcaccuacgacuaccccaaguacagcgaggaggccaagcugaacagagaggagaucgacggcgugaagcuggagagcaccagaaucuaccagauccuggccaucuacagcaccguggccagcagccuggugcugguggugagccugggcgccaucagcuucuggaugugcagcaacggcagccugcagugcagaaucugcaucuga

SEQ ID NO: 163082 - RNA, 1701 nt, Artificial Sequence
  derived and/or modified CDS sequence (opt4) from hemagglutinin__InfluenzaA__ACT22037
augaaggccauccugguggugcugcuguacaccuucgccaccgccaacgccgacacccugugcaucggcuaccacgccaacaacagcaccgacaccguggacaccgugcuggagaagaacgugaccgugacccacagcgugaaccugcuggaggacaagcacaacggcaagcugugcaagcugagaggcguggccccccugcaccugggcaagugcaacaucgccggcuggauccugggcaaccccgagugcgagagccugagcaccgccagcagcuggagcuacaucguggagaccagcagcagcgacaacggcaccugcuaccccggcgacuucaucgacuacgaggagcugagagagcagcugagcagcgugagcagcuucgagagauucgagaucuuccccaagaccagcagcuggcccaaccacgacagcaacaagggcgugaccgccgccugcccccacgccggcgccaagagcuucuacaagaaccugaucuggcuggugaagaagggcaacagcuaccccaagcugagcaagagcuacaucaacgacaagggcaaggaggugcuggugcuguggggcauccaccaccccagcaccagcgccgaccagcagagccuguaccagaacgccgacgccuacguguucgugggcaccagcagauacagcaagaaguucaagcccgagaucgccaucagacccaaggugagagagcaggagggcagaaugaacuacuacuggacccugguggagcccggcgacaagaucaccuucgaggccaccggcaaccugguggugcccagauacgccuucgccauggagagaaacgccggcagcggcaucaucaucagcgacacccccgugcacgacugcaacaccaccugccagacccccaagggcgccaucaacaccagccugcccuuccagaacauccaccccaucaccaucggcaagugccccaaguacgugaagagcaccaagcugagacuggccaccggccugagaaacgugcccagcauccagagcagaggccuguucggcgccaucgccggcuucaucgagggcggcuggaccggcaugguggacggcugguacggcuaccaccaccagaacgagcagggcagcggcuacgccgccgaccugaagagcacccagaacgccaucgacgagaucaccaacaaggugaacagcgugaucgagaagaugaacacccaguucaccgccgugggcaaggaguucaaccaccuggagaagagaaucgagaaccugaacaagaagguggacgacggcuuccuggacaucuggaccuacaacgccgagcugcuggugcugcuggagaacgagagaacccuggacuaccacgacagcaacgugaagaaccuguacgagaaggugagaagccagcugaagaacaacgccaaggagaucggcaacggcugcuucgaguucuaccacaagugcgacaacaccugcauggagagcgugaagaacggcaccuacgacuaccccaaguacagcgaggaggccaagcugaacagagaggagaucgacggcgugaagcuggagagcaccagaaucuaccagauccuggccaucuacagcaccguggccagcagccuggugcugguggugagccugggcgccaucagcuucuggaugugcagcaacggcagccugcagugcagaaucugcaucuga

SEQ ID NO: 163083 - RNA, 1701 nt, Artificial Sequence
  derived and/or modified CDS sequence (opt4) from hemagglutinin__InfluenzaA__ACT22038
augaaggccauccugguggugcugcuguacaccuucgccaccgccaacgccgacacccugugcaucggcuaccacgccaacaacagcaccgacaccguggacaccgugcuggagaagaacgugaccgugacccacagcgugaaccugcuggaggacaagcacaacggcaagcugugcaagcugagaggcguggccccccugcaccugggcaagugcaacaucgccggcuggauccugggcaaccccgagugcgagagccugagcaccgccagcagcuggagcuacaucguggagaccagcagcagcgacaacggcaccugcuaccccggcgacuucaucgacuacgaggagcugagagagcagcugagcagcgugagcagcuucgagagauucgagaucuuccccaagaccagcagcuggcccaaccacgacagcaacaagggcgugaccgccgccugcccccacgccggcgccaagagcuucuacaagaaccugaucuggcuggugaagaagggcaacagcuaccccaagcugagcaagagcuacaucaacgacaagggcaaggaggugcuggugcuguggggcauccaccaccccagcaccaacgccgaccagcagagccuguaccagaacgccgacgccuacguguucgugggcagcagcagauacagcaagaaguucaagcccgagaucgccaucagacccaaggugagagaccaggagggcagaaugaacuacuacuggacccugguggagcccggcgacaagaucaccuucgaggccaccggcaaccugguggugcccagauacgccuucgccauggagagaaacgccggcagcggcaucaucaucagcgacacccccgugcacgacugcaacaccaccugccagacccccaagggcgccaucaacaccagccugcccuuccagaacauccaccccaucaccaucggcaagugccccaaguacgugaagagcaccaagcugagacuggccaccggccugagaaacgugcccagcauccagagcagaggccuguucggcgccaucgccggcuucaucgagggcggcuggaccggcaugguggacggcugguacggcuaccaccaccagaacgagcagggcagcggcuacgccgccgaccugaagagcacccagaacgccaucgacgagaucaccaacaaggugaacagcgugaucgagaagaugaacacccaguucaccgccgugggcaaggaguucaaccaccuggagaagagaaucgagaaccugaacaagaagguggacgacggcuuccuggacaucuggaccuacaacgccgagcugcuggugcugcuggagaacgagagaacccuggacuaccacgacagcaacgugaagaaccuguacgagaaggugagaagccagcugaagaacaacgccaaggagaucggcaacggcugcuucgaguucuaccacaagugcgacaacaccugcauggagagcgugaagaacggcaccuacgacuaccccaaguacagcgaggaggccaagcugaacagagaggagaucgacggcgugaagcuggagagcaccagaaucuaccagauccuggccaucuacagcaccguggccagcagccuggugcugguggugagccugggcgccaucagcuucuggaugugcagcaacggcagccugcagugcagaaucugcaucuga

SEQ ID NO: 163084 - RNA, 1701 nt, Artificial Sequence
  derived and/or modified CDS sequence (opt4) from hemagglutinin__InfluenzaA__ACT22055
augaaggccauccugguggugcugcuguacaccuucgccaccgccaacgccgacacccugugcaucggcuaccacgccaacaacagcaccgacaccguggacaccgugcuggagaagaacgugaccgugacccacagcgugaaccugcuggaggacaagcacaacggcaagcugugcaagcugagaggcguggccccccugcaccugggcaagugcaacaucgccggcuggauccugggcaaccccgagugcgagagccugagcaccgccagcagcuggagcuacaucguggagaccagcagcagcgacaacggcaccugcuaccccggcgacuucaucgacuacgaggagcugagagagcagcugagcagcgugagcagcuucgagagauucgagaucuuccccaagaccagcagcuggcccaaccacgacagcaacaagggcgugaccgccgccugcccccacgccggcgccaagagcuucuacaagaaccugaucuggcuggugaagaagggcaacagcuaccccaagcugagaaagagcuacaucaacgacaagggcaaggaggugcuggugcuguggggcauccaccaccccagcaccagcgccgaccagcagagccuguaccagaacgccgacgccuacguguucgugggcaccagcagauacagcaagaaguucaagcccgagaucgccaucagacccaaggugagagaccaggagggcagaaugaacuacuacuggacccugguggagcccggcgacaagaucaccuucgaggccaccggcaaccugguggugcccagauacgccuucgccauggagagaaacgccggcagcggcaucaucaucagcgacacccccgugcacgacugcaacaccaccugccagacccccaagggcgccaucaacaccagccugcccuuccagaacauccaccccaucaccaucggcaagugccccaaguacgugaagagcaccaagcugagacuggccaccggccugagaaacgugcccagcauccagagcagaggccuguucggcgccaucgccggcuucaucgagggcggcuggaccggcaugguggacggcugguacggcuaccaccaccagaacgagcagggcagcggcuacgccgccgaccugaagagcacccagaacgccaucgacgagaucaccaacaaggugaacagcgugaucgagaagaugaacacccaguucaccgccgugggcaaggaguucaaccaccuggagaagagaaucgagaaccugaacaagaagguggacgacggcuuccuggacaucuggaccuacaacgccgagcugcuggugcugcuggagaacgagagaacccuggacuaccacgacagcaacgugaagaaccuguacgagaaggugagaagccagcugaagaacaacgccaaggagaucggcaacggcugcuucgaguucuaccacaagugcgacaacaccugcauggagagcgugaagaacggcaccuacgacuaccccaaguacagcgaggaggccaagcugaacagagaggagaucgacggcgugaagcuggagagcaccagaaucuaccagauccuggccaucuacagcaccguggccagcagccuggugcugguggugagccugggcgccaucagcuucuggaugugcagcaacggcagccugcagugcagaaucugcaucuga

SEQ ID NO: 163085 - RNA, 1701 nt, Artificial Sequence; identical to SEQ ID NO: 163042
  derived and/or modified CDS sequence (opt4) from hemagglutinin__InfluenzaA__ACT22504

SEQ ID NO: 163086 - RNA, 1701 nt, Artificial Sequence; identical to SEQ ID NO: 162971
  derived and/or modified CDS sequence (opt4) from hemagglutinin__InfluenzaA__ACT33122

SEQ ID NO: 163087 - RNA, 1701 nt, Artificial Sequence
  derived and/or modified CDS sequence (opt4) from hemagglutinin__InfluenzaA__ACT33123
augaaggccauccugguggugcugcuguacaccuucgccaccgccaacgccgacacccugugcaucggcuaccacgccaacaacagcaccgacaccguggacaccgugcuggagaagaacgugaccgugacccacagcgugaaccugcuggaggacaagcacaacggcaagcugugcaagcugagaggcguggccccccugcaccugggcaagugcaacaucgccggcuggauccugggcaaccccgagugcgagagccugagcaccgccagcagcuggagcuacaucguggagaccagcagcagcgacaacggcaccugcuaccccggcgacuucaucgacuacgaggagcugagagagcagcugagcagcgugagcagcuucgagagauucgagaucuuccccaagaccagcagcuggcccaaccacgacagcaacaagggcgugaccgccgccugcccccacgccggcgccaagagcuucuacaagaaccugaucuggcuggugaagaagggcaacagcuaccccaagcugagcaagagcuacaucaacgacaagggcaaggaggugcuggugcuguggggcauccaccaccccagcaccagcgccgaccagcagagccuguaccagaacgccgacgccuacguguucgugggcaccagcagauacagcaagaaguucaagcccgagaucgccaucagacccaaggugagagaccaggagggcagaaugaacuacuacuggacccugguggagcccggcgacaagaucaccuucgaggccaccggcaaccugguggugcccagauacgccuucgccauggagagaaacgccggcagcggcaucaucaucagcgacacccccgugcacgacugcaacaccaccugccagacccccaagggcgccaucaacaccagccugcccuuccagaacauccaccccaucaccaucggcaagugccccaaguacgugaagagcaccaagcugagacuggccaccggccugagaaacgugcccagcauccagagcagaggccuguucggcgccaucgccggcuucaucgagggcggcuggaccggcaugguggacggcugguacggcuaccaccaccagaacgagcagggcagcggcuacgccgccgaccugaagagcacccagaacgccaucgacgagaucaccaacaaggugaacagcgugaucgagaagaugaacacccaguucaccgccgugggcaaggaguucaaccaccuggagaagagaaucgagaaccugaacaagaagguggacgacggcuuccuggacaucuggaccuacaacgccgagcugcuggugcugcuggagaacgagagaacccuggacuaccacgacagcaacgugaagaaccuguacgagaaggugagaagccagcugaagaacaacgccaaggagaucggcaacggcugcuucgaguucuaccacaagugcgacaacaccugcauggagagcgugaagaacggcaccuacgacuaccccaaguacagcgaggaggccaagcugaacagagaggagaucgacggcgugaagcuggagagcaccagaaucuaccagauccuggccaucuacagcaccguggccagcagccuggugcugguggugagccugggcgccaucagcuucuggaugugcagcaacggcagccugcaguucagaaucugcaucuga

SEQ ID NO: 163088 - RNA, 1701 nt, Artificial Sequence; identical to SEQ ID NO: 162729
  derived and/or modified CDS sequence (opt4) from hemagglutinin__InfluenzaA__ACT33125

SEQ ID NO: 163089 - RNA, 1701 nt, Artificial Sequence
  derived and/or modified CDS sequence (opt4) from hemagglutinin__InfluenzaA__ACT36505
augaaggccauccugguggugcugcuguacaccuucgccaccgccaacgccgacacccugugcaucggcuaccacgccaacaacagcaccgacaccguggacaccgugcuggagaagaacgugaccgugacccacagcgugaaccugcuggaggacaagcacaacggcaagcugugcaagcugagaggcguggccccccugcaccugggcaagugcaacaucgccggcuggauccugggcaaccccgagugcgagagccugagcaccgccagcagcuggagcuacaucguggagaccagcagcagcgacaacggcaccugcuaccccggcgacuucaucgacuacgaggagcugagagagcagcugagcagcgugagcagcuucgagagauucgagaucuuccccaagaccagcagcuggcccaaccacgacagcaacaagggcgugaccgccgccugcccccacgccggcgccaagagcuucuacaagaaccugaucuggcuggugaagaagggcaacagcuaccccaagcugagcaagagcuacaucaacgacaagggcaaggaggugcuggugcuguggggcauccaccaccccagcaccagcgccgaccagcagagccuguaccagaacgccgacgccuacguguucgugggcaccagcagauacagcaagaaguucaagcccgagaucgccaucagacccaaggugagagaccaggagggcagaaugaacuacuacuggacccugaucgagcccggcgacaagaucaccuucgaggccaccggcaaccugguggugcccagauacgccuucgccauggagagaaacgccggcagcggcaucaucaucagcgacacccccgugcacgacugcaacaccaccugccagacccccaagggcgccaucaacaccagccugcccuuccagaacauccaccccaucaccaucggcaagugccccaaguacgugaagagcaccaagcugagacuggccaccggccugagaaacgugcccagcauccagagcagaggccuguucggcgccaucgccggcuucaucgagggcggcuggaccggcaugguggacggcugguacggcuaccaccaccagaacgagcagggcagcggcuacgccgccgaccugaagagcacccagaacgccaucgacgagaucaccaacaaggugaacagcgugaucgagaagaugaacacccaguucaccgccgugggcaaggaguucaaccaccuggagaagagaaucgagaaccugaacaagaagguggacgacggcuuccuggacaucuggaccuacaacgccgagcugcuggugcugcuggagaacgagagaacccuggacuaccacgacagcaacgugaagaaccuguacgagaaggugagaagccagcugaagaacaacgccaaggagaucggcaacggcugcuucgaguucuaccacaagugcgacaacaccugcauggagagcgugaagaacggcaccuacgacuaccccaaguacagcgaggaggccaagcugaacagagaggagaucgacggcgugaagcuggagagcaccagaaucuaccagauccuggccaucuacagcaccguggccagcagccuggugcugguggugagccugggcgccaucagcuucuggaugugcagcaacggcagccugcagugcagaaucugcaucuga

SEQ ID NO: 163090 - RNA, 1701 nt, Artificial Sequence
  derived and/or modified CDS sequence (opt4) from hemagglutinin__InfluenzaA__ACT36649
augaaggccauccugguggugcugcuguacaccuucgccaccgccaacgccgacacccugugcaucggcuaccacgccaacaacagcaccgacaccguggacaccgugcuggagaagaacgugaccgugacccacagcgugaaccugcuggaggacaagcacaacggcaagcugugcaagcugagaggcguggccccccugcaccugggcaagugcaacaucgccggcuggauccugggcaaccccgagugcgagagccugagcaccgccagaagcuggagcuacaucguggagaccagcagcagcgacaacggcaccugcuaccccggcgacuucaucgacuacgaggagcugagagagcagcugaacagcgugagcagcuucgagagauucgagaucuuccccaagaccagcagcuggcccaaccacgacagcaacaagggcgugaccgccgccugcccccacgccggcgccaagagcuucuacaagaaccugaucuggcuggugaagaagggcaacagcuaccccaagcugagcaagagcuacaucaacgacaagggcaaggaggugcuggugcuguggggcauccaccaccccagcaccagcgccgaccagcagagccuguaccagaacgccgacgccuacguguucgugggcagcagcagauacagcaagaaguucaagcccgagaucgccaucagacccaaggugagagaccaggagggcagaaugaacuacuacuggacccugguggagcccggcgacaagaucaccuucgaggccaccggcaaccugguggugcccagauacgccuucgccauggagagaaacgccggcagcggcaucaucaucagcgacacccccgugcacgacugcaacaccaccugccagacccccaagggcgccaucaacaccagccugcccuuccagaacauccaccccaucaccaucggcaagugccccaaguacgugaagagcaccaagcugagacuggccaccggccugagaaacgugcccagcauccagagcagaggccuguucggcgccaucgccggcuucaucgagggcggcuggaccggcaugguggacggcugguacggcuaccaccaccagaacgagcagggcagcggcuacgccgccgaccugaagagcacccagaacgccaucgacgagaucaccaacaaggugaacagcgugaucgagaagaugaacacccaguucaccgccgugggcaaggaguucaaccaccuggagaagagaaucgagaaccugaacaagaagguggacgacggcuuccuggacaucuggaccuacaacgccgagcugcuggugcugcuggagaacgagagaacccuggacuaccacgacagcaacgugaagagccuguacgagaaggugagaagccagcugaagaacaacgccaaggagaucggcaacggcugcuucgaguucuaccacaagugcgacaacaccugcauggagagcgugaagaacggcaccuacgacuaccccaaguacagcgaggaggccaagcugaacagagaggagaucgacggcgugaagcuggagagcaccagaaucuaccagauccuggccaucuacagcaccguggccagcagccuggugcugguggugagccugggcgccaucagcuucuggaugugcagcaacggcagccugcagugcagaaucugcaucuga

SEQ ID NO: 163091 - RNA, 1701 nt, Artificial Sequence; identical to SEQ ID NO: 162729
  derived and/or modified CDS sequence (opt4) from hemagglutinin__InfluenzaA__ACT36650

SEQ ID NO: 163092 - RNA, 1701 nt, Artificial Sequence; identical to SEQ ID NO: 162729
  derived and/or modified CDS sequence (opt4) from hemagglutinin__InfluenzaA__ACT36652

SEQ ID NO: 163093 - RNA, 1701 nt, Artificial Sequence; identical to SEQ ID NO: 162727
  derived and/or modified CDS sequence (opt4) from hemagglutinin__InfluenzaA__ACT36653

SEQ ID NO: 163094 - RNA, 1701 nt, Artificial Sequence
  derived and/or modified CDS sequence (opt4) from hemagglutinin__InfluenzaA__ACT36655
augaaggccauccugguggugcugcuguacaccuucgccaccgccaacgccgacacccugugcaucggcuaccacgccaacaacagcaccgacaccguggacaccgugcuggagaagaacgugaccgugacccacagcgugaaccugcuggaggacaagcacaacggcaagcugugcaagcugagaggcguggccccccugcaccugggcaagugcaacaucgccggcuggauccugggcaaccccgagugcgagagccugagcaccgccagcagcuggagcuacaucguggagaccagcagcagcggcaacggcaccugcuaccccggcgacuucaucgacuacgaggagcugagagagcagcugagcagcgugagcagcuucgagagauucgagaucuuccccaagaccagcagcuggcccaaccacgacagcaacaagggcgugaccgccgccugcccccacgccggcgccaagagcuucuacaagaaccugaucuggcuggugaagaagggcaacagcuaccccaagcugagcaagagcuacaucaacgacaagggcaaggaggugcuggugcuguggggcauccaccaccccagcaccagcgccgaccagcagagccuguaccagaacgccgacgccuacguguucgugggcagcagcagauacagcaagaaguucaagcccgagaucgccaucagacccaaggugagagaccaggagggcagaaugaacuacuacuggacccugguggagcccggcgacaagaucaccuucgaggccaccggcaaccugguggugcccagauacgccuucgccauggagagaaacgccggcagcggcaucaucaucagcgacacccccgugcacgacugcaacaccaccugccagacccccaagggcgccaucaacaccagccugcccuuccagaacauccaccccaucaccaucggcaagugccccaaguacgugaagagcaccaagcugagacuggccaccggccugagaaacgugcccagcauccagagcagaggccuguucggcgccaucgccggcuucaucgagggcggcuggaccggcaugguggacggcugguacggcuaccaccaccagaacgagcagggcagcggcuacgccgccgaccugaagagcacccagaacgccaucgacgagaucaccaacaaggugaacagcgugaucgagaagaugaacacccaguucaccgccgugggcaaggaguucaaccaccuggagaagagaaucgagaaccugaacaagaagguggacgacggcuuccuggacaucuggaccuacaacgccgagcugcuggugcugcuggagaacgagagaacccuggacuaccacgacagcaacgugaagaaccuguacgagaaggugagaagccagcugaagaacaacgccaaggagaucggcaacggcugcuucgaguucuaccacaagugcgacaacaccugcauggagagcgugaagaacggcaccuacgacuaccccaaguacagcgaggaggccaagcugaacagagaggagaucgacggcgugaagcuggagagcaccagaaucuaccagauccuggccaucuacagcaccguggccagcagccuggugcugguggugagccugggcgccaucagcuucuggaugugcagcaacggcagccugcagugcagaaucugcaucuga

SEQ ID NO: 163095 - RNA, 1701 nt, Artificial Sequence; identical to SEQ ID NO: 162716
  derived and/or modified CDS sequence (opt4) from hemagglutinin__InfluenzaA__ACT36658

SEQ ID NO: 163096 - RNA, 1701 nt, Artificial Sequence; identical to SEQ ID NO: 162755
  derived and/or modified CDS sequence (opt4) from hemagglutinin__InfluenzaA__ACT36659

SEQ ID NO: 163097 - RNA, 1701 nt, Artificial Sequence; identical to SEQ ID NO: 162716
  derived and/or modified CDS sequence (opt4) from hemagglutinin__InfluenzaA__ACT36661

SEQ ID NO: 163098 - RNA, 1701 nt, Artificial Sequence; identical to SEQ ID NO: 162729
  derived and/or modified CDS sequence (opt4) from hemagglutinin__InfluenzaA__ACT36663

SEQ ID NO: 163099 - RNA, 1701 nt, Artificial Sequence; identical to SEQ ID NO: 162729
  derived and/or modified CDS sequence (opt4) from hemagglutinin__InfluenzaA__ACT36666

SEQ ID NO: 163100 - RNA, 1701 nt, Artificial Sequence
  derived and/or modified CDS sequence (opt4) from hemagglutinin__InfluenzaA__ACT52687
augaaggccauccugguggugcugcuguacaccuucgccaccgccaacgccgacacccugugcaucggcuaccacgccaacaacagcaccgacaccguggacaccgugcuggagaagaacgugaccgugacccacagcgugaaccugcuggaggacaagcacaacggcaagcugugcaagcugagaggcguggccccccugcaccugggcaagugcaacaucgccggcuggauccugggcaaccccgagugcgagagccugagcaccgccagcagcuggagcuacaucguggagaccagcagcagcgacaacggcaccugcuaccccggcgacuucaucgacuacgaggagcugagagagcagcugagcagcgugagcagcuucgagagauucgagaucuuccccaagaccagcagcuggcccaaccacgacagcaacaagggcgugaccgccgccugcccccacgccggcgccaagagcuucuacaagaaccugaucuggcuggugaagaagggcaacagcuaccccaagcugagcaagagcuacaucaacgacaagggcaaggaggugcuggugcuguggggcauccaccaccccagcaccagcgccgaccagcagagccuguaccagaacgccgacgccuacguguucgugggcagcagcagauacagcaagaaguucaagcccgagaucgccaucagacccaaggugagaggccaggagggcagaaugaacuacuacuggacccugguggagcccggcgacaagaucaccuucgaggccaccggcaaccugguggugcccagauacgccuucgccauggagagaaacgccggcagcggcaucaucaucagcgacacccccgugcacgacugcaacaccaccugccagacccccaagggcgccaucaacaccagccugcccuuccagaacauccaccccaucaccaucggcaagugccccaaguacgugaagagcaccaagcugagacuggccaccggccugagaaacgugcccagcauccagagcagaggccuguucggcgccaucgccggcuucaucgagggcggcuggaccggcaugguggacggcugguacggcuaccaccaccagaacgagcagggcagcggcuacgccgccgaccugaagagcacccagaacgccaucgacgagaucaccaacaaggugaacagcgugaucgagaagaugaacacccaguucaccgccgugggcaaggaguucaaccaccuggagaagagaaucgagaaccugaacaagaagguggacgacggcuuccuggacaucuggaccuacaacgccgagcugcuggugcugcuggagaacgagagaacccuggacuaccacgacagcaacgugaagaaccuguacgagaaggugagaagccagcugaagaacaacgccaaggagaucggcaacggcugcuucgaguucuaccacaagugcgacaacaccugcauggagagcgugaagaacggcaccuacgacuaccccaaguacagcgaggaggccaagcugaacagagaggagaucgacggcgugaagcuggagagcaccagauucuaccagauccuggccaucuacagcaccguggccagcagccuggugcugguggugagccugggcgccaucagcuucuggaugugcagcaacggcagccugcagugcagaaucugcaucuga

SEQ ID NO: 163101 - RNA, 1701 nt, Artificial Sequence; identical to SEQ ID NO: 162716
  derived and/or modified CDS sequence (opt4) from hemagglutinin__InfluenzaA__ACT54606

SEQ ID NO: 163102 - RNA, 1701 nt, Artificial Sequence; identical to SEQ ID NO: 162729
  derived and/or modified CDS sequence (opt4) from hemagglutinin__InfluenzaA__ACT66146

SEQ ID NO: 163103 - RNA, 1701 nt, Artificial Sequence; identical to SEQ ID NO: 162971
  derived and/or modified CDS sequence (opt4) from hemagglutinin__InfluenzaA__ACT66155

SEQ ID NO: 163104 - RNA, 1701 nt, Artificial Sequence
  derived and/or modified CDS sequence (opt4) from hemagglutinin__InfluenzaA__ACT66162
auggaggccauccugguggugcugcuguacaccuucgccaccgccaacgccgacacccugugcaucggcuaccacgccaacaacagcaccgacaccguggacaccgugcuggagaagaacgugaccgugacccacagcgugaaccugcuggaggacaagcacaacggcaagcugugcaagcugagaggcguggccccccugcaccugggcaagugcaacaucgccggcuggauccugggcaaccccgagugcgagagccugagcaccgccagcagcuggagcuacaucguggagaccagcagcagcgacaacggcaccugcuaccccggcgacuucaucgacuacgaggagcugagagagcaccugagcagcgugagcagcuucgagagauucgagaucuuccccaagaccagcagcuggcccaaccacgacagcaacaagggcgugaccgccgccugcccccacgccggcgccaagagcuucuacaagaaccugaucuggcuggugaagaagggcaacagcuaccccaagcugagcaagagcuacaucaacgacaagggcaaggaggugcuggugcuguggggcauccaccaccccagcaccagcgccgaccagcagagccuguaccagaacgccgacgccuacguguucgugggcagcagcagauacagcaagaaguucaagcccgagaucgccaucagacccaaggugagagaccaggagggcagaaugaacuacuacuggacccugguggagcccggcgacaagaucaccuucgaggccaccggcaaccugguggugcccagauacgccuucgccauggagagaaacgccggcagcggcaucaucaucagcgacacccccgugcacgacugcaacaccaccugccagacccccaagggcgccaucaacaccagccugcccuuccagaacauccaccccaucaccaucggcaagugccccaaguacgugaagagcaccaagcugagacuggccaccggccugagaaacgugcccagcauccagagcagaggccuguucggcgccaucgccggcuucaucgagggcggcuggaccggcaugguggacggcugguacggcuaccaccaccagaacgagcagggcagcggcuacgccgccgaccugaagagcacccagaacgccaucgacgagaucaccaacaaggugaacagcgugaucgagaagaugaacacccaguucaccgccgugggcaaggaguucaaccaccuggagaagagaaucgagaaccugaacaagaagguggacgacggcuuccuggacaucuggaccuacaacgccgagcugcuggugcugcuggagaacgagagaacccuggacuaccacgacagcaacgugaagaaccuguacgagaaggugagaagccagcugaagaacaacgccaaggagaucggcaacggcugcuucgaguucuaccacaagugcgacaacaccugcauggagagcgugaagaacggcaccuacgacuaccccaaguacagcgaggaggccaagcugaacagagaggagaucgacggcgugaagcuggagagcaccagaaucuaccagauccuggccaucuacagcaccguggccagcagccuggugcugguggugagccugggcgccaucagcuucuggaugugcagcaacggcagccugcagugcagaaucugcaucuga

SEQ ID NO: 163105 - RNA, 1701 nt, Artificial Sequence; identical to SEQ ID NO: 162729
  derived and/or modified CDS sequence (opt4) from hemagglutinin__InfluenzaA__ACT67239

SEQ ID NO: 163106 - RNA, 1701 nt, Artificial Sequence; identical to SEQ ID NO: 162729
  derived and/or modified CDS sequence (opt4) from hemagglutinin__InfluenzaA__ACT67255

SEQ ID NO: 163107 - RNA, 1701 nt, Artificial Sequence; identical to SEQ ID NO: 162716
  derived and/or modified CDS sequence (opt4) from hemagglutinin__InfluenzaA__ACT68102

SEQ ID NO: 163108 - RNA, 1701 nt, Artificial Sequence
  derived and/or modified CDS sequence (opt4) from hemagglutinin__InfluenzaA__ACT68103
augaaggccauccugguggugcugcuguacaccuucgccaccgccaacgccgacacccugugcaucggcuaccacgccaacaacagcaccgacaccguggacaccgugcuggagaagaacgugaccgugacccacagcgugaaccugcuggaggacaagcacaacggcaagcugugcaagcugagaggcguggccccccugcaccugggcaagugcaacaucgccggcuggauccugggcaaccccgagugcgagagccugagcaccgccagcagcuggagcuacaucguggagaccagcagcagcgacaacggcaccugcuaccccggcgacuucaucgacuacgaggagcugagagagcagcugagcagcgugagcagcuucgagagauucgagaucuuccccaagaccagcagcuggcccaaccacgacagcaacaagggcgugaccgccgccugcccccacgccggcgccaagagcuucuacaagaaccugaucuggcuggugaagaagggcaacagcuaccccaagcugagcaagagcuacaucaacgacaagggcaaggaggugcuggugcuguggggcauccaccaccccagcaccagcgccgaccagcagagccuguaccagaacgccgacgccuacguguucgugggcagcagcagauacagcaagaaguucaagcccgagaucgccaucagacccaaggugagagaccaggagggcagaaugaacuacuacuggacccugguggagcccggcgacaagaucaccuucgaggccaccggcaaccugguggugcccagauacgccuucgccauggagagaaacgccggcagcggcaucaucaucagcgacacccccgugcacgacugcaacaccaccugccagacccugaagggcgccaucaacaccagccugcccuuccagaacauccaccccaucaccaucggcaagugccccaaguacgugaagagcaccaagcugagacuggccaccggccugagaaacgugcccagcauccagagcagaggccuguucggcgccaucgccggcuucaucgagggcggcuggaccggcaugguggacggcugguacggcuaccaccaccagaacgagcagggcagcggcuacgccgccgaccugaagagcacccagaacgccaucgacgagaucaccaacaaggugaacagcgugaucgagaagaugaacacccaguucaccgccgugggcaaggaguucaaccaccuggagaagagaaucgagaaccugaacaagaagguggacgacggcuuccuggacaucuggaccuacaacgccgagcugcuggugcugcuggagaacgagagaacccuggacuaccacgacagcaacgugaagaaccuguacgagaaggugagaagccagcugaagaacaacgccaaggagaucggcaacggcugcuucgaguucuaccacaagugcgacaacaccugcauggagagcgugaagaacggcaccuacgacuaccccaaguacagcgaggaggccaagcugaacagagaggagaucgacggcgugaagcuggagagcaccagaaucuaccagauccuggccaucuacagcaccguggccagcagccuggugcugguggugagccugggcgccaucagcuucuggaugugcagcaacggcagccugcagugcagaaucugcaucuga

SEQ ID NO: 163109 - RNA, 1701 nt, Artificial Sequence; identical to SEQ ID NO: 162716
  derived and/or modified CDS sequence (opt4) from hemagglutinin__InfluenzaA__ACT68104

SEQ ID NO: 163110 - RNA, 1701 nt, Artificial Sequence
  derived and/or modified CDS sequence (opt4) from hemagglutinin__InfluenzaA__ACT68105
augaaggccauccugguggugcugcuguacaccuucgccaccgccaacgccgacacccugugcaucggcuaccacgccaacaacagcaccgacaccguggacaccgugcuggagaagaacgugaccgugacccacagcgugaaccugcuggaggacaagcacaacggcaagcugugcaagcugagaggcguggccccccugcaccugggcaagugcaacaucgccggcuggauccugggcaaccccgagugcgagagccugagcaccgccagcagcuggagcuacaucguggagaccagcagcagcgacaacggcaccugcuaccccggcgacuucaucgacuacgaggagcugagagagcagcugagcagcgugagcagcuucgagagauucgagaucuuccccaagaccagcagcuggcccaaccacgacagcaacaagggcgugaccgccgccugcccccacgccggcgccaagagcuucuacaagaaccugaucuggcuggugaagaagggcaacagcuaccccaagcugagcaagagcuacaucaacgacaagggcaaggaggugcuggugcuguggggcauccaccaccccagcaccagcgccgaccagcagagccuguaccagaacgccgacgccuacguguucgugggcagcagcaaguacagcaagaaguucaagcccgagaucgccaucagacccaaggugagagaccaggagggcagaaugaacuacuacuggacccugguggagcccggcgacaagaucaccuucgaggccaccggcaaccugguggugcccagauacgccuucgccauggagagaaacgccggcagcggcaucaucaucagcgacacccccgugcacgacugcaacaccaccugccagacccccaagggcgccaucaacaccagccugcccuuccagaacauccaccccaucaccaucggcaagugccccaaguacgugaagagcaccaagcugagacuggccaccggccugagaaacgugcccagcauccagagcagaggccuguucggcgccaucgccggcuucaucgagggcggcuggaccggcaugguggacggcugguacggcuaccaccaccagaacgagcagggcagcggcuacgccgccgaccugaagagcacccagaacgccaucgacgagaucaccaacaaggugaacagcgugaucgagaagaugaacacccaguucaccgccgugggcaaggaguucaaccaccuggagaagagaaucgagaaccugaacaagaagguggacgacggcuuccuggacaucuggaccuacaacgccgagcugcuggugcugcuggagaacgagagaacccuggacuaccacgacagcaacgugaagaaccuguacgagaaggugagaagccagcugaagaacaacgccaaggagaucggcaacggcugcuucgaguucuaccacaagugcgacaacaccugcauggagagcgugaagaacggcaccuacgacuaccccaaguacagcggcgaggccaagcugaacagagaggagaucgacggcgugaagcuggagagcaccagaaucuaccagauccuggccaucuacagcaccguggccagcagccuggugcugguggugagccugggcgccaucagcuucuggaugugcagcaacggcagccugcagugcagaaucugcaucuga

SEQ ID NO: 163111 - RNA, 1701 nt, Artificial Sequence; identical to SEQ ID NO: 162716
  derived and/or modified CDS sequence (opt4) from hemagglutinin__InfluenzaA__ACT68106

SEQ ID NO: 163112 - RNA, 1701 nt, Artificial Sequence; identical to SEQ ID NO: 162716
  derived and/or modified CDS sequence (opt4) from hemagglutinin__InfluenzaA__ACT68107

SEQ ID NO: 163113 - RNA, 1701 nt, Artificial Sequence; identical to SEQ ID NO: 162909
  derived and/or modified CDS sequence (opt4) from hemagglutinin__InfluenzaA__ACT68108

SEQ ID NO: 163114 - RNA, 1701 nt, Artificial Sequence
  derived and/or modified CDS sequence (opt4) from hemagglutinin__InfluenzaA__ACT68109
augaaggccauccugguggugcugcuguacaccuucgccaccgccaacaccgacacccugugcaucggcuaccacgccaacaacagcaccgacaccguggacaccgugcuggagaagaacgugaccgugacccacagcgugaaccugcuggaggacaagcacaacggcaagcugugcaagcugagaggcguggccccccugcaccugggcaagugcaacaucgccggcuggauccugggcaaccccgagugcgagagccugagcaccgccagcagcuggagcuacaucguggagaccagcagcagcgacaacggcaccugcuaccccggcgacuucaucgacuacgaggagcugagagagcagcugagcagcgugagcagcuucgagagauucgagaucuuccccaagaccagcagcuggcccaaccacgacagcaacaagggcgugaccgccgccugcccccacgccggcgccaagagcuucuacaagaaccugaucuggcuggugaagaagggcaacagcuaccccaagcugagcaagagcuacaucaacgacaagggcaaggaggugcuggugcuguggggcauccaccaccccagcaccagcgccgaccagcagagccuguaccagaacgccgacgccuacguguucgugggcaccagcagauacagcaagaaguucaagcccgagaucgccaucagacccaaggugagagaccaggagggcagaaugaacuacuacuggacccugguggagcccggcgacaagaucaccuucgaggccaccggcaaccugguggugcccagauacgccuucgccauggagagaaacgccggcagcggcaucaucaucagcgacacccccgugcacgacugcaacaccaccugccagacccccaagggcgccaucaacaccagccugcccuuccagaacauccaccccaucaccaucggcaagugccccaaguacgugaagagcaccaagcugagacuggccaccggccugagaaacgugcccagcauccagagcagaggccuguucggcgccaucgccggcuucaucgagggcggcuggaccggcaugguggacggcugguacggcuaccaccaccagaacgagcagggcagcggcuacgccgccgaccugaagagcacccagaacgccaucgacgagaucaccaacaaggugaacagcgugaucgagaagaugaacacccaguucaccgccgugggcaaggaguucaaccaccuggagaagagaaucgagaaccugaacaagaagguggacgacggcuuccuggacaucuggaccuacaacgccgagcugcuggugcugcuggagaacgagagaacccuggacuaccacgacagcaacgugaagaaccuguacgagaaggugagaagccagcugaagaacaacgccaaggagaucggcaacggcugcuucgaguucuaccacaagugcgacaacaccugcauggagagcgugaagaacggcaccuacgacuaccccaaguacagcgaggaggccaagcugaacagagaggagaucgacggcgugaagcuggagagcaccagaaucuaccagauccuggccaucuacagcaccguggccagcagccuggugcugguggugagccugggcgccaucagcuucuggaugugcagcaacggcagccugcagugcagaaucugcaucuga

SEQ ID NO: 163115 - RNA, 1701 nt, Artificial Sequence; identical to SEQ ID NO: 162716
  derived and/or modified CDS sequence (opt4) from hemagglutinin__InfluenzaA__ACT68110

SEQ ID NO: 163116 - RNA, 1701 nt, Artificial Sequence; identical to SEQ ID NO: 162716
  derived and/or modified CDS sequence (opt4) from hemagglutinin__InfluenzaA__ACT68112

SEQ ID NO: 163117 - RNA, 1701 nt, Artificial Sequence; identical to SEQ ID NO: 162716
  derived and/or modified CDS sequence (opt4) from hemagglutinin__InfluenzaA__ACT68113

SEQ ID NO: 163118 - RNA, 1701 nt, Artificial Sequence; identical to SEQ ID NO: 162716
  derived and/or modified CDS sequence (opt4) from hemagglutinin__InfluenzaA__ACT68115

SEQ ID NO: 163119 - RNA, 1701 nt, Artificial Sequence; identical to SEQ ID NO: 162716
  derived and/or modified CDS sequence (opt4) from hemagglutinin__InfluenzaA__ACT68119

SEQ ID NO: 163120 - RNA, 1701 nt, Artificial Sequence
  derived and/or modified CDS sequence (opt4) from hemagglutinin__InfluenzaA__ACT79133
augaaggccauccugguggugcugcuguacaccuucgccaccgccaacgccgacacccugugcaucggcuaccacgccaacaacagcaccgacaccguggacaccgugcuggagaagaacgugaccgugacccacagcgugaaccugcuggaggacaagcacaacggcaagcugugcaagcugagaggcguggccccccugcaccugggcaagugcaacaucgccggcuggauccugggcaaccccgagugcgagagccugagcaccgccagcagcuggagcuacaucguggagaccagcagcagcgacaacggcaccugcuaccccggcgacuucaucgacuacgaggagcugagagagcagcugagcagcgugagcagcuucgagagauucgagaucuuccccaagaccagcagcuggcccaaccacgacagcaacaagggcgugaccgccgccugcccccacgccggcgccaagagcuucuacaagaaccugaucuggcuggugaagaagggcaacagcuaccccaagcugagcaagagcuacaucaacgacaagggcaaggaggugcuggugcuguggggcauccaccaccccagcaccagcgccgaccagcagagccuguaccagaacgccgacgccuacguguucgugggcaccagcagauacagcaagaaguucaagcccgagaucgccaucagacccaaggugagagaccaggagggcagaaugaacuacuacuggaagcugguggagcccggcgacaagaucaccuucgaggccaccggcaaccugguggugcccagauacgccuucgccauggagagaaacgccggcagcggcaucaucaucagcgacacccccgugcacgacugcaacaccaccugccagacccccaagggcgccaucaacaccagccugcccuuccagaacauccaccccaucaccaucggcaagugccccaaguacgugaagagcaccaagcugagacuggccaccggccugagaaacgugcccagcauccagagcagaggccuguucggcgccaucgccggcuucaucgagggcggcuggaccggcaugguggacggcugguacggcuaccaccaccagaacgagcagggcagcggcuacgccgccgaccugaagagcacccagaacgccaucgacgagaucaccaacaaggugaacagcgugaucgagaagaugaacacccaguucaccgccgugggcaaggaguucaaccaccuggagaagagaaucgagaaccugaacaagaagguggacgacggcuuccuggacaucuggaccuacaacgccgagcugcuggugcugcuggagaacgagagaacccuggacuaccacgacagcaacgugaagaaccuguacgagaaggugagaagccagcugaagaacaacgccaaggagaucggcaacggcugcuucgaguucuaccacaagugcgacaacaccugcauggagagcgugaagaacggcaccuacgacuaccccaaguacagcgaggaggccaagcugaacagagaggagaucgacggcgugaagcuggagagcaccagaaucuaccagauccuggccaucuacagcaccguggccagcagccuggugcugguggugagccugggcgccaucagcuucuggaugugcagcaacggcagccugcagugcagaaucugcaucuga

SEQ ID NO: 163121 - RNA, 1701 nt, Artificial Sequence; identical to SEQ ID NO: 162716
  derived and/or modified CDS sequence (opt4) from hemagglutinin__InfluenzaA__ACT79143

SEQ ID NO: 163122 - RNA, 1701 nt, Artificial Sequence; identical to SEQ ID NO: 162755
  derived and/or modified CDS sequence (opt4) from hemagglutinin__InfluenzaA__ACT79153

SEQ ID NO: 163123 - RNA, 1701 nt, Artificial Sequence; identical to SEQ ID NO: 163042
  derived and/or modified CDS sequence (opt4) from hemagglutinin__InfluenzaA__ACT79163

SEQ ID NO: 163124 - RNA, 1701 nt, Artificial Sequence; identical to SEQ ID NO: 163042
  derived and/or modified CDS sequence (opt4) from hemagglutinin__InfluenzaA__ACT79173

SEQ ID NO: 163125 - RNA, 1701 nt, Artificial Sequence
  derived and/or modified CDS sequence (opt4) from hemagglutinin__InfluenzaA__ACT79625
augaaggccauccugguggugcugcuguacaccuucgccaccgccaacgccgacacccugugcaucggcuaccacgccaacaacagcaccgacaccguggacaccgugcuggagaagaacgugaccgugacccacagcgugaaccugcuggaggacaagcacaacggcaagcugugcaagcugagaggcguggccccccugcaccugggcaagugcaacaucgccggcuggauccugggcaaccccgagugcgagagccugagcaccgccagcagcuggagcuacaucguggagaccagcagcagcgacaacggcaccugcuaccccggcgacuucaucgacuacgaggagcugagagagcagcugagcagcgugagcagcuucgagagauucgagaucuuccccaagaccagcagcuggcccaaccacgacagcaacaagggcgugaccaccgccugcccccacgccggcgccaagagcuucuacaagaaccugaucuggcuggugaagaagggcaacagcuaccccaagcugagcaagagcuacaucaacgacaagggcaaggaggugcuggugcuguggggcauccaccaccccagcaccagcgccgaccagcagagccuguaccagaacgccgacgccuacguguucgugggcaccagcagauacagcaagaaguucaagcccgagaucgccaucagacccaaggugagagaccaggagggcagaaugaacuacuacuggacccugguggagcccggcgacaagaucaccuucgaggccaccggcaaccugguggugcccagauacgccuucgccauggagagaaacgccggcagcggcaucaucaucagcgacacccccgugcacgacugcaacaccaccugccagacccccaagggcgccaucaacaccagccugcccuuccagaacauccaccccaucaccaucggcaagugccccaaguacgugaagagcaccaagcugagacuggccaccggccugagaaacgugcccagcauccagagcagaggccuguucggcgccaucgccggcuucaucgagggcggcuggaccggcaugguggacggcugguacggcuaccaccaccagaacgagcagggcagcggcuacgccgccgaccugaagagcacccagaacgccaucgacgagaucaccaacaaggugaacagcgugaucgagaagaugaacacccaguucaccgccgugggcaaggaguucaaccaccuggagaagagaaucgagaaccugaacaagaagaucgacgacggcuuccuggacaucuggaccuacaacgccgagcugcuggugcugcugaagaacgagagaacccuggacuaccacgacagcaacgugaagaaccuguacgagaaggugagaagccagcugaagaacaacgccaaggagaucggcaacggcugcuucgaguucuaccacaagugcgacaacaccugcauggagagcgugaagaacggcaccuacgacuaccccaaguacagcgaggaggccaagcugaacagagaggagaucgacggcgugaagcuggagagcaccagaaucuaccagauccuggccaucuacagcaccguggccagcagccuggugcugguggugagccugggcgccaucagcuucuggaugugcagcaacggcagccugcagugcagaaucugcaucuga

SEQ ID NO: 163126 - RNA, 1701 nt, Artificial Sequence; identical to SEQ ID NO: 162716
  derived and/or modified CDS sequence (opt4) from hemagglutinin__InfluenzaA__ACT79627

SEQ ID NO: 163127 - RNA, 1701 nt, Artificial Sequence
  derived and/or modified CDS sequence (opt4) from hemagglutinin__InfluenzaA__ACT82512
augaaggccauccugguggugcugcuguacaccuucgccaccgccaacgccgacacccugugcaucggcuaccacgccaacaacagcaccgacaccguggacaccgugcuggagaagaacgugaccgugacccacagcgugaaccugcuggaggacaagcacaacggcaagcugugcaagcugagaggcguggccccccugcaccugggcaagugcaacaucgccggcuggauccugggcaaccccgagugcgagagccugagcaccgccagcagcuggagcuacaucguggagaccagcagcagcgacaacggcaccugcuaccccggcgacuucaucgacuacgaggagcugagagagcagcugagcagcgugagcagcuucgagagauucgagaucuuccccaagaccagcagcuggcccaaccacgacagcaacaagggcgugaccgccgccugcccccacgccggcgccaagagcuucuacaagaaccugaucuggcuggugaagaagggcaacagcuaccccaagcugagcaagagcuacaucaacgacaagggcaaggaggugcuggugcuguggggcauccaccaccccagcaccagcgccgaccagcagagccuguaccagaacgccgacgccuacguguucgugggcaccagcagauacagcaagaaguucaagcccgagaucgccaucagacccaaggugagagaccaggagggcagaaugaacuacuacuggacccugguggagcccggcgacaagaucaccuucgaggccaccggcaaccugguggugcccagauacgccuucgccauggagagaaacgccggcagcggcaucaucaucagcgacacccccgugcacgacugcaacaccaccugccagacccccaagggcgccaucaacaccagccugcccuuccagaacauccaccccaucaccaucggcaagugccccaaguacgugaagagcaccaagcugagacuggccaccggccugagaaacgugcccagcauccagagcagaggccuguucggcgccaucgccggcuucaucgagggcggcuggaccggcaugguggacggcugguacggcuaccaccaccagaacgagcagggcagcggcuacgccgccgaccugaagagcacccagaacgccaucgacgagaucaccaacaaggugaacagcgugaucgagaagaugaacacccaguucaccgccgugggcaaggaguucaaccaccuggagaagagaaucgagaaccugaacaagaagguggacgacggcuuccuggacaucuggaccuacaacgccgagcugcuggugcugcuggagaacgagagaacccuggacuaccacgacagcaacgugaagaaccuguacgagaaggugagaagccaguucaagaacaacgccaaggagaucggcaacggcugcuucgaguucuaccacaagugcgacaacaccugcauggagagcgugaagaacggcaccuacgacuaccccaaguacagcgaggaggccaagcugaacagagaggagaucgacggcgugaagcuggagagcaccagaaucuaccagauccuggccaucuacagcaccguggccagcagccuggugcugguggugagccugggcgccaucagcuucuggaugugcagcaacggcagccugcagugcagaaucugcaucuga

SEQ ID NO: 163128 - RNA, 1701 nt, Artificial Sequence; identical to SEQ ID NO: 162729
  derived and/or modified CDS sequence (opt4) from hemagglutinin__InfluenzaA__ACT82513

SEQ ID NO: 163129 - RNA, 1701 nt, Artificial Sequence
  derived and/or modified CDS sequence (opt4) from hemagglutinin__InfluenzaA__ACT82514
augaaggccauccugguggugcugcuguacaccuucgccaccgccaacgccgacacccugugcaucggcuaccacgccaacaacagcaccgacaccguggacaccgugcuggagaagaacgugaccgugacccacagcgugaaccugcuggaggacaagcacaacggcaagcugugcaagcugagaggcguggccccccugcaccugggcaagugcaacaucgccggcuggauccugggcaaccccgagugcgagagccugagcaccgccagcagcuggagcuacaucguggagaccagcagcagcgacaacggcaccugcuaccccggcgacuucaucgacuacgaggagcugagagagcagcugagcagcgugagcagcuucgagagauucgagaucuuccccaagaccagcagcuggcccaaccacgacagcaacaagggcgugaccgccgccugcccccacgccggcgccaagagcuucuacaagaaccugaucuggcuggugaagaagggcaacagcuaccccaagcugagcaagagcuacaucaacgacaagggcaaggaggugcuggugcuguggggcauccaccaccccagcaccagcgccgaccagcagagccuguaccagaacgccgacgccuacguguucgugggcaccagcagauacagcaagaaguucaagcccgagaucgccaucagacccaaggugagagaccaggagggcagaaugaacuacuacuggacccugguggagcccggcgacaagaucaccuucgaggccaccggcaaccugguggugcccagauacgccuucgccauggagagaaacgccggcagcggcaucaucaucagcaacacccccgugcacgacugcaacaccaccugccagacccccaagggcagcaucaacaccagccugcccuuccagaacauccaccccaucaccaucggcaagugccccaaguacgugaagagcaccaagcugagacuggccaccggccugagaaacgugcccagcauccagagcagaggccuguucggcgccaucgccggcuucaucgagggcggcuggaccggcaugguggacggcugguacggcuaccaccaccagaacgagcagggcagcggcuacgccgccgaccugaagagcacccagaacgccaucgacgagaucaccaacaaggugaacagcgugaucgagaagaugaacacccaguucaccgccgugggcaaggaguucaaccaccuggagaagagaaucgagaaccugaacaagaagguggacgacggcuuccuggacaucuggaccuacaacgccgagcugcuggugcugcuggagaacgagagaacccuggacuaccacgacagcaacgugaagaaccuguacgagaaggugagaagccagcugaagaacaacgccaaggagaucggcaacggcugcuucgaguucuaccacaagugcgacaacaccugcauggagagcgugaagaacggcaccuacgacuaccccaaguacagcgaggaggccaagcugaacagagaggagaucgacggcgugaagcuggagagcaccagaaucuaccagauccuggccaucuacagcaccguggccagcagccuggugcugguggugagccugggcgccaucagcuucuggaugugcagcaacggcagccugcagugcagaaucugcaucuga

SEQ ID NO: 163130 - RNA, 1701 nt, Artificial Sequence; identical to SEQ ID NO: 162729
  derived and/or modified CDS sequence (opt4) from hemagglutinin__InfluenzaA__ACT82515

SEQ ID NO: 163131 - RNA, 1701 nt, Artificial Sequence
  derived and/or modified CDS sequence (opt4) from hemagglutinin__InfluenzaA__ACT82516
augaaggccauccugguggugcugcuguacaccuucgccaccgccaacgccgacacccugugcaucggcuaccacgccaacaacagcaccgacaccguggacaccgugcuggagaagaacgugaccgugacccacagcgugaaccugcuggaggacaagcacaacggcaagcugugcaagcugagaggcguggccccccugcaccugggcaagugcaacaucgccggcuggauccugggcaaccccgagugcgagagccugagcaccgccagcagcuggagcuacaucguggagaccagcagcagcgacaacggcaccugcuaccccggcgacuucaucgacuacgaggagcugagagagcagcugagcagcgugagcagcuucgagagauucgagaucuuccccaagaccagcagcuggcccaaccacgacagcaacaagggcgugaccgccgccugcccccacgccggcgccaagagcuucuacaagaaccugaucuggcuggugaagaagggcaacagcuaccccaagcugagcaagagcuacaucaacgacaagggcaaggaggugcuggugcuguggggcauccaccaccccagcaccagcgccgaccagcagagccuguaccagaacgccgacgccuacguguucgugggcagcagcagauacagcaagaaguucaagcccgagaucgccaucagacccaaggugagagaccaggagggcagaaugaacuacuacuggacccugguggagcccggcgacaagaucaccuucgaggccaccggcaaccugauggugcccagauacgccuucgccauggagagaaacgccggcagcggcaucaucaucagcgacacccccgugcacgacugcaacaccaccugccagacccccaagggcgccaucaacaccagccugcccuuccacaacauccaccccaucaccaucggcaagugccccaaguacgugaagagcaccaagcugagacuggccaccggccugagaaacgugcccagcauccagagcagaggccuguucggcgccaucgccggcuucaucgagggcggcuggaccggcaugguggacggcugguacggcuaccaccaccagaacgagcagggcagcggcuacgccgccgaccugaagagcacccagaacgccaucgacgagaucaccaacaaggugaacagcgugaucgagaagaugaacacccaguucaccgccgugggcaaggaguucaaccaccuggagaagagaaucgagaaccugaacaagaagguggacgacggcuuccuggacaucuggaccuacaacgccgagcugcuggugcugcuggagaacgagagaacccuggacuaccacgacagcaacgugaagaaccuguacgagaaggugagaagccagcugaagaacaacgccaaggagaucggcaacggcugcuucgaguucuaccacaagugcgacaacaccugcauggagagcgugaagaacggcaccuacgacuaccccaaguacagcgaggaggccaagcugaacagagaggagaucgacggcgugaagcuggagagcaccagaaucuaccagauccuggccaucuacagcaccguggccagcagccuggugcugguggugagccugggcgccaucagcuucuggaugugcagcaacggcagccugcagugcagaaucugcaucuga

SEQ ID NO: 163132 - RNA, 1701 nt, Artificial Sequence; identical to SEQ ID NO: 162971
  derived and/or modified CDS sequence (opt4) from hemagglutinin__InfluenzaA__ACT83795

SEQ ID NO: 163133 - RNA, 1701 nt, Artificial Sequence; identical to SEQ ID NO: 162971
  derived and/or modified CDS sequence (opt4) from hemagglutinin__InfluenzaA__ACT83805

SEQ ID NO: 163134 - RNA, 1701 nt, Artificial Sequence; identical to SEQ ID NO: 162729
  derived and/or modified CDS sequence (opt4) from hemagglutinin__InfluenzaA__ACT83815

SEQ ID NO: 163135 - RNA, 1701 nt, Artificial Sequence; identical to SEQ ID NO: 162729
  derived and/or modified CDS sequence (opt4) from hemagglutinin__InfluenzaA__ACT83825

SEQ ID NO: 163136 - RNA, 1701 nt, Artificial Sequence; identical to SEQ ID NO: 162729
  derived and/or modified CDS sequence (opt4) from hemagglutinin__InfluenzaA__ACT83835

SEQ ID NO: 163137 - RNA, 1701 nt, Artificial Sequence; identical to SEQ ID NO: 162822
  derived and/or modified CDS sequence (opt4) from hemagglutinin__InfluenzaA__ACT83845

SEQ ID NO: 163138 - RNA, 1701 nt, Artificial Sequence; identical to SEQ ID NO: 162716
  derived and/or modified CDS sequence (opt4) from hemagglutinin__InfluenzaA__ACT83855

SEQ ID NO: 163139 - RNA, 1701 nt, Artificial Sequence; identical to SEQ ID NO: 162729
  derived and/or modified CDS sequence (opt4) from hemagglutinin__InfluenzaA__ACT83865

SEQ ID NO: 163140 - RNA, 1701 nt, Artificial Sequence; identical to SEQ ID NO: 162971
  derived and/or modified CDS sequence (opt4) from hemagglutinin__InfluenzaA__ACT83875

SEQ ID NO: 163141 - RNA, 1701 nt, Artificial Sequence; identical to SEQ ID NO: 162971
  derived and/or modified CDS sequence (opt4) from hemagglutinin__InfluenzaA__ACT85999

SEQ ID NO: 163142 - RNA, 1701 nt, Artificial Sequence; identical to SEQ ID NO: 162971
  derived and/or modified CDS sequence (opt4) from hemagglutinin__InfluenzaA__ACT86009

SEQ ID NO: 163143 - RNA, 1701 nt, Artificial Sequence; identical to SEQ ID NO: 162729
  derived and/or modified CDS sequence (opt4) from hemagglutinin__InfluenzaA__ACT86019

SEQ ID NO: 163144 - RNA, 1701 nt, Artificial Sequence; identical to SEQ ID NO: 162822
  derived and/or modified CDS sequence (opt4) from hemagglutinin__InfluenzaA__ACT86029

SEQ ID NO: 163145 - RNA, 1701 nt, Artificial Sequence; identical to SEQ ID NO: 162729
  derived and/or modified CDS sequence (opt4) from hemagglutinin__InfluenzaA__ACT86039

SEQ ID NO: 163146 - RNA, 1701 nt, Artificial Sequence; identical to SEQ ID NO: 162729
  derived and/or modified CDS sequence (opt4) from hemagglutinin__InfluenzaA__ACT86059

SEQ ID NO: 163147 - RNA, 1701 nt, Artificial Sequence; identical to SEQ ID NO: 162729
  derived and/or modified CDS sequence (opt4) from hemagglutinin__InfluenzaA__ACT86069

SEQ ID NO: 163148 - RNA, 1701 nt, Artificial Sequence; identical to SEQ ID NO: 162729
  derived and/or modified CDS sequence (opt4) from hemagglutinin__InfluenzaA__ACT86079

SEQ ID NO: 163149 - RNA, 1701 nt, Artificial Sequence; identical to SEQ ID NO: 162729
  derived and/or modified CDS sequence (opt4) from hemagglutinin__InfluenzaA__ACT86089

SEQ ID NO: 163150 - RNA, 1701 nt, Artificial Sequence; identical to SEQ ID NO: 162729
  derived and/or modified CDS sequence (opt4) from hemagglutinin__InfluenzaA__ACT86099

SEQ ID NO: 163151 - RNA, 1701 nt, Artificial Sequence; identical to SEQ ID NO: 162971
  derived and/or modified CDS sequence (opt4) from hemagglutinin__InfluenzaA__ACT86109

SEQ ID NO: 163152 - RNA, 1701 nt, Artificial Sequence; identical to SEQ ID NO: 162729
  derived and/or modified CDS sequence (opt4) from hemagglutinin__InfluenzaA__ACT86119

SEQ ID NO: 163153 - RNA, 1701 nt, Artificial Sequence; identical to SEQ ID NO: 162971
  derived and/or modified CDS sequence (opt4) from hemagglutinin__InfluenzaA__ACT86129

SEQ ID NO: 163154 - RNA, 1701 nt, Artificial Sequence; identical to SEQ ID NO: 162729
  derived and/or modified CDS sequence (opt4) from hemagglutinin__InfluenzaA__ACT86139

SEQ ID NO: 163155 - RNA, 1701 nt, Artificial Sequence
  derived and/or modified CDS sequence (opt4) from hemagglutinin__InfluenzaA__ACU00932
augaaggccauccugguggugcugcuguacaccuucgccaccgccaacgccgacacccugugcaucggcuaccacgccaacaacagcaccgacaccguggacaccgugcuggagaagaacgugaccgugacccacagcgugaaccugcuggaggacaagcacaacggcaagcugugcaagcugagaggcguggccccccugcaccugggcaagugcaacaucgccggcuggauccugggcaaccccgagugcgagagccugagcaccgccagcagcuggagcuacaucguggagaccagcagcagcgacaacggcaccugcuaccccggcgacuucaucgacuacgaggagcugagagagcagcugagcagcgugagcagcuucgagagauucgagaucuuccccaagaccagcagcuggcccaaccacgacagcaacaagggcgugaccgccgccugcccccacgccggcgccaagagcuucuacaagaaccugaucuggcuggugaagaagggcaacagcuaccccaagcugagcaagagcuacaucaacgacaagggcaaggaggugcuggugcuguggggcauccaccaccccagcaccagcgccgaccagcagagccuguaccagaacgccgacgccuacguguucgugggcaccagcagauacagcaagaacuucaagcccgagaucgccaucagacccaaggugagagaccaggagggcagaaugaacuacuacuggacccugguggagcccggcgacaagaucaccuucgaggccaccggcaaccugguggugcccagauacgccuucgccauggagagaaacgccggcagcggcaucaucaucagcgacacccccgugcacgacugcaacaccaccugccagacccccaagggcgccaucaacaccagccugcccuuccagaacauccaccccaucaccaucggcaagugccccaaguacgugaagagcaccaagcugagacuggccaccggccugagaaacgugcccagcauccagagcagaggccuguucggcgccaucgccggcuucaucgagggcggcuggaccggcaugguggacggcugguacggcuaccaccaccagaacgagcagggcagcggcuacgccgccgaccugaagagcacccagaacgccaucgacgagaucaccaacaaggugaacagcgugaucgagaagaugaacacccaguucaccgccgugggcaaggaguucaaccaccuggagaagagaaucgagaaccugaacaagaagguggacgacggcuuccuggacaucuggaccuacaacgccgagcugcuggugcugcuggagaacgagagaacccuggacuaccacgacagcaacgugaagaaccuguacgagaaggugagaagccagcugaagaacaacgccaaggagaucggcaacggcugcuucgaguucuaccacaagugcgacaacaccugcauggagagcgugaagaacggcaccuacgacuaccccaaguacagcgaggaggccaagcugaacagagaggagaucgacggcgugaagcuggagagcaccagaaucuaccagauccuggccaucuacagcaccguggccagcagccuggugcugguggugagccugggcgccaucagcuucuggaugugcagcaacggcagccugcagugcagaaucugcaucuga

SEQ ID NO: 163156 - RNA, 1701 nt, Artificial Sequence; identical to SEQ ID NO: 162729
  derived and/or modified CDS sequence (opt4) from hemagglutinin__InfluenzaA__ACU00942

SEQ ID NO: 163157 - RNA, 1701 nt, Artificial Sequence; identical to SEQ ID NO: 162729
  derived and/or modified CDS sequence (opt4) from hemagglutinin__InfluenzaA__ACU00952

SEQ ID NO: 163158 - RNA, 1701 nt, Artificial Sequence
  derived and/or modified CDS sequence (opt4) from hemagglutinin__InfluenzaA__ACU12494
augaagaccaucaucgcccugagcuacauccugugccugguguucgcccagaagcugcccggcaacgacaacagcaccgccacccugugccugggccaccacgccgugcccaacggcacccuggugaagaccaucaccaacgaccagaucgaggugaccaacgccaccgagcuggugcagagcagcagcaccggcagaaucugcgacagcccccacagaauccuggacggcaagaacugcacccugaucgacgcccugcugggcgacccccacugcgacggcuuccagaacaaggagugggaccuguucguggagagaagcaaggccuacagcaacugcuaccccuacgacgugcccgacuacgccagccugagaagccugguggccagcagcggcacccuggaguucaucaacgaggacuucaacuggaccggcguggcccagagcggcgagagcuacgccugcaagagaggcagcgugaagagcuucuucagcagacugaacuggcugcacgagagcgacuacaaguaccccgcccugaacgugaccaugcccaacaacggcaaguucgacaagcuguacaucuggggcgugcaccaccccaucaccgacagagagcagaccagccuguacgugagagccagcggcagagugaccgugagcaccaagagaagccagcagaccgugauccccaacaucggcagcagacccugggugagaggccugagcagcagaaucagcaucuacuggaccaucgugaagcccggcgacauccugcugaucaacagcaccggcaaccugaucgcccccagaggcuacuucaagaucagaaccggcaagagcagcaucaugagaagcgacgcccccaucggcaccugcagcagcgagugcaucacccccaacggcagcauccccaacgacaagcccuuccagaacgugaacagaaucaccuacggcgccugccccagauacgugaagcagaacacccugaagcuggccaccggcaugagaaacgugcccgagaagcagaccagaggcaucuucggcgccaucgccggcuucaucgagaacggcugggagggcaugguggacggcugguacggcuucagacaccagaacagcgagggcaccggccaggccgccgaccugaagagcacccaggccgccaucgaccagaucaacggcaagcugaacagacugaucgagaagaccaacgagaaguuccaccagaucgagaaggaguucagcgagguggagggcagaauccaggaccuggagaaguacguggaggacaccaagaucgaccuguggagcuacaacgccgagcugcugguggcccuggagaaccagcacaccaucgaccugaccgacagcgagaugaacaagcuguucgagaagaccagaaagcagcugagagagaacgccgaggacaugggcaacggcugcuucaagaucuaccacaagugcgacaacgccugcaucggcagcaucagaaacggcaccuacgaccacgacguguacagagacgaggcccugaacaacagauuccagaucaagggcguggagcugaagagcggcuacaaggacuggauccuguggaucagcuucgccaucagcugcuuccugcugugcguggugcugcugggcuucaucaugugggccugccagaagggcaacaucagaugcaacaucugcaucuga

SEQ ID NO: 163159 - RNA, 1698 nt, Artificial Sequence; identical to SEQ ID NO: 162841
  derived and/or modified CDS sequence (opt4) from hemagglutinin__InfluenzaA__ACU12505

SEQ ID NO: 163160 - RNA, 1701 nt, Artificial Sequence
  derived and/or modified CDS sequence (opt4) from hemagglutinin__InfluenzaA__ACU12516
augaagaccaucaucgcccugagcuacauccugugccugguguucgcccagaagcugcccggcaacgacaacagcaccgccacccugugccugggccaccacgccgugcccaacggcaccaucgugaagaccaucaccaacgaccagaucgaggugaccaacgccaccgagcuggugcagagcagcagcaccggcggcaucugcgacagcccccaccagauccuggacggcgagaacugcacccugguggacgcccugcugggcgacccccagugcgacggcuuccagaacaagaagugggaccuguucguggagagaagcaaggccuacagcaacugcuaccccuacgacgugcccgacuacgccagccugagaagccugguggccagcagcggcacccuggaguucaacaacgagagcuucaacuggaccggcgugacccagaacggcaccagcagcgccugcaagagaagaagcaacaacagcuucuucagcagacugaacuggcugacccaccugaaguucaaguaccccgcccugaacgugaccaugcccaacaacgagaaguucgacaagcuguacaucuggggcgugcaccaccccggcaccgacaacgaccagaucagccuguacgcccaggccagcggcagaaucaccgugagcaccaagagaagccagcagaccgugauccccaacaucggcagcagacccagagugagagacaucagcagcagaaucagcaucuacuggaccaucgugaagcccggcgacauccugcugaucaacagcaccggcaaccugaucgcccccagaggcuacuucaagaucagaagcggcaagagcagcaucaugagaagcgacgcccccaucggcaagugcaacagcgagugcaucacccccaacggcagcauccccaacgacaagcccuuccagaacgugaacagaaucaccuacggcgccugccccagauacgugaagcagaacacccugaagcuggccaccggcaugagaaacgugcccgagacccagaccagaggcaucuucggcgccaucgccggcuucaucgagaacggcugggagggcaugguggacggcugguacggcuucagacaccagaacagcgagggcaccggccaggccgccgaccugaagagcacccaggccgccaucaaccagaucaacggcaagcugaacagacugaucggcaagaccaacgagaaguuccaccagaucgagaaggaguucagcgagguggagggcagaauccaggaccuggagaaguacguggaggacaccaagaucgaccuguggagcuacaacgccgagcugcugguggcccuggagaaccagcacaccaucgaccugaccgacagcgagaugaacaagcuguucgagagaaccaagaagcagcugagagagaacgccgaggacaugggcaacggcugcuucaagaucuaccacaagugcgacaacgccugcaucggcagcaucagaaacggcaccuacgaccacgacguguacagagacgaggcccugaacaacagauuccagaucaagggcguggagcugaagagcggcuacaaggacuggauccuguggaucagcuucgccaucagcugcuuccugcugugcguggcccugcugggcuucaucaugugggccugccagaagggcaacaucagaugcaacaucugcaucuga

SEQ ID NO: 163161 - RNA, 1701 nt, Artificial Sequence; identical to SEQ ID NO: 160690
  derived and/or modified CDS sequence (opt4) from hemagglutinin__InfluenzaA__ACU12527

SEQ ID NO: 163162 - RNA, 1701 nt, Artificial Sequence; identical to SEQ ID NO: 162432
  derived and/or modified CDS sequence (opt4) from hemagglutinin__InfluenzaA__ACU12538

SEQ ID NO: 163163 - RNA, 1701 nt, Artificial Sequence; identical to SEQ ID NO: 161628
  derived and/or modified CDS sequence (opt4) from hemagglutinin__InfluenzaA__ACU12549

SEQ ID NO: 163164 - RNA, 1698 nt, Artificial Sequence
  derived and/or modified CDS sequence (opt4) from hemagglutinin__InfluenzaA__ACU12560
augaaggugaagcugcuggugcugcugugcaccuucaccgccaccuacgccgacaccaucugcaucggcuaccacgccaacaacagcaccgacaccguggacaccgugcuggagaagaacgugaccgugacccacagcgugaaccugcuggagaacagccacaacggcaagcugugccugcugaagggcaucgccccccugcagcugggcaacugcagcguggccggcuggauccugggcaaccccgagugcgagcugcugaucagcaaggagagcuggagcuacaucguggagaagcccaaccccgagaacggcaccugcuaccccggccacuucgccgacuacgaggagcugagagagcagcugagcagcgugagcagcuucgagagauucgagaucuuccccaaggagagcagcuggcccaaccacaccgugaccggcgugagcgccagcugcagccacaacggcgagagcagcuucuacagaaaccugcuguggcugaccggcaagaacggccuguaccccaaccugagcaagagcuacgccaacaacaagggcaaggaggugcuggugcuguggggcgugcaccacccccccaacaucggcgaccagaacacccuguaccacaccgagaacgccuacgugagcguggugagcagccacuacagcagaaaguucacccccgagaucgccaagagacccaaggugagagaccaggagggcagaaucaacuacuacuggacccugcuggagcccggcgacaccaucaucuucgaggccaacggcaaccugaucgcccccagauacgccuucgcccugagcagaggcuucggcagcggcaucaucaacagcaacgugcccauggacaagugcgacgccaagugccagaccccccagggcgccaucaacagcagccugcccuuccagaacgugcaccccgugaccaucggcgagugccccaaguacgugagaagcgccaagcugagaauggugaccggccugagaaacauccccagcauccagagcagaggccuguucggcgccaucgccggcuucaucgagggcggcuggaccggcaugguggacggcugguacggcuaccaccaccagaacgagcagggcagcggcuacgccgccgaccagaagagcacccagaacgccaucaacggcaucaccaacaaggugaacagcgugaucgagaagaugaacacccaguucaccgccgugggcaaggaguucaacaagcuggagagaagaauggagaaccugaacaagaagguggacgacggcuucaucgacaucuggaccuacaacgccgagcugcuggugcugcuggagaacgagagaacccuggacuuccacgacagcaacgugaagaaccuguacgagaaggugaagagccagcugaagaacaacgccaaggagaucggcaacggcugcuucgaguucuaccacaagugcaacgacgagugcauggagagcgugaagaacggcaccuacgacuaccccaaguacagcgaggagagcaagcugaacagagagaagaucgacggcgugaagcuggagagcaugggcguguaccagauccuggccaucuacagcaccguggccagcagccuggugcugcuggugagccugggcgccaucagcuucuggaugugcagcaacggcagccugcagugcagaaucugcaucuga

SEQ ID NO: 163165 - RNA, 1698 nt, Artificial Sequence; identical to SEQ ID NO: 162548
  derived and/or modified CDS sequence (opt4) from hemagglutinin__InfluenzaA__ACU12571

SEQ ID NO: 163166 - RNA, 1698 nt, Artificial Sequence
  derived and/or modified CDS sequence (opt4) from hemagglutinin__InfluenzaA__ACU12582
augaaggugaagcugcuggugcugcugugcaccuucaccgccaccuacgccgacaccaucugcaucggcuaccacgccaacaacagcaccgacaccguggacaccgugcuggagaagaacgugaccgugacccacagcgugaaccugcuggagaacagccacaacggcaagcugugccugcugaagggcaucgccccccugcagcugggcaacugcagcguggccggcuggauccugggcaaccccgagugcgagcugcugaucagcaaggagagcuggagcuacaucguggagaagcccaaccccgagaacggcaccugcuaccccggcagauucgccgacuacgaggagcugagagagcagcugagcagcgugagcagcuucgagagauucgagaucuuccccaaggagagcagcuggcccaaccacaccgugaccggcgugagcgccagcugcagccacaacggcgagagcagcuucuacagaaaccugcuguggcugaccggcaagaacggccuguaccccaaccugagcaagagcuacgccaacaacaagggcaaggaggugcuggugcuguggggcgugcaccacccccccaacaucggcgaccagaacacccuguaccacaccgagaacgccuacgugagcguggugagcagccacuacagcagaaaguucacccccgagaucgccaagagacccaaggugagagaccaggagggcagaaucaacuacuacuggacccugcuggagcccggcgacaccaucaucuucgaggccaacggcaaccugaucgcccccagauacgccuucgcccugagcagaggcuucggcagcggcaucaucaacagcaacgcccccauggacaagugcgacgccaagugccagaccccccagggcgccaucaacagcagccugcccuuccagaacgugcaccccgugaccaucggcgagugccccaaguacgugagaagcgccaagcugagaauggugaccggccugagaaacauccccagcauccagagcagaggccuguucggcgccaucgccggcuucaucgagggcggcuggaccggcaugguggacggcugguacggcuaccaccaccagaacgagcagggcagcggcuacgccgccgaccagaagagcacccagaacgccaucaacggcaucaccaacaaggugaacagcgugaucgagaagaugaacacccaguucaccgccgugggcaaggaguucaacaagcuggagagaagaauggagaaccugaacaagaagguggacgacggcuucaucgacaucuggaccuacaacgccgagcugcuggugcugcuggagaacgagagaacccuggacuuccacgacagcaacgugaagaaccuguacgagaaggugaagagccagcugaagaacaacgccaaggagaucggcaacggcugcuucgaguucuaccacaagugcaacgacgagugcauggagagcgugaagaacggcaccuacgacuaccccaaguacagcgaggagagcaagcugaacagagagaagaucgacggcgugaagcuggagagcaugggcguguaccagauccuggccaucuacagcaccguggccagcagccuggugcugcuggugagccugggcgccaucagcuucuggaugugcagcaacggcagccugcagugcagaaucugcaucuga

SEQ ID NO: 163167 - RNA, 1698 nt, Artificial Sequence
  derived and/or modified CDS sequence (opt4) from hemagglutinin__InfluenzaA__ACU12593
augaaggugaagcugcuggugcugcugugcaccuucaccgccaccuacgccgacaccaucugcaucggcuaccacgccaacaacagcaccgacaccguggacaccgugcuggagaagaacgugaccgugacccacagcgugaaccugcuggagaacagccacaacggcaagcugugccugcugaagggcaucgccccccugcagcugggcaacugcagcguggccggcuggauccugggcaaccccgagugcgagcugcugaucagcaaggagagcuggagcuacaucguggagaagcccaaccccgagaacggcaccugcuaccccggccacuucgccgacuacgaggagcugagagagcagcugagcagcgugagcagcuucgagagauucgagaucuuccccaaggagagcagcuggcccaaccacaccgugaccggcgugagcgccagcugcagccacaacggcgagagcagcuucuacagaaaccugcuguggcugaccggcaagaacggccuguaccccaaccugagcaagagcuacgccaacaacaaggagaaggaggugcuggugcuguggggcgugcaccacccccccaacaucguggaccagaagacccuguacagaaccgagaacgccuacgugagcguggugagcagccacuacagcagaaaguucacccccgagaucgccaagagacccaaggugagagaccaggagggcagaaucaacuacuacuggacccugcuggagcccggcgacaccaucaucuucgaggccaacggcaaccugaucgcccccagauacgccuucgcccugagcagaggcuucggcagcggcaucaucaacagcaacgcccccauggacaagugcgacgccaagugccagaccccccagggcgccaucaacagcagccugcccuuccagaacgugcaccccgugaccaucggcgagugccccaaguacgugagaagcgccaagcugagaauggugaccggccugagaaacauccccagcauccagagcagaggccuguucggcgccaucgccggcuucaucgagggcggcuggaccggcaugguggacggcugguacggcuaccaccaccagaacgagcagggcagcggcuacgccgccgaccagaagagcacccagaacgccaucgacggcaucaccaacaaggugaacagcgugaucgagaagaugaacacccaguucaccgccgugggcaaggaguucaacaagcuggagagaagaauggagaaccugaacaagaagguggacgacggcuucaucgacaucuggaccuacaacgccgagcugcuggugcugcuggagaacgagagaacccuggacuuccacgacagcaacgugaagaaccuguacgagaaggugaagagccagcugaagaacaacgccaaggagaucggcaacggcugcuucgaguucuaccacaagugcaacgacgagugcauggagagcgugaagaacggcaccuacgacuaccccaaguacagcgaggagagcaagcugaacagagagaagaucgacggcaucaagcuggagagcaugggcguguaccagauccuggccaucuacagcaccguggccagcagccuggugcugcuggugagccugggcgccaucagcuucuggaugugcagcaacggcagccugcagugcagaaucugcaucuga

SEQ ID NO: 163168 - RNA, 1701 nt, Artificial Sequence; identical to SEQ ID NO: 162729
  derived and/or modified CDS sequence (opt4) from hemagglutinin__InfluenzaA__ACU13090

SEQ ID NO: 163169 - RNA, 1701 nt, Artificial Sequence; identical to SEQ ID NO: 162729
  derived and/or modified CDS sequence (opt4) from hemagglutinin__InfluenzaA__ACU13091

SEQ ID NO: 163170 - RNA, 1701 nt, Artificial Sequence; identical to SEQ ID NO: 162729
  derived and/or modified CDS sequence (opt4) from hemagglutinin__InfluenzaA__ACU13092

SEQ ID NO: 163171 - RNA, 1701 nt, Artificial Sequence; identical to SEQ ID NO: 162729
  derived and/or modified CDS sequence (opt4) from hemagglutinin__InfluenzaA__ACU13093

SEQ ID NO: 163172 - RNA, 1701 nt, Artificial Sequence
  derived and/or modified CDS sequence (opt4) from hemagglutinin__InfluenzaA__ACU13094
augaaggccauccugguggugcugcuguacaccuucgccaccgccaacgccgacacccugugcaucggcuaccacgccaacaacagcaccgacaccguggacaccgugcuggagaagaacgugaccgugacccacagcgugaaccugcuggaggacaagcacaacggcaagcugugcaagcugagaggcguggccccccugcaccugggcaagugcaacaucgccggcuggauccugggcaaccccgagugcgagagccugagcaccgccagcagcuggagcuacaucguggagaccagcagcagcgacaacggcaccugcuaccccggcgacuucaucgacuacgaggagcugagagagcagcugagcagcgugagcagcuucgagagauucgagaucuuccccaagaccagcagcuggcccaaccacgacagcaacaagggcgugaccgccgccugcccccacgccggcgccaagagcuucuacaagaaccugaucuggcuggugaagaagggcaacagcuaccccaagcugagcaagagcuacaucaacgacaagggcaaggaggugcuggugcuguggggcauccaccaccccagcaccagcgccgaccagcagagccuguaccagaacgccgacgccuacguguucgugggcagcagcagauacagcaagaaguucaagcccgagaucgccaucagacccaaggugagaggccaggagggcagaaugaacuacuacuggacccugguggagcccggcgacaagaucaccuucgaggccaccggcaaccugguggugcccagauacgccuucgccauggagagaaacgccggcagcggcaucaucaucagcgacacccccgugcacgacugcaacaccaccugccagacccccaagggcgccaucaacaccagccugcccuuccagaacauccaccccaucaccaucggcaagugccccaaguacgugaagagcaccaagcugagacuggccaccggccugagaaacgugcccagcauccagagcagaggccuguucggcgccaucgccggcuucaucgagggcggcuggaccggcaugguggacggcugguacggcuaccaccaccagaacgagcagggcagcggcuacgccgccgaccugaagagcacccagaacgccaucgacgagaucaccaacaaggugaacagcgugaucgagaagaugaacacccaguucaccgccgugggcaaggaguucaaccaccuggagaagagaaucgagaaccugaacaagaagguggacgacggcuuccuggacaucuggaccuacaacgccgagcugcuggugcugcuggagaacgagagaacccuggacuaccacgacagcaacgugaagaaccuguacgagaaggugagaagccagcugaagaacaacgccaaggagaucggcaacggcugcuucgaguucuaccacaagugcgacaacaccugcauggagagcgugaagaacggcaccuacgacuaccccaaguacagcgaggaggccaagcugaacagagaggagaucgacggcgugaagcuggagagcaccagaaucuaccagauccuggccaucuacagcaccguggccagcagccuggugcugguggugagccugggcgccaucagcuucuggaugugcagcaacggcagccugcagugcagaaucugcaucuga

SEQ ID NO: 163173 - RNA, 1701 nt, Artificial Sequence; identical to SEQ ID NO: 162729
  derived and/or modified CDS sequence (opt4) from hemagglutinin__InfluenzaA__ACU13095

SEQ ID NO: 163174 - RNA, 1701 nt, Artificial Sequence
  derived and/or modified CDS sequence (opt4) from hemagglutinin__InfluenzaA__ACU13096
augaaggccauccugguggugcugcugcacaccuucgccaccgccaacgccgacacccugugcaucggcuaccacgccaacaacagcaccgacaccguggacaccgugcuggagaagaacgugaccgugacccacagcgugaaccugcuggaggacaagcacaacggcaagcugugcaagcugagaggcguggccccccugcaccugggcaagugcaacaucgccggcuggauccugggcaaccccgagugcgagagccugagcaccgccagcagcuggagcuacaucguggagaccagcagcagcgacaacggcaccugcuaccccggcgacuucaucgacuacgaggagcugagagagcagcugagcagcgugagcagcuucgagagauucgagaucuuccccaagaccagcagcuggcccaaccacgacagcaacaagggcgugaccgccgccugcccccacgccggcgccaagagcuucuacaagaaccugaucuggcuggugaagaagggcaacagcuaccccaagcugagcaagagcuacaucaacgacaagggcaaggaggugcuggugcuguggggcauccaccaccccagcaccagcgccgaccagcagagccuguaccagaacgccgacgccuacguguucgugggcagcagcagauacagcaagaaguucaagcccgagaucgccaucagacccaaggugagagaccaggagggcagaaugaacuacuacuggacccugguggagcccggcgacaagaucaccuucgaggccaccggcaaccugguggugcccagauacgccuucgccauggagagaaacgccggcagcggcaucaucaucagcgacacccccgugcacgacugcaacaccaccugccagacccccaagggcgccaucaacaccagccugcccuuccagaacauccaccccaucaccaucggcaagugccccaaguacgugaagagcaccaagcugagacuggccaccggccugagaaacgugcccagcauccagagcagaggccuguucggcgccaucgccggcuucaucgagggcggcuggaccggcaugguggacggcugguacggcuaccaccaccagaacgagcagggcagcggcuacgccgccgaccugaagagcacccagaacgccaucgacgagaucaccaacaaggugaacagcgugaucgagaagaugaacacccaguucaccgccgugggcaaggaguucaaccaccuggagaagagaaucgagaaccugaacaagaagguggacgacggcuuccuggacaucuggaccuacaacgccgagcugcuggugcugcuggagaacgagagaacccuggacuaccacgacagcaacgugaagaaccuguacgagaaggugagaagccagcugaagaacaacgccaaggagaucggcaacggcugcuucgaguucuaccacaagugcgacaacaccugcauggagagcgugaagaacggcaccuacgacuaccccaaguacagcgaggaggccaagcugaacagagaggagaucgacggcgugacccuggagagcaccagaaucuaccagauccuggccaucuacagcaccguggccagcagccuggugcugguggugagccugggcgccaucagcuucuggaugugcagcaacggcagccugcagugcagaaucugcaucuga

SEQ ID NO: 163175 - RNA, 1701 nt, Artificial Sequence; identical to SEQ ID NO: 162729
  derived and/or modified CDS sequence (opt4) from hemagglutinin__InfluenzaA__ACU13098

SEQ ID NO: 163176 - RNA, 1701 nt, Artificial Sequence
  derived and/or modified CDS sequence (opt4) from hemagglutinin__InfluenzaA__ACU13099
augaaggccauccugguggugcugcuguacaccuucgccaccgccaacgccgacacccugugcaucggcuaccacgccaacaacagcaccgacaccguggacaccgugcuggagaagaacgugaccgugacccacagcgugaaccugcuggaggacaagcacaacggcaagcugugcaagcugagaggcguggccccccugcaccugggcaagugcaacaucgccggcuggauccugggcaaccccgagugcgagagccugagcaccgccagcagcuggagcuacaucguggagaccagcagcagcgacaacggcaccugcuaccccggcgacuucaucgacuacgaggagcugagagagcagcugagcagcgugagcagcuucgagagauucgagaucuuccccaagaccagcagcuggcccaaccacgacagcaacaagggcgugaccgccgccugcccccacgccggcgccaagagcuucuacaagaaccugaucuggcuggugaagaagggcaacagcuaccccaagcugagcaagagcuacaucaacgacaagggcaaggaggugcuggugcuguggggcauccaccaccccagcaccagcgccgaccagcagagccuguaccagaacgccgacgccuacguguucgugggcaccagcagauacagcaagaaguucaagcccgagaucgccaucagacccaaggugagagagcaggagggcagaaugaacuacuacuggacccugguggagcccggcgacaagaucaccuucgaggccaccggcaaccugguggugcccagauacgccuucgccauggagagaaacgccggcagcggcaucaucaucagcgacacccccgugcacgacugcaacaccaccugccagacccccaagggcgccaucaacaccagccugcccuuccagaacauccacagcaucaccaucggcaagugccccaaguacgugaagagcaccaagcugagacuggccaccggccugagaaacgugcccagcauccagagcagaggccuguucggcgccaucgccggcuucaucgagggcggcuggaccggcaugguggacggcugguacggcuaccaccaccagaacgagcagggcagcggcuacgccgccgaccugaagagcacccagaacgccaucgacgagaucaccaacaaggugaacagcgugaucgagaagaugaacacccaguucaccgccgugggcaaggaguucaaccaccuggagaagagaaucgagaaccugaacaagaagguggacgacggcuuccuggacaucuggaccuacaacgccgagcugcuggugcugcuggagaacgagagaacccuggacuaccacgacagcaacgugaagaaccuguacgagaaggugagaagccagcugaagaacaacgccaaggagaucggcaacggcugcuucgaguucuaccacaagugcgacaacaccugcauggagagcgugaagaacggcaccuacgacuaccccaaguacagcgaggaggccaagcugaacagagaggagaucgacggcgugaagcuggagagcaccagaaucuaccagauccuggccaucuacagcaccguggccagcagccuggugcugguggugagccugggcgccaucagcuucuggaugugcagcaacggcagccugcagugcagaaucugcaucuga

SEQ ID NO: 163177 - RNA, 1701 nt, Artificial Sequence
  derived and/or modified CDS sequence (opt4) from hemagglutinin__InfluenzaA__ACU13129
augaaggccauccugguggugcugcuguacaccuucgccaccgccaacgccgacacccugugcaucggcuaccacgccaacaacagcaccgacaccguggacaccgugcuggagaagaacgugaccgugacccacagcgugaaccugcuggaggacaagcacaacggcaagcugugcaagcugagaggcguggccccccugcaccugggcaagugcaacaucgccggcuggauccugggcaaccccgagugcgagagccugagcaccgccagcagcuggagcuacaucguggagaccagcagcagcgacaacggcaccugcuaccccggcgacuucaucgacuacgaggagcugagagagcagcugagcagcgugagcagcuucgagagauucgagaucuuccccaagaccagcagcuggcccaaccacgacagcaacaagggcgugaccgccgccugcccccacgccggcgccaagagcuucuacaagaaccugaucuggcuggugaagaagggcaacagcuaccccaagcugagcaagagcuacaucaacgacaagggcaaggaggugcuggugcuguggggcauccaccaccccagcaccagcgccgaccagcagagccuguaccagaacgccgacgccuacguguucgugggcaccagcagauacagcaagaaguucaagcccgagaucgccaucagacccaaggugagagagcaggagggcagaaugaacuacuacuggacccugguggagcccggcgacaagaucaccuucgaggccaccggcaaccugguggugcccagauacgccuucgccauggagagaaacgccggcagcggcaucaucaucagcgacacccccgugcacgacugcaacaccaccugccagacccccaagggcgccaucaacaccagccugcccuuccagaacauccaccccaucaccaucggcaagugccccaaguacgugaagagcaccaagcugagacuggccaccggccugagaaacgugcccagcauccagagcagaggccuguucggcgccaucgccggcuucaucgagggcggcuggaccggcaugguggacggcugguacggcuaccaccaccagaacgagcagggcagcggcuacgccgccgaccugaagagcacccagaacgccaucgacgagaucaccaacaaggugaacagcgugaucgagaagaugaacacccaguucaccgccgugggcgaggaguucaaccaccuggagaagagaaucgagaaccugaacaagaagguggacgacggcuuccuggacaucuggaccuacaacgccgagcugcuggugcugcuggagaacgagagaacccuggacuaccacgacagcaacgugaagaaccuguacgagaaggugagaagccagcugaagaacaacgccaaggagaucggcaacggcugcuucgaguucuaccacaagugcgacaacaccugcauggagagcgugaagaacggcaccuacgacuaccccaaguacagcgaggaggccaagcugaacagagaggagaucgacggcgugaagcuggagagcaccagaaucuaccagauccuggccaucuacagcaccguggccagcagccuggugcugguggugagccugggcgccaucagcuucuggaugugcagcaacggcagccugcagugcagaaucugcaucuga

SEQ ID NO: 163178 - RNA, 1701 nt, Artificial Sequence; identical to SEQ ID NO: 162729
  derived and/or modified CDS sequence (opt4) from hemagglutinin__InfluenzaA__ACU16795

SEQ ID NO: 163179 - RNA, 1701 nt, Artificial Sequence; identical to SEQ ID NO: 162729
  derived and/or modified CDS sequence (opt4) from hemagglutinin__InfluenzaA__ACU16858

SEQ ID NO: 163180 - RNA, 1701 nt, Artificial Sequence; identical to SEQ ID NO: 162729
  derived and/or modified CDS sequence (opt4) from hemagglutinin__InfluenzaA__ACU16930

SEQ ID NO: 163181 - RNA, 1701 nt, Artificial Sequence; identical to SEQ ID NO: 162729
  derived and/or modified CDS sequence (opt4) from hemagglutinin__InfluenzaA__ACU16993

SEQ ID NO: 163182 - RNA, 1701 nt, Artificial Sequence; identical to SEQ ID NO: 162729
  derived and/or modified CDS sequence (opt4) from hemagglutinin__InfluenzaA__ACU17059

SEQ ID NO: 163183 - RNA, 1701 nt, Artificial Sequence; identical to SEQ ID NO: 162729
  derived and/or modified CDS sequence (opt4) from hemagglutinin__InfluenzaA__ACU17126

SEQ ID NO: 163184 - RNA, 1701 nt, Artificial Sequence; identical to SEQ ID NO: 162820
  derived and/or modified CDS sequence (opt4) from hemagglutinin__InfluenzaA__ACU17187

SEQ ID NO: 163185 - RNA, 1701 nt, Artificial Sequence; identical to SEQ ID NO: 162729
  derived and/or modified CDS sequence (opt4) from hemagglutinin__InfluenzaA__ACU17258

SEQ ID NO: 163186 - RNA, 1701 nt, Artificial Sequence
  derived and/or modified CDS sequence (opt4) from hemagglutinin__InfluenzaA__ACU17389
auggaggccauccugguggugcugcuguacaccuucgccaccgccaacgccgacacccugugcaucggcuaccacgccaacaacagcaccgacaccguggacaccgugcuggagaagaacgugaccgugacccacagcgugaaccugcuggaggacaagcacaacggcaagcugugcaagcugagaggcguggccccccugcaccugggcaagugcaacaucgccggcuggauccugggcaaccccgagugcgagagccugagcaccgccagcagcuggagcuacaucguggagaccagcagcagcgacaacggcaccugcuaccccggcgacuucaucgacuacgaggagcugagagagcagcugagcagcgugagcagcuucgagagauucgagaucuuccccaagaccagcagcuggcccaaccacgacagcaacaagggcgugaccgccgccugcccccacgccggcgccaagagcuucuacaagaaccugaucuggcuggugaagaagggcaacagcuaccccaagcugagcaagagcuacaucaacgacaagggcaaggaggugcuggugcuguggggcauccaccaccccagcaccagcgccgaccagcagagccuguaccagaacgccgacgccuacguguucgugggcagcagcagauacagcaagaaguucaagcccgagaucgccaucagacccaaggugagagaccaggagggcagaaugaacuacuacuggacccugguggagcccggcgacaagaucaccuucgaggccaccggcaaccugguggugcccagauacgccuucgccauggagagaaacgccggcagcggcaucaucaucagcgacacccccgugcacgacugcaacaccgccugccagacccccaagggcgccaucaacaccagccugcccuuccacaacauccaccccaucaccaucggcaagugccccaaguacgugaagagcaccaagcugagacuggccaccggccugagaaacgugcccagcauccagagcagaggccuguucggcgccaucgccggcuucaucgagggcggcuggaccggcaugguggacggcugguacggcuaccaccaccagaacgagcagggcagcggcuacgccgccgaccugaagagcacccagaacgccaucgacgagaucaccaacaaggugaacagcgugaucgagaagaugaacacccaguucaccgccgugggcaaggaguucaaccaccuggagaagagaaucgagaaccugaacaagaagguggacgacggcuuccuggacaucuggaccuacaacgccgagcugcuggugcugcuggagaacgagagaacccuggacuaccacgacagcaacgugaagaaccuguacgagaaggugagaagccagcugaagaacaacgccaaggagaucggcaacggcugcuucgaguucuaccacaagugcgacaacaccugcauggagagcgugaagaacggcaccuacgacuaccccaaguacagcgaggaggccaagcugaacagagaggagaucgacggcgugaagcuggagagcaccagaaucuaccagauccuggccaucuacagcaccguggccagcagccuggugcugguggugagccugggcgccaucagcuucuggaugugcagcaacggcagccugcagugcagaaucugcaucuga

SEQ ID NO: 163187 - RNA, 1701 nt, Artificial Sequence; identical to SEQ ID NO: 162729
  derived and/or modified CDS sequence (opt4) from hemagglutinin__InfluenzaA__ACU17450

SEQ ID NO: 163188 - RNA, 1701 nt, Artificial Sequence; identical to SEQ ID NO: 162729
  derived and/or modified CDS sequence (opt4) from hemagglutinin__InfluenzaA__ACU17521

SEQ ID NO: 163189 - RNA, 1701 nt, Artificial Sequence; identical to SEQ ID NO: 162716
  derived and/or modified CDS sequence (opt4) from hemagglutinin__InfluenzaA__ACU27041

SEQ ID NO: 163190 - RNA, 1698 nt, Artificial Sequence
  derived and/or modified CDS sequence (opt4) from hemagglutinin__InfluenzaA__ACU27406
augaaggugaagcugcuggugcugcugugcaccuucaccgccaccuacgccgacaccaucugcaucggcuaccacgccaacaacagcaccgacaccguggacaccgugcuggagaagaacgugaccgugacccacagcgugaaccugcuggagaacagccacaacggcaagcugugccugcugaagggcaucgccccccugcagcugggcaacugcagcguggccggcuggauccugggcaaccccgagugcgagcugcugaucagcaaggagagcuggagcuacaucguggagaagcccaaccccgagaacggcaccugcuaccccggccacuucgccgacuacgaggagcugagagagcagcugagcagcgugagcagcuucgagagauucgagaucuuccccaaggagagcagcuggcccaaccacaccgugaccggcgugagcgccagcugcagccacaacggcgagagcagcuucuacagaaaccugcuguggcugaccggcaagaacggccuguaccccaaccugagcaagagcuacgccaacaacaaggagaaggaggugcuggugcuguggggcgugcaccacccccccaacaucguggaccagaagacccuguacagaaccgagaacgccuacgugagcguggugagcagccacuacagcagaaaguucacccccgagaucgccaagagacccaagaucagagaccaggagggcagaaucaacuacuacuggacccugcuggagcccggcgacaccaucaucuucgaggccaacggcaaccugaucgcccccagauacgccuucgcccugagcagaggcuucggcagcggcaucaucaacagcaacgcccccauggacaagugcgacgccaagugccagaccccccagggcgccaucaacagcagccugcccuuccagaacgugcaccccgugaccaucggcgagugccccaaguacgugagaagcgccaagcugagaauggugaccggccugagaaacauccccagcauccagagcagaggccuguucggcgccaucgccggcuucaucgagggcggcuggaccggcaugguggacggcugguacggcuaccaccaccagaacgagcagggcagcggcuacgccgccgaccagaagagcacccagaacgccaucaacggcaucaccaacaaggugaacagcgugaucgagagaaugaacacccaguucaccgccgugggcaaggaguucaacaagcuggagagaagaauggagaaccugaacaagaagguggacgacggcuucaucgacaucuggaccuacaacgccgagcugcuggugcugcuggagaacgagagaacccuggacuuccacgacagcaacgugaagaaccuguacgagaaggugaagagccagcugaagaacaacgccaaggagaucggcaacggcugcuucgaguucuaccacaagugcaacgacgagugcauggagagcgugaagaacggcaccuacgacuaccccaaguacagcgaggagagcaagcugaacagagagaagaucgacggcgugaagcuggagagcaugggcguguaccagauccuggccaucuacagcaccguggccagcagccuggugcugcuggugagccugggcgccaucagcuucuggaugugcagcaacggcagccugcagugcagaaucugcaucuga

SEQ ID NO: 163191 - RNA, 1698 nt, Artificial Sequence
  derived and/or modified CDS sequence (opt4) from hemagglutinin__InfluenzaA__ACU27407
augaaggugaagcugcuggugcugcugugcaccuucaccgccaccuacgccgacaccaucugcaucggcuaccacgccaacaacagcaccgacaccguggacaccgugcuggagaagaacgugaccgugacccacagcgugaaccugcuggagaacagccacaacggcaagcugugccugcugaagggcaucgccccccugcagcugggcaacugcagcguggccggcuggauccugggcaaccccgagugcgagcugcugaucagcaaggagagcuggagcuacaucguggagaagcccaaccccgagaacggcaccugcuaccccggccacuucgccgacuacgaggagcugagagagcagcugagcagcgugagcagcuucgagagauucgagaucuuccccaaggagagcagcuggcccaaccacaccgugaccggcgugagcgccagcugcagccacaacggcgagagcagcuucuacagaaaccugcuguggcugaccggcaagaacggccuguaccccaaccugagcaagagcuacgccaacaacaaggagaaggaggugcuggugcuguggggcgugcaccacccccccaacaucguggaccagaagacccuguacagaaccgagaacgccuacgugagcguggugagcagccacuacagcagaaaguucacccccgagaucgccaagagacccaaggugagagaccaggagggcagaaucaacuacuacuggacccugcuggagcccggcgacaccaucaucuucgaggccaacggcaaccugaucgcccccagauacgccuucgcccugagcagaggcuucggcagcggcaucaucaacagcaacgcccccauggacaagugcgacgccaagugccagaccccccagggcgccaucaacagcagccugcccuuccagaacgugcaccccgugaccaucggcgagugccccaaguacgugagaagcgccaagcugagaauggugaccggccugagaaacauccccagcauccagagcagaggccuguucggcgccaucgccggcuucaucgagggcggcuggaccggcaugguggacggcugguacggcuaccaccaccagaacgagcagggcagcggcuacgccgccgaccagaagagcacccagaacgccaucaacggcaucaccaacaaggugaacagcgugaucgagaagaugaacacccaguucaccgccgugggcaaggaguucaacaagcuggagagaagaauggagaaccugaacaagaagguggacgacggcuucaucgacaucuggaccuacaacgccgagcugcuggugcugcuggagaacgagagaacccuggacuuccacgacagcaacgugaagaaccuguacgagaaggugaagagccagcugaagaacaacgccaaggagaucggcaacggcugcuucgaguucuaccacaagugcaacgacgagugcauggagagcgugaagaacggcaccuacgacuaccccaaguacagcgaggagagcaagcugaacagagagaagaucgacggcgugaagcuggagagcaugggcguguaccagauccuggccaucuacagcaccguggccagcagccuggugcugcuggugagccugggcgccaucagcuucuggaugugcagcaacggcagccugcagugcagaaucugcaucuga

SEQ ID NO: 163192 - RNA, 1701 nt, Artificial Sequence; identical to SEQ ID NO: 162716
  derived and/or modified CDS sequence (opt4) from hemagglutinin__InfluenzaA__ACU29949

SEQ ID NO: 163193 - RNA, 1701 nt, Artificial Sequence
  derived and/or modified CDS sequence (opt4) from hemagglutinin__InfluenzaA__ACU29979
augaaggccauccugguggugcugcuguacaccuucgccgccgccaacgccgacacccugugcaucggcuaccacgccaacaacagcaccgacaccguggacaccgugcuggagaagaacgugaccgugacccacagcgugaaccugcuggaggacaagcacaacggcaagcugugcaagcugagaggcguggccccccugcaccugggcaagugcaacaucgccggcuggauccugggcaaccccgagugcgagagccugagcaccgccagcagcuggagcuacaucguggagaccagcagcagcgacaacggcaccugcuaccccggcgacuucaucgacuacgaggagcugagagagcagcugagcagcgugagcagcuucgagagauucgagaucuuccccaagaccagcagcuggcccaaccacgacagcaacaagggcgugaccgccgccugcccccacgccggcgccaagagcuucuacaagaaccugaucuggcuggugaagaagggcaacagcuaccccaagcugagcaagagcuacaucaacgacaagggcaaggaggugcuggugcuguggggcauccaccaccccagcaccagcgccgaccagcagagccuguaccagaacgccgacgccuacguguucgugggcaccagcagauacagcaagaaguucaagcccgagaucgccaucagacccaaggugagagaccaggagggcagaaugaacuacuacuggacccugguggagcccggcgacaagaucaccuucgaggccaccggcaaccugguggugcccagauacgccuucgccauggagagaaacgccggcagcggcaucaucaucagcgacacccccgugcacgacugcaacaccaccugccagacccccaagggcgccaucaacaccagccugcccuuccagaacauccaccccaucaccaucggcaagugccccaaguacgugaagagcaccaagcugagacuggccaccggccugagaaacgugcccagcauccagagcagaggccuguucggcgccaucgccggcuucaucgagggcggcuggaccggcaugguggacggcugguacggcuaccaccaccagaacgagcagggcagcggcuacgccgccgaccugaagagcacccagaacgccaucgacgagaucaccaacaaggugaacagcgugaucgagaagaugaacacccaguucaccgccgugggcaaggaguucaaccaccuggagaagagaaucgagaaccugaacaagaagguggacgacggcuuccuggacaucuggaccuacaacgccgagcugcuggugcugcuggagaacgagagaacccuggacuaccacgacagcaacgugaagaaccuguacgagaaggugagaagccagcugaagaacaacgccaaggagaucggcaacggcugcuucgaguucuaccacaagugcgacaacaccugcauggagagcgugaagaacggcaccuacgacuaccccaaguacagcgaggaggccaagcugaacagagaggagaucgacggcgugaagcuggagagcaccagaaucuaccagauccuggccaucuacagcaccguggccagcagccuggugcugguggugagccugggcgccaucagcuucuggaugugcagcaacggcagccugcagugcagaaucugcaucuga

SEQ ID NO: 163194 - RNA, 1701 nt, Artificial Sequence; identical to SEQ ID NO: 162729
  derived and/or modified CDS sequence (opt4) from hemagglutinin__InfluenzaA__ACU29989

SEQ ID NO: 163195 - RNA, 1704 nt, Artificial Sequence
  derived and/or modified CDS sequence (opt4) from hemagglutinin__InfluenzaA__ACU29999
augaaggccauccugguggugcugcuguacaccuucgccaccgccaacgccgacacccugugcaucggcuaccacgccaacaacagcaccgacaccguggacaccgugcuggagaagaacgugaccgugacccacagcgugaaccugcuggaggacaagcacaacggcaagcugugcaagcugagaggcguggccccccugcaccugggcaagugcaacaucgccggcuggauccugggcaaccccgagugcgagagccugagcaccgccagcagcuggagcuacaucguggagaccagcagcagcgacaacggcaccugcuaccccggcgacuucaucgacuacgaggagcugagagagcagcugagcagcgugagcagcuucgagagauucgagaucuuccccaagaccagcagcuggcccaaccacgacagcaacaagggcgugaccgccgccugcccccacgccggcgccaagagcuucuacaagaaccugaucuggcuggugaagaagggcaacagcuaccccaagcugagcaagagcuacaucaacgacaagggcaaggaggugcuggugcuguggggcauccaccaccccagcaccagcgccgaccagcagagccuguaccagaacgccgacgccuacguguucgugggcaccagcagauacagcaagaaguucaagcccgagaucgccaucagacccaaggugagagaccaggagggcagaaugaacuacuacuggacccugguggagcccggcgacaagaucaccuucgaggccaccggcaaccugguggugcccagauacgccuucgccauggagagaaacgccggcagcggcaucaucaucagcgacacccccgugcacgacugcaacaccaccugccagacccccaagggcgccaucaacaccagccugcccuuccagaacauccaccccaucaccaucggcaagugccccaaguacgugaagagcaccaagcugagacuggccaccggccugagaaacgugcccagcauccagagcagaggccuguucggcgccaucgccggcuucaucgagggcggcuggaccggcaugguggacggcugguacggcuaccaccaccagaacgagcagggcagcggcuacgccgccgaccugaagagcacccagaacgccaucgacgagaucaccaacaaggugaacagcgugaucgagaagaugaacacccaguucaccgccgugggcaaggaguucaaccaccuggagaagagaaucgagaaccugaacaagaagguggacgacggcuuccuggacaucuggaccuacaacgccgagcugcuggugcugcuggagaacgagagaacccuggacuaccacgacagcaacgugaagaaccuguacgagaaggugagaagccagcugaagaacaacgccaaggagaucggcaacggcugcuucgaguucuaccacaagugcgacaacaccugcauggagagcgugaagaacggcaccuacgacuaccccaaguacagcgaggaggccaagcugaacagagaggagaucgacggcgugaagcuggagagcaccagaaucuaccagauccuggccaucuacagcaccguggccagcagccuggugcugguggugagccugggcgccaucagcuucuggaugugcagcaacggcagccugcugcagugcagaaucugcaucuga

SEQ ID NO: 163196 - RNA, 1704 nt, Artificial Sequence
  derived and/or modified CDS sequence (opt4) from hemagglutinin__InfluenzaA__ACU30009
auggaggccauccugguggugcugcuguacaccuucgccaccgccaacgccgacacccugugcaucggcuaccacgccaacaacagcaccgacaccguggacaccgugcuggagaagaacgugaccgugacccacagcgugaaccugcuggaggacaagcacaacggcaagcugugcaagcugagaggcguggccccccugcaccugggcaagugcaacaucgccggcuggauccugggcaaccccgagugcgagagccugagcaccgccagcagcuggagcuacaucguggagaccagcagcagcgacaacggcaccugcuaccccggcgacuucaucgacuacgaggagcugagagagcagcugagcagcgugagcagcuucgagagauucgagaucuuccccaagaccagcagcuggcccaaccacgacagcaacaagggcgugaccgccgccugcccccacgccggcgccaagagcuucuacaagaaccugaucuggcuggugaagaagggcaacagcuaccccaagcugagcaagagcuacaucaacgacaagggcaaggaggugcuggugcuguggggcauccaccaccccagcaccagcgccgaccagcagagccuguaccagaacgccgacgccuacguguucgugggcagcagcagauacagcaagaaguucaagcccgagaucgccaucagacccaaggugagagaccaggagggcagaaugaacuacuacuggacccugguggagcccggcgacaagaucaccuucgaggccaccggcaaccugguggugcccagauacgccuucgccauggagagaaacgccggcagcggcaucaucaucagcgacacccccgugcacgacugcaacaccaccugccagacccccaagggcgccaucaacaccagccugcccuuccacaacauccaccccaucaccaucggcaagugccccaaguacgugaagagcaccaagcugagacuggccaccggccugagaaacgugcccagcauccagagcagaggccuguucggcgccaucgccggcuucaucgagggcggcuggaccggcaugguggacggcugguacggcuaccaccaccagaacgagcagggcagcggcuacgccgccgaccugaagagcacccagaacgccaucgacgagaucaccaacaaggugaacagcgugaucgagaagaugaacacccaguucaccgccgugggcaaggaguucaaccaccuggagaagagaaucgagaaccugaacaagaagguggacgacggcuuccuggacaucuggaccuacaacgccgagcugcuggugcugcuggagaacgagagaacccuggacuaccacgacagcaacgugaagaaccuguacgagaaggugagaagccagcugaagaacaacgccaaggagaucggcaacggcugcuucgaguucuaccacaagugcgacaacaccugcauggagagcgugaagaacggcaccuacgacuaccccaaguacagcgaggaggccaagcugaacagagaggagaucgacggcgugaagcuggagagcaccagaaucuaccagauccuggccaucuacagcaccguggccagcagccuggugcugguggugagccugggcgccaucagcuucuggaugugcagcggcuacggcagccugcagugcagaaucugcaucuga

SEQ ID NO: 163197 - RNA, 1701 nt, Artificial Sequence; identical to SEQ ID NO: 163089
  derived and/or modified CDS sequence (opt4) from hemagglutinin__InfluenzaA__ACU30019

SEQ ID NO: 163198 - RNA, 1701 nt, Artificial Sequence; identical to SEQ ID NO: 162909
  derived and/or modified CDS sequence (opt4) from hemagglutinin__InfluenzaA__ACU30093

SEQ ID NO: 163199 - RNA, 1701 nt, Artificial Sequence
  derived and/or modified CDS sequence (opt4) from hemagglutinin__InfluenzaA__ACU30103
augaaggccauccugguggugcugcuguacaccuucgccaccgccaacgccgacacccugugcaucggcuaccacgccaacaacagcaccgacaccguggacaccgugcuggagaagaacgugaccgugacccacagcgugaaccugcuggaggacaagcacaacggcaagcugugcaagcugagaggcguggccccccugcaccugggcaagugcaacaucgccggcuggauccugggcaaccccgagugcgagagccugagcaccgccagcagcuggagcuacaucguggagaccagcagcagcgacaacggcaccugcuaccccggcgacuucaucgacuacgaggagcugagagagcagcugagcagcgugagcagcuucgagagauucgagaucuuccccaagaccagcagcuggcccaaccacgacagcaacaagggcgugaccgccgccugcccccacgccggcgccaagagcuucuacaagaaccugaucuggcuggugaagaagggcaacagcuaccccaagcugagcaagagcuacaucaacgacaagggcaaggaggugcuggugcuguggggcauccaccaccccagcaccagcgccgaccagcagagccuguaccagaacgccgacgccuacguguucgugggcaccagcagauacagcaagaaguucaagcccgagaucgccaucagacccaaggugagagaccaggagggcagaaugaacuaccacuggacccugguggagcccggcgacaagaucaccuucgaggccaccggcaaccugguggugcccagauacgccuucgccauggagagaaacgccggcagcggcaucaucaucagcgacacccccgugcacgacugcaacaccaccugccagacccccaagggcgccaucaacaccagccugcccuuccagaacauccaccccaucaccaucggcaagugccccaaguacgugaagagcaccaagcugagacuggccaccggccugagaaacgugcccagcauccagagcagaggccuguucggcgccaucgccggcuucaucgagggcggcuggaccggcaugguggacggcugguacggcuaccaccaccagaacgagcagggcagcggcuacgccgccgaccugaagagcacccagaacgccaucgacgagaucaccaacaaggugaacagcgugaucgagaagaugaacacccaguucaccgccgugggcaaggaguucaaccaccuggagaagagaaucgagaaccugaacaagaagguggacgacggcuuccuggacaucuggaccuacaacgccgagcugcuggugcugcuggagaacgagagaacccuggacuaccacgacagcaacgugaagaaccuguacgagaaggugagaagccagcugaagaacaacgccaaggagaucggcaacggcugcuucgaguucuaccacaagugcgacaacaccugcauggagagcgugaagaacggcaccuacgacuaccccaaguacagcgaggaggccaagcugaacagagaggagaucgacggcgugaagcuggagagcaccagaaucuaccagauccuggccaucuacagcaccguggccagcagccuggugcugguggugagccugggcgccaucagcuucuggaugugcagcaacggcagccugcagugcagaaucugcaucuga

SEQ ID NO: 163200 - RNA, 1704 nt, Artificial Sequence
  derived and/or modified CDS sequence (opt4) from hemagglutinin__InfluenzaA__ACU30112
auggaggccauccugguggugcugcuguacaccuucgccaccgccaacgccgacacccugugcaucggcuaccacgccaacaacagcaccgacaccguggacaccgugcuggagaagaacgugaccgugacccacagcgugaaccugcuggaggacaagcacaacggcaagcugugcaagcugagaggcguggccccccugcaccugggcaagugcaacaucgccggcuggauccugggcaaccccgagugcgagagccugagcaccgccagcagcuggagcuacaucguggagaccagcagcagcgacaacggcaccugcuaccccggcgacuucaucgacuacgaggagcugagagagcagcugagcagcgugagcagcuucgagagauucgagaucuuccccaagaccagcagcuggcccaaccacgacagcaacaagggcgugaccgccgccugcccccacgccggcgccaagagcuucuacaagaaccugaucuggcuggugaagaagggcaacagcuaccccaagcugagcaagagcuacaucaacgacaagggcaaggaggugcuggugcuguggggcauccaccaccccagcaccagcgccgaccagcagagccuguaccagaacgccgacgccuacguguucgugggcagcagcagauacagcaagaaguucaagcccgagaucgccaucagacccaaggugagagaccaggagggcagaaugaacuacuacuggacccugguggagcccggcgacaagaucaccuucgaggccaccggcaaccugguggugcccagauacgccuucgccauggagagaaacgccggcagcggcaucaucaucagcgacacccccgugcacgacugcaacaccaccugccagacccccaagggcgccaucaacaccagccugcccuuccacaacauccaccccaucaccaucggcaagugccccaaguacgugaagagcaccaagcugagacuggccaccggccugagaaacgugcccagcauccagagcagaggccuguucggcgccaucgccggcuucaucgagggcggcuggaccggcaugguggacggcugguacggcuaccaccaccagaacgagcagggcagcggcuacgccgccgaccugaagagcacccagaacgccaucgacgagaucaccaacaaggugaacagcgugaucgagaagaugaacacccaguucaccgccgugggcaaggaguucaaccaccuggagaagagaaucgagaaccugaacaagaagguggacgacggcuuccuggacaucuggaccuacaacgccgagcugcuggugcugcuggagaacgagagaacccuggacuaccacgacagcaacgugaagaaccuguacgagaaggugagaagccagcugaagaacaacgccaaggagaucggcaacggcugcuucgaguucuaccacaagugcgacaacaccugcauggagagcgugaagaacggcaccuacgacuaccccaaguacagcgaggaggccaagcugaacagagaggagaucgacggcgugaagcuggagagcaccagaaucuaccagauccuggccaucuacagcaccguggccagcagccuggugcugguggugagccugggcgccaucagcuucuggaugugcagccacauggugcugcugcagugcagaaucugcaucuga

SEQ ID NO: 163201 - RNA, 1701 nt, Artificial Sequence
  derived and/or modified CDS sequence (opt4) from hemagglutinin__InfluenzaA__ACU30121
auggaggccauccugguggugcugcuguacaccuucgccaccgccaacgccgacacccugugcaucggcuaccacgccaacaacagcaccgacaccguggacaccgugcuggagaagaacgugaccgugacccacagcgugaaccugcuggaggacaagcacaacggcaagcugugcaagcugagaggcguggccccccugcaccugggcaagugcaacaucgccggcuggauccugggcaaccccgagugcgagagccugagcaccgccagcagcuggagcuacaucguggagaccagcagcagcgacaacggcaccugcuaccccggcgacuucaucgacuacgaggagcugagagagcagcugagcagcgugagcagcuucgagagauucgagaucuuccccaagaccagcagcuggcccaaccacgacagcaacaagggcgugaccgccgccugcccccacgccggcgccaagagcuucuacaagaaccugaucuggcuggugaagaagggcaacagcuaccccaagcugagcaagagcuacaucaacgacaagggcaaggaggugcuggugcuguggggcauccaccaccccagcaccagcgccgaccagcagagccuguaccagaacgccgacgccuacguguucgugggcagcagcagauacagcaagaaguucaagcccgagaucgccaucagacccaaggugagagaccaggagggcagaaugaacuacuacuggacccugguggagcccggcgacaagaucaccuucgaggccaccggcaaccugguggugcccagauacgccuucgccauggagagaaacgccggcagcggcaucaucaucagcgacacccccgugcacgacugcaacaccaccugccagacccccaagggcgccaucaacaccagccugcccuuccacaacauccaccccaucaccaucggcaagugccccaaguacgugaagagcaccaagcugagacuggccaccggccugagaaacgugcccagcauccagagcagaggccuguucggcgccaucgccggcuucaucgagggcggcuggaccggcaugguggacggcugguacggcuaccaccaccagaacgagcagggcagcggcuacgccgccgaccugaagagcacccagaacgccaucgacgagaucaccaacaaggugaacagcgugaucgagaagaugaacacccaguucaccgccgugggcaaggaguucaaccaccuggagaagagaaucgagaaccugaacaagaagguggacgacggcuuccuggacaucuggaccuacaacgccgagcugcuggugcugcuggagaacgagagaacccuggacuaccacgacagcaacgugaagaaccuguacgagaaggugagaaaccagcugaagaacaacgccaaggagaucggcaacggcugcuucgaguucuaccacaagugcgacaacaccugcauggagagcgugaagaacggcaccuacgacuaccccaaguacagcgaggaggccaagcugaacagagaggagaucgacggcgugaagcuggagagcaccagaaucuaccagauccuggccaucuacagcaccguggccagcagccuggugcugguggugagccugggcgccaucagcuucuggaugugcagcaacggcagccugcagugcagaaucugcaucuga

SEQ ID NO: 163202 - RNA, 1701 nt, Artificial Sequence; identical to SEQ ID NO: 162822
  derived and/or modified CDS sequence (opt4) from hemagglutinin__InfluenzaA__ACU31124

SEQ ID NO: 163203 - RNA, 1701 nt, Artificial Sequence; identical to SEQ ID NO: 162761
  derived and/or modified CDS sequence (opt4) from hemagglutinin__InfluenzaA__ACU31143

SEQ ID NO: 163204 - RNA, 1701 nt, Artificial Sequence; identical to SEQ ID NO: 162761
  derived and/or modified CDS sequence (opt4) from hemagglutinin__InfluenzaA__ACU31144

SEQ ID NO: 163205 - RNA, 1701 nt, Artificial Sequence; identical to SEQ ID NO: 162761
  derived and/or modified CDS sequence (opt4) from hemagglutinin__InfluenzaA__ACU31145

SEQ ID NO: 163206 - RNA, 1701 nt, Artificial Sequence; identical to SEQ ID NO: 162909
  derived and/or modified CDS sequence (opt4) from hemagglutinin__InfluenzaA__ACU31146

SEQ ID NO: 163207 - RNA, 1701 nt, Artificial Sequence; identical to SEQ ID NO: 162729
  derived and/or modified CDS sequence (opt4) from hemagglutinin__InfluenzaA__ACU31147

SEQ ID NO: 163208 - RNA, 1701 nt, Artificial Sequence
  derived and/or modified CDS sequence (opt4) from hemagglutinin__InfluenzaA__ACU31148
augaaggccauccuggugaucaugcuguacaccuucgccaccgccaacgccgacacccugugcaucggcuaccacgccaacaacagcaccgacaccguggacaccgugcuggagaagaacgugaccgugacccacagcgugaaccugcuggaggacaagcacaacggcaagcugugcaagcugagaggcguggccccccugcaccugggcaagugcaacaucgccggcuggauccugggcaaccccgagugcgagagccugagcaccgccagcagcuggagcuacaucguggagaccagcagcagcgacaacggcaccugcuaccccggcgacuucaucgacuacgaggagcugagagagcagcugagcagcgugagcagcuucgagagauucgagaucuuccccaagaccagcagcuggcccaaccacgacagcaacaagggcgugaccgccgccugcccccacgccggcgccaagagcuucuacaagaaccugaucuggcuggugaagaagggcaacagcuaccccaagcugagcaagagcuacaucaacgacaagggcaaggaggugcuggugcuguggggcauccaccaccccagcaccagcgccgaccagcagagccuguaccagaacgccgacgccuacguguucgugggcagcagcagauacagcaagaaguucaagcccgagaucgccaucagacccaaggugagagaccaggagggcagaaugaacuacuacuggacccugguggagcccggcgacaagaucaccuucgaggccaccggcaaccugguggugcccagauacgccuucgccauggagagaaacgccggcagcggcaucaucaucagcgacacccccgugcacgacugcaacaccaccugccagacccccaagggcgccaucaacaccagccugcccuuccagaacauccaccccaucaccaucggcaagugccccaaguacgugaagagcaccaagcugagacuggccaccggccugagaaacgugcccagcauccagagcagaggccuguucggcgccaucgccggcuucaucgagggcggcuggaccggcaugguggacggcugguacggcuaccaccaccagaacgagcagggcagcggcuacgccgccgaccugaagagcacccagaacgccaucgacgagaucaccaacaaggugaacagcgugaucgagaagaugaacacccaguucaccgccgugggcaaggaguucaaccaccuggagaagagaaucgagaaccugaacaagaagguggacgacggcuuccuggacaucuggaccuacaacgccgagcugcuggugcugcuggagaacgagagaacccuggacuaccacgacagcaacgugaagaaccuguacgagaaggugagaagccagcugaagaacaacgccaaggagaucggcaacggcugcuucgaguucuaccacaagugcgacaacaccugcauggagagcgugaagaacggcaccuacgacuaccccaaguacagcgaggaggccaagcugaacagagaggagaucgacggcgugaagcuggagagcaccagaaucuaccagauccuggccaucuacagcaccguggccagcagccuggugcugguggugagccugggcgccaucagcuucuggaugugcagcaacggcagccugcagugcagaaucugcaucuga

SEQ ID NO: 163209 - RNA, 1701 nt, Artificial Sequence; identical to SEQ ID NO: 162716
  derived and/or modified CDS sequence (opt4) from hemagglutinin__InfluenzaA__ACU31149

SEQ ID NO: 163210 - RNA, 1701 nt, Artificial Sequence; identical to SEQ ID NO: 162716
  derived and/or modified CDS sequence (opt4) from hemagglutinin__InfluenzaA__ACU31150

SEQ ID NO: 163211 - RNA, 1701 nt, Artificial Sequence; identical to SEQ ID NO: 162716
  derived and/or modified CDS sequence (opt4) from hemagglutinin__InfluenzaA__ACU31151

SEQ ID NO: 163212 - RNA, 1701 nt, Artificial Sequence; identical to SEQ ID NO: 162716
  derived and/or modified CDS sequence (opt4) from hemagglutinin__InfluenzaA__ACU31152

SEQ ID NO: 163213 - RNA, 1707 nt, Artificial Sequence
  derived and/or modified CDS sequence (opt4) from hemagglutinin__InfluenzaA__ACU46644
auggagaagaucgugcugcuguucgccaucgugagccuggugaagagcgaccagaucugcaucggcuaccacgccaacaacagcaccgagcagguggacaccaucauggagaagaacgugaccgugacccacgcccaggacauccuggagaagacccacaacggcaagcugugcgaccuggacggcggcaagccccugauccugagagacugcagaguggccggcuggcugcugggcaaccccaugugcgacgaguucaucaacgugcccgaguggagcuacaucguggagaaggccaaccccgugaacgaccugugcuaccccggcgacuucaacgacuacgaggagcugaagcaccugcugagcagaaucaaccacuucgagaagauccagaucauccccaagagcagcuggagcagccacgaggccagccugggcgugagcagcgccugccccuaccagggcaagagcagcuucuucagaaacgugguguggcugaucaagaagaacagcaccuaccccaccaucaagagaagcuacaacaacaccaaccaggaggaccugcuggugcugugguggauccaccaccccaacgacgccgccgagcagaccaagcuguaccagaaccccaccaccuacaucagcgugggcaccagcacccugaaccagagacuggugcccagaaucgccaccagaagcaaggugaacggccagagcggcagaauggaguucuucuggaccauccugaagcccaacgacgccaucaacuucgagagcaacggcaacuucaucgcccccgaguacgccuacaagaucgugaagaagggcgacagcaccaucaugaagagcgagcuggaguacggcaacugcaacaccaagugccagacccccaugggcgccaucaacagcagcaugcccuuccaccacauccacccccugaccaucggcgagugccccaaguacgugaagagcaacagacuggugcuggccaccggccugagaaacagcccccagagagagagaagaagaaagaagagaggccuguucggcgccaucgccggcuucaucgagggcggcuggcagggcaugguggacggcugguacggcuaccaccacagcaacgagcagggcagcggcuacgccgccgacaaggagagcacccagaaggccaucgacggcgugaccaacaaggugaacagcaucaucgacaagaugaacacccaguucgaggccgugggcagagaguucaaccaccuggagagaagaaucgagaaccugaacaagaagauggaggacggcuuccuggacguguggaccuacaacgccgagcugcuggugcugauggagaacgagagaacccuggacuuccacgacagcaacgugaagaaccuguacgacaaggugagacugcagcugagagacaacgccaaggagcugggcaacggcugcuucgaguucuaccacaagugcgacgacgagugcauggagagcgugagaaacggcaccuacgacuacccccaguacagcgaggaggccagacugaagagagaggagaucagcggcgugaagcuggagagcaucggcaucuaccagauccugagcaucuacagcaccguggccagcagccuggcccuggccaucaugguggccggccugagccuguggaugugcagcaacggcagccugcagugcagaaucugcaucuga

SEQ ID NO: 163214 - RNA, 1701 nt, Artificial Sequence
  derived and/or modified CDS sequence (opt4) from hemagglutinin__InfluenzaA__ACU56924
augaaggccauccugguggugcugcuguacaccuucgccaccgccaacgccgacacccugugcaucggcuaccacgccaacaacagcaccgacaccguggacaccgugcuggagaagaacgugaccgugacccacagcgugaaccugcuggaggacaagcacaacggcaagcugugcaagcugagaggcguggccccccugcaccugggcaagugcaacaucgccggcuggauccugggcaaccccgagugcgagagccugagcaccgccagcagcuggagcuacaucguggagaccagcagcagcgacaacggcaccugcuaccccggcgacuucaucgacuacgaggagcugagagagcagcugagcagcgugagcagcuucgagagauucgagaucuuccccaagaccagcagcuggcccaaccacgacagcaacaagggcgugaccgccgccugcccccacgccggcgccaagagcuucuacaagaaccugaucuggcuggugaagaagggcaacagcuaccccaagcugagcaagagcuacaucaacgacaagggcaaggaggugcuggugcuguggggcauccaccaccccagcaccagcgccgaccagcagagccuguaccagaacgccgacgccuacguguucgugggcaccagcagauacagcaagaaguucaagcccgagaucgccaucagacccaaggugagagacagagagggcagaaugaacuacuacuggacccugguggagcccggcgacaagaucaccuucgaggccaccggcaaccugguggugcccagauacgccuucgccauggagagaaacgccggcagcggcaucaucaucagcgacacccccgugcacgacugcaacaccaccugccagacccccaagggcgccaucaacaccagccugcccuuccagaacauccaccccaucaccaucggcaagugccccaaguacgugaagagcaccaagcugagacuggccaccggccugagaaacgugcccagcauccagagcagaggccuguucggcgccaucgccggcuucaucgagggcggcuggaccggcaugguggacggcugguacggcuaccaccaccagaacgagcagggcagcggcuacgccgccgaccugaagagcacccagaacgccaucgacgagaucaccaacaaggugaacagcgugaucgagaagaugaacacccaguucaccgccgugggcaaggaguucaaccaccuggagaagagaaucgagaaccugaacaagaagguggacgacggcuuccuggacaucuggaccuacaacgccgagcugcuggugcugcuggagaacgagagaacccuggacuaccacgacagcaacgugaagaaccuguacgagaaggugagaagccagcugaagaacaacgccaaggagaucggcaacggcugcuucgaguucuaccacaagugcgacaacaccugcauggagagcgugaagaacggcaccuacgacuaccccaaguacagcgaggaggccaagcugaacagagaggagaucgacggcgugaagcuggagagcaccagaaucuaccagauccuggccaucuacagcaccguggccagcagccuggugcugguggugagccugggcgccaucagcuucuggaugugcagcaacggcagccugcagugcagaaucugcaucuga

SEQ ID NO: 163215 - RNA, 1701 nt, Artificial Sequence; identical to SEQ ID NO: 163082
  derived and/or modified CDS sequence (opt4) from hemagglutinin__InfluenzaA__ACU56931

SEQ ID NO: 163216 - RNA, 1701 nt, Artificial Sequence; identical to SEQ ID NO: 162729
  derived and/or modified CDS sequence (opt4) from hemagglutinin__InfluenzaA__ACU64792

SEQ ID NO: 163217 - RNA, 1701 nt, Artificial Sequence; identical to SEQ ID NO: 162909
  derived and/or modified CDS sequence (opt4) from hemagglutinin__InfluenzaA__ACU64801

SEQ ID NO: 163218 - RNA, 1701 nt, Artificial Sequence; identical to SEQ ID NO: 162909
  derived and/or modified CDS sequence (opt4) from hemagglutinin__InfluenzaA__ACU64812

SEQ ID NO: 163219 - RNA, 1701 nt, Artificial Sequence; identical to SEQ ID NO: 162378
  derived and/or modified CDS sequence (opt4) from hemagglutinin__InfluenzaA__ACU79871

SEQ ID NO: 163220 - RNA, 1701 nt, Artificial Sequence; identical to SEQ ID NO: 162376
  derived and/or modified CDS sequence (opt4) from hemagglutinin__InfluenzaA__ACU79882

SEQ ID NO: 163221 - RNA, 1701 nt, Artificial Sequence; identical to SEQ ID NO: 162389
  derived and/or modified CDS sequence (opt4) from hemagglutinin__InfluenzaA__ACU79893

SEQ ID NO: 163222 - RNA, 1701 nt, Artificial Sequence; identical to SEQ ID NO: 162389
  derived and/or modified CDS sequence (opt4) from hemagglutinin__InfluenzaA__ACU79904

SEQ ID NO: 163223 - RNA, 1698 nt, Artificial Sequence
  derived and/or modified CDS sequence (opt4) from hemagglutinin__InfluenzaA__ACU79937
augaaggccaagcugcuggugcugcugugcaccuucaccgccaccuacgccgacaccaucugcaucggcuaccacgccaacaacagcaccgacaccguggacaccgugcuggagaagaacgugaccgugacccacagcgugaaccugcuggaggacagccacaacggcaagcugugccugcugaagggcaucgccccccugcagcugggcaacugcagcguggccggcuggauccugggcaaccccgagugcgagagccugaucagcaaggagagcuggagcuacaucguggagacccccaaccccgagaacggcaccugcuaccccggcuacuucgccgacuacgaggagcugagagagcagcugagcagcgugagcagcuucgagagauucgagaucuuccccaaggagagcagcuggcccaaccacaccgugaccggcgugaccgccagcugcagccacaacggcaagagcagcuucuacagaaaccugcuguggcugaccgagaagaacggccuguaccccaaccugagcaacagcuacgugaacaacaaggagaaggaggugcuggugcuguggggcgugcaccaccccagcaacaucggcgugcagagagccaucuaccacaccgagaacgccuacgugagcguggugagcagccacuacagcagaagauucacccccgagaucgccaagagacccaaggugagaggccaggagggcagaaucaacuacuacuggacccugcuggagcccggcgacaccaucaucuucgaggccaacggcaaccugaucgcccccugguacgccuucgcccugagcagaggcuucggcagcggcaucaucaccagcaacgcccccaugaacgagugcgacgccaagugccagaccccccagggcgccaucaacagcagccugcccuuccagaacgugcaccccgugaccaucggcgagugccccaaguacgugagaagcaccaagcugagaauggugaccggccugagaaacauccccagcauccagagcagaggccuguucggcgccaucgccggcuucaucgagggcggcuggaccggcaugauggacggcugguacggcuaccaccaccagaacgagcagggcagcggcuacgccgccgaccagaagagcacccagaacgccaucaacggcaucaccaacaaggugaacagcgugaucgagaagaugaacacccaguucaccgccgugggcaaggaguucaacaagcuggagagaagaauggagaaccugaacaagaagguggacgacggcuuccuggacaucuggaccuacaacgccgagcugcuggugcugcuggagaacgagagaacccuggacuuccacgacagcaacgugaagaaccuguacgagaaggugaagagccagcugaagaacaacgccaaggagaucggcaacggcugcuucgaguucuaccacaagugcaacaacgagugcauggagagcgugaagaacggcaccuacgacuaccccaaguacagcgaggagagcaagcugaacagagagaagaucgacggcgugaagcuggagagcaugggcguguaccagauccuggccaucuacagcaccguggccagcagccuggugcugcuggugagccugggcgccaucagcuucuggaugugcagcaacggcagccugcagugcagaaucugcaucuga

SEQ ID NO: 163224 - RNA, 1689 nt, Artificial Sequence
  derived and/or modified CDS sequence (opt4) from hemagglutinin__InfluenzaA__ACU79948
auggccaucaucuaccugauccugcuguucaccgccgugagaggcgaccagaucugcaucggcuaccacgccaacaacagcaccgagaagguggacaccauccuggagagaaacgugaccgugacccacgccaaggacauccuggagaagacccacaacggcaagcugugcaagcugaacggcauccccccccuggagcugggcgacugcagcaucgccggcuggcugcugggcaaccccgagugcgacagacugcugagcgugcccgaguggagcuacaucauggagaaggagaaccccagagacggccugugcuaccccggcagcuucaacgacuacgaggagcugaagcaccugcugagcagcgugaagcacuucgagaaggugaagauccugcccaaggacagauggacccagcacaccaccaccggcggcagcagagccugcgccgugagcggcaaccccagcuucuucagaaacaugguguggcugaccaagaagggcagcgacuaccccguggccaagggcagcuacaacaacaccagcggcgagcagaugcugaucaucuggggcgugcaccaccccaacgacgagaccgagcagagaacccuguaccagaacgugggcaccuacgugagcgugggcaccagcacccugaacaagagaagcacccccgagaucgccaccagacccaaggugaacggccagggcggcagaauggaguucagcuggacccugcuggacaugugggacaccaucaacuucgagagcaccggcaaccugaucgcccccgaguacggcuucaagaucagcaagagaggcagcagcggcaucaugaagaccgagggcacccuggagaacugcgagaccaagugccagaccccccugggcgccaucaacaccacccugcccuuccacaacgugcacccccugaccaucggcgagugccccaaguacgugaagagcgagaagcuggugcuggccaccggccugagaaacgugccccagaucgagagcagaggccuguucggcgccaucgccggcuucaucgagggcggcuggcagggcaugguggacggcugguacggcuaccaccacagcaacgaccagggcagcggcuacgccgccgacaaggagagcacccagaaggccuucgacggcaucaccaacaacgugaacagcgugaucgagaagaugaacacccaguucgaggccgugggcaaggaguucagcaaccuggagagaagacuggagaaccugaacaagaagauggaggacggcuuccuggacguguggaccuacaacgccgagcugcuggugcugauggagaacgagagaacccuggacuuccacgacagcaacgugaagaaccuguacgacaaggugagaaugcagcugagagacaacgugaaggagcugggcaacggcugcuucgaguucuaccacaagugcgacgacgagugcaugaacagcgugaagaacggcaccuacgacuaccccaaguacgaggaggagagcaagcugaacagaaacgagaucaagggcgugaagcugagcagcaugggcguguaccagauccuggccaucuacgccaccguggccggcagccugagccuggccaucaugauggccggcaucagcuucuggaugugcagcaacggcagccugcagugcagaaucugcaucuga

SEQ ID NO: 163225 - RNA, 1689 nt, Artificial Sequence
  derived and/or modified CDS sequence (opt4) from hemagglutinin__InfluenzaA__ACU79959
auggccaucaucuaccugauccugcuguucaccgccgugagaggcgaccagaucugcaucggcuaccacgccaacaacagcaccgagaagguggacaccauccuggagagaaacgugaccgugacccacgccaaggacauccuggagaagacccacaacggcaagcugugcaagcugaacggcauccccccccuggagcugggcgacugcagcaucgccggcuggcugcugggcaaccccgagugcgacagacugcugagcgugcccgaguggagcuacaucauggagaaggagaaccccagagacggccugugcuaccccggcagcuucaacgacuacgaggagcugaagcaccugcugagcagcgugaagcacuucgagaaggugaagauccugcccaaggacagauggacccagcacaccaccaccggcggcagcagagccugcgccgugagcggcaaccccagcuucuucagaaacaugguguggcugaccaagaagggcagcgacuaccccguggccaagggcagcuacaacaacaccagcggcgagcagaugcugaucaucuggggcgugcaccaccccaacgacgagaccgagcagagaacccuguaccagaacgugggcaccuacgugagcgugggcaccagcacccugaacaagagaagcacccccgagaucgccaccagacccaaggugaacggccagggcggcagaauggaguucagcuggacccugcuggacaugugggacaccaucaacuucgagagcaccggcaaccugaucgcccccgaguacggcuucaagaucagcaagagaggcagcagcggcaucaugaagaccgagggcacccuggagaacugcgagaccaagugccagaccccccugggcgccaucaacaccacccugcccuuccacaacgugcacccccugaccaucggcgagugccccaaguacgugaagagcgagaagcuggugcuggccaccggccugagaaacgugccccagaucgagagcagaggccuguucggcgccaucgccggcuucaucgagggcggcuggcagggcaugguggacggcugguacggcuaccaccacagcaacgaccagggcagcggcuacgccgccgacaaggagagcacccagaaggccuucgacggcaucaccaacaaggugaacagcgugaucgagaagaugaacacccaguucgaggccgugggcaaggaguucagcaaccuggagagaagacuggagaaccugaacaagaagauggaggacggcuuccuggacguguggaccuacaacgccgagcugcuggugcugauggagaacgagagaacccuggacuuccacgacagcaacgugaagaaccuguacgacaaggugagaaugcagcugagagacaacgugaaggagcugggcaacggcugcuucgaguucuaccacaagugcgacgacgagugcaugaacagcgugaagaacggcaccuacgacuaccccaaguacgaggaggagagcaagcugaacagaaacgagaucaagggcgugaagcugagcagcaugggcguguaccagauccuggccaucuacgccaccguggccggcagccugagccuggccaucaugauggccggcaucagcuucuggaugugcagcaacggcagccugcagugcagaaucugcaucuga

SEQ ID NO: 163226 - RNA, 1701 nt, Artificial Sequence
  derived and/or modified CDS sequence (opt4) from hemagglutinin__InfluenzaA__ACU79970
augaagaccaucaucgcccugagcuacauccagugccugguguucgcccagaaguuccccggcaacgacaacagcaccgccacccugugccugggccaccacgccgugcccaacggcaccaucgugaagaccaucaccaacgaccagaucgaggugaccaacgccaccgagcuggugcagagcagcagcaccggcgagaucugcgacagcccccaccagauccuggacggcgagaacugcacccugaucgacgcccugcugggcgacccccagugcgacggcuuccagaacaagaacugggaccuguucguggagagaagcaaggccuacagcaacugcuaccccuacgacgugcccgacuacgccagccugagaagccugguggccagcagcggcacccuggaguucaacaacgagagcuucaacuggaccggcgugacccagaacggcaccagcagcgccugcaucagaagaagcaacaacagcuucuucagcaagcugaacuggcugacccacagcaaguucaaguaccccgcccugaacgugaccaugcccaacaacgagaacuucgacaagcuguacaucuggggcgugcaccaccccggcaccgacaacgaccagaucuuccuguacgcccaggccagcggcagaaucaccgugagcaccaagagaagccagcagaccgugauccccaacaucggcagcagacccagagugagaaacauccccagcagaaucagcaucuacuggaccaucgugaagcccggcgacauccugcugaucaacagcaccggcaaccugaucgcccccagaggcuacuucaagaucagaagcggcaagagcagcaucaugagaagcgacgcccccaucggcaagugcaacagcgagugcaucacccccaacggcagcauccccaacgacaagcccuuccagaacgugaacagaaucaccuacggcgccugccccagauacgugaagcagaacacccugaagcuggccaccggcaugagaaacgugcccgagaagcagaccagaggcaucuucggcgccaucgccggcuucaucgagaacggcugggagggcaugguggacggcugguacggcuucagacaccagaacagcgagggcaucggccaggccgccgaccugaagagcacccaggccgccaucgaccagaucaacggcaagcugaacagacugaucggcaagaccaacgagaaguuccaccagaucgagaaggaguucagcgagguggagggcagaauccaggaccuggagaaguacguggaggacaccaagaucgaccuguggagcuacaacgccgagcugcugguggcccuggagaaccagcacaccaucgaccugaccgacagcgagaugaacaagcuguucgagaagaccaagaagcagcugagagagaacgccgaggacaugggcaacggcugcuucaagaucuaccacaagugcgacaacgccugcaucggcagcaucagaaacggcaccuacgaccacgacguguacagagacgaggcccugaacaacagauuccagaucaagggcguggagcugaagagcggcuacaaggacuggauccuguggaucagcuucgccaucagcugcuuccugcugugcaucgcccugcugggcuucaucaugugggccugccagaagggcaacaucagaugcaacaucugcaucuga

SEQ ID NO: 163227 - RNA, 1698 nt, Artificial Sequence
  derived and/or modified CDS sequence (opt4) from hemagglutinin__InfluenzaA__ACU79981
augaaggugaagcugcuggugcugcugugcaccuucaccgccaccuacgccgacaccaucugcaucggcuaccacgccaacaacagcaccgacaccguggacaccgugcuggagagaaacgugaccgugacccacagcgugaaccugcuggagaacagccacaacggcaagcugugccugcugaagggcaucgccccccugcagcugggcaacugcagcguggccggcuggauccugggcaaccccgagugcgagcugcugaucagcaaggagagcuggagcuacaucguggagaagcccaaccccgagaacggcaccugcuaccccggccacuucgccgacuacgaggagcugagagagcagcugagcagcgugagcagcuucgagagauucgagaucuuccccaaggagagcagcuggcccaaccacaccgugaccggcgugagcgccagcugcagccacaacggcgagagcagcuucuacagaaaccugcuguggcugaccggcaagaacggccuguaccccaaccugagcaagagcuacgccaacaacaaggagaaggaggugcuggugcuguggggcgugcaccacccccccaacaucggcgaccagaaggcccuguaccacaccgagaacgccuacgugagcguggugagcagccacuacagcagaaaguucacccccgagaucgccaagagacccaaggugagagaccaggagggcagaaucaacuacuacuggacccugcugaagcccggcgacaccaucaucuucgaggccaacggcaaccugaucgcccccagauacgccuucgcccugagcagaggcuucggcagcggcaucaucaacagcaacgcccccauggacaagugcgacgccaagugccagaccccccagggcgccaucaacagcagccugcccuuccagaacgugcaccccgugaccaucggcgagugccccaaguacgugagaagcgccaagcugagaauggugaccggccugagaaacauccccagcauccagagcagaggccuguucggcgccaucgccggcuucaucgagggcggcuggaccggcaugguggacggcugguacggcuaccaccaccagaacgagcagggcagcggcuacgccgccgaccagaagagcacccagaacgccaucaacggcaucaccaacaaggugaacagcgugaucgagaagaugaacacccaguucaccgccgugggcaaggaguucaacaagcuggagagaagaauggagaaccugaacaagaagguggacgacggcuucaucgacaucuggaccuacaacgccgagcugcuggugcugcuggagaacgagagaacccuggacuuccacgacagcaacgugaagaaccuguacgagaaggugaagagccagcugaagaacaacgccaaggagaucggcaacggcugcuucgaguucuaccacaagugcaacgacgagugcauggagagcgugaagaacggcaccuacgacuaccccaaguacagcgaggagagcaagcugaacagagagaagaucgacggcgugaagcuggagagcaugggcguguaccagauccuggccaucuacagcaccguggccagcagccuggugcugcuggugagccugggcgccaucagcuucuggaugugcagcaacggcagccugcagugcagaaucugcaucuga

SEQ ID NO: 163228 - RNA, 1698 nt, Artificial Sequence
  derived and/or modified CDS sequence (opt4) from hemagglutinin__InfluenzaA__ACU79992
augaaggugaagcugcuggugcugcugugcaccuucaccgccaccuacgccgacaccaucugcaucggcuaccacgccaacaacagcaccgacaccguggacaccgugcuggagaagaacgugaccgugacccacagcgugaaccugcuggaggacaaccacaacggcaagcugugccugcugaagggcaaggccccccugcagcugggcaacugcagcguggccggcuggauccugggcaaccccgagugcggccugcugaucagcaaggagagcuggagcuacaucguggagagacccaaccccgagaacggcaccugcuaccccggccacuucgccgacuacgaggagcugagagagcagcugagcagcgugagcagcuucgagagauucgagaucuuccccaaggagagcagcuggcccaaccacaccgugaccggcgugagcgccagcugcagccacaacggcgagagcagcuucuacaagaaccugcuguggcugaccggcaagaacggccuguaccccaaccugagcaagagcuacgccaacaacaaggagaaggaggugcuggugcuguggggcgugcaccacccccccaacaucggcgaccagaugacccuguaccacaaggagaacgccuacgugagcguggugagcagccacuacagcagaaaguucacccccgagaucgccaagagacccaaggugagagaccaggagggcagaaucaacuacuacuggacccugcuggagcccggcgacaccaucaucuucgaggccaacggcaaccugaucgcccccagauacgccuucgcccugagcagaggcuucggcagcggcaucaucaacagcaacgcccccauggacgagugcgacgccaagugccagaccccccagggcgccaucaacagcagccugcccuuccagaacgugcaccccgugaccaucggcgagugccccaaguacgugagaagcgccaagcugagaauggugaccggccugagaaacauccccagcauccagagcagaggccuguucggcgccaucgccggcuucaucgagggcggcuggaccggcaugguggacggcugguacggcuaccaccaccagaacgagcagggcagcggcuacgccgccgaccagaagagcacccagaacgccaucaacggcaucaccaacaaggugaacagcgugaucgagaagaugaacacccaguucaccgccgugggcaaggaguucaacaagcuggagagaagaauggagaaccugaacaagaagguggacgacggcuucaucgacguguggaccuacaacgccgagcugcuggugcugcuggagaacgagagaacccuggacuuccacgacagcaacgugaagaaccuguacgagaaggugaagaaccagcugaagaacaacgccaaggagaucggcaacggcugcuucgaguucuaccacaagugcaacgacgagugcauggagagcgugaagaacggcaccuacgacuaccccaaguacagcgaggagagcaagcugagcagagagaagaucgacggcgugaagcuggagagcaugggcguguaccagauccuggccaucuacagcaccguggccagcagccuggugcugcuggugagccugggcgccaucagcuucuggaugugcagcaacggcagccugcagugcagaaucugcaucuga

SEQ ID NO: 163229 - RNA, 1701 nt, Artificial Sequence; identical to SEQ ID NO: 162494
  derived and/or modified CDS sequence (opt4) from hemagglutinin__InfluenzaA__ACU80003

SEQ ID NO: 163230 - RNA, 1698 nt, Artificial Sequence
  derived and/or modified CDS sequence (opt4) from hemagglutinin__InfluenzaA__ACU80025
augaaggugaagcugcuggugcugcugugcaccuucgccgccaccuacgccgacaccaucugcaucggcuaccacgccaacaacagcaccgacaccguggacaccgugcuggagaagaacgugaccgugacccacagcgugaaccugcuggagaacagccacaacggcaagcugugccugcugaagggcaucgccccccugcagcugggcaacugcagcguggccggcuggauccugggcaaccccgagugcgagcugcugaucagcaaggagagcuggagcuacaucguggagaagcccaaccccgagaacggcaccugcuaccccggccacuucgccgacuacgaggagcugagagagcagcugagcagcgugagcagcuucgagagauucgagaucuuccccaaggagagcagcuggcccaaccacaccgugaccggcgugagcgccagcugcagccacaacggcgagagcagcuucuacagaaaccugcuguggcugaccggcaagaacggccuguaccccaaccugagcaagagcuacgccaacaacaaggagaaggaggugcuggugcuguggggcgugcaccacccccccaacaucggcgaccagaaggcccuguaccacaccgagaacgccuacgugagcguggugagcagccacuacagcagaaaguucacccccgagaucgccaagagacccaaggugagagaccaggagggcagaaucaacuacuacuggacccugcuggagcccggcgacaccaucaucuucgaggccaacggcaaccugaucgcccccagauacgccuucgcccugagcagaggcuucggcagcggcaucaucaacagcaacgcccccauggacaagugcgacgccaagugccagaccccccagggcgccaucaacagcagccugcccuuccagaacgugcaccccgugaccaucggcgagugccccaaguacgugagaagcgccaagcugagaauggugaccggccugagaaacauccccagcauccagagcagaggccuguucggcgccaucgccggcuucaucgagggcggcuggaccggcaugguggacggcugguacggcuaccaccaccagaacgagcagggcagcggcuacgccgccgaccagaagagcacccagaacgccaucaacggcaucaccaacaaggugaacagcgugaucgagaagaugaacacccaguucaccgccgugggcaaggaguucaacaagcuggagagaagaauggagaaccugaacaagaagguggacgacggcuucaucgacaucuggaccuacaacgccgagcugcuggugcugcuggagaacgagagaacccuggacuuccacgacagcaacgugaagaaccuguacgagaaggugaagagccagcugaagaacaacgccaaggagaucggcaacggcugcuucgaguucuaccacaagugcaacgacgagugcauggagagcgugaagaacggcaccuacgacuaccccaaguacagcgaggagagcaagcugaacagagagaagaucgacggcgugaagcuggagagcaugggcguguaccagauccuggccaucuacagcaccguggccagcagccuggugcugcuggugagccugggcgccaucagcuucuggaugugcagcaacggcagccugcagugcagaaucugcaucuga

SEQ ID NO: 163231 - RNA, 1701 nt, Artificial Sequence
  derived and/or modified CDS sequence (opt4) from hemagglutinin__InfluenzaA__ACU80036
augaagaccaucaucgcccugagcuacauccugugccugguguucgcccagaagcugcccggcaacgacaacagcaccgccacccugugccugggccaccacgccgugcccaacggcaccaucgugaagaccaucaccaacgaccagaucgaggugaccaacgccaccgagcuggugcagagcagcagcaccggcgagaucugcgacagcccccaccagauccuggacggcgagaacugcacccugaucgacgcccugcugggcgacccccagugcgacggcuuccagaacaagaagugggaccuguucguggagagaagcaaggccuacagcaacugcuaccccuacgacgugcccgacuacgccagccugagaagccugguggccagcagcggcacccuggaguucaacaacgagagcuucaacuggaccggcgugacccagaacggcaccagcagcgccugcaucagaagaagcaacaacagcuucuucagcagacugaacuggcugacccaccugaaguucaaguaccccgcccugaacgugaccaugcccaacaacgagcaguucgacaagcuguacaucuggggcgugcaccaccccggcaccgacaacgaccagaucuuccuguacgcccaggccagcggcagaaucaccgugagcaccaagagaagccagcagaccgugauccccaacaucggcagcagacccagagugagaaacauccccagcagaaucagcaucuacuggaccaucgugaagcccggcgacauccugcugaucaacagcaccggcaaccugaucgcccccagaggcuacuucaagaucagaagcggcaagagcagcaucaugagaagcgacgcccccaucggcaagugcagcagcgagugcaucacccccaacggcagcauccccaacgacaagcccuuccagaacgugaacagaaucaccuacggcgccugccccagauacgugaagcagaacacccugaagcuggccaccggcaugagaaacgugcccgagaagcagaccagaggcaucuucggcgccaucgccggcuucaucgagaacggcugggagggcaugguggacggcugguacggcuucagacaccagaacagcgagggcagaggccaggccgccgaccugaagagcacccaggccgccaucgaccagaucaacggcaagcugaacagacugaucggcaagaccaacgagaaguuccaccagaucgagaaggaguucagcgagguggagggcagaauccaggaccuggagaaguacguggaggacaccaagaucgaccuguggagcuacaacgccgagcugcugguggcccuggagaaccagcacaccaucgaccugaccgacagcgagaugaacaagcuguucgagaagaccaagaagcagcugagagagaacgccgaggacaucggcaacggcugcuucaagaucuaccacaagugcgacaacgccugcaucggcagcaucagaaacggcaccuacgaccacgacguguacagagacgaggcccugaacaacagauuccagaucaagggcguggagcugaagagcggcuacaaggacuggauccuguggaucagcuucgccaucagcugcuuccugcugugcguggcccugcugggcuucaucaugugggccugccagaagggcaacaucagaugcaacaucugcaucuga

SEQ ID NO: 163232 - RNA, 1698 nt, Artificial Sequence; identical to SEQ ID NO: 162703
  derived and/or modified CDS sequence (opt4) from hemagglutinin__InfluenzaA__ACU80047

SEQ ID NO: 163233 - RNA, 1701 nt, Artificial Sequence
  derived and/or modified CDS sequence (opt4) from hemagglutinin__InfluenzaA__ACU80058
augaagaccaucaucgcccugagcuacauccugugccugguguucgcccagaagcugcccggcaacgacaacagcaccgccacccugugccugggccaccacgccgugcccaacggcaccaucgugaagaccaucaccaacgaccagaucgaggugaccaacgccaccgagcuggugcagagcagcagcaccggcggcaucugcgacagcccccaccagauccuggacggcgagaacugcacccugaucgacgcccugcugggcgacccccagugcgacggcuuccagaacaagaagugggaccuguucguggagagaagcaaggccugcagcaacugcuaccccuacgacgugcccgacuacgccagccugagaagccugguggccagcagcggcacccuggaguucaacaacgagagcuucaacuggaccggcgugacccagaacggcaccagcagcgccugcaagagaagaagcaacaacagcuucuucagcagacugaacuggcugacccaccugaaguucaaguaccccgcccugaacgugaccaugcccaacaacgagaaguucgacaagcuguacaucuggggcgugcaccaccccggcaccgacaacgaccagaucuuccuguacgcccaggccagcggcagaaucaccgugagcaccaagagaagccagcagaccgugauccccaacaucggcagcagacccagagugagaaacauccccagcagaaucagcaucuacuggaccaucgugaagcccggcgacauccugcugaucaacagcaccggcaaccugaucgcccccagaggcuacuucaagaucagaagcggcaagagcagcaucaugagaagcgacgcccccaucggcaagugcaacagcgagugcaucacccccaacggcagcauccccaacgacaagcccuuccagaacgugaacagaaucaccuacggcgccugccccagauacgugaagcagaacacccugaagcuggccaccggcaugagaaacgugcccgagaagcagaccagaggcaucuucggcgccaucgccggcuucaucgagaacggcugggagggcaugguggacggcugguacggcuucagacaccagaacagcgagggcaucggccaggccgccgaccugaagagcacccaggccgccaucaaccagaucaacggcaagcugaacagacugaucggcaagaccaacgagaaguuccaccagaucgagaaggaguucagcgagguggagggcagaauccaggaccuggagaaguacguggaggacaccaagaucgaccuguggagcuacaacgccgagcugcugguggcccuggagaaccagcacaccaucgaccugaccgacagcgagaugaacaagcuguucgagagaaccaagaagcagcugagagagaacgccgaggacaugggcaacggcugcuucaagaucuaccacaagugcgacaacgccugcaucggcagcaucagaaacggcaccuacgaccacgacguguacagagacgaggcccugaacaacagauuccagaucaagggcguggagcugaagagcggcuacaaggacuggauccuguggaucagcuucgccaucagcugcuuccugcugugcguggcccugcugggcuucaucaugugggccugccagaagggcaacaucagaugcaacaucugcaucuga

SEQ ID NO: 163234 - RNA, 1698 nt, Artificial Sequence; identical to SEQ ID NO: 162548
  derived and/or modified CDS sequence (opt4) from hemagglutinin__InfluenzaA__ACU80069

SEQ ID NO: 163235 - RNA, 1698 nt, Artificial Sequence
  derived and/or modified CDS sequence (opt4) from hemagglutinin__InfluenzaA__ACU80080
augaaggugaagcugcuggugcugcugugcaccuucaccgccaccuacgccgacaccaucugcaucggcuaccacgccaacaacagcaccgacaccguggacaccgugcuggagaagaacgugaccgugacccacagcgugaaccugcuggagaacagccacaacggcaagcugugccugcugaagggcaucgccccccugcagcugggcaacugcagcguggccggcuggauccugggcaaccccgagugcgagcugcugaucagcaaggagagcuggagcuacaucguggagaagcccaaccccgagaacggcaccugcuaccccggccacuucgccgacuacgaggagcugagagagcagcugagcagcgugagcagcuucgagagauucgagaucuuccccaaggagagcagcuggcccaaccacaccgugaccggcgugagcgccagcugcagccacaacggcgagagcagcuucuacagaaaccugcuguggcugaccggcaagaacggccuguaccccaaccugagcaagagcuacgccaacaacaaggagaaggaggugcuggugcuguggggcgugcaccacccccccaacaucguggaccagaagacccuguacagaaccgagaacgccuacgugagcguggugagcagccacuacagcagaaaguucacccccgagaucgccaagagacccaaggugagagaccaggagggcagaaucaacuacuacuggacccugcuggagcccggcgacaccaucaucuucgaggccaacggcaaccugaucgcccccagauacgccuucgcccugagcagaggcuucggcagcggcaucaucaacagcaacgcccccauggacaagugcgacgccaagugccagaccccccagggcgccaucaacagcagccugcccuuccagaacgugcaccccgugaccaucggcgagugccccaaguacgugagaagcgccaagcugagaauggugaccggccugagaaacauccccagcauccagagcagaggccuguucggcgccaucgccggcuucaucgagggcggcuggaccggcaugguggacggcugguacggcuaccaccaccagaacgagcagggcagcggcuacgccgccgaccagaagagcacccagaacgccaucaacggcaucaccaacaaggugaacagcgugaucgagaagaugaacacccaguucaccgccgugggcaaggaguucaacaagcuggagagaagaauggagaaccugaacaagaagguggacgacggcuucaucgacaucuggaccuacaacgccgagcugcuggugcugcuggagaacgagagaacccuggacuuccacgacagcaacgugaagaaccuguacgagaaggugaagagccagcugaagaacaacgccaaggagaucggcaacggcugcuucgaguucuaccacaagugcaacgacgagugcauggagagcgugaagaacggcaccuacgacuaccccaaguacagcgaggagagcaagcugaacagagagaagaucgacggcaucaagcuggagagcaugggcguguaccagauccuggccaucuacagcaccguggccagcagccuggugcugcuggugagccugggcgccaucagcuucuggaugugcagcaacggcagccugcagugcagaaucugcaucuga

SEQ ID NO: 163236 - RNA, 1698 nt, Artificial Sequence; identical to SEQ ID NO: 162834
  derived and/or modified CDS sequence (opt4) from hemagglutinin__InfluenzaA__ACU80091

SEQ ID NO: 163237 - RNA, 1701 nt, Artificial Sequence; identical to SEQ ID NO: 162597
  derived and/or modified CDS sequence (opt4) from hemagglutinin__InfluenzaA__ACU80102

SEQ ID NO: 163238 - RNA, 1701 nt, Artificial Sequence
  derived and/or modified CDS sequence (opt4) from hemagglutinin__InfluenzaA__ACU80113
augaagaccaucaucgcccugagcuacauccugugccugguguucgcccagaaguuccccggcaacgacaacagcaccgccacccugugccugggccaccacgccgugcccaacggcaccaucgugaagaccaucaccaacgaccagaucgaggugaccaacgccaccgagcuggugcagagcagcagcaccggcgagaucugcgacagcccccaccagauccuggacggcgagaacugcacccugaucgacgcccugcugggcgacccccagugcgacggcuuccagaacaagaacugggaccuguucguggagagaagcaaggccuacagcaacugcuaccccuacgacgugcccgacuacgccagccugagaagccugguggccagcagcggcacccuggaguucaacaacgagagcuucaacuggaccggcgugacccagaacggcaccagcagcgccugcaucagaagaagcaacaacagcuucuucagcagacugaacuggcugacccacagcaaguucaaguaccccgcccugaacgugaccaugcccaacaacgagaacuucgacaagcuguacaucuggggcgugcaccaccccggcaccgacaacgaccagaucuuccuguacgcccaggccagcggcagaaucaccgugagcaccaagagaagccagcagaccgugauccccaacaucggcagcagacccagagugagaaacauccccagcagaaucagcaucuacuggaccaucgugaagcccggcgacauccugcugaucaacagcaccggcaaccugaucgcccccagaggcuacuucaagaucagaagcggcaagagcagcaucaugagaagcgacgcccccaucggcaagugcaacagcgagugcaucacccccaacggcagcauccccaacgacaagcccuuccagaacgugaacagaaucaccuacggcgccugccccagauacgugaagcagaacacccugaagcuggccaccggcaugagaaacgugcccgagaagcagaccagaggcaucuucggcgccaucgccggcuucaucgagaacggcugggagggcaugguggacggcugguacggcuucagacaccagaacagcgagggcaucggccaggccgccgaccugaagagcacccaggccgccaucgaccagaucaacggcaagcugaacagacugaucggcaagaccaacgagaaguuccaccagaucgagaaggaguucagcgagaucgagggcagaauccaggaccuggagaaguacguggaggacaccaagaucgaccuguggagcuacaacgccgagcugcugguggcccuggagaaccagcacaccaucgaccugaccgacagcgagaugaacaagcuguucgagaagaccaagaagcagcugagagagaacgccgaggacaugggcaacggcugcuucaagaucuaccacaagugcgacaacgccugcaucggcagcaucagaaacggcaccuacgaccacgacguguacagagacgaggcccugaacaacagauuccagaucaagggcguggagcugaagagcggcuacaagaacuggauccuguggaucagcuucgccaucagcugcuuccugcugugcaucgcccugcugggcuucaucaugugggccugccagaagggcaacaucagaugcaacaucugcaucuga

SEQ ID NO: 163239 - RNA, 1701 nt, Artificial Sequence
  derived and/or modified CDS sequence (opt4) from hemagglutinin__InfluenzaA__ACU80135
augaagaccaucaucgcccugagcuacauccugugccugguguucgcccagaaguuccccggcaacgacaacagcaccgccacccugugccugggccaccacgccgugcccaacggcaccauggugaagaccaucaccaacgaccagaucgaggugaccaacgccaccgagcuggugcagagcagcagcaccggcgagaucugcgacagcccccaccagauccuggacggcgagaacugcacccugaucgacgcccugcugggcgacccccagugcgacggcuuccagaacaagaacugggaccuguucguggagagaagcaaggccuacagcaacugcuaccccuacgacgugcccgacuacgccagccugagaagccugguggccagcagcggcacccuggaguucaacaacgagagcuucaacuggaccggcgugacccagaacggcaccagcagcgccugcaucagaagaagcaacaacagcuucuucagcagacugaacuggcugacccacagcaaguucaaguaccccgcccugaacgugaccaugcccaacaacgagaacuucgacaagcuguacaucuggggcgugcaccaccccggcaccgacaacgaccagaucuuccuguacgcccaggccagcggcagaaucaccgugagcaccaagagaagccagcagaccgugauccccaacaucggcagcagacccagagugagaaacauccccagcagaaucagcaucuacuggaccaucgugaagcccggcgacauccugcugaucaacagcaccggcaaccugaucgcccccagaggcuacuucaagaucagaagcggcaagagcagcaucaugagaagcgacgcccccaucggcaagugcaacagcgagugcaucacccccaacggcagcauccccaacgacaagcccuuccagaacgugaacagaaucaccuacggcgccugccccagauacgugaagcagaacacccugaagcuggccaccggcaugagaaacgugcccgagaagcagaccagaggcaucuucggcgccaucgccggcuucaucgagaacggcugggagggcaugguggacggcugguacggcuucagacaccagaacagcgagggcaucggccaggccgccgaccugaagagcacccaggccgccaucgaccagaucaacggcaagcugaacagacugaucggcaagaccaacgagaaguuccaccagaucgagaaggaguucagcgagguggagggcagaauccaggaccuggagaaguacguggaggacaccaagaucgaccuguggagcuacaacgccgagcugcugguggcccuggagaaccagcacaccaucgaccugaccgacagcgagaugaacaagcuguucgagaagaccaagaagcagcugagagagaacgccgaggacaugggcaacggcugcuucaagaucuaccacaagugcgacaacgccugcaucggcagcaucagaaacggcaccuacgaccacgacguguacagagacgaggcccugaacaacagauuccagaucaagggcguggagcugaagagcggcuacaaggacuggauccuguggaucagcuucgccaucagcugcuuccugcugugcaucgcccugcugggcuucaucaugugggccugccagaagggcaacaucagaugcaacaucugcaucuga

SEQ ID NO: 163240 - RNA, 1701 nt, Artificial Sequence
  derived and/or modified CDS sequence (opt4) from hemagglutinin__InfluenzaA__ACU80146
augaagaccaucaucgcccugagcuacauccugugccugguguucgcccagaagcugcccggcaacgacaacagcaccgccacccugugccugggccaccacgccgugcccaacggcaccaucgugaagaccaucaccaacgaccagaucgaggugaccaacgccaccgagcuggugcagagcagcagcaccggcgagaucugcgacagcccccaccagauccuggacggcgagaacugcacccugaucgacgcccugcugggcgacccccagugcgacggcuuccagaacaagaagugggaccuguucguggagagaagcaaggccuacagcaacugcuaccccuacgacgugcccgacuacgccagccugagaagccugguggccagcagcggcacccuggaguucaacaacgagagcuucaacuggaccggcgugacccagaacggcaccagcagcgccugcaucagaagaagcaacaacagcuucuucagcagacugaacuggcugacccacagcaaguucaaguaccccgcccugaacgugaccaugcccaacaacgaggaguucgacaagcuguacaucuggggcgugcaccaccccggcaccgacaacgaccagaucuuccuguacgcccaggccagcggcagaaucaccgugagcaccaagagaagccagcagaccgugauccccaacaucggcagcagacccagagugagaaacauccccagcagaaucagcaucuacuggaccaucgugaagcccggcgacauccugcugaucaacagcaccggcaaccugaucgcccccagaggcuacuucaagaucagaagcggcaagagcagcaucaugagaagcgacgcccccaucggcaagugcaacagcgagugcaucacccccaacggcagcauccccaacgacaagcccuuccagaacgugaacagaaucaccuacggcgccugccccagauacgugaagcagaacacccugaagcuggccaccggcaugagaaacgugcccgagaagcagaccagaggcaucuucggcgccaucgccggcuucaucgagaacggcugggagggcaugguggacggcugguacggcuucagacaccagaacagcgagggcaucggccaggccgccgaccugaagagcacccaggccgccaucgaccagaucaacggcaagcugaacagacugaucggcaagaccaacgagaaguuccaccagaucgagaaggaguucagcgagguggagggcagaauccaggaccuggagaaguacguggaggacaccaagaucgaccuguggagcuacaacgccgagcugcugguggcccuggagaaccagcacaccaucgaccugaccgacagcgagaugaacaagcuguucgagaagaccaagaagcagcugagagagaacgccgaggacaugggcaacggcugcuucaagaucuaccacaagugcgacaacgccugcaucggcagcaucagaaacggcaccuacgaccacgacguguacagagacgaggcccugaacaacagauuccagaucaagggcguggagcugaagagcggcuacaaggacuggauccuguggaucagcuucgccaucagcugcuuccugcugugcguggcccugcugggccugaucaugugggccugccagaagggcaacaucagaugcaacaucugcaucuga

SEQ ID NO: 163241 - RNA, 1701 nt, Artificial Sequence; identical to SEQ ID NO: 162494
  derived and/or modified CDS sequence (opt4) from hemagglutinin__InfluenzaA__ACU80157

SEQ ID NO: 163242 - RNA, 1698 nt, Artificial Sequence; identical to SEQ ID NO: 163230
  derived and/or modified CDS sequence (opt4) from hemagglutinin__InfluenzaA__ACU80168

SEQ ID NO: 163243 - RNA, 1701 nt, Artificial Sequence; identical to SEQ ID NO: 162494
  derived and/or modified CDS sequence (opt4) from hemagglutinin__InfluenzaA__ACU80179

SEQ ID NO: 163244 - RNA, 1701 nt, Artificial Sequence
  derived and/or modified CDS sequence (opt4) from hemagglutinin__InfluenzaA__ACU80190
augaagaccaucaucgcccugagcuacauccugugccugguguucgcccagaagcugcccggcaacgacaacagcaccgccacccugugccugggccaccacgccgugcccaacggcaccaucgugaagaccaucaccaacgaccagaucgaggugaccaacgccaccgagcuggugcagagcagcagcaccggcgagaucugcgacagcccccaccagauccuggacggcgagaacugcacccugaucgacgcccugcugggcgacccccagugcgacggcuuccagaacaagaagugggaccuguucguggagagaagcaaggccuacagcaacugcuaccccuacgacgugcccgacuacgccagccugagaagccugguggccagcagcggcacccuggaguucaacaacgagagcuucaacuggaccggcgugacccagaacggcaccagcagcgccugcaucagaagaagcaacaacagcuucuucagcagacugaacuggcugacccacagcaaguucaaguaccccgcccugaacgugaccaugcccaacaacgaggaguucgacaagcuguacaucuggggcgugcaccaccccggcaccgacaacgaccagaucuuccuguacgcccaggccagcggcagaaucaccgugagcaccaagagaagccagcagaccgugauccccaacaucggcagcagacccagagugagaaacauccccagcagaaucagcaucuacuggaccaucgugaagcccggcgacauccugcugaucaacagcaccggcaaccugaucgcccccagaggcuacuucaagaucagaagcggcaagagcagcaucaugagaagcgacgcccccaucggcaagugcaacagcgagugcaucacccccaacggcagcauccccaacgacaagcccuuccagaacgugaacagaaucaccuacggcgccugccccagauacgugaagcagaacacccugaagcuggccaccggcaugagaaacgugcccgagaagcagaccagaggcaucuucggcgccaucgccggcuucaucgagaacggcugggagggcaugguggacggcugguacggcuucagacaccagaacagcgagggcaucggccaggccgccgaccugaagagcacccaggccgccaucgaccagaucaacggcaagcugaacagacugaucggcaagaccaacgagaaguuccaccagaucgagaaggaguucagcgagguggagggcagaauccaggaccuggagaaguacguggaggacaccaagaucgaccuguggagcuacaacgccgagcugcugguggcccuggagaaccagcacaccaucgaccugaccgacagcgagaugaacaagcuguucgagaagaccaagaagcagcugagagagaacgccgaggacaugggcaacggcugcuucaagaucuaccacaagugcgacaacgccugcaucggcagcaucagaaacggcaccuacgaccacgacguguacagagacgaggcccugaacaacagauuccagaucaagggcaucgagcugaagagcggcuacaaggacuggauccuguggaucagcuucgccaucagcugcuuccugcugugcguggcccugcugggcuucaucaugugggccugccagaagggcaacaucagaugcaacaucugcaucuga

SEQ ID NO: 163245 - RNA, 1701 nt, Artificial Sequence
  derived and/or modified CDS sequence (opt4) from hemagglutinin__InfluenzaA__ACU80201
augaagaccaucaucgcccugagcuacauccugugccugguguucgcccagaagcugcccggcaacgacaacagcaccgccacccugugccugggccaccacgccgugcccaacggcaccaucgugaagaccaucaccaacgaccagaucgaggugaccaacgccaccgagcuggugcagagcagcagcaccggcgagaucugcgacagcccccaccagauccuggacggcgagaacugcacccugaucgacgcccugcugggcgacccccagugcgacggcuuccagaacaagaagugggaccuguucguggagagaagcaaggccuacagcaacugcuaccccuacgacgugcccgacuacgccagccugagaagccugguggccagcagcggcacccuggaguucaacaacgagagcuucaacuggaccggcgugacccagaacggcaccagcagcgccugcaucagaagaagcaacaacagcuucuucagcagacugaacuggcugacccaccugaaguucaaguaccccgcccugaacgugaccaugcccaacaacgagcaguucgacaagcuguacaucuggggcgugcaccaccccggcaccgacaacgaccagaucuuccuguacgcccaggccagcggcagaaucaccgugagcaccaagagaagccagcagaccgugauccccaacaucggcagcagacccagagugagaaacauccccagcagaaucagcaucuacuggaccaucgugaagcccggcgacauccugcugaucaacagcaccggcaaccugaucgcccccagaggcuacuucaagaucagaagcggcaagagcagcaucaugagaagcgacgcccccaucggcaagugcaacagcgagugcaucacccccaacggcagcauccccaacgacaagcccuuccagaacgugaacagaaucaccuacggcgccugccccagauacgugaagcagaacacccugaagcuggccaccggcaugagaaacgugcccgagaagcagaccagaggcaucuucggcgccaucgccggcuucaucgagaacggcugggagggcaugguggacggcugguacggcuucagacaccagaacagcgagggcagaggccaggccgccgaccugaagagcacccaggccgccaucgaccagaucaacggcaagcugaacagacugaucggcaagaccaacgagaaguuccaccagaucgagaaggaguucagcgagguggagggcagaauccaggaccuggagaaguacguggaggacaccaagaucgaccuguggagcuacaacgccgagcugcugguggcccuggagaaccagcacaccaucgaccugaccgacagcgagaugaacaagcuguucgagaagaccaagaagcagcugagagagaacgccgaggacaugggcaacggcugcuucaagaucuaccacaagugcgacaacgccugcaucggcagcaucagaaacggcaccuacgaccacgacguguacagagacgaggcccugaacaacagauuccagaucaagggcguggagcugaagagcggcuacaaggacuggauccuguggaucagcuucgccaucagcugcuuccugcugugcguggcccugcugggcuucaucaugugggccugccagaagggcaacaucaagugcaacaucugcaucuga

SEQ ID NO: 163246 - RNA, 1701 nt, Artificial Sequence; identical to SEQ ID NO: 162494
  derived and/or modified CDS sequence (opt4) from hemagglutinin__InfluenzaA__ACU80212

SEQ ID NO: 163247 - RNA, 1698 nt, Artificial Sequence
  derived and/or modified CDS sequence (opt4) from hemagglutinin__InfluenzaA__ACU80234
augaaggugaagcugcuggugcugcugugcaccuucgccgccaccuacgccgacaccaucugcaucggcuaccacgccaacaacagcaccgacaccguggacaccgugcuggagaagaacgugaccgugacccacagcgugaaccugcuggagaacagccacaacggcaagcugugccugcugaagggcaucgccccccugcagcugggcaacugcagcguggccggcuggauccugggcaaccccgagugcgagcugcugaucagcaaggagagcuggagcuacaucguggagaagcccaaccccgagaacggcaccugcuaccccggccacuucgccgacuacgaggagcugagagagcagcugagcagcgugagcagcuucgagagauucgagaucuuccccaaggagagcagcuggcccaaccacaccgugaccggcgugagcgccagcugcagccacaacggcgagagcagcuucuacaagaaccugcuguggcugaccggcaagaacggccuguaccccaaccugagcaagagcuacgccaacaacaaggagaaggaggugcuggugcuguggggcgugcaccacccccccaacaucggcgaccagaaggcccuguaccacaccgagaacgccuacgugagcguggugagcagccacuacagcagaaaguucacccccgagaucgccaagagacccaaggugagagaccaggagggcagaaucaacuacuacuggacccugcuggagcccggcgacaccaucaucuucgaggccaacggcaaccugaucgcccccagauacgccuucgcccugagcagaggcuucggcagcggcaucaucaacagcaacgcccccauggacaagugcgacgccaagugccagaccccccagggcgccaucaacagcagccugcccuuccagaacgugcaccccgugaccaucggcgagugccccaaguacgugagaagcgccaagcugagaauggugaccggccugagaaacauccccagcauccagagcagaggccuguucggcgccaucgccggcuucaucgagggcggcuggaccggcaugguggacggcugguacggcuaccaccaccagaacgagcagggcagcggcuacgccgccgaccagaagagcacccagaacgccaucaacggcaucaccaacaaggugaacagcgugaucgagaagaugaacacccaguucaccgccgugggcaaggaguucaacaagcuggagagaagaauggagaaccugaacaagaagguggacgacggcuucaucgacaucuggaccuacaacgccgagcugcuggugcugcuggagaacgagagaacccuggacuuccacgacagcaacgugaagaaccuguacgagaaggugaagagccagcugaagaacaacgccaaggagaucggcaacggcugcuucgaguucuaccacaagugcaacgacgagugcauggagagcgugaagaacggcaccuacgacuaccccaaguacagcgaggagagcaagcugaacagagagaagaucgacggcgugaagcuggagagcaugggcguguaccagauccuggccaucuacagcaccguggccagcagccuggugcugcuggugagccugggcgccaucagcuucuggaugugcagcaacggcagccugcagugcagaaucugcaucuga

SEQ ID NO: 163248 - RNA, 1701 nt, Artificial Sequence
  derived and/or modified CDS sequence (opt4) from hemagglutinin__InfluenzaA__ACU80245
augaagaccaucaucgcccugagcuacauccugugccugguguucgcccagaaguuccccggcaacgacaacagcaccgccacccugugccugggccaccacgccgugcccaacggcaccaucgugaagaccaucaccaacgaccagaucgaggugaccaacgccaccgagcuggugcagagcagcagcaccggcgagaucugcgacagcccccaccagauccuggacggcgagaacugcacccugaucgacgcccugcugggcgacccccagugcgacggcuuccagaacaagaacugggaccuguucguggagagaagcaaggccuacagcaacugcuaccccuacgacgugcccgacuacgccagccugagaagccugguggccagcagcggcacccuggaguucaacaacgagagcuucaacuggaccggcgugacccagaacggcaccagcagcgccugcaucagaagaagcaacaacagcuucuucagcagacugaacuggcugacccacagcaaguucaaguaccccgcccugaacgugaccaugcccaacaacgagaacuucgacaagcuguacaucuggggcgugcaccaccccggcaccgacaacgaccagaucuuccuguacgcccaggccagcggcagaaucaccgugagcaccaagagaagccagcagaccgugauccccaacaucggcagcagacccagagugagaaacauccccagcagaaucagcaucuacuggaccaucgugaagcccggcgacauccugcugaucaacagcaccggcaaccugaucgcccccagaggcuacuucaagaucagaagcggcaagagcagcaucaugagaagcgacgcccccaucggcagaugcaacagcgagugcaucacccccaacggcagcauccccaacgacaagcccuuccagaacgugaacagaaucaccuacggcgccugccccagauacgugaagcagaacacccugaagcuggccaccggcaugagaaacgugcccgagaagcagaccagaggcaucuucggcgccaucgccggcuucaucgagaacggcugggagggcaugguggacggcugguacggcuucagacaccagaacagcgagggcaucggccaggccgccgaccugaagagcacccaggccgccaucgaccagaucaacggcaagcugaacagacugaucggcaagaccaacgagaaguuccaccagaucgagaaggaguucagcgagguggagggcagaauccaggaccuggagaaguacguggaggacaccaagaucgaccuguggagcuacaacgccgagcugcugguggcccuggagaaccagcacaccaucgaccugaccgacagcgagaugaacaagcuguucgagaagaccaagaagcagcugagagagaacgccgaggacaugggcaacggcugcuucaagaucuaccacaagugcgacaacgccugcaucggcagcaucagaaacggcaccuacgaccacgacguguacagagacgaggcccugaacaacagauuccagaucaagggcguggagcugaagagcggcuacaaggacuggauccuguggaucagcuucgccaucagcugcuuccugcugugcaucgcccugcugggcuucaucaugugggccugccagaagggcaacaucagaugcaacaucugcaucuga

SEQ ID NO: 163249 - RNA, 1701 nt, Artificial Sequence; identical to SEQ ID NO: 162597
  derived and/or modified CDS sequence (opt4) from hemagglutinin__InfluenzaA__ACU80256

SEQ ID NO: 163250 - RNA, 1698 nt, Artificial Sequence; identical to SEQ ID NO: 162548
  derived and/or modified CDS sequence (opt4) from hemagglutinin__InfluenzaA__ACU80267

SEQ ID NO: 163251 - RNA, 1698 nt, Artificial Sequence; identical to SEQ ID NO: 163230
  derived and/or modified CDS sequence (opt4) from hemagglutinin__InfluenzaA__ACU80278

SEQ ID NO: 163252 - RNA, 1701 nt, Artificial Sequence; identical to SEQ ID NO: 162494
  derived and/or modified CDS sequence (opt4) from hemagglutinin__InfluenzaA__ACU80289

SEQ ID NO: 163253 - RNA, 1701 nt, Artificial Sequence; identical to SEQ ID NO: 162597
  derived and/or modified CDS sequence (opt4) from hemagglutinin__InfluenzaA__ACU80300

SEQ ID NO: 163254 - RNA, 1701 nt, Artificial Sequence
  derived and/or modified CDS sequence (opt4) from hemagglutinin__InfluenzaA__ACU80311
augagaaccaucaucgcccugagcuacauccugugccugguguucgcccagaaguuccccggcaacgacaacagcaccgccacccugugccugggccaccacgccgugcccaacggcaccaucgugaagaccaucaccaacgaccagaucgaggugaccaacgccaccgagcuggugcagagcagcagcaccggcgagaucugcgacagcccccaccagauccuggacggcgagaacugcacccugaucgacgcccugcugggcgacccccagugcgacggcuuccagaacaagaacugggaccuguucguggagagaagcaaggccuacagcaacugcuaccccuacgacgugcccgacuacgccagccugagaagccugguggccagcagcggcacccuggaguucaacaacgagagcuucaacuggaccggcgugacccagaacggcaccagcagcgccugcaucagaagaagcaacaacagcuucuucagcagacugaacuggcugacccacagcaaguucaaguaccccgcccugaacgugaccaugcccaacaacgagaacuucgacaagcuguacaucuggggcgugcaccaccccggcaccgacaacgaccagaucuuccuguacgcccaggccagcggcagaaucaccgugagcaccaagagaagccagcagaccgugauccccaacaucggcagcagacccagagugagaaacauccccagcagaaucagcaucuacuggaccaucgugaagcccggcgacauccugcugaucaacagcaccggcaaccugaucgcccccagaggcuacuucaagaucagaagcggcaagagcagcaucaugagaagcgacgcccccaucggcaagugcaacagcgagugcaucacccccaacggcagcauccccaacgacaagcccuuccagaacgugaacagaaucaccuacggcgccugccccagauacgugaagcagaacacccugaagcuggccaccggcaugagaaacgugcccgagaagcagaccagaggcaucuucggcgccaucgccggcuucaucgagaacggcugggagggcaugguggacggcugguacggcuucagacaccagaacagcgagggcaucggccaggccgccgaccugaagagcacccaggccgccaucgaccagaucaacggcaagcugaacagacugaucggcaagaccaacgagaaguuccaccagaucgagaaggaguucagcgagguggagggcagaauccaggaccuggagaaguacguggaggacaccaagaucgaccuguggagcuacaacgccgagcugcugguggcccuggagaaccagcacaccaucgaccugaccgacagcgagaugaacaagcuguucgagaagaccaagaagcagcugagagagaacgccgaggacaugggcaacggcugcuucaagaucuaccacaagugcgacaacgccugcaucggcagcaucagaaacggcaccuacgaccacgacguguacagagacgaggcccugaacaacagauuccagaucaagggcguggagcugaagagcggcuacaaggacuggauccuguggaucagcuucgccaucagcugcuuccugcugugcaucgcccugcugggcuucaucaugugggccugccagaagggcaacaucagaugcaacaucugcaucuga

SEQ ID NO: 163255 - RNA, 1701 nt, Artificial Sequence; identical to SEQ ID NO: 162597
  derived and/or modified CDS sequence (opt4) from hemagglutinin__InfluenzaA__ACU80322

SEQ ID NO: 163256 - RNA, 1701 nt, Artificial Sequence; identical to SEQ ID NO: 162494
  derived and/or modified CDS sequence (opt4) from hemagglutinin__InfluenzaA__ACU80333

SEQ ID NO: 163257 - RNA, 1701 nt, Artificial Sequence; identical to SEQ ID NO: 162597
  derived and/or modified CDS sequence (opt4) from hemagglutinin__InfluenzaA__ACU80344

SEQ ID NO: 163258 - RNA, 1701 nt, Artificial Sequence; identical to SEQ ID NO: 162597
  derived and/or modified CDS sequence (opt4) from hemagglutinin__InfluenzaA__ACU80355

SEQ ID NO: 163259 - RNA, 1701 nt, Artificial Sequence; identical to SEQ ID NO: 162597
  derived and/or modified CDS sequence (opt4) from hemagglutinin__InfluenzaA__ACU80366

SEQ ID NO: 163260 - RNA, 1701 nt, Artificial Sequence
  derived and/or modified CDS sequence (opt4) from hemagglutinin__InfluenzaA__ACU80377
augaagaccaucaucgcccugagcuacauccugugccugguguucgcccagaaguuccccggcaacgacaacagcaccgccacccugugccugggccaccacgccgugcccaacggcaccaucgugaagaccaucaccaacgaccagaucgaggugaccaacgccaccgagcuggugcagagcagcagcaccggcgagaucugcgacagcccccaccagauccuggacggcgagaacugcacccugaucgacgcccugcugggcgacccccagugcgacggcuuccagaacaagaacugggaccuguucguggagagaagcaaggccuacagcaacugcuaccccuacgacgugcccgacuacgccagccugagaagccugguggccagcagcggcacccuggaguucaacaacgagagcuucaacuggaccggcgugacccagaacggcaccagcagcgccugcaucagaagaagcaacaacagcuucuucagcagacugaacuggcugacccacagcaaguucaaguaccccgcccugaacgugaccaugcccaacaacgagaacuucgacaagcuguacaucuggggcgugcaccaccccggcaccgacaacgaccagaucuuccuguacgcccaggccagcggcagaaucaccgugagcaccaagagaagccagcagaccgugauccccaacaucggcagcagacccagagugagaaacauccccagcagaaucagcaucuacuggaccaucgugaagcccggcgacauccugcugaucaacagcaccggcaaccugaucgcccccagaggcuacuucaagaucagaagcggcaagagcagcaucaugagaagcgacgcccccaucggcaagugcaacuucgagugcaucacccccaacggcagcauccccaacgacaagcccuuccagaacgugaacagaaucaccuacggcgccugccccagauacgugaagcagaacacccugaagcuggccaccggcaugagaaacgugcccgagaagcagaccagaggcaucuucggcgccaucgccggcuucaucgagaacggcugggagggcaugguggacggcugguacggcuucagacaccagaacagcgagggcaucggccaggccgccgaccugaagagcacccaggccgccaucgaccagaucaacggcaagcugaacagacugaucggcaagaccaacgagaaguuccaccagaucgagaaggaguucagcgagguggagggcagaauccaggaccuggagaaguacguggaggacaccaagaucgaccuguggagcuacaacgccgagcugcugguggcccuggagaaccagcacaccaucgaccugaccgacagcgagaugaacaagcuguucgagaagaccagaaagcagcugagagagaacgccgaggacaugggcaacggcugcuucaagaucuaccacaagugcgacaacgccugcaucggcagcaucagaaacggcaccuacgaccacgacguguacagagacgaggcccugaacaacagauuccagaucaagggcguggagcugaagagcggcuacaaggacuggauccuguggaucagcuucgccaugagcugcuuccugcugugcaucgcccugcugggcuucaucaugugggccugccagaagggcaacaucagaugcaacaucugcaucuga

SEQ ID NO: 163261 - RNA, 1701 nt, Artificial Sequence; identical to SEQ ID NO: 162597
  derived and/or modified CDS sequence (opt4) from hemagglutinin__InfluenzaA__ACU80388

SEQ ID NO: 163262 - RNA, 1701 nt, Artificial Sequence; identical to SEQ ID NO: 162494
  derived and/or modified CDS sequence (opt4) from hemagglutinin__InfluenzaA__ACU80399

SEQ ID NO: 163263 - RNA, 1698 nt, Artificial Sequence
  derived and/or modified CDS sequence (opt4) from hemagglutinin__InfluenzaA__ACU80410
augaaggugaagcugcuggugcugcugugcaccuucaccgccaccuacgccgacaccaucugcaucggcuaccacgccaacaacagcaccgacaccguggacaccgugcuggagaagaacgugaccgugacccacagcgugaaccugcuggagaacagccacaacggcaagcugugccugcugaagggcaucgccccccugcagcugggcaacugcagcguggccggcuggauccugggcaaccccgagugcgagcugcugaucagcaaggagagcuggagcuacaucguggagaagcccaaccccgagaacggcaccugcuaccccggccacuucgccgacuacgaggagcugagagagcagcugagcagcgugagcagcuucgagagauucgagaucuuccccaaggagagcagcuggcccaaccacaccgugaccggcgugagcgccagcugcagccacaacggcgagagcagcuucuacagaaaccugcuguggcugaccggcaagaacggccuguaccccaaccugagcaagagcuacgccaacaacaaggagaaggaggugcuggugcuguggggcgugcaccacccccccaacaucggcgaccagaaggcccuguaccacaccgagaacgccuacgugagcguggugagcagccacuacagcagaaaguucacccccgagaucgccaagagacccaaggugagagaccaggagggcagaaucaacuacuacuggacccugcuggagcccggcgacaccaucaucuucgaggccaacggcaaccugaucgcccccagauacgccuucgcccugagcagaggcuucggcagcggcaucaucaacagcaacgcccccauggacaagugcgacgccaagugccagaccccccagggcgccaucaacagcagccugcccuuccagaacgugcaccccgugaccaucggcgagugccccaaguacgugagaagcgccaagcugagaauggugaccggccugagaaacauccccagcauccagagcagaggccuguucggcgccaucgccggcuucaucgagggcggcuggaccggcaugguggacggcugguacggcuaccaccaccagaacgagcagggcagcggcuacgccgccgaccagaagagcacccagaacgccaucaacggcaucaccaacaaggugaacagcgugaucgagaagaugaacacccaguucaccgccgugggcaaggaguucaacaagcuggagagaagaauggagaaccugaacaagaagguggacgacggcuucaucgacaucuggaccuacaacgccgagcugcuggugcugcuggagaacgagagaacccuggacuuccacgacagcaacgugaagaaccuguacgagaaggugaagaaccagcugaagaacaacgccaaggagaucggcaacggcugcuucgaguucuaccacaagugcaacgacgagugcauggagagcgugaagaacggcaccuacgacuaccccaaguacagcgaggagagcaagcugaacagagagaagaucgacggcgugaagcuggagagcaugggcguguaccagauccuggccaucuacagcaccguggccagcagccuggugcugcuggugagccugggcgccaucagcuucuggaugugcagcaacggcagccugcagugcagaaucugcaucuga

SEQ ID NO: 163264 - RNA, 1701 nt, Artificial Sequence
  derived and/or modified CDS sequence (opt4) from hemagglutinin__InfluenzaA__ACU80424
augaagaccaucaucgcccugagcuacauccugugccugguguucgcccagaaguuccccggcaacgacaacagcaccgccacccugugccugggccaccacgccgugcccaacggcaccaucgugaagaccaucaccaacgaccagaucgaggugaccaacgccaccgagcuggugcagagcagcagcaccggcgagaucugcgacagcccccaccagauccuggacggcgagaacugcacccugaucgacgcccugcugggcgacccccagugcgacggcuuccagaacaagaacugggaccuguucguggagagaagcaaggccuacagcaacugcuaccccuacgacgugcccgacuacgccagccugagaagccugguggccagcagcggcacccuggaguucaacaacgagagcuucaacuggaccggcgugacccagaacggcaccagcagcgccugcaucagaagaagcaacaacagcuucuucagcagacugaacuggcugacccacagcaaguucaaguaccccgcccugaacgugaccaugcccaacaacgagaacuucgacaagcuguacaucuggggcgugcaccaccccggcaccgacaacgaccagaucuuccuguacgcccaggccagcggcagaaucaccgugagcaccaagagaagccagcagaccgugauccccaacaucggcagcagacccagagugagaaacauccccagcagaaucagcaucuacuggaccaucgugaagcccggcgacauccugcugaucaacagcaccggcaaccugaucgcccccagaggcuacuucaagaucagaagcggcaagagcagcaucaugagaagcgacgcccccaucggcaagugcaacuucgagugcaucacccccaacggcagcauccccaacgacaagcccuuccagaacgugaacagaaucaccuacggcgccugccccagauacgugaagcagaacacccugaagcuggccaccggcaugagaaacgugcccgagaagcagaccagaggcaucuucggcgccaucgccggcuucaucgagaacggcugggagggcaugguggacggcugguacggcuucagacaccagaacagcgagggcaucggccaggccgccgaccugaagagcacccaggccgccaucgaccagaucaacggcaagcugaacagacugaucggcaagaccaacgagaaguuccaccagaucgagaaggaguucagcgagguggagggcagaauccaggaccuggagaaguacguggaggacaccaagaucgaccuguggagcuacaacgccgagcugcugguggcccuggagaaccagcacaccaucgaccugaccgacagcgagaugaacaagcuguucgagaagaccagaaagcagcugagagagaacgccgaggacaugggcaacggcugcuucaagaucuaccacaagugcgacaacgccugcaucggcagcaucagaaacggcaccuacgaccacgacguguacagagacgaggcccugaacaacagauuccagaucaagggcguggagcugaagagcggcuacaaggacuggauccuguggaucagcuucgccaucagcugcuuccugcugugcaucgcccugcugggcuucaucaugugggccugccagaagggcaacaucagaugcaacaucugcaucuga

SEQ ID NO: 163265 - RNA, 1701 nt, Artificial Sequence; identical to SEQ ID NO: 163264
  derived and/or modified CDS sequence (opt4) from hemagglutinin__InfluenzaA__ACU80435

SEQ ID NO: 163266 - RNA, 1698 nt, Artificial Sequence
  derived and/or modified CDS sequence (opt4) from hemagglutinin__InfluenzaA__ACU80446
augaaggugaagcugcuggugcugcugugcaccuucaccgccaccuacgccgacaccaucugcaucggcuaccacgccaacaacagcaccgacaccguggacaccgugcuggagaagaacgugaccgugacccacagcgugaaccugcuggagaacagccacaacggcaagcugugccugcugaagggcaucgccccccugcagcugggcaacugcagcguggccggcuggauccugggcaaccccgagugcgagcugcugaucagcaaggagagcuggagcuacaucguggagaagcccaaccccgagaacggcaccugcuaccccggccacuucgccgacuacgaggagcugagagagcagcugagcagcgugagcagcuucgagagauucgagaucuuccccaaggagagcagcuggcccaaccacaccgugaccggcgugagcgccagcugcagccacaacggcgagagcagcuucuacagaaaccugcuguggcugaccggcaagaacggccuguaccccaaccugagcaagagcuacgccaacaacaaggagaaggaggugcuggugcuguggggcgugcaccacccccccaacaucggcgaccagaagacccuguaccacaccgagaacgccuacgugagcguggugagcagccacuacagcagaaaguucacccccgagaucgccaagagacccaaggugagagaccaggagggcagaaucaacuacuacuggacccugcuggagcccggcgacaccaucaucuucgaggccaacggcaaccugaucgcccccagauacgccuucgcccugagcagaggcuucggcagcggcaucaucaacagcaacgcccccauggacaagugcgacgccaagugccagaccccccagggcgccaucaacagcagccugcccuuccagaacgugcaccccgugaccaucggcgagugccccaaguacgugagaagcgccaagcugagaauggugaccggccugagaaacauccccagcauccagagcagaggccuguucggcgccaucgccggcuucaucgagggcggcuggaccggcaugguggacggcugguacggcuaccaccaccagaacgagcagggcagcggcuacgccgccgaccagaagagcacccagaacgccaucaacggcaucaccaacaaggugaacagcgugaucgagaagaugaacacccaguucaccgccgugggcaaggaguucaacaagcuggagagaagaauggagaaccugaacaagaagguggacgacggcuucaucgacaucuggaccuacaacgccgagcugcuggugcugcuggagaacgagagaacccuggacuuccacgacagcaacgugaagaaccuguacgagaaggugaagagccagcugaagaacaacgccaaggagaucggcaacggcugcuucgaguucuaccacaagugcaacgacgagugcauggagagcgugaagaacggcaccuacgacuaccccaaguacagcgaggagagcaagcugaacagagagaagaucgacggcgugaagcuggagagcauggagguguaccagauccuggccaucuacagcaccguggccagcagccuggugcugcuggugagccugggcgccaucagcuucuggaugugcagcaacggcagccugcagugcagaaucugcaucuga

SEQ ID NO: 163267 - RNA, 1701 nt, Artificial Sequence; identical to SEQ ID NO: 162494
  derived and/or modified CDS sequence (opt4) from hemagglutinin__InfluenzaA__ACU80458

SEQ ID NO: 163268 - RNA, 1701 nt, Artificial Sequence; identical to SEQ ID NO: 162494
  derived and/or modified CDS sequence (opt4) from hemagglutinin__InfluenzaA__ACU80470

SEQ ID NO: 163269 - RNA, 1701 nt, Artificial Sequence; identical to SEQ ID NO: 162597
  derived and/or modified CDS sequence (opt4) from hemagglutinin__InfluenzaA__ACU80600

SEQ ID NO: 163270 - RNA, 1701 nt, Artificial Sequence; identical to SEQ ID NO: 163264
  derived and/or modified CDS sequence (opt4) from hemagglutinin__InfluenzaA__ACU80611

SEQ ID NO: 163271 - RNA, 1701 nt, Artificial Sequence; identical to SEQ ID NO: 162597
  derived and/or modified CDS sequence (opt4) from hemagglutinin__InfluenzaA__ACU80622

SEQ ID NO: 163272 - RNA, 1701 nt, Artificial Sequence; identical to SEQ ID NO: 162494
  derived and/or modified CDS sequence (opt4) from hemagglutinin__InfluenzaA__ACU80633

SEQ ID NO: 163273 - RNA, 1701 nt, Artificial Sequence
  derived and/or modified CDS sequence (opt4) from hemagglutinin__InfluenzaA__ACU80644
augaagaccaucaucgcccugagcuacauccugugccugguguucgcccagaagcugcccggcaacgacaacagcaccgccacccugugccugggccaccacgccgugcccaacggcaccaucgugaagaccaucaccaacgaccagaucgaggugaccaacgccaccgagcuggugcagagcagcagcaccggcgagaucugcgacagcccccaccagauccuggacggcgagaacugcacccugaucgacgcccugcugggcgacccccagugcgacggcuuccagaacaagaagugggaccuguucguggagagaagcaaggccuacagcaacugcuaccccuacgacgugcccgacuacgccagccugagaagccugguggccagcagcggcacccuggaguucaacaacgagagcuucaacuggaccggcgugacccagaacggcaccagcagcgccugcaucagaagaagcaacaacagcuucuucagcagacugaacuggcugacccacagcaaguucaaguaccccgcccugaacgugaccaugcccaacaacgaggaguucgacaagcuguacaucuggggcgugcaccaccccggcaccgacaacgaccagaucuuccuguacgcccaggccagcggcagaaucaccgugagcaccaagagaagccagcagaccgugauccccaacaucggcagcagacccagagugagaaacauccccagcagaaucagcaucuacuggaccaucgugaagcccggcgacauccugcugaucaacagcaccggcaaccugaucgcccccagaggcuacuucaagaucagaagcggcaagagcagcaucaugagaagcgacgcccccaucggcaagugcaacagcgagugcaucacccccaacggcagcauccccaacgacaagcccuuccagaacgugaacagaaucaccuacggcgccugccccagauacgugaagcagaacacccugaagcuggccaccggcaugagaaacgugcccgagaagcagaccagaggcaucuucggcgccaucgccggcuucaucgagaacggcugggagggcaugguggacggcugguacggcuucagacaccagaacagcgagggcaucggccaggccgccgaccugaagagcacccaggccgccaucgaccagaucaacggcaagcugaacagacugaucggcaagaccaacgagaaguuccaccagaucgagaaggaguucagcgagguggagggcagaauccaggaccuggagaaguacguggaggacaccaagaucgaccuguggagcuacaacgccgagcugcugguggcccuggagaaccagcacaccaucgaccugaccgacagcgagaugaacaagcuguucgagaagaccaagaagcagcugagagagaacgccgaggacaugggcaacggcugcuucaagaucuaccacaagugcgacaacgccugcaucggcagcaucagaaacggcaccuacgaccacgacguguacagagacgaggcccugaacaacagauuccagaucaagggcguggagcugaagagcggcuacaaggacuggauccuguggaucagcuucgccaucagcugcuuccugcugugcguggcccugcugggcuucaucaugugggccugccagaagggcaacaucagaugcaacaucugcaucuga

SEQ ID NO: 163274 - RNA, 1701 nt, Artificial Sequence; identical to SEQ ID NO: 162494
  derived and/or modified CDS sequence (opt4) from hemagglutinin__InfluenzaA__ACU80655

SEQ ID NO: 163275 - RNA, 1701 nt, Artificial Sequence; identical to SEQ ID NO: 162494
  derived and/or modified CDS sequence (opt4) from hemagglutinin__InfluenzaA__ACU80666

SEQ ID NO: 163276 - RNA, 1701 nt, Artificial Sequence; identical to SEQ ID NO: 161988
  derived and/or modified CDS sequence (opt4) from hemagglutinin__InfluenzaA__ACU80677

SEQ ID NO: 163277 - RNA, 1701 nt, Artificial Sequence; identical to SEQ ID NO: 162494
  derived and/or modified CDS sequence (opt4) from hemagglutinin__InfluenzaA__ACU80688

SEQ ID NO: 163278 - RNA, 1701 nt, Artificial Sequence; identical to SEQ ID NO: 162597
  derived and/or modified CDS sequence (opt4) from hemagglutinin__InfluenzaA__ACU80699

SEQ ID NO: 163279 - RNA, 1701 nt, Artificial Sequence; identical to SEQ ID NO: 162597
  derived and/or modified CDS sequence (opt4) from hemagglutinin__InfluenzaA__ACU80710

SEQ ID NO: 163280 - RNA, 1701 nt, Artificial Sequence
  derived and/or modified CDS sequence (opt4) from hemagglutinin__InfluenzaA__ACU80721
augaagaccaucaucgcccugagcuacauccugugccugguguucgcccagaagcugcccggcaacgacaacagcaccgccacccugugccugggccaccacgccgugcccaacggcaccaucgugaagaccaucaccaacgaccagaccgaggugaccaacgccaccgagcuggugcagagcagcagcaccggcgagaucugcgacagcccccaccagauccuggacggcgagaacugcacccugaucgacgcccugcugggcgacccccagugcgacggcuuccagaacaagaagugggaccuguucguggagagaagcaaggccuacagcaacugcuaccccuacgacgugcccgacuacgccagccugagaagccugguggccagcagcggcacccuggaguucaacaacgagagcuucaacuggaccggcgugacccagaacggcaccagcagcgccugcaucagaagaagcaacaacagcuucuucagcagacugaacuggcugacccaccugaaguucaaguaccccgcccugaacgugaccaugcccaacaacgagcaguucgacaagcuguacaucuggggcgugcaccaccccggcaccgacaacgaccagaucuuccuguacgcccaggccagcggcagaaucaccgugagcaccaagagaagccagcagaccgugauccccaacaucggcagcagacccagagugagaaacauccccagcagaaucagcaucuacuggaccaucgugaagcccggcgacauccugcugaucaacagcaccggcaaccugaucgcccccagaggcuacuucaagaucagaagcggcaagagcagcaucaugagaagcgacgcccccaucggcaagugcaacagcgagugcaucacccccaacggcagcauccccaacgacaagcccuuccagaacgugaacagaaucaccuacggcgccugccccagauacgugaagcagaacacccugaagcuggccaccggcaugagaaacgugcccgagaagcagaccagaggcaucuucggcgccaucgccggcuucaucgagaacggcugggagggcaugguggacggcugguacggcuucagacaccagaacagcgagggcagaggccaggccgccgaccugaagagcacccaggccgccaucgaccagaucaacggcaagcugaacagacugaucggcaagaccaacgagaaguuccaccagaucgagaaggaguucagcgagguggagggcagaauccaggaccuggagaaguacguggaggacaccaagaucgaccuguggagcuacaacgccgagcugcugguggcccuggagaaccagcacaccaucgaccugaccgacagcgagaugaacaagcuguucgagaagaccaagaagcagcugagagagaacgccgaggacaugggcaacggcugcuucaagaucuaccacaagugcgacaacgccugcaucggcagcaucagaaacggcaccuacgaccacgacguguacagagacgaggcccugaacaacagauuccagaucaagggcguggagcugaagagcggcuacaaggacuggauccuguggaucagcuucgccaucagcugcuuccugcugugcguggcccugcugggcuucaucaugugggccugccagaagggcaacaucagaugcaacaucugcaucuga

SEQ ID NO: 163281 - RNA, 1701 nt, Artificial Sequence; identical to SEQ ID NO: 162494
  derived and/or modified CDS sequence (opt4) from hemagglutinin__InfluenzaA__ACU80732

SEQ ID NO: 163282 - RNA, 1701 nt, Artificial Sequence; identical to SEQ ID NO: 162494
  derived and/or modified CDS sequence (opt4) from hemagglutinin__InfluenzaA__ACU80743

SEQ ID NO: 163283 - RNA, 1701 nt, Artificial Sequence
  derived and/or modified CDS sequence (opt4) from hemagglutinin__InfluenzaA__ACU80754
augaagaccaucaucgcccugagcuacauccugugccugguguucgcccagaagcugcccggcaacgacaacagcaccgccacccugugccugggccaccacgccgugcccaacggcaccaucgugaagaccaucaccaacgaccagaucgaggugaccaacgccaccgagcuggugcagagcagcagcaccggcgagaucugcgacagcccccaccagauccuggacggcgagaacugcacccugaucgacgcccugcugggcgacccccagugcgacggcuuccagaacaagaagugggaccuguucguggagagaagcaaggccuacagcaacugcuaccccuacgacgugcccgacuacgccagccugagaagccugguggccagcagcggcacccuggaguucaacaacgagagcuucaacuggaccggcgugacccagaacggcaccagcagcgccugcaucagaagaagcaacaacagcuucuucagcagacugaacuggcugacccaccugaaguucaaguaccccgcccugaacgugaccaugcccaacaacgagcaguucgacaagcuguacaucuggggcgugcaccaccccggcaccgacaacgaccagaucuuccuguacgcccaggccagcggcagaaucaccgugagcaccaagagaagccagcagaccgugauccccaacaucggcagcagacccagagugagaaacauccccagcagaaucagcaucuacuggaccaucgugaagcccggcgacauccugcugaucaacagcaccggcaaccugaucgcccccagaggcuacuucaagaucagaagcggcaagagcagcaucaugagaagcgacgcccccaucggcaagugcaacagcgagugcaucacccccaacggcagcauccccaacgacaagcccuuccagaacgugaacagaaucaccuacggcgccugccccagauacgugaagcagaacacccugaagcuggccaccggcaugagaaacgugcccgagaagcagaccagaggcaucuucggcgccaucgccggcuucaucgagaacggcugggagggcaugguggacggcugguacggcuucagacaccagaacagcgagggcagaggccaggccgccgaccugaagagcacccaggccgccaucgaccagaucaacggcaagcugaacagacugaucggcaagaccaacgagaaguuccaccagaucgagaaggaguucagcgagguggagggcagaauccaggaccuggagaaguacguggaggacaccaagaucgaccuguggagcuacaacgccgagcugcugguggcccuggagaaccagcacaccaucgaccugaccgacagcgagaugaacaagcuguucgagaagaccaagaagcagcugagagagaacgccgaggacaugggcaacggcugcuucaagaucuaccacaagugcgacaacgccugcaucggcagcaucagaaacggcaccuacgaccacgacguguacagagacgaggcccugaacaacagauuccagaucaagggcguggagcugaagagcggcuacaaggacuggauccuguggaucagcuucgccaucagcugcuuccugcugugcguggugcugcugggcuucaucaugugggccugccagaagggcaacaucagaugcaacaucugcaucuga

SEQ ID NO: 163284 - RNA, 1701 nt, Artificial Sequence
  derived and/or modified CDS sequence (opt4) from hemagglutinin__InfluenzaA__ACU80765
augaagaccaucaucgcccugagcuacauccugugccugguguucgcccagaagcugcccggcaacgacaacagcaccgccacccugugccugggccaccacgccgugcccaacggcaccaucgugaagaccaucaccaacgaccagaucgaggugaccaacgccaccgagcuggugcagagcagcagcaccggcgagaucugcgacagcccccaccagauccuggacggcgagaacugcacccugaucgacgcccugcugggcgacccccagugcgacggcuuccagaacaagaagugggaccuguucguggagagaagcaaggccuacagcaacugcuaccccuacgacgugcccgacuacgccagccugagaagccugguggccagcagcggcacccuggaguucaacaacgagagcuucaacuggaccggcgugacccagaacggcaccagcagcgccugcaucagaagaagcaacaacagcuucuucagcagacugaacuggcugacccacagcaaguucaaguaccccgcccugaacgugaccaugcccaacaacgaggaguucgacaagcuguacaucuggggcgugcaccaccccggcaccgacaacgaccagaucuuccuguacgcccaggccagcggcagaaucaccgugagcaccaagagaagccagcagaccgugauccccaacaucggcagcagacccagagugagaaacauccccagcagaaucagcaucuacuggaccaucgugaagcccggcgacauccugcugaucaacagcaccggcaaccugaucgcccccagaggcuacuucaagaucagaagcggcaagagcagcaucaugagaagcgacgcccccaucggcaagugcaacagcgagugcaucacccccaacggcagcauccccaacgacaagcccuuccagaacgugaacagaaucaccuacggcgccugccccagauacgugaagcagaacacccugaagcuggccaccggcaugagaaacgugcccgagaagcagaccagaggcaucuucggcgccaucgccggcuucaucgagaacggcugggagggcaugguggacggcugguacggcuucagacaccagaacagcgagggcaucggccaggccgccgaccugaagagcacccaggccgccaucgaccagaucaacggcaagcugaacagacugaucggcaagaccaacgagaaguuccaccagaucgagaaggaguucagcgagguggagggcagaauccaggaccuggagaaguacguggaggacaccaagaucgaccuguggagcuacaacgccgagcugcugguggcccuggagaaccagcacaccaucgaccugaccgacagcgagaugaacaagcuguucgagaagaccaagaagcagcugagagagaacgccgaggacaugggcaacggcugcuucaagaucuaccacaagugcgacaacgccugcaucggcagcaucagaaacggcaccuacgaccacgacguguacagagacgaggcccugaacaacagauuccagaucaagggcguggagcugaagagcggcuacaaggacuggauccuguggaucagcuucgccaucagcugcuuccugcugugcaucgcccugcugggcuucaucaugugggccugccagaagggcaacaucagaugcaacaucugcaucuga

SEQ ID NO: 163285 - RNA, 1701 nt, Artificial Sequence
  derived and/or modified CDS sequence (opt4) from hemagglutinin__InfluenzaA__ACU80787
augaagaccaucaucgcccugagcuacauccugugccugguguucgcccagaagcugcccggcaacgacaacagcaccgccacccugugccugggccaccacgccgugcccaacggcaccaucgugaagaccaucaccaacgaccagaucgaggugaccaacgccaccgagcuggugcagagcagcagcaccggcgagaucugcgacagcccccaccagauccuggacggcgagaacugcacccugaucgacgcccugcugggcgacccccagugcgacggcuuccagaacaagaagugggaccuguucguggagagaagcaaggccuacagcaacugcuaccccuacgacgugcccgacuacgccagccugagaagccugguggccagcagcggcacccuggaguucaacaacgagagcuucaacuggaccggcgugacccagaacggcaccagcagcgccugcaucagaagaagcaacaacagcuucuucagcagacugaacuggcugacccaccugaaguucaaguaccccgcccugaacgugaccaugcccaacaacgagcaguucgacaagcuguacaucuggggcgugcaccaccccggcaccgacaacgaccagaucuuccuguacgcccaggccagcggcagaaucaccgugagcaccaagagaagccagcagaccgugauccccaacaucggcagcagacccagagugagaaacauccccagcagaaucagcaucuacuggaccaucgugaagcccggcgacauccugcugaucaacagcaccggcaaccugaucgcccccagaggcuacuucaagaucagaagcggcaagagcagcaucaugagaagcgacgcccccaucggcaagugcaacagcgagugcaucacccccaacggcagcauccccaacgacaagcccuuccagaacgugaacagaaucaccuacggcgccugccccagauacgugaagcagaacacccugaagcuggccaccggcaugagaaacgugcccgagaagcagaccagaggcaucuucggcgccaucgccggcuucaucgagaacggcugggagggcaugauggacggcugguacggcuucagacaccagaacagcgagggcagaggccaggccgccgaccugaagagcacccaggccgccaucgaccagaucaacggcaagcugaacagacugaucggcaagaccaacgagaaguuccaccagaucgagaaggaguucagcgagguggagggcagaauccaggaccuggagaaguacguggaggacaccaagaucgaccuguggagcuacaacgccgagcugcugguggcccuggagaaccagcacaccaucgaccugaccgacagcgagaugaacaagcuguucgagaagaccaagaagcagcugagagagaacgccgaggacaugggcaacggcugcuucaagaucuaccacaagugcgacaacgccugcaucggcagcaucagaaacggcaccuacgaccacgacguguacagagacgaggcccugaacaacagauuccagaucaagggcguggagcugaagagcggcuacaaggacuggauccuguggaucagcuucgccaucagcugcuuccugcugugcguggcccugcugggcuucaucaugugggccugccagaagggcaacaucagaugcaacaucugcaucuga

SEQ ID NO: 163286 - RNA, 1701 nt, Artificial Sequence; identical to SEQ ID NO: 162494
  derived and/or modified CDS sequence (opt4) from hemagglutinin__InfluenzaA__ACU80798

SEQ ID NO: 163287 - RNA, 1701 nt, Artificial Sequence; identical to SEQ ID NO: 162494
  derived and/or modified CDS sequence (opt4) from hemagglutinin__InfluenzaA__ACU81103

SEQ ID NO: 163288 - RNA, 1701 nt, Artificial Sequence
  derived and/or modified CDS sequence (opt4) from hemagglutinin__InfluenzaA__ACU87270
augaaggccauccugguggugcugcuguacaccuucgccaccgccaacgccgacacccugugcaucggcuaccacgccaacaacagcaccgacaccguggacaccgugcuggagaagaacgugaccgugacccacagcgugaaccugcuggaggacaagcacaacggcaagcugugcaagcugagaggcguggccccccugcaccugggcaagugcaacaucgccggcuggauccugggcaaccccgagugcgagagccugagcaccgccagcagcuggagcuacaucguggagaccagcagcagcgacaacggcaccugcuaccccggcgacuucaucgacuacgaggagcugagagagcagcugagcagcgugagcagcuucgagagauucgagaucuuccccaagaccagcagcuggcccaaccacgacagcaacaagggcgugaccgccgccugcccccacgccggcgccaagagcuucuacaagaaccugaucuggcuggugaagaagggcaacagcuaccccaagcugagcaagagcuacaucaacgacaagggcaaggaggugcuggugcuguggggcauccaccaccccagcaccagcgccgaccagcagagccuguaccagaacgccgacgccuacguguucgugggcaccagcagauacagcaagaaguucaagcccgagaucgccaucagacccaaggugagagacagagagggcagaaugaacuacuacuggacccugaucgagcccggcgacaagaucaccuucgaggccaccggcaaccugguggugcccagauacgccuucgccauggagagaaacgccggcagcggcaucaucaucagcgacacccccgugcacgacugcaacaccaccugccagacccccaagggcgccaucaacaccagccugcccuuccagaacauccaccccaucaccaucggcaagugccccaaguacgugaagagcaccaagcugagacuggccaccggccugagaaacgugcccagcauccagagcagaggccuguucggcgccaucgccggcuucaucgagggcggcuggaccggcaugguggacggcugguacggcuaccaccaccagaacgagcagggcagcggcuacgccgccgaccugaagagcacccagaacgccaucgacgagaucaccaacaaggugaacagcgugaucgagaagaugaacacccaguucaccgccgugggcaaggaguucaaccaccuggagaagagaaucgagaaccugaacaagaagguggacgacggcuuccuggacaucuggaccuacaacgccgagcugcuggugcugcuggagaacgagagaacccuggacuaccacgacagcaacgugaagaaccuguacgagaaggugagaagccagcugaagaacaacgccaaggagaucggcaacggcugcuucgaguucuaccacaagugcgacaacaccugcauggagagcgugaagaacggcaccuacgacuaccccaaguacagcgaggaggccaagcugaacagagaggagaucgacggcgugaagcuggagagcaccagaaucuaccagauccuggccaucuacagcaccguggccagcagccuggugcugguggugagccugggcgccaucagcuucuggaugugcagcaacggcagccugcagugcagaaucugcaucuga

SEQ ID NO: 163289 - RNA, 1701 nt, Artificial Sequence; identical to SEQ ID NO: 162729
  derived and/or modified CDS sequence (opt4) from hemagglutinin__InfluenzaA__ACV04228

SEQ ID NO: 163290 - RNA, 1701 nt, Artificial Sequence; identical to SEQ ID NO: 162729
  derived and/or modified CDS sequence (opt4) from hemagglutinin__InfluenzaA__ACV04238

SEQ ID NO: 163291 - RNA, 1701 nt, Artificial Sequence
  derived and/or modified CDS sequence (opt4) from hemagglutinin__InfluenzaA__ACV04248
auggaggccauccugguggugcugcuguacaccuucgccaccgccaacgccgacacccugugcaucggcuaccacgccaacaacagcaccgacaccguggacaccgugcuggagaagaacgugaccgugacccacagcgugaaccugcuggaggacaagcacaacggcaagcugugcaagcugagaggcguggccccccugcaccugggcaagugcaacaucgccggcuggauccugggcaaccccgagugcgagagccugagcaccgccagcagcuggagcuacaucguggagaccagcagcagcgacaacggcaccugcuaccccggcgacuucaucgacuacgaggagcugagagagcagcugagcagcgugagcagcuucgagagauucgagaucuuccccaagaccagcagcuggcccaaccacgacagcaacaagggcaucaccgccgccugcccccacgccggcgccaagagcuucuacaagaaccugaucuggcuggugaagaagggcaacagcuaccccaagcugagcaagagcuacaucaacgacaagggcaaggaggugcuggugcuguggggcauccaccaccccagcaccagcgccgaccagcagagccuguaccagaacgccgacgccuacguguucgugggcagcagcagauacagcaagaaguucaagcccgagaucgccaucagacccaaggugagagaccaggagggcagaaugaacuacuacuggacccugguggagcccggcgacaagaucaccuucgaggccaccggcaaccugguggugcccagauacgccuucgccauggagagaaacgccggcagcggcaucaucaucagcgacacccccgugcacgacugcaacaccaccugccagacccccaagggcgccaucaacaccagccugcccuuccacaacauccaccccaucaccaucggcaagugccccaaguacgugaagagcaccaagcugagacuggccaccggccugagaaacgugcccagcauccagagcagaggccuguucggcgccaucgccggcuucaucgagggcggcuggaccggcaugguggacggcugguacggcuaccaccaccagaacgagcagggcagcggcuacgccgccgaccugaagagcacccagaacgccaucgacgagaucaccaacaaggugaacagcgugaucgagaagaugaacacccaguucaccgccgugggcaaggaguucaaccaccuggagaagagaaucgagaaccugaacaagaagguggacgacggcuuccuggacaucuggaccuacaacgccgagcugcuggugcugcuggagaacgagagaacccuggacuaccacgacagcaacgugaagaaccuguacgagaaggugagaagccagcugaagaacaacgccaaggagaucggcaacggcugcuucgaguucuaccacaagugcgacaacaccugcauggagagcgugaagaacggcaccuacgacuaccccaaguacagcgaggaggccaagcugaacagagaggagaucgacggcgugaagcuggagagcaccagaaucuaccagauccuggccaucuacagcaccguggccagcagccuggugcugguggugagccugggcgccaucagcuucuggaugugcagcaacggcagccugcagugcagaaucugcaucuga

SEQ ID NO: 163292 - RNA, 1701 nt, Artificial Sequence; identical to SEQ ID NO: 162729
  derived and/or modified CDS sequence (opt4) from hemagglutinin__InfluenzaA__ACV04258

SEQ ID NO: 163293 - RNA, 1701 nt, Artificial Sequence; identical to SEQ ID NO: 162729
  derived and/or modified CDS sequence (opt4) from hemagglutinin__InfluenzaA__ACV04268

SEQ ID NO: 163294 - RNA, 1701 nt, Artificial Sequence; identical to SEQ ID NO: 162729
  derived and/or modified CDS sequence (opt4) from hemagglutinin__InfluenzaA__ACV04278

SEQ ID NO: 163295 - RNA, 1701 nt, Artificial Sequence; identical to SEQ ID NO: 162729
  derived and/or modified CDS sequence (opt4) from hemagglutinin__InfluenzaA__ACV04288

SEQ ID NO: 163296 - RNA, 1701 nt, Artificial Sequence
  derived and/or modified CDS sequence (opt4) from hemagglutinin__InfluenzaA__ACV04298
augaaggccauccugguggugcugcuguacaccuucgccaccgccaacgccgacacccugugcaucggcuaccacgccaacaacagcaccgacaccguggacaccgugcuggagaagaacgugaccgugacccacagcgugaaccugcuggaggacaagcacaacggcaagcugugcaagcugagaggcguggccccccugcaccugggcaagugcaacaucgccggcuggauccugggcaaccccgagugcgagagccugagcaccgccagcagcuggagcuacaucguggagaccagcagcagcgacaacggcaccugcuaccccggcgacuucaucgacuacgaggagcugagagagcagcugagcagcgugagcagcuucgagagauucgagaucuuccccaagaccagcagcuggcccaaccacgacagcaacaagggcgugaccgccgccugcccccacgccggcgccaagagcuucuacaagaaccugaucuggcuggugaagaagggcaacagcuaccccaagcugagcaagagcuacaucaacgacaagggcaaggaggugcuggugcuguggggcauccaccaccccagcaccagcgccgaccagcagagccuguaccagaacgccgacgccuacguguucgugggcaccagcagauacagcaagaaguucaagcccgagaucgccaucagacccaaggugagagaccaggagggcagaaugaacuacuacuggacccugguggagcccggcgacaagaucaccuucgaggccaccggcaaccugguggugcccagauacgccuucgccauggagagaaacgccggcagcggcaucaucaucagcgacacccccgugcacgacugcaacaccaccugccagacccccaagggcgccaucaacaccagccugcccuuccagaacauccaccccgugaccaucggcaagugccccaaguacgugaagagcaccaagcugagacuggccaccggccugagaaacgugcccagcauccagagcagaggccuguucggcgccaucgccggcuucaucgagggcggcuggaccggcaugguggacggcugguacggcuaccaccaccagaacgagcagggcagcggcuacgccgccgaccugaagagcacccagaacgccaucgacgagaucaccaacaaggugaacagcgugaucgagaagaugaacacccaguucaccgccgugggcaaggaguucaaccaccuggagaagagaaucgagaaccugaacaagaagguggacgacggcuuccuggacaucuggaccuacaacgccgagcugcuggugcugcuggagaacgagagaacccuggacuaccacgacagcaacgugaagaaccuguacgagaaggugagaagccagcugaagaacaacgccaaggagaucggcaacggcugcuucgaguucuaccacaagugcgacaacaccugcauggagagcgugaagaacggcaccuacgacuaccccaaguacagcgaggaggccaagcugaacagagaggagaucgacggcgugaagcuggagagcaccagaaucuaccagauccuggccaucuacagcaccguggccagcagccuggugcugguggugagccugggcgccaucagcuucuggaugugcagcaacggcagccugcagugcagaaucugcaucuga

SEQ ID NO: 163297 - RNA, 1701 nt, Artificial Sequence; identical to SEQ ID NO: 162729
  derived and/or modified CDS sequence (opt4) from hemagglutinin__InfluenzaA__ACV04308

SEQ ID NO: 163298 - RNA, 1701 nt, Artificial Sequence
  derived and/or modified CDS sequence (opt4) from hemagglutinin__InfluenzaA__ACV04318
augaaggccauccugguggugcugcuguacaccuucgccaccgccaacgccgacacccugugcaucggcuaccacgccaacaacagcaccgacaccguggacaccgugcuggagaagaacgugaccgugacccacagcgugaaccugcuggaggacaagcacaacggcaagcugugcaagcugagaggcguggccccccugcaccugggcaagugcaacaucgccggcuggauccugggcaaccccgagugcgagagccugagcaccgccagcagcuggagcuacaucguggagaccagcagcagcgacaacggcaccugcuaccccggcgacuucaucgacuacgaggagcugagagagcagcugagcagcgugagcagcuucgagagauucgagaucuuccccaagaccagcagcuggcccaaccacgacagcaacaagggcgugaccgccgccugcccccacgccggcgccaagagcuucuacaagaaccugaucuggcuggugaagaagggcaacagcuaccccaagcugagcaagagcuacaucaacgacaagggcaaggaggugcuggugcuguggggcauccaccaccccagcaccagcgccgaccagcagagccuguaccagaacgccgacgccuacguguucgugggcaccagcagauacagcaagaaguucaagcccgagaucgccaucagacccaaggugagagaccaggagggcagaaugaacuacuacuggacccugguggagcccggcgacaagaucaccuucgaggccaccggcaaccugguggugcccagauacgccuucgccauggagagaaacgccggcagcggcaucaucaucagcgacacccccgugcacaacugcaacaccaccugccagacccccaagggcgccaucaacaccagccugcccuuccagaacauccaccccaucaccaucggcaagugccccaaguacgugaagagcaccaagcugagacuggccaccggccugagaaacgugcccagcauccagagcagaggccuguucggcgccaucgccggcuucaucgagggcggcuggaccggcaugguggacggcugguacggcuaccaccaccagaacgagcagggcagcggcuacgccgccgaccugaagagcacccagaacgccaucgacgagaucaccaacaaggugaacagcgugaucgagaagaugaacacccaguucaccgccgugggcaaggaguucaaccaccuggagaagagaaucgagaaccugaacaagaagguggacgacggcuuccuggacaucuggaccuacaacgccgagcugcuggugcugcuggagaacgagagaacccuggacuaccacgacagcaacgugaagaaccuguacgagaaggugagaagccagcugaagaacaacgccaaggagaucggcaacggcugcuucgaguucuaccacaagugcgacaacaccugcauggagagcgugaagaacggcaccuacgacuaccccaaguacagcgaggaggccaagcugaacagagaggagaucgacggcgugaagcuggagagcaccagaaucuaccagauccuggccaucuacagcaccguggccagcagccuggugcugguggugagccugggcgccaucagcuucuggaugugcagcaacggcagccugcagugcagaaucugcaucuga

SEQ ID NO: 163299 - RNA, 1701 nt, Artificial Sequence; identical to SEQ ID NO: 162729
  derived and/or modified CDS sequence (opt4) from hemagglutinin__InfluenzaA__ACV04328

SEQ ID NO: 163300 - RNA, 1701 nt, Artificial Sequence; identical to SEQ ID NO: 162729
  derived and/or modified CDS sequence (opt4) from hemagglutinin__InfluenzaA__ACV04338

SEQ ID NO: 163301 - RNA, 1701 nt, Artificial Sequence; identical to SEQ ID NO: 162971
  derived and/or modified CDS sequence (opt4) from hemagglutinin__InfluenzaA__ACV04358

SEQ ID NO: 163302 - RNA, 1701 nt, Artificial Sequence
  derived and/or modified CDS sequence (opt4) from hemagglutinin__InfluenzaA__ACV04368
augaaggccauccugguggugcugcuguacaccuucgccaccgccaacgccgacacccugugcaucggcuaccacgccaacaacagcaccgacaccguggacaccgugcuggagaagaacgugaccgugacccacagcgugaaccugcuggaggacaagcacaacggcaagcugugccagcugagaggcguggccccccugcaccugggcaagugcaacaucgccggcuggauccugggcaaccccgagugcgagagccugagcaccgccagcagcuggagcuacaucguggagaccagcagcagcgacaacggcaccugcuaccccggcgacuucaucgacuacgaggagcugagagagcagcugagcagcgugagcagcuucgagagauucgagaucuuccccaagaccagcagcuggcccaaccacgacagcaacaagggcgugaccgccgccugcccccacgccggcgccaagagcuucuacaagaaccugaucuggcuggugaagaagggcaacagcuaccccaagcugagcaagagcuacaucaacgacaagggcaaggaggugcuggugcuguggggcauccaccaccccagcaccagcgccgaccagcagagccuguaccagaacgccgacgccuacguguucgugggcaccagcagauacagcaagaaguucaagcccgagaucgccaucagacccaaggugagagaccaggagggcagaaugaacuacuacuggacccugguggagcccggcgacaagaucaccuucgaggccaccggcaaccugguggugcccagauacgccuucgccauggagagaaacgccggcagcggcaucaucaucagcgacacccccgugcacgacugcaacaccaccugccagacccccaagggcgccaucaacaccagccugcccuuccagaacauccaccccaucaccaucggcaagugccccaaguacgugaagagcaccaagcugagacuggccaccggccugagaaacgugcccagcauccagagcagaggccuguucggcgccaucgccggcuucaucgagggcggcuggaccggcaugguggacggcugguacggcuaccaccaccagaacgagcagggcagcggcuacgccgccgaccugaagagcacccagaacgccaucgacgagaucaccaacaaggugaacagcgugaucgagaagaugaacacccaguucaccgccgugggcaaggaguucaaccaccuggagaagagaaucgagaaccugaacaagaagguggacgacggcuuccuggacaucuggaccuacaacgccgagcugcuggugcugcuggagaacgagagaacccuggacuaccacgacagcaacgugaagaaccuguacgagaaggugagaagccagcugaagaacaacgccaaggagaucggcaacggcugcuucgaguucuaccacaagugcgacaacaccugcauggagagcgugaagaacggcaccuacgacuaccccaaguacagcgaggaggccaagcugaacagagaggagaucgacggcgugaagcuggagagcaccagaaucuaccagauccuggccaucuacagcaccguggccagcagccuggugcugguggugagccugggcgccaucagcuucuggaugugcagcaacggcagccugcagugcagaaucugcaucuga

SEQ ID NO: 163303 - RNA, 1701 nt, Artificial Sequence
  derived and/or modified CDS sequence (opt4) from hemagglutinin__InfluenzaA__ACV04378
augaaggccauccugguggugcugcuguacaccuucgccaccgccaacgccgacacccugugcaucggcuaccacgccaacaacagcaccgacaccguggacaccgugcuggagaagaacgugaccgugacccacagcgugaaccugcuggaggacaagcacaacggcaagcugugcaagcugagaggcguggccccccugcaccugggcaagugcaacaucgccggcuggauccugggcaaccccgagugcgagagccugagcaccgccagcagcuggagcuacaucguggagaccagcagcagcgacaacggcaccugcuaccccggcgacuucaucgacuacgaggagcugagagagcagcugagcagcgugagcagcuucgagagauucgagaucuuccccaagaccagcagcuggcccaaccacgacagcaacaagggcgugaccgccgccugcccccacgccggcgccaagagcuucuacaagaaccugaucuggcuggugaagaagggcaacagcuaccccaagcugagcaagagcuacaucaacgacaagggcaaggaggugcuggugcuguggggcauccaccaccccagcaccagcgccgaccagcagagccuguaccagaacgccgacgccuacguguucgugggcaccagcagauacagcaagaaguucaagcccgagaucgccaucagacccaaggugagagaccaggagggcagaaugaacuacuacuggacccugguggagcccggcgacaagaucaccuucgaggccaccggcaaccugguggugcccagauacgccuucgccauggagagaaacgccggcagcggcaucaucaucagcgacacccccgugcacgacugcaacaccaccugccagacccccaagggcgccaucaacaccagccugcccuuccagaacauccaccccaucaccaucggcaagugccccaaguacgugaagagcaccaagcugagacuggccaccggccugagaaacauccccagcauccagagcagaggccuguucggcgccaucgccggcuucaucgagggcggcuggaccggcaugguggacggcugguacggcuaccaccaccagaacgagcagggcagcggcuacgccgccgaccugaagagcacccagaacgccaucgacgagaucaccaacaaggugaacagcgugaucgagaagaugaacacccaguucaccgccgugggcaaggaguucaaccaccuggagaagagaaucgagaaccugaacaagaagguggacgacggcuuccuggacaucuggaccuacaacgccgagcugcuggugcugcuggagaacgagagaacccuggacuaccacgacagcaacgugaagaaccuguacgagaaggugagaagccagcugaagaacaacgccaaggagaucggcaacggcugcuucgaguucuaccacaagugcgacaacaccugcauggagagcgugaagaacggcaccuacgacuaccccaaguacagcgaggaggccaagcugaacagagaggagaucgacggcgugaagcuggagagcaccagaaucuaccagauccuggccaucuacagcaccguggccagcagccuggugcugaucgugagccugggcgccaucagcuucuggaugugcagcaacggcagccugcagugcagaaucugcaucuga

SEQ ID NO: 163304 - RNA, 1701 nt, Artificial Sequence; identical to SEQ ID NO: 162971
  derived and/or modified CDS sequence (opt4) from hemagglutinin__InfluenzaA__ACV04388

SEQ ID NO: 163305 - RNA, 1701 nt, Artificial Sequence; identical to SEQ ID NO: 162729
  derived and/or modified CDS sequence (opt4) from hemagglutinin__InfluenzaA__ACV04398

SEQ ID NO: 163306 - RNA, 1701 nt, Artificial Sequence; identical to SEQ ID NO: 162973
  derived and/or modified CDS sequence (opt4) from hemagglutinin__InfluenzaA__ACV04408

SEQ ID NO: 163307 - RNA, 1701 nt, Artificial Sequence; identical to SEQ ID NO: 162729
  derived and/or modified CDS sequence (opt4) from hemagglutinin__InfluenzaA__ACV04489

SEQ ID NO: 163308 - RNA, 1701 nt, Artificial Sequence; identical to SEQ ID NO: 162729
  derived and/or modified CDS sequence (opt4) from hemagglutinin__InfluenzaA__ACV04499

SEQ ID NO: 163309 - RNA, 1701 nt, Artificial Sequence; identical to SEQ ID NO: 162909
  derived and/or modified CDS sequence (opt4) from hemagglutinin__InfluenzaA__ACV04509

SEQ ID NO: 163310 - RNA, 1701 nt, Artificial Sequence; identical to SEQ ID NO: 162729
  derived and/or modified CDS sequence (opt4) from hemagglutinin__InfluenzaA__ACV04519

SEQ ID NO: 163311 - RNA, 1701 nt, Artificial Sequence; identical to SEQ ID NO: 162729
  derived and/or modified CDS sequence (opt4) from hemagglutinin__InfluenzaA__ACV04529

SEQ ID NO: 163312 - RNA, 1701 nt, Artificial Sequence; identical to SEQ ID NO: 162729
  derived and/or modified CDS sequence (opt4) from hemagglutinin__InfluenzaA__ACV04549

SEQ ID NO: 163313 - RNA, 1701 nt, Artificial Sequence; identical to SEQ ID NO: 162729
  derived and/or modified CDS sequence (opt4) from hemagglutinin__InfluenzaA__ACV04559

SEQ ID NO: 163314 - RNA, 1701 nt, Artificial Sequence; identical to SEQ ID NO: 162729
  derived and/or modified CDS sequence (opt4) from hemagglutinin__InfluenzaA__ACV04579

SEQ ID NO: 163315 - RNA, 1701 nt, Artificial Sequence
  derived and/or modified CDS sequence (opt4) from hemagglutinin__InfluenzaA__ACV04751
auggaggccauccugguggugaugcuguacaccuucgccaccgccaacgccgacacccugugcaucggcuaccacgccaacaacagcaccgacaccguggacaccgugcuggagaagaacgugaccgugacccacagcgugaaccugcuggaggacaagcacaacggcaagcugugcaagcugagaggcguggccccccugagacugggcaagugcaacaucgccggcuggauccugggcaaccccgagugcgagagccugagcaccgccagcagcuggagcuacaucguggagaccagcagcagcgacaacggcaccugcuaccccggcgacuucaucgacuacgaggagcugagagagcagcugagcagcgugagcagcuucgagagauucgagaucuuccccaagaccagcagcuggcccaaccacgacagcaacaagggcgugaccgccgccugcccccacgccggcgccaagagcuucuacaagaaccugaucuggcuggugaagaagggcaacagcuaccccaagcugagcaagagcuacaucaacgacaagggcaaggaggugcuggugcuguggggcauccaccaccccagcaccagcgccgaccagcagagccuguaccagaacgccgacgccuacguguucgugggcaccagcagauacagcaagaaguucaagcccgagaucgccaucagacccaaggugagagaccaggagggcagaaugaacuacuacuggacccugguggagcccggcgacaagaucaccuucgaggccaccggcaaccugguggugcccagauacgccuucgccauggagagaaacgccggcagcggcaucaucaucagcgacacccccgugcacaacugcaacaccaccugccagacccccaagggcgccaucaacaccagccugcccuuccagaacauccaccccaucaccaucggcaagugccccaaguacgugaagagcaccaagcugagacuggccaccggccugagaaacgugcccagcauccagagcagaggccuguucggcgccaucgccggcuucaucgagggcggcuggaccggcaugguggacggcugguacggcuaccaccaccagaacgagcagggcagcggcuacgccgccgaccugaagagcacccagaacgccaucgacgagaucaccaacaaggugaacagcgugaucgagaagaugaacacccaguucaccgccgugggcaaggaguucaaccaccuggagaagagaaucgagaaccugaacaagaagguggacgacggcuuccuggacaucuggaccuacaacgccgagcugcuggugcugcuggagaacgagagaacccuggacuaccacgacagcaacgugaagaaccuguacgagaaggugagaagccagcugaagaacaacaccaaggagaucggcaacggcugcuucgaguucuaccacaagugcgacaacaccugcauggagagcgugaagaacggcaccuacgacuaccccaaguacagcgaggaggccaagcugaacagagaggagaucgacggcgugaagcuggagagcaccagaaucuaccagauccuggccaucuacagcaccguggccagcagccuggugcugguggugagccugggcgccaucagcuucuggaugugcagcaacggcagccugcagugcagaaucugcaucuga

SEQ ID NO: 163316 - RNA, 1701 nt, Artificial Sequence
  derived and/or modified CDS sequence (opt4) from hemagglutinin__InfluenzaA__ACV04752
auggaggccauccugguggugcugcuguacaccuucgccaccgccaacgccgacacccugugcaucggcuaccacgccaacaacagcaccgacaccguggacaccgugcuggagaagaacgugaccgugacccacagcgugaacauccuggaggacaagcacaacggcaagcugugcaagcugagaggcguggccccccugcaccugggcaagugcaacaucgccggcuggauccuggagaaccccgagugcgagagccugagcaccgccagcagcuggagcuacaucguggagaccagcagcagcgacaacggcaccugcuaccccggcgacuucaucgacuacgaggagcugagagagcagcugagcagcgugagcagcuucgagagauucgagaucuuccccaagaccagcagcuggcccaaccacgacagcaacaagggcgugaccgccgccugcccccacgccggcgccaagagcuucuacaagaaccugaucuggcuggugaagaagggcaacagcuaccccaagcugagcaagagcuacaucaacgacaagggcaaggaggugcuggugcuguggggcauccaccaccccagcaccagcgccgaccagcagagccuguaccagaacgccgacgccuacguguucgugggcagcagcagauacagcaagaaguucaagcccgagaucgccaucagacccaaggugagagaccaggagggcagaaugaacuacuacuggacccugguggagcccggcgacaagaucaccuucgaggccaccggcaaccugguggugcccagauacgccuucgccauggagagaaacgccggcagcggcaucaucaucagcgacacccccgugcacgacugcaacaccaccugccagacccccaagggcgccaucaacaccagccugcccuuccacaacauccaccccaucaccaucggcaagugccccaaguacgugaagagcaccaagcugagacuggccaccggccugagaaacgugcccagcauccagagcagaggccuguucggcgccaucgccggcuucaucgagggcggcuggaccggcaugguggacggcugguacggcuaccaccaccagaacgagcagggcagcggcuacgccgccgaccugaagagcacccagaacgccaucgacgagaucaccaacaaggugaacagcgugaucgagaagaugaacacccaguucaccgccgugggcaaggaguucaaccaccuggagaagagaaucgagaaccugaacaagaagguggacgacggcuuccuggacaucuggaccuacaacgccgagcugcuggugcugcuggagaacgagagaacccuggacuaccacgacagcaacgugaagaaccuguacgagaaggugagaagccagcugaagaacaacgccaaggagaucggcaacggcugcuucgaguucuaccacaagugcgacaacaccugcauggagagcgugaagaacggcaccuacgacuaccccaaguacagcgaggaggccaagcugaacagagaggagaucgacggcgugaagcuggagagcaccagaaucuaccagauccuggccaucuacagcaccguggccagcagccuggugcugguggugagccugggcgccaucagcuucuggaugugcagcaacggcagccugcagugcagaaucugcaucuga

SEQ ID NO: 163317 - RNA, 1701 nt, Artificial Sequence
  derived and/or modified CDS sequence (opt4) from hemagglutinin__InfluenzaA__ACV04753
auggaggccauccugguggugcugcuguacaccuucgccaccgccaacgccgacacccugugcaucggcuaccacgccaacaacagcaccgacaccguggacaccgugcuggagaagaacgugaccgugacccacagcgugaaccugcuggaggacaagcacaacggcaagcugugcaagcugagaggcguggccccccugcaccugggcaagugcaacaucgccggcuggauccugggcaaccccgagugcgagagccugagcaccgccagcagcuggagcuacaucguggagaccagcagcagcgacaacggcaccugcuaccccggcgacuucaucgacuacgaggagcugagagagcagcugagcagcgugagcagcuucgagagauucgagaucuuccccaagaccagcagcuggcccaaccacgacagcaacaagggcgugaccgccgccugcccccacgccggcgccaagagcuucuacaagaaccugaucuggcuggugaagaagggcaacagcuaccccaagcugagcaagagcuacaucaacgacaagggcaaggaggugcuggugcuguggggcauccaccaccccagcaccagcgccgaccagcagagccuguaccagaacgccgacgccuacguguucgugggcaccagcagauacagcaagaaguucaagcccgagaucgccaucagacccaaggugagagacagagagggcagaaugaacuacuacuggacccugguggagcccggcgacaagaucaccuucgaggccaccggcaaccugguggugcccagauacgccuucgccauggagagaaacgccggcagcggcaucaucaucagcgacacccccgugcacgacugcaacaccaccugccagacccccaagggcgccaucaacaccagccugcccuuccagaacauccaccccaucaccaucggcaagugccccaaguacgugaagagcaccaagcugagacuggccaccggccugagaaacgugcccagcauccagagcagaggccuguucggcgccaucgccggcuucaucgagggcggcuggaccggcaugguggacggcugguacggcuaccaccaccagaacgagcagggcagcggcuacgccgccgaccugaagagcacccagaacgccaucgacgagaucaccaacaaggugaacagcgugaucgagaagaugaacacccaguucaccgccgugggcaaggaguucaaccaccuggagaagagaaucgagaaccugaacaagaagguggacgacggcuuccuggacaucuggaccuacaacgccgagcugcuggugcugcuggagaacgagagaacccuggacuaccacgacagcaacgugaagaaccuguacgagaaggugagaagccagcugaagaacaacgccaaggagaucggcaacggcugcuucgaguucuaccacaagugcgacaacaccugcauggagagcgugaagaacggcaccuacgacuaccccaaguacagcgaggaggccaagcugaacagagaggagaucgacggcgugaagcuggagagcaccagaaucuaccagauccuggccaucuacagcaccguggccagcagccuggugcugguggugagccugggcgccaucagcuucuggaugugcagcaacggcagccugcagugcagaaucugcaucuga

SEQ ID NO: 163318 - RNA, 1701 nt, Artificial Sequence
  derived and/or modified CDS sequence (opt4) from hemagglutinin__InfluenzaA__ACV04754
auggaggccauccugguggugcugcuguacaccuucgccaccgccaacgccgacacccugugcaucggcuaccacgccaacaacagcaccgacaccguggacaccgugcuggagaagaacgugcccgugacccacagcgugaaccugcugaaggacaagcacaacggcaagcugugcaagcugagaggcguggccccccugcaccugggcaagugcaacaucgccggcuggauccugggcaaccccgagugcgagagccugagcaccgccagcagcuggagcuacaucguggagaccagcagcagcgacaacggcaccugcuaccccggcgacuucaucgacuacgaggagcugagagagcagcugagcagcgugagcagcuucgagagauucgagaucuuccccaagaccagcagcuggcccaaccacgagagcaacaagggcgugaccgccgccugcccccacgccggcgccaagagcuucuacaagaaccugaucuggcuggugaagaagggcaacagcuaccccaagcugagcaagagcuacaucaacgacaagggcaaggaggugcuggugcuguggggcauccaccaccccagcaccagcgccgaccagcagagccuguaccagaacgccgacgccuacguguucgugggcaccagcagauacagcaagaaguucaagcccgagaucgccaucagacccaaggugagagaccaggagggcagaaugaacuacuacuggacccugguggagcccggcgacaagaucaccuucgaggccaccggcaaccugguggugcccagauacgccuucgccauggagagaaacgccggcagcggcaucaucaucagcgacacccccgugcacgacugcaacaccaccugccagacccccaagggcgccaucaacaccagccugcccuuccagaacauccaccccaucaccaucggcaagugccccaaguacgugaagagcaccaagcugagacuggccaccggccugagaaacgugcccagcauccagagcagaggcguguucggcgccaucgccggcuucaucgagggcggcuggaccggcaugguggacggcugguacggcuaccaccaccagaacgagcagggcagcggcuacgccgccgaccugaagagcacccagaacgccaucgacgagaucaccaacaaggugaacagcgugaucgagaagaugaacacccaguucaccgccgugggcaaggaguucaaccaccuggagaagagaaucgagaaccugaacaagaagguggacgacggcuuccuggacaucuggaccuacaacgccgagcugcuggugcugcuggagaacgagagaacccuggacuaccacgacagcaacgugaagaaccuguacgagaaggugagaagccagcugaagaacaacgccaaggagaucggcaacggcugcuucgaguucuaccacaagugcgacaacaccugcauggagagcgugaagaacggcaccuacgacuaccccaaguacagcgaggaggccaagcugaacagagaggagaucgacggcgugaagcuggagagcaccagaaucuaccagauccuggccaucuacagcaccguggccagcagccuggugcugguggugagccugggcgccaucagcuucuggaugugcagcaacggcagccugcagugcagaaucugcaucuga

SEQ ID NO: 163319 - RNA, 1701 nt, Artificial Sequence; identical to SEQ ID NO: 163214
  derived and/or modified CDS sequence (opt4) from hemagglutinin__InfluenzaA__ACV04755

SEQ ID NO: 163320 - RNA, 1701 nt, Artificial Sequence; identical to SEQ ID NO: 162909
  derived and/or modified CDS sequence (opt4) from hemagglutinin__InfluenzaA__ACV33084

SEQ ID NO: 163321 - RNA, 1701 nt, Artificial Sequence; identical to SEQ ID NO: 162729
  derived and/or modified CDS sequence (opt4) from hemagglutinin__InfluenzaA__ACV33094

SEQ ID NO: 163322 - RNA, 1701 nt, Artificial Sequence; identical to SEQ ID NO: 162729
  derived and/or modified CDS sequence (opt4) from hemagglutinin__InfluenzaA__ACV33104

SEQ ID NO: 163323 - RNA, 1701 nt, Artificial Sequence; identical to SEQ ID NO: 162729
  derived and/or modified CDS sequence (opt4) from hemagglutinin__InfluenzaA__ACV33114

SEQ ID NO: 163324 - RNA, 1701 nt, Artificial Sequence; identical to SEQ ID NO: 162729
  derived and/or modified CDS sequence (opt4) from hemagglutinin__InfluenzaA__ACV33124

SEQ ID NO: 163325 - RNA, 1701 nt, Artificial Sequence; identical to SEQ ID NO: 162729
  derived and/or modified CDS sequence (opt4) from hemagglutinin__InfluenzaA__ACV33134

SEQ ID NO: 163326 - RNA, 1701 nt, Artificial Sequence; identical to SEQ ID NO: 163291
  derived and/or modified CDS sequence (opt4) from hemagglutinin__InfluenzaA__ACV33144

SEQ ID NO: 163327 - RNA, 1701 nt, Artificial Sequence; identical to SEQ ID NO: 162729
  derived and/or modified CDS sequence (opt4) from hemagglutinin__InfluenzaA__ACV33154

SEQ ID NO: 163328 - RNA, 1701 nt, Artificial Sequence; identical to SEQ ID NO: 162729
  derived and/or modified CDS sequence (opt4) from hemagglutinin__InfluenzaA__ACV33164

SEQ ID NO: 163329 - RNA, 1701 nt, Artificial Sequence; identical to SEQ ID NO: 162729
  derived and/or modified CDS sequence (opt4) from hemagglutinin__InfluenzaA__ACV33174

SEQ ID NO: 163330 - RNA, 1701 nt, Artificial Sequence; identical to SEQ ID NO: 162716
  derived and/or modified CDS sequence (opt4) from hemagglutinin__InfluenzaA__ACV41981

SEQ ID NO: 163331 - RNA, 1701 nt, Artificial Sequence; identical to SEQ ID NO: 162755
  derived and/or modified CDS sequence (opt4) from hemagglutinin__InfluenzaA__ACV41991

SEQ ID NO: 163332 - RNA, 1701 nt, Artificial Sequence; identical to SEQ ID NO: 162755
  derived and/or modified CDS sequence (opt4) from hemagglutinin__InfluenzaA__ACV42001

SEQ ID NO: 163333 - RNA, 1701 nt, Artificial Sequence; identical to SEQ ID NO: 162729
  derived and/or modified CDS sequence (opt4) from hemagglutinin__InfluenzaA__ACV42008

SEQ ID NO: 163334 - RNA, 1701 nt, Artificial Sequence; identical to SEQ ID NO: 162729
  derived and/or modified CDS sequence (opt4) from hemagglutinin__InfluenzaA__ACV42018

SEQ ID NO: 163335 - RNA, 1701 nt, Artificial Sequence; identical to SEQ ID NO: 162376
  derived and/or modified CDS sequence (opt4) from hemagglutinin__InfluenzaA__ACV49501

SEQ ID NO: 163336 - RNA, 1701 nt, Artificial Sequence
  derived and/or modified CDS sequence (opt4) from hemagglutinin__InfluenzaA__ACV49512
augaagaccaucaucgcccugagcuacaucuucugccuggcccugggccaggaccugcccggcaacgacaacagcaccgccacccugugccugggccaccacgccgugcccaacggcacccuggugaagaccaucaccgacgaccagaucgaggugaccaacgccaccgagcuggugcagagcagcagcaccggcaagaucugcaacaacccccacagaauccuggacggcaucgacugcacccugaucgacgcccugcugggcgacccccacugcgacguguuccagaacgagaccugggaccuguucguggagagaagcaaggccuucagcaacugcuaccccuacgacgugcccgacuacgccagccugagaagccugguggccagcagcggcacccuggaguucaucaccgagggcuucaccuggaccggcgugacccagaacggcggcagcaacgccugcaagagaggccccggcagcggcuucuucagcagacugaacuggcugaccaagagcggcagcaccuaccccgugcugaacgugaccaugcccaacaacgacaacuucgacaagcuguacaucuggggcgugcaccaccccagcaccaaccaggagcagaccagccuguacgugcaggccagcggcagagugaccgugagcaccagaagaagccagcagaccaucauccccaacaucgagagcagacccugggugagaggccugagcagcagaaucagcaucuacuggaccaucgugaagcccggcgacgugcuggugaucaacagcaacggcaaccugaucgcccccagaggcuacuucaagaugagaaccggcaagagcagcaucaugagaagcgacgcccccaucgacaccugcaucagcgagugcaucacccccaacggcagcauccccaacgacaagcccuuccagaacgugaacaagaucaccuacggcgccugccccaaguacgugaagcagaacacccugaagcuggccaccggcaugagaaacgugcccgagaagcagaccagaggccuguucggcgccaucgccggcuucaucgagaacggcugggagggcaugaucgacggcugguacggcuucagacaccagaacagcgagggcaccggccaggccgccgaccugaagagcacccaggccgccaucgaccagaucaacggcaagcugaacagagugaucgagaagaccaacgagaaguuccaccagaucgagaaggaguucagcgagguggagggcagaauccaggaccuggagaaguacguggaggacaccaagaucgaccuguggagcuacaacgccgagcugcugguggcccuggagaaccagcacaccaucgaccugaccgacagcgagaugaacaagcuguucgagaagaccagaagacagcugagagagaacgccgaggacaugggcaacggcugcuucaagaucuaccacaagugcgacaacgccugcaucgagagcaucagaaacggcaccuacgaccacgacguguacagagacgaggcccugaacaacagauuccagaucaaggacguggagcugaagagcggcuacaaggacuggauccuguggaucagcuucgccaucagcugcuuccugcugugcguggugcugcugggcuucaucaugugggccugccagagaggcaacaucagaugcaacaucugcaucuga

SEQ ID NO: 163337 - RNA, 1701 nt, Artificial Sequence; identical to SEQ ID NO: 162389
  derived and/or modified CDS sequence (opt4) from hemagglutinin__InfluenzaA__ACV49523

SEQ ID NO: 163338 - RNA, 1698 nt, Artificial Sequence
  derived and/or modified CDS sequence (opt4) from hemagglutinin__InfluenzaA__ACV49545
augaaggccaaccugcuggugcugcugugcgcccuggccgccgccgacgccgacaccaucugcaucggcuaccacgccaacaacagcaccgacaccguggacaccgugcuggagaagaacgugaccgugacccacagcgugaaccugcuggaggacagccacaacggcaagcugugcagacugaagggcaucgccccccugcagcugggcaagugcaacaucgccggcuggcugcugggcaaccccgagugcgacccccugcugcccgugagaagcuggagcuacaucguggagacccccaacagcgagaacggcaucugcuaccccggcgacuucaucgacuacgaggagcugagagagcagcugagcagcgugagcagcuucgagagauucgagaucuuccccaaggagagcagcuggcccaaccacaacaccaacggcgugaccgccgccugcagccacgagggcaagagcagcuucuacagaaaccugcuguggcugaccgagaaggagggcagcuaccccaagcugaagaacagcuacgugaacaagaagggcaaggaggugcuggugcuguggggcauccaccacccccccaacagcaaggagcagcagaaccuguaccagaacgagaacgccuacgugagcguggugaccagcaacuacaacagaagauucacccccgagaucgccgagagacccaaggugagagaccaggccggcagaaugaacuacuacuggacccugcugaagcccggcgacaccaucaucuucgaggccaacggcaaccugaucgcccccauguacgccuucgcccugagcagaggcuucggcagcggcaucaucaccagcaacgccagcaugcacgagugcaacaccaagugccagaccccccugggcgccaucaacagcagccugcccuaccagaacauccaccccgugaccaucggcgagugccccaaguacgugagaagcgccaagcugagaauggugaccggccugagaaacauccccagcauccagagcagaggccuguucggcgccaucgccggcuucaucgagggcggcuggaccggcaugaucgacggcugguacggcuaccaccaccagaacgagcagggcagcggcuacgccgccgaccagaagagcacccagaacgccaucaacggcaucaccaacaaggugaacaccgugaucgagaagaugaacauccaguucaccgccgugggcaaggaguucaacaagcuggagaagagaauggagaaccugaacaagaagguggacgacggcuuccuggacaucuggaccuacaacgccgagcugcuggugcugcuggagaacgagagaacccuggacuuccacgacagcaacgugaagaaccuguacgagaaggugaagagccagcugaagaacaacgccaaggagaucggcaacggcugcuucgaguucuaccacaagugcgacaacgagugcauggagagcgugagaaacggcaccuacgacuaccccaaguacagcgaggagagcaagcugaacagagagaagguggacggcgugaagcuggagagcaugggcaucuaccagauccuggccaucuacagcaccguggccagcagccuggugcugcuggugagccugggcgccaucagcuucuggaugugcagcaacggcagccugcagugcagaaucugcaucuga

SEQ ID NO: 163339 - RNA, 1701 nt, Artificial Sequence
  derived and/or modified CDS sequence (opt4) from hemagglutinin__InfluenzaA__ACV49556
augaaggccagacugcugauccugcugugcgcccuggccgccaccgacgccgacaccaucugcaucggcuaccacgccaacaacagcaccgacaccguggacaccgugcuggagaagaacgugaccgugacccacagcgugaaccugcuggaggacagccacaacggcaagcugugcagacugaagggcaucgccccccugcagcugggcaagugcaacaucgccggcuggauccugggcaaccccgagugcgacagccugcugcccgccagcagcuggagcuacaucguggagacccccaacagcaagaacggcaucugcuaccccggcgacuucaucgacuacgaggagcugagagagcagcugagcagcgugagcagcuucgagagauucgagaucuuccccaaggagagcagcuggcccaagcacagcaccaccaagggcgugaccgccgccugcagccacgccggcaagagcagcuucuacagaaaccugcuguggcugaccaagaaggaggacagcuaccccaagcugagcaacagcuacgugaacaagaagggcaaggaggugcuggugcuguggggcgugcaccaccccagcagcagcaaggagcagcagacccuguaccagaacgagaacgccuacgugagcguggugagcagcaacuacaacagaagauucauccccgagaucgccgagagacccgaggugaaggaccaggccggcagaaucaacuacuacuggacccugcuggagcccggcgacaccaucaucuucgaggccaacggcaaccugguggcccccugguacgccuucgcccugagcagaggcuucggcagcggcaucaucaccagcaacgccagcaugcacgagugcaacaccaagugccagaccccccagggcgccaucaacagcagccugcccuuccagaacauccaccccgugaccaucggcgagugccccaaguacgugaagagcgccaagcugagaauggugaccggccugagaaacauccccagcauccagagcagaggccuguucggcgccaucgccggcuucaucgagggcggcuggaccggcaugaucgacggcugguacggcuaccaccaccagaacgagcagggcagcggcuacgccgccgaccagaagagcacccagaacgccaucaacggcaucaccaacaaggugaacagcgugaucgagaagaugaacacccaguucaccgccgugggcaaggaguucaacaaccuggagaagagaauggagaaccugaacaagaagguggacgacggcuuccuggacaucuggaccuacaacgccgagcugcuggugcugcuggagaacgagagaacccuggacuuccacgacagcaacgugaagaaccuguacgagaaggugaagauccagcugaagaacaacgccaaggagaucggcaacggcugcuucgaguucuaccacaagugcgacaacgagugcauggagagcgugagaaacggcaccuacgacuaccccaaguacagcaaggagagcaagcugaacagagagaagaucgacggcgugaagcuggagagcaugggcguguaccagauccuggccaucuacagcaccguggccagcagccuggugcugcuggugagccugggcgccaucagcuucuggaugugcagcaacggcagccugcagugcagaaucugcaucuga

SEQ ID NO: 163340 - RNA, 1701 nt, Artificial Sequence
  derived and/or modified CDS sequence (opt4) from hemagglutinin__InfluenzaA__ACV49567
augaaggccaagcugcugauccugcugugcgcccugaccgccaccgacgccgacaccaucugcaucggcuaccacgccaacaacagcaccgacaccguggacaccgugcuggagaagaacgugaccgugacccacagcgugaaccugcuggaggacagccacaacggcaagcugugcagacugaagggcaucgccccccugcagcugggcaagugcaacaucgccggcuggauccugggcaaccccgagugcgagagccugcugagcaagagaagcuggagcuacaucgccgagacccccaacagcgagaacggcgccugcuaccccggcgacuucgccgacuacgaggagcugagagagcagcugagcagcgugagcagcuucgagagauucgagaucuuccccaaggagagaagcuggcccaagcacaacaucaccagaggcgugaccgccgccugcagccacgccggcaagagcagcuucuacaagaaccugcuguggcugaccgagaccgacggcagcuaccccaagcugagcaagagcuacgugaacaacaaggagaaggaggugcuggugcuguggggcgugcaccaccccagcaacaucgaggaccagaagacccuguacagaaaggagaacgccuacgugagcguggugagcagcaacuacaacagaagauucacccccgagaucgccgagagacccaaggugagaggccaggccggcagaaucaacuacuacuggacccugcuggagcccggcgacaccaucaucuucgaggccaacggcaaccugaucgcccccugguacgccuucgcccugagcagagacuucggcagcggcaucaucaccagcaacgccagcauggacgagugcgacaccaagugccagaccccccagggcgccaucaacagcagccugcccuuccagaacauccaccccgugaccaucggcgagugccccaaguacgugaagagcaccaagcugagaauggugaccggccugagaaacauccccagcauccagagcagaggccuguucggcgccaucgccggcuucaucgagggcggcuggaccggcaugaucgacggcugguacggcuaccaccaccagaacgagcagggcagcggcuacgccgccgaccagaagagcacccagaacgccaucaacuggaucaccaacaaggugaacagcgugaucgagaagaugaacacccaguucaccgccgugggcaaggaguucaacaagcuggagaagagaauggagaaccugaacaagaagguggacgacggcuuccuggacaucuggaccuacaacgccgagcugcuggugcugcuggagaacgagagaacccuggacuuccacgacagcaacgugaagaaccuguacgagaaggugaagaaccagcugagaaacaacgccaaggagaucggcaacggcugcuucgaguucuaccacaagugcaacaacgagugcauggagagcgugaagaacggcaccuacgacuaccccaaguacagcgaggagagcaagcugaacagagagaagaucgacggcgugaagcuggagagcaugggcguguaccagauccuggccaucuacagcaccguggccagcagccuggugcugcuggugagccugggcgccaucagcuucuggaugugcagcaacggcagccugcagugcagaaucugcaucuga

SEQ ID NO: 163341 - RNA, 1689 nt, Artificial Sequence
  derived and/or modified CDS sequence (opt4) from hemagglutinin__InfluenzaA__ACV49578
auggccaucaucuaccugauccugcuguucaccgccgugagaggcgaccagaucugcaucggcuaccacgccaacaacagcaccgagaagguggacaccauccuggagagaaacgugaccgugacccacgccaaggacauccuggagaagacccacaacggcaagcugugcaagcugaacggcauccccccccuggagcugggcgacugcagcaucgccggcuggcugcugggcaaccccgagugcgacagacugcugagagugcccgaguggagcuacaucauggagaaggagaaccccaaguacagccugugcuaccccggcagcuucaacgacuacgaggagcugaagcaccugcugagcagcgugaagcacuucgagaaggugaagauccugcccaaggacagauggacccagcacaccaccaccggcggcagcagagccugcgccgugagcggcaaccccagcuucuucagaaacaugguguggcugaccaagaagggccccaacuaccccguggccaagggcagcuacaacaacaccagcggcgagcagaugcugaucaucuggggcgugcaccaccccaucgacgaggccgagcagaucgcccuguaccagaaggugggcaccuacgugagcgccagcaccagcacccugaacaagagaagcacccccgagaucgccgccagacccgaggugaacggccugggcagcagaauggaguucagcuggacccugcuggacaugugggacaccaucaacuucgagagcaccggcaaccugguggcccccgaguacggcuucaagaucagcaagagaggcagcagcggcaucaugaagaccgagggcacccuggagaacugcgagaccaagugccagaccccccugggcgccaucaacaccacccugcccuuccacaacgugcacccccugaccaucggcgagugccccaaguacgugaagagcgagaagcuggugcuggccaccggccugagaaacgugccccagaucgagagcagaggccuguucggcgccaucgccggcuucaucgagggcggcuggcagggcaugguggacggcugguacggcuaccaccacagcaacgaccagggcagcggcuacgccgccgacaaggagagcacccagaaggccuucgacggcaucaccaacaaggugaacagcgugaucgagaagaugaacacccaguucgaggccgugggcaaggaguucagcaaccuggagaagagacuggagaaccugaacaagaagauggaggacggcuuccuggacguguggaccuacaacgccgagcugcuggugcugauggagaacgagagaacccuggacuuccacgacagcaacgugaagaaccuguacgacaaggugagaaugcagcugagagacaacgugaaggagcugggcaacggcugcuucgaguucuaccacaagugcgacgacgagugcauggacagcgugaagaacggcaccuacgacuaccccaaguacgaggaggagagcaagcugaacagaaacgagaucaagggcgugaagcugagcagcaugggcguguaccagauccuggccaucuacgccaccguggccggcagccugagccuggccaucaugauggccggcaucagcuucuggaugugcagcaacggcagccugcagugcagaaucugcaucuga

SEQ ID NO: 163342 - RNA, 1689 nt, Artificial Sequence; identical to SEQ ID NO: 163341
  derived and/or modified CDS sequence (opt4) from hemagglutinin__InfluenzaA__ACV49589

SEQ ID NO: 163343 - RNA, 1689 nt, Artificial Sequence
  derived and/or modified CDS sequence (opt4) from hemagglutinin__InfluenzaA__ACV49600
auggccaucaucuaccugauccugcuguucaccgccgugagaggcgaccagaucugcaucggcuaccacgccaacaacagcaccgagaagguggacaccauccuggagagaaacgugaccgugacccacgccaaggacauccuggagaagacccacaacggcaagcugugcaagcugaacggcauccccccccuggagcugggcgacugcagcaucgccggcuggcugcugggcaaccccgagugcgacagacugcugagcgugcccgaguggagcuacaucauggagaaggagaaccccagagacggccugugcuaccccggcagcuucaacgacuacgaggagcugaagcaccugcugagcagcgugaagcacuucgagaaggugaagauccugcccaaggacagauggacccagcacaccaccaccggcggcagcagagccugcgccgugagcggcaaccccagcuucuucagaaacaugguguggcugaccgagaagggcagcaacuaccccguggccaagggcagcuacaacaacaccagcggcgagcagaugcugaucaucuggggcgugcaccaccccaacgacgagaccgagcagagaacccuguaccagaacgugggcaccuacgugagcgugggcaccagcacccugaacaagagaagcacccccgagaucgccaccagacccaaggugaacggccagggcggcagaauggaguucagcuggacccugcuggacaugugggacaccaucaacuucgagagcaccggcaaccugaucgcccccgaguacggcuucaagaucagcaagagaggcagcagcggcaucaugaagaccgagggcacccuggagaacugcgagaccaagugccagaccccccugggcgccaucaacaccacccugcccuuccacaacgugcacccccugaccaucggcgagugccccaaguacgugaagagcgagaagcuggugcuggccaccggccugagaaacgugccccagaucgagagcagaggccuguucggcgccaucgccggcuucaucgagggcggcuggcagggcaugguggacggcugguacggcuaccaccacagcaacgaccagggcagcggcuacgccgccgacaaggagagcacccagaaggccuucgacggcaucaccaacaaggugaacagcgugaucgagaagaugaacacccaguucgaggccgugggcaaggaguucagcaaccuggagagaagacuggagaaccugaacaagaagauggaggacggcuuccuggacguguggaccuacaacgccgagcugcuggugcugauggagaacgagagaacccuggacuuccacgacagcaacgugaagaaccuguacgacaaggugagaaugcagcugagagacaacgugaaggagcugggcaacggcugcuucgaguucuaccacaagugcgacgacgagugcaugaacagcgugaagaacggcaccuacgacuaccccaaguacgaggaggagagcaagcugaacagaaacgagaucaagggcgugaagcugagcagcaugggcguguaccagauccuggccaucuacgccaccguggccggcagccugagccuggccaucaugauggccggcaucagcuucuggaugugcagcaacggcagccugcagugcagaaucugcaucuga

SEQ ID NO: 163344 - RNA, 1689 nt, Artificial Sequence
  derived and/or modified CDS sequence (opt4) from hemagglutinin__InfluenzaA__ACV49611
auggccaucaucuaccugauccugcuguucaccgccgugagaggcgaccagaucugcaucggcuaccacgccaacaacagcaccgagaagguggacaccauccuggagagaaacgugaccgugacccacgccaaggacauccuggagaagacccacaacggcaagcugugcaagcugaacggcauccccccccuggagcugggcgacugcagcaucgccggcuggcugcugggcaaccccgagugcgacagacugcugagcgugcccgaguggagcuacaucauggagaaggagaaccccagagacggccugugcuaccccggcagcuucaacgacuacgaggagcugaagcaccugcugagcagcgugaagcacuucgagaaggugaagauccugcccaaggacagauggacccagcacaccaccaccggcggcagcagagccugcgccgugagcggcaaccccagcuucuucagaaacaugguguggcugaccgagaagggcagcaacuaccccguggccaagggcagcuacaacaacaccagcggcgagcagaugcugaucaucuggggcgugcaccaccccaacgacgagaccgagcagagaacccuguaccagaacgugggcaccuacgugagcgugggcaccagcacccugaacaagagaagcacccccaagaucgccaccagacccaaggugaacggccagggcggcagaauggaguucagcuggacccugcuggacaugugggacaccaucaacuucgagagcaccggcaaccugaucgcccccgaguacggcuucaagaucagcaagagaggcagcagcggcaucaugaagaccgagggcacccuggagaacugcgagaccaagugccagaccccccugggcgccaucaacaccacccugcccuuccacaacgugcacccccugaccaucggcgagugccccaaguacgugaagagcgagaagcuggugcuggccaccggccugagaaacgugccccagaucgagagcagaggccuguucggcgccaucgccggcuucaucgagggcggcuggcagggcaugguggacggcugguacggcuaccaccacagcaacgaccagggcagcggcuacgccgccgacaaggagagcacccagaaggccuucgacggcaucaccaacaaggugaacagcgugaucgagaagaugaacacccaguucgaggccgugggcaaggaguucagcaaccuggagagaagacuggagaaccugaacaagaagguggaggacggcuuccuggacguguggaccuacaacgccgagcugcuggugcugauggagaacgagagaacccuggacuuccacgacagcaacgugaagaaccuguacgacaaggugagaaugcagcugagagacaacgugaaggagcugggcaacggcugcuucgaguucuaccacaagugcgacgacgagugcaugaacagcgugaagaacggcaccuacgacuaccccaaguacgaggaggagagcaagcugaacagaaacgagaucaagggcgugaagcugagcagcaugggcguguaccagauccuggccaucuacgccaccguggccggcagccugagccuggccaucaugauggccggcaucagcuucuggaugugcagcaacggcagccugcagugcagaaucugcaucuga

SEQ ID NO: 163345 - RNA, 1701 nt, Artificial Sequence
  derived and/or modified CDS sequence (opt4) from hemagglutinin__InfluenzaA__ACV49633
augaagaccaucaucgcccugagcuacauccugugccugguguucgcccagaagcugcccggcaacgacaacagcaccgccacccugugccugggccaccacgccgugcccaacggcacccuggugaagaccaucaccaacgaccagaucgaggugaccaacgccaccgagcuggugcagagcagcagcaccggcagaaucugcgacagcccccacagaauccuggacggcaagaacugcacccugaucgacgcccugcugggcgacccccacugcgacggcuuccagaacaaggagugggaccuguucguggagagaagcaaggccuacagcaacugcuaccccuacgacgugcccgacuacgccagccugagaagccugguggccagcagcggcacccuggaguucaccaacgagggcuucaacuggaccggcguggcccaggacggcaccagcuacgccugcaagagaggcagcgugaagagcuucuucagcagacugaacuggcugcacaagcuggaguacaaguaccccgcccugaacgugaccaugcccaacaacgacaaguucgacaagcuguacaucuggggcgugcaccaccccagcaccgacagcgugcagaccagccuguacgugcaggccagcggcagagugaccgugagcaccaagagaagccagcagaccgugauccccaacaucggcagcagacccugggugagaggcaucagcagcagaaucagcaucuacuggaccaucgugaagcccggcgacauccugcugaucaacagcaccggcaaccugaucgcccccagaggcuacuucaagaucagaagcggcaagagcagcaucaugagaagcgacgcccccaucggcaacugcaacagcgagugcaucacccccaacggcagcauccccaacgacaagcccuuccagaacgugaacagaaucaccuacggcgccugccccagauacgugaagcagaacacccugaagcuggccaccggcaugagaaacgugcccgagaagcagaccagaggcaucuucggcgccaucgccggcuucaucgagaacggcugggagggcaugguggacggcugguacggcuucagacaccagaacagcgagggcaccggccaggccgccgaccugaagagcacccaggccgccaucaaccagaucaacggcaagcugaacagacugaucgagaagaccaacgagaaguucccccagaucgagaaggaguucagcgagguggagggcagaauccaggaccuggagaaguacguggaggacaccaagaucgaccuguggagcuacaacgccgagcugcugguggcccuggagaaccagcacaccaucgaccugaccgacagcgagaugaacaagcuguucgagagaaccagaaagcagcugagagagaacgccgaggacaugggcaacggcugcuucaagaucuaccacaagugcgacaacgccugcaucggcagcaucagaaacggcaccuacgaccacgacguguacagagacgaggcccugaacaacagauuccagaucaagggcguggagcugaagagcggcuacaaggacuggauccuguggaucagcuucgccaucagcugcuuccugcugugcguggugcugcugggcuucaucaugugggccugccagaagggcaacaucagaugcaacaucugcaucuga

SEQ ID NO: 163346 - RNA, 1701 nt, Artificial Sequence; identical to SEQ ID NO: 162416
  derived and/or modified CDS sequence (opt4) from hemagglutinin__InfluenzaA__ACV49644

SEQ ID NO: 163347 - RNA, 1698 nt, Artificial Sequence; identical to SEQ ID NO: 163235
  derived and/or modified CDS sequence (opt4) from hemagglutinin__InfluenzaA__ACV49676

SEQ ID NO: 163348 - RNA, 1701 nt, Artificial Sequence; identical to SEQ ID NO: 162716
  derived and/or modified CDS sequence (opt4) from hemagglutinin__InfluenzaA__ACV53450

SEQ ID NO: 163349 - RNA, 1701 nt, Artificial Sequence; identical to SEQ ID NO: 162716
  derived and/or modified CDS sequence (opt4) from hemagglutinin__InfluenzaA__ACV53460

SEQ ID NO: 163350 - RNA, 1701 nt, Artificial Sequence; identical to SEQ ID NO: 162716
  derived and/or modified CDS sequence (opt4) from hemagglutinin__InfluenzaA__ACV53480

SEQ ID NO: 163351 - RNA, 1701 nt, Artificial Sequence
  derived and/or modified CDS sequence (opt4) from hemagglutinin__InfluenzaA__ACV53490
auggaggccauccugguggugcugcuguacaccuucgccaccgccaacgccgacacccugugcaucggcuaccacgccaacaacagcaccgacaccguggacaccgugcuggagaagaacgugaccgugacccacagcgugaaccugcuggaggacaagcacaacggcaagcugugcaagcugagaggcguggccccccugcaccugggcaagugcgacaucgccggcuggauccugggcaaccccgagugcgagagccugagcaccgccagcagcuggagcuacaucguggagaccagcagcagcgacaacggcaccugcuaccccggcgacuucaucgacuacgaggagcugagagagcagcugagcagcgugagcagcuucgagagauucgagaucuuccccaagaccagcagcuggcccaaccacgacagcaacaagggcgugaccgccgccugcccccacgccggcgccaagagcuucuacaagaaccugaucuggcuggugaagaagggcaacagcuaccccaagcugagcaagagcuacaucaacgacaagggcaaggaggugcuggugcuguggggcauccaccaccccagcaccagcgccgaccagcagagccuguaccagaacgccgacgccuacguguucgugggcagcagcagauacagcaagaaguucaagcccgagaucgccaucagacccaaggugagagaccaggagggcagaaugaacuacuacuggacccugguggagcccggcgacaagaucaccuucgaggccaccggcaaccugguggugcccagauacgccuucgccauggagagaaacgccggcagcggcaucaucaucagcgacacccccgugcacgacugcaacaccaccugccagacccccaagggcgccaucaacaccagccugcccuuccacaacauccaccccaucaccaucggcaagugccccaaguacgugaagagcaccaagcugagacuggccaccggccugagaaacgugcccagcauccagagcagaggccuguucggcgccaucgccggcuucaucgagggcggcuggaccggcaugguggacggcugguacggcuaccaccaccagaacgagcagggcagcggcuacgccgccgaccugaagagcacccagaacgccaucgacgagaucaccaacaaggugaacagcgugaucgagaagaugaacacccaguucaccgccgugggcaaggaguucaaccaccuggagaccagaaucgagaaccugaacaagaagguggacgacggcuuccuggacaucuggaccuacaacgccgagcugcuggugcugcuggagaacgagagaacccuggacuaccacgacagcaacgugaagaaccuguacgagaaggugagaagccagcugaagaacaacgccaaggagaucggcaacggcugcuucgaguucuaccacaagugcgacaacaccugcauggagagcgugaagaacggcaccuacgacuaccccaaguacagcgaggaggccaagcugaacagagaggagaucgacggcgugaagcuggagagcaccagaaucuaccagauccuggccaucuacagcaccguggccagcagccuggugcugguggugagccugggcgccaucagcuucuggaugugcagcaacggcagccugcagugcagaaucugcaucuga

SEQ ID NO: 163352 - RNA, 1701 nt, Artificial Sequence
  derived and/or modified CDS sequence (opt4) from hemagglutinin__InfluenzaA__ACV53500
auggaggccauccugguggugcugcuguacaccuucgccaccgccaacgccgacacccugugcaucggcuaccacgccaacaacagcaccgacaccguggacaccgugcuggagaagaacgugaccgugacccacagcgugaaccugcuggaggacaagcacaacggcaagcugugcaagcugagaggcguggccccccugcaccugggcaagugcaacaucgccggcuggauccugggcaaccccgagugcgagagccugagcaccgccagcagcuggagcuacaucguggagaccagcagcagcgacaacggcaccugcuaccccggcgacuucaucgacuacgaggagcugagagagcagcugagcagcgugagcagcuucgagagauucgagaucuuccccaagaccagcagcuggcccaaccacgacagcaacaagggcgugaccgccgccugcccccacgccggcgccaagagcuucuacaagaaccugaucuggcuggugaagaagggcaacagcuaccccaagcugagcaagagcuacaucaacgacaagggcaaggaggugcuggugcuguggggcauccaccaccccagcaccagcgccgaccagcagagccuguaccagaacgccgacgccuacguguucgugggcagcagcagauacagcaagaaguucaagcccgagaucgccaucagacccaaggugagagaccaggagggcagaaugaacuacuacuggacccugguggagcccggcgacaagaucaccuucgaggccaccggcaaccugguggugcccagauacgccuucgccauggagagaaacgccggcagcggcaucaucaucagcgacacccccgugcacgacugcaacaccaccugccagacccccaagggcgccaucaacaccagccugcccuuccacaacauccaccccaucaccaucggcaagugccccaaguacgugaagagcaccaagcugagacuggccaccggccugagaaacgugcccagcauccagagcagaggccuguucggcgccaucgccggcuucaucgagggcggcuggaccggcaugguggacggcugguacggcuaccaccaccagaacgagcagggcagcggcuacgccgccgaccugaagagcacccagaacgccaucgacgagaucaccaacaaggugaacagcgugaucgagaagaugaacacccaguucaccgccgugggcaaggaguucaaccaccuggagaccagaaucgagaaccugaacaagaagguggacgacggcuuccuggacaucuggaccuacaacgccgagcugcuggugcugcuggagaacgagagaacccuggacuaccacgacagcaacgugaagaaccuguacgagaaggugagaagccagcugaagaacaacgccaaggagaucggcaacggcugcuucgaguucuaccacaagugcgacaacaccugcauggagagcgugaagaacggcaccuacgacuaccccaaguacagcgaggaggccaagcugaacagagaggagaucgacggcgugaagcuggagagcaccagaaucuaccagauccuggccaucuacagcaccguggccagcagccuggugcugguggugagccugggcgccaucagcuucuggaugugcagcaacggcagccugcagugcagaaucugcaucuga

SEQ ID NO: 163353 - RNA, 1701 nt, Artificial Sequence
  derived and/or modified CDS sequence (opt4) from hemagglutinin__InfluenzaA__ACV53880
augaaggccauccugguggugcugcuguacaccuucgccaccgccaacgccgacacccugugcaucggcuaccacgccaacaacagcaccgacaccguggacaccgugcuggagaagaacgugaccgugacccacagcgugaaccugcuggaggacaagcacaacggcaagcugugcaagcugagaggcguggccccccugcaccugggcaagugcaacaucgccggcuggauccugggcaaccccgagugcgagagccugagcaccgccagcagcuggagcuacaucguggagaccagcagcagcgacaacggcaccugcuaccccggcgacuucaucgacuacgaggagcugagagagcagcugagcagcgugagcagcuucgagagauucgagaucuuccccaagaccagcagcuggcccaaccacgacagcaacaagggcgugaccaccgccugcccccacgccggcgccaagagcuucuacaagaaccugaucuggcuggugaagaagggcaacagcuaccccaagcugagcaagagcuacaucaacgacaagggcaaggaggugcuggugcuguggggcauccaccaccccagcaccagcgccgaccagcagagccuguaccagaacgccgacgccuacguguucgugggcaccagcagauacagcaagaaguucaagcccgagaucgccaucagacccaaggugagagaccaggagggcagaaugaacuacuacuggacccugguggagcccggcgacaagaucaccuucgaggccaccggcaaccugguggugcccagauacgccuucgccauggagagaaacgccggcagcggcaucaucaucagcgacacccccgugcacgacugcaacaccaccugccagacccccaagggcgccaucaacaccagccugcccuuccagaacauccaccccaucaccaucggcaagugccccaaguacgugaagagcaccaagcugagacuggccaccggccugagaaacgugcccagcauccagagcagaggccuguucggcgccaucgccggcuucaucgagggcggcuggaccggcaugguggacggcugguacggcuaccaccaccagaacgagcagggcagcggcuacgccgccgaccugaagagcacccagaacgccaucgacgagaucaccaacaaggugaacagcgugaucgagaagaugaacacccaguucaccgccgugggcaaggaguucaaccaccuggagaagagaaucgagaaccugaacaagaagguggacgacggcuuccuggacaucuggaccuacaacgccgagcugcuggugcugcuggagaacgagagaacccuggacuaccacgacagcaacgugaagaaccuguacgagaaggugagaagccagcugaagaacaacgccaaggagaucggcaacggcugcuucgaguucuaccacaagugcgacaacaccugcauggagagcgugaagaacggcaccuacgacuaccccaaguacagcgaggaggccaagcugaacagagaggagaucgacggcgugaagcuggagagcaccagaaucuaccagauccuggccaucuacagcaccguggccagcagccuggugcugguggugagccugggcgccaucagcuucuggaugugcagcaacggcagccugcagugcagaaucugcaucuga

SEQ ID NO: 163354 - RNA, 1701 nt, Artificial Sequence; identical to SEQ ID NO: 162729
  derived and/or modified CDS sequence (opt4) from hemagglutinin__InfluenzaA__ACV53881

SEQ ID NO: 163355 - RNA, 1701 nt, Artificial Sequence; identical to SEQ ID NO: 162716
  derived and/or modified CDS sequence (opt4) from hemagglutinin__InfluenzaA__ACV53882

SEQ ID NO: 163356 - RNA, 1701 nt, Artificial Sequence; identical to SEQ ID NO: 162729
  derived and/or modified CDS sequence (opt4) from hemagglutinin__InfluenzaA__ACV53883

SEQ ID NO: 163357 - RNA, 1701 nt, Artificial Sequence; identical to SEQ ID NO: 162729
  derived and/or modified CDS sequence (opt4) from hemagglutinin__InfluenzaA__ACV53885

SEQ ID NO: 163358 - RNA, 1701 nt, Artificial Sequence
  derived and/or modified CDS sequence (opt4) from hemagglutinin__InfluenzaA__ACV53899
augaaggccauccugguggugcugcuguacaccuucgccaccgccaacgccgacacccugugcaucggcuaccacgccaacaacagcaccgacaccguggacaccgugcuggagaagaacgugaccgugacccacagcgugaaccugcuggaggacaagcacaacggcaagcugugcaagcugagaggcguggccccccugcaccugggcaagugcaacaucgccggcuggauccugggcaaccccgagugcgagagccugagcaccgccagcagcuggagcuacaucguggagaccagcagcagcgacaacggcaccugcuaccccggcgacuucaucgacuacgaggagcugagagagcagcugagcagcgugagcagcuucgagagauucgagaucuuccccaagaccagcagcuggcccaaccacgacagcaacaagggcgugaccgccgccugcccccacgccggcgccaagagcuucuacaagaaccugaucuggcuggugaagaagggcaacagcuaccccaagcugagcaagagcuacaucaacgacaagggcaaggaggugcuggugcuguggggcauccaccaccccagcaccagcgccgaccagcagagccuguaccagaacgccgacgccuacguguucgugggcaccagcagauacagcaagaaguucaagcccgagaucgccaucagacccaaggugagagaccaggagggcagaaugaacuacuacuggacccugguggagcccggcgacaagaucaccuucgaggccaccggcaaccugguggugcccagauacgccuucgccauggagagaaacgccggcagcggcaucaucaucagcgacacccccgugcacgacugcaacaccaccugccagacccccgagggcgccaucaacaccagccugcccuuccagaacauccaccccaucaccaucggcaagugccccaaguacgugaagagcaccaagcugagacuggccaccggccugagaaacgugcccagcauccagagcagaggccuguucggcgccaucgccggcuucaucgagggcggcuggaccggcaugguggacggcugguacggcuaccaccaccagaacgagcagggcagcggcuacgccgccgaccugaagagcacccagaacgccaucgacgagaucaccaacaaggugaacagcgugaucgagaagaugaacacccaguucaccgccgugggcaaggaguucaaccaccuggagaagagaaucgagaaccugaacaagaagguggacgacggcuuccuggacaucuggaccuacaacgccgagcugcuggugcugcuggagaacgagagaacccuggacuaccacgacagcaacgugaagaaccuguacgagaaggugagaagccagcugaagaacaacgccaaggagaucggcaacggcugcuucgaguucuaccacaagugcgacaacaccugcauggagagcgugaagaacggcaccuacgacuaccccaaguacagcgaggaggccaagcugaacagagaggagaucgacggcgugaagcuggagagcaccagaaucuaccagauccuggccaucuacagcaccguggccagcagccuggugcugguggugagccugggcgccaucagcuucuggaugugcagcaacggcagccugcagugcagaaucugcaucuga

SEQ ID NO: 163359 - RNA, 1701 nt, Artificial Sequence; identical to SEQ ID NO: 162729
  derived and/or modified CDS sequence (opt4) from hemagglutinin__InfluenzaA__ACV53909

SEQ ID NO: 163360 - RNA, 1701 nt, Artificial Sequence; identical to SEQ ID NO: 162729
  derived and/or modified CDS sequence (opt4) from hemagglutinin__InfluenzaA__ACV67220

SEQ ID NO: 163361 - RNA, 1701 nt, Artificial Sequence
  derived and/or modified CDS sequence (opt4) from hemagglutinin__InfluenzaA__ACV67221
augaaggccauccugguggugcugcuguacaccuucgccaccgccaacgccgacacccugugcaucggcuaccacgccaacaacagcaccgacaccguggacaccgugcuggagaagaacgugaccgugacccacagcgugaaccugcuggaggacaagcacaacggcaagcugugcaagcugagaggcguggccccccugcaccugggcaagugcaacaucgccggcuggauccugggcaaccccgagugcggcagccugagcaccgccagcagcuggagcuacaucguggagaccagcagcagcgacaacggcaccugcuaccccggcgacuucaucgacuacgaggagcugagagagcagcugagcagcgugagcagcuucgagagauucgagaucuuccccaagaccagcagcuggcccaaccacgacagcaacaagggcgugaccgccgccugcccccacgccggcgccaagagcuucuacaagaaccugaucuggcuggugaagaagggcaacagcuaccccaagcugagcaagagcuacaucaacgacaagggcaaggaggugcuggugcuguggggcauccaccaccccagcaccagcgccgaccagcagagccuguaccagagcgccgacgccuacguguucgugggcaccagcagauacagcaagaaguucaagcccgagaucgccaucagacccaaggugagagaccaggagggcagaaugaacuacuacuggacccugguggagcccggcgacaagaucaccuucgaggccaccggcaaccugguggugcccagauacgccuucgccauggagagaaacgccggcagcggcaucaucaucagcgacacccccgugcacgacugcaacaccaccugccagacccccaagggcgccaucaacaccagccugcccuuccagaacauccaccccaucaccaucggcaagugccccaaguacgugaagagcaccaagcugagacuggccaccggccugagaaacgugcccagcauccagagcagaggccuguucggcgccaucgccggcuucaucgagggcggcuggaccggcaugguggacggcugguacggcuaccaccaccagaacgagcagggcagcggcuacgccgccgaccugaagagcacccagaacgccaucgacgagaucaccaacaaggugaacagcgugaucgagaagaugaacacccaguucaccgccgugggcaaggaguucaaccaccuggagaagagaaucgagaaccugaacaagaagguggacgacggcuuccuggacaucuggaccuacaacgccgagcugcuggugcugcuggagaacgagagaacccuggacuaccacgacagcaacgugaagaaccuguacgagaaggugagaagccagcugaagaacaacgccaaggagaucggcaacggcugcuucgaguucuaccacaagugcgacaacaccugcauggagagcgugaagaacggcaccuacgacuaccccaaguacagcgaggaggccaagcugaacagagaggagaucgacggcgugaagcuggagagcaccagaaucuaccagauccuggccaucuacagcaccguggccagcagccuggugcugguggugagccugggcgccaucagcuucuggaugugcagcaacggcagccugcagugcagaaucugcaucuga

SEQ ID NO: 163362 - RNA, 1701 nt, Artificial Sequence; identical to SEQ ID NO: 162716
  derived and/or modified CDS sequence (opt4) from hemagglutinin__InfluenzaA__ACV67222

SEQ ID NO: 163363 - RNA, 1701 nt, Artificial Sequence; identical to SEQ ID NO: 162755
  derived and/or modified CDS sequence (opt4) from hemagglutinin__InfluenzaA__ACV67223

SEQ ID NO: 163364 - RNA, 1701 nt, Artificial Sequence; identical to SEQ ID NO: 162971
  derived and/or modified CDS sequence (opt4) from hemagglutinin__InfluenzaA__ACV67224

SEQ ID NO: 163365 - RNA, 1701 nt, Artificial Sequence; identical to SEQ ID NO: 162909
  derived and/or modified CDS sequence (opt4) from hemagglutinin__InfluenzaA__ACV67225

SEQ ID NO: 163366 - RNA, 1701 nt, Artificial Sequence; identical to SEQ ID NO: 162729
  derived and/or modified CDS sequence (opt4) from hemagglutinin__InfluenzaA__ACV67226

SEQ ID NO: 163367 - RNA, 1701 nt, Artificial Sequence
  derived and/or modified CDS sequence (opt4) from hemagglutinin__InfluenzaA__ACV67227
augaaggccauccugguggugcugcuguacaccuucgccaccgccaacgccgacacccugugcaucggcuaccacgccaacaacagcaccgacaccguggacaccgugcuggagaagaacgugaccgugacccacagcgugaaccugcuggaggacaagcacaacggcaagcugugcaagcugagaggcguggccccccugcaccugggcaagugcaacaucgccggcuggauccugggcaaccccgagugcgagagccugagcaccgccagcagcuggagcuacaucguggagaccagcagcagcgacaacggcaccugcuaccccggcgacuucaucgacuacgaggagcugagagagcagcugagcagcgugagcagcuucgagagauucgagaucuuccccaagaccagcagcuggcccaaccacgacagcaacaagggcgugaccgccgccugcccccacgccggcgccaagagcuucuacaagaaccugaucuggcuggugaagaagggcaacagcuaccccaagcugagcaagagcuacaucaacgacaagggcaaggaggugcuggugcuguggggcauccaccaccccagcaccagcgccgaccagcagagccuguaccagaacgccgacgccuacguguucgugggcaccagcagauacagcaagaaguucaagcccgagaucgccaucagacccaaggugagagaccaggagggcagaaugaacuacuacuggacccugguggagcccggcgacaagaucaccuucgaggccaccggcaaccugguggugcccagauacgccuucgccauggagagaaacgccggcagcggcaucaucaucagcaacacccccgugcacgacugcaacaccaccugccagacccccaagggcgccaucaacaccagccugcccuuccagaacauccaccccaucaccaucggcaagugccccaaguacgugaagagcaccaagcugagacuggccaccggccugagaaacgugcccagcauccagagcagaggccuguucggcgccaucgccggcuucaucgagggcggcuggaccggcaugguggacggcugguacggcuaccaccaccagaacgagcagggcagcggcuacgccgccgaccugaagagcacccagaacgccaucgacgagaucaccaacaaggugaacagcgugaucgagaagaugaacacccaguucaccgccgugggcaaggaguucaaccaccuggagaagagaaucgagaaccugaacaagaagguggacgacggcuuccuggacaucuggaccuacaacgccgagcugcuggugcugcuggagaacgagagaacccuggacuaccacgacagcaacgugaagaaccuguacgagaaggugagaagccagcugaagaacaacgccaaggagaucggcaacggcugcuucgaguucuaccacaagugcgacaacaccugcauggagagcgugaagaacggcaccuacgacuaccccaaguacagcgaggaggccaagcugaacagagaggagaucgacggcgugaagcuggagagcaccagaaucuaccagauccuggccaucuacagcaccguggccagcagccuggugcugguggugagccugggcgccaucagcuucuggaugugcagcaacggcagccugcagugcagaaucugcaucuga

SEQ ID NO: 163368 - RNA, 1701 nt, Artificial Sequence; identical to SEQ ID NO: 162971
  derived and/or modified CDS sequence (opt4) from hemagglutinin__InfluenzaA__ACV67228

SEQ ID NO: 163369 - RNA, 1701 nt, Artificial Sequence
  derived and/or modified CDS sequence (opt4) from hemagglutinin__InfluenzaA__ACV67229
augaaggccauccugguggugcugcuguacaccuucgccaccgccaacgccgacacccugugcaucggcuaccacgccaacaacagcaccgacaccguggacaccgugcuggagaagaacgugaccgugacccacagcgugaaccugcuggaggacaagcacaacggcaagcugugcaagcugagaggcguggccccccugcaccugggcaagugcaacaucgccggcuggauccugggcaaccccgagugcgagagccugagcaccgccagcagcuggagcuacaucguggagaccagcagcagcgacaacggcaccugcuaccccggcgacuucaucgacuacgaggagcugagagagcagcugagcagcgugagcagcuucgagagauucgagaucuuccccaagaccagcagcuggcccaaccacgacagcaacaagggcgugaccgccgccugcccccacgccggcgccaagagcuucuacaagaaccugaucuggcuggugaagaagggcaacagcuaccccaagcugagcaagagcuacaucaacgacaagggcaaggaggugcuggugcuguggggcauccaccaccccagcaccagcgccgaccagcagagccuguaccagaacgccgacgccuacguguucgugggcaccagcagauacagcaagaaguucaagcccgagaucgccaucagacccaaggugagagaccaggagggcagaaugaacuacuacuggacccugguggagcccggcgacaagaucaccuucgaggccaccggcaaccugguggugcccagauacgccuucgccauggagagaaacgccggcagcggcaucaucaucagcgacacccccgugcacgacugcaacaccaccugccagacccccaagggcgccaucaacaccagccugcccuuccagaacauccaccccaucaccaucggcaagugccccaaguacgugaagagcaccaagcugagacuggccaccggccugagaaacgugcccagcauccagagcagaggccuguucggcgccaucgccggcuucaucgagggcggcuggaccggcaugguggacggcugguacggcuaccaccaccagaacgagcagggcagcggcuacgccgccgaccugaagagcacccagaaccccaucgacgagaucaccaacaaggugaacagcgugaucgagaagaugaacacccaguucaccgccgugggcaaggaguucaaccaccuggagaagagaaucgagaaccugaacaagaagguggacgacggcuuccuggacaucuggaccuacaacgccgagcugcuggugcugcuggagaacgagagaacccuggacuaccacgacagcaacgugaagaaccuguacgagaaggugagaagccagcugaagaacaacgccaaggagaucggcaacggcugcuucgaguucuaccacaagugcgacaacaccugcauggagagcgugaagaacggcaccuacgacuaccccaaguacagcgaggaggccaagcugaacagagaggagaucgacggcgugaagcuggagagcaccagaaucuaccagauccuggccaucuacagcaccguggccagcagccuggugcugguggugagccugggcgccaucagcuucuggaugugcagcaacggcagccugcagugcagaaucugcaucuga

SEQ ID NO: 163370 - RNA, 1701 nt, Artificial Sequence; identical to SEQ ID NO: 162716
  derived and/or modified CDS sequence (opt4) from hemagglutinin__InfluenzaA__ACV67230

SEQ ID NO: 163371 - RNA, 1701 nt, Artificial Sequence; identical to SEQ ID NO: 162729
  derived and/or modified CDS sequence (opt4) from hemagglutinin__InfluenzaA__ACV67231

SEQ ID NO: 163372 - RNA, 1701 nt, Artificial Sequence; identical to SEQ ID NO: 162729
  derived and/or modified CDS sequence (opt4) from hemagglutinin__InfluenzaA__ACV67232

SEQ ID NO: 163373 - RNA, 1701 nt, Artificial Sequence; identical to SEQ ID NO: 162716
  derived and/or modified CDS sequence (opt4) from hemagglutinin__InfluenzaA__ACV67233

SEQ ID NO: 163374 - RNA, 1701 nt, Artificial Sequence; identical to SEQ ID NO: 162971
  derived and/or modified CDS sequence (opt4) from hemagglutinin__InfluenzaA__ACV67234

SEQ ID NO: 163375 - RNA, 1701 nt, Artificial Sequence
  derived and/or modified CDS sequence (opt4) from hemagglutinin__InfluenzaA__ACV67235
augaaggccauccugguggugcugcuguacaccuucgccaccgccaacgccgacacccugugcaucggcuaccacgccaacaacagcaccgacaccguggacaccgugcuggagaagaacgugaccgugacccacagcgugaaccugcuggaggacaagcacaacggcaagcugugcaagcugagaggcguggccccccugcaccugggcaagugcaacaucgccggcuggauccugggcaaccccgagugcgagagccugagcaccgccagcagcuggagcuacaucguggagaccagcagcagcgacaacggcaccugcuaccccggcgacuucaucgacuacgaggagcugagagagcagcugagcagcgugagcagcuucgagagauucgagaucuuccccaagaccagcagcuggcccaaccacgacagcaacaagggcgugaccgccgccugcccccacgccggcgccaagagcuucuacaagaaccugaucuggcuggugaagaagggcaacagcuaccccaagcugagcaagagcuacaucaacgacaagggcaaggaggugcuggugcuguggggcauccaccaccccagcaccagcgccgaccagcagagccuguaccagaacgccgacgccuacguguucgugggcagcagcagauacagcaagaaguucaagcccgagaucgccaucagacccaaggugagagaccaggagggcagaaugaacuacuacuggacccugguggagcccggcgacaagaucaccuucgaggccaccggcaaccugguggugcccagauacgccuucgccauggagagaaacgccggcagcggcaucaucaucagcgacacccccgugcacgacugcaacaccaccugccagacccccaagggcgccaucaacaccagccugcccuuccagaacauccaccccaucaccaucggcaagugccccaaguacgugaagagcaccaagcugagacuggccaccggccugagaaacgugcccagcauccagagcagaggccuguucggcgccaucgccggcuucaucgagggcggcuggaccggcaugguggacggcugguacggcuaccaccaccagaacgagcagggcagcggcuacgccgccgaccugaagagcacccagaacgccaucgacgagaucaccaacaaggugaacagcgugaucgagaagaugaacacccaguucaccgccgugggcaaggaguucaaccaccuggagaagagaaucgagaaccugaacaagaagguggacgacggcuuccuggacaucuggaccuacaacgccgagcugcuggugcugcuggagaacgagagaacccuggacuaccacgacagcaacgugaagaaccuguacgagaaggugagaagccagcugaagaacaacgccaacgagaucggcaacggcugcuucgaguucuaccacaagugcgacaacaccugcauggagagcgugaagaacggcaccuacgacuaccccaaguacagcgaggaggccaagcugaacagagaggagaucgacggcgugaagcuggagagcaccagaaucuaccagauccuggccaucuacagcaccguggccagcagccuggugcugguggugagccugggcgccaucagcuucuggaugugcagcaacggcagccugcagugcagaaucugcaucuga

SEQ ID NO: 163376 - RNA, 1701 nt, Artificial Sequence; identical to SEQ ID NO: 162973
  derived and/or modified CDS sequence (opt4) from hemagglutinin__InfluenzaA__ACV67236

SEQ ID NO: 163377 - RNA, 1701 nt, Artificial Sequence; identical to SEQ ID NO: 162716
  derived and/or modified CDS sequence (opt4) from hemagglutinin__InfluenzaA__ACV67238

SEQ ID NO: 163378 - RNA, 1701 nt, Artificial Sequence
  derived and/or modified CDS sequence (opt4) from hemagglutinin__InfluenzaA__ACV67239
augaaggccauccugguggugcugcuguacaccuucaccaccgccaacgccgacacccugugcaucggcuaccacgccaacaacagcaccgacaccguggacaccgugcuggagaagaacgugaccgugacccacagcgugaaccugcuggaggacaagcacaacggcaagcugugcaagcugagaggcguggccccccugcaccugggcaagugcaacaucgccggcuggauccugggcaaccccgagugcgagagccugagcaccgccagcagcuggagcuacaucguggagaccagcagcagcgacaacggcaccugcuaccccggcgacuucaucgacuacgaggagcugagagagcagcugagcagcgugagcagcuucgagagauucgagaucuuccccaagaccagcagcuggcccaaccacgacagcaacaagggcgugaccgccgccugcccccacgccggcgccaagagcuucuacaagaaccugaucuggcuggugaagaagggcaacagcuaccccaagcugagcaagagcuacaucaacgacaagggcaaggaggugcuggugcuguggggcauccaccaccccagcaccagcgccgaccagcagagccuguaccagaacgccgacgccuacguguucgugggcagcagcagauacagcaagaaguucaagcccgagaucgccaucagacccaaggugagagaccaggagggcagaaugaacuacuacuggacccugguggagcccggcgacaagaucaccuucgaggccaccggcaaccugguggugcccagauacgccuucgccauggagagaaacgccggcagcggcaucaucaucagcgacacccccgugcacgacugcaacaccaccugccagacccccaagggcgccaucaacaccagccugcccuuccagaacauccaccccaucaccaucggcaagugccccaaguacgugaagagcaccaagcugagacuggccaccggccugagaaacgugcccagcauccagagcagaggccuguucggcgccaucgccggcuucaucgagggcggcuggaccggcaugguggacggcugguacggcuaccaccaccagaacgagcagggcagcggcuacgccgccgaccugaagagcacccagaacgccaucgacgagaucaccaacaaggugaacagcgugaucgagaagaugaacacccaguucaccgccgugggcaaggaguucaaccaccuggagaagagaaucgagaaccugaacaagaagguggacgacggcuuccuggacaucuggaccuacaacgccgagcugcuggugcugcuggagaacgagagaacccuggacuaccacgacagcaacgugaagaaccuguacgagaaggugagaagccagcugaagaacaacgccaaggagaucggcaacggcugcuucgaguucuaccacaagugcaacaacaccugcauggagagcgugaagaacggcaccuacgacuaccccaaguacagcgaggaggccaagcugaacagagaggagaucgacggcgugaagcuggagagcaccagaaucuaccagauccuggccaucuacagcaccguggccagcagccuggugcugguggugagccugggcgccaucagcuucuggaugugcagcaacggcagccugcagugcagaaucugcaucuga

SEQ ID NO: 163379 - RNA, 1701 nt, Artificial Sequence; identical to SEQ ID NO: 162973
  derived and/or modified CDS sequence (opt4) from hemagglutinin__InfluenzaA__ACV67240

SEQ ID NO: 163380 - RNA, 1701 nt, Artificial Sequence
  derived and/or modified CDS sequence (opt4) from hemagglutinin__InfluenzaA__ACV67241
augaaggccauccugguggugcugcuguacaccuucgccaccgccaacgccgacacccugugcaucggcuaccacgccaacaacagcaccgacaccguggacaccgugcuggagaagaacgugaccgugacccacagcgugaaccugcuggaggacaagcacaacggcaagcugugcaagcugagaggcguggccccccugcaccugggcaagugcaacaucgccggcuggauccugggcaaccccgagugcgagagccugagcaccgccagcagcuggagcuacaucguggagaccagcagcagcgacaacggcaccugcuaccccggcgacuucaucgacuacgaggagcugagagagcagcugagcagcgugagcagcuucgagagauucgagaucuuccccaagaccagcagcuggcccaaccacgacagcaacaagggcgugaccgccgccugcccccacgccggcgccaagagcuucuacaagaaccugaucuggcuggugaagaacggcaacagcuaccccaagcugagcaagagcuacaucaacgacaagggcaaggaggugcuggugcuguggggcauccaccaccccagcaccagcgccgaccagcagagccuguaccagaacgccgacgccuacguguucgugggcaccagcagauacagcaagaaguucaagcccgagaucgccaucagacccaaggugagagaccaggagggcagaaugaacuacuacuggacccugguggagcccggcgacaagaucaccuucgaggccaccggcaaccugguggugcccagauacgccuucgccauggagagaaacgccggcagcggcaucaucaucagcgacacccccgugcacgacugcaacaccaccugccagacccccaagggcgccaucaacaccagccugcccuuccagaacauccaccccaucaccaucggcaagugccccaaguacgugaagagcaccaagcugagacuggccaccggccugagaaacgugcccagcauccagagcagaggccuguucggcgccaucgccggcuucaucgagggcggcuggaccggcaugguggacggcugguacggcuaccaccaccagaacgagcagggcagcggcuacgccgccgaccugaagagcacccagaacgccaucgacgagaucaccaacaaggugaacagcgugaucgagaagaugaacacccaguucaccgccgugggcaaggaguucaaccaccuggagaagagaaucgagaaccugaacaagaagguggacgacggcuuccuggacaucuggaccuacaacgccgagcugcuggugcugcuggagaacgagagaacccuggacuaccacgacagcaacgugaagaaccuguacgagaaggugagaagccagcugaagaacaacgccaaggagaucggcaacggcugcuucgaguucuaccacaagugcgacaacaccugcauggagagcgugaagaacggcaccuacgacuaccccaaguacagcgaggaggccaagcugaacagagaggagaucgacggcgugaagcuggagagcaccagaaucuaccagauccuggccaucuacagcaccguggccagcagccuggugcugguggugagccugggcgccaucagcuucuggaugugcagcaacggcagccugcagugcagaaucugcaucuga

SEQ ID NO: 163381 - RNA, 1701 nt, Artificial Sequence; identical to SEQ ID NO: 162971
  derived and/or modified CDS sequence (opt4) from hemagglutinin__InfluenzaA__ACV67242

SEQ ID NO: 163382 - RNA, 1701 nt, Artificial Sequence; identical to SEQ ID NO: 162909
  derived and/or modified CDS sequence (opt4) from hemagglutinin__InfluenzaA__ACV67244

SEQ ID NO: 163383 - RNA, 1701 nt, Artificial Sequence; identical to SEQ ID NO: 162822
  derived and/or modified CDS sequence (opt4) from hemagglutinin__InfluenzaA__ACV67246

SEQ ID NO: 163384 - RNA, 1701 nt, Artificial Sequence; identical to SEQ ID NO: 163353
  derived and/or modified CDS sequence (opt4) from hemagglutinin__InfluenzaA__ACV67247

SEQ ID NO: 163385 - RNA, 1701 nt, Artificial Sequence; identical to SEQ ID NO: 162716
  derived and/or modified CDS sequence (opt4) from hemagglutinin__InfluenzaA__ACV70073

SEQ ID NO: 163386 - RNA, 1701 nt, Artificial Sequence; identical to SEQ ID NO: 162716
  derived and/or modified CDS sequence (opt4) from hemagglutinin__InfluenzaA__ACV70093

SEQ ID NO: 163387 - RNA, 1701 nt, Artificial Sequence; identical to SEQ ID NO: 162716
  derived and/or modified CDS sequence (opt4) from hemagglutinin__InfluenzaA__ACV70103

SEQ ID NO: 163388 - RNA, 1701 nt, Artificial Sequence; identical to SEQ ID NO: 162716
  derived and/or modified CDS sequence (opt4) from hemagglutinin__InfluenzaA__ACV70113

SEQ ID NO: 163389 - RNA, 1701 nt, Artificial Sequence; identical to SEQ ID NO: 162716
  derived and/or modified CDS sequence (opt4) from hemagglutinin__InfluenzaA__ACV70123

SEQ ID NO: 163390 - RNA, 1701 nt, Artificial Sequence; identical to SEQ ID NO: 162716
  derived and/or modified CDS sequence (opt4) from hemagglutinin__InfluenzaA__ACV70154

SEQ ID NO: 163391 - RNA, 1701 nt, Artificial Sequence
  derived and/or modified CDS sequence (opt4) from hemagglutinin__InfluenzaA__ACV70164
augaaggccauccugguggugcugcuguacaccuucaccaccgccaacgccgacacccugugcaucggcuaccacgccaacaacagcaccgacaccguggacaccgugcuggagaagaacgugaccgugacccacagcgugaaccugcuggaggacaagcacaacggcaagcugugcaagcugagaggcguggccccccugcaccugggcaagugcaacaucgccggcuggauccugggcaaccccgagugcgagagccugagcaccgccagcagcuggagcuacaucguggagaccagcagcagcgacaacggcaccugcuaccccggcgacuucaucgacuacgaggagcugagagagcagcugagcagcgugagcagcuucgagagauucgagaucuuccccaagaccagcagcuggcccaaccacgacagcaacaagggcgugaccgccgccugcccccacgccggcgccaagagcuucuacaagaaccugaucuggcuggugaagaagggcaacagcuaccccaagcugagcaagagcuacaucaacgacaagggcaaggaggugcuggugcuguggggcauccaccaccccagcaccagcgccgaccagcagagccuguaccagaacgccgacgccuacguguucgugggcagcagcagauacagcaagaaguucaagcccgagaucgccaucagacccaaggugagagaccaggagggcagaaugaacuacuacuggacccugguggagcccggcgacaagaucaccuucgaggccaccggcaaccugguggugcccagauacgccuucgccauggagagaaacgccggcagcggcaucaucaucagcgacacccccgugcacgacugcaacaccaccugccagacccugaagggcgccaucaacaccagccugcccuuccagaacauccaccccaucaccaucggcaagugccccaaguacgugaagagcaccaagcugagacuggccaccggccugagaaacgugcccagcauccagagcagaggccuguucggcgccaucgccggcuucaucgagggcggcuggaccggcaugguggacggcugguacggcuaccaccaccagaacgagcagggcagcggcuacgccgccgaccugaagagcacccagaacgccaucgacgagaucaccaacaaggugaacagcgugaucgagaagaugaacacccaguucaccgccgugggcaaggaguucaaccaccuggagaagagaaucgagaaccugaacaagaagguggacgacggcuuccuggacaucuggaccuacaacgccgagcugcuggugcugcuggagaacgagagaacccuggacuaccacgacagcaacgugaagaaccuguacgagaaggugagaagccagcugaagaacaacgccaaggagaucggcaacggcugcuucgaguucuaccacaagugcgacaacaccugcauggagagcgugaagaacggcaccuacgacuaccccaaguacagcgaggaggccaagcugaacagagaggagaucgacggcgugaagcuggagagcaccagaaucuaccagauccuggccaucuacagcaccguggccagcagccuggugcugguggugagccugggcgccaucagcuucuggaugugcagcaacggcagccugcagugcagaaucugcaucuga

SEQ ID NO: 163392 - RNA, 1701 nt, Artificial Sequence; identical to SEQ ID NO: 162716
  derived and/or modified CDS sequence (opt4) from hemagglutinin__InfluenzaA__ACV70174

SEQ ID NO: 163393 - RNA, 1701 nt, Artificial Sequence; identical to SEQ ID NO: 162716
  derived and/or modified CDS sequence (opt4) from hemagglutinin__InfluenzaA__ACV70184

SEQ ID NO: 163394 - RNA, 1701 nt, Artificial Sequence; identical to SEQ ID NO: 162716
  derived and/or modified CDS sequence (opt4) from hemagglutinin__InfluenzaA__ACV70194

SEQ ID NO: 163395 - RNA, 1701 nt, Artificial Sequence; identical to SEQ ID NO: 162716
  derived and/or modified CDS sequence (opt4) from hemagglutinin__InfluenzaA__ACV70204

SEQ ID NO: 163396 - RNA, 1701 nt, Artificial Sequence; identical to SEQ ID NO: 162716
  derived and/or modified CDS sequence (opt4) from hemagglutinin__InfluenzaA__ACV70214

SEQ ID NO: 163397 - RNA, 1701 nt, Artificial Sequence; identical to SEQ ID NO: 162716
  derived and/or modified CDS sequence (opt4) from hemagglutinin__InfluenzaA__ACV70224

SEQ ID NO: 163398 - RNA, 1701 nt, Artificial Sequence; identical to SEQ ID NO: 162716
  derived and/or modified CDS sequence (opt4) from hemagglutinin__InfluenzaA__ACV70234

SEQ ID NO: 163399 - RNA, 1701 nt, Artificial Sequence; identical to SEQ ID NO: 162716
  derived and/or modified CDS sequence (opt4) from hemagglutinin__InfluenzaA__ACV70254

SEQ ID NO: 163400 - RNA, 1701 nt, Artificial Sequence; identical to SEQ ID NO: 162716
  derived and/or modified CDS sequence (opt4) from hemagglutinin__InfluenzaA__ACV70264

SEQ ID NO: 163401 - RNA, 1701 nt, Artificial Sequence; identical to SEQ ID NO: 162716
  derived and/or modified CDS sequence (opt4) from hemagglutinin__InfluenzaA__ACV70274

SEQ ID NO: 163402 - RNA, 1701 nt, Artificial Sequence; identical to SEQ ID NO: 162716
  derived and/or modified CDS sequence (opt4) from hemagglutinin__InfluenzaA__ACV70284

SEQ ID NO: 163403 - RNA, 1701 nt, Artificial Sequence; identical to SEQ ID NO: 162716
  derived and/or modified CDS sequence (opt4) from hemagglutinin__InfluenzaA__ACV70294

SEQ ID NO: 163404 - RNA, 1701 nt, Artificial Sequence; identical to SEQ ID NO: 162716
  derived and/or modified CDS sequence (opt4) from hemagglutinin__InfluenzaA__ACV70304

SEQ ID NO: 163405 - RNA, 1701 nt, Artificial Sequence; identical to SEQ ID NO: 163391
  derived and/or modified CDS sequence (opt4) from hemagglutinin__InfluenzaA__ACV70314

SEQ ID NO: 163406 - RNA, 1701 nt, Artificial Sequence
  derived and/or modified CDS sequence (opt4) from hemagglutinin__InfluenzaA__ACV70324
augaaggccauccugguggugcugcuguacaccuucgccaccgccaacgccgacacccugugcaucggcuaccacgccaacaacagcaccgacaccguggacaccgugcuggagaagaacgugaccgugacccacagcgugaaccugcuggaggacaagcacaacggcaagcugugcaagcugagaggcguggccccccugcaccugggcaagugcaacaucgccggcuggauccugggcaaccccgagugcgagagccuguucaccgccagcagcuggagcuacaucguggagaccagcagcagcgacaacggcaccugcuaccccggcgacuucaucgacuacgaggagcugagagagcagcugagcagcgugagcagcuucgagagauucgagaucuuccccaagaccagcagcuggcccaaccacgacagcaacaagggcgugaccgccgccugcccccacgccggcgccaagagcuucuacaagaaccugaucuggcuggugaagaagggcaacagcuaccccaagcugagcaagagcuacaucaacgacaagggcaaggaggugcuggugcuguggggcauccaccaccccagcaccagcgccgaccagcagagccuguaccagaacgccgacgccuacguguucgugggcagcagcagauacagcaagaaguucaagcccgagaucgccaucagacccaaggugagagaccaggagggcagaaugaacuacuacuggacccugguggagcccggcgacaagaucaccuucgaggccaccggcaaccugguggugcccagauacgccuucgccauggagagaaacgccggcagcggcaucaucaucagcgacacccccgugcacgacugcaacaccaccugccagacccccaagggcgccaucaacaccagccugcccuuccagaacauccaccccaucaccaucggcaagugccccaaguacgugaagagcaccaagcugagacuggccaccggccugagaaacgugcccagcauccagagcagaggccuguucggcgccaucgccggcuucaucgagggcggcuggaccggcaugguggacggcugguacggcuaccaccaccagaacgagcagggcagcggcuacgccgccgaccugaagagcacccagaacgccaucgacgagaucaccaacaaggugaacagcgugaucgagaagaugaacacccaguucaccgccgugggcaaggaguucaaccaccuggagaagagaaucgagaaccugaacaagaagguggacgacggcuuccuggacaucuggaccuacaacgccgagcugcuggugcugcuggagaacgagagaacccuggacuaccacgacagcaacgugaagaaccuguacgagaaggugagaagccagcugaagaacaacgccaaggagaucggcaacggcugcuucgaguucuaccacaagugcgacaacaccugcauggagagcgugaagaacggcaccuacgacuaccccaaguacagcgaggaggccaagcugaacagagaggagaucgacggcgugaagcuggagagcaccagaaucuaccagauccuggccaucuacagcaccguggccagcagccuggugcugguggugagccugggcgccaucagcuucuggaugugcagcaacggcagccugcagugcagaaucugcaucuga

SEQ ID NO: 163407 - RNA, 1701 nt, Artificial Sequence; identical to SEQ ID NO: 162716
  derived and/or modified CDS sequence (opt4) from hemagglutinin__InfluenzaA__ACV70334

SEQ ID NO: 163408 - RNA, 1701 nt, Artificial Sequence; identical to SEQ ID NO: 162716
  derived and/or modified CDS sequence (opt4) from hemagglutinin__InfluenzaA__ACV70344

SEQ ID NO: 163409 - RNA, 1701 nt, Artificial Sequence; identical to SEQ ID NO: 162716
  derived and/or modified CDS sequence (opt4) from hemagglutinin__InfluenzaA__ACV70354

SEQ ID NO: 163410 - RNA, 1701 nt, Artificial Sequence; identical to SEQ ID NO: 162716
  derived and/or modified CDS sequence (opt4) from hemagglutinin__InfluenzaA__ACV70364

SEQ ID NO: 163411 - RNA, 1701 nt, Artificial Sequence; identical to SEQ ID NO: 162716
  derived and/or modified CDS sequence (opt4) from hemagglutinin__InfluenzaA__ACV70374

SEQ ID NO: 163412 - RNA, 1701 nt, Artificial Sequence; identical to SEQ ID NO: 162716
  derived and/or modified CDS sequence (opt4) from hemagglutinin__InfluenzaA__ACV70384

SEQ ID NO: 163413 - RNA, 1701 nt, Artificial Sequence; identical to SEQ ID NO: 162716
  derived and/or modified CDS sequence (opt4) from hemagglutinin__InfluenzaA__ACV70394

SEQ ID NO: 163414 - RNA, 1701 nt, Artificial Sequence; identical to SEQ ID NO: 162716
  derived and/or modified CDS sequence (opt4) from hemagglutinin__InfluenzaA__ACV70404

SEQ ID NO: 163415 - RNA, 1701 nt, Artificial Sequence; identical to SEQ ID NO: 163391
  derived and/or modified CDS sequence (opt4) from hemagglutinin__InfluenzaA__ACV70414

SEQ ID NO: 163416 - RNA, 1701 nt, Artificial Sequence; identical to SEQ ID NO: 162716
  derived and/or modified CDS sequence (opt4) from hemagglutinin__InfluenzaA__ACV70424

SEQ ID NO: 163417 - RNA, 1701 nt, Artificial Sequence; identical to SEQ ID NO: 162716
  derived and/or modified CDS sequence (opt4) from hemagglutinin__InfluenzaA__ACV70434

SEQ ID NO: 163418 - RNA, 1701 nt, Artificial Sequence; identical to SEQ ID NO: 162716
  derived and/or modified CDS sequence (opt4) from hemagglutinin__InfluenzaA__ACV70444

SEQ ID NO: 163419 - RNA, 1701 nt, Artificial Sequence; identical to SEQ ID NO: 162716
  derived and/or modified CDS sequence (opt4) from hemagglutinin__InfluenzaA__ACV70454

SEQ ID NO: 163420 - RNA, 1701 nt, Artificial Sequence; identical to SEQ ID NO: 162716
  derived and/or modified CDS sequence (opt4) from hemagglutinin__InfluenzaA__ACV70464

SEQ ID NO: 163421 - RNA, 1701 nt, Artificial Sequence; identical to SEQ ID NO: 162716
  derived and/or modified CDS sequence (opt4) from hemagglutinin__InfluenzaA__ACV70474

SEQ ID NO: 163422 - RNA, 1701 nt, Artificial Sequence; identical to SEQ ID NO: 162716
  derived and/or modified CDS sequence (opt4) from hemagglutinin__InfluenzaA__ACV70484

SEQ ID NO: 163423 - RNA, 1701 nt, Artificial Sequence; identical to SEQ ID NO: 162716
  derived and/or modified CDS sequence (opt4) from hemagglutinin__InfluenzaA__ACV70494

SEQ ID NO: 163424 - RNA, 1701 nt, Artificial Sequence; identical to SEQ ID NO: 162716
  derived and/or modified CDS sequence (opt4) from hemagglutinin__InfluenzaA__ACV70504

SEQ ID NO: 163425 - RNA, 1701 nt, Artificial Sequence; identical to SEQ ID NO: 162716
  derived and/or modified CDS sequence (opt4) from hemagglutinin__InfluenzaA__ACV70514

SEQ ID NO: 163426 - RNA, 1701 nt, Artificial Sequence; identical to SEQ ID NO: 162716
  derived and/or modified CDS sequence (opt4) from hemagglutinin__InfluenzaA__ACV70524

SEQ ID NO: 163427 - RNA, 1701 nt, Artificial Sequence; identical to SEQ ID NO: 162909
  derived and/or modified CDS sequence (opt4) from hemagglutinin__InfluenzaA__ACV70534

SEQ ID NO: 163428 - RNA, 1701 nt, Artificial Sequence; identical to SEQ ID NO: 162716
  derived and/or modified CDS sequence (opt4) from hemagglutinin__InfluenzaA__ACV70544

SEQ ID NO: 163429 - RNA, 1701 nt, Artificial Sequence; identical to SEQ ID NO: 162716
  derived and/or modified CDS sequence (opt4) from hemagglutinin__InfluenzaA__ACV70564

SEQ ID NO: 163430 - RNA, 1701 nt, Artificial Sequence; identical to SEQ ID NO: 162716
  derived and/or modified CDS sequence (opt4) from hemagglutinin__InfluenzaA__ACV70584

SEQ ID NO: 163431 - RNA, 1701 nt, Artificial Sequence; identical to SEQ ID NO: 163391
  derived and/or modified CDS sequence (opt4) from hemagglutinin__InfluenzaA__ACV70594

SEQ ID NO: 163432 - RNA, 1701 nt, Artificial Sequence; identical to SEQ ID NO: 162716
  derived and/or modified CDS sequence (opt4) from hemagglutinin__InfluenzaA__ACV70604

SEQ ID NO: 163433 - RNA, 1701 nt, Artificial Sequence; identical to SEQ ID NO: 162716
  derived and/or modified CDS sequence (opt4) from hemagglutinin__InfluenzaA__ACV70614

SEQ ID NO: 163434 - RNA, 1701 nt, Artificial Sequence; identical to SEQ ID NO: 162716
  derived and/or modified CDS sequence (opt4) from hemagglutinin__InfluenzaA__ACV70624

SEQ ID NO: 163435 - RNA, 1701 nt, Artificial Sequence; identical to SEQ ID NO: 162716
  derived and/or modified CDS sequence (opt4) from hemagglutinin__InfluenzaA__ACV70634

SEQ ID NO: 163436 - RNA, 1701 nt, Artificial Sequence; identical to SEQ ID NO: 162716
  derived and/or modified CDS sequence (opt4) from hemagglutinin__InfluenzaA__ACV70644

SEQ ID NO: 163437 - RNA, 1701 nt, Artificial Sequence; identical to SEQ ID NO: 162716
  derived and/or modified CDS sequence (opt4) from hemagglutinin__InfluenzaA__ACV70654

SEQ ID NO: 163438 - RNA, 1701 nt, Artificial Sequence; identical to SEQ ID NO: 162716
  derived and/or modified CDS sequence (opt4) from hemagglutinin__InfluenzaA__ACV70664

SEQ ID NO: 163439 - RNA, 1701 nt, Artificial Sequence; identical to SEQ ID NO: 162716
  derived and/or modified CDS sequence (opt4) from hemagglutinin__InfluenzaA__ACV70674

SEQ ID NO: 163440 - RNA, 1701 nt, Artificial Sequence; identical to SEQ ID NO: 162716
  derived and/or modified CDS sequence (opt4) from hemagglutinin__InfluenzaA__ACV70684

SEQ ID NO: 163441 - RNA, 1701 nt, Artificial Sequence; identical to SEQ ID NO: 162716
  derived and/or modified CDS sequence (opt4) from hemagglutinin__InfluenzaA__ACV70694

SEQ ID NO: 163442 - RNA, 1701 nt, Artificial Sequence; identical to SEQ ID NO: 162716
  derived and/or modified CDS sequence (opt4) from hemagglutinin__InfluenzaA__ACV70704

SEQ ID NO: 163443 - RNA, 1701 nt, Artificial Sequence; identical to SEQ ID NO: 162716
  derived and/or modified CDS sequence (opt4) from hemagglutinin__InfluenzaA__ACV70714

SEQ ID NO: 163444 - RNA, 1701 nt, Artificial Sequence; identical to SEQ ID NO: 162716
  derived and/or modified CDS sequence (opt4) from hemagglutinin__InfluenzaA__ACV70724

SEQ ID NO: 163445 - RNA, 1701 nt, Artificial Sequence; identical to SEQ ID NO: 163353
  derived and/or modified CDS sequence (opt4) from hemagglutinin__InfluenzaA__ACV70734

SEQ ID NO: 163446 - RNA, 1701 nt, Artificial Sequence; identical to SEQ ID NO: 162716
  derived and/or modified CDS sequence (opt4) from hemagglutinin__InfluenzaA__ACV70744

SEQ ID NO: 163447 - RNA, 1701 nt, Artificial Sequence; identical to SEQ ID NO: 162716
  derived and/or modified CDS sequence (opt4) from hemagglutinin__InfluenzaA__ACV70754

SEQ ID NO: 163448 - RNA, 1701 nt, Artificial Sequence; identical to SEQ ID NO: 162716
  derived and/or modified CDS sequence (opt4) from hemagglutinin__InfluenzaA__ACV70764

SEQ ID NO: 163449 - RNA, 1701 nt, Artificial Sequence; identical to SEQ ID NO: 162716
  derived and/or modified CDS sequence (opt4) from hemagglutinin__InfluenzaA__ACV70784

SEQ ID NO: 163450 - RNA, 1701 nt, Artificial Sequence
  derived and/or modified CDS sequence (opt4) from hemagglutinin__InfluenzaA__ACV70794
augaaggccauccugguggugcugcuguacaccuucgccaccgccaacgccgacacccugugcaucggcuaccacgccaacaacagcaccgacaccguggacaccgugcuggagaagaacgugaccgugacccacagcgugaaccugcuggaggacaagcacaacggcaagcugugcaagcugagaggcguggccccccugcaccugggcaagugcaacaucgccggcuggauccugggcaaccccgagugcgagagccugagcaccgccagcagcuggagcuacaucguggagaccagcagcagcgacaacggcaccugcuaccccggcgacuucaucgacuacgaggagcugagagagcagcugagcagcgugagcagcuucgagagauucgagaucuuccccaagaccagcagcuggcccaaccacgacagcaacaagggcgccaccgccgccugcccccacgccggcgccaagggcuucuacaagaaccugaucuggcuggugaagaagggcaacagcuaccccaagcugagcaagagcuacaucaacgacaagggcaaggaggugcuggugcuguggggcauccaccaccccagcaccagcgccgaccagcagagccuguaccagaacgccgacgccuacguguucgugggcagcagcagauacagcaagaaguucaagcccgagaucgccaucagacccaaggugagagaccaggagggcagaaugaacuacuacuggacccugguggagcccggcgacaagaucaccuucgaggccaccggcaaccugguggugcccagauacgccuucgccauggagagaaacgccggcagcggcaucaucaucagcgacacccccgugcacgacugcaacaccaccugccagacccccaagggcgccaucaacaccagccugcccuuccagaacauccaccccaucaccaucggcaagugccccaaguacgugaagagcaccaagcugagacuggccaccggccugagaaacgugcccagcauccagagcagaggccuguucggcgccaucgccggcuucaucgagggcggcuggaccggcaugguggacggcugguacggcuaccaccaccagaacgagcagggcagcggcuacgccgccgaccugaagagcacccagaacgccaucgacgagaucaccaacaaggugaacagcgugaucgagaagaugaacacccaguucaccgccgugggcaaggaguucaaccaccuggagaagagaaucgagaaccugaacaagaagguggacgacggcuuccuggacaucuggaccuacaacgccgagcugcuggugcugcuggagaacgagagaacccuggacuaccacgacagcaacgugaagaaccuguacgagaaggugagaagccagcugaagaacaacgccaaggagaucggcaacggcugcuucgaguucuaccacaagugcgacaacaccugcauggagagcgugaagaacggcaccuacgacuaccccaaguacagcgaggaggccaagcugaacagagaggagaucgacggcgugaagcuggagagcaccagaaucuaccagauccuggccaucuacagcaccguggccagcagccuggugcugguggugagccugggcgccaucagcuucuggaugugcagcaacggcagccugcagugcagaaucugcaucuga

SEQ ID NO: 163451 - RNA, 1701 nt, Artificial Sequence; identical to SEQ ID NO: 162716
  derived and/or modified CDS sequence (opt4) from hemagglutinin__InfluenzaA__ACV70804

SEQ ID NO: 163452 - RNA, 1701 nt, Artificial Sequence; identical to SEQ ID NO: 163391
  derived and/or modified CDS sequence (opt4) from hemagglutinin__InfluenzaA__ACV70824

SEQ ID NO: 163453 - RNA, 1701 nt, Artificial Sequence; identical to SEQ ID NO: 162716
  derived and/or modified CDS sequence (opt4) from hemagglutinin__InfluenzaA__ACV70834

SEQ ID NO: 163454 - RNA, 1701 nt, Artificial Sequence
  derived and/or modified CDS sequence (opt4) from hemagglutinin__InfluenzaA__ACV70844
augaaggccauccugguggugcugcuguacaccuucgccaccgccaacgccgacacccugugcaucggcuaccacgccaacaacagcaccgacaccguggacaccgugcuggagaagaacgugaccgugacccacagcgugaaccugcuggaggacaagcacaacggcaagcugugcaagcugagaggcguggccccccugcaccugggcaagugcaacaucgccggcuggauccugggcaaccccgagugcgagagccugagcaccgccagcagcuggagcuacaucguggagaccagcagcagcgacaacggcaccugcuaccccggcgacuucaucgacuacgaggagcugagagagcagcugagcagcgugagcagcuucgagagauucgagaucuuccccaagaccagcagcuggcccaaccacgacagcaacaagggcgugaccgccgccugcccccacgccggcgccaagggcuucuacaagaaccugaucuggcuggugaagaagggcaacagcuaccccaagcugagcaagagcuacaucaacgacaagggcaaggaggugcuggugcuguggggcauccaccaccccagcaccagcgccgaccagcagagccuguaccagaacgccgacgccuacguguucgugggcagcagcagauacagcaagaaguucaagcccgagaucgccaucagacccaaggugagagaccaggagggcagaaugaacuacuacuggacccugguggagcccggcgacaagaucaccuucgaggccaccggcaaccugcuggugcccagauacgccuucgccauggagagaaacgccggcagcggcaucaucaucagcgacacccccgugcacgacugcaacaccaccugccagacccccaagggcgccaucaacaccagccugcccuuccagaacauccaccccaucaccaucggcaagugccccaaguacgugaagagcaccaagcugagacuggccaccggccugagaaacgugcccagcauccagagcagaggccuguucggcgccaucgccggcuucaucgagggcggcuggaccggcaugguggacggcugguacggcuaccaccaccagaacgagcagggcagcggcuacgccgccgaccugaagagcacccagaacgccaucgacgagaucaccaacaaggugaacagcgugaucgagaagaugaacacccaguucaccgccgugggcaaggaguucaaccaccuggagaagagaaucgagaaccugaacaagaagguggacgacggcuuccuggacaucuggaccuacaacgccgagcugcuggugcugcuggagaacgagagaacccuggacuaccacgacagcaacgugaagaaccuguacgagaaggugagaagccagcugaagaacaacgccaaggagaucggcaacggcugcuucgaguucuaccacaagugcgacaacaccugcauggagagcgugaagaacggcaccuacgacuaccccaaguacagcgaggaggccaagcugaacagagaggagaucgacggcgugaagcuggagagcaccagaaucuaccagauccuggccaucuacagcaccguggccagcagccuggugcugguggugagccugggcgccaucagcuucuggaugugcagcaacggcagccugcagugcagaaucugcaucuga

SEQ ID NO: 163455 - RNA, 1701 nt, Artificial Sequence; identical to SEQ ID NO: 162716
  derived and/or modified CDS sequence (opt4) from hemagglutinin__InfluenzaA__ACV70854

SEQ ID NO: 163456 - RNA, 1701 nt, Artificial Sequence
  derived and/or modified CDS sequence (opt4) from hemagglutinin__InfluenzaA__ACV70864
augaaggccauccugguggugcugcuguacaccuucgccaccgccaacgccgacacccugugcaucggcuaccacgccaacaacagcaccgacaccguggacaccgugcuggagaagaacgugaccgugacccacagcgugaaccugcuggaggacaagcacaacggcaagcugugcaagcugagaggcguggccccccugcaccugggcaagugcaacaucgccggcuggauccugggcaaccccgagugcgagagccugagcaccgccagcagcuggagcuacaucguggagaccagcagcagcgacaacggcaccugcuaccccggcgacuucaucgacuacgaggagcugagagagcagcugagcagcgugagcagcuucgagagauucgagaucuuccccaagaccagcagcuggcccaaccacgacagcaacaagggcgugaccgccgccugcccccacgccggcgccaagagcuucuacaagaaccugaucuggcuggugaagaagggcaccagcuaccccaagcugagcaagagcuacaucaacgacaagggcaaggaggugcuggugcuguggggcauccaccaccccagcaccagcgccgaccagcagagccuguaccagaacgccgacgccuacguguucgugggcagcagcagauacagcaagaaguucaagcccgagaucgccaucagacccaaggugagagaccaggagggcagaaugaacuacuacuggacccugguggagcccggcgacaagaucaccuucgaggccaccggcaaccugguggugcccagauacgccuucgccauggagagaaacgccggcagcggcaucaucaucagcgacacccccgugcacgacugcaacaccaccugccagacccccaagggcgccaucaacaccagccugcccuuccagaacauccaccccaucaccaucggcaagugccccaaguacgugaagagcaccaagcugagacuggccaccggccugagaaacgugcccagcauccagagcagaggccuguucggcgccaucgccggcuucaucgagggcggcuggaccggcaugguggacggcugguacggcuaccaccaccagaacgagcagggcagcggcuacgccgccgaccugaagagcacccagaacgccaucgacgagaucaccaacaaggugaacagcgugaucgagaagaugaacacccaguucaccgccgugggcaaggaguucaaccaccuggagaagagaaucgagaaccugaacaagaagguggacgacggcuuccuggacaucuggaccuacaacgccgagcugcuggugcugcuggagaacgagagaacccuggacuaccacgacagcaacgugaagaaccuguacgagaaggugagaagccagcugaagaacaacgccaaggagaucggcaacggcugcuucgaguucuaccacaagugcgacaacaccugcauggagagcgugaagaacggcaccuacgacuaccccaaguacagcgaggaggccaagcugaacagagaggagaucgacggcgugaagcuggagagcaccagaaucuaccagauccuggccaucuacagcaccguggccagcagccuggugcugguggugagccugggcgccaucagcuucuggaugugcagcaacggcagccugcagugcagaaucugcaucuga

SEQ ID NO: 163457 - RNA, 1701 nt, Artificial Sequence; identical to SEQ ID NO: 162716
  derived and/or modified CDS sequence (opt4) from hemagglutinin__InfluenzaA__ACV70874

SEQ ID NO: 163458 - RNA, 1701 nt, Artificial Sequence; identical to SEQ ID NO: 162909
  derived and/or modified CDS sequence (opt4) from hemagglutinin__InfluenzaA__ACV70884

SEQ ID NO: 163459 - RNA, 1701 nt, Artificial Sequence
  derived and/or modified CDS sequence (opt4) from hemagglutinin__InfluenzaA__ACV70904
augaaggccauccugguggugcugcuguacaccuucgccaccgccaacgccgacacccugugcaucggcuaccacgccaacaacagcaccgacaccguggacaccgugcuggagaagaacgugaccgugacccacagcgugaaccugcuggaggacaagcacaacggcaagcugugcaagcugagaggcguggccccccugcaccugggcaagugcaacaucgccggcuggauccugggcaaccccgagugcgagagccugagcaccgccagcagcuggagcuacaucguggagaccagcagcagcgacaacggcaccugcuaccccggcgacuucaucgacuacgaggagcugagagagcagcugagcagcgugagcagcuucgagagauucgagaucuuccccaagaccagcagcuggcccaaccacgacagcaacaagggcgugaccgccgccugcccccacgccggcgccaagagcuucuacaagaaccugaucuggcuggugaagaagggcaacagcuaccccaagcugagcaagagcuacaucaacgacaagggcaaggaggugcuggugcuguggggcauccaccaccccagcaccagcgccgaccagcagagccuguaccagaacgccgacgccuacguguucgugggcagcagcagauacagcaagaaguucaagcccgagaucgccaucagacccaaggugagagaccaggagggcagaaugaacuacuacuggacccugguggagcccggcgacaagaucaccuucgaggccaccggcaaccugguggugcccagauacgccuucgccauggagagaaacgccggcagcggcaucaucaucagcgacacccccgugcacgacugcaacaccaccugccagacccccaagggcgccaucaacaccagccugcccuuccagaacauccaccccaucaccaucggcaagugccccaaguacgugaagagcaccaagcugagacuggccaccggccugagaaacauccccagcauccagagcagaggccuguucggcgccaucgccggcuucaucgagggcggcuggaccggcaugguggacggcugguacggcuaccaccaccagaacgagcagggcagcggcuacgccgccgaccugaagagcacccagaacgccaucgacgagaucaccaacaaggugaacagcgugaucgagaagaugaacacccaguucaccgccgugggcaaggaguucaaccaccuggagaagagaaucgagaaccugaacaagaagguggacgacggcuuccuggacaucuggaccuacaacgccgagcugcuggugcugcuggagaacgagagaacccuggacuaccacgacagcaacgugaagaaccuguacgagaaggugagaagccagcugaagaacaacgccaaggagaucggcaacggcugcuucgaguucuaccacaagugcgacaacaccugcauggagagcgugaagaacggcaccuacgacuaccccaaguacagcgaggaggccaagcugaacagagaggagaucgacggcgugaagcuggagagcaccagaaucuaccagauccuggccaucuacagcaccguggccagcagccuggugcugguggugagccugggcgccaucagcuucuggaugugcagcaacggcagccugcagugcagaaucugcaucuga

SEQ ID NO: 163460 - RNA, 1701 nt, Artificial Sequence; identical to SEQ ID NO: 162716
  derived and/or modified CDS sequence (opt4) from hemagglutinin__InfluenzaA__ACV70914

SEQ ID NO: 163461 - RNA, 1701 nt, Artificial Sequence; identical to SEQ ID NO: 162716
  derived and/or modified CDS sequence (opt4) from hemagglutinin__InfluenzaA__ACV70924

SEQ ID NO: 163462 - RNA, 1701 nt, Artificial Sequence; identical to SEQ ID NO: 162716
  derived and/or modified CDS sequence (opt4) from hemagglutinin__InfluenzaA__ACV70934

SEQ ID NO: 163463 - RNA, 1701 nt, Artificial Sequence; identical to SEQ ID NO: 162716
  derived and/or modified CDS sequence (opt4) from hemagglutinin__InfluenzaA__ACV70944

SEQ ID NO: 163464 - RNA, 1701 nt, Artificial Sequence
  derived and/or modified CDS sequence (opt4) from hemagglutinin__InfluenzaA__ACV70954
augaaggccauccugguggugcugcuguacaccuucgccaccgccaacgccgacacccugugcaucggcuaccacgccaacaacagcaccgacaccguggacaccgugcuggagaagaacgugaccgugacccacagcgugaaccugcuggaggacaagcacaacggcaagcugugcaagcugagaggcguggccccccugcaccugggcaagugcaacaucgccggcuggauccugggcaaccccgagugcgagagccugagcaccgccagcagcuggagcuacaucguggagaccagcagcagcgacaacggcaccugcuaccccggcgacuucaucgacuacgaggagcugagagagcagcugagcagcgugagcagcuucgagagauucgagaucuuccccaagaccagcagcuggcccaaccacgacagcaacaagggcgugaccgccgccugcccccacgccggcgccaagagcuucuacaagaaccugaucuggcuggugaagaagggcaacagcuaccccaagcugagcaagagcuacaucaacgacaagggcaaggaggugcuggugcuguggggcauccaccaccccagcaccagcgccgaccagcagagccuguaccagaacgccgacgccuacguguucgugggcagcagcagauacagcaagaaguucaagcccgagaucgccaucagacccaaggugagagaccaggagggcagaaugaacuacuacuggacccugguggagcccggcgacaagaucaccuucgaggccaccggcaaccugcuggugcccagauacgccuucgccauggagagaaacgccggcagcggcaucaucaucagcgacacccccgugcacgacugcaacaccaccugccagacccccaagggcgccaucaacaccagccugcccuuccagaacauccaccccaucaccaucggcaagugccccaaguacgugaagagcaccaagcugagacuggccaccggccugagaaacgugcccagcauccagagcagaggccuguucggcgccaucgccggcuucaucgagggcggcuggaccggcaugguggacggcugguacggcuaccaccaccagaacgagcagggcagcggcuacgccgccgaccugaagagcacccagaacgccaucgacgagaucaccaacaaggugaacagcgugaucgagaagaugaacacccaguucaccgccgugggcaaggaguucaaccaccuggagaagagaaucgagaaccugaacaagaagguggacgacggcuuccuggacaucuggaccuacaacgccgagcugcuggugcugcuggagaacgagagaacccuggacuaccacgacagcaacgugaagaaccuguacgagaaggugagaagccagcugaagaacaacgccaaggagaucggcaacggcugcuucgaguucuaccacaagugcgacaacaccugcauggagagcgugaagaacggcaccuacgacuaccccaaguacagcgaggaggccaagcugaacagagaggagaucgacggcgugaagcuggagagcaccagaaucuaccagauccuggccaucuacagcaccguggccagcagccuggugcugguggugagccugggcgccaucagcuucuggaugugcagcaacggcagccugcagugcagaaucugcaucuga

SEQ ID NO: 163465 - RNA, 1701 nt, Artificial Sequence; identical to SEQ ID NO: 162716
  derived and/or modified CDS sequence (opt4) from hemagglutinin__InfluenzaA__ACV70964

SEQ ID NO: 163466 - RNA, 1701 nt, Artificial Sequence; identical to SEQ ID NO: 162716
  derived and/or modified CDS sequence (opt4) from hemagglutinin__InfluenzaA__ACV70974

SEQ ID NO: 163467 - RNA, 1701 nt, Artificial Sequence; identical to SEQ ID NO: 163459
  derived and/or modified CDS sequence (opt4) from hemagglutinin__InfluenzaA__ACV70984

SEQ ID NO: 163468 - RNA, 1701 nt, Artificial Sequence; identical to SEQ ID NO: 163464
  derived and/or modified CDS sequence (opt4) from hemagglutinin__InfluenzaA__ACV70994

SEQ ID NO: 163469 - RNA, 1701 nt, Artificial Sequence; identical to SEQ ID NO: 162716
  derived and/or modified CDS sequence (opt4) from hemagglutinin__InfluenzaA__ACV71004

SEQ ID NO: 163470 - RNA, 1701 nt, Artificial Sequence
  derived and/or modified CDS sequence (opt4) from hemagglutinin__InfluenzaA__ACV82230
augaagaccaucaucgcccugagcuacauccugugccugguguucgcccagaagcugcccggcaacgacaacagcaccgccacccugugccugggccaccacgccgugcccaacggcaccaucgugaagaccaucaccaacgaccagaucgaggugaccaacgccaccgagcuggugcagagcagcagcaccggcgagaucugcgacagcccccaccagauccuggacggcaagaacugcacccugaucgacgcccugcugggcgacccccagugcgacggcuuccagaacaagaagugggaccuguucguggagagaagccaggccuacagcaacugcuaccccuacgacgugcccgacuacgccagccugagaagccugguggccagcagcggcacccuggaguucaacaacgagagcuucaacuggaccggcgugacccagaacggcaccagcagcgccugcaucagaagaagcaagaacagcuucuucagcagacugaacuggcugacccaccugaacuucaaguaccaggcccugaacgugaccaugcccaacaacgagcaguucgacaagcuguacaucuggggcgugcaccaccccggcaccgacaaggaccagaucuuccuguacgcccaggccagcggcagaaucaccgugagcaccaagagaagccagcagaccgugauccccaacaucggcagcagacccagagugagaaacauccccagcagaaucagcaucuacuggaccaucgugaagcccggcgacauccugcugaucaacagcaccggcaaccugaucgcccccagaggcuacuucaagauccagagcggcaagagcagcaucaugagaagcgacgcccccaucggcaagugcaacagcgagugcaucacccccaacggcagcauccccaacgacaagcccuuccagaacgugaacagaaucaccuacggcgccugccccagauacgugaagcagaacacccugaagcuggccaccggcaugagaaacgugcccgagaagcagaccagaggcaucuucggcgccaucgccggcuucaucgagaacggcugggagggcaugguggacggcugguacggcuucagacaccagaacagcgagggcagaggccaggccgccgaccugaagagcacccaggccgccaucgaccagaucaacggcaagcugaacagacugaucggcaagaccaacgagaaguuccaccagaucgagaaggaguucagcgagguggagggcagaauccaggaccuggagaaguacguggaggacaccaagaucgaccuguggagcuacaacgccgagcugcugguggcccuggagaaccagcacaccaucgaccugaccgacagcgagaugaacaagcuguucgagaagaccaagaagcagcugagagagaacgccgaggacaugggcaacggcugcuucaagaucuaccacaagugcgacaacgccugcaucggcagcaucagaaacggcaccuacgaccacgacguguacagagacgaggcccugaacaacagauuccagaucaagggcguggagcugaagagcggcuacaaggacuggauccuguggaucagcuucgccaucagcugcuuccugcugugcguggcccugcugggcuucaucaugugggccugccagaagggcaacaucagaugcaacaucugcaucuga

SEQ ID NO: 163471 - RNA, 1701 nt, Artificial Sequence
  derived and/or modified CDS sequence (opt4) from hemagglutinin__InfluenzaA__ACV82232
augaagaccaucaucgcccugagcuacauccugugccugguguucgcccagaagcugcccggcaacgacaacagcaccgccacccugugccugggccaccacgccgugcccaacggcaccaucgugaagaccaucaccaacgaccagaucgaggugaccaacgccaccgagcuggugcagagcagcagcaccggcgagaucugcgacagcccccaccagauccuggacggcgagaacugcacccugaucgacgcccugcugggcgacccccagugcgacggcuuccagaacaagaagugggaccuguucguggagagaagcaaggccuacagcaacugcuaccccuacgacgugcccgacuacgccagccugagaagccugguggccagcagcggcacccuggaguucaacaacgagagcuucaacuggaccggcgugacccagaacggcaccagcagcgccugcaucagaagaagcaacaacagcuucuucagcagacugaacuggcugacccaccugaacuucaaguaccccgcccugaacgugaccaugcccaacaacgagcaguucgacaagcuguacaucuggggcgugcaccaccccggcaccgacaaggaccagaucuuccuguacgcccaggccagcggcagaaucaccgugagcaccaagagaagccagcaggccgugauccccaacaucggcagcagacccagagugagaaacauccccagcagaaucagcaucuacuggaccaucgugaagcccggcgacauccugcugaucaacagcaccggcaaccugaucgcccccagaggcuacuucaagaucagaagcggcaagagcagcaucaugagaagcgacgcccccaucggcaagugcaacagcgagugcaucacccccaacggcagcauccccaacgacaagcccuuccagaacgugaacagaaucaccuacggcgccugccccagauacgugaagcagaacacccugaagcuggccaccggcaugagaaacgugcccgagaagcagaccagaggcaucuucggcgccaucgccggcuucaucgagaacggcugggagggcaugguggacggcugguacggcuucagacaccagaacagcgagggcagaggccaggccgccgaccugaagagcacccaggccgccaucgaccagaucaacggcaagcugaacagacugaucggcaagaccaacgagaaguuccaccagaucgagaaggaguucagcgagguggagggcagaauccaggaccuggagaaguacguggaggacaccaagaucgaccuguggagcuacaacgccgagcugcugguggcccuggagaaccagcacaccaucgaccugaccgacagcgagaugaacaagcuguucgagaagaccaagaagcagcugagagagaacgccgaggacaugggcaacggcugcuucaagaucuaccacaagugcgacaacgccugcaucggcagcaucagaaacggcaccuacgaccacgacguguacagagacgaggcccugaacaacagauuccagaucaagggcguggagcugaagagcggcuacaaggacuggauccuguggaucagcuucgccaucagcugcuuccugcugugcguggcccugcugggcuucaucaugugggccugccagaagggcaacaucagaugcaacaucugcaucuga

SEQ ID NO: 163472 - RNA, 1698 nt, Artificial Sequence
  derived and/or modified CDS sequence (opt4) from hemagglutinin__InfluenzaA__ACV82233
augaaggugaagcugcuggugcugcugugcaccuucaccgccaccuacgccgacaccaucugcaucggcuaccacgccaacaacagcaccgacaccguggacaccgugcuggagaagaacgugaccgugacccacagcgugaaccugcuggagaacaaccacaacggcaagcugugccugcugaagggcaucgccccccugcagcugggcaacugcagcguggccggcuggauccugggcaaccccgagugcgagcugcugaucagcaaggagagcuggagcuacaucguggagaagcccaaccccgagaacggcaccugcuaccccggccacuucgccgacuacgaggagcugagagagcagcugagcagcgugagcagcuucgagagauucgagaucuuccccaaggagagcagcuggcccaaccacaccgugaccggcgugagcgccagcugcagccacaacggcgagaacagcuucuacagaaaccugcuguggcugaccggcaagaacggccuguaccccaaccugagcaagagcuacgccaacaacaaggagaaggaggugcuggugcuguggggcgugcaccacccccccaacaucgccgaccagaagacccuguaccacaccgagaacgccuacgugagcguggugagcagccacuacagcagaaaguucacccccgagaucgccaagagacccaagaucagagaccaggagggcagaaucaacuacuacuggacccugcuggagcccggcgacaccaucaucuucgaggccaacggcaaccugaucgcccccagauacgccuucgcccugagcagaggcuucggcagcggcaucaucaacagcaacgcccccauggacaagugcgacgccaagugccagaccccccagggcgccaucaacagcagccugcccuuccagaacgugcaccccgugaccaucggcgagugccccaaguacgugagaagcgccaagcugagaauggugaccggccugagaaacauccccagcauccagagcagaggccuguucggcgccaucgccggcuucaucgagggcggcuggaccggcaugguggacggcugguacggcuaccaccaccagaacgagcagggcagcggcuacgccgccgaccagaagagcacccagaacgccaucaacggcaucaccaacaaggugaacagcgugaucgagaagaugaacacccaguucaccgccgugggcaaggaguucaacaagcuggagagaagaauggagaaccugaacaagaagguggacgacggcuucaucgacaucuggaccuacaacgccgagcugcuggugcugcuggagaacgagagaacccuggacuuccacgacagcaacgugaagaaccuguacgagaaggugaagagccagcugaagaacaacgccaaggagaucggcaacggcugcuucgaguucuaccacaagugcaacgacgagugcauggagagcgugaagaacggcaccuacgacuaccccaaguacagcgaggagagcaagcugaacagagagaagaucgacggcgugaagcuggagagcaugggcguguaccagauccuggccaucuacagcaccguggccagcagccuggugcugcuggugagccugggcgccaucagcuucuggaugugcagcaacggcagccugcagugcagaaucugcaucuga

SEQ ID NO: 163473 - RNA, 1701 nt, Artificial Sequence
  derived and/or modified CDS sequence (opt4) from hemagglutinin__InfluenzaA__ACV83662
augaaggccauccugguggugcugcuguacaccuucgccaccgccaacgccgacacccugugcaucggcuaccacgccaacaacagcaccgacaccguggacaccgugcuggagaagaacgugaccgugacccacagcgugaaccugcuggaggacaagcacaacggcaagcugugcaagcugagaggcguggccccccugcaccugggcaagugcaacaucgccggcuggauccugggcaaccccgagugcgagagccugagcaccgccagcagcuggagcuacaucguggagaccagcagcagcgacaacggcaccugcuaccccggcgacuucaucgacuacgaggagcugagagagcagcugagcagcgugagcagcuucgagagauucgagaucuuccccaagaccagcagcuggcccaaccacgacagcaacaagggcgugaccgccgccugcccccacgccggcgccaagagcuucuacaagaaccugaucuggcuggugaagaagggcaacagcuaccccaagcugagcaagagcuacaucaacgacaagggcaaggaggugcuggugcuguggggcauccaccaccccagcaccagcgccgaccagcagagccuguaccagaacgccgacgccuacguguucgugggcaccagcagauacagcaagaaguucaagcccgagaucgccaucagacccaaggugagagacagagagggcagaaugaacuacuacuggacccugguggagcccggcgacaagaucaccuucgaggccaccggcaaccugguggugcccagauacgccuucgccauggugagaaacgccggcagcggcaucaucaucagcgacacccccgugcacgacugcaacaccaccugccagacccccaagggcgccaucaacaccagccugcccuuccagaacauccaccccaucaccaucggcaagugccccaaguacgugaagagcaccaagcugagacuggccaccggccugagaaacgugcccagcauccagagcagaggccuguucggcgccaucgccggcuucaucgagggcggcuggaccggcaugguggacggcugguacggcuaccaccaccagaacgagcagggcagcggcuacgccgccgaccugaagagcacccagaacgccaucgacgagaucaccaacaaggugaacagcgugaucgagaagaugaacacccaguucaccgccgugggcaaggaguucaaccaccuggagaagagaaucgagaaccugaacaagaagguggacgacggcuuccuggacaucuggaccuacaacgccgagcugcuggugcugcuggagaacgagagaacccuggacuaccacgacagcaacgugaagaaccuguacgagaaggugagaagccagcugaagaacaacgccaaggagaucggcaacggcugcuucgaguucuaccacaagugcgacaacaccugcauggagagcgugaagaacggcaccuacgacuaccccaaguacagcgaggaggccaagcugaacagagaggagaucgacggcgugaagcuggagagcaccagaaucuaccagauccuggccaucuacagcaccguggccagcagccuggugcugguggugagccugggcgccaucagcuucuggaugugcagcaacggcagccugcagugcagaaucugcaucuga

SEQ ID NO: 163474 - RNA, 1701 nt, Artificial Sequence
  derived and/or modified CDS sequence (opt4) from hemagglutinin__InfluenzaA__ACV83663
augaaggccauccugguggugcugcuguacaccuucgccaccgccaacgccgacacccugugcaucggcuaccacgccaacaacagcaccgacaccguggacaccgugcuggagaagaacgugaccgugacccacagcgugaaccugcuggaggacaagcacaacggcaagcugugcaagcugagaggcguggccccccugcaccugggcaagugcaacaucgccggcuggauccugggcaaccccgagugcgagagccugagcaccgccagcagcuggagcuacaucguggagaccagcagcagcgacaacggcaccugcuaccccggcgacuucaucgacuacgaggagcugagagagcagcugagcagcgugagcagcuucgagagauucgagaucuuccccaagaccagcagcuggcccaaccacgacagcaacaagggcgugaccgccgccugcccccacgccggcgccaagagcuucuacaagaaccugaucuggcuggugaagaagggcaacagcuaccccaagcugagcaagagcuacaucaacgacaagggcaaggaggugcuggugcuguggggcauccaccaccccagcaccagcgccgaccagcagagccuguaccagaacgccgacgccuacguguucgugggcaccagcagauacagcaagaaguucaagcccgagaucgccaucagacccaaggugagaggccaggagggcagaaugaacuacuacuggacccugguggagcccggcgacaagaucaccuucgaggccaccggcaaccugguggugcccagauacgccuucgccauggagagaaacgccggcagcggcaucaucaucagcgacacccccgugcacgacugcaacaccaccugccagacccccaagggcgccaucaacaccagccugcccuuccagaacauccaccccaucaccaucggcaagugccccaaguacgugaagagcaccaagcugagacuggccaccggccugagaaacgugcccagcauccagagcagaggccuguucggcgccaucgccggcuucaucgagggcggcuggaccggcaugguggacggcugguacggcuaccaccaccagaacgagcagggcagcggcuacgccgccgaccugaagagcacccagaacgccaucgacgagaucaccaacaaggugaacagcgugaucgagaagaugaacacccaguucaccgccgugggcaaggaguucaaccaccuggagaagagaaucgagaaccugaacaagaagguggacgacggcuuccuggacaucuggaccuacaacgccgagcugcuggugcugcuggagaacgagagaacccuggacuaccacgacagcaacgugaagaaccuguacgagaaggugagaagccagcugaagaacaacgccaaggagaucggcaacggcugcuucgaguucuaccacaagugcgacaacaccugcauggagagcgugaagaacggcaccuacgacuaccccaaguacagcgaggaggccaagcugaacagagaggagaucgacggcgugaagcuggagagcaccagaaucuaccagauccuggccaucuacagcaccguggccagcagccuggugcugguggugagccugggcgccaucagcuucuggaugugcagcaacggcagccugcagugcagaaucugcaucuga

SEQ ID NO: 163475 - RNA, 1701 nt, Artificial Sequence; identical to SEQ ID NO: 163474
  derived and/or modified CDS sequence (opt4) from hemagglutinin__InfluenzaA__ACV83664

SEQ ID NO: 163476 - RNA, 1701 nt, Artificial Sequence
  derived and/or modified CDS sequence (opt4) from hemagglutinin__InfluenzaA__ACV83665
auggaggccauccugguggugcugcuguacaccuucgccaccgccaacgccgacacccugugcaucggcuaccacgccaacaacagcaccgacaccguggacaccgugcuggagaagaacgugaccgugacccacagcgugaaccugcuggaggacaagcacaacggcaagcugugcaagcugagaggcguggccccccugcaccugggcaagugcaacaucgccggcuggauccugggcaaccccgagugcgagagccugagcaccgccagcagcuggagcuacaucguggagaccagcagcagcgacaacggcaccugcuaccccggcgacuucaucgacuacgaggagcugagagagcagcugagcagcgugagcagcuucgagagauucgagaucuuccccaagaccagcagcuggcccaaccacgacagcaacaagggcgugaccgccgccugcccccacgccggcgccaagagcuucuacaagaaccugaucuggcuggugaagaagggcaacagcuaccccaagcugagcaagagcuacaucaacgacaagggcaaggaggugcuggugcuguggggcauccaccaccccagcaccaucgccgaccagcagagccuguaccagaacgccgacgccuacguguucgugggcagcagcagauacagcaagaaguucaagcccgagaucgccaucagacccaaggugagagaccaggagggcagaaugaacuacuacuggacccugguggagcccggcgacaagaucaccuucgaggccaccggcaaccugguggugcccagauacgccuucgccauggagagaaacgccggcagcggcaucaucaucagcgacacccccgugcacgacugcaacaccaccugccagacccccaagggcgccaucaacaccagccugcccuuccacaacauccaccccaucaccaucggcaagugccccaaguacgugaagagcaccaagcugagacuggccaccggccugagaaacgugcccagcauccagagcagaggccuguucggcgccaucgccggcuucaucgagggcggcuggaccggcaugguggacggcugguacggcuaccaccaccagaacgagcagggcagcggcuacgccgccgaccugaagagcacccagaacgccaucgacgagaucaccaacaaggugaacagcgugaucgagaagaugaacacccaguucaccgccgugggcaaggaguucaaccaccuggagaagagaaucgagaaccugaacaagaagguggacgacggcuuccuggacaucuggaccuacaacgccgagcugcuggugcugcuggagaacgagagaacccuggacuaccacgacagcaacgugaagaaccuguacgagaaggugagaagccagcugaagaacaacgccaaggagaucggcaacggcugcuucgaguucuaccacaagugcgacaacaccugcauggagagcgugaagaacggcaccuacgacuaccccaaguacagcgaggaggccaagcugaacagagaggagaucgacggcgugaagcuggagagcaccagaaucuaccagauccuggccaucuacagcaccguggccagcagccuggugcugguggugagccugggcgccaucagcuucuggaugugcagcaacggcagccugcagugcagaaucugcaucuga

SEQ ID NO: 163477 - RNA, 1701 nt, Artificial Sequence
  derived and/or modified CDS sequence (opt4) from hemagglutinin__InfluenzaA__ACV83667
augaaggccauccugguggugcugcuguacaccuucgccaccgccaacgccgacacccugugcaucggcuaccacgccaacaacagcaccgacaccguggacaccgugcuggagaagaacgugaccgugacccacagcgugaaccugcuggaggacaagcacaacggcaagcugugcaagcugagaggcguggccccccugcaccugggcaagugcaacaucgccggcuggauccugggcaaccccgagugcgagagccugagcaccgccagcagcuggagcuacaucguggagaccagcagcagcgacaacggcaccugcuaccccggcgacuucaucgacuacgaggagcugagagagcagcugagcagcgugagcagcuucgagagauucgagaucuuccccaagaccagcagcuggcccaaccacgacagcaacaagggcgugaccgccgccugcccccacgccggcgccaagagcuucuacaagaaccugaucuggcuggugaagaagggcaacagcuaccccaagcugagcaagagcuacaucaacgacaagggcaaggaggugcuggugcuguggggcauccaccaccccagcaccagcgccgaccagcagagccuguaccagaacgccgacgccuacguguucgugggcaccagcagauacagcaagaaguucaagcccgagaucgccaucagacccaaggugagaaaccaggagggcagaaugaacuacuacuggacccugguggagcccggcgacaagaucaccuucgaggccaccggcaaccugguggugcccagauacgccuucgccauggagagaaacgccggcagcggcaucaucaucagcgacacccccgugcacgacugcaacaccaccugccagacccccaagggcgccaucaacaccagccugcccuuccagaacauccaccccaucaccaucggcaagugccccaaguacgugaagagcaccaagcugagacuggccaccggccugagaaacgugcccagcauccagagcagaggccuguucggcgccaucgccggcuucaucgagggcggcuggaccggcaugguggacggcugguacggcuaccaccaccagaacgagcagggcagcggcuacgccgccgaccugaagagcacccagaacgccaucgacgagaucaccaacaaggugaacagcgugaucgagaagaugaacacccaguucaccgccgugggcaaggaguucaaccaccuggagaagagaaucgagaaccugaacaagaagguggacgacggcuuccuggacaucuggaccuacaacgccgagcugcuggugcugcuggagaacgagagaacccuggacuaccacgacagcaacgugaagaaccuguacgagaaggugagaagccagcugaagaacaacgccaaggagaucggcaacggcugcuucgaguucuaccacaagugcgacaacaccugcauggagagcgugaagaacggcaccuacgacuaccccaaguacagcgaggaggccaagcugaacagagaggagaucgacggcgugaagcuggagagcaccagaaucuaccagauccuggccaucuacagcaccguggccagcagccuggugcugguggugagccugggcgccaucagcuucuggaugugcagcaacggcagccugcagugcagaaucugcaucuga

SEQ ID NO: 163478 - RNA, 1701 nt, Artificial Sequence; identical to SEQ ID NO: 162729
  derived and/or modified CDS sequence (opt4) from hemagglutinin__InfluenzaA__ACV83668

SEQ ID NO: 163479 - RNA, 1701 nt, Artificial Sequence; identical to SEQ ID NO: 162729
  derived and/or modified CDS sequence (opt4) from hemagglutinin__InfluenzaA__ACV83670

SEQ ID NO: 163480 - RNA, 1701 nt, Artificial Sequence; identical to SEQ ID NO: 162971
  derived and/or modified CDS sequence (opt4) from hemagglutinin__InfluenzaA__ACV83671

SEQ ID NO: 163481 - RNA, 1701 nt, Artificial Sequence; identical to SEQ ID NO: 163291
  derived and/or modified CDS sequence (opt4) from hemagglutinin__InfluenzaA__ACV88399

SEQ ID NO: 163482 - RNA, 1701 nt, Artificial Sequence; identical to SEQ ID NO: 163291
  derived and/or modified CDS sequence (opt4) from hemagglutinin__InfluenzaA__ACV88409

SEQ ID NO: 163483 - RNA, 1701 nt, Artificial Sequence; identical to SEQ ID NO: 162716
  derived and/or modified CDS sequence (opt4) from hemagglutinin__InfluenzaA__ACV88419

SEQ ID NO: 163484 - RNA, 1698 nt, Artificial Sequence; identical to SEQ ID NO: 163338
  derived and/or modified CDS sequence (opt4) from hemagglutinin__InfluenzaA__ACV89502

SEQ ID NO: 163485 - RNA, 1701 nt, Artificial Sequence
  derived and/or modified CDS sequence (opt4) from hemagglutinin__InfluenzaA__ACV89516
augaaggccagacugcugauccugcugugcgcccuggccgccaccgacgccgacaccaucugcaucggcuaccacgccaacaacagcaccgacaccguggacaccgugcuggagaagaacgugaccgugacccacagcgugaaccugcuggaggacagccacaacggcaagcugugcagacugaagggcaucgccccccugcagcugggcaagugcaacaucgccggcuggauccugggcaaccccgagugcgacagccugcugcccgccagcagcuggagcuacaucguggagacccccaacagcaagaacggcaucugcuaccccggcgacuucaucgacuacgaggagcugagagagcagcugagcagcgugagcagcuucgagagauucgagaucuuccccaaggagagcagcuggcccaagcacagcaccaccaagggcgugaccgccgccugcagccacgccggcaagagcagcuucuacagaaaccugcuguggcugaccaagaagggcgacagcuaccccaagcugagcaacagcuacgugaacaagaagggcaaggaggugcuggugcuguggggcgugcaccaccccagcagcagcaaggagcagcagacccuguaccagaacgagaacgccuacgugagcguggugagcagcaacuacaacagaagauucauccccgagaucgccgagagacccgaggugaaggaccaggccggcagaaucaacuacuacuggacccugcuggagcccggcgacaccaucaucuucgaggccaacggcaaccugguggcccccugguacgccuucgcccugagcagaggcuucggcagcggcaucaucaccagcaacgccagcaugcacgagugcaacaccaagugccagaccccccagggcgccaucaacagcagccugcccuuccagaacauccaccccgugaccaucggcgagugccccaaguacgugaagagcgccaagcugagaauggugaccggccugagaaacauccccagcauccagagcagaggccuguucggcgccaucgccggcuucaucgagggcggcuggaccggcaugaucgacggcugguacggcuaccaccaccagaacgagcagggcagcggcuacgccgccgaccagaagagcacccagaacgccaucaacggcaucaccaacaaggugaacagcgugaucgagaagaugaacacccaguucaccgccgugggcaaggaguucaacaaccuggagaagagaauggagaaccugaacaagaagguggacgacggcuuccuggacaucuggaccuacaacgccgagcugcuggugcugcuggagaacgagagaacccuggacuuccacgacagcaacgugaagaaccuguacgagaaggugaagauccagcugaagaacaacgccaaggagaucggcaacggcugcuucgaguucuaccacaagugcgacaacgagugcauggagagcgugagaaacggcaccuacgacuaccccaaguacagcaaggagagcaagcugaacagagagaagaucgacggcgugaagcuggagagcaugggcguguaccagauccuggccaucuacagcaccguggccagcagccuggugcugcuggugagccugggcgccaucagcuucuggaugugcagcaacggcagccugcagugcagaaucugcaucuga

SEQ ID NO: 163486 - RNA, 1698 nt, Artificial Sequence
  derived and/or modified CDS sequence (opt4) from hemagglutinin__InfluenzaA__ACV90512
augaacgugaagcugcuggugcugcugugcaccuucaccgccaccuacgccgacaccaucugcaucggcuaccacgccaacaacagcaccgacaccguggacaccgugcuggagaagaacgugaccgugacccacagcgugaaccugcuggagaacagccacaacggcaagcugugccugcugaagggcaucgccccccugcagcugggcaacugcagcguggccggcuggauccugggcaaccccgagugcgagcugcugaucagcaaggagagcuggagcuacaucguggagaagcccaaccccgagaacggcaccugcuaccccggccacuucgccgacuacgaggagcugagagagcagcugagcagcgugagcagcuucgagagauucgagaucuuccccaaggagagcagcuggcccaaccacaccgugaccggcgugagcgccagcugcagccacaacggcgagaacagcuucuacagaaaccugcuguggcugaccggcaagaacggccuguaccccaaccugagcaagagcuacgccaacaacaaggagaaggaggugcuggugcuguggggcgugcaccacccccccaacaucgccgaccagaagacccuguaccacaccgagaacgccuacgugagcguggugagcagccacuacagcagaaaguucacccccgagaucgccaagagacccaaggugagagaccaggagggcagaaucaacuacuacuggacccugcuggagcccggcgacaccaucaucuucgaggccaacggcaaccugaucgcccccagauacgccuucgcccugagcagaggcuucggcagcggcaucaucaacagcaacgcccccaucgacaagugggacgccaagugccagaccccccagggcgccaucaacagcagccugcccuuccagaacgugcaccccgugaccaucggcgaguggcccaaguacgugagaagcgccaagcugagaauggugaccggccugagaaacauccccagcauccagagcagaggccuguucggcgccaucgccggcuucaucgagggcggcuggaccggcaugguggacggcugguacggcuaccaccaccagaacgagcagggcagcggcuacgccgccgaccagaagagcacccagaacgccaucaacggcaucaccaacaagaugaacagcgugaucgagaagaugaacacccaguucaccgccgugggcaaggaguucaacaagcuggagagaagaauggagaaccugaacaagaagguggacgacggcuucaucgacaucuggaccuacaacgccgagcugcuggugcugcuggagaacgagagaacccuggacuuccacgacagcaacgugaagaaccuguacgagaaggugaagagccagcugaagaacaacgccaaggagaucggcaacggcugcuucgaguucuaccacaagugcaacgacgagugcauggagagcgugaagaacggcaccuacgacuaccccaaguacagcgaggagagcaagcugaacagagagaagaucgacggcgugacccuggagagcaugggcguguaccagauccuggccaucuacagcaccguggccagcagccuggugcugcuggugagccugggcgccaucagcuucuggaugugcagcaacggcagccugcagugcagaaucugcaucuga

SEQ ID NO: 163487 - RNA, 1701 nt, Artificial Sequence; identical to SEQ ID NO: 162729
  derived and/or modified CDS sequence (opt4) from hemagglutinin__InfluenzaA__ACV91672

SEQ ID NO: 163488 - RNA, 1701 nt, Artificial Sequence; identical to SEQ ID NO: 162729
  derived and/or modified CDS sequence (opt4) from hemagglutinin__InfluenzaA__ACV91676

SEQ ID NO: 163489 - RNA, 1701 nt, Artificial Sequence; identical to SEQ ID NO: 162729
  derived and/or modified CDS sequence (opt4) from hemagglutinin__InfluenzaA__ACV91680

SEQ ID NO: 163490 - RNA, 1701 nt, Artificial Sequence
  derived and/or modified CDS sequence (opt4) from hemagglutinin__InfluenzaA__ACX31591
augaagaccaucaucgcccugagcuacauccugugccugguguucgcccagaagcugcccggcaacgacaacagcaccgccacccugugccugggccaccacgccgugcccaacggcaccaucgugaagaccaucaccaacgaccagaucgaggugaccaacgccaccgagcuggugcagagcagcagcaccggcgagaucugcgacagcccccaccagauccuggacggcaagaacugcacccugaucgacgcccugcugggcgacccccagugcgacggcuuccagaacaagaagugggaccuguucguggagagaagcaaggccuacagcaacugcuaccccuacgacgugcccgacuacgccagccugagaagccugguggccagcagcggcacccuggaguucaacaacgagagcuucaacuggaccggcgugacccagaacggcaccagcagcgccugcaucagaagaagcaagaacagcuucuucagcagacugaacuggcugacccaccugaacuucaaguaccaggcccugaacgugaccaugcccaacaacgagcaguucgacaagcuguacaucuggggcgugcaccaccccggcaccgacaaggaccagaucuuccuguacgcccaggccagcggcagaaucaccgugagcaccaagagaagccagcagaccgugauccccaacaucggcagcagacccagagugagaaacauccccagcagaaucagcaucuacuggaccaucgugaagcccggcgacauccugcugaucaacagcaccggcaaccugaucgcccccagaggcuacuucaagauccagagcggcaagagcagcaucaugagaagcgacgcccccaucggcaagugcaacagcgagugcaucacccccaacggcagcauccccaacgacaagcccuuccagaacgugaacagaaucaccuacggcgccugccccagauacgugaagcagaacacccugaagcuggccaccggcaugagaaacgugcccgagaagcagaccagaggcaucuucggcgccaucgccggcuucaucgagaacggcugggagggcaugguggacggcugguacggcuucagacaccagaacagcgagggcagaggccaggccgccgaccugaagagcacccaggccgccaucgaccagaucaacggcaagcugaacagacugaucggcaagaccaacgagaaguuccaccagaucgagaaggaguucagcgagguggagggcagaauccaggaccuggagaaguacguggaggacaccaagaucgaccuguggagcuacaacgccgagcugcugguggcccuggagaaccagcacaccaucgaccugaccgacagcgagaugaacaagcuguucgagaagaccaagaagcagcugagagagaacgccgaggacaugggcaacggcugcuucaagaucuaccacaagugcgacaacgccugcaucggcagcaucagaaacggcaccuacgaccacgacguguacagagacgaggcccugaacaacagauuccagaucaagggcguggagcugaagagcggcuacaaggacuggauccuguggaucagcuucgccaucagcugcuuccugcugugcguggcccugcugggcuucaucaugugggccugccagaagggcaacaucagaugcaacaucugcaucuga

SEQ ID NO: 163491 - RNA, 1701 nt, Artificial Sequence
  derived and/or modified CDS sequence (opt4) from hemagglutinin__InfluenzaA__ACX31933
augaaggccauccugguggugcugcuguacaccuucgccaccgccaacgccgacacccugugcaucggcuaccacgccaacaacagcaccgacaccguggacaccgugcuggagaagaacgugaccgugacccacagcgugaaccugcuggaggacaagcacaacggcaagcugugcaagcugagaggcguggccccccugcaccugggcaagugcaacaucgccggcuggauccugggcaaccccgagugcgagagccugagcaccgccagcagcuggagcuacaucguggagaccagcagcagcggcaacggcaccugcuaccccggcgacuucaucgacuacgaggagcugagagagcagcugagcagcgugagcagcuucgagagauucgagaucuuccccaagaccagcagcuggcccaaccacgacagcaacaagggcgugaccgccgccugcccccacgccggcgccaagagcuucuacaagaaccugaucuggcuggugaagaagggcaacagcuaccccaagcugagcaagagcuacaucaacgacaagggcaaggaggugcuggugcuguggggcauccaccaccccagcaccagcgccgaccagcagagccuguaccagaacgccgacgccuacguguucgugggcaccagcagauacagcaagaaguucaagcccgagaucgccaucagacccaaggugagagaccaggagggcagaaugaacuacuacuggacccugguggagcccggcgacaagaucaccuucgaggccaccggcaaccugguggugcccagauacgccuucgccauggagagaaacgccggcagcggcaucaucaucagcgacacccccgugcacgacugcaacaccaccugccagacccccaagggcgccaucaacaccagccugcccuuccagaacauccaccccaucaccaucggcaagugccccaaguacgugaagagcaccaagcugagacuggccaccggccugagaaacgugcccagcauccagagcagaggccuguucggcgccaucgccggcuucaucgagggcggcuggaccggcaugguggacggcugguacggcuaccaccaccagaacgagcagggcagcggcuacgccgccgaccugaagagcacccagaacgccaucgacgagaucaccaacaaggugaacagcgugaucgagaagaugaacacccaguucaccgccgugggcaaggaguucaaccaccuggagaagagaaucgagaaccugaacaagaagguggacgacggcuuccuggacaucuggaccuacaacgccgagcugcuggugcugcuggagaacgagagaacccuggacuaccacgacagcaacgugaagaaccuguacgagaaggugagaagccagcugaagaacaacgccaaggagaucggcaacggcugcuucgaguucuaccacaagugcgacaacaccugcauggagagcgugaagaacggcaccuacgacuaccccaaguacagcgaggaggccaagcugaacagagaggagaucaacggcgugaagcuggagagcaccagaaucuaccagauccuggccaucuacagcaccguggccagcagccuggugcugguggugagccugggcgccaucagcuucuggaugugcagcaacggcagccugcagugcagaaucugcaucuga

SEQ ID NO: 163492 - RNA, 1701 nt, Artificial Sequence
  derived and/or modified CDS sequence (opt4) from hemagglutinin__InfluenzaA__ACX31934
augaaggccauccugguggugcugcuguacaccuucgccaccgccaacgccgacacccugugcaucggcuaccacgccaacaacagcaccgacaccguggacaccgugcuggagaagaacgugaccgugacccacagcgugaaccugcuggaggacaagcacaacggcaagcugugcaagcugagaggcguggccccccugcaccugggcaagugcaacaucgccggcuggauccugggcaaccccgagugcgagagccugagcaccgccagcagcuggagcuacaucguggagaccagcagcagcgacaacggcaccugcuaccccggcgacuucaucgacuacgaggagcugagagagcagcugagcagcgugagcagcuucgagagauucgagaucuuccccaagaccagcagcuggcccaaccacgacagcaacaagggcgugaccgccgccugcccccacgccggcgccaagagcuucuacaagaaccugaucuggcuggugaagaagggcaacagcuaccccaagcugagcaagagcuacaucaacgacaagggcaaggaggugcuggugcuguggggcauccaccaccccagcaccagcgccgaccagcagagccuguaccagaacgccgacgccuacguguucgugggcaccagcagauacagcaagaaguucaagcccgagaucaccaucagacccaaggugagaggccaggagggcagaaugaacuacuacuggacccugguggagcccggcgacaagaucaccuucgaggccaccggcaaccugguggugcccagauacgccuucgccauggagagaaacgccggcagcggcaucaucaucagcgacacccccgugcacgacugcaacaccaccugccagacccccaagggcgccaucaacaccagccugcccuuccagaacauccaccccaucaccaucggcaagugccccaaguacgugaagagcaccaagcugagacuggccaccggccugagaaacgugcccagcauccagagcagaggccuguucggcgccaucgccggcuucaucgagggcggcuggaccggcaugguggacggcugguacggcuaccaccaccagaacgagcagggcagcggcuacgccgccgaccugaagagcacccagaacgccaucgacgagaucaccaacaaggugaacagcgugaucgagaagaugaacacccaguucaccgccgugggcaaggaguucaaccaccuggagaagagaaucgagaaccugaacaagaagguggacgacggcuuccuggacaucuggaccuacaacgccgagcugcuggugcugcuggagaacgagagaacccuggacuaccacgacagcaacgugaagaaccuguacgagaaggugagaagccagcugaagaacaacgccaaggagaucggcaacggcugcuucgaguucuaccacaagugcgacaacaccugcauggagagcgugaagaacggcaccuacgacuaccccaaguacagcgaggaggccaagcugaacagagaggagaucgacggcgugaagcuggagagcaccagaaucuaccagauccuggccaucuacagcaccguggccagcagccuggugcugguggugagccugggcgccaucagcuucuggaugugcagcaacggcagccugcagugcagaaucugcaucuga

SEQ ID NO: 163493 - RNA, 1701 nt, Artificial Sequence; identical to SEQ ID NO: 162729
  derived and/or modified CDS sequence (opt4) from hemagglutinin__InfluenzaA__ACX31935

SEQ ID NO: 163494 - RNA, 1701 nt, Artificial Sequence; identical to SEQ ID NO: 162729
  derived and/or modified CDS sequence (opt4) from hemagglutinin__InfluenzaA__ACX31936

SEQ ID NO: 163495 - RNA, 1701 nt, Artificial Sequence; identical to SEQ ID NO: 162820
  derived and/or modified CDS sequence (opt4) from hemagglutinin__InfluenzaA__ACX31939

SEQ ID NO: 163496 - RNA, 1701 nt, Artificial Sequence; identical to SEQ ID NO: 162820
  derived and/or modified CDS sequence (opt4) from hemagglutinin__InfluenzaA__ACX31940

SEQ ID NO: 163497 - RNA, 1701 nt, Artificial Sequence; identical to SEQ ID NO: 162729
  derived and/or modified CDS sequence (opt4) from hemagglutinin__InfluenzaA__ACX31943

SEQ ID NO: 163498 - RNA, 1701 nt, Artificial Sequence; identical to SEQ ID NO: 162729
  derived and/or modified CDS sequence (opt4) from hemagglutinin__InfluenzaA__ACX31946

SEQ ID NO: 163499 - RNA, 1701 nt, Artificial Sequence; identical to SEQ ID NO: 162729
  derived and/or modified CDS sequence (opt4) from hemagglutinin__InfluenzaA__ACX31947

SEQ ID NO: 163500 - RNA, 1701 nt, Artificial Sequence; identical to SEQ ID NO: 162729
  derived and/or modified CDS sequence (opt4) from hemagglutinin__InfluenzaA__ACX31948

SEQ ID NO: 163501 - RNA, 1701 nt, Artificial Sequence
  derived and/or modified CDS sequence (opt4) from hemagglutinin__InfluenzaA__ACX31949
augaaggccauccugguggugcugcuguacaccuucgccaccgccaacgccgacacccugugcaucggcuaccacgccaacaacagcaccgacaccguggacaccgugcuggagaagaacgugaccgugacccacagcgugaaccugcuggaggacaagcacaacggcaagcugugcaagcugagaggcguggccccccugcaccugggcaagugcaacaucgccggcuggauccugggcaaccccgagugcgagagccugagcaccgccagcagcuggagcuacaucguggagaccagcagcagcgacaacggcaccugcuaccccggcgacuucaucgacuacgaggagcugagagagcagcugagcagcgugagcagcuucgagagauucgagaucuuccccaagaccagcagcuggcccaaccacgacagcaacaagggcgugaccgccgccugcccccacgccggcgccaagagcuucuacaagaaccugaucuggcuggugaagaagggcaacagcuaccccaagcugagcaagagcuacaucaacgacaagggcaaggaggugcuggugcuguggggcauccaccaccccagcaccagcgccgaccagcagagccuguaccagaacgccgacgccuacguguucgugggcaccagcagauacagcaagaaguucaagcccgagaucgccaucagacccaaggugagagaccaggagggcagaaugaacuacuacuggacccugguggagcccggcgacaagaucaccuucgaggccaccggcaaccugguggugcccagauacgccuucgccauggagagaaacgccggcagcggcaucaucaucagcgacacccccgugcacuacugcaacaccaccugccagacccccaagggcgccaucaacaccagccugcccuuccagaacauccaccccaucaccaucggcaagugccccaaguacgugaagagcaccaagcugagacuggccaccggccugagaaacgugcccagcauccagagcagaggccuguucggcgccaucgccggcuucaucgagggcggcuggaccggcaugguggacggcugguacggcuaccaccaccagaacgagcagggcagcggcuacgccgccgaccugaagagcacccagaacgccaucgacgagaucaccaacaaggugaacagcgugaucgagaagaugaacacccaguucaccgccgugggcaaggaguucaaccaccuggagaagagaaucgagaaccugaacaagaagguggacgacggcuuccuggacaucuggaccuacaacgccgagcugcuggugcugcuggagaacgagagaacccuggacuaccacgacagcaacgugaagaaccuguacgaggaggugagaagccagcugaagaacaacgccaaggagaucggcaacggcugcuucgaguucuaccacaagugcgacaacaccugcauggagagcgugaagaacggcaccuacgacuaccccaaguacagcgaggaggccaagcugaacagagaggagaucgacggcgugaagcuggagagcaccagaaucuaccagauccuggccaucuacagcaccguggccagcagccuggugcugguggugagccugggcgccaucagcuucuggaugugcagcaacggcagccugcagugcagaaucugcaucuga

SEQ ID NO: 163502 - RNA, 1701 nt, Artificial Sequence; identical to SEQ ID NO: 162729
  derived and/or modified CDS sequence (opt4) from hemagglutinin__InfluenzaA__ACX31950

SEQ ID NO: 163503 - RNA, 1701 nt, Artificial Sequence; identical to SEQ ID NO: 162729
  derived and/or modified CDS sequence (opt4) from hemagglutinin__InfluenzaA__ACX31951

SEQ ID NO: 163504 - RNA, 1701 nt, Artificial Sequence; identical to SEQ ID NO: 162729
  derived and/or modified CDS sequence (opt4) from hemagglutinin__InfluenzaA__ACX31954

SEQ ID NO: 163505 - RNA, 1701 nt, Artificial Sequence; identical to SEQ ID NO: 162729
  derived and/or modified CDS sequence (opt4) from hemagglutinin__InfluenzaA__ACX31955

SEQ ID NO: 163506 - RNA, 1701 nt, Artificial Sequence; identical to SEQ ID NO: 162716
  derived and/or modified CDS sequence (opt4) from hemagglutinin__InfluenzaA__ACX31956

SEQ ID NO: 163507 - RNA, 1701 nt, Artificial Sequence; identical to SEQ ID NO: 162729
  derived and/or modified CDS sequence (opt4) from hemagglutinin__InfluenzaA__ACX31957

SEQ ID NO: 163508 - RNA, 1701 nt, Artificial Sequence; identical to SEQ ID NO: 162716
  derived and/or modified CDS sequence (opt4) from hemagglutinin__InfluenzaA__ACX31958

SEQ ID NO: 163509 - RNA, 1701 nt, Artificial Sequence; identical to SEQ ID NO: 162971
  derived and/or modified CDS sequence (opt4) from hemagglutinin__InfluenzaA__ACX31960

SEQ ID NO: 163510 - RNA, 1701 nt, Artificial Sequence
  derived and/or modified CDS sequence (opt4) from hemagglutinin__InfluenzaA__ACX31961
augaaggccauccugguggugaugcuguacaccuucgccaccgccaacgccgacacccugugcaucggcuaccacgccaacaacagcaccgacaccguggacaccgugcuggagaagaacgugaccgugacccacagcgugaaccugcuggaggacaagcacaacggcaagcugugcaagcugagaggcguggccccccugcaccugggcaagugcaacaucgccggcuggauccugggcaaccccgagugcgagagccugagcaccgccagcagcuggagcuacaucguggagaccagcagcagcgacaacggcaccugcuaccccggcgacuucaucgacuacgaggagcugagagagcagcugagcagcgugagcagcuucgagagauucgagaucuuccccaagaccagcagcuggcccaaccacgacagcaacaagggcgugaccgccgccugcccccacgccggcgccaagagcuucuacaagaaccugaucuggcuggugaagaagggcaacagcuaccccaagcugagcaagagcuacaucaacgacaagggcaaggaggugcuggugcuguggggcauccaccaccccagcaccagcgccgaccagcagagccuguaccagaacgccgacgccuacguguucgugggcagcagcagauacagcaagaaguucaagcccgagaucgccaucagacccaaggugagagaccaggagggcagaaugaacuacuacuggacccugguggagcccggcgacaagaucaccuucgaggccaccggcaaccugguggugcccagauacgccuucgccauggagagaaacgccggcagcggcaucaucaucagcgacacccccgugcacgacugcaacaccaccugccagacccccaagggcgccaucaacaccagccugcccuuccagaacauccaccccaucaccaucggcaagugccccaaguacgugaagagcaccaagcugagacuggccaccggccugagaaacgugcccagcauccagagcagaggccuguucggcgccaucgccggcuucaucgagggcggcuggaccggcaugguggacggcugguacggcuaccaccaccagaacgagcagggcagcggcuacgccgccgaccugaagagcacccagaacgccaucgacgagaucaccaacaaggugaacagcgugaucgagaagaugaacacccaguucaccgccgugggcaaggaguucaaccaccuggagaagagaaucgagaaccugaacaagaagguggacgacggcuucauggacaucuggaccuacaacgccgagcugcuggugcugcuggagaacgagagaacccuggacuaccacgacagcaacgugaagaaccuguacgagaaggugagaagccagcugaagaacaacgccaaggagaucggcaacggcugcuucgaguucuaccacaagugcgacaacaccugcauggagagcgugaagaacggcaccuacgacuaccccaaguacagcgaggaggccaagcugaacagagaggagaucgacggcgugaagcuggagagcaccagaaucuaccagauccuggccaucuacagcaccguggccagcagccuggugcugguggugagccugggcgccaucagcuucuggaugugcagcaacggcagccugcagugcagaaucugcaucuga

SEQ ID NO: 163511 - RNA, 1701 nt, Artificial Sequence; identical to SEQ ID NO: 162729
  derived and/or modified CDS sequence (opt4) from hemagglutinin__InfluenzaA__ACX31962

SEQ ID NO: 163512 - RNA, 1701 nt, Artificial Sequence; identical to SEQ ID NO: 162729
  derived and/or modified CDS sequence (opt4) from hemagglutinin__InfluenzaA__ACX31964

SEQ ID NO: 163513 - RNA, 1701 nt, Artificial Sequence; identical to SEQ ID NO: 162716
  derived and/or modified CDS sequence (opt4) from hemagglutinin__InfluenzaA__ACX35237

SEQ ID NO: 163514 - RNA, 1701 nt, Artificial Sequence; identical to SEQ ID NO: 162729
  derived and/or modified CDS sequence (opt4) from hemagglutinin__InfluenzaA__ACX35247

SEQ ID NO: 163515 - RNA, 1701 nt, Artificial Sequence; identical to SEQ ID NO: 162729
  derived and/or modified CDS sequence (opt4) from hemagglutinin__InfluenzaA__ACX35257

SEQ ID NO: 163516 - RNA, 1701 nt, Artificial Sequence; identical to SEQ ID NO: 162729
  derived and/or modified CDS sequence (opt4) from hemagglutinin__InfluenzaA__ACX35267

SEQ ID NO: 163517 - RNA, 1701 nt, Artificial Sequence; identical to SEQ ID NO: 162729
  derived and/or modified CDS sequence (opt4) from hemagglutinin__InfluenzaA__ACX35277

SEQ ID NO: 163518 - RNA, 1701 nt, Artificial Sequence; identical to SEQ ID NO: 162729
  derived and/or modified CDS sequence (opt4) from hemagglutinin__InfluenzaA__ACX35287

SEQ ID NO: 163519 - RNA, 1701 nt, Artificial Sequence; identical to SEQ ID NO: 162729
  derived and/or modified CDS sequence (opt4) from hemagglutinin__InfluenzaA__ACX35297

SEQ ID NO: 163520 - RNA, 1701 nt, Artificial Sequence
  derived and/or modified CDS sequence (opt4) from hemagglutinin__InfluenzaA__ACX35307
augaaggccauccugguggugcugcuguacaccuucgccaccgccaacgccgacacccugugcaucggcuaccacgccaacaacagcaccgacaccguggacaccgugcuggagaagaacgugaccgugacccacagcgugaaccugcuggaggacaagcacaacggcaagcugugcaagcugagaggcguggccccccugcaccugggcaagugcaacaucgccggcuggauccugggcaaccccgagugcgagagccugagcaccgccagcagcuggagcuacaucguggagaccagcagcagcgacaacggcaccugcuaccccggcgacuucaucgacuacgaggagcugagagagcagcugagcagcgugagcagcuucgagagauucgagaucuuccccaagaccagcagcuggcccaaccacgacagcaacaagggcgugaccgccgccugcccccacgccggcgccaagagcuucuacaagaaccugaucuggcuggugaagaagggcaacagcuaccccaagcugagcaagagcuacaucaacgacaagggcaaggaggugcuggugcuguggggcauccaccaccccagcaccagcgccgaccagcagagccuguaccagaacgccgacgccuacguguucgugggcaccagcagauacagcaagaaguucaagcccgagaucgccaucagacccaaggugagagaccaggagggcagaaugaacuacuacuggacccuggugggccccggcgacaagaucaccuucgaggccaccggcaaccugguggugcccagauacgccuucgccauggagagaaacgccggcagcggcaucaucaucagcgacacccccgugcacgacugcaacaccaccugccagacccccaagggcgccaucaacaccagccugcccuuccagaacauccaccccaucaccaucggcaagugccccaaguacgugaagagcaccaagcugagacuggccaccggccugagaaacgugcccagcauccagagcagaggccuguucggcgccaucgccggcuucaucgagggcggcuggaccggcaugguggacggcugguacggcuaccaccaccagaacgagcagggcagcggcuacgccgccgaccugaagagcacccagaacgccaucgacgagaucaccaacaaggugaacagcgugaucgagaagaugaacacccaguucaccgccgugggcaaggaguucaaccaccuggagaagagaaucgagaaccugaacaagaagguggacgacggcuuccuggacaucuggaccuacaacgccgagcugcuggugcugcuggagaacgagagaacccuggacuaccacgacagcaacgugaagaaccuguacgagaaggugagaagccagcugaagaacaacgccaaggagaucggcaacggcugcuucgaguucuaccacaagugcgacaacaccugcauggagagcgugaagaacggcaccuacgacuaccccaaguacagcgaggaggccaagcugaacagagaggagaucgacggcgugaagcuggagagcaccagaaucuaccagauccuggccaucuacagcaccguggccagcagccuggugcugguggugagccugggcgccaucagcuucuggaugugcagcaacggcagccugcagugcagaaucugcaucuga

SEQ ID NO: 163521 - RNA, 1701 nt, Artificial Sequence; identical to SEQ ID NO: 162971
  derived and/or modified CDS sequence (opt4) from hemagglutinin__InfluenzaA__ACX35317

SEQ ID NO: 163522 - RNA, 1701 nt, Artificial Sequence
  derived and/or modified CDS sequence (opt4) from hemagglutinin__InfluenzaA__ACX35327
augaaggccauccugguggugcugcuguacaccuucgccaccgccaacgccgacacccugugcaucggcuaccacgccaacaacagcaccgacaccguggacaccgugcuggagaagaacgugaccgugacccacagcgugaaccugcuggaggacaagcacaacggcaagcugugcaagcugagaggcguggccccccugcaccugggcaagugcaacaucgccggcuggauccugggcaaccccgagugcgagagccugagcaccgccagcagcuggagcuacaucguggagaccagcagcagcgacaacggcaccugcuaccccggcgacuucaucgacuacgaggagcugagagagcagcugagcagcgugagcagcuucgagagauucgagaucuuccccaagaccagcagcuggcccaaccacgacagcaacaagggcgugaccgccgccugcccccacgccggcgccaagagcuucuacaagaaccugaucuggcuggugaagaagggcaacagcuaccccaagcugagcaagagcuacaucaacgacaagggcaaggaggugcuggugcuguggggcauccaccaccccagcaccagcgccgaccagcagagccuguaccagaacgccgacagcuacguguucgugggcaccagcagauacagcaagaaguucaagcccgagaucgccaucagacccaaggugagagaccaggagggcagaaugaacuacuacuggacccugguggagcccggcgacaagaucaccuucgaggccaccggcaaccugguggugcccagauacgccuucgccauggagagaaacgccggcagcggcaucaucaucagcgacacccccgugcacgacugcaacaccaccugccagacccccaagggcgccaucaacaccagccugcccuuccagaacauccaccccaucaccaucggcaagugccccaaguacgugaagagcaccaagcugagacuggccaccggccugagaaacgugcccagcauccagagcagaggccuguucggcgccaucgccggcuucaucgagggcggcuggaccggcaugguggacggcugguacggcuaccaccaccagaacgagcagggcagcggcuacgccgccgaccugaagagcacccagaacgccaucgacgagaucaccaacaaggugaacagcgugaucgagaagaugaacacccaguucaccgccgugggcaaggaguucaaccaccuggagaagagaaucgagaaccugaacaagaagguggacgacggcuuccuggacaucuggaccuacaacgccgagcugcuggugcugcuggagaacgagagaacccuggacuaccacgacagcaacgugaagaaccuguacgagaaggugagaagccagcugaagaacaacgccaaggagaucggcaacggcugcuucgaguucuaccacaagugcgacaacaccugcauggagagcgugaagaacggcaccuacgacuaccccaaguacagcgaggaggccaagcugaacagagaggagaucgacggcgugaagcuggagagcaccagaaucuaccagauccuggccaucuacagcaccguggccagcagccuggugcugguggugagccugggcgccaucagcuucuggaugugcagcaacggcagccugcagugcagaaucugcaucuga

SEQ ID NO: 163523 - RNA, 1701 nt, Artificial Sequence
  derived and/or modified CDS sequence (opt4) from hemagglutinin__InfluenzaA__ACX36501
augaaggccauccugguggugcugcuguacaccuucgccaccgccaacgccgacacccugugcaucggcuaccacgccaacaacagcaccgacaccguggacaccgugcuggagaagaacgugaccgugacccacagcgugaaccugcuggaggacaagcacaacggcaagcugugcaagcugagaggcguggccccccugcaccugggcaagugcaacaucgccggcuggauccugggcaaccccgagugcgagagccugagcaccgccagcagcuggagcuacaucguggagaccagcagcagcgacaacggcaccugcuaccccggcgacuucaucgacuacgaggagcugagagagcagcugagcagcgugagcagcuucgagagauucgagaucuuccccaagaccagcagcuggcccaaccacgacagcaacaagggcgugaccgccgccugcccccacgccggcgccaagagcuucuacaagaaccugaucuggcuggugaagaagggcaacagcuaccccaagcugagcaagagcuacaucaacgacaagggcaaggaggugcuggugcuguggggcauccaccaccccagcaccagcgccgaccagcagagcaucuaccagaacgccgacgccuacguguucgugggcaccagcagauacagcaagaaguucaagcccgagaucgccaucagacccaaggugagagaccaggagggcagaaugaacuacuacuggacccugguggagcccggcgacaagaucaccuucgaggccaccggcaaccugguggugcccagauacgccuucgccauggagagaaacgccggcagcggcaucaucaucagcgacacccccgugcacgacugcaacaccaccugccagacccccaagggcgccaucaacaccagccugcccuuccagaacauccaccccaucaccaucggcaagugccccaaguacgugaagagcaccaagcugagacuggccaccggccugagaaacgugcccagcauccagagcagaggccuguucggcgccaucgccggcuucaucgagggcggcuggaccggcaugguggacggcugguacggcuaccaccaccagaacgagcagggcagcggcuacgccgccgaccugaagagcacccagaacgccaucgacgagaucaccaacaaggugaacagcgugaucgagaagaugaacacccaguucaccgccgugggcaaggaguucaaccaccuggagaagagaaucgagaaccugaacaagaagguggacgacggcuuccuggacaucuggaccuacaacgccgagcugcuggugcugcuggagaacgagagaacccuggacuaccacgacagcaacgugaagaaccuguacgagaaggugagaagccagcugaagaacaacgccaaggagaucggcaacggcugcuucgaguucuaccacaagugcgacaacaccugcauggagagcgugaagaacggcaccuacgacuaccccaaguacagcgaggaggccaagcugaacagagaggagaucgacggcgugaagcuggagagcaccagaaucuaccagauccuggccaucuacagcaccguggccagcagccuggugcugguggugagccugggcgccaucagcuucuggaugugcagcaacggcagccugcagugcagaaucugcaucuga

SEQ ID NO: 163524 - RNA, 1701 nt, Artificial Sequence
  derived and/or modified CDS sequence (opt4) from hemagglutinin__InfluenzaA__ACX36502
augaaggccauccugguggugcugcuguacaccuucgccaccgccaacgccgacacccugugcaucggcuaccacgccaacaacagcaccgacaccguggacaccauccuggagaagaacgugaccgugacccacagcgugaaccugcuggaggacaagcacaacggcaagcugugcaagcugagaggcguggccccccugcaccugggcaagugcaacaucgccggcuggauccugggcaaccccgagugcgagagccugagcaccgccagcagcuggagcuacaucguggagaccagcagcagcgacaacggcaccugcuaccccggcgacuucaucgacuacgaggagcugagagagcagcugagcagcgugagcagcuucgagagauucgagaucuuccccaagaccagcagcuggcccaaccacgacagcaacaagggcgugaccgccgccugcccccacgccggcgccaagagcuucuacaagaaccugaucuggcuggugaagaagggcaacagcuaccccaagcugagcaagagcuacaucaacgacaagggcaaggaggugcuggugcuguggggcauccaccaccccagcaccagcgccgaccagcagagcaucuaccagaacgccgacgccuacguguucgugggcaccagcagauacagcaagaaguucaagcccgagaucgccaucagacccaaggugagagaccaggagggcagaaugaacuacuacuggacccugguggagcccggcgacaagaucaccuucgaggccaccggcaaccugguggugcccagauacgccuucgccauggagagaaacgccggcagcggcaucaucaucagcgacacccccgugcacgacugcaacaccaccugccagacccccaagggcgccaucaacaccagccugcccuuccagaacauccaccccaucaccaucggcaagugccccaaguacgugaagagcaccaagcugagacuggccaccggccugagaaacgugcccagcauccagagcagaggccuguucggcgccaucgccggcuucaucgagggcggcuggaccggcaugguggacggcugguacggcuaccaccaccagaacgagcagggcagcggcuacgccgccgaccugaagagcacccagaacgccaucgacgagaucaccaacaaggugaacagcgugaucgagaagaugaacacccaguucaccgccgugggcaaggaguucaaccaccuggagaagagaaucgagaaccugaacaagaagguggacgacggcuuccuggacaucuggaccuacaacgccgagcugcuggugcugcuggagaacgagagaacccuggacuaccacgacagcaacgugaagaaccuguacgagaaggugagaagccagcugaagaacaacgccaaggagaucggcaacggcugcuucgaguucuaccacaagugcgacaacaccugcauggagagcgugaagaacggcaccuacgacuaccccaaguacagcgaggaggccaagcugaacagagaggagaucgacggcgugaagcuggagagcaccagaaucuaccagauccuggccaucuacagcaccguggccagcagccuggugcugguggugagccugggcgccaucagcuucuggaugugcagcaacggcagccugcagugcagaaucugcaucuga

SEQ ID NO: 163525 - RNA, 1701 nt, Artificial Sequence
  derived and/or modified CDS sequence (opt4) from hemagglutinin__InfluenzaA__ACX36503
augaaggccauccugguggugcugcuguacaccuucgccaccgccaacgccgacacccugugcaucggcuaccacgccaacaacagcaccgacaccguggacaccauccuggagaagaacgugaccgugacccacagcgugaaccugcuggaggacaagcacaacggcaagcugugcaagcugagaggcguggccccccugcaccugggcaagugcaacaucgccggcuggauccugggcaaccccgagugcgagagccugagcaccgccagcagcuggagcuacaucguggagaccagcagcagcgacaacggcaccugcuaccccggcgacuucaucgacuacgaggagcugagagagcagcugagcagcgugagcagcuucgagagauucgagaucuuccccaagaccagcagcuggcccaaccacgacagcaacaagggcgugaccgccgccugcccccacgccggcgccaagagcuucuacaagaaccugaucuggcuggugaagaagggcaacagcuaccccaagcugagcaagagcuacaucaacgacaagggcaaggaggugcuggugcuguggggcauccaccaccccagcaccagcgccgaccagcagagcaucuaccagaacgccgacgccuacguguucgugggcaccagcagauacagcaagaaguucaagcccgagaucgccaucagacccaaggugagagaccaggagggcagaaugaacuacuacuggacccugguggagcccggcgacaagaucaccuucgaggccaccggcaaccugguggugcccagauacgccuucgccauggagagaaacgccggcagcggcaucaucaucagcgacacccccgugcacgacugcaacaccaccugccagacccccaagggcgccaucaacaccagccugcccuuccagaacauccaccccaucaccaucggcaagugccccaaguacgugaagagcaccaagcugagacuggccaccggccugagaaacgugcccagcauccagagcagaggccuguucggcgccaucgccggcuucaucgagggcggcuggaccggcaugguggacggcugguacggcuaccaccaccagaacgagcagggcagcggcuacgccgccgaccugaagagcacccagaacgccaucgacgagaucaccaacaaggugaacagcgugaucgagaagaugaacacccaguucaccgccgugggcaaggaguucaaccaccuggagaagagaaucgagaaccugaacaagaagguggacgacggcuuccuggacaucuggaccuacaacgccgagcugcuggugcugcuggagaacgagagaacccuggacuaccacgacagcaacgugaagaaccuguacgagaaggugagaagccagcugaagaacaacaccaaggagaucggcaacggcugcuucgaguucuaccacaagugcgacaacaccugcauggagagcgugaagaacggcaccuacgacuaccccaaguacagcgaggaggccaagcugaacagagaggagaucgacggcgugaagcuggagagcaccagaaucuaccagauccuggccaucuacagcaccguggccagcagccuggugcugguggugagccugggcgccaucagcuucuggaugugcagcaacggcagccugcagugcagaaucugcaucuga

SEQ ID NO: 163526 - RNA, 1701 nt, Artificial Sequence
  derived and/or modified CDS sequence (opt4) from hemagglutinin__InfluenzaA__ACX47367
augaaggccauccugguggugcugcuguacaccuucgccaccgccaacgccgacacccugugcaucggcuaccacgccaacaacagcaccgacaccguggacaccgugcuggagaagaacgugaccgugacccacagcgugaaccugcuggaggacaagcacaacggcaagcugugcaagcugagaggcguggccccccugcaccugggcaagugcaacaucgccggcuggauccugggcaaccccgagugcgagagccugagcaccgccagcagcuggagcuacaucguggagaccagcagcagcgacaacggcaccugcuaccccggcgacuucaucgacuacgaggagcugagagagcagcugagcagcgugagcagcuucgagagauucgagaucuuccccaagaccagcagcuggcccaaccacgaccccaacaagggcgugaccgccgccugcccccacgccggcgccaagagcuucuacaagaaccugaucuggcuggugaagaagggcaacagcuaccccaagcugagcaagagcuacaucaacgacaagggcaaggaggugcuggugcuguggggcauccaccaccccagcaccagcgccgaccagcagagccuguaccagaacgccgacgccuacguguucgugggcaccagcagauacagcaagaaguucaagcccgagaucgccaucagacccaaggugagagaccaggagggcagaaugaacuacuacuggacccuggugaagcccggcgacaagaucaccuucgaggccaccggcaaccugguggugcccagauacgccuucgccauggagagaaacgccggcagcggcaucaucaucagcgacacccccgugcacgacugcaacaccaccugccagacccccaagggcgccaucaacaccagccugcccuuccagaacauccaccccaucaccaucggcaagugccccaaguacgugaagagcaccaagcugagacuggccaccggccugagaaacgugcccagcauccagagcagaggccuguucggcgccaucgccggcuucaucgagggcggcuggaccggcaugguggacggcugguacggcuaccaccaccagaacgagcagggcagcggcuacgccgccgaccugaagagcacccagaacgccaucgacgagaucaccaacaaggugaacagcgugaucgagaagaugaacacccaguucaccgccgugggcaaggaguucaaccaccuggagaagagaaucgagaaccugaacaagaagguggacgacggcuuccuggacaucuggaccuacaacgccgagcugcuggugcugcuggagaacgagagaacccuggacuaccacgacagcaacgugaagaaccuguacgagaaggugagaagccagcugaagaacaacgccaaggagaucggcaacggcugcuucgaguucuaccacaagugcgacaacaccugcauggagagcgugaagaacggcaccuacgacuaccccaaguacagcgaggaggccaagcugaacagagaggagaucgacggcgugaagcuggagagcaccagaaucuaccagauccuggccaucuacagcaccguggccagcagccuggugcugguggugagccugggcgccaucagcuucuggaugugcagcaacggcagccugcagugcagaaucugcaucuga

SEQ ID NO: 163527 - RNA, 1701 nt, Artificial Sequence
  derived and/or modified CDS sequence (opt4) from hemagglutinin__InfluenzaA__ACX47368
augaaggccauccugguggugcugcuguacaccuucgccaccgccaacgccgacacccugugcaucggcuaccacgccaacaacagcaccgacaccguggacaccgugcuggagaagaacgugaccgugacccacagcgugaaccugcuggaggacaagcacaacggcaagcugugcaagcugagaggcguggccccccugcaccugggcaagugcaacaucgccggcuggauccugggcaaccccgagugcgagagccugagcaccgccagcagcuggagcuacaucguggagaccagcagcagcgacaacggcaccugcuaccccggcgacuucaucgacuacgaggagcugagagagcagcugagcagcgugagcagcuucgagagauucgagaucuuccccaagaccagcagcuggcccaaccacgaccccaacaagggcgugaccgccgccugcccccacgccggcgccaagagcuucuacaagaaccugaucuggcuggugaagaagggcaacagcuaccccaagcugagcaagagcuacaucaacgacaagggcaaggaggugcuggugcuguggggcauccaccaccccagcaccagcgccgaccagcagagccuguaccagaacgccgacgccuacguguucgugggcaccagcagauacagcaagaaguucaagcccgagaucgccaucagacccaaggugagagaccaggagggcagaaugaacuacuacuggacccugguggagcccggcgacaagaucaccuucgaggccaccggcaaccugguggugcccagauacgccuucgccauggagagaaacgccggcagcggcaucaucaucagcgacacccccgugcacgacugcaacaccaccugccagacccccaagggcgccaucaacaccagccugcccuuccagaacauccaccccaucaccaucggcaagugccccaaguacgugaagagcaccaagcugagacuggccaccggccugagaaacgugcccagcauccagagcagaggccuguucggcgccaucgccggcuucaucgagggcggcuggaccggcaugguggacggcugguacggcuaccaccaccagaacgagcagggcagcggcuacgccgccgaccugaagagcacccagaacgccaucgacgagaucaccaacaaggugaacagcgugaucgagaagaugaacacccaguucaccgccgugggcaaggaguucaaccaccuggagaagagaaucgagaaccugaacaagaagguggacgacggcuuccuggacaucuggaccuacaacgccgagcugcuggugcugcuggagaacgagagaacccuggacuaccacgacagcaacgugaagaaccuguacgagaaggugagaagccagcugaagaacaacgccaaggagaucggcaacggcugcuucgaguucuaccacaagugcgacaacaccugcauggagagcgugaagaacggcaccuacgacuaccccaaguacagcgaggaggccaagcugaacagagaggagaucgacggcgugaagcuggagagcaccagaaucuaccagauccuggccaucuacagcaccguggccagcagccuggugcugguggugagccugggcgccaucagcuucuggaugugcagcaacggcagccugcagugcagaaucugcaucuga

SEQ ID NO: 163528 - RNA, 1701 nt, Artificial Sequence; identical to SEQ ID NO: 163527
  derived and/or modified CDS sequence (opt4) from hemagglutinin__InfluenzaA__ACX47369

SEQ ID NO: 163529 - RNA, 1701 nt, Artificial Sequence
  derived and/or modified CDS sequence (opt4) from hemagglutinin__InfluenzaA__ACX47370
augaaggccauccugguggugcugcuguacaccuucgccaccgccaacgccgacacccugugcaucggcuaccacgccaacaacagcaccgacaccguggacaccgugcuggagaagaacgugaccgugacccacagcgugaaccugcuggaggacaagcacaacggcaagcugugcaagcugagaggcguggccccccugcaccugggcaagugcaacaucgccggcuggauccugggcaaccccgagugcgagagccugagcaccgccagcagcuggagcuacaucguggagaccagcagcagcgacaacggcaccugcuaccccggcgacuucaucgacuacgaggagcugagagagcagcugagcagcgugagcagcuucgagagauucgagaucuuccccaagaccagcagcuggcccaaccacgaccccaacaagggcgugaccgccgccugcccccacgccggcgccaagagcuucuacaagaaccugaucuggcuggugaagaagggcaacagcuaccccaagcugagcaagagcuacaucaacgacaagggcaaggaggugcuggugcuguggggcauccaccaccccagcaccagcgccgacagacagagccuguaccagaacgccgacgccuacguguucgugggcaccagcagauacagcaagaaguucaagcccgagaucgccaucagacccaaggugagagaccaggagggcagaaugaacuacuacuggacccugguggagcccggcgacaagaucaccuucgaggccaccggcaaccugguggugcccagauacgccuucgccauggagagaaacgccggcagcggcaucaucaucagcgacacccccgugcacgacugcaacaccaccugccagacccccaagggcgccaucaacaccagccugcccuuccagaacauccaccccaucaccaucggcaagugccccaaguacgugaagagcaccaagcugagacuggccaccggccugagaaacgugcccagcauccagagcagaggccuguucggcgccaucgccggcuucaucgagggcggcuggaccggcaugguggacggcugguacggcuaccaccaccagaacgagcagggcagcggcuacgccgccgaccugaagagcacccagaacgccaucgacgagaucaccaacaaggugaacagcgugaucgagaagaugaacacccaguucaccgccgugggcaaggaguucaaccaccuggagaagagaaucgagaaccugaacaagaagguggacgacggcuuccuggacaucuggaccuacaacgccgagcugcuggugcugcuggagaacgagagaacccuggacuaccacgacagcaacgugaagaaccuguacgagaaggugagaagccagcugaagaacaacgccaaggagaucggcaacggcugcuucgaguucuaccacaagugcgacaacaccugcauggagagcgugaagaacggcaccuacgacuaccccaaguacagcgaggaggccaagcugaacagagaggagaucgacggcgugaagcuggagagcaccagaaucuaccagauccuggccaucuacagcaccguggccagcagccuggugcugguggugagccugggcgccaucagcuucuggaugugcagcaacggcagccugcagugcagaaucugcaucuga

SEQ ID NO: 163530 - RNA, 1701 nt, Artificial Sequence; identical to SEQ ID NO: 163527
  derived and/or modified CDS sequence (opt4) from hemagglutinin__InfluenzaA__ACX47371

SEQ ID NO: 163531 - RNA, 1701 nt, Artificial Sequence; identical to SEQ ID NO: 163527
  derived and/or modified CDS sequence (opt4) from hemagglutinin__InfluenzaA__ACX47372

SEQ ID NO: 163532 - RNA, 1701 nt, Artificial Sequence; identical to SEQ ID NO: 163527
  derived and/or modified CDS sequence (opt4) from hemagglutinin__InfluenzaA__ACX47373

SEQ ID NO: 163533 - RNA, 1701 nt, Artificial Sequence; identical to SEQ ID NO: 163527
  derived and/or modified CDS sequence (opt4) from hemagglutinin__InfluenzaA__ACX47374

SEQ ID NO: 163534 - RNA, 1701 nt, Artificial Sequence
  derived and/or modified CDS sequence (opt4) from hemagglutinin__InfluenzaA__ACX47375
augaaggccauccugguggugcugcuguacaccuucgccaccgccaacgccgacacccugugcaucggcuaccacgccaacaacagcaccgacaccguggacaccgugcuggagaagaacgugaccgugacccacagcgugaaccugcuggaggacaagcacaacggcaagcugugcaagcugagaggcguggccccccugcaccugggcaagugcaacaucgccggcuggauccugggcaaccccgagugcgagagccugagcaccgccagcagcuggagcuacaucguggagaccagcagcagcgacaacggcaccugcuaccccggcgacuucaucgacuacgaggagcugagagagcagcugagcagcgugagcagcuucgagagauucgagaucuuccccaagaccagcagcuggcccaaccacgaccccaacaagggcgugaccgccgccugcccccacgccggcgccaagagcuucuacaagaaccugaucuggcuggugaagaagggcaacagcuaccccaagcugagcaagagcuacaucaacgacaagggcaaggaggugcuggugcuguggggcauccaccaccccagcaccagcgccgaccagcagagccuguaccagaacgccgacgccuacguguucgugggcaccagcagauacagcaagaaguucaagcccgagaucgccaucagacccaaggugagagaccaggagggcagaaugaacuacuacuggacccugguggagcccggcgacaagaucaccuucgaggccaccggcaaccugguggugcccagauacgccuucgccauggagagaaacgccggcagcggcaucaucaucagcgacacccccgugcacgacugcaacaccaccugccagacccccaacggcgccaucaacaccagccugcccuuccagaacauccaccccaucaccaucggcaagugccccaaguacgugaagagcaccaagcugagacuggccaccggccugagaaacgugcccagcauccagagcagaggccuguucggcgccaucgccggcuucaucgagggcggcuggaccggcaugguggacggcugguacggcuaccaccaccagaacgagcagggcagcggcuacgccgccgaccugaagagcacccagaacgccaucgacgagaucaccaacaaggugaacagcgugaucgagaagaugaacacccaguucaccgccgugggcaaggaguucaaccaccuggagaagagaaucgagaaccugaacaagaagguggacgacggcuuccuggacaucuggaccuacaacgccgagcugcuggugcugcuggagaacgagagaacccuggacuaccacgacagcaacgugaagaaccuguacgagaaggugagaagccagcugaagaacaacgccaaggagaucggcaacggcugcuucgaguucuaccacaagugcgacaacaccugcauggagagcgugaagaacggcaccuacgacuaccccaaguacagcgaggaggccaagcugaacagagaggagaucgacggcgugaagcuggagagcaccagaaucuaccagauccuggccaucuacagcaccguggccagcagccuggugcugguggugagccugggcgccaucagcuucuggaugugcagcaacggcagccugcagugcagaaucugcaucuga

SEQ ID NO: 163535 - RNA, 1701 nt, Artificial Sequence; identical to SEQ ID NO: 163527
  derived and/or modified CDS sequence (opt4) from hemagglutinin__InfluenzaA__ACX47376

SEQ ID NO: 163536 - RNA, 1701 nt, Artificial Sequence; identical to SEQ ID NO: 163527
  derived and/or modified CDS sequence (opt4) from hemagglutinin__InfluenzaA__ACX47377

SEQ ID NO: 163537 - RNA, 1701 nt, Artificial Sequence
  derived and/or modified CDS sequence (opt4) from hemagglutinin__InfluenzaA__ACX47380
augaaggccauccugguggugcugcuguacaccuucgccaccgccaacgccgacacccugugcaucggcuaccacgccaacaacagcaccgacaccguggacaccgugcuggagaagaacgugaccgugacccacagcgugaaccugcuggaggacaagcacaacggcaagcugugcaagcugagaggcguggccccccugcaccugggcaagugcaacaucgccggcuggauccugggcaaccccgagugcgagagccugagcaccaccagcagcuggagcuacaucguggagaccagcagcagcgacaacggcaccugcuaccccggcgacuucaucgacuacgaggagcugagagagcagcugagcagcgugagcagcuucgagagauucgagaucuuccccaagaccagcagcuggcccaaccacgacagcaacaagggcgugaccgccgccugcccccacgccggcgccaagagcuucuacaagaaccugaucuggcuggugaagaagggcaacagcuaccccaagcugagcaagagcuacaucaacgacaagggcaaggaggugcuggugcuguggggcauccaccaccccagcaccagcgccgaccagcagagccuguaccagaacgccgacgccuacguguucgugggcaccagcagauacagcaagaaguucaagcccgagaucgccaucagacccaaggugagagaccaggagggcagaaugaacuacuacuggacccugguggagcccggcgacaagaucaccuucgaggccaccggcaaccugguggugcccagauacgccuucgugauggagagaaacgccggcagcggcaucaucaucagcgacacccccgugcacgacugcaacaccaccugccagacccccaagggcgccaucaacaccagccugcccuuccagaacauccaccccaucaccaucggcaagugccccaaguacgugaagagcaccaagcugagacuggccaccggccugagaaacgugcccagcauccagagcagaggccuguucggcgccaucgccggcuucaucgagggcggcuggaccggcaugguggacggcugguacggcuaccaccaccagaacgagcagggcagcggcuacgccgccgaccugaagagcacccagaacgccaucgacgagaucaccaacaaggugaacagcgugaucgagaagaugaacacccaguucaccgccgugggcaaggaguucaaccaccuggagaagagaaucgagaaccugaacaagaagguggacgacggcuuccuggacaucuggaccuacaacgccgagcugcuggugcugcuggagaacgagagaacccuggacuaccacgacagcaacgugaagaaccuguacgagaaggugagaagccagcugaagaacaacgccaaggagaucggcaacggcugcuucgaguucuaccacaagugcgacaacaccugcauggagagcgugaagaacggcaccuacgacuaccccaaguacagcgaggaggccaagcugaacagagaggagaucgacggcgugaagcuggagagcaccagaaucuaccagauccuggccaucuacagcaccguggccagcagccuggugcugguggugagccugggcgccaucagcuucuggaugugcagcaacggcagccugcagugcagaaucugcaucuga

SEQ ID NO: 163538 - RNA, 1701 nt, Artificial Sequence; identical to SEQ ID NO: 163537
  derived and/or modified CDS sequence (opt4) from hemagglutinin__InfluenzaA__ACX47381

SEQ ID NO: 163539 - RNA, 1701 nt, Artificial Sequence; identical to SEQ ID NO: 163537
  derived and/or modified CDS sequence (opt4) from hemagglutinin__InfluenzaA__ACX47382

SEQ ID NO: 163540 - RNA, 1701 nt, Artificial Sequence
  derived and/or modified CDS sequence (opt4) from hemagglutinin__InfluenzaA__ACX47383
augaaggccauccugguggugcugcuguacaccuucgccaccgccaacgccgacacccugugcaucggcuaccacgccaacaacagcaccgacaccguggacaccgugcuggagaagaacgugaccgugacccacagcgugaaccugcuggaggacaagcacaacggcaagcugugcaagcugagaggcguggccccccugcaccugggcaagugcaacaucgccggcuggauccugggcaaccccgagugcgagagccugagcaccaccagcagcuggagcuacaucguggagaccagcagcagcgacaacggcaccugcuaccccggcgacuucaucgacuacgaggagcugagagagcagcugagcagcgugagcagcuucgagagauucgagaucuuccccaagaccagcagcuggcccaaccacgacagcaacaagggcgugaccgccgccugcccccacgccggcgccaagagcuucuacaagaaccugaucuggcuggugaagaagggcaacagcuaccccaagcugagcaagagcuacaucaacgacaagggcaaggaggugcuggugcuguggggcauccaccaccccagcaccagcgccgaccagcagagccuguaccagaacgccgacgccuacguguucgugggcaccagcagauacagcaagaaguucaagcccgagaucgccaucagacccaaggugagagaccaggagggcagaaugaacuacuacuggacccugguggagcccggcgacaagaucaccuucgaggccaccggcaaccugguggugcccagauacgccuucgccauggagagaaacgccggcagcggcaucaucaucagcgacacccccgugcacgacugcaacaccaccugccagacccccaagggcgccaucaacaccagccugcccuuccagaacauccaccccaucaccaucggcaagugccccaaguacgugaagagcaccaagcugagacuggccaccggccugagaaacgugcccagcauccagagcagaggccuguucggcgccaucgccggcuucaucgagggcggcuggaccggcaugguggacggcugguacggcuaccaccaccagaacgagcagggcagcggcuacgccgccgaccugaagagcacccagaacgccaucgacgagaucaccaacaaggugaacagcgugaucgagaagaugaacacccaguucaccgccgugggcaaggaguucaaccaccuggagaagagaaucgagaaccugaacaagaagguggacgacggcuuccuggacaucuggaccuacaacgccgagcugcuggugcugcuggagaacgagagaacccuggacuaccacgacagcaacgugaagaaccuguacgagaaggugagaagccagcugaagaacaacgccaaggagaucggcaacggcugcuucgaguucuaccacaagugcgacaacaccugcauggagagcgugaagaacggcaccuacgacuaccccaaguacagcgaggaggccaagcugaacagagagaagaucgacggcgugaagcuggagagcaccagaaucuaccagauccuggccaucuacagcaccguggccagcagccuggugcugguggugagccugggcgccaucagcuucuggaugugcagcaacggcagccugcagugcagaaucugcaucuga

SEQ ID NO: 163541 - RNA, 1701 nt, Artificial Sequence
  derived and/or modified CDS sequence (opt4) from hemagglutinin__InfluenzaA__ACX47384
augaaggccauccugguggugcugcuguacaccuucgccaccgccaacgccgacacccugugcaucggcuaccacgccaacaacagcaccgacaccguggacaccgugcuggagaagaacgugaccgugacccacagcgugaaccugcuggaggacaagcacaacggcaagcugugcaagcugagaggcguggccccccugcaccugggcaagugcaacaucgccggcuggauccugggcaaccccgagugcgagagccugagcaccaccagcagcuggagcuacaucguggagaccagcagcagcgacaacggcaccugcuaccccggcgacuucaucgacuacgaggagcugagagagcagcugagcagcgugagcagcuucgagagauucgagaucuuccccaagaccagcagcuggcccaaccacgacagcaacaagggcgugaccgccgccugcccccacgccggcgccaagagcuucuacaagaaccugaucuggcuggugaagaagggcaacagcuaccccaagcugagcaagagcuacaucaacgacaagggcaaggaggugcuggugcuguggggcauccaccaccccagcaccagcgccgaccagcagagccuguaccagaacgccgacgccuacguguucgugggcaccagcagauacagcaagaaguucaagcccgagaucgccaucagacccaaggugagagaccaggagggcagaaugaacuacuacuggacccugguggagcccggcgacaagaucaccuucgaggccaccggcaaccugguggugcccagauacgccuucgccauggagagaaacgccggcagcggcaucaucaucagcgacacccccgugcacgacugcaacaccaccugccagacccccaagggcgccaucaacaccagccugcccuuccagaacauccaccccaucaccaucggcaagugccccaaguacgugaagagcaccaagcugagacuggccaccggccugagaaacgugcccagcauccagagcagaggccuguucggcgccaucgccggcuucaucgagggcggcuggaccggcaugguggacggcugguacggcuaccaccaccagaacgagcagggcagcggcuacgccgccgaccugaagagcacccagaacgccaucgacgagaucaccaacaaggugaacagcgugaucgagaagaugaacacccaguucaccgccgugggcaaggaguucaaccaccuggagaagagaaucgagaaccugaacaagaagguggacgacggcuuccuggacaucuggaccuacaacgccgagcugcuggugcugcuggagaacgagagaacccuggacuaccacgacagcaacgugaagaaccuguacgagaaggugagaagccagcugaagaacaacgccaaggagaucggcaacggcugcuucgaguucuaccacaagugcgacaacaccugcauggagagcgugaagaacggcaccuacgacuaccccaaguacagcgaggaggccaagcugaacagagaggagaucgacggcgugaagcuggagagcaccagaaucuaccagauccuggccaucuacagcaccguggccagcagccuggugcugguggugagccugggcgccaucagcuucuggaugugcagcaacggcagccugcagugcagaaucugcaucuga

SEQ ID NO: 163542 - RNA, 1701 nt, Artificial Sequence; identical to SEQ ID NO: 163541
  derived and/or modified CDS sequence (opt4) from hemagglutinin__InfluenzaA__ACX47385

SEQ ID NO: 163543 - RNA, 1701 nt, Artificial Sequence; identical to SEQ ID NO: 163541
  derived and/or modified CDS sequence (opt4) from hemagglutinin__InfluenzaA__ACX47387

SEQ ID NO: 163544 - RNA, 1701 nt, Artificial Sequence; identical to SEQ ID NO: 162729
  derived and/or modified CDS sequence (opt4) from hemagglutinin__InfluenzaA__ACX55834

SEQ ID NO: 163545 - RNA, 1701 nt, Artificial Sequence; identical to SEQ ID NO: 163527
  derived and/or modified CDS sequence (opt4) from hemagglutinin__InfluenzaA__ACX61574

SEQ ID NO: 163546 - RNA, 1701 nt, Artificial Sequence; identical to SEQ ID NO: 162729
  derived and/or modified CDS sequence (opt4) from hemagglutinin__InfluenzaA__ACX61575

SEQ ID NO: 163547 - RNA, 1701 nt, Artificial Sequence
  derived and/or modified CDS sequence (opt4) from hemagglutinin__InfluenzaA__ACX83577
augaaggccauccugguggugcugcuguacaccuucgccaccgccaacgccgacacccugugcaucggcuaccacgccaacaacagcaccgacaccguggacaccgugcuggagaagaacgugaccgugacccacagcgugaaccugcuggaggacaagcacaacggcaagcugugcaagcugagaggcguggccccccugcaccugggcaagugcaacaucgccggcuggauccugggcaaccccgagugcgagagcuucagcaccagcagcagcuggagcuacaucguggagaccagcagcagcgacaacggcaccugcuaccccggcgacuucaucgacuacgaggagcugagagagcagcugagcagcgugagcagcuucgagagauucgagaucuuccccaagaccagcagcuggcccaaccacgacagcaacaagggcgugaccgccgccugcccccacgccggcgccaagagcuucuacaagaaccugaucuggcuggugaagaagggcaacagcuaccccaagcugagcaagagcuacaucaacgacaagggcaaggaggugcuggugcuguggggcauccaccaccccagcaccagcgccgaccagcagagccuguaccagaacgccgacgccuacguguucgugggcaccagcagauacagcaagaaguucaagcccgagaucgccaucagacccaaggugagaggccaggagggcagaaugaacuacuacuggacccugguggagcccggcgacaagaucaccuucgaggccaccggcaaccugguggugcccagauacgccuucgccauggagagaaacgccggcagcggcaucaucaucagcgacacccccgugcacgacugcaacaccaccugccagacccccaagggcgccaucaacaccagccugcccuuccagaacauccaccccaucaccaucggcaagugccccaaguacgugaagagcaccaagcugagacuggccaccggccugagaaacgugcccagcauccagagcagaggccuguucggcgccaucgccggcuucaucgagggcggcuggaccggcaugguggacggcugguacggcuaccaccaccagaacgagcagggcagcggcuacgccgccgaccugaagagcacccagaacgccaucgacgagaucaccaacaaggugaacagcgugaucgagaagaugaacacccaguucaccgccgugggcaaggaguucaaccaccuggagaagagaaucgagaaccugaacaagaagguggacgacggcuuccuggacaucuggaccuacaacgccgagcugcuggugcugcuggagaacgagagaacccuggacuaccacgacagcaacgugaagaaccuguacgagaaggugagaagccagcugaagaacaacgccaaggagaucggcaacggcugcuucgaguucuaccacaagugcgacaacaccugcauggagagcgugaagaacggcaccuacgacuaccccaaguacagcgaggaggccaagcugaacagagaggagaucgacggcgugaagcuggagagcaccagaaucuaccagauccuggccaucuacagcaccguggccagcagccuggugcugguggugagccugggcgccaucagcuucuggaugugcagcaacggcagccugcagugcagaaucugcaucuga

SEQ ID NO: 163548 - RNA, 1701 nt, Artificial Sequence
  derived and/or modified CDS sequence (opt4) from hemagglutinin__InfluenzaA__ACX94091
augaaggccauccugguggugcugcuguacaccuucgccaccgccaacgccgacacccugugcaucggcuaccacgccaacaacagcaccgacaccguggacaccgugcuggagaagaacgugaccgugacccacagcgugaaccugcuggaggacaagcacaacggcaagcugugcaagcugagaggcguggccccccugcaccugggcaagugcaacaucgccggcuggauccugggcaaccccgagugcgagagccugagcaccgccagcagcuggagcuacaucguggagaccagcagcagcgacaacggcaccugcuaccccggcgacuucaucgacuacgaggagcugagagagcagcugagcagcgugagcagcuucgagagauucgagaucuuccccaagaccaucagcuggcccaaccacgacagcaacaagggcgugaccgccgccugcccccacgccggcgccaagagcuucuacaagaaccugaucuggcuggugaagaagggcaacagcuaccccaagcugagcaagagcuacaucaacgacaagggcaaggaggugcuggugcuguggggcauccaccaccccagcaccagcgccgaccagcagagccuguaccagaacgccgacgccuacguguucgugggcaccagcagauacagcaagaaguucaagcccgagaucgccaucagacccaaggugagagaccaggagggcagaaugaacuacuacuggacccugguggagcccggcgacaagaucaccuucgaggccaccggcaaccugguggugcccagauacgccuucgccauggagagaaacgccggcagcggcaucaucaucagcgacacccccgugcacgacugcaacaccaccugccagacccccaagggcgccaucaacaccagccugcccuuccagaacauccaccccaucaccaucggcaagugcagcaaguacgugaagagcaccaagcugagacuggccaccggccugagaaacgugcccagcauccagagcagaggccuguucggcgccaucgccggcuucaucgagggcggcuggaccggcaugguggacggcugguacggcuaccaccaccagaacgagcagggcagcggcuacgccgccgaccugaagagcacccagaacgccaucgacgagaucaccaacaaggugaacagcgugaucgagaagaugaacacccaguucaccgccgugggcaaggaguucaaccaccuggagaagagaaucgagaaccugaacaagaagguggacgacggcuuccuggacaucuggaccuacaacgccgagcugcuggugcugcuggagaacgagagaacccuggacuaccacgacagcaacgugaagaaccuguacgagaaggugagaagccagcugaagaacaacgccaaggagaucggcaacggcugcuucgaguucuaccacaagugcgacaacaccugcauggagagcgugaagaacggcaccuacgacuaccccaaguacagcgaggaggccaagcugaacagagaggagaucgacggcgugaagcuggagagcaccagaaucuaccagauccuggccaucuacagcaccguggccagcagccuggugcugguggugagccugggcgccaucagcuucuggaugugcagcaacggcagccugcagugcagaaucugcaucuga

SEQ ID NO: 163549 - RNA, 1701 nt, Artificial Sequence
  derived and/or modified CDS sequence (opt4) from hemagglutinin__InfluenzaA__ACY26192
augaaggccauccugguggugcugcuguacaccuucgccaccgccaacgccgacacccugugcaucggcuaccacgccaacaacagcaccgacaccguggacaccgugcuggagaagaacgugaccgugacccacagcgugaaccugcuggaggacaagcacaacggcaagcugugcaagcugagaggcguggccccccugcaccugggcaagugcaacaucgccggcuggauccugggcaaccccgagugcgagagccugagcaccgccagcagcuggagcuacaucguggagaccagcagcagcgacaacggcaccugcuaccccggcgacuucaucgacuacgaggagcugagagagcagcugagcagcgugagcagcuucgagagauucgagaucuuccccaagaccagcagcuggcccaaccacgacagcaacaagggcgugaccgccgccugcccccacgccggcgccaagagcuucuacaagaaccugaucuggcuggugaagaagggcaacagcuaccccaagcugagcaagagcuacaucaacgacaagggcaaggaggugcuggugcuguggggcauccaccaccccagcaccagcgccgaccagcagagccuguaccagaacgccgacgccuacguguucgugggcaccagcagauacagcaagaaguucaagcccgagaucgccaucagacccaaggugagagaccaggagggcagaaugaacuacuacuggacccugguggagcccggcgacaagaucaccuucgaggccaccggcaaccugguggugcccagauacgccuucgccauggagagaaacgccggcagcggcaucaucaucagcgacacccccgugcacaacugcaacaccaccugccagacccccaagggcgccaucaacaccagccugcccuuccagaacauccaccccaucaccaucggcaagugccccaaguacgugaagagcaccaagcugagacuggccaccggccugagaaacgugcccagcauccagagcagaggccuguucggcgccaucgccggcuucaucgagggcggcuggaccggcaugguggacggcugguacggcuaccaccaccagaacgagcagggcagcggcuacgccgccgaccugaagagcacccaggacgccaucgacgagaucaccaacaaggugaacagcgugaucgagaagaugaacacccaguucaccgccgugggcaaggaguucaaccaccuggagaagagaaucgagaaccugaacaagaagguggacgacggcuuccuggacaucuggaccuacaacgccgagcugcuggugcugcuggagaacgagagaacccuggacuaccacgacagcaacgugaagaaccuguacgagaaggugagaagccagcugaagaacaacgccaaggagaucggcaacggcugcuucgaguucuaccacaagugcgacaacaccugcauggagagcgugaagaacggcaccuacgacuaccccaaguacagcgaggaggccaagcugaacagagaggagaucgacggcgugaagcuggagagcaccagaaucuaccagauccuggccaucuacagcaccguggccagcagccuggugcugguggugagccugggcgccaucagcuucuggaugugcagcaacggcagccugcagugcagaaucugcaucuga

SEQ ID NO: 163550 - RNA, 1701 nt, Artificial Sequence; identical to SEQ ID NO: 163298
  derived and/or modified CDS sequence (opt4) from hemagglutinin__InfluenzaA__ACY26202

SEQ ID NO: 163551 - RNA, 1701 nt, Artificial Sequence; identical to SEQ ID NO: 162729
  derived and/or modified CDS sequence (opt4) from hemagglutinin__InfluenzaA__ACY46103

SEQ ID NO: 163552 - RNA, 1701 nt, Artificial Sequence; identical to SEQ ID NO: 162729
  derived and/or modified CDS sequence (opt4) from hemagglutinin__InfluenzaA__ACY46113

SEQ ID NO: 163553 - RNA, 1701 nt, Artificial Sequence
  derived and/or modified CDS sequence (opt4) from hemagglutinin__InfluenzaA__ACY46123
augaaggccauccugguggugcugcuguacaccuucgccaccgccaacgccgacacccugugcaucggcuaccacgccaacaacagcaccgacaccguggacaccgugcuggagaagaacgugaccgugacccacagcgugaaccugcuggaggacaagcacaacggcaagcugugcaagcugagaggcguggccccccugcaccugggcaagugcaacaucgccggcuggauccugggcaaccccgagugcgagagccugagcaccgccagcagcuggagcuacaucguggagaccagcagcagcgacaacggcaccugcuaccccggcgacuucaucgacuacgaggagcugagagagcagcugagcagcgugagcagcuucgagagauucgagaucuuccccaagaccagcagcuggcccaaccacgacagcaacaagggcgugaccgccgccugcccccacgccggcgccaagagcuucuacaagaaccugaucuggcuggugaagaagggcaacagcuaccccaagcugagcaagagcuacaucaacgacaagggcaaggaggugcuggugcuguggggcauccaccaccccagcaccagcgccgaccagcagagccuguaccagaacgccgacgccuacguguucgugggcaccagcagauacagcaagaaguucaagcccgagaucgccaucagacccaaggugggcgaccaggagggcagaaugaacuacuacuggacccugguggagcccggcgacaagaucaccuucgaggccaccggcaaccugguggugcccagauacgccuucgccauggagagaaacgccggcagcggcaucaucaucagcgacacccccgugcacgacugcaacaccaccugccagacccccaagggcgccaucaacaccagccugcccuuccagaacauccaccccaucaccaucggcaagugccccaaguacgugaagagcaccaagcugagacuggccaccggccugagaaacgugcccagcauccagagcagaggccuguucggcgccaucgccggcuucaucgagggcggcuggaccggcaugguggacggcugguacggcuaccaccaccagaacgagcagggcagcggcuacgccgccgaccugaagagcacccagaacgccaucgacgagaucaccaacaaggugaacagcgugaucgagaagaugaacacccaguucaccgccgugggcaaggaguucaaccaccuggagaagagaaucgagaaccugaacaagaagguggacgacggcuuccuggacaucuggaccuacaacgccgagcugcuggugcugcuggagaacgagagaacccuggacuaccacgacagcaacgugaagaaccuguacgagaaggugagaagccagcugaagaacaacgccaaggagaucggcaacggcugcuucgaguucuaccacaagugcgacaacaccugcauggagagcgugaagaacggcaccuacgacuaccccaaguacagcgaggaggccaagcugaacagagaggagaucgacggcgugaagcuggagagcaccagaaucuaccagauccuggccaucuacagcaccguggccagcagccuggugcugguggugagccugggcgccaucagcuucuggaugugcagcaacggcagccugcagugcagaaucugcaucuga

SEQ ID NO: 163554 - RNA, 1701 nt, Artificial Sequence; identical to SEQ ID NO: 162729
  derived and/or modified CDS sequence (opt4) from hemagglutinin__InfluenzaA__ACY46133

SEQ ID NO: 163555 - RNA, 1701 nt, Artificial Sequence; identical to SEQ ID NO: 162729
  derived and/or modified CDS sequence (opt4) from hemagglutinin__InfluenzaA__ACY46163

SEQ ID NO: 163556 - RNA, 1701 nt, Artificial Sequence
  derived and/or modified CDS sequence (opt4) from hemagglutinin__InfluenzaA__ACY46173
augaaggccauccugguggugcugcuguacaccuucgccaccgccaacgccgacacccugugcaucggcuaccacgccaacaacagcaccgacaccguggacaccgugcuggagaagaacgugaccgugacccacagcgugaaccugcuggaggacaagcacaacggcaagcugugcaagcugagaggcguggccccccugcaccugggcaagugcaacaucgccggcuggauccugggcaaccccgagugcgagagccugagcaccgccagcagcuggagcuacaucguggagaccagcagcagcgacaacggcaccugcuaccccggcgacuucaucgacuacgaggagcugagagagcagcugagcagcgugagcagcuucgagagauucgagaucuuccccaagaccagcagcuggcccaaccacgacagcaacaagggcgugaccgccgccugcccccacgccggcgccaagagcuucuacaagaaccugaucuggcuggugaagaagggcaacagcuaccccaagcugagcaagagcuacaucaacgacaagggcaaggaggugcuggugcuguggggcauccaccaccccagcaccagcgccgaccagcagagccuguaccagaacgccgacgccuacguguucgugggcagcagcaaguacagcaagaaguucaagcccgagaucgccaucagacccaaggugagagaccaggagggcagaaugaacuacuacuggacccugguggagcccggcgacaagaucaccuucgaggccaccggcaaccugguggugcccagauacgccuucgccauggagagaaacgccggcagcggcaucaucaucagcgacacccccgugcacgacugcaacaccaccugccagacccccaagggcgccaucaacaccagccugcccuuccagaacauccaccccaucaccaucggcaagugccccaaguacgugaagagcaccaagcugagacuggccaccggccugagaaacgugcccagcauccagagcagaggccuguucggcgccaucgccggcuucaucgagggcggcuggaccggcaugguggacggcugguacggcuaccaccaccagaacgagcagggcagcggcuacgccgccgaccugaagagcacccagaacgccaucgacgagaucaccaacaaggugaacagcgugaucgagaagaugaacacccaguucaccgccgugggcaaggaguucaaccaccuggagaagagaaucgagaaccugaacaagaagguggacgacggcuuccuggacaucuggaccuacaacgccgagcugcuggugcugcuggagaacgagagaacccuggacuaccacgacagcaacgugaagaaccuguacgagaaggugagaagccagcugaagaacaacgccaaggagaucggcaacggcugcuucgaguucuaccacaagugcgacaacaccugcauggagagcgugaagaacggcaccuacgacuaccccaaguacagcgaggaggccaagcugaacagagaggagaucgacggcgugaagcuggagagcaccagaaucuaccagauccuggccaucuacagcaccguggccagcagccuggugcugguggugagccugggcgccaucagcuucuggaugugcagcaacggcagccugcagugcagaaucugcaucuga

SEQ ID NO: 163557 - RNA, 1701 nt, Artificial Sequence; identical to SEQ ID NO: 162729
  derived and/or modified CDS sequence (opt4) from hemagglutinin__InfluenzaA__ACY46213

SEQ ID NO: 163558 - RNA, 1701 nt, Artificial Sequence; identical to SEQ ID NO: 162729
  derived and/or modified CDS sequence (opt4) from hemagglutinin__InfluenzaA__ACY46223

SEQ ID NO: 163559 - RNA, 1701 nt, Artificial Sequence; identical to SEQ ID NO: 162729
  derived and/or modified CDS sequence (opt4) from hemagglutinin__InfluenzaA__ACY46233

SEQ ID NO: 163560 - RNA, 1701 nt, Artificial Sequence; identical to SEQ ID NO: 162729
  derived and/or modified CDS sequence (opt4) from hemagglutinin__InfluenzaA__ACY46243

SEQ ID NO: 163561 - RNA, 1701 nt, Artificial Sequence; identical to SEQ ID NO: 162729
  derived and/or modified CDS sequence (opt4) from hemagglutinin__InfluenzaA__ACY46253

SEQ ID NO: 163562 - RNA, 1701 nt, Artificial Sequence; identical to SEQ ID NO: 162729
  derived and/or modified CDS sequence (opt4) from hemagglutinin__InfluenzaA__ACY46263

SEQ ID NO: 163563 - RNA, 1701 nt, Artificial Sequence; identical to SEQ ID NO: 162729
  derived and/or modified CDS sequence (opt4) from hemagglutinin__InfluenzaA__ACY46273

SEQ ID NO: 163564 - RNA, 1701 nt, Artificial Sequence; identical to SEQ ID NO: 162729
  derived and/or modified CDS sequence (opt4) from hemagglutinin__InfluenzaA__ACY46283

SEQ ID NO: 163565 - RNA, 1701 nt, Artificial Sequence
  derived and/or modified CDS sequence (opt4) from hemagglutinin__InfluenzaA__ACY46293
augaaggccauccugguggugcugcuguacaccuucgccaccgccaacgccgacacccugugcaucggcuaccacgccaacaacagcaccgacaccguggacaccgugcuggagaagaacgugaccgugacccacagcgugaaccugcuggaggacaagcacaacggcaagcugugcaagcugagaggcguggccccccugcaccugggcaagugcaacaucgccggcuggauccugggcaaccccgagugcgagagccugagcaccgccagcagcuggagcuacaucguggagaccagcagcagcgacaacggcaccugcuaccccggcgacuucaucgacuacgaggagcugagagagcagcugagcagcgugagcagcuucgagagauucgagaucuuccccaagaccagcagcuggcccaaccacgacagcaacaagggcgugaccgccgccugcccccacgccggcgccaagagcuucuacaagaaccugaucuggcuggugaagaagggcaacagcuaccccaagcugagcaagagcuacaucaacgacaagggcaaggaggugcuggugcuguggggcauccaccaccccagcaccagcgccgaccagcagagccuguaccagaacgccgacgccuacguguucgugggcaccagcagauacagcaagaaguucaagcccgagaucgccaucagacccaaggugagagaccaggagggcagaaugaacuacuacuggacccugguggagcccggcgacaagaucaccuucgaggccaccggcaaccugguggugcccagauacgccuucgccauggagagaaacgccggcagcggcaucaucaucagcgacacccccgugcacgacugcaacaccaccugccagacccccaagggcgccaucaacaccagccugcccuuccagaacauccaccccaucaccaucggcaagugccccaaguacgugaagagcaccaagcugagacuggccgccggccugagaaacgugcccagcauccagagcagaggccuguucggcgccaucgccggcuucaucgagggcggcuggaccggcaugguggacggcugguacggcuaccaccaccagaacgagcagggcagcggcuacgccgccgaccugaagagcacccagaacgccaucgacgagaucaccaacaaggugaacagcgugaucgagaagaugaacacccaguucaccgccgugggcaaggaguucaaccaccuggagaagagaaucgagaaccugaacaagaagguggacgacggcuuccuggacaucuggaccuacaacgccgagcugcuggugcugcuggagaacgagagaacccuggacuaccacgacagcaacgugaagaaccuguacgagaaggugagaagccagcugaagaacaacgccaaggagaucggcaacggcugcuucgaguucuaccacaagugcgacaacaccugcauggagagcgugaagaacggcaccuacgacuaccccaaguacagcgaggaggccaagcugaacagagaggagaucgacggcgugaagcuggagagcaccagaaucuaccagauccuggccaucuacagcaccguggccagcagccuggugcugguggugagccugggcgccaucagcuucuggaugugcagcaacggcagccugcagugcagaaucugcaucuga

SEQ ID NO: 163566 - RNA, 1701 nt, Artificial Sequence; identical to SEQ ID NO: 162729
  derived and/or modified CDS sequence (opt4) from hemagglutinin__InfluenzaA__ACY46303

SEQ ID NO: 163567 - RNA, 1701 nt, Artificial Sequence; identical to SEQ ID NO: 162729
  derived and/or modified CDS sequence (opt4) from hemagglutinin__InfluenzaA__ACY46313

SEQ ID NO: 163568 - RNA, 1701 nt, Artificial Sequence; identical to SEQ ID NO: 162729
  derived and/or modified CDS sequence (opt4) from hemagglutinin__InfluenzaA__ACY46323

SEQ ID NO: 163569 - RNA, 1701 nt, Artificial Sequence; identical to SEQ ID NO: 162729
  derived and/or modified CDS sequence (opt4) from hemagglutinin__InfluenzaA__ACY46343

SEQ ID NO: 163570 - RNA, 1701 nt, Artificial Sequence; identical to SEQ ID NO: 162729
  derived and/or modified CDS sequence (opt4) from hemagglutinin__InfluenzaA__ACY46353

SEQ ID NO: 163571 - RNA, 1701 nt, Artificial Sequence
  derived and/or modified CDS sequence (opt4) from hemagglutinin__InfluenzaA__ACY46373
augaaggccauccugaucgugcugcuguacaccuucgccaccgccaacgccgacacccugugcaucggcuaccacgccaacaacagcaccgacaccguggacaccgugcuggagaagaacgugaccgugacccacagcgugaaccugcuggaggacaagcacaacggcaagcugugcaagcugagaggcguggccccccugcaccugggcaagugcaacaucgccggcuggauccugggcaaccccgagugcgagagccugagcaccgccagcagcuggagcuacaucguggagaccagcagcagcgacaacggcaccugcuaccccggcgacuucaucgacuacgaggagcugagagagcagcugagcagcgugagcagcuucgagagauucgagaucuuccccaagaccagcagcuggcccaaccacgacagcaacaagggcgugaccgccgccugcccccacgccggcgccaagagcuucuacaagaaccugaucuggcuggugaagaagggcaacagcuaccccaagcugagcaagagcuacaucaacgacaagggcaaggaggugcuggugcuguggggcauccaccaccccagcaccagcgccgaccagcagagccuguaccagaacgccgacgccuacguguucgugggcaccagcagauacagcaagaaguucaagcccgagaucgccaucagacccaaggugagagaccaggagggcagaaugaacuacuacuggacccugguggagcccggcgacaagaucaccuucgaggccaccggcaaccugguggugcccagauacgccuucgccauggagagaaacgccggcagcggcaucaucaucagcgacacccccgugcacgacugcaacaccaccugccagacccccaagggcgccaucaacaccagccugcccuuccagaacauccaccccaucaccaucggcaagugccccaaguacgugaagagcaccaagcugagacuggccaccggccugagaaacgugcccagcauccagagcagaggccuguucggcgccaucgccggcuucaucgagggcggcuggaccggcaugguggacggcugguacggcuaccaccaccagaacgagcagggcagcggcuacgccgccgaccugaagagcacccagaacgccaucgacgagaucaccaacaaggugaacagcgugaucgagaagaugaacacccaguucaccgccgugggcaaggaguucaaccaccuggagaagagaaucgagaaccugaacaagaagguggacgacggcuuccuggacaucuggaccuacaacgccgagcugcuggugcugcuggagaacgagagaacccuggacuaccacgacagcaacgugaagaaccuguacgagaaggugagaagccagcugaagaacaacgccaaggagaucggcaacggcugcuucgaguucuaccacaagugcgacaacaccugcauggagagcgugaagaacggcaccuacgacuaccccaaguacagcgaggaggccaagcugaacagagaggagaucgacggcgugaagcuggagagcaccagaaucuaccagauccuggccaucuacagcaccguggccagcagccuggugcugguggugagccugggcgccaucagcuucuggaugugcagcaacggcagccugcagugcagaaucugcaucuga

SEQ ID NO: 163572 - RNA, 1701 nt, Artificial Sequence
  derived and/or modified CDS sequence (opt4) from hemagglutinin__InfluenzaA__ACY46383
augaaggccauccugguggugcugcuguacaccuucgccaccgccaacgccgacacccugugcaucggcuaccacgccaacaacagcaccgacaccguggacaccgugcuggagaagaacgugaccgugacccacagcgugaaccugcuggaggacaagcacaacggcaagcugugcaagcugagaggcguggccccccugcaccugggcaagugcaacaucgccggcuggauccugggcaaccccgagugcgagagccugagcaccgccagcagcuggagcuacaucguggagaccagcagcagcgacaacggcaccugcuaccccggcgacuucaucgacuacgaggagcugagagagcagcugagcagcgugagcagcuucgagagauucgagaucuuccccaagaccagcagcuggcccaaccacgacagcaacaagggcgugaccgccgccugcccccacgccggcgccaagagcuucuacaagaaccugaucuggcuggugaagaagggcaacagcuaccccaagcugagcaagagcuacaucaacgacaagggcaaggaggugcuggugcuguggggcauccaccaccccagcaccagcgccgaccagcagagccuguaccagaacgccgacgccuacguguucgugggcagcagcagauacagcaagaaguucaagcccgagaucgccaucagacccaaggugagagaccaggagggcagaaugaacuacuacuggacccugguggagcccggcgacaagaucaccuucgaggccaccggcaaccugguggugcccagauacgccuucgccauggagagaaacgccggcagcggcaucaucaucagcgacacccccgugcacgacugcaacaccaccugccagacccccaagggcgccaucaacaccagccugcccuuccacaacauccaccccaucaccaucggcaagugccccaaguacgugaagagcaccaagcugagacuggccaccggccugagaaacgugcccagcauccagagcagaggccuguucggcgccaucgccggcuucaucgagggcggcuggaccggcaugguggacggcugguacggcuaccaccaccagaacgagcagggcagcggcuacgccgccgaccugaagagcacccagaacgccaucgacgagaucaccaacaaggugaacagcgugaucgagaagaugaacacccaguucaccgccgugggcaaggaguucaaccaccuggagaagagaaucgagaaccugaacaagaagguggacgacggcuuccuggacaucuggaccuacaacgccgagcugcuggugcugcuggagaacgagagaacccuggacuaccacgacagcaacgugaagaaccuguacgagaaggugagaagccagcugaagaacaacgccaaggagaucggcaacggcugcuucgaguucuaccacaagugcgacaacaccugcauggagagcgugaagaacggcaccuacgacuaccccaaguacagcgaggaggccaagcugaacagagaggagaucgacggcgugaagcuggagagcaccagaaucuaccagauccuggccaucuacagcaccguggccagcagccuggugcugguggugagccugggcgccaucagcuucuggaugugcagcaacggcagccugcagugcagaaucugcaucuga

SEQ ID NO: 163573 - RNA, 1701 nt, Artificial Sequence; identical to SEQ ID NO: 162729
  derived and/or modified CDS sequence (opt4) from hemagglutinin__InfluenzaA__ACY46393

SEQ ID NO: 163574 - RNA, 1701 nt, Artificial Sequence; identical to SEQ ID NO: 162729
  derived and/or modified CDS sequence (opt4) from hemagglutinin__InfluenzaA__ACY46403

SEQ ID NO: 163575 - RNA, 1701 nt, Artificial Sequence; identical to SEQ ID NO: 162729
  derived and/or modified CDS sequence (opt4) from hemagglutinin__InfluenzaA__ACY46413

SEQ ID NO: 163576 - RNA, 1701 nt, Artificial Sequence; identical to SEQ ID NO: 162729
  derived and/or modified CDS sequence (opt4) from hemagglutinin__InfluenzaA__ACY46433

SEQ ID NO: 163577 - RNA, 1701 nt, Artificial Sequence; identical to SEQ ID NO: 162729
  derived and/or modified CDS sequence (opt4) from hemagglutinin__InfluenzaA__ACY46443

SEQ ID NO: 163578 - RNA, 1701 nt, Artificial Sequence; identical to SEQ ID NO: 162729
  derived and/or modified CDS sequence (opt4) from hemagglutinin__InfluenzaA__ACY46453

SEQ ID NO: 163579 - RNA, 1701 nt, Artificial Sequence
  derived and/or modified CDS sequence (opt4) from hemagglutinin__InfluenzaA__ACY46463
augaaggccauccugguggugaugcuguacaccuucgccaccgccaacgccgacacccugugcaucggcuaccacgccaacaacagcaccgacaccguggacaccgugcuggagaagaacgugaccgugacccacagcgugaaccugcuggaggacaagcacaacggcaagcugugcaagcugagaggcguggccccccugcaccugggcaagugcaacaucgccggcuggauccugggcaaccccgagugcgagagccugagcaccgccagcagcuggagcuacaucguggagaccagcagcagcgacaacggcaccugcuaccccggcgacuucaucgacuacgaggagcugagagagcagcugagcagcgugagcagcuucgagagauucgagaucuuccccaagaccagcagcuggcccaaccacgacagcaacaagggcgugaccgccgccugcccccacgccggcgccaagagcuucuacaagaaccugaucuggcuggugaagaagggcaacagcuaccccaagcugagcaagagcuacaucaacgacaagggcaaggaggugcuggugcuguggggcauccaccaccccagcaccagcgccgaccagcagagccuguaccagaacgccgacgccuacguguucgugggcaccagcagauacagcaagaaguucaagcccgagaucgccaucagacccaaggugagagaccaggagggcagaaugaacuacuacuggacccugguggagcccggcgacaagaucaccuucgaggccaccggcaaccugguggugcccagauacgccuucgccauggugagaaacgccggcagcggcaucaucaucagcgacacccccgugcacgacugcaacaccaccugccagacccccaagggcgccaucaacaccagccugcccuuccagaacauccaccccaucaccaucggcaagugccccaaguacgugaagagcaccaagcugagacuggccaccggccugagaaacgugcccagcauccagagcagaggccuguucggcgccaucgccggcuucaucgagggcggcuggaccggcaugguggacggcugguacggcuaccaccaccagaacgagcagggcagcggcuacgccgccgaccugaagagcacccagaacgccaucgacgagaucaccaacaaggugaacagcgugaucgagaagaugaacacccaguucaccgccgugggcaaggaguucaaccaccuggagaagagaaucgagaaccugaacaagaagguggacgacggcuuccuggacaucuggaccuacaacgccgagcugcuggugcugcuggagaacgagagaacccuggacuaccacgacagcaacgugaagaaccuguacgagaaggugagaagccagcugaagaacaacgccaaggagaucggcaacggcugcuucgaguucuaccacaagugcgacaacaccugcauggagagcgugaagaacggcaccuacgacuaccccaaguacagcgaggaggccaagcugaacagagaggagaucgacggcgugaagcuggagagcaccagaaucuaccagauccuggccaucuacagcaccguggccagcagccuggugcugguggugagccugggcgccaucagcuucuggaugugcagcaacggcagccugcagugcagaaucugcaucuga

SEQ ID NO: 163580 - RNA, 1701 nt, Artificial Sequence; identical to SEQ ID NO: 162729
  derived and/or modified CDS sequence (opt4) from hemagglutinin__InfluenzaA__ACY46473

SEQ ID NO: 163581 - RNA, 1701 nt, Artificial Sequence; identical to SEQ ID NO: 162716
  derived and/or modified CDS sequence (opt4) from hemagglutinin__InfluenzaA__ACY46493

SEQ ID NO: 163582 - RNA, 1701 nt, Artificial Sequence
  derived and/or modified CDS sequence (opt4) from hemagglutinin__InfluenzaA__ACY46513
augaaggccauccugguggugcugcuguacaccuucgccaccgccaacgccgacacccugugcaucggcuaccacgccaacaacagcaccgacaccguggacaccgugcuggagaagaacgugaccgugacccacagcgugaaccugcuggaggacaagcacaacggcaagcugugcaagcugagaggcguggccccccugcaccugggcaagugcaacaucgccggcuggauccugggcaaccccgagugcgagagccugagcaccgccagcagcuggagcuacaucguggagaccagcagcagcgacaacggcaccugcuaccccggcgacuucaucgacuacgaggagcugagagagcagcugagcagcgugagcagcuucgagagauucgagaucuuccccaagaccagcagcuggcccaaccacgacagcaacaagggcgugaccgccgccugcccccacgccggcgccaagagcuucuacaagaaccugaucuggcuggugaagaagggcaacagcuaccccaagcugagcaagagcuacaucaacgacaagggcaaggaggugcuggugcuguggggcauccaccaccccagcaccagcgccgaccagcagagccuguaccagaacgccgacgccuacguguucgugggcagcagcaaguacagcaagaaguucaagcccgagaucgccaucagacccaaggugagagaccaggagggcagaaugaacuacuacuggacccugguggagcccggcgacaagaucaccuucgaggccaccggcaaccugguggugcccagauacgccuucgccauggagagaaacgccggcagcggcaucaucaucagcgacacccccgugcacgacugcaacaccaccugccagacccccaagggcgccaucaacaccagccugcccuuccagaacauccaccccaucaccaucggcaagugccccaaguacgugaagagcaccaagcugagacuggccaccggccugagaaacgugcccagcauccagagcagaggccuguucggcgccaucgccggcuucaucgagggcggcuggaccggcaugguggacggcugguacggcuaccaccaccagaacgagcagggcagcggcuacgccgccgaccugaagagcacccagaacgccaucgacgagaucaccaacaaggugaacagcgugaucgagaagaugaacacccaguucaccgccgugggcaaggaguucaaccaccuggagaagagaaucgagaaccugaacaagaagguggacgacggcuuccuggacaucuggaccuacaacgccgagcugcuggugcugcuggacaacgagagaacccuggacuaccacgacagcaacgugaagaaccuguacgagaaggugagaagccagcugaagaacaacgccaaggagaucggcaacggcugcuucgaguucuaccacaagugcgacaacaccugcauggagagcgugaagaacggcaccuacgacuaccccaaguacagcgaggaggccaagcugaacagagaggagaucgacggcgugaagcuggagagcaccagaaucuaccagauccuggccaucuacagcaccguggccagcagccuggugcugguggugagccugggcgccaucagcuucuggaugugcagcaacggcagccugcagugcagaaucugcaucuga

SEQ ID NO: 163583 - RNA, 1701 nt, Artificial Sequence; identical to SEQ ID NO: 162729
  derived and/or modified CDS sequence (opt4) from hemagglutinin__InfluenzaA__ACY46523

SEQ ID NO: 163584 - RNA, 1701 nt, Artificial Sequence; identical to SEQ ID NO: 162729
  derived and/or modified CDS sequence (opt4) from hemagglutinin__InfluenzaA__ACY46533

SEQ ID NO: 163585 - RNA, 1701 nt, Artificial Sequence; identical to SEQ ID NO: 162729
  derived and/or modified CDS sequence (opt4) from hemagglutinin__InfluenzaA__ACY46562

SEQ ID NO: 163586 - RNA, 1701 nt, Artificial Sequence; identical to SEQ ID NO: 162729
  derived and/or modified CDS sequence (opt4) from hemagglutinin__InfluenzaA__ACY46572

SEQ ID NO: 163587 - RNA, 1701 nt, Artificial Sequence; identical to SEQ ID NO: 162729
  derived and/or modified CDS sequence (opt4) from hemagglutinin__InfluenzaA__ACY46582

SEQ ID NO: 163588 - RNA, 1701 nt, Artificial Sequence; identical to SEQ ID NO: 162729
  derived and/or modified CDS sequence (opt4) from hemagglutinin__InfluenzaA__ACY46592

SEQ ID NO: 163589 - RNA, 1701 nt, Artificial Sequence; identical to SEQ ID NO: 162729
  derived and/or modified CDS sequence (opt4) from hemagglutinin__InfluenzaA__ACY46622

SEQ ID NO: 163590 - RNA, 1701 nt, Artificial Sequence
  derived and/or modified CDS sequence (opt4) from hemagglutinin__InfluenzaA__ACY46672
augaaggccauccugguggugcugcuguacaccuucgccaccgccaacgccgacacccugugcaucggcuaccacgccaacaacagcaccgacaccguggacaccgugcuggagaagaacgugaccgugacccacagcgugaaccugcuggaggacaagcacaacggcaagcugugcaagcugagaggcguggccccccugcaccugggcaagugcaacaucgccggcuggauccugggcaaccccgagugcgagagccugagcaccgccagcagcuggagcuacaucguggagaccagcagcagcgacaacggcaccugcuaccccggcgacuucaucgacuacgaggagcugagagagcagcugagcagcgugagcagcuucgagagauucgagaucuuccccaagaccagcagcuggcccaaccacgacagcaacaagggcgugaccgccgccugcccccacgccggcgccaagagcuucuacaagaaccugaucuggcuggugaagaagggcaacagcuaccccaagcugagcaagagcuacaucaacgacaagggcaaggaggugcuggugcuguggggcauccaccaccccagcaccagcgccgaccagcagagccuguaccagaacgccgacgccuacguguucgugggcaccagcagauacagcaagaaguucaagcccgagaucgccaucagacccaaggugagagaccaggagggcagaaugaacuacuacuggacccugguggagcccggcgacaagaucaccuucgaggccaccggcaaccugguggugcccagauacgccuucgccauggugagaaacgccggcagcggcaucaucaucagcgacacccccgugcacgacugcaacaccaccugccagacccccaagggcgccaucaacaccagccugcccuuccagaacauccaccccaucaccaucggcaagugccccaaguacgugaagagcaccaagcugagacuggccaccggccugagaaacgugcccagcauccagagcagaggccuguucggcgccaucgccggcuucaucgagggcggcuggaccggcaugguggacggcugguacggcuaccaccaccagaacgagcagggcagcggcuacgccgccgaccugaagagcacccagaacgccaucgacgagaucaccaacaaggugaacagcgugaucgagaagaugaacacccaguucaccgccgugggcaaggaguucaaccaccuggagaagagaaucgagaaccugaacaagaagguggacgacggcuuccuggacaucuggaccuacaacgccgagcugcuggugcugcuggagaacgagagaacccuggacuaccacgacagcaacgugaagaaccuguacgagaaggugagaagccagcugaagaacaacgccaaggagaucggcaacggcugcuucgaguucuaccacaagugcgacaacaccugcauggagagcgugaagaacggcaccuacgacuaccccaaguacagcgaggaggccaagcugaacagagaggagaucgacggcgugaagcuggagagcaccagaaucuaccagauccuggccaucuacagcaccguggccagcagccuggugcugguggugagccugggcgccaucagcuucuggaugugcagcaacggcagccugcagugcagaaucugcaucuga

SEQ ID NO: 163591 - RNA, 1701 nt, Artificial Sequence; identical to SEQ ID NO: 162729
  derived and/or modified CDS sequence (opt4) from hemagglutinin__InfluenzaA__ACY46682

SEQ ID NO: 163592 - RNA, 1701 nt, Artificial Sequence; identical to SEQ ID NO: 162729
  derived and/or modified CDS sequence (opt4) from hemagglutinin__InfluenzaA__ACY46692

SEQ ID NO: 163593 - RNA, 1701 nt, Artificial Sequence; identical to SEQ ID NO: 162729
  derived and/or modified CDS sequence (opt4) from hemagglutinin__InfluenzaA__ACY46712

SEQ ID NO: 163594 - RNA, 1701 nt, Artificial Sequence
  derived and/or modified CDS sequence (opt4) from hemagglutinin__InfluenzaA__ACY46722
augaaggccauccugguggugcugcuguacaccuucgccaccgccaacgccgacacccugugcaucggcuaccacgccaacaacagcaccgacaccguggacaccgugcuggagaagaacgugaccgugacccacagcgugaaccugcuggaggacaagcacaacggcaagcugugcaagcugagaggcguggccccccugcaccugggcaagugcaacaucgccggcuggauccugggcaaccccgagugcgagagccugagcaccgccagcagcuggagcuacaucguggagaccagcagcagcgacaacggcaccugcuaccccggcgacuucaucgacuacgaggagcugagagagcagcugagcagcgugagcagcuucgagagauucgagaucuuccccaagaccagcagcuggcccaaccacgacagcaacaagggcgugaccgccgccugcccccacgccggcgccaagagcuucuacaagaaccugaucuggcuggugaagaagggcaacagcuaccccaagcugagcaagagcuacaucaacgacaagggcaaggaggugcuggugcuguggggcauccaccaccccagcaccagcgccggccagcagagccuguaccagaacgccgacgccuacguguucgugggcaccagcagauacagcaagaaguucaagcccgagaucgccaucagacccaaggugagagaccaggagggcagaaugaacuacuacuggacccugguggagcccggcgacaagaucaccuucgaggccaccggcaaccugguggugcccagauacgccuucgccauggagagaaacgccggcagcggcaucaucaucagcgacacccccgugcacgacugcaacaccaccugccagacccccaagggcgccaucaacaccagccugcccuuccagaacauccaccccaucaccaucggcaagugccccaaguacgugaagagcaccaagcugagacuggccaccggccugagaaacgugcccagcauccagagcagaggccuguucggcgccaucgccggcuucaucgagggcggcuggaccggcaugguggacggcugguacggcuaccaccaccagaacgagcagggcagcggcuacgccgccgaccugaagagcacccagaacgccaucgacgagaucaccaacaaggugaacagcgugaucgagaagaugaacacccaguucaccgccgugggcaaggaguucaaccaccuggagaagagaaucgagaaccugaacaagaagguggacgacggcuuccuggacaucuggaccuacaacgccgagcugcuggugcugcuggagaacgagagaacccuggacuaccacgacagcaacgugaagaaccuguacgagaaggugagaagccagcugaagaacaacgccaaggagaucggcaacggcugcuucgaguucuaccacaagugcgacaacaccugcauggagagcgugaagaacggcaccuacgacuaccccaaguacagcgaggaggccaagcugaacagagaggagaucgacggcgugaagcuggagagcaccagaaucuaccagauccuggccaucuacagcaccguggccagcagccuggugcugguggugagccugggcgccaucagcuucuggaugugcagcaacggcagccugcagugcagaaucugcaucuga

SEQ ID NO: 163595 - RNA, 1701 nt, Artificial Sequence
  derived and/or modified CDS sequence (opt4) from hemagglutinin__InfluenzaA__ACY46742
augaaggccauccugguggugcugcuguacaccuucgccaccgccaacgccgacacccugugcaucggcuaccacgccaacaacagcaccgacaccguggacaccgugcuggagaagaacgugaccgugacccacagcgugaaccugcuggaggacaagcacaacggcaagcugugcaagcugagaggcguggccccccugcaccugggcaagugcaacaucgccggcuggauccugggcaaccccgagugcgagagccugagcaccgccagcagcuggagcuacaucguggagaccagcagcagcgacaacggcaccugcuaccccggcaacuucaucgacuacgaggagcugagagagcagcugagcagcgugagcagcuucgagagauucgagaucuuccccaagaccagcagcuggcccaaccacgacagcaacaagggcgugaccgccgccugcccccacgccggcgccaagagcuucuacaagaaccugaucuggcuggugaagaagggcaacagcuaccccaagcugagcaagagcuacaucaacgacaagggcaaggaggugcuggugcuguggggcauccaccaccccagcaccagcgccgaccagcagagccuguaccagaacgccgacgccuacguguucgugggcaccagcagauacagcaagaaguucaagcccgagaucgccaucagacccaaggugagagaccaggagggcagaaugaacuacuacuggacccugguggagcccggcgacaagaucaccuucgaggccaccggcaaccugguggugcccagauacgccuucgccauggagagaaacgccggcagcggcaucaucaucagcgacacccccgugcacgacugcaacaccaccugccagacccccaagggcgccaucaacaccagccugcccuuccagaacauccaccccaucaccaucggcaagugccccaaguacgugaagagcaccaagcugagacuggccaccggccugagaaacgugcccagcauccagagcagaggccuguucggcgccaucgccggcuucaucgagggcggcuggaccggcaugguggacggcugguacggcuaccaccaccagaacgagcagggcagcggcuacgccgccgaccugaagagcacccagaacgccaucgacgagaucaccaacaaggugaacagcgugaucgagaagaugaacacccaguucaccgccgugggcaaggaguucaaccaccuggagaagagaaucgagaaccugaacaagaagguggacgacggcuuccuggacaucuggaccuacaacgccgagcugcuggugcugcuggagaacgagagaacccuggacuaccacgacagcaacgugaagaaccuguacgagaaggugagaagccagcugaagaacaacgccaaggagaucggcaacggcugcuucgaguucuaccacaagugcgacaacaccugcauggagagcgugaagaacggcaccuacgacuaccccaaguacagcgaggaggccaagcugaacagagaggagaucgacggcgugaagcuggagagcaccagaaucuaccagauccuggccaucuacagcaccguggccagcagccuggugcugguggugagccugggcgccaucagcuucuggaugugcagcaacggcagccugcagugcagaaucugcaucuga

SEQ ID NO: 163596 - RNA, 1701 nt, Artificial Sequence; identical to SEQ ID NO: 162729
  derived and/or modified CDS sequence (opt4) from hemagglutinin__InfluenzaA__ACY46762

SEQ ID NO: 163597 - RNA, 1701 nt, Artificial Sequence; identical to SEQ ID NO: 162729
  derived and/or modified CDS sequence (opt4) from hemagglutinin__InfluenzaA__ACY46772

SEQ ID NO: 163598 - RNA, 1701 nt, Artificial Sequence; identical to SEQ ID NO: 162729
  derived and/or modified CDS sequence (opt4) from hemagglutinin__InfluenzaA__ACY46903

SEQ ID NO: 163599 - RNA, 1701 nt, Artificial Sequence; identical to SEQ ID NO: 162755
  derived and/or modified CDS sequence (opt4) from hemagglutinin__InfluenzaA__ACY77534

SEQ ID NO: 163600 - RNA, 1698 nt, Artificial Sequence
  derived and/or modified CDS sequence (opt4) from hemagglutinin__InfluenzaA__ACY77544
augaaggccauccugguggugaugcuguacaccuucgccaccgccaacgccgacacccugugcaucggcuaccacgccaacaacagcaccgacaccguggacaccgugcuggagaagaacgugaccgugacccacagcgugaaccugcuggaggacaagcacaacggcaagcugugcaagcugagaggcguggccccccugcaccugggcaagugcaacaucgccggcuggauccugggcaaccccgagugcgagagccugagcaccgccagcagcuggagcuacaucguggagaccagcagcagcgacaacggcaccugcuaccccggcgacuucaucgacuacgaggagcugagagagcagcugagcagcgugagcagcuucgagagauucgagaucuuccccaagaccagcagcuggcccaaccacgacagcaacaagggcgugaccgccgccugcccccacgccggcgccaagagcuucuacaagaaccugaucuggcuggugaagaagggcaacagcuaccccaagcugagcaagagcuacaucaacgacaagggcaaggaggugcuggugcuguggggcauccaccaccccagcaccagcgccgaccagcagagccuguaccagaacgccgacgccuacguguucgugggcagcagcagauacagcaagaaguucaagcccgagaucgccaucagacccaaggugagagaccaggagggcagaaugaacuacuacuggacccugguggagcccggcgacaagaucaccuucgaggccaccggcaaccugguggugcccagauacgccuucgccauggagagaaacgccggcagcggcaucaucaucagcgacaccaccgugcacgacugcaacaccaccugccagacccccaagggcgccaucaacaccagccugcccuuccagaacauccaccccaucaccaucggcaagugccccaaguacgugaagagcaccaagcugagacuggccaccggccugagaaacgugcccagcauccagagcagaggccuguucggcgccaucgccggcuucaucgagggcggcuggaccggcaugguggacggcugguacggcuaccaccaccagaacgagcagggcagcggcuacgccgccgaccugaagagcacccagaacgccaucgacgagaucaccaacaaggugaacagcgugaucgagaagaugaacacccaguucaccgccgugggcaaggaguucaaccaccuggagaagagaaucgagaaccugaacaagaagguggacgacggcuuccuggacaucuggaccuacaacgccgagcugcuggugcugcuggagaacgagagaacccuggacuaccacgacagcaacgugaagaaccuguacgagaaggugagaagccagcugaagaacaacgccaaggagaucggcaacggcugcuucgaguucuaccacaagugcgacaacaccugcauggagagcgugaagaacggcaccuacgacuaccccaaguacagcgaggaggccaagcugaacagagaggagaucgacggcgugaagcuggagagcaccagaaucuaccagauccuggccaucuacagcaccguggccagcagccuggugcugguggugagccugggcgccaucagcuucuggaugugcagcuggagccugcagugcagaaucugcaucuga

SEQ ID NO: 163601 - RNA, 1698 nt, Artificial Sequence
  derived and/or modified CDS sequence (opt4) from hemagglutinin__InfluenzaA__ACY77554
augaaggccauccugguggugcugcuguacaccuucgccaccgccaacgccgacacccugugcaucggcuaccacgccaacaacagcaccgacaccguggacaccgugcuggagaagaacgugaccgugacccacagcgugaaccugcuggaggacaagcacaacggcaagcugugcaagcugagaggcguggccccccugcaccugggcaagugcaacaucgccggcuggauccugggcaaccccgagugcgagagccugagcaccgccagcagcuggagcuacaucguggagaccagcagcagcgacaacggcaccugcuaccccggcgacuucaucgacuacgaggagcugagagagcagcugagcagcgugagcagcuucgagagauucgagaucuuccccaagaccagcagcuggcccaaccacgacagcaacaagggcgugaccgccgccugcccccacgccggcgccaagagcuucuacaagaaccugaucuggcuggugaagaagggcaacagcuaccccaagcugagcaagagcuacaucaacgacaagggcaaggaggugcuggugcuguggggcauccaccaccccagcaccagcgccgaccagcagagccuguaccagaacgccgacgccuacguguucgugggcaccagcagauacagcaagaaguucaagcccgagaucgccaucagacccaaggugagagaccaggagggcagaaugaacuacuacuggacccugguggagcccggcgacaagaucaccuucgaggccaccggcaaccugguggugcccagauacgccuucgccauggagagaaacgccggcagcggcaucaucaucagcgacacccccgugcacaacugcaacaccaccugccagacccccaagggcgccaucaacaccagccugcccuuccagaacauccaccccaucaccaucggcaagugccccaaguacgugaagagcaccaagcugagacuggccaccggccugagaaacgugcccagcauccagagcagaggccuguucggcgccaucgccggcuucaucgagggcggcuggaccggcaugguggacggcugguacggcuaccaccaccagaacgagcagggcagcggcuacgccgccgaccugaagagcacccagaacgccaucgacgagaucaccaacaaggugaacagcgugaucgagaagaugaacacccaguucaccgccgugggcaaggaguucaaccaccuggagaagagaaucgagaaccugaacaagaagguggacgacggcuuccuggacaucuggaccuacaacgccgagcugcuggugcugcuggagaacgagagaacccuggacuaccacgacagcaacgugaagaaccuguacgagaaggugagaagccagcugaagaacaacgccaaggagaucggcaacggcugcuucgaguucuaccacaagugcgacaacaccugcauggagagcgugaagaacggcaccuacgacuaccccaaguacagcgaggaggccaagcugaacagagaggagaucgacggcgugaagcuggagagcaccagaaucuaccagauccuggccaucuacagcaccguggccagcagccuggugcugguggugagccugggcgccaucagcuucuggaugugcagcggccaccugcagugcagaaucugcaucuga

SEQ ID NO: 163602 - RNA, 1695 nt, Artificial Sequence
  derived and/or modified CDS sequence (opt4) from hemagglutinin__InfluenzaA__ACY77573
augaaggccauccugguggugcugcuguacaccuucgccaccgccaacgccgacacccugugcaucggcuaccacgccaacaacagcaccgacaccguggacaccgugcuggagaagaacgugaccgugacccacagcgugaaccugcuggaggacaagcacaacggcaagcugugcaagcugagaggcguggccccccugcaccugggcaagugcaacaucgccggcuggauccugggcaaccccgagugcgagagccugagcaccgccagcagcuggagcuacaucguggagaccagcagcagcgacaacggcaccugcuaccccggcgacuucaucgacuacgaggagcugagagagcagcugagcagcgugagcagcuucgagagauucgagaucuuccccaagaccagcagcuggcccaaccacgacagcaacaagggcgugaccgccgccugcccccacgccggcgccaagagcuucuacaagaaccugaucuggcuggugaagaagggcaacagcuaccccaagcugagcaagagcuacaucaacgacaagggcaaggaggugcuggugcuguggggcauccaccaccccagcaccagcgccgaccagcagagccuguaccagaacgccgacgccuacguguucgugggcagcagcagauacagcaagaaguucaagcccgagaucgccaucagacccaaggugagagaccaggagggcagaaugaacuacuacuggacccugguggagcccggcgacaagaucaccuucgaggccaccggcaaccugguggugcccagauacgccuucgccauggagagaaacgccggcagcggcaucaucaucagcgacacccccgugcacgacugcaacaccaccugccagacccccaagggcgccaucaacaccagccugcccuuccagaacauccaccccaucaccaucggcaagugccccaaguacgugaagagcaccaagcugagacuggccaccggccugagaaacgugcccagcauccagagcagaggccuguucggcgccaucgccggcuucaucgagggcggcuggaccggcaugguggacggcugguacggcuaccaccaccagaacgagcagggcagcggcuacgccgccgaccugaagagcacccagagcgccaucgacgagaucaccaacaaggugaacagcgugaucgagaagaugaacacccagcugaccggccagugcaaggaguucaaccaccuggagaagagaaucgagaaccugaacaagaagguggacgacggcuuccuggacaucuggaccuacaacgccgagcugcuggugcugcuggagaacgagagaacccuggacuaccacgacagcaacgugaagaaccuguacgagaaggugagaagccagcugaagaacaacgccaacgagaucggcaacggcugcuucgaguucuaccacaagugcgacaacaccugcauggagagcgugaagaacggcaccuacgacuaccccaaguacagcgaggaggccaagcugaacagagaggagaucgacggcgugaagcuggagagcaccagaaucuaccagauccuggccaucuacagcaccguggccagcagccuggugcugguggugagccugggcgccaucagcuucuggaugugcagcggccacagcugcagaaucugcaucuga

SEQ ID NO: 163603 - RNA, 1701 nt, Artificial Sequence
  derived and/or modified CDS sequence (opt4) from hemagglutinin__InfluenzaA__ACY77593
augaaggccauccugguggugaugcuguacaccuucgccaccgccaacgccgacacccugugcaucggcuaccacgccaacaacagcaccgacaccguggacaccgugcuggagaagaacgugaccgugacccacagcgugaaccugcuggaggacaagcacaacggcaagcugugcaagcugagaggcguggccccccugcaccugggcaagugcaacaucgccggcuggauccugggcaaccccgagugcgagagccugagcaccgccagcagcuggagcuacaucguggagaccagcagcagcgacaacggcaccugcuaccccggcgacuucaucgacuacgaggagcugagagagcagcugagcagcgugagcagcuucgagagauucgagaucuuccccaagaccagcagcuggcccaaccacgacagcaacaagggcgugaccgccgccugcccccacgccggcgccaagagcuucuacaagaaccugaucuggcuggugaagaagggcaacagcuaccccaagcugagcaagagcuacaucaacgacaagggcaaggaggugcuggugcuguggggcauccaccaccccagcaccagcgccgaccagcagagccuguaccagaacgccgacgccuacguguucgugggcagcagcagauacagcaagaaguucaagcccgagaucgccaucagacccaaggugagagaccaggagggcagaaugaacuacuacuggacccugguggagcccggcgacaagaucaccuucgaggccaccggcaaccugguggugcccagauacgccuucgccauggagagaaacgccggcagcggcaucaucaucagcgacaccaccgugcacgacugcaacaccaccugccagacccccaagggcgccaucaacaccagccugcccuuccagaacauccaccccaucaccaucggcaagugccccaaguacgugaagagcaccaagcugagacuggccaccggccugagaaacgugcccagcauccagagcagaggccuguucggcgccaucgccggcuucaucgagggcggcuggaccggcaugguggacggcugguacggcuaccaccaccagaacgagcagggcagcggcuacgccgccgaccugaagagcacccagaacgccaucgacgagaucaccaacaaggugaacagcgugaucgagaagaugaacacccaguucaccgccgugggcaaggaguucaaccaccuggagaagagaaucgagaaccugaacaagaagguggacgacggcuuccuggacaucuggaccuacaacgccgagcugcuggugcugcuggagaacgagagaacccuggacuaccacgacagcaacgugaagaaccuguacgagaaggugagaagccagcugaagaacaacgccaaggagaucggcaacggcugcuucgaguucuaccacaagugcgacaacaccugcauggagagcgugaagaacggcaccuacgacuaccccaaguacagcgaggaggccaagcugaacagagaggagaucgacggcgugaagcuggagagcaccagaaucuaccagauccuggccaucuacagcaccguggccagcagccuggugcugguggugagccugggcgccaucagcuucuggaugugcagcaacggcagccugcagugcagaaucugcaucuga

SEQ ID NO: 163604 - RNA, 1698 nt, Artificial Sequence
  derived and/or modified CDS sequence (opt4) from hemagglutinin__InfluenzaA__ACY77603
augaaggccauccugguggugaugcuguacaccuucgccaccgccaacgccgacacccugugcaucggcuaccacgccaacaacagcaccgacaccguggacaccgugcuggagaagaacgugaccgugacccacagcgugaaccugcuggaggacaagcacaacggcaagcugugcaagcugagaggcguggccccccugcaccugggcaagugcaacaucgccggcuggauccugggcaaccccgagugcgagagccugagcaccgccagcagcuggagcuacaucguggagaccagcagcagcgacaacggcaccugcuaccccggcgacuucaucgacuacgaggagcugagagagcagcugagcagcgugagcagcuucgagagauucgagaucuuccccaagaccagcagcuggcccaaccacgacagcaacaagggcgugaccgccgccugcccccacgccggcgccaagagcuucuacaagaaccugaucuggcuggugaagaagggcaacagcuaccccaagcugagcaagagcuacaucaacgacaagggcaaggaggugcuggugcuguggggcauccaccaccccagcaccagcgccgaccagcagagccuguaccagaacgccgacgccuacguguucgugggcagcagcagauacagcaagaaguucaagcccgagaucgccaucagacccaaggugagagaccaggagggcagaaugaacuacuacuggacccugguggagcccggcgacaagaucaccuucgaggccaccggcaaccugguggugcccagauacgccuucgccauggagagaaacgccggcagcggcaucaucaucagcgacacccccgugcacgacugcaacaccaccugccagacccccaagggcgccaucaacaccagccugcccuuccagaacauccaccccaucaccaucggcaagugccccaaguacgugaagagcaccaagcugagacuggccaccggccugagaaacgugcccagcauccagagcagaggccuguucggcgccaucgccggcuucaucgagggcggcuggaccggcaugguggacggcugguacggcuaccaccaccagaacgagcagggcagcggcuacgccgccgaccugaagagcacccagaacgccaucgacgagaucaccaacaaggugaacagcgugaucgagaagaugaacacccaguucaccgccgugggcaaggaguucaaccaccuggagaagagaaucgagaaccugaacaagaagguggacgacggcuuccuggacaucuggaccuacaacgccgagcugcuggugcugcuggagaacgagagaacccuggacuaccacgacagcaacgugaagaaccuguacgagaaggugagaagccagcugaagaacaacgccaaggagaucggcaacggcugcuucgaguucuaccacaagugcgacaacaccugcauggagagcgugaagaacggcaccuacgacuaccccaaguacagcgaggaggccaagcugaacagagaggagaucgacggcgugaagcuggagagcaccagaaucuaccagauccuggccaucuacagcaccguggccagcagccuggugcugguggugagccugggcgccaucagcuucuggaugugcagcuggagccugcagugcagaaucugcaucuga

SEQ ID NO: 163605 - RNA, 1695 nt, Artificial Sequence
  derived and/or modified CDS sequence (opt4) from hemagglutinin__InfluenzaA__ACY77613
augaaggccauccugguggugcugcuguacaccuucgccaccgccaacgccgacacccugugcaucggcuaccacgccaacaacagcaccgacaccguggacaccgugcuggagaagaacgugaccgugacccacagcgugaaccugcuggaggacaagcacaacggcaagcugugcaagcugagaggcguggccccccugcaccugggcaagugcaacaucgccggcuggauccugggcaaccccgagugcgagagccugagcaccgccagcagcuggagcuacaucguggagaccagcagcagcgacaacggcaccugcuaccccggcgacuucaucgacuacgaggagcugagagagcagcugagcagcgugagcagcuucgagagauucgagaucuuccccaagaccagcagcuggcccaaccacgacagcaacaagggcgugaccgccgccugcccccacgccggcgccaagagcuucuacaagaaccugaucuggcuggugaagaagggcaacagcuaccccaagcugagcaagagcuacaucaacgacaagggcaaggaggugcuggugcuguggggcauccaccaccccagcaccagcgccgaccagcagagccuguaccagaacgccgacgccuacguguucgugggcaccagcagauacagcaagaaguucaagcccgagaucgccaucagacccaaggugagagaccaggagggcagaaugaacuacuacuggacccugguggagcccggcgacaagaucaccuucgaggccaccggcaaccugguggugcccagauacgccuucgccauggagagaaacgccggcagcggcaucaucaucagcgacacccccgugcacgacugcaacaccaccugccagacccccaagggcgccaucaacaccagccugcccuuccagaacauccaccccaucaccaucggcaagugccccaaguacgugaagagcaccaagcugagacuggccaccggccugagaaacgugcccagcauccagagcagaggccuguucggcgccaucgccggcuucaucgagggcggcuggaccggcaugguggacggcugguacggcuaccaccaccagaacgagcagggcagcggcuacgccgccgaccugaagagcacccagaacgccaucgacgagaucaccaacaaggugaacagcgugaucgagaagaugaacacccaguucaccggccagugcaaggaguucaaccaccuggagaagagaaucgagaaccugaacaagaagguggacgacggcuuccuggacaucuggaccuacaacgccgagcugcuggugcugcuggagaacgagagaacccuggacuaccacgacagcaacgugaagaaccuguacgagaaggugagaagccagcugaagaacaacgccaaggagaucggcaacggcugcuucgaguucuaccacaagugcgacaacaccugcauggagagcgugaagaacggcaccuacgacuaccccaaguacagcgaggaggccaagcugaacagagaggagaucgacggcgugaagcuggagagcaccagaaucuaccagauccuggccaucuacagcaccguggccagcagccuggugcugguggugagccugggcgccaucagcuucuggaugugcagcggccacagcugcagaaucugcaucuga

SEQ ID NO: 163606 - RNA, 1701 nt, Artificial Sequence; identical to SEQ ID NO: 162729
  derived and/or modified CDS sequence (opt4) from hemagglutinin__InfluenzaA__ACY77623

SEQ ID NO: 163607 - RNA, 1707 nt, Artificial Sequence
  derived and/or modified CDS sequence (opt4) from hemagglutinin__InfluenzaA__ACY77653
augaaggccauccugguggugcugcuguacaccuucgccaccgccaacgccgacacccugugcaucggcuaccacgccaacaacagcaccgacaccguggacaccgugcuggagaagaacgugaccgugacccacagcgugaacauccuggaggacaagcacaacggcaagcugugcaagcugagaggcguggccccccugcaccugggcaagugcaacaucgccggcuggauccugggcaaccccgagugcgagagccugagcaccgccagcagcuggagcuacaucguggagaccagcagcagcgacaacggcaccugcuaccccggcgacuucaucgacuacgaggagcugagagagcagcugagcagcgugagcagcuucgagagauucgagaucuuccccaagaccagcagcuggcccaaccacgacagcaacaagggcgugaccgccgccugcccccacgccggcgccaagagcuucuacaagaaccugaucuggcuggugaagaagggcaacagcuaccccaagcugagcaagagcuacaucaacgacaagggcaaggaggugcuggugcuguggggcauccaccaccccagcaccagcgccgaccagcagagccuguaccagaacgccgacgccuacguguucgugggcagcagcagauacagcaagaaguucaagcccgagaucgccaucagacccaaggugagagaccaggagggcagaaugaacuacuacuggacccugguggagcccggcgacaagaucaccuucgaggccaccggcaaccugguggugcccagauacgccuucgccauggagagaaacgccggcagcggcaucaucaucagcgacacccccgugcacgacugcaacaccaccugccagacccccaagggcgccaucaacaccagccugcccuuccagaacauccaccccaucaccaucggcaagugccccaaguacgugaagagcaccaagcugagacuggccaccggccugagaaacgugcccagcauccagagcagaggccuguucggcgccaucgccggcuucaucgagggcggcuggaccggcaugguggacggcugguacggcuaccaccaccagaacgagcagggcagcggcuacgccgccgaccugaagagcacccagaacgccaucgacgagaucaccaacaaggugaacagcgugaucgagaagaugaacacccaguucaccgccgugggcaaggaguucaaccaccuggagaagagaaucgagaaccugaacaagaagguggacgacggcuuccuggacaucuggaccuacaacgccgagcugcuggugcugcuggagaacgagagaacccuggacuaccacgacagcaacgugaagaaccuguacgagaaggugagaagccagcugaagaacaacgccaaggaggugggcaacggcugcuucgaguucuaccacaagugcgacaacaccugcauggagagcgugaagaacggcaccuacgacuaccccaaguacagcgaggaggccaagcugaacagagaggagaucgacggcgugaagcuggagagcaccagaaucuaccagauccuggccaucuacagcaccguggccagcagccuggugcugguggugagccugggcgccaucagcuucuggaugugcagcggccacagcggcagccugcagugcagaaucugcaucuga

SEQ ID NO: 163608 - RNA, 1698 nt, Artificial Sequence
  derived and/or modified CDS sequence (opt4) from hemagglutinin__InfluenzaA__ACY77663
augaaggccauccugguggugcugcuguacaccuucgccaccgccaacgccgacacccugugcaucggcuaccacgccaacaacagcaccgacaccguggacaccgugcuggagaagaacgugaccgugacccacagcgugaaccugcuggaggacaagcacaacggcaagcugugcaagcugagaggcguggccccccugcaccugggcaagugcaacaucgccggcuggauccugggcaaccccgagugcgagagccugagcaccgccagcagcuggagcuacaucguggagaccagcagcagcgacaacggcaccugcuaccccggcgacuucaucgacuacgaggagcugagagagcagcugagcagcgugagcagcuucgagagauucgagaucuuccccaagaccagcagcuggcccaaccacgacagcaacaagggcgugaccgccgccugcccccacgccggcgccaagagcuucuacaagaaccugaucuggcuggugaagaagggcaacagcuaccccaagcugagcaagagcuacaucaacgacaagggcaaggaggugcuggugcuguggggcauccaccaccccagcaccagcgccgaccagcagagccuguaccagaacgccgacgccuacguguucgugggcaccagcagauacagcaagaaguucaagcccgagaucgccaucagacccaaggugagagaccaggagggcagaaugaacuacuacuggacccugguggagcccggcgacaagaucaccuucgaggccaccggcaaccugguggugcccagauacgccuucgccauggagagaaacgccggcagcggcaucaucaucagcgacacccccgugcacgacugcaacaccaccugccagacccccaagggcgccaucaacaccagccugcccuuccagaacauccaccccaucaccaucggcaagugccccaaguacgugaagagcaccaagcugagacuggccaccggccugagaaacgugcccagcauccagagcagaggccuguucggcgccaucgccggcuucaucgagggcggcuggaccggcaugguggacggcugguacggcuaccaccaccagaacgagcagggcagcggcuacgccgccgaccugaagagcacccagaacgccaucgacgagaucaccaacaaggugaacagcgugaucgagaagaugaacacccaguucaccgccgugggcaaggaguucaaccaccuggagaagagaaucgagaaccugaacaagaagguggacgacggcuuccuggacaucuggaccuacaacgccgagcugcuggugcugcuggagaacgagagaacccuggacuaccacgacagcaacgugaagaaccuguacgagaaggugagaagccagcugaagaacaacgccaaggagaucggcaacggcugcuucgaguucuaccacaagugcgacaacaccugcauggagagcgugaagaacggcaccuacgacuaccccaaguacagcgaggaggccaagcugaacagagaggagaucgacggcgugaagcuggagagcaccagaaucuaccagauccuggccaucuacagcaccguggccagcagccuggugcugguggugagccugggcgccaucagcuucuggaugugcagcuggagccugcugugcagaaucugcaucuga

SEQ ID NO: 163609 - RNA, 1698 nt, Artificial Sequence
  derived and/or modified CDS sequence (opt4) from hemagglutinin__InfluenzaA__ACY77683
augaaggccauccugguggugcugcuguacaccuucgccaccgccaacgccgacacccugugcaucggcuaccacgccaacaacagcaccgacaccguggacaccgugcuggagaagaacgugaccgugacccacagcgugaacauccuggaggacaagcacaacggcaagcugugcaagcugagaggcguggccccccugcaccugggcaagugcaacaucgccggcuggauccugggcaaccccgagugcgagagccugagcaccgccagcagcuggagcuacaucguggagaccagcagcagcgacaacggcaccugcuaccccggcgacuucaucgacuacgaggagcugagagagcagcugagcagcgugagcagcuucgagagauucgagaucuuccccaagaccagcagcuggcccaaccacgacagcaacaagggcgugaccgccgccugcccccacgccggcgccaagagcuucuacaagaaccugaucuggcuggugaagaagggcaacagcuaccccaagcugagcaagagcuacaucaacgacaagggcaaggaggugcuggugcuguggggcauccaccaccccagcaccagcgccgaccagcagagccuguaccagaacgccgacgccuacguguucgugggcagcagcagauacagcaagaaguucaagcccgagaucgccaucagacccaaggugagagaccaggagggcagaaugaacuacuacuggacccugguggagcccggcgacaagaucaccuucgaggccaccggcaaccugguggugcccagauacgccuucgccauggagagaaacgccggcagcggcaucaucaucagcgacacccccgugcacgacugcaacaccaccugccagacccccaagggcgccaucaacaccagccugcccuuccagaacauccaccccaucaccaucggcaagugccccaaguacgugaagagcaccaagcugagacuggccaccggccugagaaacgugcccagcauccagagcagaggccuguucggcgccaucgccggcuucaucgagggcggcuggaccggcaugguggacggcugguacggcuaccaccaccagaacgagcagggcagcggcuacgccgccgaccugaagagcacccagaacgccaucgacgagaucaccaacaaggugaacagcgugaucgagaagaugaacacccaguucaccgccgugggcaaggaguucaaccaccuggagaagagaaucgagaaccugaacaagaagguggacgacggcuuccuggacaucuggaccuacaacgccgagcugcuggugcugcuggagaacgagagaacccuggacuaccacgacagcaacgugaagaaccuguacgagaaggugagaagccagcugaagaacaacgccaaggaggugggcaacggcugcuucgaguucuaccacaagugcgacaacaccugcauggagagcgugaagaacggcaccuacgacuaccccaaguacagcgaggaggccaagcugaacagagaggagaucgacggcgugaagcuggagagcaccagaaucuaccagauccuggccaucuacagcaccguggccagcagccuggugcugguggugagccugggcgccaucagcuucuggaugugcagcuggagccugcagugcagaaucugcaucuga

SEQ ID NO: 163610 - RNA, 1698 nt, Artificial Sequence
  derived and/or modified CDS sequence (opt4) from hemagglutinin__InfluenzaA__ACY77693
augaaggccauccugguggugcugcuguacaccuucgccaccgccaacgccgacacccugugcaucggcuaccacgccaacaacagcaccgacaccguggacaccgugcuggagaagaacgugaccgugacccacagcgugaacauccuggaggacaagcacaacggcaagcugugcaagcugagaggcguggccccccugcaccugggcaagugcaacaucgccggcuggauccugggcaaccccgagugcgagagccugagcaccgccagcagcuggagcuacaucguggagaccagcagcagcgacaacggcaccugcuaccccggcgacuucaucgacuacgaggagcugagagagcagcugagcagcgugagcagcuucgagagauucgagaucuuccccaagaccagcagcuggcccaaccacgacagcaacaagggcgugaccgccgccugcccccacgccggcgccaagagcuucuacaagaaccugaucuggcuggugaagaagggcaacagcuaccccaagcugagcaagagcuacaucaacgacaagggcaaggaggugcuggugcuguggggcauccaccaccccagcaccagcgccgaccagcagagccuguaccagaacgccgacgccuacguguucgugggcagcagcagauacagcaagaaguucaagcccgagaucaccaucagacccaaggugagagaccaggagggcagaaugaacuacuacuggacccugguggagcccggcgacaagaucaccuucgaggccaccggcaaccugguggugcccagauacgccuucgccauggagagaaacgccggcagcggcaucaucaucagcgacacccccgugcacgacugcaacaccaccugccagacccccaagggcgccaucaacaccagccugcccuuccagaacauccaccccaucaccaucggcaagugccccaaguacgugaagagcaccaagcugagacuggccaccggccugagaaacgugcccagcauccagagcagaggccuguucggcgccaucgccggcuucaucgagggcggcuggaccggcaugguggacggcugguacggcuaccaccaccagaacgagcagggcagcggcuacgccgccgaccugaagagcacccagaacgccaucgacgagaucaccaacaaggugaacagcgugaucgagaagaugaacacccaguucaccggccagugcaaggaguucaaccaccuggagaagagaaucgagaaccugaacaagaagguggacgacggcuuccuggacaucuggaccuacaacgccgagcugcuggugcugcuggagaacgagagaacccuggacuaccacgacagcaacgugaagaaccuguacgagaaggugagaagccagcugaagaacaacgccaaggaggugggcaacggcugcuucgaguucuaccacaagugcgacaacaccugcauggagagcgugaagaacggcaccuacgacuaccccaaguacagcgaggaggccaagcugaacagagaggagaucgacggcgugaagcuggagagcaccagaaucuaccagauccuggccaucuacagcaccguggccagcagccuggugcugguggugagccugggcgccaucagcuucuggaugugcagcuggagccugcagugcagaaucugcaucuga

SEQ ID NO: 163611 - RNA, 1698 nt, Artificial Sequence
  derived and/or modified CDS sequence (opt4) from hemagglutinin__InfluenzaA__ACY77703
augaaggccauccugguggugcugcuguacaccuucgccaccgccaacgccgacacccugugcaucggcuaccacgccaacaacagcaccgacaccguggacaccgugcuggagaagaacgugaccgugacccacagcgugaacauccuggaggacaagcacaacggcaagcugugcaagcugagaggcguggccccccugcaccugggcaagugcaacaucgccggcuggauccugggcaaccccgagugcgagagccugagcaccgccagcagcuggagcuacaucguggagaccagcagcagcgacaacggcaccugcuaccccggcgacuucaucgacuacgaggagcugagagagcagcugagcagcgugagcagcuucgagagauucgagaucuuccccaagaccagcagcuggcccaaccacgacagcaacaagggcgugaccgccgccugcccccacgccggcgccaagagcuucuacaagaaccugaucuggcuggugaagaagggcaacagcuaccccaagcugagcaagagcuacaucaacgacaagggcaaggaggugcuggugcuguggggcauccaccaccccagcaccagcgccgaccagcagagccuguaccagaacgccgacgccuacguguucgugggcagcagcagauacagcaagaaguucaagcccgagaucgccaucagacccaaggugagagaccaggagggcagaaugaacuacuacuggacccugguggagcccggcgacaagaucaccuucgaggccaccggcaaccugguggugcccagauacgccuucgccauggagagaaacgccggcagcggcaucaucaucagcgacacccccgugcacgacugcaacaccaccugccagacccccaagggcgccaucaacaccagccugcccuuccagaacauccaccccaucaccaucggcaagugccccaaguacgugaagagcaccaagcugagacuggccaccggccugagaaacgugcccagcauccagagcagaggccuguucggcgccaucgccggcuucaucgagggcggcuggaccggcaugguggacggcugguacggcuaccaccaccagaacgagcagggcagcggcuacgccgccgaccugaagagcacccagaacgccaucgacgagaucaccaacaaggugaacagcgugaucgagaagaugaacacccaguucaccggccagugcaaggaguucaaccaccuggagaagagaaucgagaaccugaacaagaagguggacgacggcuuccuggacaucuggaccuacaacgccgagcugcuggugcugcuggagaacgagagaacccuggacuaccacgacagcaacgugaagaaccuguacgagaaggugagaagccagcugaagaacaacgccaaggaggugggcaacggcugcuucgaguucuaccacaagugcgacaacaccugcauggagagcgugaagaacggcaccuacgacuaccccaaguacagcgaggaggccaagcugaacagagaggagaucgacggcgugaagcuggagagcaccagaaucuaccagauccuggccaucuacagcaccguggccagcagccuggugcugguggugagccugggcgccaucagcuucuggaugugcagcuggagccugcagugcagaaucugcaucuga

SEQ ID NO: 163612 - RNA, 1698 nt, Artificial Sequence
  derived and/or modified CDS sequence (opt4) from hemagglutinin__InfluenzaA__ACY77713
augaaggccauccugguggugcugcuguacaccuucgccaccgccaacgccgacacccugugcaucggcuaccacgccaacaacagcaccgacaccguggacaccgugcuggagaagaacgugaccgugacccacagcgugaacauccuggaggacaagcacaacggcaagcugugcaagcugagaggcguggccccccugcaccugggcaagugcaacaucgccggcuggauccugggcaaccccgagugcgagagccugagcaccgccagcagcuggagcuacaucguggagaccagcagcagcgacaacggcaccugcuaccccggcgacuucaucgacuacgaggagcugagagagcagcugagcagcgugagcagcuucgagagauucgagaucuuccccaagaccagcagcuggcccaaccacgacagcaacaagggcgugaccgccgccugcccccacgccggcgccaagagcuucuacaagaaccugaucuggcuggugaagaagggcaacagcuaccccaagcugagcaagagcuacaucaacgacaagggcaaggaggugcuggugcuguggggcauccaccaccccagcaccagcgccgaccagcagagccuguaccagaacgccgacgccuacguguucgugggcagcagcagauacagcaagaaguucaagcccgagaucgccaucagacccaaggugagagaccaggagggcagaaugaacuacuacuggacccugguggagcccggcgacaagaucaccuucgaggccaccggcaaccugguggugcccagauacgccuucgccauggagagaaacgccggcagcggcaucaucaucagcgacacccccgugcacgacugcaacaccaccugccagacccccaagggcgccaucaacaccagccugcccuuccagaacauccaccccaucaccaucggcaagugccccaaguacgugaagagcaccaagcugagacuggccaccggccugagaaacgugcccagcauccagagcagaggccuguucggcgccaucgccggcuucaucgagggcggcuggaccggcaugguggacggcugguacggcuaccaccaccagaacgagcagggcagcggcuacgccgccgaccugaagagcacccagaacgccaucgacgagaucaccaacaaggugaacagcgugaucgagaagaugaacacccaguucaccggccagugcaaggaguucaaccaccuggagaagagaaucgagaaccugaacaagaagguggacgacggcuuccuggacaucuggaccuacaacgccgagcugcuggugcugcuggagaacgagagaacccuggacuaccacgacagcaacgugaagaaccuguacgagaaggugagaagccagcugaagaacaacgccaaggaggugggcaacggcugcuucgaguucuaccacaagugcgacaacaccugcauggagagcgugaagaacggcaccuacgacuaccccaaguacagcgaggaggccaagcugaacagagaggagaucgacggcgugaagcuggagagcaccagaaucuaccagauccuggccaucuacagcaccguggccagcagccuggugcugguggugagccugggcgccaucagcuucuggaugugcagcggccaccugcagugcagaaucugcaucuga

SEQ ID NO: 163613 - RNA, 1701 nt, Artificial Sequence; identical to SEQ ID NO: 163042
  derived and/or modified CDS sequence (opt4) from hemagglutinin__InfluenzaA__ACY77723

SEQ ID NO: 163614 - RNA, 1695 nt, Artificial Sequence
  derived and/or modified CDS sequence (opt4) from hemagglutinin__InfluenzaA__ACY77733
augaaggccauccugguggugcugcuguacaccuucgccaccgccaacgccgacacccugugcaucggcuaccacgccaacaacagcaccgacaccguggacaccgugcuggagaagaacgugaccgugacccacagcgugaacauccuggaggacaagcacaacggcaagcugugcaagcugagaggcguggccccccugcaccugggcaagugcaacaucgccggcuggauccugggcaaccccgagugcgagagccugagcaccgccagcagcuggagcuacaucguggagaccagcagcagcgacaacggcaccugcuaccccggcgacuucaucgacuacgaggagcugagagagcagcugagcagcgugagcagcuucgagagauucgagaucuuccccaagaccagcagcuggcccaaccacgacagcaacaagggcgugaccgccgccugcccccacgccggcgccaagagcuucuacaagaaccugaucuggcuggugaagaccggcaacagcuaccccaagcugagcaagagcuacaucaacgacaagggcaaggaggugcuggugcuguggggcauccaccaccccagcaccagcgccgaccagcagagccuguaccagaacgccgacgccuacguguucgugggcagcagcagauacagcaagaaguucaagcccgagaucgccaucagacccaaggugagagaccaggagggcagaaugaacuacuacuggacccugguggagcccggcgacaagaucaccuucgaggccaccggcaaccugguggugcccagauacgccuucgccauggagagaaacgccggcagcggcaucaucaucagcgacacccccgugcacgacugcaacaccaccugccagacccccaagggcgccaucaacaccagccugcccuuccagaacauccaccccaucaccaucggcaagugccccaaguacgugaagagcaccaagcugagacuggccaccggccugagaaacgugcccagcauccagagcagaggccuguucggcgccaucgccggcuucaucgagggcggcuggaccggcaugguggacggcugguacggcuaccaccaccagaacgagcagggcagcggcuacgccgccgaccugaagagcacccagaacgccaucgacgagaucaccaacaaggugaacagcgugaucgagaagaugaacacccaguucaccgccgugggcaaggaguucaaccaccuggagaagagaaucgagaaccugaacaagaagguggacgacggcuuccuggacaucuggaccuacaacgccgagcugcuggugcugcuggagaacgagagaacccuggacuaccacgacagcaacgugaagaaccuguacgagaaggugagaagccagcugaagaacaacgccaaggagaucggcaacggcugcuucgaguucuaccacaagugcgacaacaccugcauggagagcgugaagaacggcaccuacgacuaccccaaguacagcgaggaggccaagcugaacagagaggagaucgacggcgugaagcuggagagcaccagaaucuaccagauccuggccaucuacagcaccguggccagcagccuggugcugguggugagccugggcgccaucagcuucuggaugugcagcggccugcagugcagaaucugcaucuga

SEQ ID NO: 163615 - RNA, 1698 nt, Artificial Sequence
  derived and/or modified CDS sequence (opt4) from hemagglutinin__InfluenzaA__ACY77743
augaaggccauccugguggugcugcuguacaccuucgccaccgccaacgccgacacccugugcaucggcuaccacgccaacaacagcaccgacaccguggacaccgugcuggagaagaacgugaccgugacccacagcgugaaccugcuggaggacaagcacaacggcaagcugugcaagcugagaggcguggccccccugcaccugggcaagugcaacaucgccggcuggauccugggcaaccccgagugcgagagccugagcaccgccagcagcuggagcuacaucguggagaccagcagcagcgacaacggcaccugcuaccccggcgacuucaucgacuacgaggagcugagagagcagcugagcagcgugagcagcuucgagagauucgagaucuuccccaagaccagcagcuggcccaaccacgacagcaacaagggcgugaccgccgccugcccccacgccggcgccaagagcuucuacaagaaccugaucuggcuggugaagaagggcaacagcuaccccaagcugagcaagagcuacaucaacgacaagggcaaggaggugcuggugcuguggggcauccaccaccccagcaccagcgccgaccagcagagccuguaccagaacgccgacgccuacguguucgugggcagcagcagauacagcaagaaguucaagcccgagaucgccaucagacccaaggugagagaccaggagggcagaaugaacuacuacuggacccugguggagcccggcgacaagaucaccuucgaggccaccggcaaccugguggugcccagauacgccuucgccauggagagaaacgccggcagcggcaucaucaucagcgacacccccgugcacgacugcaacaccaccugccagacccccaagggcgccaucaacaccagccugcccuuccagaacauccaccccaucaccaucggcaagugccccaaguacgugaagagcaccaagcugagacuggccaccggccugagaaacgugcccagcauccagagcagaggccuguucggcgccaucgccggcuucaucgagggcggcuggaccggcaugguggacggcugguacggcuaccaccaccagaacgagcagggcagcggcuacgccgccgaccugaagagcacccagaacgccaucgacgagaucaccaacaaggugaacagcgugaucgagaagaugaacacccaguucaccgccgugggcaaggaguucaaccaccuggagaagagaaucgagaaccugaacaagaagguggacgacggcuuccuggacaucuggaccuacaacgccgagcugcuggugcugcuggagaacgagagaacccuggacuaccacgacagcaacgugaagaaccuguacgagaaggugagaagccagcugaagaacaacgccaaggaggugggcaacggcugcuucgaguucuaccacaagugcgacaacaccugcauggagagcgugaagaacggcaccuacgacuaccccaaguacagcgaggaggccaagcugaacagagaggagaucgacggcgugaagcuggagagcaccagaaucuaccagauccuggccaucuacagcaccguggccagcagccuggugcugguggugagccugggcgccaucagcuucuggaugugcagcuggagccugcagugcagaaucugcaucuga

SEQ ID NO: 163616 - RNA, 1701 nt, Artificial Sequence; identical to SEQ ID NO: 162729
  derived and/or modified CDS sequence (opt4) from hemagglutinin__InfluenzaA__ACY77753

SEQ ID NO: 163617 - RNA, 1695 nt, Artificial Sequence
  derived and/or modified CDS sequence (opt4) from hemagglutinin__InfluenzaA__ACY77783
augaaggccauccugguggugcugcuguacaccuucgccaccgccaacgccgacacccugugcaucggcuaccacgccaacaacagcaccgacaccguggacaccgugcuggagaagaacgugaccgugacccacagcgugaaccugcugggcgacaagcacaacggcaagcugugcaagcugagaggcguggccccccugcaccugggcaagugcaacaucgccggcuggauccugggcaaccccgagugcgagagccugagcaccgccagcagcuggagcuacaucguggagaccagcagcagcgacaacggcaccugcuaccccggcgacuucaucgacuacgaggagcugagagagcagcugagcagcgugagcagcuucgagagauucgagaucuuccccaagaccagcagcuggcccaaccacgacagcgacaagggcgugaccgccgccugcccccacgccggcgccaagagcuucuacaagaaccugaucuggcuggugaagaagggcaacagcuaccccaagcugagcaagagcuacaucaacgacaagggcaaggaggugcuggugcuguggggcauccaccaccccagcaccagcgccgaccagcagagccuguaccagaacgccgacaccuacguguucgugggcaccagcagauacagcaagaaguucaagcccgagaucgccaucagacccaaggugagagaccaggagggcagaaugaacuacuacuggacccugguggagcccggcgacaagaucaccuucgaggccaccggcaaccugguggugcccagauacgccuucgccauggagagaaacgccggcagcggcaucaucaucagcgacacccccgugcacgacugcaacaccaccugccagacccccaagggcgccaucaacaccagccugcccuuccagaacauccaccccaucaccaucggcaagugccccaaguacgugaagagcaccaagcugagacuggccaccggccugagaaacgugcccagcauccagagcagaggccuguucggcgccaucgccggcuucaucgagggcggcuggaccggcaugguggacggcugguacggcuaccaccaccagaacgagcagggcagcggcuacgccgccgaccugaagagcacccagaacgccaucgacgagaucaccaacaaggugaacagcgugaucgagaagaugaacacccaguucaccgccgugggcaaggaguucaaccaccuggagaagagaaucgagaaccugaacaagaagguggacgacggcuuccuggacaucuggaccuacaacgccgagcugcuggugcugcuggagaacgagagaacccuggacuaccacgacagcaacgugaagagccuguacgagaaggugagaagccagcugaagaacaacgccaaggagaucggcaacggcugcuucgaguucuaccacaagugcgacaacaccugcauggagagcgugaagaacggcaccuacgacuaccccaaguacagcgaggaggccaagcugaacagagaggagaucgacggcgugaagcuggagagcaccagaaucuaccagauccuggccaucuacagcaccguggccagcagccuggugcugguggugagccugggcgccaucagcuucuggaugugcagcggccacagcugcagaaucugcaucuga

SEQ ID NO: 163618 - RNA, 1698 nt, Artificial Sequence
  derived and/or modified CDS sequence (opt4) from hemagglutinin__InfluenzaA__ACY77813
augaaggccauccugguggugcugcuguacaccuucgccaccgccaacgccgacacccugugcaucggcuaccacgccaacaacagcaccgacaccguggacaccgugcuggagaagaacgugaccgugacccacagcgugaaccugcuggaggacaagcacaacggcaagcugugcaagcugagaggcguggccccccugcaccugggcaagugcaacaucgccggcuggauccugggcaaccccgagugcgagagccugagcaccgccagcagcuggagcuacaucguggagaccagcagcagcgacaacggcaccugcuaccccggcgacuucaucgacuacgaggagcugagagagcagcugagcagcgugagcagcuucgagagauucgagaucuuccccaagaccagcagcuggcccaaccacgacagcaacaagggcgugaccgccgccugcccccacgccggcgccaagagcuucuacaagaaccugaucuggcuggugaagaagggcaacagcuaccccaagcugagcaagagcuacaucaacgacaagggcaaggaggugcuggugcuguggggcauccaccaccccagcaccagcgccgaccagcagagccuguaccagaacgccgacgccuacguguucgugggcaccagcagauacagcaagaaguucaagcccgagaucgccaucagacccaaggugagagaccaggagggcagaaugaacuacuacuggacccugguggagcccggcgacaagaucaccuucgaggccaccggcaaccugguggugcccagauacgccuucgccauggagagaaacgccggcagcggcaucaucaucagcgacacccccgugcacgacugcaacaccaccugccagacccccaagggcgccaucaacaccagccugcccuuccagaacauccaccccaucaccaucggcaagugccccaaguacgugaagagcaccaagcugagacuggccaccggccugagaaacgugcccagcauccagagcagaggccuguucggcgccaucgccggcuucaucgagggcggcuggaccggcaugguggacggcugguacggcuaccaccaccagaacgagcagggcagcggcuacgccgccgaccugaagagcacccagaacgccaucgacgagaucaccaacaaggugaacagcgugaucgagaagaugaacacccaguucaccggccagugcaaggaguucaaccaccuggagaagagaaucgagaaccugaacaagaagguggacgacggcuuccuggacaucuggaccuacaacgccgagcugcuggugcugcuggagaacgagagaacccuggacuaccacgacagcaacgugaagaaccuguacgagaaggugagaagccagcugaagaacaacgccaaggagaucggcaacggcugcuucgaguucuaccacaagugcgacaacaccugcauggagagcgugaagaacggcaccuacgacuaccccaaguacagcgaggaggccaagcugaacagagaggagaucgacggcgugaagcuggagagcaccagaaucuaccagauccuggccaucuacagcaccguggccagcagccuggugcugguggugagccugggcgccaucagcuucuggaugugcagcggccaccugcagugcagaaucugcaucuga

SEQ ID NO: 163619 - RNA, 1698 nt, Artificial Sequence
  derived and/or modified CDS sequence (opt4) from hemagglutinin__InfluenzaA__ACY77823
augaaggccauccugguggugcugcuguacaccuucgccaccgccaacgccgacacccugugcaucggcuaccacgccaacaacagcaccgacaccguggacaccgugcuggagaagaacgugaccgugacccacagcgugaaccugcuggaggacaagcacaacggcaagcugugcaagcugagaggcguggccccccugcaccugggcaagugcaacaucgccggcuggauccugggcaaccccgagugcgagagccugagcaccgccagcagcuggagcuacaucguggagaccagcagcagcgacaacggcaccugcuaccccggcgacuucaucgacuacgaggagcugagagagcagcugagcagcgugagcagcuucgagagauucgagaucuuccccaagaccagcagcuggcccaaccacgacagcaacaagggcgugaccgccgccugcccccacgccggcgccaagagcuucuacaagaaccugaucuggcuggugaagaagggcaacagcuaccccaagcugagcaagagcuacaucaacgacaagggcaaggaggugcuggugcuguggggcauccaccaccccagcaccagcgccgaccagcagagccuguaccagaacgccgacgccuacguguucgugggcaccagcagauacagcaagaaguucaagcccgagaucgccaucagacccaaggugagagaccaggagggcagaaugaacuacuacuggacccugguggagcccggcgacaagaucaccuucgaggccaccggcaaccugguggugcccagauacgccuucgccauggagagaaacgccggcagcggcaucaucaucagcgacacccccgugcacgacugcaacaccaccugccagacccccaagggcgccaucaacaccagccugcccuuccagaacauccaccccaucaccaucggcaagugccccaaguacgugaagagcaccaagcugagacuggccaccggccugagaaacgugcccagcauccagagcagaggccuguucggcgccaucgccggcuucaucgagggcggcuggaccggcaugguggacggcugguacggcuaccaccaccagaacgagcagggcagcggcuacgccgccgaccugaagagcacccagaacgccaucgacgagaucaccaacaaggugaacagcgugaucgagaagaugaacacccaguucaccggccagugcaaggaguucaaccaccuggagaagagaaucgagaaccugaacaagaagguggacgacggcuuccuggacaucuggaccuacaacgccgagcugcuggugcugcuggagaacgagagaacccuggacuaccacgacagcaacgugaagaaccuguacgagaaggugagaagccagcugaagaacaacgccaaggagaucggcaacggcugcuucgaguucuaccacaagugcgacaacaccugcauggagagcgugaagaacggcaccuacgacuaccccaaguacagcgaggaggccaagcugaacagagaggagaucgacggcgugaagcuggagagcaccagaaucuaccagauccuggccaucuacagcaccguggccagcagccuggugcugguggugagccugggcgccaucagcuucuggaugugcagcuggagccugcagugcagaaucugcaucuga

SEQ ID NO: 163620 - RNA, 1698 nt, Artificial Sequence
  derived and/or modified CDS sequence (opt4) from hemagglutinin__InfluenzaA__ACY77833
augaaggccauccugguggugcugcuguacaccuucgccaccgccaacgccgacacccugugcaucggcuaccacgccaacaacagcaccgacaccguggacaccgugcuggagaagaacgugaccgugacccacagcgugaaccugcuggaggacaagcacaacggcaagcugugcaagcugagaggcguggccccccugcaccugggcaagugcaacaucgccggcuggauccugggcaaccccgagugcgagagccugagcaccgccagcagcuggagcuacaucguggagaccagcagcagcgacaacggcaccugcuaccccggcgacuucaucgacuacgaggagcugagagagcagcugagcagcgugagcagcuucgagagauucgagaucuuccccaagaccagcagcuggcccaaccacgacagcaacaagggcgugaccgccgccugcccccacgccggcgccaagagcuucuacaagaaccugaucuggcuggugaagaagggcaacagcuaccccaagcugagcaagagcuacaucaacgacaagggcaaggaggugcuggugcuguggggcauccaccaccccagcaccagcgccgaccagcagagccuguaccagaacgccgacgccuacguguucgugggcaccagcagauacagcaagaaguucaagcccgagaucgccaucagacccaaggugagagaccaggagggcagaaugaacuacuacuggacccugguggagcccggcgacaagaucaccuucgaggccaccggcaaccugguggugcccagauacgccuucgccauggagagaaacgccggcagcggcaucaucaucagcgacacccccgugcacgacugcaacaccaccugccagacccccaagggcgccaucaacaccagccugcccuuccagaacauccaccccaucaccaucggcaagugccccaaguacgugaagagcaccaagcugagacuggccaccggccugagaaacgugcccagcauccagagcagaggccuguucggcgccaucgccggcuucaucgagggcggcuggaccggcaugguggacggcugguacggcuaccaccaccagaacgagcagggcagcggcuacgccgccgaccugaagagcacccagaacgccaucgacgagaucaccaacaaggugaacagcgugaucgagaagaugaacacccaguucaccgccgugggcaaggaguucaaccaccuggagaagagaaucgagaaccugaacaagaagguggacgacggcuuccuggacaucuggaccuacaacgccgagcugcuggugcugcuggagaacgagagaacccuggacuaccacgacagcaacgugaagaaccuguacgagaaggugagaagccagcugaagaacaacgccaaggagaucggcaacggcugcuucgaguucuaccacaagugcgacaacaccugcauggagagcgugaagaacggcaccuacgacuaccccaaguacagcgaggaggccaagcugaacagagaggagaucgacggcgugaagcuggagagcaccagaaucuaccagauccuggccaucuacagcaccguggccagcagccuggugcugguggugagccugggcgccaucagcuucuggaugugcagcuggagccugcagugcagaaucugcaucuga

SEQ ID NO: 163621 - RNA, 1698 nt, Artificial Sequence
  derived and/or modified CDS sequence (opt4) from hemagglutinin__InfluenzaA__ACY77843
augaaggccauccugguggugaugcuguacaccuucgccaccgccaacgccgacacccugugcaucggcuaccacgccaacaacagcaccgacaccguggacaccgugcuggagaagaacgugaccgugacccacagcgugaaccugcuggaggacaagcacaacggcaagcugugcaagcugagaggcguggccccccugcaccugggcaagugcaacaucgccggcuggauccugggcaaccccgagugcgagagccugagcaccgccagcagcuggagcuacaucguggagaccagcagcagcgacaacggcaccugcuaccccggcgacuucaucgacuacgaggagcugagagagcagcugagcagcgugagcagcuucgagagauucgagaucuuccccaagaccagcagcuggcccaaccacgacagcaacaagggcgugaccgccgccugcccccacgccggcgccaagagcuucuacaagaaccugaucuggcuggugaagaagggcaacagcuaccccaagcugagcaagagcuacaucaacgacaagggcaaggaggugcuggugcuguggggcauccaccaccccagcaccagcgccgaccagcagagccuguaccagaacgccgacgccuacguguucgugggcagcagcagauacagcaagaaguucaagcccgagaucgccaucagacccaaggugagagaccaggagggcagaaugaacuacuacuggacccugguggagcccggcgacaagaucaccuucgaggccaccggcaaccugguggugcccagauacgccuucgccauggagagaaacgccggcagcggcaucaucaucagcgacaccaccgugcacgacugcaacaccaccugccagacccccaagggcgccaucaacaccagccugcccuuccagaacauccaccccaucaccaucggcaagugccccaaguacgugaagagcaccaagcugagacuggccaccggccugagaaacgugcccagcauccagagcagaggccuguucggcgccaucgccggcuucaucgagggcggcuggaccggcaugguggacggcugguacggcuaccaccaccagaacgagcagggcagcggcuacgccgccgaccugaagagcacccagaacgccaucgacgagaucaccaacaaggugaacagcgugaucgagaagaugaacacccaguucaccgccgugggcaaggaguucaaccaccuggagaagagaaucgagaaccugaacaagaagguggacgacggcuuccuggacaucuggaccuacaacgccgagcugcuggugcugcuggagaacgagagaacccuggacuaccacgacagcaacgugaagaaccuguacgagaaggugagaagccagcugaagaacaacgccaaggagaucggcaacggcugcuucgaguucuaccacaagugcgacaacaccugcauggagagcgugaagaacggcaccuacgacuaccccaaguacagcgaggaggccaagcugaacagagaggagaucgacggcgugaagcuggagagcaccagaaucuaccagauccuggccaucuacagcaccguggccagcagccuggugcugguggugagccugggcgccaucagcuucuggaugugcagcggccaccugcagugcagaaucugcaucuga

SEQ ID NO: 163622 - RNA, 1701 nt, Artificial Sequence
  derived and/or modified CDS sequence (opt4) from hemagglutinin__InfluenzaA__ACY77863
augaaggccauccugguggugcugcuguacaccuucgccaccgccaacgccgacacccugugcaucggcuaccacgccaacaacagcaccgacaccguggacaccgugcuggagaagaacgugaccgugacccacagcgugaaccugcuggaggacaagcacaacggcaagcugugcaagcugagaggcguggccccccugcaccugggcaagugcaacaucgccggcuggauccugggcaaccccgagugcgagagccugagcaccgccagcagcuggagcuacaucguggagaccagcagcagcgacaacggcaccugcuaccccggcgacuucaucgacuacgaggagcugagagagcagcugagcagcgugagcagcuucgagagauucgagaucuuccccaagaccagcagcuggcccaaccacgacagcaacaagggcgugaccgccgccugcccccacgccggcgccaagagcuucuacaagaaccugaucuggcuggugaagaagggcaacagcuaccccaagcugagcaagagcuacaucaacgacaagggcaaggaggugcuggugcuguggggcauccaccaccccagcaccagcgccgaccagcagagccuguaccagaacgccgacgccuacguguucgugggcaccagcagauacagcaagaaguucaagcccgagaucgccaucagacccaaggugagagaccaggagggcagaaugaacuacuacuggacccugguggagcccggcgacaagaucaccuucgaggccaccggcaaccugguggugcccagauacgccuucgccauggagagaaacgccggcagcggcaucaucaucagcgacacccccgugcacgacugcaacaccaccugccagacccccaagggcgccaucaacaccagccugcccuuccagaacauccaccccaucaccaucggcaagugccccaaguacgugaagagcaccaagcugagacuggccaccggccugagaaacgugcccagcauccagagcagaggccuguucggcgccaucgccggcuucaucgagggcggcuggaccggcaugguggacggcugguacggcuaccaccaccagaacgagcagggcagcggcuacgccgccgaccugaagagcacccagaacgccaucgacgagaucaccaacaaggugaacagcgugaucgagaagaugaacacccaguucaccgccgugggcaaggaguucaaccaccuggagaagagaaucgagaaccugaacaagaagguggacgacggcuuccuggacaucuggaccuacaacgccgagcugcuggugcugcuggagaacgagagaacccuggacuaccacgacagcaacgugaagaaccuguacgagaaggugagaagccagcugaagaacaacgccaaggagaucggcaacggcugcuucgaguucuaccacaagugcgacaacaccugcauggagagcgugaagaacggcaccuacgacuaccccaaguacagcgaggaggccaagcugaacagagaggagaucgacggcgugaagcuggagagcaccagaaucuaccagauccuggccaucuacagcaccguggccagcagccuggugcugguggugagccugggcgccaucagcuucuggaugugcagcggcaugagccugcagugcagaaucugcaucuga

SEQ ID NO: 163623 - RNA, 1701 nt, Artificial Sequence; identical to SEQ ID NO: 162716
  derived and/or modified CDS sequence (opt4) from hemagglutinin__InfluenzaA__ACY77874

SEQ ID NO: 163624 - RNA, 1701 nt, Artificial Sequence; identical to SEQ ID NO: 162716
  derived and/or modified CDS sequence (opt4) from hemagglutinin__InfluenzaA__ACY77884

SEQ ID NO: 163625 - RNA, 1701 nt, Artificial Sequence
  derived and/or modified CDS sequence (opt4) from hemagglutinin__InfluenzaA__ACY77904
augaaggccauccugguggugcugcuguacaccuucgccaccgccaacgccgacacccugugcaucggcuaccacgccaacaacagcaccgacaccguggacaccgugcuggagaagaacgugaccgugacccacagcgugaaccugcuggaggacaagcacaacggcaagcugugcaagcugagaggcguggccccccugcaccugggcaagugcaacaucgccggcuggauccugggcaaccccgagugcgagagccugagcaccgccagcagcuggagcuacaucguggagaccagcagcagcgacaacggcaccugcuaccccggcgacuucaucgacuacgaggagcugagagagcagcugagcagcgugagcagcuucgagagauucgagaucuuccccaagaccagcagcuggcccaaccacgacagcaacaagggcgugaccgccgccugcccccacgccggcgccaagagcuucuacaagaaccugaucuggcuggugaagaagggcaacagcuaccccaagcugagcaagagcuacaucaacgacaagggcaaggaggugcuggugcuguggggcauccaccaccccagcaccagcgccgaccagcagagccuguaccagaacgccgacgccuacguguucgugggcagcagcaaguacagcaagaaguucaagcccgagaucgccaucagacccaaggugagagaccaggagggcagaaugaacuacuacuggacccugguggagcccggcgacaagaucaccuucgaggccaccggcaaccugguggugcccagauacgccuucgccauggagagaaacgccggcagcggcaucaucaucagcgacacccccgugcacgacugcaacaccaccugccagacccccaagggcgccaucaacaccagccugcccuuccagaacauccaccccaucaccaucggcaagugccccaagcacgugaagagcaccaagcugagacuggccaccggccugagaaacgugcccagcauccagagcagaggccuguucggcgccaucgccggcuucaucgagggcggcuggaccggcaugguggacggcugguacggcuaccaccaccagaacgagcagggcagcggcuacgccgccgaccugaagagcacccagaacgccaucgacgagaucaccaacaaggugaacagcgugaucgagaagaugaacacccaguucaccgccgugggcaaggaguucaaccaccuggagaagagaaucgagaaccugaacaagaagguggacgacggcuuccuggacaucuggaccuacaacgccgagcugcuggugcugcuggagaacgagagaacccuggacuaccacgacagcaacgugaagaaccuguacgagaaggugagaagccagcugaagaacaacgccaaggagaucggcaacggcugcuucgaguucuaccacaagugcgacaacaccugcauggagagcgugaagaacggcaccuacgacuaccccaaguacagcgaggaggccaagcugaacagagaggagaucgacggcgugaagcuggagagcaccagaaucuaccagauccuggccaucuacagcaccguggccagcagccuggugcugguggugagccugggcgccaucagcuucuggaugugcagcaacggcagccugcagugcagaaucugcaucuga

SEQ ID NO: 163626 - RNA, 1701 nt, Artificial Sequence; identical to SEQ ID NO: 162909
  derived and/or modified CDS sequence (opt4) from hemagglutinin__InfluenzaA__ACY77914

SEQ ID NO: 163627 - RNA, 1701 nt, Artificial Sequence
  derived and/or modified CDS sequence (opt4) from hemagglutinin__InfluenzaA__ACY77924
augaaggccauccugguggugcugcuguacaccuucgccaccgccaacgccgacacccugugcaucggcuaccacgccaacaacagcaccgacaccguggacaccgugcuggagaagaacgugaccgugacccacagcgugaaccugcuggaggacaagcacgacggcaagcugugcaagcugagaggcguggccccccugcaccugggcaagugcaacaucgccggcuggauccugggcaaccccgagugcgagagccugagcaccgccagcagcuggagcuacaucguggagaccagcagcagcgacaacggcaccugcuaccccggcgacuucaucgacuacgaggagcugagagagcagcugagcagcgugagcagcuucgagagauucgagaucuuccccaagaccagcagcuggcccaaccacgacagcaacaagggcgugaccgccgccugcccccacgccggcgccaagagcuucuacaagaaccugaucuggcuggugaagaagggcaacagcuaccccaagcugagcaagagcuacaucaacgacaagggcaaggaggugcuggugcuguggggcauccaccaccccagcaccagcgccgaccagcagagccuguaccagaacgccgacgccuacguguucgugggcaccagcagauacagcaagaaguucaagcccgagaucgccaucagacccaaggugagagaccaggagggcagaaugaacuacuacuggacccugguggagcccggcgacaagaucaccuucgaggccaccggcaaccugguggugcccagauacgccuucgccauggagagaaacgccggcagcggcaucaucaucagcgacacccccgugcacgacugcaacaccaccugccagacccccaagggcgccaucaacaccagccugcccuuccagaacauccaccccaucaccaucggcaagugccccaaguacgugaagagcaccaagcugagacuggccaccggccugagaaacgugcccagcauccagagcagaggccuguucggcgccaucgccggcuucaucgagggcggcuggaccggcaugguggacggcugguacggcuaccaccaccagaacgagcagggcagcggcuacgccgccgaccugaagagcacccagaacgccaucgacgagaucaccaacaaggugaacagcgugaucgagaagaugaacacccaguucaccgccgugggcaaggaguucaaccaccuggagaagagaaucgagaaccugaacaagaagguggacgacggcuuccuggacaucuggaccuacaacgccgagcugcuggugcugcuggagaacgagagaacccuggacuaccacgacagcaacgugaagaaccuguacgagaaggugagaagccagcugaagaacaacgccaaggagaucggcaacggcugcuucgaguucuaccacaagugcgacaacaccugcauggagagcgugaagaacggcaccuacgacuaccccaaguacagcgaggaggccaagcugaacagagaggagaucgacggcgugaagcuggagagcaccagaaucuaccagauccuggccaucuacagcaccguggccagcagccuggugcugguggugagccugggcgccaucagcuucuggaugugcagcaacggcagccugcagugcagaaucugcaucuga

SEQ ID NO: 163628 - RNA, 1701 nt, Artificial Sequence; identical to SEQ ID NO: 163477
  derived and/or modified CDS sequence (opt4) from hemagglutinin__InfluenzaA__ACY77934

SEQ ID NO: 163629 - RNA, 1701 nt, Artificial Sequence
  derived and/or modified CDS sequence (opt4) from hemagglutinin__InfluenzaA__ACY77944
augaaggccauccugguggugcugcuguacaccuucgccaccgccaacgccgacacccugugcaucggcuaccacgccaacaacagcaccgacaccguggacaccgugcuggagaagaacgugaccgugacccacagcgugaaccugcuggaggacaagcacaacggcaagcugugcaagcugagaggcguggccccccugcaccugggcaagugcaacaucgccggcuggauccugggcaaccccgagugcgagagccugagcaccgccagcagcuggagcuacaucguggagaccagcagcagcgacaacggcaccugcuaccccggcgacuucaucgacuacgaggagcugagagagcagcugagcagcgugagcagcuucgagagauucgagaucuuccccaagaccagcagcuggcccaaccacgacagcaacaagggcgugaccgccgccugcccccacgccggcgccaagagcuucuacaagaaccugaucuggcuggugaagaagggcaacagcuaccccaagcugagcaagagcuacaucaacgacaagggcaaggaggugcuggugcuguggggcauccaccaccccagcaccagcgccgaccagcagagccuguaccagaacgccgacgccuacguguucgugggcagcagcagauacagcaagaaguucaagcccgagaucgccaucagacccaaggugagagaccaggagggcagaaugaacuacuacuggacccugguggagcccggcgacaagaucaccuucgaggccaccggcaaccugguggugcccagauacgccuucgccauggagagaaacgccgagagcggcaucaucaucagcgacacccccgugcacgacugcaacaccaccugccagacccccaagggcgccaucaacaccagccugcccuuccagaacauccaccccaucaccaucggcaagugccccaaguacgugaagagcaccaagcugagacuggccaccggccugagaaacgugcccagcauccagagcagaggccuguucggcgccaucgccggcuucaucgagggcggcuggaccggcaugguggacggcugguacggcuaccaccaccagaacgagcagggcagcggcuacgccgccgaccugaagagcacccagaacgccaucgacgagaucaccaacaaggugaacagcgugaucgagaagaugaacacccaguucaccgccgugggcaaggaguucaaccaccuggagaagagaaucgagaaccugaacaagaagguggacgacggcuuccuggacaucuggaccuacaacgccgagcugcuggugcugcuggagaacgagagaacccuggacuaccacgacagcaacgugaagaaccuguacgagaaggugagaagccagcugaagaacaacgccaaggagaucggcaacggcugcuucgaguucuaccacaagugcgacaacaccugcauggagagcgugaagaacggcaccuacgacuaccccaaguacagcgaggaggccaagcugaacagagaggagaucgacggcgugaagcuggagagcaccagaaucuaccagauccuggccaucuacagcaccguggccagcagccuggugcugguggugagccugggcgccaucagcuucuggaugugcagcaacggcagccugcagugcagaaucugcaucuga

SEQ ID NO: 163630 - RNA, 1701 nt, Artificial Sequence; identical to SEQ ID NO: 162716
  derived and/or modified CDS sequence (opt4) from hemagglutinin__InfluenzaA__ACY77954

SEQ ID NO: 163631 - RNA, 1701 nt, Artificial Sequence; identical to SEQ ID NO: 162716
  derived and/or modified CDS sequence (opt4) from hemagglutinin__InfluenzaA__ACY77964

SEQ ID NO: 163632 - RNA, 1701 nt, Artificial Sequence; identical to SEQ ID NO: 162716
  derived and/or modified CDS sequence (opt4) from hemagglutinin__InfluenzaA__ACY77974

SEQ ID NO: 163633 - RNA, 1701 nt, Artificial Sequence; identical to SEQ ID NO: 162716
  derived and/or modified CDS sequence (opt4) from hemagglutinin__InfluenzaA__ACY77984

SEQ ID NO: 163634 - RNA, 1701 nt, Artificial Sequence; identical to SEQ ID NO: 162716
  derived and/or modified CDS sequence (opt4) from hemagglutinin__InfluenzaA__ACY77994

SEQ ID NO: 163635 - RNA, 1701 nt, Artificial Sequence
  derived and/or modified CDS sequence (opt4) from hemagglutinin__InfluenzaA__ACY79633
augaaggagauccugguggugcugcuguacaccuucgccaccgccaacgccgacacccugugcaucggcuaccacgccaacaacagcaccgacaccguggacaccgugcuggagaagaacgugaccgugacccacagcgugaaccugcuggaggacaagcacaacggcaagcugugcaagcugagaggcguggccccccugcaccugggcaagugcaacaucgccggcuggauccugggcaaccccgagugcgagagccugagcaccgccagcagcuggagcuacaucguggagaccagcagcagcgacaacggcaccugcuaccccggcgacuucaucgacuacgaggagcugagagagcagcugagcagcgugagcagcuucgagagauucgagaucuuccccaagaccagcagcuggcccaaccacgacagcaacaagggcgugaccgccgccugcccccacgccggcgccaagagcuucuacaagaaccugaucuggcuggugaagaagggcaacagcuaccccaagcugagcaagagcuacaucaacgacaagggcaaggaggugcuggugcuguggggcauccaccaccccagcaccagcgccgaccagcagagccuguaccagaacgccgacgccuacguguucgugggcaccagcagauacagcaagaaguucaagcccgagaucgccaucagacccaaggugagagaccaggagggcagaaugaacuacuacuggacccugguggagcccggcgacaagaucaccuucgaggccaccggcaaccugguggugcccagauacgccuucgccauggagagaaacgccagaagcggcaucaucaucagcgacacccccgugcacgacugcaacaccaccugccagacccccaagggcgccaucaacaccagccugcccuuccagaacauccaccccaucaccaucggcaagugccccaaguacgugaagagcaccaagcugagacuggccaccggccugagaaacgugcccagcauccagagcagaggccuguucggcgccaucgccggcuucaucgagggcggcuggaccggcaugguggacggcugguacggcuaccaccaccagaacgagcagggcagcggcuacgccgccgaccugaagagcacccagaacgccaucgacgagaucaccaacaaggugaacagcgugaucgagaagaugaacacccaguucaccgccgugggcaaggaguucaaccaccuggagaagagaaucgagaaccugaacaagaagguggacgacggcuuccuggacaucuggaccuacaacgccgagcugcuggugcugcuggagaacgagagaacccuggacuaccacgacagcaacgugaagaaccuguacgagaaggugagaagccagcugaagaacaacgccaaggagaucggcaacggcugcuucgaguucuaccacaagugcgacaacaccugcauggagagcgugaagaacggcaccuacgacuaccccaaguacagcgaggaggccaagcugaacagagaggagaucgacggcgugaagcuggagagcaccagaaucuaccagauccuggccaucuacagcaccguggccagcagccuggugcugguggugagccugggcgccaucagcuucuggaugugcagcaacggcagccugcagugcagaaucugcaucuga

SEQ ID NO: 163636 - RNA, 1701 nt, Artificial Sequence; identical to SEQ ID NO: 163527
  derived and/or modified CDS sequence (opt4) from hemagglutinin__InfluenzaA__ACZ01953

SEQ ID NO: 163637 - RNA, 1701 nt, Artificial Sequence
  derived and/or modified CDS sequence (opt4) from hemagglutinin__InfluenzaA__ACZ05050
augaaggccauccugguggugcugcuguacaccuucgccaccgccaacgccgacacccugugcaucggcuaccacgccaacaacagcaccgacaccguggacaccgugcuggagaagaacgugaccgugacccacagcgugaaccugcuggaggacaagcacaacggcaagcugugcaagcugagaggcguggccccccugcaccugggcaagugcaacaucgccggcuggauccugggcaaccccgagugcgagagccugagcaccgccagcagcuggagcuacaucguggagaccagcagcagcgacaacggcaccugcuaccccggcgacuucaucgacuacgaggagcugagagagcagcugagcagcgugagcagcuucgagagauucgagaucuuccccaagaccagcagcuggcccaaccacgacagcaacaagggcgugaccgccgccugcagccacgccggcgccaagagcuucuacaagaaccugaucuggcuggugaagaagggcaacagcuaccccaagcugagcaagagcuacaucaacgacaagggcaaggaggugcuggugcuguggggcauccaccaccccagcaccagcgccgaccagcagagccuguaccagaacgccgacgccuacguguucgugggcagcagcagauacagcaagaaguucaagcccgagaucgccaucagacccaaggugagagaccaggagggcagaaugaacuacuacuggacccugguggagcccggcgacaagaucaccuucgaggccaccggcaaccugguggugcccagauacgccuucgccauggagagaaacgccggcagcggcaucaucaucagcgacacccccgugcacgacugcaacaccaccugccagacccccaagggcgccaucaacaccagccugcccuuccagaacauccaccccaucaccaucggcaagugccccaaguacgugaagagcaccaagcugagacuggccaccggccugagaaacgugcccagcauccagagcagaggccuguucggcgccaucgccggcuucaucgagggcggcuggaccggcaugguggacggcugguacggcuaccaccaccagaacgagcagggcagcggcuacgccgccgaccugaagagcacccagaacgccaucgacgagaucaccaacaaggugaacagcgugaucgagaagaugaacacccaguucaccgccgugggcaaggaguucaaccaccuggagaagagaaucgagaaccugaacaagaagguggacgacggcuuccuggacaucuggaccuacaacgccgagcugcuggugcugcuggagaacgagagaacccuggacuaccacgacagcaacgugaagaaccuguacgagaaggugagaagccagcugaagaacaacgccaaggagaucggcaacggcugcuucgaguucuaccacaagugcgacaacaccugcauggagagcgugaagaacggcaccuacgacuaccccaaguacagcgaggaggccaagcugaacagagaggagaucgacggcgugaagcuggagagcaccagaaucuaccagauccuggccaucuacagcaccguggccagcagccuggugcugguggugagccugggcgccaucagcuucuggaugugcagcaacggcagccugcagugcagaaucugcaucuga

SEQ ID NO: 163638 - RNA, 1701 nt, Artificial Sequence
  derived and/or modified CDS sequence (opt4) from hemagglutinin__InfluenzaA__ACZ05061
auggaggccauccugguggugcugcuguacaccuucaccaccgccaacgccgacacccugugcaucggcuaccacgccaacaacagcaccgacaccguggacaccgugcuggagaagaacgugaccgugacccacagcgugaaccugcuggaggacaagcacaacggcaagcugugcaagcugagaggcguggccccccugcaccugggcaagugcaacaucgccggcuggauccugggcaaccccgagugcgagagccugagcaccgccagcagcuggagcuacaucguggagaccagcagcagcgacaacggcaccugcuaccccggcgacuucaucgacuacgaggagcugagagagcagcugagcagcgugagcagcuucgagagauucgagaucuuccccaagaccagcagcuggcccaaccacgacagcaacaagggcgugaccgccgccugcccccacgccggcgccaagagcuucuacaagaaccugaucuggcuggugaagaagggcaacagcuaccccaagcugagcaagagcuacaucaacgacaagggcaaggaggugcuggugcuguggggcauccaccaccccagcaccagcgccgaccagcagagccuguaccagaacgccgacgccuacguguucgugggcagcagcagauacagcaagaaguucaagcccgagaucgccaucagacccaaggugagagaccaggagggcagaaugaacuacuacuggacccugguggagcccggcgacaagaucaccuucgaggccaccggcaaccugguggugcccagauacgccuucgccauggagagaaacgccggcagcggcaucaucaucagcgacacccccgugcacgacugcaacaccaccugccagacccugaagggcgccaucaacaccagccugcccuuccagaacauccaccccaucaccaucggcaagugccccaaguacgugaagagcaccaagcugagacuggccaccggccugagaaacgugcccagcauccagagcagaggccuguucggcgccaucgccggcuucaucgagggcggcuggaccggcaugguggacggcugguacggcuaccaccaccagaacgagcagggcagcggcuacgccgccgaccugaagagcacccagaacgccaucgacgagaucaccaacaaggugaacagcgugaucgagaagaugaacacccaguucaccgccgugggcaaggaguucaaccaccuggagaagagaaucgagaaccugaacaagaagguggacgacggcuuccuggacaucuggaccuacaacgccgagcugcuggugcugcuggagaacgagagaacccuggacuaccacgacagcaacgugaagaaccuguacgagaaggugagaagccagcugaagaacaacgccaaggagaucggcaacggcugcuucgaguucuaccacaagugcgacaacaccugcauggagagcgugaagaacggcaccuacgacuaccccaaguacagcgaggaggccaagcugaacagagaggagaucgacggcgugaagcuggagagcaccagaaucuaccagauccuggccaucuacagcaccguggccagcagccuggugcugguggugagccugggcgccaucagcuucuggaugugcagcaacggcagccugcagugcagaaucugcaucuga

SEQ ID NO: 163639 - RNA, 1701 nt, Artificial Sequence; identical to SEQ ID NO: 162716
  derived and/or modified CDS sequence (opt4) from hemagglutinin__InfluenzaA__ACZ05071

SEQ ID NO: 163640 - RNA, 1701 nt, Artificial Sequence; identical to SEQ ID NO: 162716
  derived and/or modified CDS sequence (opt4) from hemagglutinin__InfluenzaA__ACZ05081

SEQ ID NO: 163641 - RNA, 1701 nt, Artificial Sequence; identical to SEQ ID NO: 162716
  derived and/or modified CDS sequence (opt4) from hemagglutinin__InfluenzaA__ACZ05091

SEQ ID NO: 163642 - RNA, 1701 nt, Artificial Sequence; identical to SEQ ID NO: 162716
  derived and/or modified CDS sequence (opt4) from hemagglutinin__InfluenzaA__ACZ05101

SEQ ID NO: 163643 - RNA, 1701 nt, Artificial Sequence; identical to SEQ ID NO: 162716
  derived and/or modified CDS sequence (opt4) from hemagglutinin__InfluenzaA__ACZ05111

SEQ ID NO: 163644 - RNA, 1701 nt, Artificial Sequence
  derived and/or modified CDS sequence (opt4) from hemagglutinin__InfluenzaA__ACZ05121
augaaggccauccugguggugcugcuguacaccuucgccaccgccaacgccgacacccugugcaucggcuaccacgccaacaacagcaccgacaccguggacaccgugcuggagaagaacgugaccgugacccacagcgugaaccugcuggaggacaagcacaacggcaagcugugcaagcugagaggcguggccccccugcaccugggcaagugcaacaucgccggcuggauccugggcaaccccgagugcgagagccugagcaccgccagcagcuggagcuacaucguggagaccagcagcagcgacaacggcaccugcuaccccggcgacuucaucgacuacgaggagcugagagagcagcugagcagcgugagcagcuucgagagauucgagaucuuccccaagaccagcagcuggcccaaccacgacagcaacaagggcgugaccgccgccugcccccacgccggcgccaagagcuucuacaacaaccugaucuggcuggugaagaagggcaacagcuaccccaagcugagcaagagcuacaucaacgacaagggcaaggaggugcuggugcuguggggcauccaccaccccagcaccagcgccgaccagcagagccuguaccagaacgccgacgccuacguguucgugggcagcagcagauacagcaagaaguucaagcccgagaucgccaucagacccaaggugagagaccaggagggcagaaugaacuacuacuggacccugguggagcccggcgacaagaucaccuucgaggccaccggcaaccugguggugcccagauacgccuucgccauggagagaaacgccggcagcggcaucaucaucagcgacacccccgugcacgacugcaacaccaccugccagacccccaagggcgccaucaacaccagccugcccuuccagaacauccaccccaucaccaucggcaagugccccaaguacgugaagagcaccaagcugagacuggccaccggccugagaaacgugcccagcauccagagcagaggccuguucggcgccaucgccggcuucaucgagggcggcuggaccggcaugguggacggcugguacggcuaccaccaccagaacgagcagggcagcggcuacgccgccgaccugaagagcacccagaacgccaucgacgagaucaccaacaaggugaacagcgugaucgagaagaugaacacccaguucaccgccgugggcaaggaguucaaccaccuggagaagagaaucgagaaccugaacaagaagguggacgacggcuuccuggacaucuggaccuacaacgccgagcugcuggugcugcuggagaacgagagaacccuggacuaccacgacagcaacgugaagaaccuguacgagaaggugagaagccagcugaagaacaacgccaaggagaucggcaacggcugcuucgaguucuaccacaagugcgacaacaccugcaugggcagcgugaagaacggcaccuacgacuaccccaaguacagcgaggaggccaagcugaacagagaggagaucgacggcgugaagcuggagagcaccagaaucuaccagauccuggccaucuacagcaccguggccagcagccuggugcugguggugagccugggcgccaucagcuucuggaugugcagcaacggcagccugcagugcagaaucugcaucuga

SEQ ID NO: 163645 - RNA, 1701 nt, Artificial Sequence; identical to SEQ ID NO: 162716
  derived and/or modified CDS sequence (opt4) from hemagglutinin__InfluenzaA__ACZ05131

SEQ ID NO: 163646 - RNA, 1701 nt, Artificial Sequence; identical to SEQ ID NO: 162716
  derived and/or modified CDS sequence (opt4) from hemagglutinin__InfluenzaA__ACZ05141

SEQ ID NO: 163647 - RNA, 1701 nt, Artificial Sequence; identical to SEQ ID NO: 162716
  derived and/or modified CDS sequence (opt4) from hemagglutinin__InfluenzaA__ACZ05151

SEQ ID NO: 163648 - RNA, 1701 nt, Artificial Sequence
  derived and/or modified CDS sequence (opt4) from hemagglutinin__InfluenzaA__ACZ05172
augaagaccaucaucgcccugagcuacauccugugccugguguucgcccagaagcugcccggcaacgacaacagcaccgccacccugugccugggccaccacgccgugcccaacggcaccaucgugaagaccaucaccaacgaccagaucgaggugaccaacgccaccgagcuggugcagagcagcagcaccggcgagaucugcgacagcccccaccagauccuggacggcaagaacugcacccugaucgacgcccugcugggcgacccccagugcgacggcuuccagaacaagaagugggaccuguucguggagagaagcaaggccuacagcaacugcuaccccuacgacgugcccgacuacgccagccugagaagccugguggccagcagcggcacccuggaguucaacaacgagagcuucaacuggaccggcgugacccaggacggcaccagcagcgccugcaucagaagaagcaagaacagcuucuucagcagacugaacuggcugacccaccugaacuucaaguaccccgcccugaacgugaccaugcccaacaacgagcaguucgacaagcuguacaucuggggcgugcaccaccccggcaccgacaaggaccagaucuuccuguacgcccaggccagcggcagaaucaccgugagcaccaagagaagccagcagaccgccauccccaacaucggcagcagacccagagugagaaacauccccagcagaaucagcaucuacuggaccaucgugaagcccggcgacauccugcugaucaacagcaccggcaaccugaucgcccccagaggcuacuucaagaucagaagcggcaagagcagcaucaugagaagcgacgcccccaucggcaagugcaacagcgagugcaucacccccaacggcagcauccccaacgacaagcccuuccagaacgugaacagaaucaccuacggcgccugccccagauacgugaagcagaacacccugaagcuggccaccggcaugagaaacgugcccgagaagcagaccagaggcaucuucggcgccaucgccggcuucaucgagaacggcugggagggcaugguggacggcugguacggcuucagacaccagaacagcgagggcagaggccaggccgccgaccugaagagcacccaggccgccaucgaccagaucaacggcaagcugaacagacugaucggcaagaccaacgagaaguuccaccagaucgagaaggaguucagcgagguggagggcagaauccaggaccuggagaaguacguggaggacaccaagaucgaccuguggagcuacaacgccgagcugcugguggcccuggagaaccagcacaccaucgaccugaccgacagcgagaugaacaagcuguucgagaagaccaagaagcagcugagagagaacgccgaggacaugggcaacggcugcuucaagaucuaccacaagugcgacaacgccugcaucggcagcaucagaaacggcaccuacgaccacgacguguacagagacgaggcccugaacaacagauuccagaucaagggcguggagcugaagagcggcuacaaggacuggauccuguggaucagcuucgccaucagcugcuuccugcugugcguggcccugcugggcuucaucaugugggccugccagaagggcaacaucagaugcaacaucugcaucuga

SEQ ID NO: 163649 - RNA, 1698 nt, Artificial Sequence; identical to SEQ ID NO: 163191
  derived and/or modified CDS sequence (opt4) from hemagglutinin__InfluenzaA__ACZ05194

SEQ ID NO: 163650 - RNA, 1701 nt, Artificial Sequence; identical to SEQ ID NO: 163648
  derived and/or modified CDS sequence (opt4) from hemagglutinin__InfluenzaA__ACZ05205

SEQ ID NO: 163651 - RNA, 1701 nt, Artificial Sequence
  derived and/or modified CDS sequence (opt4) from hemagglutinin__InfluenzaA__ACZ05216
augaagaccaucaucgcccugagcuacauccugugccugguguucgcccagaagauccccggcaacgacaacaacaccgccacccugugccugggccaccacgccgugcccaacggcaccaucgugaagaccaucaccaacgaccagaucgaggugaccaacgccaccgagcuggugcagagcagcagcaccggcgagaucugcgacagcccccaccagauccuggacggcgagaacugcacccugaucgacgcccugcugggcgacccccagugcgacggcuuccagaacaagaagugggaccuguucguggagagaagcaaggccuacagcaacugcuaccccuacgacgugcccgacuacgccagccugagaagccugguggccagcagcggcacccuggaguucaacaacgagagcuucaacuggaccggcgugacccagaacggcaccagcagcgccugcaucagaagaagcaacaacagcuucuucagcagacugaacuggcugacccaccugaaguucaaguaccccgcccugaacgugaccaugcccaacaacgagcaguucgacaagcuguacaucuggggcgugcaccaccccggcaccgacaacgaccagaucuuccuguacgcccaggccagcggcagaaucaccgugagcaccaagagaagccagcagaccgugauccccaacaucggcagcagacccagagugagaaacauccccagcagaaucagcaucuacuggaccaucgugaagcccggcgacauccugcugaucaacagcaccggcaaccugaucgcccccagaggcuacuucaagaucagaagcggcaagagcagcaucaugagaagcgacgcccccaucggcaagugcaacagcgagugcaucacccccaacggcagcauccccaacgacaagcccuuccagaacgugaacagaaucaccuacggcgccugccccagauacgugaagcagaacacccugaagcuggccaccggcaugagaaacgugcccgagaagcagaccagaggcaucuucggcgccaucgccggcuucaucgagaacggcugggagggcaugguggacggcugguacggcuucagacaccagaacagcgagggcagaggccaggccgccgaccugaagagcacccaggccgccaucgaccagaucaacggcaagcugaacagacugaucggcaagaccaacgagaaguuccaccagaucgagaaggaguucagcgagguggagggcagaauccaggaccuggagaaguacguggaggacaccaagaucgaccuguggagcuacaacgccgagcugcugguggcccuggagaaccagcacaccaucgaccugaccgacagcgagaugaacaagcuguucgagaagaccaagaagcagcugagagagaacgccgaggacaugggcaacggcugcuucaagaucuaccacaagugcgacaacgccugcaucggcagcaucagaaacggcaccuacgaccacgacguguacagagacgaggcccugaacaacagauuccagaucaagggcguggagcugaagagcggcuacaaggacuggauccuguggaucagcuucgccaucagcugcuuccugcugugcguggcccugcugggcuucaucaugugggccugccagaagggcaacaucagaugcaacaucugcaucuga

SEQ ID NO: 163652 - RNA, 1701 nt, Artificial Sequence; identical to SEQ ID NO: 163648
  derived and/or modified CDS sequence (opt4) from hemagglutinin__InfluenzaA__ACZ05227

SEQ ID NO: 163653 - RNA, 1701 nt, Artificial Sequence
  derived and/or modified CDS sequence (opt4) from hemagglutinin__InfluenzaA__ACZ05238
augaagaccaucaucgcccugagcuacauccugugccugguguucgcccagaagcugcccggcaacgacaacagcaccgccacccugugccugggccaccacgccgugcccaacggcaccaucgugaagaccaucaccaacgaccagaucgaggugaccaacgccaccgagcuggugcagagcagcagcaccggcgagaucugcgacagcccccaccagauccuggacggcaagaacugcacccugaucgacgcccugcugggcgacccccagugcgacggcuuccagaacaagaagugggaccuguucguggagagaagcaaggccuacagcaacugcuaccccuacgacgugcccgacuacgccagccugagaagccugguggccagcagcggcacccuggaguucaacaacgagagcuucaacugggccggcgugacccagaacggcaccagcagcgccugcaucagaagaagcaagaacagcuucuucagcagacugaacuggcugacccaccugaacuucaaguaccccgcccugaacgugaccaugcccaacaacgagcaguucgacaagcuguacaucuggggcgugcaccaccccggcaccgacaaggaccagaucuuccuguacgcccaggccagcggcagaaucaccgugagcaccaagagaagccagcagaccgccauccccaacaucggcagcagacccagagugagaaacauccccagcagaaucagcaucuacuggaccaucgugaagcccggcgacauccugcugaucaacagcaccggcaaccugaucgcccccagaggcuacuucaagaucagaagcggcaagagcagcaucaugagaagcgacgcccccaucggcaagugcaacagcgagugcaucacccccaacggcagcauccccaacgacaagcccuuccagaacgugaacagaaucaccuacggcgccugccccagauacgugaagcagaacacccugaagcuggccaccggcaugagaaacgugcccgagaagcagaccagaggcaucuucggcgccaucgccggcuucaucgagaacggcugggagggcaugguggacggcugguacggcuucagacaccagaacagcgagggcagaggccaggccgccgaccugaagagcacccaggccgccaucgaccagaucaacggcaagcugaacagacugaucggcaagaccaacgagaaguuccaccagaucgagaaggaguucagcgagguggagggcagaauccaggaccuggagaaguacguggaggacaccaagaucgaccuguggagcuacaacgccgagcugcugguggcccuggagaaccagcacaccaucgaccugaccgacagcgagaugaacaagcuguucgagaagaccaagaagcagcugagagagaacgccgaggacaugggcaacggcugcuucaagaucuaccacaagugcgacaacgccugcaucggcagcaucagaaacggcaccuacgaccacgacguguacagagacgaggcccugaacaacagauuccagaucaagggcguggagcugaagagcggcuacaaggacuggauccuguggaucagcuucgccaucagcugcuuccugcugugcguggcccugcugggcuucaucaugugggccugccagaagggcaacaucagaugcaacaucugcaucuga

SEQ ID NO: 163654 - RNA, 1701 nt, Artificial Sequence; identical to SEQ ID NO: 163648
  derived and/or modified CDS sequence (opt4) from hemagglutinin__InfluenzaA__ACZ05249

SEQ ID NO: 163655 - RNA, 1701 nt, Artificial Sequence; identical to SEQ ID NO: 163648
  derived and/or modified CDS sequence (opt4) from hemagglutinin__InfluenzaA__ACZ05260

SEQ ID NO: 163656 - RNA, 1701 nt, Artificial Sequence
  derived and/or modified CDS sequence (opt4) from hemagglutinin__InfluenzaA__ACZ05271
augaagaccaucaucgcccugagcuacauccugugccugguguucgcccagaagcugcccggcaacgacaacagcaccgccacccugugccugggccaccacgccgugcccaacggcaccaucgugaagaccaucaccaacgaccagaucgaggugaccaacgccaccgagcuggugcagagcagcagcaccggcgagaucugcgacagcccccaccagauccuggacggcgagaacugcacccugaucgacgcccugcugggcgacccccagugcgacggcuuccagaacaagaagugggaccuguucguggagagaagcaaggccuacagcaacugcuaccccuacgacgugcccgacuacgccagccugagaagccugguggccagcagcggcacccuggaguucaacaacgagagcuucaacuggaccggcgugacccagaacggcaccagcagcgccugcaucagaagaagcaacaacagcuucuucagcagacugaacuggcugacccaccugaaguucaaguaccccgcccugaacgugaccaugcccaacaacgagcaguucgacaagcuguacaucuggggcgugcaccaccccggcaccgacaacgaccagaucuuccuguacgcccaggccagcggcagaaucaccgugagcaccaagagaagccagcagaccgugauccccaacaucggcagcagacccagagugagaaacauccccagcagaaucagcaucuacuggaccaucgugaagcccggcgacauccugcugaucaacagcaccggcaaccugaucgcccccagaggcuacuucaagaucagaagcggcaagagcagcaucaugagaagcgacgcccccaucggcaagugcaacagcgagugcaucacccccaacggcagcauccccaacgacaagcccuuccagaacgugaacagaaucaccuacggcgccugccccagauacgugaagcagaacacccugaagcuggccaccggcaugagaaacgugcccgagagacagaccagaggcaucuucggcgccaucgccggcuucaucgagaacggcugggagggcaugguggacggcugguacggcuucagacaccagaacagcgagggcagaggccaggccgccgaccugaagagcacccaggccgccaucgaccagaucaacggcaagcugaacagacugaucggcaagaccaacgagaaguuccaccagaucgagaaggaguucagcgagguggagggcagaauccaggaccuggagaaguacguggaggacaccaagaucgaccuguggagcuacaacgccgagcugcugguggcccuggagaaccagcacaccaucgaccugaccgacagcgagaugaacaagcuguucgagaagaccaagaagcagcugagagagaacgccgaggacaugggcaacggcugcuucaagaucuaccacaagugcgacaacgccugcaucggcagcaucagaaacggcaccuacgaccacgacguguacagagacgaggcccugaacaacagauuccagaucaagggcguggagcugaagagcggcuacaaggacuggauccuguggaucagcuucgccaucagcugcuuccugcugugcguggcccugcugggcuucaucaugugggccugccagaagggcaacaucagaugcaacaucugcaucuga

SEQ ID NO: 163657 - RNA, 1701 nt, Artificial Sequence
  derived and/or modified CDS sequence (opt4) from hemagglutinin__InfluenzaA__ACZ05282
augaagaccaccaucgcccugagcuacauccugugccugguguucgcccagaagcugcccggcaacgacaacagcaccgccacccugugccugggccaccacgccgugcccaacggcaccaucgugaagaccaucaccaacgaccagaucgaggugaccaacgccaccgagcuggugcagagcagcagcaccggcgagaucugcgacagcccccaccagauccuggacggcgagaacugcacccugaucgacgcccugcugggcgacccccagugcgacggcuuccagaacaagaagugggaccuguucguggagagaagcaaggccuacagcaacugcuaccccuacgacgugcccgacuacgccagccugagaagccugguggccagcagcggcacccuggaguucaacaacgagagcuucaacuggaccggcgugacccagaacggcaccagcagcgccugcaucagaagaagcaacaacagcuucuucagcagacugaacuggcugacccaccugaaguucaaguaccccgcccugaacgugaccaugcccaacaacgagcaguucgacaagcuguacaucuggggcgugcaccaccccggcaccgacaacgaccagaucuuccuguacgcccaggccagcggcagaaucaccgugagcaccaagagaagccagcagaccgugauccccaacaucggcagcagacccagagugagaaacauccccagcagaaucagcaucuacuggaccaucgugaagcccggcgacauccugcugaucaacagcaccggcaaccugaucgcccccagaggcuacuucaagauccagagcggcaagagcagcaucaugagaagcgacgcccccaucggcaagugcaacagcgagugcaucacccccaacggcagcauccccaacgacaagcccuuccagaacgugaacagaaucaccuacggcgccugccccagauacgugaagcagaacacccugaagcuggccaccggcaugagaaacgugcccgagaagcagaccagaggcaucuucggcgccaucgccggcuucaucgagaacggcugggagggcaugguggacggcugguacggcuucagacaccagaacagcgagggcagaggccaggccgccgaccugaagagcacccaggccgccaucgaccagaucaacggcaagcugaacagacugaucggcaagaccaacgagaaguuccaccagaucgagaaggaguucagcgagguggagggcagaauccaggaccuggagaaguacguggaggacaccaagaucgaccuguggagcuacaacgccgagcugcugguggcccuggagaaccagcacaccaucgaccugaccgacagcgagaugaacaagcuguucgagaagaccaagaagcagcugagagagaacgccgaggacaugggcaacggcugcuucaagaucuaccacaagugcgacaacgccugcaucggcagcaucagaaacggcaccuacgaccacgacguguacagagacgaggcccugaacaacagauuccagaucaagggcguggagcugaagagcggcuacaaggacuggauccuguggaucagcuucgccaucagcugcuuccugcugugcguggcccugcugggcuucaucaugugggccugccagaagggcaacaucagaugcaacaucugcaucuga

SEQ ID NO: 163658 - RNA, 1701 nt, Artificial Sequence; identical to SEQ ID NO: 163648
  derived and/or modified CDS sequence (opt4) from hemagglutinin__InfluenzaA__ACZ05304

SEQ ID NO: 163659 - RNA, 1701 nt, Artificial Sequence; identical to SEQ ID NO: 163471
  derived and/or modified CDS sequence (opt4) from hemagglutinin__InfluenzaA__ACZ05315

SEQ ID NO: 163660 - RNA, 1701 nt, Artificial Sequence; identical to SEQ ID NO: 163648
  derived and/or modified CDS sequence (opt4) from hemagglutinin__InfluenzaA__ACZ05326

SEQ ID NO: 163661 - RNA, 1701 nt, Artificial Sequence
  derived and/or modified CDS sequence (opt4) from hemagglutinin__InfluenzaA__ACZ05337
augaagaccaucaucgcccugagcuacauccugugccugguguucacccagaagcugcccggcaacgacaacagcaccgccacccugugccugggccaccacgccgugcccaacggcaccaucgugaagaccaucaccaacgaccagaucgaggugaccaacgccaccgagcuggugcagagcagcagcaccggcgagaucugcgacagcccccaccagauccuggacggcaagaacugcacccugaucgacgcccugcugggcgacccccagugcgacggcuuccagaacaagaagugggaccuguucguggagagaagcaaggccuacagcaacugcuaccccuacgacgugcccgacuacgccagccugagaagccugguggccagcagcggcacccuggaguucaacaacgagagauucaacuggaccggcgugacccagaacggcaccagcagcgccugcaucagaagaagcaagaacagcuucuucagcagacugaacuggcugacccaccugaacuucaaguaccccgcccugaacgugaccaugcccaacaacgagcaguucgacaagcuguacaucuggggcgugcaccaccccggcaccgacaaggaccagaucuuccuguacgcccaggccagcggcagaaucaccgugagcaccaagagaagccagcagaccgugauccccaacaucggcagcagacccagagugagaaacauccccagcagaaucagcaucuacuggaccaucgugaagcccggcgacauccugcugaucagcagcaccggcaaccugaucgcccccagaggcuacuucaagaucagaagcggcaagagcagcaucaugagaagcgacgcccccaucggcaagugcaacagcgagugcaucacccccaacggcagcauccccaacgacaagcccuuccagaacgugaacagaaucaccuacggcgccugccccagauacgugaagcagaacacccugaagcuggccaccggcaugagaaacgugcccgagaagcagaccagaggcaucuucggcgccaucgccggcuucaucgagaacggcugggagggcaugguggacggcugguacggcuucagacaccagaacagcgagggcagaggccaggccgccgaccugaagagcacccaggccgccaucgaccagaucaacggcaagcugaacagacugaucggcaagaccaacgagaaguuccaccagaucgagaaggaguucagcgagguggagggcagaauccaggaccuggagaaguacguggaggacaccaagaucgaccuguggagcuacaacgccgagcugcugguggcccuggagaaccagcacaccaucgaccugaccgacagcgagaugaacaagcuguucgagaagaccaagaagcagcugagagagaacgccgaggacaugggcaacggcugcuucaagaucuaccacaagugcgacaacgccugcaucggcagcaucagaaacggcaccuacgaccacgacguguacagagacgaggcccugaacaacagauuccagaucaagggcguggagcugaagagcggcuucaaggacuggauccuguggaucagcuucgccaucagcugcuuccugcugugcguggcccugcugggcuucaucaugugggccugccagaagggcaacaucagaugcaacaucugcaucuga

SEQ ID NO: 163662 - RNA, 1701 nt, Artificial Sequence; identical to SEQ ID NO: 163648
  derived and/or modified CDS sequence (opt4) from hemagglutinin__InfluenzaA__ACZ05348

SEQ ID NO: 163663 - RNA, 1701 nt, Artificial Sequence; identical to SEQ ID NO: 163653
  derived and/or modified CDS sequence (opt4) from hemagglutinin__InfluenzaA__ACZ05359

SEQ ID NO: 163664 - RNA, 1701 nt, Artificial Sequence; identical to SEQ ID NO: 163648
  derived and/or modified CDS sequence (opt4) from hemagglutinin__InfluenzaA__ACZ05370

SEQ ID NO: 163665 - RNA, 1701 nt, Artificial Sequence
  derived and/or modified CDS sequence (opt4) from hemagglutinin__InfluenzaA__ACZ05392
augaagaccaucaucgcccugagcuacauccugugccugguguucgcccagaagcugcccggcaacgacaacagcaccgccacccugugccugggccaccacgccgugcccaacggcaccaucgugaagaccaucaccaacgaccagaucgaggugaccaacgccaccgagcuggugcagagcagcagcaccggcgagaucugcgacagcccccaccagauccuggacggcaagaacugcacccugaucgacgcccugcugggcgacccccagugcgacggcuuccagaacaagaagugggaccuguucguggagagaagcaaggccuacagcaacugcuaccccuacgacgugcccgacuacgccagccugagaagccugguggccagcagcggcacccuggaguucaacaacgagagcuucaacuggaccggcgugacccagaacggcgccagcagcgccugcaucagaagaagcaagaacagcuucuucagcagacugaacuggcugacccaccugaacuucaaguaccccgcccugaacgugaccaugcccaacaacgagcaguucgacaagcuguacaucuggggcgugcaccaccccggcaccgacaaggaccagaucuuccuguacgcccaggccagcggcagaaucaccgugagcaccaagagaagccagcagaccgccauccccaacaucggcagcagacccagagugagaaacauccccagcagaaucagcaucuacuggaccaucgugaagcccggcgacauccugcugaucaacagcaccggcaaccugaucgcccccagaggcuacuucaagaucagaagcggcaagagcagcaucaugagaagcgacgcccccaucggcaagugcaacagcgagugcaucacccccaacggcagcauccccaacgacaagcccuuccagaacgugaacagaaucaccuacggcgccugccccagauacgugaagcagaacacccugaagcuggccaccggcaugagaaacgugcccgagaagcagaccagaggcaucuucggcgccaucgccggcuucaucgagaacggcugggagggcaugguggacggcugguacggcuucagacaccagaacagcgagggcagaggccaggccgccgaccugaagagcacccaggccgccaucgaccagaucaacggcaagcugaacagacugaucggcaagaccaacgagaaguuccaccagaucgagaaggaguucagcgagguggagggcagaauccaggaccuggagaaguacguggaggacaccaagaucgaccuguggagcuacaacgccgagcugcugguggcccuggagaaccagcacaccaucgaccugaccgacagcgagaugaacaagcuguucgagaagaccaagaagcagcugagagagaacgccgaggacaugggcaacggcugcuucaagaucuaccacaagugcgacaacgccugcaucggcagcaucagaaacggcaccuacgaccacgacguguacagagacgaggcccugaacaacagauuccagaucaagggcguggagcugaagagcggcuacaaggacuggauccuguggaucagcuucgccaucagcugcuuccugcugugcguggcccugcugggcuucaucaugugggccugccagaagggcaacaucagaugcaacaucugcaucuga

SEQ ID NO: 163666 - RNA, 1701 nt, Artificial Sequence; identical to SEQ ID NO: 163648
  derived and/or modified CDS sequence (opt4) from hemagglutinin__InfluenzaA__ACZ05403

SEQ ID NO: 163667 - RNA, 1701 nt, Artificial Sequence
  derived and/or modified CDS sequence (opt4) from hemagglutinin__InfluenzaA__ACZ05436
augaagaccaucaucgcccugagcuacauccugugccugguguucgcccagaagcugcccggcaacgacaacagcaccgccacccugugccugggccaccacgccgugcccaacggcaccaucgugaagaccaucaccaacgaccagaucgaggugaccaacgccaccgagcuggugcagagcagcagcaccggcgagaucugcgacagcccccaccagauccuggacggcaagagcugcacccugaucgacgcccugcugggcgacccccagugcgacggcuuccagaacaagaagugggaccuguucguggagagaagcaaggccuacagcaacugcuaccccuacgacgugcccgacuacgccagccugagaagccugguggccagcagcggcacccuggaguucaacaacgagagcuucaacuggaccggcgugacccagaacggcaccagcagcgccugcaucagaagaagcaagaacagcuucuucagcagacugaacuggcugacccaccugaacuucaaguaccccgcccugaacgugaccaugcccaacaacgagcaguucgacaagcuguacaucuggggcgugcaccaccccggcaccgacaaggaccagaucuuccuguacgcccaggccagcggcagaaucaccgugagcaccaagagaagccagcagaccgccauccccaacaucggcagcagacccagagugagaaacauccccagcagaaucagcaucuacuggaccaucgugaagcccggcgacauccugcugaucaacagcaccggcaaccugaucgcccccagaggcuacuucaagaucagaagcggcaagagcagcaucaugagaagcgacgcccccaucggcaagugcaacagcgagugcaucacccccaacggcagcauccccaacgacaagcccuuccagaacgugaacagaaucaccuacggcgccugccccagauacgugaagcagaacacccugaagcuggccaccggcaugagaaacgugcccgagaagcagaccagaggcaucuucggcgccaucgccggcuucaucgagaacggcugggagggcaugguggacggcugguacggcuucagacaccagaacagcgagggcagaggccaggccgccgaccugaagagcacccaggccgccaucgaccagaucaacggcaagcugaacagacugaucggcaagaccaacgagaaguuccaccagaucgagaaggaguucagcgagguggagggcagaauccaggaccuggagaaguacguggaggacaccaagaucgaccuguggagcuacaacgccgagcugcugguggcccuggagaaccagcacaccaucgaccugaccgacagcgagaugaacaagcuguucgagaagaccaagaagcagcugagagagaacgccgaggacaugggcaacggcugcuucaagaucuaccacaagugcgacaacgccugcaucggcagcaucagaaacggcaccuacgaccacgacguguacagagacgaggcccugaacaacagauuccagaucaagggcguggagcugaagagcggcuacaaggacuggauccuguggaucagcuucgccaucagcugcuuccugcugugcguggcccugcugggcuucaucaugugggccugccagaagggcaacaucagaugcaacaucugcaucuga

SEQ ID NO: 163668 - RNA, 1701 nt, Artificial Sequence; identical to SEQ ID NO: 163648
  derived and/or modified CDS sequence (opt4) from hemagglutinin__InfluenzaA__ACZ05458

SEQ ID NO: 163669 - RNA, 1701 nt, Artificial Sequence; identical to SEQ ID NO: 163648
  derived and/or modified CDS sequence (opt4) from hemagglutinin__InfluenzaA__ACZ05469

SEQ ID NO: 163670 - RNA, 1701 nt, Artificial Sequence; identical to SEQ ID NO: 163667
  derived and/or modified CDS sequence (opt4) from hemagglutinin__InfluenzaA__ACZ05480

SEQ ID NO: 163671 - RNA, 1701 nt, Artificial Sequence; identical to SEQ ID NO: 163471
  derived and/or modified CDS sequence (opt4) from hemagglutinin__InfluenzaA__ACZ05513

SEQ ID NO: 163672 - RNA, 1701 nt, Artificial Sequence; identical to SEQ ID NO: 163648
  derived and/or modified CDS sequence (opt4) from hemagglutinin__InfluenzaA__ACZ05524

SEQ ID NO: 163673 - RNA, 1701 nt, Artificial Sequence
  derived and/or modified CDS sequence (opt4) from hemagglutinin__InfluenzaA__ACZ05535
augaagaccaucaucgcccugagcuacauccugugccugguguucgcccagaagcugcccggcaacgacaacagcaccgccacccugugccugggccaccacgccgugcccaacggcaccaucgugaagaccaucaccaacgaccagaucgaggugaccaacgccaccgagcuggugcagagcagcagcaccggcgagaucugcgacagcccccaccagauccuggacggcaagaacugcacccugaucgacgcccugcugggcgacccccagugcgacggcuuccagaacaagaagugggaccuguucguggagagaagcaaggccuacagcaacugcuaccccuacgacgugcccgacuacgccagccugagaagccugguggccagcagcggcacccuggaguucaacaacgagagcuucaacuggaccggcgugacccagaacggcaccagcagcgccugcaucagaagaagcaagaacagcuucuucagcagacugaacuggcugacccaccugaacuucaaguaccccgcccugaacgugaccaugcccaacaacgagcaguucgacaagcuguacaucuggggcgugcaccaccccggcaccgacaaggaccagaucuuccuguacgcccaggccagcggcagaaucaccgugagcaccaagagaagccagcagaccgccauccccaacaucggcagcagacccagagugagaaacauccccagcagaaucagcaucuacuggaccaucgugaagcccggcgacauccugcugaucaacagcaccggcaaccugaucgcccccagaggcuacuucaagaucagaagcggcaagagcagcaucaugagaagcgacgcccccaucggcaagugcaacagcgagugcaucacccccaacggcagcauccccaacgacaagcccuuccagaacgugaacagaaucaccuacggcgccugccccagauacgugaagcagaacacccugaagcuggccaccggcaugagaaacgugcccgagaagcagaccagaggcaucuucggcgccaucgccggcuucaucgagaacggcugggagggcaugguggacggcugguacggcuucagacaccagaacagcgagggcagaggccaggccgccgaccugaagagcacccaggccgccaucgaccagaucaacggcaagcugaacagacugaucggcaagaccaacgagaaguuccaccagaucgagaaggaguucagcgagguggagggcagaauccaggaccuggagaaguacguggaggacaccaagaucgaccuguggagcuacaacgccgagcugcugguggcccuggagaaccagcacaccaucgaccugaccgacagcgagaugaacaagcuguucgagaagaccaagaagcagcugagagagaacgccgaggacaugggcaacggcugcuucaagaucuaccacaagugcgacaacgccugcaucggcagcaucagaaacggcaccuacgaccacgacguguacagagacgaggcccugaacaacagauuccagaucaagggcguggagcugaagagcggcuacaaggacuggauccuguggaucagcuucgccaucagcugcuuccugcugugcguggcccugcugggcuucaucaugugggccugccagaagggcaacaucagaugcaacaucugcaucuga

SEQ ID NO: 163674 - RNA, 1701 nt, Artificial Sequence; identical to SEQ ID NO: 163673
  derived and/or modified CDS sequence (opt4) from hemagglutinin__InfluenzaA__ACZ05546

SEQ ID NO: 163675 - RNA, 1701 nt, Artificial Sequence; identical to SEQ ID NO: 163648
  derived and/or modified CDS sequence (opt4) from hemagglutinin__InfluenzaA__ACZ05557

SEQ ID NO: 163676 - RNA, 1698 nt, Artificial Sequence
  derived and/or modified CDS sequence (opt4) from hemagglutinin__InfluenzaA__ACZ05579
augaaggugaagcugcuggugcugcugugcaccuucaccgccaccuacgccgacaccaucugcaucggcuaccacgccaacaacagcaccgacaccguggacaccgugcuggagaagaacgugaccgugacccacagcgugaaccugcuggagaacagccacaacggcaagcugugccugcugaagggcaucgccccccugcagcugggcaacugcagcguggccggcuggauccugggcaaccccgagugcgagcugcugaucagcaaggagagcuggagcuacaucguggagaagcccaaccccgagaacggcaccugcuaccccggccacuucgccgacuacgaggagcugagagagcagcugagcagcgugagcagcuucgagagauucgagaucuuccccaaggagagcagcuggcccaaccacaccgugaccggcgugagcgccagcugcagccacaacggcgagagcagcuucuacagaaaccugcuguggcugaccgugaagaacggccuguaccccaaccugagcaagagcuacgccaacaacaaggagaaggaggugcuggugcuguggggcgugcaccacccccccaacaucguggaccagaagacccuguacagaaccgagaacgccuacgugagcguggugagcagccacuacagcagaaaguucacccccgagaucgccaagagacccaaggugagagaccaggagggcagaaucaacuacuacuggacccugcuggagcccggcgacaccaucaucuucgaggccaacggcaaccugaucgcccccagauacgccuucgcccugagcagaggcuucggcagcggcaucaucaacagcaacgcccccauggacaagugcgacgccaagugccagacccccagaggcgccaucaacagcagccugcccuuccagaacgugcaccccgugaccaucggcgagugccccaaguacgugagaagcgccaagcugagaauggugaccggccugagaaacauccccagcauccagagcagaggccuguucggcgccaucgccggcuucaucgagggcggcuggaccggcaugguggacggcugguacggcuaccaccaccagaacgagcagggcagcggcuacgccgccgaccagaagagcacccagaacgccaucaacggcaucaccaacaaggugaacagcgugaucgagaagaugaacacccaguucaccgccgugggcaaggaguucaacaagcuggagagaagaauggagaaccugaacaagaagguggacgacggcuucaucgacaucuggaccuacaacgccgagcugcuggugcugcuggagaacgagagaacccuggacuuccacgacagcaacgugaagaaccuguacgagaaggugaagagccagcugaagaacaacgccaaggagaucggcaacggcugcuucgaguucuaccacaagugcaacgacgagugcauggagagcgugaagaacggcaccuacgacuaccccaaguacagcgaggagagcaagcugaacagagagaagaucgacggcgugaagcuggagagcaugggcguguaccagauccuggccaucuacagcaccguggccagcagccuggugcugcuggugagccugggcgccaucagcuucuggaugugcagcaacggcagccugcagugcagaaucugcaucuga

SEQ ID NO: 163677 - RNA, 1698 nt, Artificial Sequence
  derived and/or modified CDS sequence (opt4) from hemagglutinin__InfluenzaA__ACZ05590
augaaggugaagcugcuggugcugcugugcaccuucaccgccaccuacgccgacaccaucugcaucggcuaccacgccaacaacagcaccgacaccguggacaccgugcuggagaagaacgugaccgugacccacagcgugaaccugcuggagaacagccacaacggcaagcugugccugcugaagggcaucgccccccugcagcugggcaacugcagcguggccggcuggauccugggcaaccccgagugcgagcugcugaucagcaaggagagcuggagcuacaucguggagaagcccaaccccgagaacggcaccugcuaccccggccacuucgccgacuacgaggagcugagagagcagcugagcagcgugagcagcuucgagagauucgagaucuuccccaaggagagcagcuggcccaaccacaccgugaccggcgugagcgccagcugcagccacaacggcgagagcagcuucuacagaaaccugcuguggcugaccggcaagaacggccuguaccccaaccugagcaagagcuacgccaacaacaaggagaaggaggugcuggugcuguggggcgugcaccacccccccagcaucagcgaccagaagacccuguaccacaccgaggacgccuacgugagcguggugagcagccacuacagcagaaaguucacccccgagaucgccaagagacccaaggugagagaccaggagggcagaaucaacuacuacuggacccugcuggagcccggcgacaccaucaucuucgaggccaacggcaaccugaucgcccccagauacgccuucgcccugagcagaggcuucggcagcggcaucaucaacagcaacgcccccaugggcaagugcgacgccaagugccagaccccccagggcgccaucaacagcagccugcccuuccagaacgugcaccccgugaccaucggcgagugccccaaguacgugagaagcgccaagcugagaauggugaccggccugagaaacauccccagcauccagagcagaggccuguucggcgccaucgccggcuucaucgagggcggcuggaccggcaugguggacggcugguacggcuaccaccaccagaacgagcagggcagcggcuacgccgccgaccagaagagcacccagaacgccaucaacggcaucaccaacaaggugaacagcgugaucgagaagaugaacacccaguucaccgccgugggcaaggaguucaacaagcuggagagaagaauggagaaccugaacaagaagguggacgacggcuucaucgacaucuggaccuacaacgccgagcugcuggugcugcuggagaacgagagaacccuggacuuccacgacagcaacgugaagaaccuguacgagaaggugaagagccagcugaagaacaacgccaaggagaucggcaacggcugcuucgaguucuaccacaagugcaacgacgagugcauggagagcgugaagaacggcaccuacgacuaccccaaguacagcgaggagagcaagcugaacagagagaagaucgacggcgugaagcuggagagcaugggcguguaccagauccuggccaucuacagcaccguggccagcagccuggugcugcuggugagccugggcgccaucagcuucuggaugugcagcaacggcagccugcagugcagaaucugcaucuga

SEQ ID NO: 163678 - RNA, 1701 nt, Artificial Sequence; identical to SEQ ID NO: 163673
  derived and/or modified CDS sequence (opt4) from hemagglutinin__InfluenzaA__ACZ05950

SEQ ID NO: 163679 - RNA, 1701 nt, Artificial Sequence; identical to SEQ ID NO: 163648
  derived and/or modified CDS sequence (opt4) from hemagglutinin__InfluenzaA__ACZ05961

SEQ ID NO: 163680 - RNA, 1701 nt, Artificial Sequence
  derived and/or modified CDS sequence (opt4) from hemagglutinin__InfluenzaA__ACZ05972
augaagaccaucaucgcccugagcuacauccugugccugguguucgcccagaagcugcccggcaacgacaacagcaccgccacccugugccugggccaccacgccgugcccaacggcaccaucgugaagaccaucaccaacgaccagaucgaggugaccaacgccaccgagcuggugcagagcagcagcaccggcgagaucugcgacagcccccaccagauccuggacggcaagaacugcacccugaucgacgcccugcugggcgacccccagugcgacggcuuccagaacaagaagugggaccuguucguggagagaagcaaggccuacagcaacugcuaccccuacgacgugcccgacuacgccagccugagaagccugguggccagcagcggcacccuggaguucaacaacgagagcuucaacuggaccggcgugacccagaacggcaccagcagcgccugcaucagaagaagcaagaacagcuucuucagcagacugaacuggcugacccaccugaacuucaaguaccccgcccugaacgugaccaugcccaacaacgagcaguucgacaagcuguacaucuggggcgugcaccaccccggcaccgacaaggaccagaucuuccuguacgcccaggccagcggcagaaucaccgugagcaccaagagaagccagcagaccgccauccccaacaucggcagcagacccagagugagaaacauccccagcagaaucagcaucuacuggaccaucgugaagcccggcgacauccugcugaucaacagcaccggcaaccugaucgcccccagaggcuacuucaagaucagaagcggcaagagcagcaucaugagaagcgacgcccccaucggcaagugcaacagcgagugcaucacccccaacggcagcauccccaacgacaagcccuuccagaacgugaacagaaucaccuacggcgccugccccagauacgugaagcagaacacccugaagcuggccaccggcaugagaaacgugcccgagaagcagaccagaggcaucuucggcgccaucgccggcuucaucgagaacggcugggagggcaugguggacggcugguacggcuucagacaccagaacagcgagggcagaggccaggccgccgaccugaagagcacccaggccgccaucgaccagaucaacggcaagcugaacagacugaucggcaagaccaacgagaaguuccaccagaucgagaaggaguucagcgagguggagggcagaauccaggaccuggagaaguacguggaggacaccaagaucgaccuguggagcuacaacgccgagcugcugguggcccuggagaaccagcacaccaucgaccugaccgacagcgagaugaacaagcuguucgagaagaccaagaagcagcugagagagaacgccgaggacaugggcaacggcugcuucaagaucuaccacaagugcgacaacgccugcaucggcagcaucagaaacggcaccuacgaccacgacguguacagagacgaggcccugaacaacagauuccagaucaagggcguggagcugaagagcggcuacaaggacuggauccuguggaucagcuucgccaucagcugcagccugcugugcguggcccugcugggcuucaucaugugggccugccagaagggcaacaucagaugcaacaucugcaucuga

SEQ ID NO: 163681 - RNA, 1701 nt, Artificial Sequence
  derived and/or modified CDS sequence (opt4) from hemagglutinin__InfluenzaA__ACZ05983
augaagaccaucaucgcccugagcuacauccugugccugguguucgcccagaagcugcccggcaacgacaacagcaccgccacccugugccugggccaccacgccgugcccaacggcaccaucgugaagaccaucaccaacgaccagaucgaggugaccaacgccaccgagcuggugcagagcagcagcaccggcgagaucugcgacagcccccaccagauccuggacggcaagaacugcacccugaucgacgcccugcugggcgacccccagugcgacggcuuccagaacaagaagugggaccuguucguggagagaagcaaggccuacagcaacugcuaccccuacgacgugcccgacuacgccagccugagaagccugguggccagcagcggcacccuggaguucaacaacgagagcuucaacuggaccggcgugacccagaacggcaccagcagcgccugcaucagaagaagcaagaacagcuucuucagcagacugaacuggcugacccaccugaacuucaaguaccccgcccugaacgugaccaugcccaacaacgagcaguucgacaagcuguacaucuggggcgugcaccaccccggcaccgacaaggaccagaucuuccuguacgcccaggccagcggcagaaucaccgugagcaccaagagaagccagcagaccgccauccccaacaucggcagcagacccagagugagaaacauccccagcagaaucagcaucuacuggaccaucgugaagcccggcgacauccugcugaucaacagcaccggcaaccugaucgcccccagaggcuacuucaagaucagaagcggcaagagcagcaucaugagaagcgacgcccccaucggcaagugcaacagcgagugcaucacccccaacggcagcauccccaacgacaagcccuuccagaacgugaacagaaacaccuacggcgccugccccagauacgugaagcagaacacccugaagcuggccaccggcaugagaaacgugcccgagaagcagaccagaggcaucuucggcgccaucgccggcuucaucgagaacggcugggagggcaugguggacggcugguacggcuucagacaccagaacagcgagggcagaggccaggccgccgaccugaagagcacccaggccgccaucgaccagaucaacggcaagcugaacagacugaucggcaagaccaacgagaaguuccaccagaucgagaaggaguucagcgagguggagggcagaauccaggaccuggagaaguacguggaggacaccaagaucgaccuguggagcuacaacgccgagcugcugguggcccuggagaaccagcacaccaucgaccugaccgacagcgagaugaacaagcuguucgagaagaccaagaagcagcugagagagaacgccgaggacaugggcaacggcugcuucaagaucuaccacaagugcgacaacgccugcaucggcagcaucagaaacggcaccuacgaccacgacguguacagagacgaggcccugaacaacagauuccagaucaagggcguggagcugaagagcggcuacaaggacuggauccuguggaucagcuucgccaucagcugcuuccugcugugcguggcccugcugggcuucaucaugugggccugccagaagggcaacaucagaugcaacaucugcaucuga

SEQ ID NO: 163682 - RNA, 1701 nt, Artificial Sequence
  derived and/or modified CDS sequence (opt4) from hemagglutinin__InfluenzaA__ACZ05994
augaagaccaucaucgcccugagcuacauccugugccugguguucgcccagaagcugcccggcaacgacaacagcaccgccacccugugccugggccaccacgccgugcccaacggcaccaucgugaagaccaucaccaacgaccagaucgaggugaccaacgccaccgagcuggugcagagcagcagcaccggcgagaucugcgacagcccccaccagauccuggacggcaagaacugcacccugaucgacgcccugcugggcgacccccagugcgacggcuuccagaacaagaagugggaccuguucguggagagaagcaaggccuacagcaacugcuaccccuacgacgugcccgacuacgccagccugagaagccugguggccagcagcggcacccuggaguucaacaacgagagcuucaacuggaccggcgugacccagaacggcaccagcagcgccugcaucagaagaagcaagaacagcuucuucagcagacugaacuggcugacccaccugaacuucaaguaccccgcccugaacgugaccgugcccaacaacgagcaguucgacaagcuguacaucuggggcgugcaccaccccggcaccgacaaggaccagaucuuccuguacgcccaggccagcggcagaaucaccgugagcaccaagagaagccagcagaccgccauccccaacaucggcagcagacccagagugagaaacauccccagcagaaucagcaucuacuggaccaucgugaagcccggcgacauccugcugaucaacagcaccggcaaccugaucgcccccagaggcuacuucaagaucagaagcggcaagagcagcaucaugagaagcgacgcccccaucggcaagugcaacagcgagugcaucacccccaacggcagcauccccaacgacaagcccuuccagaacgugaacagaaucaccuacggcgccugccccagauacgugaagcagaacacccugaagcuggccaccggcaugagaaacgugcccgagaagcagaccagaggcaucuucggcgccaucgccggcuucaucgagaacggcugggagggcaugguggacggcugguacggcuucagacaccagaacagcgagggcagaggccaggccgccgaccugaagagcacccaggccgccaucgaccagaucaacggcaagcugaacagacugaucggcaagaccaacgagaaguuccaccagaucgagaaggaguucagcgagguggagggcagaauccaggaccuggagaaguacguggaggacaccaagaucgaccuguggagcuacaacgccgagcugcugguggcccuggagaaccagcacaccaucgaccugaccgacagcgagaugaacaagcuguucgagaagaccaagaagcagcugagagagaacgccgaggacaugggcaacggcugcuucaagaucuaccacaagugcgacaacgccugcaucggcagcaucagaaacggcaccuacgaccacgacguguacagagacgaggcccugaacaacagauuccagaucaagggcguggagcugaagagcggcuacaaggacuggauccuguggaucagcuucgccaucagcugcuuccugcugugcguggcccugcugggcuucaucaugugggccugccagaagggcaacaucagaugcaacaucugcaucuga

SEQ ID NO: 163683 - RNA, 1701 nt, Artificial Sequence; identical to SEQ ID NO: 163648
  derived and/or modified CDS sequence (opt4) from hemagglutinin__InfluenzaA__ACZ06005

SEQ ID NO: 163684 - RNA, 1701 nt, Artificial Sequence; identical to SEQ ID NO: 163648
  derived and/or modified CDS sequence (opt4) from hemagglutinin__InfluenzaA__ACZ06016

SEQ ID NO: 163685 - RNA, 1698 nt, Artificial Sequence
  derived and/or modified CDS sequence (opt4) from hemagglutinin__InfluenzaA__ACZ16013
augaaggugaagcugcuggugcugcugugcaccuucaccgccaccuacgccgacaccaucugcaucggcuaccacgccaacaacagcaccgacaccguggacaccgugcuggagaagaacgugaccgugacccacagcgugaaccugcuggagaacagccacaacggcaagcugugccugcugaagggcaucgccccccugcagcugggcaacugcagcguggccggcuggauccugggcaaccccgagugcgagcugcugaucagcaaggagagcuggagcuacaucguggagaagcccaaccccgagaacggcaccugcuaccccggccacuucgccgacuacgaggagcugagagagcagcugagcagcgugagcagcuucgagagauucgagaucuuccccaaggagagcagcuggcccaaccacaccgugaccggcgugagcgccagcugcagccacaacggcgagaacagcuucuacagaaaccugcuguggcugaccggcaagaacggccuguaccccaaccugagcaagagcuacgccaacaacaaggagaaggaggugcuggugcuguggggcgugcaccacccccccaacaucgccgaccagaagacccuguaccacaccgagaaggccuacgugagcguggugagcagccacuacagcagaaaguucacccccgagaucgccaagagacccaaggugagagaccaggagggcagaaucaacuacuacuggacccugcuggagcccggcgacaccaucaucuucgaggccaacggcaaccugaucgcccccagauacgccuucgcccugagcagaggcuucggcagcggcaucaucaacagcaacgcccccauggacaagugcgacgccaagugccagaccccccagggcgccaucaacagcagccugcccuuccagaacgugcaccccgugaccaucggcgagugccccaaguacgugagaagcgccaagcugagaauggugaccggccugagaaacauccccagcauccagagcagaggccuguucggcgccaucgccggcuucaucgagggcggcuggaccggcaugguggacggcugguacggcuaccaccaccagaacgagcagggcagcggcuacgccgccgaccagaagagcacccagaacgccaucaacggcaucaccaacaaggugaacagcgugaucgagaagaugaacacccaguucaccgccgugggcaaggaguucaacaagcuggagagaagaauggagaaccugaacaagaagguggacgacggcuucaucgacaucuggaccuacaacgccgagcugcuggugcugcuggagaacgagagaacccuggacuuccacgacagcaacgugaagaaccuguacgagaaggugaagagccagcugaagaacaacgccaaggagaucggcaacggcugcuucgaguucuaccacaagugcaacgacgagugcauggagagcgugaagaacggcaccuacgacuaccccaaguacagcgaggagagcaagcugaacagagagaagaucgacggcgugaagcuggagagcaugggcguguaccagauccuggccaucuacagcaccguggccagcagccuggugcugcuggugagccugggcgccaucagcuucuggaugugcagcaacggcagccugcagugcagaaucugcaucuga

SEQ ID NO: 163686 - RNA, 1698 nt, Artificial Sequence
  derived and/or modified CDS sequence (opt4) from hemagglutinin__InfluenzaA__ACZ16023
augaaggugaagcugcuggugcugcugugcaccuucaccgccaccuacgccgacaccaucugcaucggcuaccacgccaacaacagcaccgacaccguggacaccgugcuggagaagaacgugaccgugacccacagcgugaaccugcuggagaacagccacaacggcaagcugugccugcugaagggcaucgccccccugcagcugggcaacugcagcguggccggcuggauccugggcaaccccgagugcgagcugcugaucagcaaggagagcuggagcuacaucguggagaagcccaaccccgagaacggcaccugcuaccccggccacuucgccgacuacgaggagcugagagagcagcugagcagcgugagcagcuucgagagauucgagaucuuccccaaggagagcagcuggcccaaccacaccgugaccggcgugagcgccagcugcagccacaacggcgagaacagcuucuacagaaaccugcuguggcugaccggcaagaacggccuguaccccaaccugagcaagagcuacgccaacaacaaggagaaggaggugcuggugcuguggggcgugcaccacccccccaacaucgccgaccagaagacccuguaccacaccgagaacgccuacgugagcguggugagcagccacuacagcagaaaguucacccccgagaucgccaagagacccaaggugagagaccaggagggcagaaucaacuacuacuggacccugcuggagcccggcgacaccaucaucuucgaggccaacggcaaccugaucgcccccagauacgccuucgcccugagcagaggcuucggcagcggcaucaucaacagcaacgcccccauggacaagugcgacgccaagugccagaccccccagggcgccaucaacagcagccugcccuuccagaacgugcaccccgugaccaucggcgagugccccaaguacgugagaagcgccaagcugagaauggugaccggccugagaaacauccccagcauccagagcagaggccuguucggcgccaucgccggcuucaucgagggcggcuggaccggcaugguggacggcugguacggcuaccaccaccagaacgagcagggcagcggcuacgccgccgaccagaagagcacccagaacgccaucaacggcaucaccaacaaggugaacagcgugaucgagaagaugaacacccaguucaccgccgugggcaaggaguucaacaagcuggagagaagaauggagaaccugaacaagaagguggacgacggcuucaucgacaucuggaccuacaacgccgagcugcuggugcugcuggagaacgagagaacccuggacuuccacgacagcaacgugaagaaccuguacgagaaggugaagagccagcugaagaacaacgccaaggagaucggcaacggcugcuucgaguucuaccacaagugcaacgacgagugcauggagagcgugaagaacggcaccuacgacuaccccaaguacagcgaggagagcaagcugaacagagagaagaucgacggcgugaagcuggagagcaugggcguguaccagauccuggccaucuacagcaccguggccagcagccuggugcugcuggugagccugggcgccaucagcuucuggaugugcagcaacggcagccugcagugcagaaucugcaucuga

SEQ ID NO: 163687 - RNA, 1698 nt, Artificial Sequence
  derived and/or modified CDS sequence (opt4) from hemagglutinin__InfluenzaA__ACZ16033
augaaggugaagcugcuggugcugcugugcaccuucaccgccaccuacgccgacaccaucugcaucggcuaccacgccaacaacagcaccgacaccguggacaccgugcuggagaagaacgugaccgugacccacagcgugaaccugcuggagaacagccacaacggcaagcugugccugcugaagggcaucgccccccugcagcugggcaacugcagcguggccggcuggauccugggcaaccccgagugcgagcugcugaucagcaaggagagcuggagcuacaucguggagaagcccaaccccgagaacggcaccugcuaccccggccacuucgccgacuacgaggagcugagagagcagcugagcagcgugagcagcuucgagagauucgagaucuuccccaaggagagcagcuggcccaaccacaccgugaccggcgccagcgccagcugcagccacaacggcgagaacagcuucuacagaaaccugcuguggcugaccggcaagaacggccuguaccccaaccugagcaagagcuacgccaacaacaaggagaaggaggugcuggugcuguggggcgugcaccacccccccaacaucgccgaccagaagacccuguaccacaccgagaacgccuacgugagcguggugagcagccacuacagcagaaaguucacccccgagaucgccaagagacccaaggugagagaccaggagggcagaaucaacuacuacuggacccugcuggagcccggcgacaccaucaucuucgaggccaacggcaaccugaucgcccccagauacgccuucgcccugagcagaggcuucggcagcggcaucaucaacagcaacgcccccauggacaagugcgacgccaagugccagaccccccagggcgccaucaacagcagccugcccuuccagaacauccaccccgugaccaucggcgagugccccaaguacgugagaagcgccaagcugagaauggugaccggccugagaaacauccccagcauccagagcagaggccuguucggcgccaucgccggcuucaucgagggcggcuggaccggcaugguggacggcugguacggcuaccaccaccagaacgagcagggcagcggcuacgccgccgaccagaagagcacccagaacgccaucaacggcaucaccaacaaggugaacagcgugaucgagaagaugaacacccaguucaccgccgugggcaaggaguucaacaagcuggagagaagaauggagaaccugaacaagaagguggacgacggcuucaucgacaucuggaccuacaacgccgagcugcuggugcugcuggagaacgagagaacccuggacuuccacgacagcaacgugaagaaccuguacgagaaggugaagagccagcugaagaacaacgccaaggagaucggcaacggcugcuucgaguucuaccacaagugcaacgacgagugcauggagagcgugaagaacggcaccuacgacuaccccaaguacagcgaggagagcaagcugaacaaggagaagaucgacggcgugaagcuggagagcaugggcguguaccagauccuggccaucuacagcaccguggccagcagccuggugcugcuggugagccugggcgccaucagcuucuggaugugcagcaacggcagccugcagugcagaaucugcaucuga

SEQ ID NO: 163688 - RNA, 1701 nt, Artificial Sequence; identical to SEQ ID NO: 162716
  derived and/or modified CDS sequence (opt4) from hemagglutinin__InfluenzaA__ACZ16040

SEQ ID NO: 163689 - RNA, 1701 nt, Artificial Sequence; identical to SEQ ID NO: 162716
  derived and/or modified CDS sequence (opt4) from hemagglutinin__InfluenzaA__ACZ16050

SEQ ID NO: 163690 - RNA, 1701 nt, Artificial Sequence; identical to SEQ ID NO: 162716
  derived and/or modified CDS sequence (opt4) from hemagglutinin__InfluenzaA__ACZ16060

SEQ ID NO: 163691 - RNA, 1701 nt, Artificial Sequence
  derived and/or modified CDS sequence (opt4) from hemagglutinin__InfluenzaA__ACZ16070
augaaggccauccugguggugcugcuguacaccuucgccaccgccaacgccgacacccugugcaucggcuaccacgccaacaacagcaccgacaccguggacaccgugcuggagaagaacgugaccgugacccacagcgugagccugcuggaggacaagcacaacggcaagcugugcaagcugagaggcguggccccccugcaccugggcaagugcaacaucgccggcuggauccugggcaaccccgagugcgagagccugagcaccgccagcagcuggagcuacaucguggagaccagcagcagcgacaacggcaccugcuaccccggcgacuucaucgacuacgaggagcugagagagcagcugagcagcgugagcagcuucgagagauucgagaucuuccccaagaccagcagcuggcccaaccacgacagcaacaagggcgugaccgccgccugcccccacgccggcgccaagagcuucuacaagaaccugaucuggcuggugaagaagggcaacagcuaccccaagcugagcaagagcuacaucaacgacaagggcaaggaggugcuggugcuguggggcauccaccaccccagcaccagcgccgaccagcagagccuguaccagaacgccgacgccuacguguucgugggcagcagcagauacagcaagaaguucaagcccgagaucgccaucagacccaaggugagagaccaggagggcagaaugaacuacuacuggacccugguggagcccggcgacaagaucaccuucgaggccaccggcaaccugguggugcccagauacgccuucgccauggagagaaacgccggcagcggcaucaucaucagcgacacccccgugcacgacugcaacaccaccugccagacccccaagggcgccaucaacaccagccugcccuuccagaacauccaccccaucaccaucggcaagugccccaaguacgugaagagcaccaagcugagacuggccaccggccugagaaacgugcccagcauccagagcagaggccuguucggcgccaucgccggcuucaucgagggcggcuggaccggcaugguggacggcugguacggcuaccaccaccagaacgagcagggcagcggcuacgccgccgaccugaagagcacccagaacgccaucgacgagaucaccaacaaggugaacagcgugaucgagaagaugaacacccaguucaccgccgugggcaaggaguucaaccaccuggagaagagaaucgagaaccugaacaagaagguggacgacggcuuccuggacaucuggaccuacaacgccgagcugcuggugcugcuggagaacgagagaacccuggacuaccacgacagcaacgugaagaaccuguacgagaaggugagaagccagcugaagaacaacgccaaggagaucggcaacggcugcuucgaguucuaccacaagugcgacaacaccugcauggagagcgugaagaacggcaccuacgacuaccccaaguacagcgaggaggccaagcugaacagagaggagaucgacggcgugaagcuggagagcaccagaaucuaccagauccuggccaucuacagcaccguggccagcagccuggugcugguggugagccugggcgccaucagcuucuggaugugcagcaacggcagccugcagugcagaaucugcaucuga

SEQ ID NO: 163692 - RNA, 1701 nt, Artificial Sequence
  derived and/or modified CDS sequence (opt4) from hemagglutinin__InfluenzaA__ACZ16080
augaaggccauccugguggugcugcuguacaccuucgccaccgccaacgccgacacccugugcaucggcuaccacgccaacaacagcaccgacaccguggacaccgugcuggagaagaacgugaccgugacccacagcgugaaccugcuggaggacaagcacaacggcaagcugugcaagcugagaggcguggccccccugcaccugggcaagugcaacaucgccggcuggauccugggcaaccccgagugcgagagccugagcaccgccagcagcuggagcuacaucguggagaccagcagcagcgacaacggcaccugcuaccccggcgacuucaucgacuacgaggagcugagagagcagcugagcagcgugagcagcuucgagagauucgagaucuuccccaagaccagcagcuggcccaaccacgacagcaacaagggcgugaccgccgccugcccccacgccggcgccaagagcuucuacaagaaccugaucuggcuggugaagaagggcaacagcuaccccaagcugagcaagagcuacaucaacgacaagggcaaggaggugcuggugcuguggggcauccaccaccccagcaccagcgccgaccagcagagccuguaccagaacgccgacgccuacguguucgugggcagcagcagauacagcaagaaguucaagcccgagaucgccaucagacccaaggugagagaccaggagggcagaaugaacuacuacuggacccugguggagcccggcgacaagaucaccuucgaggccaccggcaaccugguggugcccagauacgccuucgccauggagagaaacgacggcagcggcaucaucaucagcgacacccccgugcacgacugcaacaccaccugccagacccccaagggcgccaucaacaccagccugcccuuccagaacauccaccccaucaccaucggcaagugccccaaguacgugaagagcaccaagcugagacuggccaccggccugagaaacgugcccagcauccagagcagaggccuguucggcgccaucgccggcuucaucgagggcggcuggaccggcaugguggacggcugguacggcuaccaccaccagaacgagcagggcagcggcuacgccgccgaccugaagagcacccagaacgccaucgacgagaucaccaacaaggugaacagcgugaucgagaagaugaacacccaguucaccgccgugggcaaggaguucaaccaccuggagaagagaaucgagaaccugaacaagaagguggacgacggcuuccuggacaucuggaccuacaacgccgagcugcuggugcugcuggagaacgagagaacccuggacuaccacgacagcaacgugaagaaccuguacgagaaggugagaagccagcugaagaacaacgccaaggagaucggcaacggcugcuucgaguucuaccacaagugcgacaacaccugcauggagagcgugaagaacggcaccuacgacuaccccaaguacagcgaggaggccaagcugaacagagaggagaucgacggcgugaagcuggagagcaccagaaucuaccagauccuggccaucuacagcaccguggccagcagccuggugcugguggugagccugggcgccaucagcuucuggaugugcagcaacggcagccugcagugcagaaucugcaucuga

SEQ ID NO: 163693 - RNA, 1701 nt, Artificial Sequence
  derived and/or modified CDS sequence (opt4) from hemagglutinin__InfluenzaA__ACZ16090
augaaggccauccugcuggugcugcuguacaccuucgccaccgccaacgccgacacccugugcaucggcuaccacgccaacaacagcaccgacaccguggacaccgugcuggagaagaacgugaccgugacccacagcgugaaccugcuggaggacaagcacaacggcaagcugugcaagcugagaggcguggccccccugcaccugggcaagugcaacaucgccggcuggauccugggcaaccccgagugcgagagccugagcaccgccagcagcuggagcuacaucguggagaccagcagcagcgacaacggcaccugcuaccccggcgacuucaucgacuacgaggagcugagagagcagcugagcagcaugagcagcuucgagagauucgagaucuuccccaagaccagcagcuggcccaaccacgacagcaacaagggcgugaccgccgccugcccccacgccggcgccaagagcuucuacaagaaccugaucuggcuggugaagaagggcaacagcuaccccaagcugagcaagagcuacaucaacgacaagggcaaggaggugcuggugcuguggggcauccaccaccccagcaccagcgccgaccagcagagccuguaccagaacgccgacgccuacguguucgugggcagcagcagauacagcaagaaguucaagcccgagaucgccaucagacccaaggugagagaccaggagggcagaaugaacuacuacuggacccugguggagcccggcgacaagaucaccuucgaggccaccggcaaccugguggugcccagauacgccuucgccauggagagaaacgccggcagcggcaucaucaucagcgacacccccgugcacgacugcaacaccaccugccagacccccaagggcgccaucaacaccagccugcccuuccagaacauccaccccaucaccaucggcaagugccccaaguacgugaagagcaccaagcugagacuggccaccggccugagaaacgugcccagcauccagagcagaggccuguucggcgccaucgccggcuucaucgagggcggcuggaccggcaugguggacggcugguacggcuaccaccaccagaacgagcagggcagcggcuacgccgccgaccugaagagcacccagaacgccaucgacgagaucaccaacaaggugaacagcgugaucgagaagaugaacacccaguucaccgccgugggcaaggaguucaaccaccuggagaagagaaucgagaaccugaacaagaagguggacgacggcuuccuggacaucuggaccuacaacgccgagcugcuggugcugcuggagaacgagagaacccuggacuaccacgacagcaacgugaagaaccuguacgagaaggugagaagccagcugaagaacaacgccaaggagaucggcaacggcugcuucgaguucuaccacaagugcgacaacaccugcauggagagcgugaagaacggcaccuacgacuaccccaaguacagcgaggaggccaagcugaacagagaggagaucgacggcgugaagcuggagagcaccagaaucuaccagauccuggccaucuacagcaccguggccagcagccuggugcugguggugagccugggcgccaucagcuucuggaugugcagcaacggcagccugcagugcagaaucugcaucuga

SEQ ID NO: 163694 - RNA, 1701 nt, Artificial Sequence; identical to SEQ ID NO: 162716
  derived and/or modified CDS sequence (opt4) from hemagglutinin__InfluenzaA__ACZ16100

SEQ ID NO: 163695 - RNA, 1701 nt, Artificial Sequence; identical to SEQ ID NO: 162716
  derived and/or modified CDS sequence (opt4) from hemagglutinin__InfluenzaA__ACZ16110

SEQ ID NO: 163696 - RNA, 1701 nt, Artificial Sequence; identical to SEQ ID NO: 162716
  derived and/or modified CDS sequence (opt4) from hemagglutinin__InfluenzaA__ACZ16120

SEQ ID NO: 163697 - RNA, 1701 nt, Artificial Sequence; identical to SEQ ID NO: 163464
  derived and/or modified CDS sequence (opt4) from hemagglutinin__InfluenzaA__ACZ16130

SEQ ID NO: 163698 - RNA, 1701 nt, Artificial Sequence; identical to SEQ ID NO: 162716
  derived and/or modified CDS sequence (opt4) from hemagglutinin__InfluenzaA__ACZ16140

SEQ ID NO: 163699 - RNA, 1701 nt, Artificial Sequence; identical to SEQ ID NO: 162716
  derived and/or modified CDS sequence (opt4) from hemagglutinin__InfluenzaA__ACZ16150

SEQ ID NO: 163700 - RNA, 1701 nt, Artificial Sequence; identical to SEQ ID NO: 162716
  derived and/or modified CDS sequence (opt4) from hemagglutinin__InfluenzaA__ACZ16160

SEQ ID NO: 163701 - RNA, 1701 nt, Artificial Sequence; identical to SEQ ID NO: 162909
  derived and/or modified CDS sequence (opt4) from hemagglutinin__InfluenzaA__ACZ16170

SEQ ID NO: 163702 - RNA, 1701 nt, Artificial Sequence
  derived and/or modified CDS sequence (opt4) from hemagglutinin__InfluenzaA__ACZ16180
augaaggccauccugguggugcugcuguacaccuucgccaccgccaacgccgacacccugugcaucggcuaccacgccaacaacagcaccgacaccguggacaccgugcuggagaagaacgugaccgugacccacagcgugaaccugcuggaggacaagcacaacggcaagcugugcaagcugagaggcguggccccccugcaccugggcaagugcaacaucgccggcuggauccugggcaaccccgagugcgagagccuguacaccgccagcagcuggagcuacaucguggagaccagcagcagcgacaacggcaccugcuaccccggcgacuucaucgacuacgaggagcugagagagcagcugagcagcgugagcagcuucgagagauucgagaucuuccccaagaccagcagcuggcccaaccacgacagcaacaagggcgugaccgccgccugcccccacgccggcgccaagagcuucuacaagaaccugaucuggcuggugaagaagggcaacagcuaccccaagcugagcaagagcuacaucaacgacaagggcaaggaggugcuggugcuguggggcauccaccaccccagcaccagcgccgaccagcagagccuguaccagaacgccgacgccuacguguucgugggcagcagcagauacagcaagaaguucaagcccgagaucgccaucagacccaaggugagagaccaggagggcagaaugaacuacuacuggacccugguggagcccggcgacaagaucaccuucgaggccaccggcaaccugguggugcccagauacgccuucgccauggagagaaacgccggcagcggcaucaucaucagcgacacccccgugcacgacugcaacaccaccugccagacccccaagggcgccaucaacaccagccugcccuuccagaacauccaccccaucaccaucggcaagugccccaaguacgugaagagcaccaagcugagacuggccaccggccugagaaacgugcccagcauccagagcagaggccuguucggcgccaucgccggcuucaucgagggcggcuggaccggcaugguggacggcugguacggcuaccaccaccagaacgagcagggcagcggcuacgccgccgaccugaagagcacccagaacgccaucgacgagaucaccaacaaggugaacagcgugaucgagaagaugaacacccaguucaccgccgugggcaaggaguucaaccaccuggagaagagaaucgagaaccugaacaagaagguggacgacggcuuccuggacaucuggaccuacaacgccgagcugcuggugcugcuggagaacgagagaacccuggacuaccacgacagcaacgugaagaaccuguacgagaaggugagaagccagcugaagaacaacgccaaggagaucggcaacggcugcuucgaguucuaccacaagugcgacaacaccugcauggagagcgugaagaacggcaccuacgacuaccccaaguacagcgaggaggccaagcugaacagagaggagaucgacggcgugaagcuggagagcaccagaaucuaccagauccuggccaucuacagcaccguggccagcagccuggugcugguggugagccugggcgccaucagcuucuggaugugcagcaacggcagccugcagugcagaaucugcaucuga

SEQ ID NO: 163703 - RNA, 1701 nt, Artificial Sequence; identical to SEQ ID NO: 162716
  derived and/or modified CDS sequence (opt4) from hemagglutinin__InfluenzaA__ACZ16190

SEQ ID NO: 163704 - RNA, 1701 nt, Artificial Sequence
  derived and/or modified CDS sequence (opt4) from hemagglutinin__InfluenzaA__ACZ16200
augaaggccauccugguggugcugcuguacaccuucgccaccgccaaccccgacacccugugcaucggcuaccacgccaacaacagcaccgacaccguggacaccgugcuggagaagaacgugaccgugacccacagcgugaaccugcuggaggacaagcacaacggcaagcugugcaagcugagaggcguggccccccugcaccugggcaagugcaacaucgccggcuggauccugggcaaccccgagugcgagagccugagcaccgccagcagcuggagcuacaucguggagaccagcagcagcgacaacggcaccugcuaccccggcgacuucaucgacuacgaggagcugagagagcagcugagcagcgugagcagcuucgagagauucgagaucuuccccaagaccagcagcuggcccaaccacgacagcaacaagggcgugaccgccgccugcccccacgccggcgccaagagcuucuacaagaaccugaucuggcuggugaagaagggcaacagcuaccccaagcugagcaagagcuacaucaacgacaagggcaaggaggugcuggugcuguggggcauccaccaccccagcaccagcgccgaccagcagagccuguaccagaacgccgacgccuacguguucgugggcagcagcagauacagcaagaaguucaagcccgagaucgccaucagacccaaggugagagaccaggagggcagaaugaacuacuacuggacccugguggagcccggcgacaagaucaccuucgaggccaccggcaaccugguggugcccagauacgccuucgccauggagagaaacgccggcagcggcaucaucaucagcgacacccccgugcacgacugcaacaccaccugccagacccccaagggcgccaucaacaccagccugcccuuccagaacauccaccccaucaccaucggcaagugccccaaguacgugaagagcaccaagcugagacuggccaccggccugagaaacgugcccagcauccagagcagaggccuguucggcgccaucgccggcuucaucgagggcggcuggaccggcaugguggacggcugguacggcuaccaccaccagaacgagcagggcagcggcuacgccgccgaccugaagagcacccagaacgccaucgacgagaucaccaacaaggugaacagcgugaucgagaagaugaacacccaguucaccgccgugggcaaggaguucaaccaccuggagaagagaaucgagaaccugaacaagaagguggacgacggcuuccuggacaucuggaccuacaacgccgagcugcuggugcugcuggagaacgagagaacccuggacuaccacgacagcaacgugaagaaccuguacgagaaggugagaagccagcugaagaacaacgccaaggagaucggcaacggcugcuucgaguucuaccacaagugcgacaacaccugcauggagagcgugaagaacggcaccuacgacuaccccaaguacagcgaggaggccaagcugaacagagaggagaucgacggcgugaagcuggagagcaccagaaucuaccagauccuggccaucuacagcaccguggccagcagccuggugcugguggugagccugggcgccaucagcuucuggaugugcagcaacggcagccugcagugcagaaucugcaucuga

SEQ ID NO: 163705 - RNA, 1701 nt, Artificial Sequence; identical to SEQ ID NO: 162716
  derived and/or modified CDS sequence (opt4) from hemagglutinin__InfluenzaA__ACZ16210

SEQ ID NO: 163706 - RNA, 1701 nt, Artificial Sequence; identical to SEQ ID NO: 162716
  derived and/or modified CDS sequence (opt4) from hemagglutinin__InfluenzaA__ACZ16220

SEQ ID NO: 163707 - RNA, 1701 nt, Artificial Sequence; identical to SEQ ID NO: 163464
  derived and/or modified CDS sequence (opt4) from hemagglutinin__InfluenzaA__ACZ16230

SEQ ID NO: 163708 - RNA, 1701 nt, Artificial Sequence
  derived and/or modified CDS sequence (opt4) from hemagglutinin__InfluenzaA__ACZ16240
augaaggccauccugguggugcugcuguacaccuucgccaccgccaacgccgacacccugugcaucggcuaccacgccaacaacagcaccgacaccguggacaccgugcuggagaagaacgugaccgugacccacagcgugaacauccuggaggacaagcacaacggcaagcugugcaagcugagaggcguggccccccugcaccugggcaagugcaacaucgccggcuggauccugggcaaccccgagugcgagagccugagcaccgccagcagcuggagcuacaucguggagaccagcagcagcgacaacggcaccugcuaccccggcgacuucaucgacuacgaggagcugagagagcagcugagcagcgugagcagcuucgagagauucgagaucuuccccaagaccagcagcuggcccaaccacgacagcaacaagggcgugaccgccgccugcccccacgccggcgccaagagcuucuacaagaaccugaucuggcuggugaagaagggcaacagcuaccccaagcugagcaagagcuacaucaacgacaagggcaaggaggugcuggugcuguggggcauccaccaccccagcaccagcgccgaccagcagagccuguaccagaacgccgacgccuacguguucgugggcagcagcagauacagcaagaaguucaagcccgagaucgccaucagacccaaggugagagaccaggagggcagaaugaacuacuacuggacccugguggagcccggcgacaagaucaccuucgaggccaccggcaaccugguggugcccagauacgccuucgccauggagagaaacgccggcagcggcaucaucaucagcgacacccccgugcacgacugcaacaccaccugccagacccccaagggcgccaucaacaccagccugcccuuccagaacauccaccccaucaccaucggcaagugccccaaguacgugaagagcaccaagcugagacuggccaccggccugagaaacgugcccagcauccagagcagaggccuguucggcgccaucgccggcuucaucgagggcggcuggaccggcaugguggacggcugguacggcuaccaccaccagaacgagcagggcagcggcuacgccgccgaccugaagagcacccagaacgcccuggacgagaucaccaacaaggugaacagcgugaucgagaagaugaacacccaguucaccgccgugggcaaggaguucaaccaccuggagaagagaaucgagaaccugaacaagaagguggacgacggcuuccuggacaucuggaccuacaacgccgagcugcuggugcugcuggagaacgagagaacccuggacuaccacgacagcaacgugaagaaccuguacgagaaggugagaagccagcugaagaacaacgccaaggagaucggcaacggcugcuucgaguucuaccacaagugcgacaacaccugcauggagagcgugaagaacggcaccuacgacuaccccaaguacagcgaggaggccaagcugaacagagaggagaucgacggcgugaagcuggagagcaccagaaucuaccagauccuggccaucuacagcaccguggccagcagccuggugcugguggugagccugggcgccaucagcuucuggaugugcagcaacggcagccugcagugcagaaucugcaucuga

SEQ ID NO: 163709 - RNA, 1701 nt, Artificial Sequence; identical to SEQ ID NO: 162716
  derived and/or modified CDS sequence (opt4) from hemagglutinin__InfluenzaA__ACZ16260

SEQ ID NO: 163710 - RNA, 1701 nt, Artificial Sequence
  derived and/or modified CDS sequence (opt4) from hemagglutinin__InfluenzaA__ACZ16270
augaaggccauccugguggugcugcuguacaccuucgccaccgccaacgccgacacccugugcaucggcuaccacgccaacaacagcaccgacaccguggacaccgugcuggagaagaacgugaccgugacccacagcgugaaccugcuggaggacaagcacaacggcaagcugugcaagcugagaggcguggccccccugcaccugggcaagugcaacaucgccggcuggauccugggcaaccccgagugcgagagccugagcaccgccagcagcuggagcuacaucguggagaccagcagcagcgacaacggcaccugcuaccccggcgacuucaucgacuacgaggagcugagagagcagcugagcagcgugagcagcuucgagagauucgagaucuuccccaagaccagcagcuggcccaaccacgacagcaacaagggcgugaccgccgccugcccccacgccggcgccaagagcuucuacaagaaccugaucuggcuggugaagaagggcaacagcuaccccaagcugagcaagagcuacaucaacgacaagggcaaggaggugcuggugcuguggggcauccaccaccccagcaccagcgccgaccagcagaaccuguaccagaacgccgacgccuacguguucgugggcagcagcagauacagcaagaaguucaagcccgagaucgccaucagacccaaggugagagaccaggagggcagaaugaacuacuacuggacccugguggagcccggcgacaagaucaccuucgaggccaccggcaaccugguggugcccagauacgccuucgccauggagagaaacgccggcagcggcaucaucaucagcgacacccccgugcacgacugcaacaccaccugccagacccccaagggcgccaucaacaccagccugcccuuccagaacauccaccccaucaccaucggcaagugccccaaguacgugaagagcaccaagcugagacuggccaccggccugagaaacgugcccagcauccagagcagaggccuguucggcgccaucgccggcuucaucgagggcggcuggaccggcaugguggacggcugguacggcuaccaccaccagaacgagcagggcagcggcuacgccgccgaccugaagagcacccagaacgccaucgacgagaucaccaacaaggugaacagcgugaucgagaagaugaacacccaguucaccgccgugggcaaggaguucaaccaccuggagaagagaaucgagaaccugaacaagaagguggacgacggcuuccuggacaucuggaccuacaacgccgagcugcuggugcugcuggagaacgagagaacccuggacuaccacgacagcaacgugaagaaccuguacgagaaggugagaagccagcugaagaacaacgccaaggagaucggcaacggcugcuucgaguucuaccacaagugcgacaacaccugcauggagagcgugaagaacggcaccuacgacuaccccaaguacagcgaggaggccaagcugaacagagaggagaucgacggcgugaagcuggagagcaccagaaucuaccagauccuggccaucuacagcaccguggccagcagccugauccugguggugagccugggcgccaucagcuucuggaugugcagcaacggcagccugcagugcagaaucugcaucuga

SEQ ID NO: 163711 - RNA, 1701 nt, Artificial Sequence; identical to SEQ ID NO: 163391
  derived and/or modified CDS sequence (opt4) from hemagglutinin__InfluenzaA__ACZ16280

SEQ ID NO: 163712 - RNA, 1701 nt, Artificial Sequence; identical to SEQ ID NO: 162716
  derived and/or modified CDS sequence (opt4) from hemagglutinin__InfluenzaA__ACZ16290

SEQ ID NO: 163713 - RNA, 1701 nt, Artificial Sequence
  derived and/or modified CDS sequence (opt4) from hemagglutinin__InfluenzaA__ACZ16300
augaaggccauccugguggugcugcuguacaccuucgccaccgccaacgccgacacccugugcaucggcuaccacgccaacaacagcaccgacaccguggacaccgugcuggagaagaacgugaucgugacccacagcgugaaccugcuggaggacaagcacaacggcaagcugugcaagcugagaggcguggccccccugcaccugggcaagugcaacaucgccggcuggauccugggcaaccccgagugcgagagccugagcaccgccagcagcuggagcuacaucguggagaccagcagcagcgacaacggcaccugcuaccccggcgacuucaucgacuacgaggagcugagagagcagcugagcagcgugagcagcuucgagagauucgagaucuuccccaagaccagcagcuggcccaaccacgacagcaacaagggcgugaccgccgccugcccccacgccggcgccaagagcuucuacaagaaccugaucuggcuggugaagaagggcaacagcuaccccaagcugagcaagagcuacaucaacgacaagggcaaggaggugcuggugcuguggggcauccaccaccccagcaccagcgccgaccagcagagccuguaccagaacgccgacgccuacguguucgugggcagcagcagauacagcaagaaguucaagcccgagaucgccaucagacccaaggugagagaccaggagggcagaaugaacuacuacuggacccugguggagcccggcgacaagaucaccuucgaggccaccggcaaccugcuggugcccagauacgccuucgccauggagagaaacgccggcagcggcaucaucaucagcgacacccccgugcacgacugcaacaccaccugccagacccccaagggcgccaucaacaccagccugcccuuccagaacauccaccccaucaccaucggcaagugccccaaguacgugaagagcaccaagcugagacuggccaccggccugagaaacgugcccagcauccagagcagaggccuguucggcgccaucgccggcuucaucgagggcggcuggaccggcaugguggacggcugguacggcuaccaccaccagaacgagcagggcagcggcuacgccgccgaccugaagagcacccagaacgccaucgacgagaucaccaacaaggugaacagcgugaucgagaagaugaacacccaguucaccgccgugggcaaggaguucaaccaccuggagaagagaaucgagaaccugaacaagaagguggacgacggcuuccuggacaucuggaccuacaacgccgagcugcuggugcugcuggagaacgagagaacccuggacuaccacgacagcaacgugaagaaccuguacgagaaggugagaagccagcugaagaacaacgccaaggagaucggcaacggcugcuucgaguucuaccacaagugcgacaacaccugcauggagagcgugaagaacggcaccuacgacuaccccaaguacagcgaggaggccaagcugaacagagaggagaucgacggcgugaagcuggagagcaccagaaucuaccagauccuggccaucuacagcaccguggccagcagccuggugcugguggugagccugggcgccaucagcuucuggaugugcagcaacggcagccugcagugcagaaucugcaucuga

SEQ ID NO: 163714 - RNA, 1701 nt, Artificial Sequence; identical to SEQ ID NO: 163459
  derived and/or modified CDS sequence (opt4) from hemagglutinin__InfluenzaA__ACZ16310

SEQ ID NO: 163715 - RNA, 1701 nt, Artificial Sequence
  derived and/or modified CDS sequence (opt4) from hemagglutinin__InfluenzaA__ACZ16320
augaaggccauccugguggugcugcuguacaccuucgccaccgccaacgccgacacccugugcaucggcuaccacgccaacaacagcaccgacaccguggacaccgugcuggagaagaacgugaccgugacccacagcgugaaccugcuggaggacaagcacaacggcaagcugugcaagcugagaggcguggccccccugcaccugggcaagugcaacaucgccggcuggauccugggcaaccccgagugcgagagccugagcaccgccagcagcuggagcuacaucguggagaccagcagcagcgacaacggcaccugcuaccccggcgacuucaucgacuacgaggagcugagagagcagcugagcagcgugagcagcuucgagagauucgagaucuuccccaagaccagcagcuggcccaaccacgacagcaacaagggcgugaccgccgccugcccccacgccggcgccaagagcuucuacaagaaccugaucuggcuggugaagaagggcaacagcuaccccaagcugagcaagagcuacaucaacgacaagggcaaggaggugcuggugcuguggggcauccaccaccccagcaccagcgccgaccagcagagccuguaccagaacgccgacgccuacguguucgugggcagcagcagauacagcaagaaguucaagcccgagaucgccaucagacccaaggugagagaccaggagggcagaaugaacuacuacuggacccugguggagcccggcgacaagaucaccuucgaggccaccggcaaccugguggugcccagauacgccuucgccauggagagaaacgccggcagcggcaucaucaucagcgacacccccgugcacgacugcaacaccaccugccagacccccaagggcgccaucaacaccagccugcccuuccagaacauccaccccaucaccaucggcaagugccccaaguacgugaagagcaccagacugagacuggccaccggccugagaaacgugcccagcauccagagcagaggccuguucggcgccaucgccggcuucaucgagggcggcuggaccggcaugguggacggcugguacggcuaccaccaccagaacgagcagggcagcggcuacgccgccgaccugaagagcacccagaacgccaucgacgagaucaccaacaaggugaacagcgugaucgagaagaugaacacccaguucaccgccgugggcaaggaguucaaccaccuggagaagagaaucgagaaccugaacaagaagguggacgacggcuuccuggacaucuggaccuacaacgccgagcugcuggugcugcuggagaacgagagaacccuggacuaccacgacagcaacgugaagaaccuguacgagaaggugagaagccagcugaagaacaacgccaaggagaucggcaacggcugcuucgaguucuaccacaagugcgacaacaccugcauggagagcgugaagaacggcaccuacgacuaccccaaguacagcgaggaggccaagcugaacagagaggagaucgacggcgugaagcuggagagcaccagaaucuaccagauccuggccaucuacagcaccguggccagcagccuggugcugguggugagccugggcgccaucagcuucuggaugugcagcaacggcagccugcagugcagaaucugcaucuga

SEQ ID NO: 163716 - RNA, 1701 nt, Artificial Sequence; identical to SEQ ID NO: 163459
  derived and/or modified CDS sequence (opt4) from hemagglutinin__InfluenzaA__ACZ16330

SEQ ID NO: 163717 - RNA, 1701 nt, Artificial Sequence; identical to SEQ ID NO: 162909
  derived and/or modified CDS sequence (opt4) from hemagglutinin__InfluenzaA__ACZ16340

SEQ ID NO: 163718 - RNA, 1701 nt, Artificial Sequence; identical to SEQ ID NO: 162716
  derived and/or modified CDS sequence (opt4) from hemagglutinin__InfluenzaA__ACZ16350

SEQ ID NO: 163719 - RNA, 1701 nt, Artificial Sequence; identical to SEQ ID NO: 162716
  derived and/or modified CDS sequence (opt4) from hemagglutinin__InfluenzaA__ACZ16360

SEQ ID NO: 163720 - RNA, 1701 nt, Artificial Sequence; identical to SEQ ID NO: 162909
  derived and/or modified CDS sequence (opt4) from hemagglutinin__InfluenzaA__ACZ16370

SEQ ID NO: 163721 - RNA, 1701 nt, Artificial Sequence; identical to SEQ ID NO: 162716
  derived and/or modified CDS sequence (opt4) from hemagglutinin__InfluenzaA__ACZ16380

SEQ ID NO: 163722 - RNA, 1701 nt, Artificial Sequence; identical to SEQ ID NO: 162716
  derived and/or modified CDS sequence (opt4) from hemagglutinin__InfluenzaA__ACZ16390

SEQ ID NO: 163723 - RNA, 1701 nt, Artificial Sequence; identical to SEQ ID NO: 162716
  derived and/or modified CDS sequence (opt4) from hemagglutinin__InfluenzaA__ACZ16400

SEQ ID NO: 163724 - RNA, 1701 nt, Artificial Sequence; identical to SEQ ID NO: 162716
  derived and/or modified CDS sequence (opt4) from hemagglutinin__InfluenzaA__ACZ16410

SEQ ID NO: 163725 - RNA, 1701 nt, Artificial Sequence; identical to SEQ ID NO: 163353
  derived and/or modified CDS sequence (opt4) from hemagglutinin__InfluenzaA__ACZ16420

SEQ ID NO: 163726 - RNA, 1701 nt, Artificial Sequence; identical to SEQ ID NO: 162716
  derived and/or modified CDS sequence (opt4) from hemagglutinin__InfluenzaA__ACZ16430

SEQ ID NO: 163727 - RNA, 1701 nt, Artificial Sequence; identical to SEQ ID NO: 162716
  derived and/or modified CDS sequence (opt4) from hemagglutinin__InfluenzaA__ACZ16440

SEQ ID NO: 163728 - RNA, 1701 nt, Artificial Sequence
  derived and/or modified CDS sequence (opt4) from hemagglutinin__InfluenzaA__ACZ16450
augaaggccauccugguggugcugcuguacaccuucgccaccgccaacgccgacacccugugcaucggcuaccacgccaacaacagcaccgacaccguggacaccgugcuggagaagaacgugaccgugacccacagcgugaaccugcuggaggacaagcacaacggcaagcugugcaagcugagaggcguggccccccugcaccugggcaagugcaacaucgccggcuggauccugggcaaccccgagugcgagagccugagcaccgccagcagcuggagcuacaucguggagaccagcagcagcgacaacggcaccugcuaccccggcgacuucaucgacuacgaggagcugagagagcagcugagcagcgugagcagcuucgagagauucgagaucuuccccaagaccagcagcuggcccaaccacgacagcaacaagggcgugaccgccgccugcccccacgccggcgccaagagcuucuacaagaaccugaucuggcuggugaagaagggcaacagcuaccccaagcugagcaagagcuacaucaacgacaagggcaaggaggugcuggugcuguggggcauccaccaccccagcaccagcgccgaccagcagagccuguaccagaacgccgacgccuacguguucgugggcagcagcagauacagcaagaaguucaagcccgagaucgccaucagacccaaggugagagaccaggagggcagaaugaacuacuacuggacccuggugaagcccggcgacaagaucaccuucgaggccaccggcaaccugguggugcccagauacgccuucgccauggagagaaacgccggcagcggcaucaucaucagcgacacccccgugcacgacugcaacaccaccugccagacccccaagggcgccaucaacaccagccugcccuuccagaacauccaccccaucaccaucggcaagugccccaaguacgugaagagcaccaagcugagacuggccaccggccugagaaacgugcccagcauccagagcagaggccuguucggcgccaucgccggcuucaucgagggcggcuggaccggcaugguggacggcugguacggcuaccaccaccagaacgagcagggcagcggcuacgccgccgaccugaagagcacccagaacgccaucgacgagaucaccaacaaggugaacagcgugaucgagaagaugaacacccaguucaccgccgugggcaaggaguucaaccaccuggagaagagaaucgagaaccugaacaagaagguggacgacggcuuccuggacaucuggaccuacaacgccgagcugcuggugcugcuggagaacgagagaacccuggacuaccacgacagcaacgugaagaaccuguacgagaaggugagaagccagcugaagaacaacgccaaggagaucggcaacggcugcuucgaguucuaccacaagugcgacaacaccugcauggagagcgugaagaacggcaccuacgacuaccccaaguacagcgaggaggccaagcugaacagagaggagaucgacggcgugaagcuggagagcaccagaaucuaccagauccuggccaucuacagcaccguggccagcagccuggugcugguggugagccugggcgccaucagcuucuggaugugcagcaacggcagccugcagugcagaaucugcaucuga

SEQ ID NO: 163729 - RNA, 1701 nt, Artificial Sequence; identical to SEQ ID NO: 162909
  derived and/or modified CDS sequence (opt4) from hemagglutinin__InfluenzaA__ACZ16460

SEQ ID NO: 163730 - RNA, 1701 nt, Artificial Sequence; identical to SEQ ID NO: 162716
  derived and/or modified CDS sequence (opt4) from hemagglutinin__InfluenzaA__ACZ16470

SEQ ID NO: 163731 - RNA, 1701 nt, Artificial Sequence; identical to SEQ ID NO: 162716
  derived and/or modified CDS sequence (opt4) from hemagglutinin__InfluenzaA__ACZ16480

SEQ ID NO: 163732 - RNA, 1701 nt, Artificial Sequence; identical to SEQ ID NO: 163464
  derived and/or modified CDS sequence (opt4) from hemagglutinin__InfluenzaA__ACZ16490

SEQ ID NO: 163733 - RNA, 1701 nt, Artificial Sequence; identical to SEQ ID NO: 162716
  derived and/or modified CDS sequence (opt4) from hemagglutinin__InfluenzaA__ACZ16500

SEQ ID NO: 163734 - RNA, 1701 nt, Artificial Sequence; identical to SEQ ID NO: 162909
  derived and/or modified CDS sequence (opt4) from hemagglutinin__InfluenzaA__ACZ16510

SEQ ID NO: 163735 - RNA, 1701 nt, Artificial Sequence; identical to SEQ ID NO: 162716
  derived and/or modified CDS sequence (opt4) from hemagglutinin__InfluenzaA__ACZ16530

SEQ ID NO: 163736 - RNA, 1701 nt, Artificial Sequence
  derived and/or modified CDS sequence (opt4) from hemagglutinin__InfluenzaA__ACZ16540
augaaggccauccugguggugcugcuguacaccuucgccaccgccaacgccgacacccugugcaucggcuaccacgccaacaacagcaccgacaccguggacaccgugcuggagaagaacgugaccgugacccacagcgugaacauccuggaggacaagcacaacggcaagcugugcaagcugagaggcguggccccccugcaccugggcaagugcaacaucgccggcuggauccugggcaaccccgagugcgagagccugagcaccgccagcagcuggagcuacaucguggagaccagcagcagcgacaacggcaccugcuaccccggcgacuucaucgacuacgaggagcugagagagcagcugagcagcgugagcagcuucgagagauucgagaucuuccccaagaccagcagcuggcccaaccacgacagcaacaagggcgugaccgccgccugcccccacgccggcgccaagagcuucuacaagaaccugaucuggcuggugaagaagggcaacagcuaccccaagcugagcaagagcuacaucaacgacaagggcaaggaggugcuggugcuguggggcauccaccaccccagcaccagcgccgaccagcagagccuguaccagaacgccgacgccuacguguucgugggcagcagcagauacagcaagaaguucaagcccgagaucgccaucagacccaaggugagagaccaggagggcagaaugaacuacuacuggacccugguggagcccggcgacaagaucaccuucgaggccaccggcaaccugguggugcccagauacgccuucgccauggagagaaacgccggcagcggcaucaucaucagcgacacccccgugcacgacugcaacaccaccugccagacccccaagggcgccaucaacaccagccugcccuuccagaacauccaccccaucaccaucggcaagugccccaaguacgugaagagcaccaagcugagacuggccaccggccugagaaacgugcccagcauccagagcagaggccugcugggcgccaucgccggcuucaucgagggcggcuggaccggcaugguggacggcugguacggcuaccaccaccagaacgagcagggcagcggcuacgccgccgaccugaagagcacccagaacgccaucgacgagaucaccaacaaggugaacagcgugaucgagaagaugaacacccaguucaccgccgugggcaaggaguucaaccaccuggagaagagaaucgagaaccugaacaagaagguggacgacggcuuccuggacaucuggaccuacaacgccgagcugcuggugcugcuggagaacgagagaacccuggacuaccacgacagcaacgugaagaaccuguacgagaaggugagaagccagcugaagaacaacgccaaggagaucggcaacggcugcuucgaguucuaccacaagugcgacaacaccugcauggagagcgugaagaacggcaccuacgacuaccccaaguacagcgaggaggccaagcugaacagagaggagaucgacggcgugaagcuggagagcaccagaaucuaccagauccuggccaucuacagcaccguggccagcagccuggugcugguggugagccugggcgccaucagcuucuggaugugcagcaacggcagccugcagugcagaaucugcaucuga

SEQ ID NO: 163737 - RNA, 1701 nt, Artificial Sequence; identical to SEQ ID NO: 163459
  derived and/or modified CDS sequence (opt4) from hemagglutinin__InfluenzaA__ACZ16550

SEQ ID NO: 163738 - RNA, 1701 nt, Artificial Sequence; identical to SEQ ID NO: 162716
  derived and/or modified CDS sequence (opt4) from hemagglutinin__InfluenzaA__ACZ16583

SEQ ID NO: 163739 - RNA, 1701 nt, Artificial Sequence; identical to SEQ ID NO: 163459
  derived and/or modified CDS sequence (opt4) from hemagglutinin__InfluenzaA__ACZ16593

SEQ ID NO: 163740 - RNA, 1701 nt, Artificial Sequence; identical to SEQ ID NO: 162716
  derived and/or modified CDS sequence (opt4) from hemagglutinin__InfluenzaA__ACZ16603

SEQ ID NO: 163741 - RNA, 1701 nt, Artificial Sequence; identical to SEQ ID NO: 163459
  derived and/or modified CDS sequence (opt4) from hemagglutinin__InfluenzaA__ACZ16630

SEQ ID NO: 163742 - RNA, 1701 nt, Artificial Sequence; identical to SEQ ID NO: 162716
  derived and/or modified CDS sequence (opt4) from hemagglutinin__InfluenzaA__ACZ16640

SEQ ID NO: 163743 - RNA, 1701 nt, Artificial Sequence; identical to SEQ ID NO: 162716
  derived and/or modified CDS sequence (opt4) from hemagglutinin__InfluenzaA__ACZ16650

SEQ ID NO: 163744 - RNA, 1701 nt, Artificial Sequence; identical to SEQ ID NO: 162716
  derived and/or modified CDS sequence (opt4) from hemagglutinin__InfluenzaA__ACZ16660

SEQ ID NO: 163745 - RNA, 1701 nt, Artificial Sequence; identical to SEQ ID NO: 162716
  derived and/or modified CDS sequence (opt4) from hemagglutinin__InfluenzaA__ACZ16670

SEQ ID NO: 163746 - RNA, 1701 nt, Artificial Sequence; identical to SEQ ID NO: 162716
  derived and/or modified CDS sequence (opt4) from hemagglutinin__InfluenzaA__ACZ16680

SEQ ID NO: 163747 - RNA, 1701 nt, Artificial Sequence; identical to SEQ ID NO: 162716
  derived and/or modified CDS sequence (opt4) from hemagglutinin__InfluenzaA__ACZ16690

SEQ ID NO: 163748 - RNA, 1701 nt, Artificial Sequence; identical to SEQ ID NO: 162716
  derived and/or modified CDS sequence (opt4) from hemagglutinin__InfluenzaA__ACZ16700

SEQ ID NO: 163749 - RNA, 1701 nt, Artificial Sequence; identical to SEQ ID NO: 162716
  derived and/or modified CDS sequence (opt4) from hemagglutinin__InfluenzaA__ACZ16710

SEQ ID NO: 163750 - RNA, 1701 nt, Artificial Sequence; identical to SEQ ID NO: 162716
  derived and/or modified CDS sequence (opt4) from hemagglutinin__InfluenzaA__ACZ16720

SEQ ID NO: 163751 - RNA, 1701 nt, Artificial Sequence; identical to SEQ ID NO: 163459
  derived and/or modified CDS sequence (opt4) from hemagglutinin__InfluenzaA__ACZ16730

SEQ ID NO: 163752 - RNA, 1701 nt, Artificial Sequence; identical to SEQ ID NO: 163459
  derived and/or modified CDS sequence (opt4) from hemagglutinin__InfluenzaA__ACZ16740

SEQ ID NO: 163753 - RNA, 1701 nt, Artificial Sequence; identical to SEQ ID NO: 162716
  derived and/or modified CDS sequence (opt4) from hemagglutinin__InfluenzaA__ACZ16750

SEQ ID NO: 163754 - RNA, 1701 nt, Artificial Sequence; identical to SEQ ID NO: 162716
  derived and/or modified CDS sequence (opt4) from hemagglutinin__InfluenzaA__ACZ16760

SEQ ID NO: 163755 - RNA, 1701 nt, Artificial Sequence; identical to SEQ ID NO: 162909
  derived and/or modified CDS sequence (opt4) from hemagglutinin__InfluenzaA__ACZ16770

SEQ ID NO: 163756 - RNA, 1701 nt, Artificial Sequence; identical to SEQ ID NO: 162716
  derived and/or modified CDS sequence (opt4) from hemagglutinin__InfluenzaA__ACZ16780

SEQ ID NO: 163757 - RNA, 1701 nt, Artificial Sequence; identical to SEQ ID NO: 162716
  derived and/or modified CDS sequence (opt4) from hemagglutinin__InfluenzaA__ACZ16790

SEQ ID NO: 163758 - RNA, 1701 nt, Artificial Sequence; identical to SEQ ID NO: 162716
  derived and/or modified CDS sequence (opt4) from hemagglutinin__InfluenzaA__ACZ16800

SEQ ID NO: 163759 - RNA, 1701 nt, Artificial Sequence; identical to SEQ ID NO: 162716
  derived and/or modified CDS sequence (opt4) from hemagglutinin__InfluenzaA__ACZ16810

SEQ ID NO: 163760 - RNA, 1701 nt, Artificial Sequence; identical to SEQ ID NO: 163391
  derived and/or modified CDS sequence (opt4) from hemagglutinin__InfluenzaA__ACZ16820

SEQ ID NO: 163761 - RNA, 1701 nt, Artificial Sequence; identical to SEQ ID NO: 162716
  derived and/or modified CDS sequence (opt4) from hemagglutinin__InfluenzaA__ACZ16830

SEQ ID NO: 163762 - RNA, 1701 nt, Artificial Sequence
  derived and/or modified CDS sequence (opt4) from hemagglutinin__InfluenzaA__ACZ16840
augaaggccauccugguggugcugcuguacaccuucgccaccgccaacgccgacacccugugcaucggcuaccacgccaacaacagcaccgacaccguggacaccgugcuggagaagaacgugaccgugacccacagcgugaaccugcuggaggacaagcacaacggcaagcugugcaagcugagaggcguggccccccugcaccugggcaagugcaacaucgccggcuggauccugggcaaccccgagugcgagagccugagcaccgccagcagcuggagcuacaucguggagaccagcagcagcgacaacggcaccugcuaccccggcgacuucaucgacuacgaggagcugagagagcagcugagcagcgugagcagcuucgagagauucgagaucuuccccaagaccagcagcuggcccaaccacgacagcaacaagggcgugaccgccgccugcccccacgccggcgccaagagcuucuacaagaaccugaucuggcuggugaagaagggcaacagcuaccccaagcugagcaagagcuacaucaacgacaagggcaaggaggugcuggugcuguggggcauccaccaccccagcaccagcgccgaccagcagagccuguaccagaacgccgacgccuacguguucgugggcagcagcagauacagcaagaaguucaagcccgagaucgccaucagaaccaaggugagagaccaggagggcagaaugaacuacuacuggacccugguggagcccggcgacaagaucaccuucgaggccaccggcaaccugguggugcccagauacgccuucgccauggagagaaacgccggcagcggcaucaucaucagcgacacccccgugcacgacugcaacaccaccugccagacccccaagggcgccaucaacaccagccugcccuuccagaacauccaccccaucaccaucggcaagugccccaaguacgugaagagcaccaagcugagacuggccaccggccugagaaacgugcccagcauccagagcagaggccuguucggcgccaucgccggcuucaucgagggcggcuggaccggcaugguggacggcugguacggcuaccaccaccagaacgagcagggcagcggcuacgccgccgaccugaagagcacccagaacgccaucgacgagaucaccaacaaggugaacagcgugaucgagaagaugaacacccaguucaccgccgugggcaaggaguucaaccaccuggagaagagaaucgagaaccugaacaagaagguggacgacggcuuccuggacaucuggaccuacaacgccgagcugcuggugcugcuggagaacgagagaacccuggacuaccacgacagcaacgugaagaaccuguacgagaaggugagaagccagcugaagaacaacgccaaggagaucggcaacggcugcuucgaguucuaccacaagugcgacaacaccugcauggagagcgugaagaacggcaccuacgacuaccccaaguacagcgaggaggccaagcugaacagagaggagaucgacggcgugaagcuggagagcaccagaaucuaccagauccuggccaucuacagcaccguggccagcagccuggugcugguggugagccugggcgccaucagcuucuggaugugcagcaacggcagccugcagugcagaaucugcaucuga

SEQ ID NO: 163763 - RNA, 1701 nt, Artificial Sequence; identical to SEQ ID NO: 162716
  derived and/or modified CDS sequence (opt4) from hemagglutinin__InfluenzaA__ACZ16850

SEQ ID NO: 163764 - RNA, 1701 nt, Artificial Sequence
  derived and/or modified CDS sequence (opt4) from hemagglutinin__InfluenzaA__ACZ16860
augaaggccauccugguggugcugcuguacaccuucgccaccgccaacgccgacacccugugcaucggcuaccacgccaacaacagcaccgacaccguggacaccgugcuggagaagaacgugaccgugacccacagcgugaaccugcuggaggacaagcacaacggcaagcugugcaagcugagaggcguggccccccugcaccugggcaagugcaacaucgccggcuggauccugggcaaccccgagugcgagagccugagcaccgccagcagcuggagcuacaucguggagaccagcagcagcgacaacggcaccugcuaccccggcgacuucaucgacuacgaggagcugagagagcagcugagcagcgugagcagcuucgagagauucgagaucuuccccaagaccagcagcuggcccaaccacgacagcaacaagggcgugaccgccgccugcccccacgccggcgccaagagcuucuacaagaaccugaucuggcuggugaagaagggcaacagcuaccccaagcugagcaagagcuacaucaacgacaagggcaaggaggugcuggugcuguggggcauccaccaccccagcaccagcgccgaccagcagagccuguaccagaacgccgacgccuacguguucgugggcagcagcagauacagcaagaaguucaagcccgagaucgccaucagacccaaggugagagaccaggagggcagaaugaacuacuacuggacccugguggagcccggcgacaagaucaccuucgaggccaccggcaaccugguggcccccagauacgccuucgccauggagagaaacgccggcagcggcaucaucaucagcgacacccccgugcacgacugcaacaccaccugccagacccccaagggcgccaucaacaccagccugcccuuccagaacauccaccccaucaccaucggcaagugccccaaguacgugaagagcaccaagcugagacuggccaccggccugagaaacgugcccagcauccagagcagaggccuguucggcgccaucgccggcuucaucgagggcggcuggaccggcaugguggacggcugguacggcuaccaccaccagaacgagcagggcagcggcuacgccgccgaccugaagagcacccagaacgccaucgacgagaucaccaacaaggugaacagcgugaucgagaagaugaacacccaguucaccgccgugggcaaggaguucaaccaccuggagaagagaaucgagaaccugaacaagaagguggacgacggcuuccuggacaucuggaccuacaacgccgagcugcuggugcugcuggagaacgagagaacccuggacuaccacgacagcaacgugaagaaccuguacgagaaggugagaagccagcugaagaacaacgccaaggagaucggcaacggcugcuucgaguucuaccacaagugcgacaacaccugcauggagagcgugaagaacggcaccuacgacuaccccaaguacagcgaggaggccaagcugaacagagaggagaucgacggcgugaagcuggagagcaccagaaucuaccagauccuggccaucuacagcaccguggccagcagccuggugcugguggugagccugggcgccaucagcuucuggaugugcagcaacggcagccugcagugcagaaucugcaucuga

SEQ ID NO: 163765 - RNA, 1701 nt, Artificial Sequence; identical to SEQ ID NO: 163459
  derived and/or modified CDS sequence (opt4) from hemagglutinin__InfluenzaA__ACZ16870

SEQ ID NO: 163766 - RNA, 1701 nt, Artificial Sequence
  derived and/or modified CDS sequence (opt4) from hemagglutinin__InfluenzaA__ACZ16880
augaaggccauccugguggugcugcuguacaccuucgccaccgccaacgccgacacccugugcaucggcuaccacgccaacaacagcaccgacaccguggacaccgugcuggagaagaacgugaccgugacccacagcgugaaccugcuggaggacaagcacaacggcaagcugugcaagcugagaggcguggccccccugcaccugggcaagugcaacaucgccggcuggauccugggcaaccccgagugcgagagccugagcaccgccagcagcuggagcuacaucguggagaccagcagcagcgacaacggcaccugcuaccccggcgacuucaucgacuacgaggagcugagagagcagcugagcagcgugagcagcuucgagagauucgagaucuuccccaagaccagcagcuggcccaaccacgacagcaacaagggcgugaccgccgccugcccccacgccggcgccaagagcuucuacaagaaccugaucuggcuggugaagaagggcaacagcuaccccaagcugagcaagagcuacaucaacgacaagggcaaggaggugcuggugcuguggggcauccaccaccccagcaccagcgccgaccagcagagccuguaccagaacgccgacgccuacguguucgugggcagcagcagauacagcaagaaguucaagcccgagaucgccaucagacccaaggugagagaccaggagggcagaaugaacuacuacuggacccugguggagcccggcgacaagaucaccuucgaggccaccggcaaccugguggugcccagauacgccuucgccauggagagaaacgacggcagcggcaucaucaucagcgacacccccgugcacgacugcaacaccaccugccagacccccaagggcgccaucaacaccagccugcccuuccagaacauccaccccaucaccaucggcaagugccccaaguacgugaagagcaccaagcugagacuggccaccggccugagaaacgugcccagcauccagagcagaggccuguucggcgccaucgccggcuucaucgagggcggcuggaccggcaugguggacggcugguacggcuaccaccaccagaacgagcagggcagcggcuacgccgccgaccugaagagcacccagaacgccaucgacgagaucaccaacaaggugaacagcgugaucgagaagaugaacacccaguucaccgccgugggcaaggaguucaaccaccuggagaagagaaucgagaaccugaacaagaagguggacgacggcuuccuggacaucuggaccuacaacgccgagcugcuggugcugcuggagaacgagagaacccuggacuaccacgacagcaacgugaagaaccuguacgagaaggugagaagccagcugaagaacaacgccaaggagaucggcaacggcugcuucgaguucuaccacaagugcaacaacaccugcauggagagcgugaagaacggcaccuacgacuaccccaaguacagcgaggaggccaagcugaacagagaggagaucgacggcgugaagcuggagagcaccagaaucuaccagauccuggccaucuacagcaccguggccagcagccuggugcugguggugagccugggcgccaucagcuucuggaugugcagcaacggcagccugcagugcagaaucugcaucuga

SEQ ID NO: 163767 - RNA, 1701 nt, Artificial Sequence; identical to SEQ ID NO: 163464
  derived and/or modified CDS sequence (opt4) from hemagglutinin__InfluenzaA__ACZ16890

SEQ ID NO: 163768 - RNA, 1701 nt, Artificial Sequence; identical to SEQ ID NO: 162716
  derived and/or modified CDS sequence (opt4) from hemagglutinin__InfluenzaA__ACZ16900

SEQ ID NO: 163769 - RNA, 1701 nt, Artificial Sequence; identical to SEQ ID NO: 162716
  derived and/or modified CDS sequence (opt4) from hemagglutinin__InfluenzaA__ACZ16910

SEQ ID NO: 163770 - RNA, 1701 nt, Artificial Sequence; identical to SEQ ID NO: 162716
  derived and/or modified CDS sequence (opt4) from hemagglutinin__InfluenzaA__ACZ16920

SEQ ID NO: 163771 - RNA, 1701 nt, Artificial Sequence; identical to SEQ ID NO: 162729
  derived and/or modified CDS sequence (opt4) from hemagglutinin__InfluenzaA__ACZ16930

SEQ ID NO: 163772 - RNA, 1701 nt, Artificial Sequence; identical to SEQ ID NO: 162729
  derived and/or modified CDS sequence (opt4) from hemagglutinin__InfluenzaA__ACZ16940

SEQ ID NO: 163773 - RNA, 1701 nt, Artificial Sequence; identical to SEQ ID NO: 162716
  derived and/or modified CDS sequence (opt4) from hemagglutinin__InfluenzaA__ACZ16950

SEQ ID NO: 163774 - RNA, 1701 nt, Artificial Sequence; identical to SEQ ID NO: 162971
  derived and/or modified CDS sequence (opt4) from hemagglutinin__InfluenzaA__ACZ16960

SEQ ID NO: 163775 - RNA, 1701 nt, Artificial Sequence
  derived and/or modified CDS sequence (opt4) from hemagglutinin__InfluenzaA__ACZ16970
augaaggccauccugguggugcugcuguacaccuucgccaccgccaacgccgacacccugugcaucggcuaccacgccaacaacagcaccgacaccguggacaccgugcuggagaagaacgugaccgugacccacagcgugaaccugcuggaggacaagcacaacggcaagcugugcaagcugagaggcguggccccccugcaccugggcaagugcaacaucgccggcuggauccugggcaaccccgagugcgagagccugagcaccgccagcagcuggagcuacaucguggagaccagcagcagcgacaacggcaccugcuaccccggcgacuucaucgacuacgaggagcugagagagcagcugagcagcgugagcagcuucgagagauucgagaucuuccccaagaccagcagcuggcccaaccacgacagcaacaagggcgugaccgccgccugcccccacgccggcgccaagagcuucuacaagaaccugaucuggcuggugaaggagggcaacagcuaccccaagcugagcaagagcuacaucaacgacaagggcaaggaggugcuggugcuguggggcauccaccaccccagcaccagcgccgaccagcagagccuguaccagaacgccgacgccuacguguucgugggcaccagcagauacagcaagaaguucaagcccgagaucgccaucagacccaaggugagagaccaggagggcagaaugaacuacuacuggacccugguggagcccggcgacaagaucaccuucgaggccaccggcaaccugguggugcccagauacgccuucgccauggagagaaacgccggcagcggcaucaucaucagcgacacccccgugcacgacugcaacaccaccugccagacccccaagggcgccaucaacaccagccugcccuuccagaacauccaccccaucaccaucggcaagugccccaaguacgugaagagcaccaagcugagacuggccaccggccugagaaacgugcccagcauccagagcagaggccuguucggcgccaucgccggcuucaucgagggcggcuggaccggcaugguggacggcugguacggcuaccaccaccagaacgagcagggcagcggcuacgccgccgaccugaagagcacccagaacgccaucgacgagaucaccaacaaggugaacagcgugaucgagaagaugaacacccaguucaccgccgugggcaaggaguucaaccaccuggagaagagaaucgagaaccugaacaagaagguggacgacggcuuccuggacaucuggaccuacaacgccgagcugcuggugcugcuggagaacgagagaacccuggacuaccacgacagcaacgugaagaaccuguacgagaaggugagaagccagcugaagaacaacgccaaggagaucggcaacggcugcuucgaguucuaccacaagugcgacaacaccugcauggagagcgugaagaacggcaccuacgacuaccccaaguacagcgaggaggccaagcugaacagagaggagaucgacggcgugaagcuggagagcaccagaaucuaccagauccuggccaucuacagcaccguggccagcagccuggugcugguggugagccugggcgccaucagcuucuggaugugcagcaacggcagccugcagugcagaaucugcaucuga

SEQ ID NO: 163776 - RNA, 1701 nt, Artificial Sequence; identical to SEQ ID NO: 162729
  derived and/or modified CDS sequence (opt4) from hemagglutinin__InfluenzaA__ACZ16980

SEQ ID NO: 163777 - RNA, 1701 nt, Artificial Sequence; identical to SEQ ID NO: 162729
  derived and/or modified CDS sequence (opt4) from hemagglutinin__InfluenzaA__ACZ17000

SEQ ID NO: 163778 - RNA, 1701 nt, Artificial Sequence
  derived and/or modified CDS sequence (opt4) from hemagglutinin__InfluenzaA__ACZ17010
augaaggccauccugguggugcugcuguacaccuucgccaccgccaacgccgacacccugugcaucggcuaccacgccaacaacagcaccgacaccguggacaccgugcuggagaagaacgugaccgugacccacagcgugaaccugcuggaggacaagcacaacggcaagcugugcaagcugagaggcguggccccccugcaccugggcaagugcaacaucgccggcuggauccugggcaaccccgagugcgagagccugagcaccgccagcagcuggagcuacaucguggagaccagcagcagcgacaacggcaccugcuaccccggcgacuucaucgacuacgaggagcugagagagcagcugagcagcgugagcagcuucgagagauucgagaucuuccccaagaccagcagcuggcccaaccacgacagcaacaagggcgugaccgccgccugcccccacgccggcgccaagagcuucuacaagaaccugaucuggcuggugaagaagggcaacagcuaccccaagcugagcaagagcuacaucaacgacaagggcaaggaggugcuggugcuguggggcauccaccaccccagcaccagcgccgaccagcagagccuguaccagaacgccgacgccuacguguucgugggcagcagcaaguacagcaagaaguucaagcccgagaucgccaucagacccaaggugagagaccaggagggcagaaugaacuacuacuggacccugguggagcccggcgacaagaucaccuucgaggccaccggcaaccugguggugcccagauacgccuucgccauggagagaaacgccggcagcggcaucaucaucagcgacacccccgugcacgacugcaacaccaccugccagacccccaagggcgccaucaacaccagccugcccuuccagaacauccaccccaucaccaucggcaagugccccaaguacgugaagagcaccaagcugagacuggccaccggccugagaaacgugcccagcauccagagcagaggccuguucggcgccaucgccggcuucaucgagggcggcuggaccggcaugguggacggcugguacggcuaccaccaccagaacgagcagggcagcggcuacgccgccgaccugaagagcacccagaacgccaucgacaagaucaccaacaaggugaacagcgugaucgagaagaugaacacccaguucaccgccgugggcaaggaguucaaccaccuggagaagagaaucgagaaccugaacaagaagguggacgacggcuuccuggacaucuggaccuacaacgccgagcugcuggugcugcuggagaacgagagaacccuggacuaccacgacagcaacgugaagaaccuguacgagaaggugagaagccagcugaagaacaacgccaaggagaucggcaacggcugcuucgaguucuaccacaagugcgacaacaccugcauggagagcgugaagaacggcaccuacgacuaccccaaguacagcgaggaggccaagcugaacagagaggagaucgacggcgugaagcuggagagcaccagaaucuaccagauccuggccaucuacagcaccguggccagcagccuggugcugguggugagccugggcgccaucagcuucuggaugugcagcaacggcagccugcagugcagaaucugcaucuga

SEQ ID NO: 163779 - RNA, 1701 nt, Artificial Sequence; identical to SEQ ID NO: 162729
  derived and/or modified CDS sequence (opt4) from hemagglutinin__InfluenzaA__ACZ17020

SEQ ID NO: 163780 - RNA, 1701 nt, Artificial Sequence
  derived and/or modified CDS sequence (opt4) from hemagglutinin__InfluenzaA__ACZ17030
augaaggccacccugguggugcugcuguacaccuucgccaccgccaacgccgacacccugugcaucggcuaccacgccaacaacagcaccgacaccguggacaccgugcuggagaagaacgugaccgugacccacagcgugaaccugcuggaggacaagcacaacggcaagcugugcaagcugagaggcguggccccccugcaccugggcaagugcaacaucgccggcuggauccugggcaaccccgagugcgagagccugagcaccgccagcagcuggagcuacaucguggaggccagcagcagcgacaacggcaccugcuaccccggcgacuucaucgacuacgaggagcugagagagcagcugagcagcgugagcagcuucgagagauucgagaucuuccccaagaccagcagcuggcccaaccacgacagcaacaagggcgugaccgccgccugcccccacgccggcgccaagagcuucuacaagaaccugaucuggcuggugaagaagggcaacagcuaccccaagcugagcaagagcuacaucaacgacaagggcaaggaggugcuggugcuguggggcauccaccaccccagcaccagcgccgaccagcagagccuguaccagaacgccgacgccuacguguucgugggcaccagcagauacagcaagaaguucaagcccgagaucgccaucagacccaaggugagagaccaggagggcagaaugaacuacuacuggacccugguggagcccggcgacaagaucaccuucgaggccaccggcaaccugguggugcccagauacgccuucgccauggagagaaacgccggcagcggcaucaucaucagcgacacccccgugcacgacugcaacaccaccugccagacccccaagggcgccaucaacaccagccugcccuuccagaacauccaccccaucaccaucggcaagugccccaaguacgugaagagcaccaagcugagacuggccaccggccugagaaacgugcccagcauccagagcagaggccuguucggcgccaucgccggcuucaucgagggcggcuggaccggcaugguggacggcugguacggcuaccaccaccagaacgagcagggcagcggcuacgccgccgaccugaagagcacccagaacgccaucgacgagaucaccaacaaggugaacagcgugaucgagaagaugaacacccaguucaccgccgugggcaaggaguucaaccaccuggagaagagaaucgagaaccugaacaagaagguggacgacggcuuccuggacaucuggaccuacaacgccgagcugcuggugcugcuggagaacgagagaacccuggacuaccacgacagcaacgugaagaaccuguacgagaaggugagaagccagcugaagaacaacgccaaggagaucggcaacggcugcuucgaguucuaccacaagugcgacaacaccugcauggagagcgugaagaacggcaccuacgacuaccccaaguacagcgaggaggccaagcugaacagagaggagaucgacggcgugaagcuggagagcaccagaaucuaccagauccuggccaucuacagcaccguggccagcagccuggugcugguggugagccugggcgccaucagcuucuggaugugcagcaacggcagccugcagugcagaaucugcaucuga

SEQ ID NO: 163781 - RNA, 1701 nt, Artificial Sequence
  derived and/or modified CDS sequence (opt4) from hemagglutinin__InfluenzaA__ACZ17040
augaaggccauccugguggugcugcuguacaccuucgccaccgccaacgccgacacccugugcaucggcuaccacgccaacaacagcaccgacaccguggacaccgugcuggagaagaacgugaccgugacccacagcgugaaccugcuggaggacaagcacaacggcaagcugugcaagcugagaggcguggccccccugcaccugggcaagugcaacaucgccggcuggauccugggcaaccccgagugcgagagccugagcaccgccagcagcuggagcuacaucguggagaccagcagcagcgacaacggcaccugcuaccccggcgacuucaucgacuacgaggagcugagagagcagcugagcagcgugagcagcuucgagagauucgagaucuuccccaagaccagcagcuggcccaaccacgacagcaacaagggcgugaccgccgccugcccccacgccggcgccaagagcuucuacaagaaccugaucuggcuggugaagaagggcaacagcuaccccaagcugagcaagagcuacaucaacgacaagggcaaggaggugcuggugcuguggggcauccaccaccccagcaccagcgccgaccagcagagccuguaccagaacgccgacgccuacguguucgugggcaccagcagauacagcaagaaguucaagcccgagaucgccaucagacccaaggugagagaccaggagggcagaaugaacuacuacuggacccugguggagcccggcgacaagaucaccuucgaggccaccggcaaccugguggugcccagauacgccuucgccauggagagaaacgccggcagcggcaucaucaucagcgacacccccgugcacgacugcaacaccaccugccagacccccaagggcgccaucaacaccagccugcccuuccagaacauccaccccaucaccaucggcaagugccccaaguacgugaagagcaccaagcugagacuggccaccggccugagaaacgugcccagcauccagagcagaggccuguucggcgccaucgccggcuucaucgagggcggcuggaccggcaugguggacggcugguacggcuaccaccaccagaacgagcagggcagcggcuacgccgccgaccugaagagcacccagaacgccaucgacgagaucaccaacaaggugaacagcgugaucgagaagaugaacacccaguucaccgccgugggcaaggaguucaaccaccuggagaagagaaucgagaaccugaacaagaagguggacgacggcuuccuggacaucuggaccuacaacgccgagcugcuggugcugcuggagaacgagagaacccuggacuaccacgacagcaacgugaagaaccuguacgagaaggugagaagccagcugaagaacaacgccaaggagaucggcaacggcugcuucgaguucuaccacaagugcgacaacaccugcauggagagcgugaagaacggcaccuacgacuaccccaaguacagcaaggaggccaagcugaacagagaggagaucgacggcgugaagcuggagagcaccagaaucuaccagauccuggccaucuacagcaccguggccagcagccuggugcugguggugagccugggcgccaucagcuucuggaugugcagcaacggcagccugcagugcagaaucugcaucuga

SEQ ID NO: 163782 - RNA, 1701 nt, Artificial Sequence; identical to SEQ ID NO: 162729
  derived and/or modified CDS sequence (opt4) from hemagglutinin__InfluenzaA__ACZ17050

SEQ ID NO: 163783 - RNA, 1701 nt, Artificial Sequence; identical to SEQ ID NO: 162729
  derived and/or modified CDS sequence (opt4) from hemagglutinin__InfluenzaA__ACZ17060

SEQ ID NO: 163784 - RNA, 1701 nt, Artificial Sequence; identical to SEQ ID NO: 162729
  derived and/or modified CDS sequence (opt4) from hemagglutinin__InfluenzaA__ACZ17070

SEQ ID NO: 163785 - RNA, 1701 nt, Artificial Sequence; identical to SEQ ID NO: 162909
  derived and/or modified CDS sequence (opt4) from hemagglutinin__InfluenzaA__ACZ17080

SEQ ID NO: 163786 - RNA, 1701 nt, Artificial Sequence
  derived and/or modified CDS sequence (opt4) from hemagglutinin__InfluenzaA__ACZ17090
augaaggccauccugguggugcugcuguacaccuucgccaccgccaacgccgacacccugugcaucggcuaccacgccaacaacagcaccgacaccguggacaccgugcuggagaagaacgugaccgugacccacagcgugaaccugcugggcgacaagcacaacggcaagcugugcaagcugagaggcguggccccccugcaccugggcaagugcaacaucgccggcuggauccugggcaaccccgagugcgagagccugagcaccgccagcagcuggagcuacaucguggagaccagcagcagcgacaacggcaccugcuaccccggcgacuucaucgacuacgaggagcugagagagcagcugagcagcgugagcagcuucgagagauucgagaucuuccccaagaccagcagcuggcccaaccacgacagcaacaagggcgugaccgccgccugcccccacgccggcgccaagagcuucuacaagaaccugaucuggcuggugaagaagggcaacagcuaccccaagcugagcaagagcuacaucaacgacaagggcaaggaggugcuggugcuguggggcauccaccaccccagcaccagcgccgaccagcagagccuguaccagaacgccgacgccuacguguucgugggcaccagcagauacagcaagaaguucaagcccgagaucgccaucagacccaaggugagagaccaggagggcagaaugaacuacuacuggacccugguggagcccggcgacaagaucaccuucgaggccaccggcaaccugguggugcccagauacgccuucgccauggagagaaacgccggcagcggcaucaucaucagcgacacccccgugcacgacugcaacaccaccugccagacccccaagggcgccaucaacaccagccugcccuuccagaacauccaccccaucaccaucggcaagugccccaaguacgugaagagcaccaagcugagacuggccaccggccugagaaacgugcccagcauccagagcagaggccuguucggcgccaucgccggcuucaucgagggcggcuggaccggcaugguggacggcugguacggcuaccaccaccagaacgagcagggcagcggcuacgccgccgaccugaagagcacccagaacgccaucgacgagaucaccaacaaggugaacagcgugaucgagaagaugaacacccaguucaccgccgugggcaaggaguucaaccaccuggagaagagaaucgagaaccugaacaagaagguggacgacggcuuccuggacaucuggaccuacaacgccgagcugcuggugcugcuggagaacgagagaacccuggacuaccacgacagcaacgugaagaaccuguacgagaaggugaagagccagcugaagaacaacgccaaggagaucggcaacggcugcuucgaguucuaccacaagugcgacaacaccugcauggagagcgugaagaacggcaccuacgacuaccccaaguacagcgaggaggccaagcugaacagagaggagaucgacggcgugaagcuggagagcaccagaaucuaccagauccuggccaucuacagcaccguggccagcagccuggugcugguggugagccugggcgccaucagcuucuggaugugcagcaacggcagccugcagugcagaaucugcaucuga

SEQ ID NO: 163787 - RNA, 1701 nt, Artificial Sequence; identical to SEQ ID NO: 162716
  derived and/or modified CDS sequence (opt4) from hemagglutinin__InfluenzaA__ACZ17100

SEQ ID NO: 163788 - RNA, 1701 nt, Artificial Sequence
  derived and/or modified CDS sequence (opt4) from hemagglutinin__InfluenzaA__ACZ17110
augaaggccauccugguggugcugcuguacaccuucgccaccgccaacgccgacacccugugcaucggcuaccacgccaacaacagcaccgacaccguggacaccgugcuggagaagaacgugaccgugacccacagcgugaaccugcuggaggacaagcacaacggcaagcugugcaagcugagaggcguggccccccugcaccugggcaagugcaacaucgccggcuggauccugggcaaccccgagugcgagagccugagcaccgccagcagcuggagcuacaucguggagaccagcagcagcgacaacggcaccugcuaccccggcgacuucaucgacuacgaggagcugagagagcagcugagcagcgugagcagcuucgagagauucgagaucuuccccaagaccagcagcuggcccaaccacgacagcaacaagggcgugaccgccgccugcccccacgccggcgccaagagcuucuacaagaaccugaucuggcuggugaagaagggcaacagcuaccccgagcugagcaagagcuacaucaacgacaagggcaaggaggugcuggugcuguggggcauccaccaccccagcaccagcgccgaccagcagagccuguaccagaacgccgacgccuacguguucgugggcaccagcagauacagcaagaaguucaagcccgagaucgccaucagacccaaggugagagaccaggagggcagaaugaacuacuacuggacccugguggagcccggcgacaagaucaccuucgaggccaccggcaaccugguggugcccagauacgccuucgccauggagagaaacgccggcagcggcaucaucaucagcgacacccccgugcacgacugcaacaccaccugccagacccccaagggcgccaucaacaccagccugcccuuccagaacauccaccccaucaccaucggcaagugccccaaguacgugaagagcaccaagcugagacuggccaccggccugagaaacgugcccagcauccagagcagaggccuguucggcgccaucgccggcuucaucgagggcggcuggaccggcaugguggacggcugguacggcuaccaccaccagaacgagcagggcagcggcuacgccgccgaccugaagagcacccagaacgccaucgacgagaucaccaacaaggugaacagcgugaucgagaagaugaacacccaguucaccgccgugggcaaggaguucaaccaccuggagaagagaaucgagaaccugaacaagaagguggacgacggcuuccuggacaucuggaccuacaacgccgagcugcuggugcugcuggagaacgagagaacccuggacuaccacgacagcaacgugaagaaccuguacgagaaggugagaagccagcugaagaacaacgccaaggagaucggcaacggcugcuucgaguucuaccacaagugcgacaacaccugcauggagagcgugaagaacggcaccuacgacuaccccaaguacagcgaggaggccaagcugaacagagaggagaucgacggcgugaagcuggagagcaccagaaucuaccagauccuggccaucuacagcaccguggccagcagccuggugcugguggugagccugggcgccaucagcuucuggaugugcagcaacggcagccugcagugcagaaucugcaucuga

SEQ ID NO: 163789 - RNA, 1701 nt, Artificial Sequence
  derived and/or modified CDS sequence (opt4) from hemagglutinin__InfluenzaA__ACZ17120
augaaggccauccugguggugcugcuguacaccuucgccaccgccaacgccgacacccugugcaucggcuaccacgccaacaacagcaccgacaccguggacaccgugcuggagaagaacgugaccgugacccacagcgugaaccugcuggaggacaagcacaacggcaagcugugcaagcugagaggcguggccccccugcaccugggcaagugcaacaucgccggcuggauccugggcaaccccgagugcgagagccugagcaccgccagcagcuggagcuacaucguggagaccagcagcagcgacaacggcaccugcuaccccggcgacuucaucgacuacgaggagcugagagagcagcugagcagcgugagcagcuucgagagauucgagaucuuccccaagaccagcagcuggcccaaccacgacagcaacaagggcgugaccgccgccugcccccacgccggcgccaagagcuucuacaagaaccugaucuggcuggugaagaagggcaacagcuaccccaagcugagcaagagcuacaucaacgacaagggcaaggaggugcuggugcuguggggcauccaccaccccagcaccagcgccgaccagcagagccuguaccagaacgccgacgccuacguguucgugggcaccagcagauacagcaagaaguucaagcccgagaucgccaucagacccaaggugagagaccaggagggcagaaugaacuacuacuggacccugguggagcccggcgacaagaucaccuucgaggccaccggcaaccugguggugcccagauacgccuucgccauggagagaaacgccggcagcggcaucaucaucagcgacacccccgugcacgacugcaacaccaccugccagacccccaagggcgccaucaacaccagccugcccuuccagaacauccaccccaucaccaucggcaagugccccaaguacgugaagagcaccaagcugagacuggccaccggccugagaaacgugcccagcauccagagcagaggccuguucggcgccaucgccggcuucaucgagggcggcuggaccggcaugguggacggcugguacggcuaccaccaccagaacgagcagggcagcggcuacgccgccgaccugaagagcacccagaacgccaucgacgagaucaccaacaaggugaacagcgugaucgagaagaugaacacccaguucaccgccgugggcaaggaguucaaccaccuggagaagagaaucgagaaccugaacaagaagguggacgacggcuuccuggacaucuggaccuacaacgccgagcugcuggugcugcuggagaacgagagaacccuggacuaccacgacagcaacgugaagaaccuguacgagaaggugagaagccagcugaagaccaacgccaaggagaucggcaacggcugcuucgaguucuaccacaagugcgacaacaccugcauggagagcgugaagaacggcaccuacgacuaccccaaguacagcgaggaggccaagcugaacagagaggagaucgacggcgugaagcuggagagcaccagaaucuaccagauccuggccaucuacagcaccguggccagcagccuggugcugguggugagccugggcgccaucagcuucuggaugugcagcaacggcagccugcagugcagaaucugcaucuga

SEQ ID NO: 163790 - RNA, 1701 nt, Artificial Sequence
  derived and/or modified CDS sequence (opt4) from hemagglutinin__InfluenzaA__ACZ17130
augaaggccauccugguggugcugcuguacaccuucgccaccgccaacgccgacacccugugcaucggcuaccacgccaacaacagcaccgacaccguggacaccgugcuggagaagaacgugaccgugacccacagcgugaaccugcuggaggacaagcacaacggcaagcugugcaagcugagaggcguggccccccugcaccugggcaagugcaacaucgccggcuggauccugggcaaccccgagugcgagagccugagcaccgccagcagcuggagcuacaucguggagaccagcagcagcgacaacggcaccugcuaccccggcgacuucaucgacuacgaggagcugagagagcagcugagcagcgugagcagcuucgagagauucgagaucuuccccaagaccagcagcuggcccaaccacgacagcaacaagggcgugaccgccgccugcccccacgccggcgccaagagcuucuacaagaaccugaucuggcuggugaagaagggcaacagcuaccccaagcugagcaagagcuacaucaacgacaagggcaaggaggugcuggugcuguggggcauccaccaccccagcaccagcgccgaccagcagagccuguaccagaacgccgacgccuacguguucgugggcaccagcagauacagcaagaaguucaagcccgagaucgccaucagacccaaggugagagaccaggagggcagaaugaacuacuacuggacccugguggagcccggcgacaagaucaccuucgaggccaccggcaaccugguggugcccagauacgccuucgccauggagagaaacgccggcagcggcaucaucaucagcgacacccccgugcacgacugcaacaccaccugccagacccccaagggcgccaucaacaccagccugcccuuccagaacauccaccccaucaccaucggcaagugccccaaguacgugaagagcaccaagcugagacuggccaccggccugagaaacgugcccagcauccagagcagaggccuguucggcgccaucgccggcuucaucgagggcggcuggaccggcaugguggacggcugguacggcuaccaccaccagaacgagcagggcagcggcuacgccgccgaccugaagagcacccagaacgccaucgacgagaucaccaacaaggugaacagcgugaucgagaagaugaacgcccaguucaccgccgugggcaaggaguucaaccaccuggagaagagaaucgagaaccugaacaagaagguggacgacggcuuccuggacaucuggaccuacaacgccgagcugcuggugcugcuggagaacgagagaacccuggacuaccacgacagcaacgugaagaaccuguacgagaaggugagaagccagcugaagaacaacgccaaggagaucggcaacggcugcuucgaguucuaccacaagugcgacaacaccugcauggagagcgugaagaacggcaccuacgacuaccccaaguacagcgaggaggccaagcugaacagagaggagaucgacggcgugaagcuggagagcaccagaaucuaccagauccuggccaucuacagcaccguggccagcagccuggugcugguggugagccugggcgccaucagcuucuggaugugcagcaacggcagccugcagugcagaaucugcaucuga

SEQ ID NO: 163791 - RNA, 1701 nt, Artificial Sequence; identical to SEQ ID NO: 163527
  derived and/or modified CDS sequence (opt4) from hemagglutinin__InfluenzaA__ACZ17140

SEQ ID NO: 163792 - RNA, 1701 nt, Artificial Sequence; identical to SEQ ID NO: 163358
  derived and/or modified CDS sequence (opt4) from hemagglutinin__InfluenzaA__ACZ17150

SEQ ID NO: 163793 - RNA, 1701 nt, Artificial Sequence; identical to SEQ ID NO: 163358
  derived and/or modified CDS sequence (opt4) from hemagglutinin__InfluenzaA__ACZ17160

SEQ ID NO: 163794 - RNA, 1701 nt, Artificial Sequence; identical to SEQ ID NO: 163358
  derived and/or modified CDS sequence (opt4) from hemagglutinin__InfluenzaA__ACZ17170

SEQ ID NO: 163795 - RNA, 1701 nt, Artificial Sequence
  derived and/or modified CDS sequence (opt4) from hemagglutinin__InfluenzaA__ACZ17190
augaaggccauccugguggugcugcuguacaccuucgccaccgccaacgccgacacccugugcaucggcuaccacgccaacaacagcaccgacaccguggacaccgugcuggagaagaacgugaccgugacccacagcgugaaccugcuggaggacaagcacaacggcaagcugugcaagcugagaggcguggccccccugcaccugggcaagugcaacaucgccggcuggauccugggcaaccccgagugcgagagccugagcaccgccagcagcuggagcuacaucguggagaccagcagcagcgacaacggcaccugcuaccccggcgacuucaucgacuacgaggagcugagagagcagcugagcagcgugagcagcuucgagagauucgagaucuuccccaagaccagcagcuggcccaaccacgacagcaacaagggcgugaccgccgccugcccccacgccggcgccaagagcuucuacaagaaccugaucuggcuggugaagaagggcaacagcuaccccaagcugagcaagagcuacaucaacgacaagggcaaggaggugcuggugcuguggggcauccaccaccccagcaccagcgccgaccagcagagccuguaccagaacgccgacgccuacguguucgugggcaccagcagauacagcaagaaguucaagcccgagaucgccaucagacccaaggugagagaccaggagggcagaaugaacuacuacuggacccugguggagcccggcgacaagaucaccuucgaggccaccggcaaccugguggugcccagauacgccuucgccauggagagaaacgccggcagcggcaucaucaucagcgacacccccgugcacgacugcagcaccaccugccagacccccgagggcgccaucaacaccagccugcccuuccagaacauccaccccaucaccaucggcaagugccccaaguacgugaagagcaccaagcugagacuggccaccggccugagaaacgugcccagcauccagagcagaggccuguucggcgccaucgccggcuucaucgagggcggcuggaccggcaugguggacggcugguacggcuaccaccaccagaacgagcagggcagcggcuacgccgccgaccugaagagcacccagaacgccaucgacgagaucaccaacaaggugaacagcgugaucgagaagaugaacacccaguucaccgccgugggcaaggaguucaaccaccuggagaagagaaucgagaaccugaacaagaagguggacgacggcuuccuggacaucuggaccuacaacgccgagcugcuggugcugcuggagaacgagagaacccuggacuaccacgacagcaacgugaagaaccuguacgagaaggugagaagccagcugaagaacaacgccaaggagaucggcaacggcugcuucgaguucuaccacaagugcgacaacaccugcauggagagcgugaagaacggcaccuacgacuaccccaaguacagcgaggaggccaagcugaacagagaggagaucgacggcgugaagcuggagagcaccagaaucuaccagauccuggccaucuacagcaccguggccagcagccuggugcugguggugagccugggcgccaucagcuucuggaugugcagcaacggcagccugcagugcagaaucugcaucuga

SEQ ID NO: 163796 - RNA, 1701 nt, Artificial Sequence; identical to SEQ ID NO: 163795
  derived and/or modified CDS sequence (opt4) from hemagglutinin__InfluenzaA__ACZ17200

SEQ ID NO: 163797 - RNA, 1701 nt, Artificial Sequence; identical to SEQ ID NO: 162729
  derived and/or modified CDS sequence (opt4) from hemagglutinin__InfluenzaA__ACZ17220

SEQ ID NO: 163798 - RNA, 1701 nt, Artificial Sequence
  derived and/or modified CDS sequence (opt4) from hemagglutinin__InfluenzaA__ACZ17230
augaaggccauccugguggugcugcuguacaccuucgccaccgccaacgccgacacccugugcaucggcuaccacgccaacaacagcaccgacaccguggacaccgugcuggagaagaacgugaccgugacccacagcgugaaccugcuggaggacaagcacaacggcaagcugugcaagcugagaggcguggccccccugcaccugggcaagugcaacaucgccggcuggauccugggcaaccccgagugcgagagccugagcaccgccagcagcuggagcuacaucguggagaccagcagcagcgacaacggcaccugcuaccccggcgacuucaucgacuacgaggagcugaaggagcagcugagcagcgugagcagcuucgagagauucgagaucuuccccaagaccagcagcuggcccaaccacgacagcaacaagggcgugaccgccgccugcccccacgccggcgccaagagcuucuacaagaaccugaucuggcuggugaagaagggcaacagcuaccccaagcugagcaagagcuacaucaacgacaagggcaaggaggugcuggugcuguggggcauccaccaccccagcaccagcgccgaccagcagagccuguaccagaacgccgacgccuacguguucgugggcaccagcagauacagcaagaaguucaagcccgagaucgccaucagacccaaggugagagaccaggagggcagaaugaacuacuacuggacccugguggagcccggcgacaagaucaccuucgaggccaccggcaaccugguggugcccagauacgccuucgccauggagagaaacgccggcagcggcaucaucaucagcgacacccccgugcacgacugcaacaccaccugccagacccccaagggcgccaucaacaccagccugcccuuccagaacauccaccccaucaccaucggcaagugccccaaguacgugaagagcaccaagcugagacuggccaccggccugagaaacgugcccagcauccagagcagaggccuguucggcgccaucgccggcuucaucgagggcggcuggaccggcaugguggacggcugguacggcuaccaccaccagaacgagcagggcagcggcuacgccgccgaccugaagagcacccagaacgccaucgacgagaucaccaacaaggugaacagcgugaucgagaagaugaacacccaguucaccgccgugggcaaggaguucaaccaccuggagaagagaaucgagaaccugaacaagaagguggacgacggcuuccuggacaucuggaccuacaacgccgagcugcuggugcugcuggagaacgagagaacccuggacuaccacgacagcaacgugaagaaccuguacgagaaggugagaagccagcugaagaacaacgccaaggagaucggcaacggcugcuucgaguucuaccacaagugcgacaacaccugcauggagagcgugaagaacggcaccuacgacuaccccaaguacagcgaggaggccaagcugaacagagaggagaucgacggcgugaagcuggagagcaccagaaucuaccagauccuggccaucuacagcaccguggccagcagccuggugcugguggugagccugggcgccaucagcuucuggaugugcagcaacggcagccugcagugcagaaucugcaucuga

SEQ ID NO: 163799 - RNA, 1701 nt, Artificial Sequence; identical to SEQ ID NO: 162729
  derived and/or modified CDS sequence (opt4) from hemagglutinin__InfluenzaA__ACZ17240

SEQ ID NO: 163800 - RNA, 1701 nt, Artificial Sequence; identical to SEQ ID NO: 162729
  derived and/or modified CDS sequence (opt4) from hemagglutinin__InfluenzaA__ACZ17250

SEQ ID NO: 163801 - RNA, 1701 nt, Artificial Sequence; identical to SEQ ID NO: 162729
  derived and/or modified CDS sequence (opt4) from hemagglutinin__InfluenzaA__ACZ17260

SEQ ID NO: 163802 - RNA, 1701 nt, Artificial Sequence
  derived and/or modified CDS sequence (opt4) from hemagglutinin__InfluenzaA__ACZ17270
augaaggccauccugguggugcugcuguacaccuucgccaccgccaacgccgacacccugugcaucggcuaccacgccaacaacagcaccgacaccguggacaccgugcuggagaagaacgugaccgugacccacagcgugaaccugcuggaggacaagcacaacggcaagcugugcaagcugagaggcguggccccccugcaccugggcagaugcaacaucgccggcuggauccugggcaaccccgagugcgagagccugagcaccgccagcagcuggagcuacaucguggagaccagcagcagcgacaacggcaccugcuaccccggcgacuucaucgacuacgaggagcugagagagcagcugagcagcgugagcagcuucgagagauucgagaucuuccccaagaccagcagcuggcccaaccacgacagcaacaagggcgugaccgccgccugcccccacgccggcgccaagagcuucuacaagaaccugaucuggcuggugaagaagggcaacagcuaccccaagcugagcaagagcuacaucaacgacaagggcaaggaggugcuggugcuguggggcauccaccaccccagcaccagcgccgaccagcagagccuguaccagaacgccgacgccuacguguucgugggcaccagcagauacagcaagaaguucaagcccgagaucgccaucagacccaaggugagagaccaggagggcagaaugaacuacuacuggacccugguggagcccggcgacaagaucaccuucgaggccaccggcaaccugguggugcccagauacgccuucgccauggagagaaacgccggcagcggcaucaucaucagcgacacccccgugcacgacugcaacaccaccugccagacccccaagggcgccaucaacaccagccugcccuuccagaacauccaccccaucaccaucggcaagugccccaaguacgugaagagcaccaagcugagacuggccaccggccugagaaacgugcccagcauccagagcagaggccuguucggcgccaucgccggcuucaucgagggcggcuggaccggcaugguggacggcugguacggcuaccaccaccagaacgagcagggcagcggcuacgccgccgaccugaagagcacccagaacgccaucgacgagaucaccaacaaggugaacagcgugaucgagaagaugaacacccaguucaccgccgugggcaaggaguucaaccaccuggagaagagaaucgagaaccugaacaagaagguggacgacggcuuccuggacaucuggaccuacaacgccgagcugcuggugcugcuggagaacgagagaacccuggacuaccacgacagcaacgugaagaagcuguacgagaaggugagaagccagcugaagaacaacgccaaggagaucggcaacggcugcuucgaguucuaccacaagugcgacaacaccugcauggagagcgugaagaacggcaccuacgacuaccccaaguacagcgaggaggccaagcugaacagagaggagaucgacggcgugaagcuggagagcaccagaguguaccagauccuggccaucuacagcaccguggccagcagccuggugcugguggugagccugggcgccaucagcuucuggaugugcagcaacggcagccugcagugcagaaucugcaucuga

SEQ ID NO: 163803 - RNA, 1701 nt, Artificial Sequence; identical to SEQ ID NO: 162909
  derived and/or modified CDS sequence (opt4) from hemagglutinin__InfluenzaA__ACZ17290

SEQ ID NO: 163804 - RNA, 1701 nt, Artificial Sequence; identical to SEQ ID NO: 162909
  derived and/or modified CDS sequence (opt4) from hemagglutinin__InfluenzaA__ACZ17300

SEQ ID NO: 163805 - RNA, 1701 nt, Artificial Sequence; identical to SEQ ID NO: 162909
  derived and/or modified CDS sequence (opt4) from hemagglutinin__InfluenzaA__ACZ17310

SEQ ID NO: 163806 - RNA, 1701 nt, Artificial Sequence; identical to SEQ ID NO: 162729
  derived and/or modified CDS sequence (opt4) from hemagglutinin__InfluenzaA__ACZ17398

SEQ ID NO: 163807 - RNA, 1701 nt, Artificial Sequence; identical to SEQ ID NO: 162729
  derived and/or modified CDS sequence (opt4) from hemagglutinin__InfluenzaA__ACZ17408

SEQ ID NO: 163808 - RNA, 1701 nt, Artificial Sequence; identical to SEQ ID NO: 162729
  derived and/or modified CDS sequence (opt4) from hemagglutinin__InfluenzaA__ACZ17418

SEQ ID NO: 163809 - RNA, 1701 nt, Artificial Sequence
  derived and/or modified CDS sequence (opt4) from hemagglutinin__InfluenzaA__ACZ17438
augaaggccauccugguggugcugcuguacaccuucgccaccgccaacgccgacacccugugcaucggcuaccacgccaacaacagcaccgacaccguggacaccgugcuggagaagaacgugaccgugacccacagcgugaaccugcuggaggacaagcacaacggcaagcugugcaagcugagaggcguggccccccugcaccugggcaagugcaacaucgccggcuggauccugggcaaccccgagugcgagagccugagcaccgccagcagcuggagcuacaucguggagaccagcagcagcgacaacggcaccugcuaccccggcgacuucaucgacuacgaggagcugagagagcagcugagcagcgugagcagcuucgagagauucgagaucuuccccaagaccagcagcuggcccaaccacgacagcaacaagggcgugaccgccgccugcccccacgccggcgccaagagcuucuacaagaaccugaucuggcuggugaagaagggcaacagcuaccccaagcugagcaagagcuacaucaacgacaagggcaaggaggugcuggugcuguggggcauccaccaccccagcaccagcgccgaccagcagagccuguaccagaacgccgacagcuacguguucgugggcagcagcagauacagcaagaaguucaagcccgagaucgccaucagacccaaggugagagaccaggagggcagaaugaacuacuacuggacccugguggagcccggcgacaagaucaccuucgaggccaccggcaaccugguggugcccagauacgccuucgccauggagagaaacgccggcagcggcaucaucaucagcgacacccccgugcacgacugcaacaccaccugccagacccccaagggcgccaucaacaccagccugcccuuccagaacauccaccccaucaccaucggcaagugccccaaguacgugaagagcaccaagcugagacuggccaccggccugagaaacgugcccagcauccagagcagaggccuguucggcgccaucgccggcuucaucgagggcggcuggaccggcaugguggacggcugguacggcuaccaccaccagaacgagcagggcagcggcuacgccgccgaccugaagagcacccagaacgccaucgacgagaucaccaacaaggugaacagcgugaucgagaagaugaacacccaguucaccgccgugggcaaggaguucaaccaccuggagaagagaaucgagaaccugaacaagaagguggacgacggcuuccuggacaucuggaccuacaacgccgagcugcuggugcugcuggagaacgagagaacccuggacuaccacgacagcaacgugaagaaccuguacgagaaggugagaagccagcugaagaacaacgccaaggagaucggcaacggcugcuucgaguucuaccacaagugcgacaacaccugcauggagagcgugaagaacggcaccuacgacuaccccaaguacagcgaggaggccaagcugaacagagaggagaucgacggcgugaagcuggagagcaccagaaucuaccagauccuggccaucuacagcaccguggccagcagccuggugcugguggugagccugggcgccaucagcuucuggaugugcagcaacggcagccugcagugcagaaucugcaucuga

SEQ ID NO: 163810 - RNA, 1701 nt, Artificial Sequence; identical to SEQ ID NO: 162716
  derived and/or modified CDS sequence (opt4) from hemagglutinin__InfluenzaA__ACZ17448

SEQ ID NO: 163811 - RNA, 1701 nt, Artificial Sequence; identical to SEQ ID NO: 162729
  derived and/or modified CDS sequence (opt4) from hemagglutinin__InfluenzaA__ACZ17458

SEQ ID NO: 163812 - RNA, 1701 nt, Artificial Sequence; identical to SEQ ID NO: 162716
  derived and/or modified CDS sequence (opt4) from hemagglutinin__InfluenzaA__ACZ17478

SEQ ID NO: 163813 - RNA, 1701 nt, Artificial Sequence; identical to SEQ ID NO: 162729
  derived and/or modified CDS sequence (opt4) from hemagglutinin__InfluenzaA__ACZ17488

SEQ ID NO: 163814 - RNA, 1701 nt, Artificial Sequence
  derived and/or modified CDS sequence (opt4) from hemagglutinin__InfluenzaA__ACZ18240
augaaggccauccugguggugcugcuguacaccuucgccaccgccaacgccgacacccugugcaucggcuaccacgccaacaacagcaccgacaccguggacaccgugcuggagaagaacgugaccgugacccacagcgugaaccugcuggaggacaagcacaacggcaagcugugcaagcugagaggcguggccccccugcaccugggcaagugcaacaucgccggcuggauccugggcaaccccgagugcgagagccugagcaccaccagcagcuggagcuacaucguggagaccagcagcagcgacaacggcaccugcuaccccggcgacuucaucgacuacgaggagcugagagagcagcugagcagcgugagcagcuucgagagauucgagaucuuccccaagaccagcagcuggcccaaccacgaccccaacaagggcgugaccgccgccugcccccacgccggcgccaagagcuucuacaagaaccugaucuggcuggugaagaagggcaacagcuaccccaagcugagcaagagcuacaucaacgacaagggcaaggaggugcuggugcuguggggcauccaccaccccagcaccagcgccgaccagcagagccuguaccagaacgccgacgccuacguguucgugggcaccagcagauacagcaagaaguucaagcccgagaucgccaucagacccaaggugagagaccaggagggcagaaugaacuacuacuggacccugguggagcccggcgacaagaucaccuucgaggccaccggcaaccugguggugcccagauacgccuucgccauggagagaaacgccggcagcggcaucaucaucagcgacacccccgugcacgacugcaacaccaccugccagacccccaagggcgccaucaacaccagccugcccuuccagaacauccaccccaucaccaucggcaagugccccaaguacgugaagagcaccaagcugagacuggccaccggccugagaaacgugcccagcauccagagcagaggccuguucggcgccaucgccggcuucaucgagggcggcuggaccggcaugguggacggcugguacggcuaccaccaccagaacgagcagggcagcggcuacgccgccgaccugaagagcacccagaacgccaucgacgagaucaccaacaaggugaacagcgugaucgagaagaugaacacccaguucaccgccgugggcaaggaguucaaccaccuggagaagagaaucgagaaccugaacaagaagguggacgacggcuuccuggacaucuggaccuacaacgccgagcugcuggugcugcuggagaacgagagaacccuggacuaccacgacagcaacgugaagaaccuguacgagaaggugagaagccagcugaagaacaacgccaaggagaucggcaacggcugcuucgaguucuaccacaagugcgacaacaccugcauggagagcgugaagaacggcaccuacgacuaccccaaguacagcgaggaggccaagcugaacagagaggagaucgacggcgugaagcuggagagcaccagaaucuaccagauccuggccaucuacagcaccguggccagcagccuggugcugguggugagccugggcgccaucagcuucuggaugugcagcaacggcagccugcagugcagaaucugcaucuga

SEQ ID NO: 163815 - RNA, 1701 nt, Artificial Sequence; identical to SEQ ID NO: 162729
  derived and/or modified CDS sequence (opt4) from hemagglutinin__InfluenzaA__ACZ18241

SEQ ID NO: 163816 - RNA, 1701 nt, Artificial Sequence
  derived and/or modified CDS sequence (opt4) from hemagglutinin__InfluenzaA__ACZ27800
augaaggccauccugguggugcugcuguacaccuucgccaccgccaacgccgacacccugugcaucggcuaccacgccaacaacagcaccgacaccguggacaccgugcuggagaagaacgugaccgugacccacagcgugaaccugcuggaggacaagcacaacggcaagcugugcaagcugagaggcguggccccccugcaccugggcaagugcaacaucgccggcuggauccugggcaaccccgagugcgagagccugagcaccgccagcagcuggagcuacaucguggagaccagcagcagcgacaacggcaccugcuaccccggcgacuucaucgacuacgaggagcugagagagcagcugagcagcgugagcagcuucgagagauucgagaucuuccccaagaccagcagcuggcccaaccacgacagcaacaagggcgugaccgccgccugcccccacgccggcgccaagagcuucuacaagaaccugaucuggcuggugaagaagggcaacagcuaccccaagcugagcaagagcuacaucaacgacaagggcaaggaggugcuggugcuguggggcauccaccaccccagcaccagcgccgaccagcagagccuguaccagaacgccgacgccuacguguucgugggcagcagcagauacagcaaggaguucaagcccgagaucgccaucagacccaaggugagaggccaggagggcagaaugaacuacuacuggacccugguggagcccggcgacaagaucaccuucgaggccaccggcaaccugguggugcccagauacgccuucgccauggagagaaacgccggcagcggcaucaucaucagcgacacccccgugcacgacugcaacaccaccugccagacccccaagggcgccaucaacaccagccugcccuuccagaacauccaccccaucaccaucggcaagugccccaaguacgugaagagcaccaagcugagacuggccaccggccugagaaacgugcccagcauccagagcagaggccuguucggcgccaucgccggcuucaucgagggcggcuggaccggcaugguggacggcugguacggcuaccaccaccagaacgagcagggcagcggcuacgccgccgaccugaagagcacccagaacgccaucgacgagaucaccaacaaggugaacagcgugaucgagaagaugaacacccaguucaccgccgugggcaaggaguucaaccaccuggagaagagaaucgagaaccugaacaagaagguggacgacggcuuccuggacaucuggaccuacaacgccgagcugcuggugcugcuggagaacgagagaacccuggacuaccacgacagcaacgugaagaaccuguacgagaaggugagaagccagcugaagaacaacgccaaggagaucggcaacggcugcuucgaguucuaccacaagugcgacaacaccugcauggagagcgugaagaacggcaccuacgacuaccccaaguacagcgaggaggccaagcugaacagagaggagaucgacggcgugaagcuggagagcaccagaaucuaccagauccuggccaucuacagcaccguggccagcagccuggugcugguggugagccugggcgccaucagcuucuggaugugcagcaacggcagccugcagugcagaaucugcaucuga

SEQ ID NO: 163817 - RNA, 1701 nt, Artificial Sequence; identical to SEQ ID NO: 162729
  derived and/or modified CDS sequence (opt4) from hemagglutinin__InfluenzaA__ACZ27810

SEQ ID NO: 163818 - RNA, 1701 nt, Artificial Sequence; identical to SEQ ID NO: 162729
  derived and/or modified CDS sequence (opt4) from hemagglutinin__InfluenzaA__ACZ27820

SEQ ID NO: 163819 - RNA, 1701 nt, Artificial Sequence; identical to SEQ ID NO: 162729
  derived and/or modified CDS sequence (opt4) from hemagglutinin__InfluenzaA__ACZ27830

SEQ ID NO: 163820 - RNA, 1701 nt, Artificial Sequence; identical to SEQ ID NO: 163082
  derived and/or modified CDS sequence (opt4) from hemagglutinin__InfluenzaA__ACZ27840

SEQ ID NO: 163821 - RNA, 1701 nt, Artificial Sequence; identical to SEQ ID NO: 162716
  derived and/or modified CDS sequence (opt4) from hemagglutinin__InfluenzaA__ACZ45006

SEQ ID NO: 163822 - RNA, 1701 nt, Artificial Sequence
  derived and/or modified CDS sequence (opt4) from hemagglutinin__InfluenzaA__ACZ45007
augaaggccauccugguggugcugcuguacaccuucgccaccgccaacgccgacacccugugcaucggcuaccacgccaacaacagcaccgacaccguggacaccgugcuggagaagaacgugaccgugacccacagcgugaaccugcuggaggacaagcacaacggcaagcugugcaagcugagaggcguggccccccugcaccugggcaagugcaacaucgccggcuggauccugggcaaccccgagugcgagagccugagcaccgccagcagcuggagcuacaucguggagaccagcagcagcgacaacggcaccugcuaccccggcgacuucaucgacuacgaggagcugagagagcagcugagcagcgugagcagcuucgagagauucgagaucuuccccaagaccagcagcuggcccaaccacgacagcaacaagggcgugaccgccgccugcccccacgccggcgccaagagcuucuacaagaaccugaucuggcuggugaagaagggcaacagcuaccccaagcugagcaagagcuacaucaacgacaagggcaaggaggugcuggugcuguggggcauccaccaccccagcaccagcgccgaccagcagagccuguaccagaacgccgacgccuacguguucgugggcaccagcagauacagcaagaaguucaagcccgagaucgccaucagacccaaggugagagaccaggagggcagaaugaacuacuacuggacccugguggagcccggcgacaagaucaccuucgaggccaccggcaaccugguggugcccagauacgccuucgccauggagagaaacgccggcagcggcaucaucaucagcgacacccccgugcacgacugcaacaccaccugccagacccccaagggcgccaucaacaccagccugcccuuccagaacauccaccccaucaccaucggcaagugccccaaguacgugaagagcaccaagcugagacuggccaccggccugagaaacgugcccagcauccagagcagaggccuguucggcgccaucgccggcuucaucgagggcggcuggaccggcaugguggacggcugguacggcuaccaccaccagaacgagcagggcagcggcgacgccgccgaccugaagagcacccagaacgccaucgacgagaucaccaacaaggugaacagcgugaucgagaagaugaacacccaguucaccgccgugggcaaggaguucaaccaccuggagaagagaaucgagaaccugaacaagaagguggacgacggcuuccuggacaucuggaccuacaacgccgagcugcuggugcugcuggagaacgagagaacccuggacuaccacgacagcaacgugaagaaccuguacgagaaggugagaagccagcugaagaacaacgccaaggagaucggcaacggcugcuucgaguucuaccacaagugcgacaacaccugcauggagagcgugaagaacggcaccuacgacuaccccaaguacagcgaggaggccaagcugaacagagaggagaucgacggcgugaagcuggagagcaccagaaucuaccagauccuggccaucuacagcaccguggccagcagccuggugcugguggugagccugggcgccaucagcuucuggaugugcagcaacggcagccugcagugcagaaucugcaucuga

SEQ ID NO: 163823 - RNA, 1701 nt, Artificial Sequence; identical to SEQ ID NO: 163082
  derived and/or modified CDS sequence (opt4) from hemagglutinin__InfluenzaA__ACZ45008

SEQ ID NO: 163824 - RNA, 1701 nt, Artificial Sequence; identical to SEQ ID NO: 163082
  derived and/or modified CDS sequence (opt4) from hemagglutinin__InfluenzaA__ACZ45009

SEQ ID NO: 163825 - RNA, 1701 nt, Artificial Sequence; identical to SEQ ID NO: 162971
  derived and/or modified CDS sequence (opt4) from hemagglutinin__InfluenzaA__ACZ45010

SEQ ID NO: 163826 - RNA, 1701 nt, Artificial Sequence; identical to SEQ ID NO: 162729
  derived and/or modified CDS sequence (opt4) from hemagglutinin__InfluenzaA__ACZ45012

SEQ ID NO: 163827 - RNA, 1701 nt, Artificial Sequence
  derived and/or modified CDS sequence (opt4) from hemagglutinin__InfluenzaA__ACZ45013
augaaggccauccugguggugcugcuguacaccuucgccaccgccaacgccgacacccugugcaucggcuaccacgccaacaacagcaccgacaccguggacaccgugcuggagaagaacgugaccgugacccacagcgugaaccugcuggaggacaagcacaacggcaagcugugcaagcugagaggcguggccccccugcaccugggcaagugcaacaucgccggcuggauccugggcaaccccgagugcgagagccugagcaccgccagcagcuggagcuacaucguggagaccagcagcagcgacaacggcaccugcuaccccggcgacuucaucgacuacgaggagcugagagagcagcugagcagcgugagcagcuucgagagauucgagaucuuccccaagaccagcagcuggcccaaccacgacagcagcaagggcgugaccgccgccugcccccacgccggcgccaagagcuucuacaagaaccugaucuggcuggugaagaagggcaacagcuaccccaagcugagcaagagcuacaucaacgacaagggcaaggaggugcuggugcuguggggcauccaccaccccagcaccagcgccgaccagcagagccuguaccagaacgccgacgccuacguguucgugggcaccagcagauacagcaagaaguucaagcccgagaucgccaucagacccaaggugagagagcaggagggcagaaugaacuacuacuggacccugguggagcccggcgacaagaucaccuucgaggccaccggcaaccugguggugcccagauacgccuucgccauggagagaaacgccggcagcggcaucaucaucagcgacacccccgugcacgacugcaacaccaccugccagacccccaagggcgccaucaacaccagccugcccuuccagaacauccaccccaucaccaucggcaagugccccaaguacgugaagagcaccaagcugagacuggccaccggccugagaaacgugcccagcauccagagcagaggccuguucggcgccaucgccggcuucaucgagggcggcuggaccggcaugguggacggcugguacggcuaccaccaccagaacgagcagggcagcggcuacgccgccgaccugaagagcacccagaacgccaucgacgagaucaccaacaaggugaacagcgugaucgagaagaugaacacccaguucaccgccgugggcaaggaguucaaccaccuggagaagagaaucgagaaccugaacaagaagguggacgacggcuuccuggacaucuggaccuacaacgccgagcugcuggugcugcuggagaacgagagaacccuggacuaccacgacagcaacgugaagaaccuguacgagaaggugagaagccagcugaagaacaacgccaaggagaucggcaacggcugcuucgaguucuaccacaagugcgacaacaccugcauggagagcgugaagaacggcaccuacgacuaccccaaguacagcgaggaggccaagcugaacagagaggagaucgacggcgugaagcuggagagcaccagaaucuaccagauccuggccaucuacagcaccguggccagcagccuggugcugguggugagccugggcgccaucagcuucuggaugugcagcaacggcagccugcagugcagaaucugcaucuga

SEQ ID NO: 163828 - RNA, 1701 nt, Artificial Sequence; identical to SEQ ID NO: 162729
  derived and/or modified CDS sequence (opt4) from hemagglutinin__InfluenzaA__ACZ45014

SEQ ID NO: 163829 - RNA, 1701 nt, Artificial Sequence; identical to SEQ ID NO: 162729
  derived and/or modified CDS sequence (opt4) from hemagglutinin__InfluenzaA__ACZ45016

SEQ ID NO: 163830 - RNA, 1701 nt, Artificial Sequence
  derived and/or modified CDS sequence (opt4) from hemagglutinin__InfluenzaA__ACZ45028
augaaggccauccugguggugcugcuguacaccuucgccaccgccaacgccgacacccugugcaucggcuaccacgccaacaacagcaccgacaccguggacaccgugcuggagaagaacgugaccgugacccacagcgugaaccugcuggaggacaagcacaacggcaagcugugcaagcugagaggcguggccccccugcaccugggcaagugcaacaucgccggcuggauccugggcaaccccgagugcgagagccugagcaccgccagcagcuggagcuacaucguggagaccagcagcagcgacaacggcaccugcuaccccggcgacuucaucgacuacgaggagcugagagagcagcugagcagcgugagcagcuucgagagauucgagaucuuccccaagaccagcagcuggcccaaccacgacagcaacaagggcgugaccgccgccugcccccacgccggcgccaagagcuucuacaagaaccugaucuggcuggugaagaagggcaacagcuaccccaagcugagcaagagcuacaucaacgacaagggcaaggaggugcuggugcuguggggcauccaccaccccagcaccagcgccgaccagcagagccuguaccagaacgccgacgccuacguguucgugggcaccagcagauacagcaagaaguucaagcccgagaucgccaucagacccaaggugagagaccaggagggcagaaugaacuacuacuggacccugguggagcccggcgacaagaucaccuucgaggccaccggcaaccugguggugcccagauacgccuucgccauggagagaaacgccggcagcggcaucaucaucagcgacacccccgugcacgacugcaacaccaccugccagacccccaagggcgccaucaacaccagccugcccuuccagaacauccaccccaucaccaucggcaagugccccaaguacgugaagagcaccaagcugagacuggccaccggccugagaaacauccccagcauccagagcagaggccuguucggcgccaucgccggcuucaucgagggcggcuggaccggcaugguggacggcugguacggcuaccaccaccagaacgagcagggcagcggcuacgccgccgaccugaagagcacccagaacgccaucgacgagaucaccaacaaggugaacagcgugaucgagaagaugaacacccaguucaccgccgugggcaaggaguucaaccaccuggagaagagaaucgagaaccugaacaagaagguggacgacggcuuccuggacaucuggaccuacaacgccgagcugcuggugcugcuggagaacgagagaacccuggacuaccacgacagcaacgugaagaaccuguacgagaaggugagaagccagcugaagaacaacgccaaggagaucggcaacggcugcuucgaguucuaccacaagugcgacaacaccugcauggagagcgugaagaacggcaccuacgacuaccccaaguacagcgaggaggccaagcugaacagagaggagaucgacggcgugaagcuggagagcaccagaaucuaccagauccuggccaucuacagcaccguggccagcagccuggugcugguggugagccugggcgccaucagcuucuggaugugcagcaacggcagccugcagugcagaaucugcaucuga

SEQ ID NO: 163831 - RNA, 1701 nt, Artificial Sequence
  derived and/or modified CDS sequence (opt4) from hemagglutinin__InfluenzaA__ACZ45029
augaaggccauccugguggugcugcuguacaccuucgccaccgccaacgccgacacccugugcaucggcuaccacgccaacaacagcaccgacaccguggacaccgugcuggagaagaacgugaccgugacccacagcgugaaccugcuggaggacaagcacaacggcaagcugugcaagcugagaggcguggccccccugcaccugggcaagugcaacaucgccggcuggauccugggcaaccccgagugcgagagccugagcaccgccagcagcuggagcuacaucguggagaccagcagcagcggcaacggcaccugcuaccccggcgacuucaucgacuacgaggagcugagagagcagcugagcagcgugagcagcuucgagagauucgagaucuuccccaagaccagcagcuggcccaaccacgacagcaacaagggcgugaccgccgccugcccccacgccggcgccaagagcuucuacaagaaccugaucuggcuggugaagaagggcaacagcuaccccaagcugagcaagagcuacaucaacgacaagggcaaggaggugcuggugcuguggggcauccaccaccccagcaccagcgccgaccagcagagccuguaccagaacgccgacgccuacguguucgugggcaccagcagauacagcaagaaguucaagcccgagaucgccaucagacccaaggugagagaccaggagggcagaaugaacuacuacuggacccugguggagcccggcgacaagaucaccuucgaggccaccggcaaccugguggugcccagauacgccuucgccauggagagaaacgccggcagcggcaucaucaucagcgacacccccgugcacgacugcaacaccaccugccagacccccaagggcgccaucaacaccagccugcccuuccagaacauccaccccaucaccaucggcaagugccccaaguacgugaagagcaccaagcugagacuggccaccggccugagaaacgugcccagcauccagagcagaggccuguucggcgccaucgccggcuucaucgagggcggcuggaccggcaugguggacggcugguacggcuaccaccaccagaacgagcagggcagcggcuacgccgccgaccugaagagcacccagaacgccaucgacgagaucaccaacaaggugaacagcgugaucgagaagaugaacacccaguucaccgccgugggcaaggaguucaaccaccuggagaagagaaucgagaaccugaacaagaagguggacgacggcuuccuggacaucuggaccuacaacgccgagcugcuggugcugcuggagaacgagagaacccuggacuaccacgacagcaacgugaagaaccuguacgagaaggugagaagccagcugaagaacaacgccaaggagaucggcaacggcugcuucgaguucuaccacaagugcgacaacaccugcauggagagcgugaagaacggcaccuacgacuaccccaaguacagcgaggaggccaagcugaacagagaggagaucgacggcgugaagcuggagagcaccagaaucuaccagauccuggccaucuacagcaccguggccagcagccuggugcugguggugagccugggcgccaucagcuucuggaugugcagcaacggcagccugcagugcagaaucugcaucuga

SEQ ID NO: 163832 - RNA, 1701 nt, Artificial Sequence
  derived and/or modified CDS sequence (opt4) from hemagglutinin__InfluenzaA__ACZ45030
augaaggccauccugguggugcugcuguacaccuucgccaccgccaacgccgacacccugugcaucggcuaccacgccaacaacagcaccgacaccguggacaccgugcuggagaagaacgugaccgugacccacagcgugaaccugcuggaggacaagcacaacggcaagcugugcaagcugagaggcguggccccccugcaccugggcaagugcaacaucgccggcuggauccugggcaaccccgagugcgagagccugagcaccgccagcagcuggagcuacaucguggagaccagcagcagcgacaacggcaccugcuaccccggcgacuucaucgacuacgaggagcugagagagcagcugagcagcgugagcagcuucgagagauucgagaucuuccccaagaccagcagcuggcccaaccacgacagcaacaagggcgugaccgccgccugcccccacgccggcgccaagagcuucuacaagaaccugaucuggcuggugaagaagggcaacagcuaccccaagcugagcaagagcuacaucaacgacaagggcaaggaggugcuggugcuguggggcauccaccaccccagcaccagcgccgaccagcagagccuguaccagaacgccgacgccuacguguucgugggcaccagcaccuacagcaagaaguucaagcccgagaucgccaucagacccaaggugagagaccaggagggcagaaugaacuacuacuggacccugguggagcccggcgacaagaucaccuucgaggccaccggcaaccugguggugcccagauacgccuucaccauggagagaaacgccggcagcggcaucaucaucagcgacacccccgugcacgacugcaacaccaccugccagacccccaagggcgccaucaacaccagccugcccuuccagaacauccaccccaucaccaucggcaagugccccaaguacgugaagagcaccaagcugagacuggccaccggccugagaaacauccccagcauccagagcagaggccuguucggcgccaucgccggcuucaucgagggcggcuggaccggcaugguggacggcugguacggcuaccaccaccagaacgagcagggcagcggcuacgccgccgaccugaagagcacccagaacgccaucgacgagaucaccaacaaggugaacagcgugaucgagaagaugaacacccaguucaccgccgugggcaaggaguucaaccaccuggagaagagaaucgagaaccugaacaagaagguggacgacggcuuccuggacaucuggaccuacaacgccgagcugcuggugcugcuggagaacgagagaacccuggacuaccacgacagcaacgugaagaaccuguacgagaaggugagaagccagcugaagaacaacgccaaggagaucggcaacggcugcuucgaguucuaccacaagugcgacaacaccugcauggagagcgugaagaacggcaccuacgacuaccccaaguacagcgaggaggccaagcugaacagagaggagaucgacggcgugaagcuggagagcaccagaaucuaccagauccuggccaucuacagcaccguggccagcagccuggugcugguggugagccugggcgccaucagcuucuggaugugcagcaacggcagccugcagugcagaaucugcaucuga

SEQ ID NO: 163833 - RNA, 1701 nt, Artificial Sequence
  derived and/or modified CDS sequence (opt4) from hemagglutinin__InfluenzaA__ACZ45031
augaaggccauccugguggugcugcuguacaccuucgccaccgccaacgccgacacccugugcaucggcuaccacgccaacaacagcaccgacaccguggacaccgugcuggagaagaacgugaccgugacccacagcgugaaccugcuggaggacaagcacaacggcaagcugugcaagcugagaggcguggccccccugcaccugggcaagugcaacaucgccggcuggauccugggcaaccccgagugcgagagccugagcaccgccagcagcuggagcuacaucguggagaccagcagcagcgacaacggcaccugcuaccccggcgacuucaucgacuacgaggagcugagagagcagcugagcagcgugagcagcuucgagagauucgagaucuuccccaagaccagcagcuggcccaaccacgacagcaacaagggcgugaccgccgccugcccccacgccggcgccaagagcuucuacaagaaccugaucuggcuggugaagaagggcaacagcuaccccaagcugagcaagagcuacaucaacgacaagggcaaggaggugcuggugcuguggggcauccaccaccccagcaccagcgccgaccagcagagccuguaccagaacgccgacgccuacguguucgugggcaccagcagauacagcaagaaguucaagcccgagaucgccaucagacccaaggugagagagcaggagggcagaaugaacuacuacuggacccugguggagcccggcgacaagaucaccuucgaggccaccggcaaccugguggugcccagauacgccuucaccauggagagaaacgugggcagcggcaucaucaucagcgacacccccgugcacgacugcaacaccaccugccagacccccaagggcgccaucaacaccagccugcccuuccagaacauccaccccaucaccaucggcaagugccccaaguacgugaagagcaccaagcugagacuggccaccggccugagaaacgugcccagcauccagagcagaggccuguucggcgccaucgccggcuucaucgagggcggcuggaccggcaugguggacggcugguacggcuaccaccaccagaacgagcagggcagcggcuacgccgccgaccugaagagcacccagaacgccaucgacgagaucaccaacaaggugaacagcgugaucgagaagaugaacacccaguucaccgccgugggcaaggaguucaaccaccuggagaagagaaucgagaaccugaacaagaagguggacgacggcuuccuggacaucuggaccuacaacgccgagcugcuggugcugcuggagaacgagagaacccuggacuaccacgacagcaacgugaagaaccuguacgagaaggugagaagccagcugaagaacaacgccaaggagaucggcaacggcugcuucgaguucuaccacaagugcgacaacaccugcauggagagcgugaagaacggcaccuacgacuaccccaaguacagcgaggaggccaagcugaacagagaggagaucgacggcgugaagcuggagagcaccagaaucuaccagauccuggccaucuacagcaccguggccagcagccuggugcugguggugagccugggcgccaucagcuucuggaugugcagcaacggcagccugcagugcagaaucugcaucuga

SEQ ID NO: 163834 - RNA, 1701 nt, Artificial Sequence
  derived and/or modified CDS sequence (opt4) from hemagglutinin__InfluenzaA__ACZ45034
augaaggccauccugguggugcugcuguacaccuucgccaccgccaacgccgacacccugugcaucggcuaccacgccaacaacagcaccgacaccguggacaccgugcuggagaagaacgugaccgugacccacagcgugaaccugcuggaggacaagcacaacggcaagcugugcaagcugagaggcguggccccccugcaccugggcaagugcaacaucgccggcuggauccugggcaaccccgagugcgagagccugagcaccgccagcagcuggagcuacaucguggagaccagcagcagcgacaacggcaccugcuaccccggcgacuucaucgacuacgaggagcugagagagcagcugagcagcgugagcagcuucgagagauucgagaucuuccccaagaccagcagcuggcccaaccacgacagcaacaagggcgugaccgccgccugcccccacgccggcgccaagagcuucuacaagaaccugaucuggcuggugaagaagggcaacagcuaccccaagcugagcaagagcuacaucaacgacaagggcaaggaggugcuggugcuguggggcauccaccaccccagcaccagcgccgaccagcagagccuguaccagaacgccgacgccuacguguucgugggcaccagcagauacagcaagaaguucaagcccgagaucgccaucagacccaaggugagagaccaggagggcagaaugaacuacuacuggacccugguggagcccggcgacaagaucaccuucgaggccaccggcaaccugguggugcccagauacgccuucgccauggagagaaacgccggcagcggcaucaucaucagcgacacccccgugcacgacugcaacaccaccugccagacccccaagggcgccaucaacaccagccugcccuuccagaacgugcaccccaucaccaucggcaagugccccaaguacgugaagagcaccaagcugagacuggccaccggccugagaaacgugccccccauccagagcagaggccuguucggcgccaucgccggcuucaucgagggcggcuggaccggcaugguggacggcugguacggcuaccaccaccagaacgagcagggcagcggcuacgccgccgaccugaagagcacccagaacgccaucgacgagaucaccaacaaggugaacagcgugaucgagaagaugaacacccaguucaccgccgugggcaaggaguucaaccaccuggagaagagaaucgagaaccugaacaagaagguggacgacggcuuccuggacaucuggaccuacaacgccgagcugcuggugcugcuggagaacgagagaacccuggacuaccacgacagcaacgugaagaaccuguacgagaaggugagaagccagcugaagaacaacgccaaggagaucggcaacggcugcuucgaguucuaccacaagugcgacaacaccugcauggagagcgugaagaacggcaccuacgacuaccccaaguacagcgaggaggccaagcugaacagagaggagaucgacggcgugaagcuggagagcaccagaaucuaccagauccuggccaucuacagcaccguggccagcagccuggugcugguggugagccugggcgccaucagcuucuggaugugcagcaacggcagccugcagugcagaaucugcaucuga

SEQ ID NO: 163835 - RNA, 1701 nt, Artificial Sequence; identical to SEQ ID NO: 162729
  derived and/or modified CDS sequence (opt4) from hemagglutinin__InfluenzaA__ACZ45036

SEQ ID NO: 163836 - RNA, 1701 nt, Artificial Sequence; identical to SEQ ID NO: 162729
  derived and/or modified CDS sequence (opt4) from hemagglutinin__InfluenzaA__ACZ45037

SEQ ID NO: 163837 - RNA, 1701 nt, Artificial Sequence; identical to SEQ ID NO: 163830
  derived and/or modified CDS sequence (opt4) from hemagglutinin__InfluenzaA__ACZ45038

SEQ ID NO: 163838 - RNA, 1701 nt, Artificial Sequence; identical to SEQ ID NO: 163082
  derived and/or modified CDS sequence (opt4) from hemagglutinin__InfluenzaA__ACZ45039

SEQ ID NO: 163839 - RNA, 1701 nt, Artificial Sequence; identical to SEQ ID NO: 162729
  derived and/or modified CDS sequence (opt4) from hemagglutinin__InfluenzaA__ACZ45040

SEQ ID NO: 163840 - RNA, 1701 nt, Artificial Sequence; identical to SEQ ID NO: 162729
  derived and/or modified CDS sequence (opt4) from hemagglutinin__InfluenzaA__ACZ52567

SEQ ID NO: 163841 - RNA, 1701 nt, Artificial Sequence; identical to SEQ ID NO: 162729
  derived and/or modified CDS sequence (opt4) from hemagglutinin__InfluenzaA__ACZ52568

SEQ ID NO: 163842 - RNA, 1701 nt, Artificial Sequence; identical to SEQ ID NO: 163298
  derived and/or modified CDS sequence (opt4) from hemagglutinin__InfluenzaA__ACZ52569

SEQ ID NO: 163843 - RNA, 1701 nt, Artificial Sequence
  derived and/or modified CDS sequence (opt4) from hemagglutinin__InfluenzaA__ACZ53956
augaagaccaucaucgcccugagcuacaucuucugccuggcccuggcccagaagcugcccggcaacgacaacagcaccgccacccugugccugggccaccacgccgugcccaacggcacccuggugaagaccaucaccaacgaccagaucgaggugaccaacgccaccgagcuggugcagagcagcagcaccggcagaaucugcgacagcccccaccagauccuggacggcgagaacugcacccugaucgacgcccugcugggcgacccccacugcgacggcuuccagaacaaggagugggaccuguucguggagagaagcaaggccuacagcaacugcuaccccuacgacgugcccgacuacgccagccugagaagccugguggccagcagcggcacccuggaguucaacaacgagagcuucaacuggaccggcguggcccagaacggcaccagcagcgccugcaagagaagaagcaucaagagcuucuucagcacccugaacuggcugcaccagcugcagaacagauaccccgcccugaacgugaccaugcccaacaacgacaaguucgacaagcuguacaucuggggcgugcaccaccccagcaccgacagcgaccagaucagcguguacgcccaggccagcggcagagugaccgugagcaccaagagaagccagcagaccgugauccccaacaucggcagcagacccugggugagaggcgugagcagcagaaucagcaucuacuggaccaucgugaagcccggcgacauccugcugaucaacagcaccggcaaccugaucgcccccagaggcuacuucaagaucagaagcggcaagagcagcaucaugagaagcgacgcccccaucggcaagugcaacagcgagugcaucacccccaacggcagcauccccaacgacaagcccuuccagaacgugaacagaaucaccuacggcgccugccccagauacgugaagcagaacacccugaagcuggccaccggcaugagaaacgugcccgagaagcagaccagaggcaucuucggcgccaucgccggcuucaucgagaacggcugggagggcaugauggacggcugguacggcuucagacaccagaacagcgagggcaccggccaggccgccgaccugaagagcacccaggccgccaucaaccagaucaacggcaagcugaacagacugaucgagaagaccaacgagaaguuccaccagaucgagaaggaguucagcgagguggagggcagaauccaggaccuggagaaguacguggaggacaccaagaucgaccuguggagcuacaacgccgagcugcugguggcccuggagaaccagcacaccaucgaccugaccgacagcgagaugaacaagcuguucgagagaaccagaaagcagcugagagagaacgccgaggacaugggcaacggcugcuucaagaucuaccacaagugcgacaacgccugcaucggcagcaucagaaacggcaccuacgaccacgacguguacagagacgaggcccugaacaacagauuccagaucaagggcguggagcugaagagcggcuacaaggacuggauccuguggaucagcuucgccaucagcugcuuccugcugugcguggugcugcugggcuucaucaugugggccugccagagaggcaacaucagaugcaacaucugcaucuga

SEQ ID NO: 163844 - RNA, 1701 nt, Artificial Sequence
  derived and/or modified CDS sequence (opt4) from hemagglutinin__InfluenzaA__ACZ53967
augaagaccaucaucgcccugagcuacaucuucugccuggcccuggcccagaagcugcccggcaacgacaacagcaccgccacccugugccugggccaccacgccgugcccaacggcacccuggugaagaccaucaccaacgaccagaucgaggugaccaacgccaccgagcuggugcagagcagcagcaccggcagaaucugcgacagcccccaccagauccuggacggcgagaacugcacccugaucgacgcccugcugggcgacccccacugcgacggcuuccagaacaaggagugggaccuguucguggagagaagcaaggccuacagcaacugcuaccccuacgacgugcccgacuacgccagccugagaagccugguggccagcagcggcacccuggaguucaacaacgagagcuucaacuggaccggcguggcccagaacggcaccagcagcgccugcaagagaagaagcaucaagagcuucuucagcacccugaacuggcugcaccagcugcagaacagauaccccgcccugaacgugaccaugcccaacaacgacaaguucgacaagcuguacaucuggggcgugcaccaccccagcaccgacagcgaccagaccagccuguacgcccaggccagcggcagagugaccgugagcaccaagagaagccagcagaccgugauccccaacaucggcagcagacccugggugagaggcgugagcagcagaaucagcaucuacuggaccaucgugaagcccggcgacgugcuggugaucaacagcaacggcaaccugaucgcccccagaggcuacuucaagaugagaagcggcaagagcagcaucaugagaagcgacgcccccaucggcaagugcaacagcgagugcaucacccccaacggcagcauccccaacgacaagcccuuccagaacgugaacagaaucaccuacggcgccugccccagauacgugaagcagaacacccugaagcuggccaccggcaugagaaacgugcccgagaagcagaccagaggcaucuucggcgccaucgccggcuucaucgagaacggcugggagggcaugauggacggcugguacggcuucagacaccagaacagcgagggcaccggccaggccgccgaccugaagagcacccaggccgccaucaaccagaucaacggcaagcugaacaagcugaucgagaagaccaacgagaaguuccaccagaucgagaaggaguucagcgagguggagggcagaauccaggaccuggagaaguacguggaggacaccaagaucgaccuguggagcuacaacgccgagcugcugguggcccuggagaaccagcacaccaucgaccugaccgacagcgagaugaacaagcuguucgagagaaccagaaagcagcugagagagaacgccgaggacaugggcaacggcugcuucaagaucuaccacaagugcgacaacgccugcaucggcagcaucagaaacggcaccuacgaccacgacguguacagagacgaggcccugaacaacagauuccagaucaagggcguggagcugaagagcggcuacaaggacuggauccuguggaucagcuucgccaucagcugcuuccugcugugcguggugcugcugggcagcaucaugugggccugccagagaggcaacaucagaugcaacaucugcaucuga

SEQ ID NO: 163845 - RNA, 1701 nt, Artificial Sequence
  derived and/or modified CDS sequence (opt4) from hemagglutinin__InfluenzaA__ACZ53978
augaagaccaucaucgcccugagcuacaucuucugccuggcccuggcccagaagcugcccggcaacgacaacagcaccgccacccugugccugggccaccacgccgugcccaacggcacccuggugaagaccaucaccaacgaccagaucgaggugaccaacgccaccgagcuggugcagagcagcagcaccggcagaaucugcgacagcccccaccagauccuggacggcgagaacugcacccugaucgacgcccugcugggcgacccccacugcgacggcuuccagaacaaggagugggaccuguucguggagagaagcaaggccuacagcaacugcuaccccuacgacgugcccgacuacgccagccugaagagccugaucgccagcagcggcacccuggaguucaacaacgagagcuucaacuggaucggcgugagccagaacggcaccagcagcgccugcaagagaaucagcaucaccgugagcuucaacaagcugaacuggcugcaccagcugaaguacagauaccccgcccugaacgugaccaugcccaacaacgacaaguucgacaagcuguacaucuggggcgugcaccaccccagcaccgacagcgaccagaccagccuguacgcccaggccagcggcagagugaccgugagcaccaagagaagccagcagaccgugauccccaacaucggcagcagacccugggugagaggcgugagcagcagaaucagcaucuacuggaccaucgugaagcccggcgacgugcuggugaucaacagcaacggcaaccugaucgcccccagaggcuacuucaagaugagaagcggcaagagcagcaucaugagaagcgacgcccccaucggcaagugcaacagcgagugcaucacccccaacggcagcauccccaacgacaagcccuuccagaacgugaacagaaucaccuacggcgccugccccagauacgugaagcagaacacccugaagcuggccaccggcaugagaaacgugcccgagaagcagaccagaggcaucuucggcgccaucgccggcuucaucgagaacggcugggagggcaugguggacggcugguacggcuucagacaccagaacagcgagggcaccggccaggccgccgaccugaagagcacccaggccgccaucaaccagaucaccggcaagcugaacaagcugaucgagaagaccaacgagaaguuccaccagaucgagaaggaguucagcgagguggagggcagaauccaggaccuggagaaguacguggaggacaccaagaucgaccuguggagcuacaacgccgagcugcugguggcccuggagaaccagcacaccaucgaccugaccgacagcgagaugaacaagcuguucgagagaaccagaaagcagcugagagagaacgccgaggacaugggcaacggcugcuucaagaucuaccacaagugcgacaacgccugcaucggcagcaucagaaacggcaccuacgaccacgacguguacagagacgaggcccugaacaacagauuccagaucaagggcguggagcugaagagcggcuacaaggacuggauccuguggaucagcuucgccaucagcugcuuccugcugugcguggugcugcugggcuucaucaugugggccugccagagaggcaacaucagaugcaacaucugcaucuga

SEQ ID NO: 163846 - RNA, 1701 nt, Artificial Sequence
  derived and/or modified CDS sequence (opt4) from hemagglutinin__InfluenzaA__ACZ56080
augaaggccauccugguggugcugcuguacaccuucgccaccgccaacgccgacacccugugcaucggcuaccacgccaacaacagcaccgacaccguggacaccgugcuggagaagaacgugaccgugacccacagcgugaaccugcuggaggacaagcacaacggcaagcugugcaagcugagaggcguggccccccugcaccugggcaagugcaacaucgccggcuggauccugggcaaccccgagugcgagagccugagcaccgccagcagcuggagcuacaucguggagaccagcagcagcgacaacggcaccugcuaccccggcgacuucaucgacuacgaggagcugagagagcagcugagcagcgugagcagcuucgagagauucgagaucuuccccaagaccagcagcuggcccaaccacgacagcaacaagggcgugaccgccgccugcagccacgccggcgccaagagcuucuacaagaaccugaucuggcuggugaagaagggcaacagcuaccccaagcugagcaagagcuacaucaacgacaagggcaaggaggugcuggugcuguggggcauccaccaccccagcaccagcgccgaccagcagagccuguaccagaacgccgacgccuacguguucgugggcaccagcagauacagcaagaaguucaagcccgagaucgccaucagacccaaggugagaggccaggagggcagaaugaacuacuacuggacccugguggagcccggcgacaagaucaccuucgaggccaccggcaaccugguggugcccagauacgccuucgccauggagagaaacgccggcagcggcaucaucaucagcgacacccccgugcacgacugcaacaccaccugccagacccccaagggcgccaucaacaccagccugcccuuccagaacauccaccccaucaccaucggcaagugccccaaguacgugaagagcaccaagcugagacuggccaccggccugagaaacgugcccagcauccagagcagaggccuguucggcgccaucgccggcuucaucgagggcggcuggaccggcaugguggacggcugguacggcuaccaccaccagaacgagcagggcagcggcuacgccgccgaccugaagagcacccagaacgccaucgacgagaucaccaacaaggugaacagcgugaucgagaagaugaacacccaguucaccgccgugggcaaggaguucaaccaccuggagaagagaaucgagaaccugaacaagaagguggacgacggcuuccuggacaucuggaccuacaacgccgagcugcuggugcugcuggagaacgagagaacccuggacuaccacgacagcaacgugaagaaccuguacgagaaggugagaagccagcugaagaacaacgccaaggagaucggcaacggcugcuucgaguucuaccacaagugcgacaacaccugcauggagagcgugaagaacggcaccuacgacuaccccaaguacagcgaggaggccaagcugaacagagaggagaucgacggcgugaagcuggagagcaccagaaucuaccagauccuggccaucuacagcaccguggccagcagccuggugcugguggugagccugggcgccaucagcuucuggaugugcagcaacggcagccugcagugcagaaucugcaucuga

SEQ ID NO: 163847 - RNA, 1701 nt, Artificial Sequence
  derived and/or modified CDS sequence (opt4) from hemagglutinin__InfluenzaA__ACZ61118
augaaggccauccugguggugcugcuguacaccuucgccaccgccaacgccgacacccugugcaucggcuaccacgccaacaacagcaccgacaccguggacaccgugcuggagaagaacgugaccgugacccacagcgugaaccugcuggaggacaagcacaacggcaagcugugcaagcugagaggcguggccccccugcaccugggcaagugcaacaucgccggcuggauccugggcaaccccgagugcgagagccugagcaccgccagcagcuggagcuacaucguggagaccagcagcagcgacaacggcaccugcuaccccggcgacuucaucgacuacgaggagcugagagagcagcugagcagcgugagcagcuucgagagauucgagaucuuccccaagaccagcagcuggcccaaccacgacagcaacaagggcgugaccgccgccugcccccacgccggcgccaagagcuucuacaagaaccugaucuggcuggugaagaagggcaacagcuaccccaagcugagcaagagcuacaucaacgacaagggcaaggaggugcuggugcuguggggcauccaccaccagagcaccagcgccgaccagcagagccuguaccagaacgccgacgccuacguguucgugggcagcagcagauacagcaagaaguucaagcccgagaucgccaucagacccaaggugagagaccaggagggcagaaugaacuacuacuggacccugguggagcccggcgacaagaucaccuucgaggccaccggcaaccugguggugcccagauacgccuucgccauggagagaaacgccggcagcggcaucaucaucagcgacacccccgugcacgacugcaacaccaccugccagacccccaagggcgccaucaacaccagccugcccuuccagaacauccaccccaucaccaucggcaagugccccaaguacgugaagagcaccaagcugagacuggccaccggccugagaaacgugcccagcauccagagcagaggccuguucggcgccaucgccggcuucaucgagggcggcuggaccggcaugguggacggcugguacggcuaccaccaccagaacgagcagggcagcggcuacgccgccgaccugaagagcacccagaacgccaucgacgagaucaccaacaaggugaacagcgugaucgagaagaugaacacccaguucaccgccgugggcaaggaguucaaccaccuggagaagagaaucgagaaccugaacaagaagguggacgacggcuuccuggacaucuggaccuacaacgccgagcugcuggugcugcuggagaacgagagaacccuggacuaccacgacagcaacgugaagaaccuguacgagaaggugagaagccagcugaagaacaacgccaaggagaucggcaacggcugcuucgaguucuaccacaagugcgacaacaccugcauggagagcgugaagaacggcaccuacgacuaccccaaguacagcgaggaggccaagcugaacagagaggagaucgacggcgugaagcuggagagcaccagaaucuaccagauccuggccaucuacagcaccguggccagcagccuggugcugguggugagccugggcgccaucagcuucuggaugugcagcaacggcagccugcagugcagaaucugcaucuga

SEQ ID NO: 163848 - RNA, 1701 nt, Artificial Sequence
  derived and/or modified CDS sequence (opt4) from hemagglutinin__InfluenzaA__ACZ61119
auggaggccauccugguggugcugcuguacaccuucgccaccgccaacgccgacacccugugcaucggcuaccacgccaacaacagcaccgacaccguggacaccgugcuggagaagaacgugaccgugacccacagcgugaaccugcuggaggacaagcacaacggcaagcugugcaagcugagaggcguggccccccugcaccugggcaagugcaacaucgccggcuggauccugggcaaccccgagugcgagagccugagcaccgccagcagcuggagcuacaucguggagaccagcagcagcgacaacggcaccugcuaccccggcgacuucaucgacuacgaggagcugagagagcagcugagcagcgugagcagcuucgagagauucgagaucuuccccaagaccagcagcuggcccaaccacgacagcaacaagggcgugaccgccgccugcccccacgccggcgccaagagcuucuacaagaaccugaucuggcuggugaagaagggcaacagcuaccccaagcugagcaagagcuacaucaacgacaagggcaaggaggugcuggugcuguggggcauccaccaccccagcaccagcgccgaccagcagagccuguaccagaacgccgacgccuacguguucgugggcagcagcagauacagcaagaaguucaagcccgagaucgccaucagacccaaggugagagaccaggagggcagaaugaacuacuacuggacccugguggagcccggcgacaagaucaccuucgaggccaccggcaaccugguggugcccagauacgccuucgccauggagagaaacgccggcagcggcaucaucaucagcgacacccccgugcacgacugcaacaccaccugccagacccccaagggcgccaucaacaccagccugcccuuccacaacauccaccccaucaccaucggcaagugccccaaguacgugaagagcaccaagcugagacuggccaccggccugagaaacgugcccagcauccagagcagaggccuguucggcgccaucgccggcuucaucgagggcggcuggaccggcaugguggacggcugguacggcuaccaccaccagaacgagcagggcagcggcuacgccgccgaccugaagagcacccagaacgccaucgacgagaucaccaacaaggugaacagcgugaucgagaagaugaacacccaguucaccgccgugggcaaggaguucaaccaccuggagaagagaaucgagaaccugaacaagaagguggacgacggcuuccuggacaucuggaccuacaacgccgagcugcugauccugcuggagaacgagagaacccuggacuaccacgacagcaacgugaagaaccuguacgagaaggugagaagccagcugaagaacaacgccaaggagaucggcaacggcugcuucgaguucuaccacaagugcgacaacaccugcauggagagcgugaagaacggcaccuacgacuaccccaaguacagcgaggaggccaagcugaacagagaggagaucgacggcgugaagcuggagagcaccagaaucuaccagauccuggccaucuacagcaccguggccagcagccuggugcugguggugagccugggcgccaucagcuucuggaugugcagcaacggcagccugcagugcagaaucugcaucuga

SEQ ID NO: 163849 - RNA, 1701 nt, Artificial Sequence; identical to SEQ ID NO: 162729
  derived and/or modified CDS sequence (opt4) from hemagglutinin__InfluenzaA__ACZ61122

SEQ ID NO: 163850 - RNA, 1701 nt, Artificial Sequence; identical to SEQ ID NO: 162729
  derived and/or modified CDS sequence (opt4) from hemagglutinin__InfluenzaA__ACZ61123

SEQ ID NO: 163851 - RNA, 1701 nt, Artificial Sequence; identical to SEQ ID NO: 163527
  derived and/or modified CDS sequence (opt4) from hemagglutinin__InfluenzaA__ACZ74627

SEQ ID NO: 163852 - RNA, 1698 nt, Artificial Sequence
  derived and/or modified CDS sequence (opt4) from hemagglutinin__InfluenzaA__ACZ81554
augaaggugaagcugcuggugcugcugugcaccuucaccgccaccuacgccgacaccaucugcaucggcuaccacgccaacaacagcaccgacaccguggacaccgugcuggagaagaacgugaccgugacccacagcgugaaccugcuggagaacaaccacaacggcaagcugugccugcugaagggcaucgccccccugcagcugggcaacugcaccguggccggcuggauccugggcaaccccgagugcgagcugcugaucagcaaggagagcuggagcuacaucguggagaagcccaaccccgagaacggcaccugcuaccccggccacuucgccgacuacgaggagcugagagagcagcugagcagcgugagcagcuucgagagauucgagaucuuccccaaggagagcagcuggcccaaccacaccgugaccggcgugagcgccagcugcagccacaacggcgagaacagcuucuacagaaaccugcuguggcugaccggcaagaacggccuguaccccaaccugagcaagagcuacgccaacaacaaggagaaggaggugcuggugcuguggggcgugcaccacccccccaacaucgccgaccagaagacccuguaccacaccgagaacgccuacgugagcguggugagcagccacuacagcagaaaguucacccccgagaucgccaagagacccaagaucagagaccaggagggcagaaucaacuacuacuggacccugcuggagcccggcgacaccaucaucuucgaggccaacggcaaccugaucgcccccagauacgccuucgcccugagcagaggcuucggcagcggcaucaucaacagcaacgcccccauggacaagugcgacgccaagugccagaccccccagggcgccaucaacagcagccugcccuuccagaacgugcaccccgugaccaucggcgagugccccaaguacgugagaagcgccaagcugagaauggugaccggccugagaaacauccccagcauccagagcagaggccuguucggcgccaucgccggcuucaucgagggcggcuggaccggcaugguggacggcugguacggcuaccaccaccagaacgagcagggcagcggcuacgccgccgaccagaagagcacccagaacgccaucaacggcaucaccaacaaggugaacagcgugaucgagaagaugaacacccaguucaccgccgugggcaaggaguucaacaagcuggagagaagaauggagaaccugaacaagaagguggacgacggcuucaucgacaucuggaccuacaacgccgagcugcuggugcugcuggagaacgagagaacccuggacuuccacgacagcaacgugaagaaccuguacgagaaggugaagagccagcugaagaacaacgccaaggagaucggcaacggcugcuucgaguucuaccacaagugcaacgacgagugcauggagagcgugaagaacggcaccuacgacuaccccaaguacagcgaggagagcaagcugaacagagagaagaucgacggcgugaagcuggagagcaugggcguguaccagauccuggccaucuacagcaccguggccagcagccuggugcugcuggugagccugggcgccaucagcuucuggaugugcagcaacggcagccugcagugcagaaucugcaucuga

SEQ ID NO: 163853 - RNA, 1698 nt, Artificial Sequence
  derived and/or modified CDS sequence (opt4) from hemagglutinin__InfluenzaA__ACZ81555
augaaggugaagcugcuggugcugcugugcaccuucaccgccaccuacgccgacaccaucugcaucggcuaccacgccaacaacagcaccgacaccguggacaccgugcuggagaagaacgugaccgugacccacagcgugaaccugcuggagaacagccacaacggcaagcugugccugcugaagggcaucgccccccugcagcugggcaacugcagcguggccggcuggauccugggcaaccccgagugcgagcugcugaucagcaaggagagcuggagcuacaucguggagaagcccaaccccgagaacggcaccugcuaccccggccacuucgccgacuacgaggagcugagagagcagcugagcagcgugagcagcuucgagagauucgagaucuuccccaaggagagcagcuggcccaaccacaccgugaccggcgugagcgccagcugcagccacaacggcgagaacagcuucuacagaaaccugcuguggcugaccggcaagaacggccuguaccccaaccugagcaagagcuacgccaacaacaaggagaaggaggugcuggugcuguggggcgugcaccacccccccaacaucggcgaccagaagacccuguaccacaccgagaacgccuacgugagcguggugagcagccacuacagcagaaaguucacccccgagaucgccaagagacccaaggugagagaccaggagggcagaaucaacuacuacugggcccugcuggagcccggcgacaccaucaucuucgaggccaacggcaaccugaucgcccccagauacgccuucgcccugagcagaggcuucggcagcggcaucaucaacagcaacgcccccauggacaagugcgacgccaagugccagaccccccagggcgccaucaacagcagccugcccuuccagaacgugcaccccgugaccaucggcgagugccccaaguacgugagaagcgccaagcugagaauggugaccggccugagaaacauccccagcauccagagcagaggccuguucggcgccaucgccggcuucaucgagggcggcuggaccggcaugguggacggcugguacggcuaccaccaccagaacgagcagggcagcggcuacgccgccgaccagaagagcacccagaacgccaucaacggcaucaccaacaaggugaacagcgugaucgagaagaugaacacccaguucaccgccgugggcaaggaguucaacaagcuggagagaagaauggagaaccugaacaagaagguggacgacggcuucaucgacaucuggaccuacaacgccgagcugcuggugcugcuggagaacgagagaacccuggacuuccacgacagcaacgugaagaaccuguacgagaaggugaagagccagcugaagaacaacgccaaggagaucggcaacggcugcuucgaguucuaccacaagugcaacgacgagugcauggagagcgugaagaacggcaccuacgacuaccccaaguacagcgaggagagcaagcugaacagagagaagaucgacggcgugaagcuggagagcaugggcguguaccagauccuggccaucuacagcaccguggccagcagccuggugcugcuggugagccugggcgccaucagcuucuggaugugcagcaacggcagccugcagugcagaaucugcaucuga

SEQ ID NO: 163854 - RNA, 1698 nt, Artificial Sequence
  derived and/or modified CDS sequence (opt4) from hemagglutinin__InfluenzaA__ACZ81556
augaaggugaagcugcuggugcugcugugcaccuucaccgccaccuacgccgacaccaucugcaucggcuaccacgccaacaacagcaccgacaccguggacaccgugcuggagaagaacgugaccgugacccacagcgugaaccugcuggagaacagccacaacggcaagcugugccugcugaagggcaucgccccccugcagcugggcaacugcagcguggccggcuggauccugggcaaccccgagugcgagcugcugaucagcaaggagagcuggagcuacaucguggagaagcccaaccccgagaacggcaccugcuaccccggccacuucgccgacuacgaggagcugagagagcagcugagcagcgugagcagcuucgagagauucgagaucuuccccaaggagagcagcuggcccaaccacaccgugaccggcgccagcgccagcugcagccacaacggcgagaacagcuucuacagaaaccugcuguggcugaccggcaagaacggccuguaccccaaccugagcaagagcuacgccaacaacaaggagaaggaggugcuggugcuguggggcgugcaccacccccccaacaucgccgaccagaagacccuguaccacaccgagaacgccuacgugagcguggugagcagccacuacagcagaaaguucacccccgagaucgccaagagacccaaggugagagaccaggagggcagaaucaacuacuacuggacccugcuggagcccggcgacaccaucaucuucgaggccaacggcaaccugaucgcccccagauacgccuucgcccugagcagaggcuucggcagcggcaucaucaacagcaacgcccccauggacaagugcgacgccaagugccagaccccccagggcgccaucaacagcagccugcccuuccagaacgugcaccccgugaccaucggcgagugccccaaguacgugagaagcgccaagcugagaauggugaccggccugagaaacauccccagcauccagagcagaggccuguucggcgccaucgccggcuucaucgagggcggcuggaccggcaugguggacggcugguacggcuaccaccaccagaacgagcagggcagcggcuacgccgccgaccagaagagcacccagaacgccaucaacggcaucaccaacaaggugaacagcgugaucgagaagaugaacacccaguucaccgccgugggcaaggaguucaacaagcuggagagaagaauggagaaccugaacaagaagguggacgacggcuucaucgacaucuggaccuacaacgccgagcugcuggugcugcuggagaacgagagaacccuggacuuccacgacagcaacgugaagaaccuguacgagaaggugaagagccagcugaagaacaacgccaaggagaucggcaacggcugcuucgaguucuaccacaagugcaacgacgagugcauggagagcgugaagaacggcaccuacgacuaccccaaguacagcgaggagagcaagcugaacaaggagaagaucgacggcgugaagcuggagagcaugggcguguaccagauccuggccaucuacagcaccguggccagcagccuggugcugcuggugagccugggcgccaucagcuucuggaugugcagcaacggcagccugcagugcagaaucugcaucuga

SEQ ID NO: 163855 - RNA, 1701 nt, Artificial Sequence
  derived and/or modified CDS sequence (opt4) from hemagglutinin__InfluenzaA__ACZ81557
augaagaccaucaucgcccugagcuacauccugugccugguguucgcccagaagcugcccggcaacgacaacagcaccgccacccugugccugggccaccacgccgugcccaacggcaccaucgugaagaccaucaccaacgaccagaucgaggugaccaacgccaccgagcuggugcagagcagcagcaccggcgagaucugcggcagcccccaccagauccuggacggcaagaacugcacccugaucgacgcccugcugggcgacccccagugcgacggcuuccagaacaagaagugggaccuguucguggagagaagcaaggccuacagcaacugcuaccccuacgacgugcccgacuacgccagccugagaagccugguggccagcagcggcacccuggaguucaacaacgagagcuucaacuggaccggcgugacccagaacggcaccagcagcgccugcaucagaagaagcaagaacagcuucuucagcagacugaacuggcugacccaccugaacuucaaguaccaggcccugaacgugaccaugcccaacaacgagcaguucgacaagcuguacaucuggggcgugcaccaccccggcaccgacaaggaccagaucuuccuguacgcccaggccagcggcagaaucaccgugagcaccaagagaagccagcagaccgugauccccaacaucggcagcagacccagagugagaaacauccccagcagaaucagcaucuacuggaccaucgugaagcccggcgacauccugcugaucaacagcaccggcaaccugaucgcccccagaggcuacuucaagauccagagcggcaagagcagcaucaugagaagcgacgcccccaucggcaagugcaacagcgagugcaucacccccaacggcagcauccccaacgacaagcccuuccagaacgugaacagaaucaccuacggcgccugccccagauacgugaagcagaacacccugaagcuggccaccggcaugagaaacgugcccgagaagcagaccagaggcaucuucggcgccaucgccggcuucaucgagaacggcugggagggcaugguggacggcugguacggcuucagacaccagaacagcgagggcagaggccaggccgccgaccugaagagcacccaggccgccaucgaccagaucaacggcaagcugaacagacugaucggcaagaccaacgagaaguuccaccagaucgagaaggaguucagcgagguggagggcagaauccaggaccuggagaaguacguggaggacaccaagaucgaccuguggagcuacaacgccgagcugcugguggcccuggagaaccagcacaccaucgaccugaccgacagcgagaugaacaagcuguucgagaagaccaagaagcagcugagagagaacgccgaggacaugggcaacggcugcuucaagaucuaccacaagugcgacaacgccugcaucggcagcaucagaaacggcaccuacgaccacgacguguacagagacgaggcccugaacaacagauuccagaucaagggcguggagcugaagagcggcuacaaggacuggauccuguggaucagcuucgccaucagcugcuuccugcugugcguggcccugcugggcuucaucaugugggccugccagaagggcaacaucagaugcaacaucugcaucuga

SEQ ID NO: 163856 - RNA, 1701 nt, Artificial Sequence
  derived and/or modified CDS sequence (opt4) from hemagglutinin__InfluenzaA__ACZ81558
augaagaccaucaucgcccugagcuacauccugugccugguguucgcccagaagcugcccggcaacgacaacagcaccgccacccugugccugggccaccacgccgugcccaacggcaccaucgugaagaccaucaccaacgaccagaucgaggugaccaacgccaccgagcuggugcagagcagcagcaccggcgagaucugcgacagcccccaccagauccuggacggcaagaacugcacccugaucgacgcccugcugggcgacccccacugcgacggcuuccagaacaagaagugggaccuguucguggagagaagcaaggccuacagcaacugcuaccccuacgacgugcccgacuacgccagccugagaagccugguggccagcagcggcacccuggaguucaacaacgagagcuucaacuggaccggcgugacccagaacggcaccagcagcgccugcaucagaagaagcaagaacagcuucuucagcagacugaacuggcugacccaccugaacuucaaguaccccgcccugaacgugaccaugcccaacaacgagcaguucgacaagcuguacaucuggggcgugcaccaccccggcaccgacaaggaccagaucuuccuguacgcccaggccagcggcagaaucaccgugagcaccaagagaagccagcagaccgccauccccaacaucggcagcagacccagagugagaaacauccccagcagaaucagcaucuacuggaccaucgugaagcccggcgacauccugcugaucaacagcaccggcaaccugaucgcccccagaggcuacuucaagaucagaagcggcaagagcagcaucaugagaagcgacgcccccaucggcaagugcaacagcgagugcaucacccccaacggcagcauccccaacgacaagcccuuccagaacgugaacagaaucaccuacggcgccugccccagauacgugaagcagaacacccugaagcuggccaccggcaugagaaacgugcccgagaagcagaccagaggcaucuucggcgccaucgccggcuucaucgagaacggcugggagggcaugguggacggcugguacggcuucagacaccagaacagcgagggcagaggccaggccgccgaccugaagagcacccaggccgccaucgaccagaucaacggcaagcugaacagacugaucgagaagaccaacgagaaguuccaccagaucgagaaggaguucagcgagguggagggcagaauccaggaccuggagaaguacguggaggacaccaagaucgaccuguggagcuacaacgccgagcugcugguggcccuggagaaccagcacaccaucgaccugaccgacagcgagaugaacaagcuguucgagaagaccaagaagcagcugagagagaacgccgaggacaugggcaacggcugcuucaagaucuaccacaagugcgacaacgccugcaucggcagcaucagaaacggcaccuacgaccacgacguguacagagacgaggcccugaacaacagauuccagaucaagggcguggagcugaagagcggcuacaaggacuggauccuguggaucagcuucgccaucagcugcuuccugcugugcguggcccugcugggcuucaucaugugggccugccagaagggcaacaucagaugcaacaucugcaucuga

SEQ ID NO: 163857 - RNA, 1701 nt, Artificial Sequence
  derived and/or modified CDS sequence (opt4) from hemagglutinin__InfluenzaA__ACZ81559
augaagaccaucaucgcccugagcuacauccugugccugguguucgcccagaagcugcccggcaacgacaacagcaccgccacccugugccugggccaccacgccgugcccaacggcaccaucgugaagaccaucaccaacgaccagaucgaggugaccaacgccaccgagcuggugcagagcagcagcaccggcgagaucugcgacagcccccaccagauccuggacggcaagaacugcacccugaucgacgcccugcugggcgacccccacugcgacggcuuccagaacaagaagugggaccuguucguggagagaagcaaggccuacagcaacugcuaccccuacgacgugcccgacuacgccagccugagaagccugguggccagcagcggcacccuggaguucaacaacgagagcuucaacuggaccggcgugacccagaacggcaccagcagcgccugcaucagaagaagcaagaacagcuucuucagcagacugaacuggcugacccaccugaacuucaaguaccccgcccugaacgugaccaugcccaacaacgagcaguucgacaagcuguacaucuggggcgugcaccaccccggcaccgacaaggaccagaucuuccuguacgcccaggccagcggcagaaucaccgugagcaccaagagaagccagcagaccgccauccccaacaucggcagcagacccagagugagaaacauccccagcagaaucagcaucuacuggaccaucgugaagcccggcgacauccugcugaucaacagcaccggcaaccugaucgcccccagaggcuacuucaagaucagaagcggcaagagcagcaucaugagaagcgacgcccccaucggcaagugcaacagcgagugcaucacccccaacggcagcauccccaacgacaagcccuuccagaacgugaacagaaucaccuacggcgccugccccagauacgugaagcagaacacccugaagcuggccaccggcaugagaaacgugcccgagaagcagaccagaggcaucuucggcgccaucgccggcuucaucgagaacggcugggagggcaugguggacggcugguacggcuucagacaccagaacagcgagggcagaggccaggccgccgaccugaagagcacccaggccgccaucgaccagaucaacggcaagcugaacagacugaucggcaagaccaacgagaaguuccaccagaucgagaaggaguucagcgagguggagggcagaauccaggaccuggagaaguacguggaggacaccaagaucgaccuguggagcuacaacgccgagcugcugguggcccuggagaaccagcacaccaucgaccugaccgacagcgagaugaacaagcuguucgagaagaccaagaagcagcugagagagaacgccgaggacaugggcaacggcugcuucaagaucuaccacaagugcgacaacgccugcaucggcagcaucagaaacggcaccuacgaccacgacguguacagagacgaggcccugaacaacagauuccagaucaagggcguggagcugaagagcggcuacaaggacuggauccuguggaucagcuucgccaucagcugcuuccugcugugcguggcccugcugggcuucaucaugugggccugccagaagggcaacaucagaugcaacaucugcaucuga

SEQ ID NO: 163858 - RNA, 1701 nt, Artificial Sequence; identical to SEQ ID NO: 162729
  derived and/or modified CDS sequence (opt4) from hemagglutinin__InfluenzaA__ACZ81632

SEQ ID NO: 163859 - RNA, 1701 nt, Artificial Sequence; identical to SEQ ID NO: 162729
  derived and/or modified CDS sequence (opt4) from hemagglutinin__InfluenzaA__ACZ81642

SEQ ID NO: 163860 - RNA, 1701 nt, Artificial Sequence
  derived and/or modified CDS sequence (opt4) from hemagglutinin__InfluenzaA__ACZ81652
augaaggccauccugguggugcugcuguacaccuucgccaccgccaacgccgacacccugugcaucggcuaccacgccaacaacagcaccgacaccguggacaccgugcuggagagaaacgugaccgugacccacagcgugaaccugcuggaggacaagcacaacggcaagcugugcaagcugagaggcguggccccccugcaccugggcaagugcaacaucgccggcuggauccugggcaaccccgagugcgagagccugagcaccgccagcagcuggagcuacaucguggagaccagcagcagcgacaacggcaccugcuaccccggcgacuucaucgacuacgaggagcugagagagcagcugagcagcgugagcagcuucgagagauucgagaucuuccccaagaccagcagcuggcccaaccacgacagcaacaagggcgugaccgccgccugcccccacgccgaggccaagagcuucuacaagaaccugaucuggcuggugaagaagggcaacagcuaccccaagcugagcaagagcuacaucaacgacaagggcaaggaggugcuggugcuguggggcauccaccaccccagcaccagcgccgaccagcagagccuguaccagaacgccgacgccuacguguucgugggcaccagcagauacagcaagaaguucaagcccgagaucgccaucagacccaaggugagaggccaggagggcagaaugaacuacuacuggacccugguggagcccggcgacaagaucaccuucgaggccaccggcaaccugguggugcccagauacgccuucgccauggagagaaacgccggcagcggcaucaucaucagcgacacccccgugcacgacugcaacaccaccugccagacccccaagggcgccaucaacaccagccugcccuuccagaacauccaccccaucaccaucggcaagugccccaaguacgugaagagcaccaagcugagacuggccaccggccugagaaacgugcccagcauccagagcagaggccuguucggcgccaucgccggcuucaucgagggcggcuggaccggcaugguggacggcugguacggcuaccaccaccagaacgagcagggcagcggcuacgccgccgaccugaagagcacccagaacgccaucgacgagaucaccaacaaggugaacagcgugaucgagaagaugaacacccaguucaccgccgugggcaaggaguucaaccaccuggagaagagaaucgagaaccugaacaagaagguggacgacggcuuccuggacaucuggaccuacaacgccgagcugcuggugcugcuggagaacgagagaacccuggacuaccacgacagcaacgugaagaaccuguacgagaaggugagaagccagcugaagaacaacgccaaggagaucggcaacggcugcuucgaguucuaccacaagugcgacaacaccugcauggagagcgugaagaacggcaccuacgacuaccccaaguacagcgaggaggccaagcugaacagagaggagaucgacggcgugaagcuggagagcaccagaaucuaccagauccuggccaucuacagcaccguggccagcagccuggugcugguggugagccugggcgccaucagcuucuggaugugcagcaacggcagccugcagugcagaaucugcaucuga

SEQ ID NO: 163861 - RNA, 1701 nt, Artificial Sequence
  derived and/or modified CDS sequence (opt4) from hemagglutinin__InfluenzaA__ACZ92130
auggaggccauccugguggugcugcuguacaccuucgccaccgccaacgccgacacccugugcaucggcuaccacgccaacaacagcaccgacaccguggacaccgugcuggagaagaacgugaccgugacccacagcgugaaccugcuggaggacaagcacaacggcaagcugugcaagcugagaggcguggccccccugcaccugggcaagugcaacaucgccggcuggauccugggcaaccccgagugcgagagccugagcaccgccagcagcuggagcuacaucguggagaccagcagcagcgacaacggcaccugcuaccccggcgacuucaucgacuacgaggagcugagagagcagcugagcagcgugagcagcuucgagagauucgagaucuuccccaagaccagcagcuggcccaaccacgacagcaacaagggcgugaccgccgccugcccccacgccggcgccaagagcuucuacaagaaccugaucuggcuggugaagaagggcaacagcuaccccaagcugagcaagagcuacaucaacgacaagggcaaggaggugcuggugcuguggggcauccaccaccccagcaccagcgccgaccagcagagccuguaccagaacgccgacgccuacguguucgugggcagcagcagauacagcaagaaguucaagcccgagaucgccaucagacccaaggugagagaccaggagggcagaaugaacuacuacuggacccugguggagcccggcgacaagaucaccuucgaggccaccggcaaccugguggugcccagauacgccuucgccauggagagaaacgccggcagcggcaucaucaucagcgacacccccgugcacgacugcaacaccaccugccagacccccaagggcgccaucaacaccagccugcccuuccacaacauccaccccaucaccaucggcaagugccccaaguacgugaagagcaccaagcugagacuggccaccggccugagaaacgugcccagcauccagagcagaggccuguucggcgccaucgccggcuucaucgagggcggcuggaccggcaugguggacggcugguacggcuaccaccaccagaacgagcagggcagcggcuacgccgccgaccugaagagcacccagaacgccaucgacgagaucaccaacaaggugaacagcgugaucgagaagaugaacacccaguucaccgccgugggcaaggaguucaaccaccuggagaagagaaucgagaaccugaacaagaagguggacgacggcuuccuggacaucuggaccuacaacgccgagcugcuggugcugcuggagaacgagagaacccuggacuaccacgacagcaacgugaagaaccuguacgagaaggugagaagccagcugaagaacaacgccaaggagaucggcaacggcugcuucgaguucuaccacaagugcgacaacaccugcaucgagagcgugaagaacggcaccuacgacuaccccaaguacagcgaggaggccaagcugaacagagaggagaucgacggcgugaagcuggagagcaccagaaucuaccagauccuggccaucuacagcaccguggccagcagccuggugcugguggugagccugggcgccaucagcuucuggaugugcagcaacggcagccugcagugcagaaucugcaucuga

SEQ ID NO: 163862 - RNA, 1701 nt, Artificial Sequence; identical to SEQ ID NO: 162971
  derived and/or modified CDS sequence (opt4) from hemagglutinin__InfluenzaA__ACZ92131

SEQ ID NO: 163863 - RNA, 1701 nt, Artificial Sequence; identical to SEQ ID NO: 162971
  derived and/or modified CDS sequence (opt4) from hemagglutinin__InfluenzaA__ACZ92132

SEQ ID NO: 163864 - RNA, 1701 nt, Artificial Sequence; identical to SEQ ID NO: 162971
  derived and/or modified CDS sequence (opt4) from hemagglutinin__InfluenzaA__ACZ92133

SEQ ID NO: 163865 - RNA, 1701 nt, Artificial Sequence; identical to SEQ ID NO: 162729
  derived and/or modified CDS sequence (opt4) from hemagglutinin__InfluenzaA__ACZ92134

SEQ ID NO: 163866 - RNA, 1701 nt, Artificial Sequence; identical to SEQ ID NO: 162729
  derived and/or modified CDS sequence (opt4) from hemagglutinin__InfluenzaA__ACZ95465

SEQ ID NO: 163867 - RNA, 1701 nt, Artificial Sequence; identical to SEQ ID NO: 162716
  derived and/or modified CDS sequence (opt4) from hemagglutinin__InfluenzaA__ACZ95837

SEQ ID NO: 163868 - RNA, 1701 nt, Artificial Sequence; identical to SEQ ID NO: 162729
  derived and/or modified CDS sequence (opt4) from hemagglutinin__InfluenzaA__ACZ95847

SEQ ID NO: 163869 - RNA, 1701 nt, Artificial Sequence
  derived and/or modified CDS sequence (opt4) from hemagglutinin__InfluenzaA__ACZ95857
augaaggccauccugguggugcugcuguacaccuucgccaccgccaacgccgacacccugugcaucggcuaccacgccaacaacagcaccgacaccguggacaccgugcuggagaagaacgugaccgugacccacagcgugaaccugcuggaggacaagcacaacggcaagcugugcaagcugagaggcguggccccccugcaccugggcaagugcaacaucgccggcuggauccugggcaaccccgagugcgagagccugagcaccgccagcagcuggagcuacaucguggagaccagcagcagcgacaacggcaccugcuaccccggcgacuucaucgacuacgaggagcugagagagcagcugagcagcgugagcagcuucgagagauucgagaucuuccccaagaccagcagcuggcccaaccacgacagcaacaagggcgugaccgccgccugcccccacgccggcgccaagagcuucuacaagaaccugaucuggcuggugaagaagggcaacagcuaccccaagcugagcaagagcuacaucaacgacaagggcaaggaggugcuggugcuguggggcauccaccaccccagcaccagcgccgaccagcagagccuguaccagaacgccgacgccuacguguucgugggcaccagcagauacagcaagaaguucaagcccgagaucgccaucagacccaaggugagagaccaggagggcagaaugaacuacuacuggacccugguggagcccggcgacaagaucaccuucgaggccaccggcaaccugguggugcccagauacgccuucgccauggagagaaacgccggcagcggcaucaucaucagcgacacccccgugcacgacugcaacaccaccugccagaccagcaagggcgccaucaacaccagccugcccuuccagaacauccaccccaucaccaucggcaagugccccaaguacgugaagagcaccaagcugagacuggccaccggccugagaaacgugcccagcauccagagcagaggccuguucggcgccaucgccggcuucaucgagggcggcuggaccggcaugguggacggcugguacggcuaccaccaccagaacgagcagggcagcggcuacgccgccgaccugaagagcacccagaacgccaucgacgagaucaccaacaaggugaacagcgugaucgagaagaugaacacccaguucaccgccgugggcaaggaguucaaccaccuggagaagagaaucgagaaccugaacaagaagguggacgacggcuuccuggacaucuggaccuacaacgccgagcugcuggugcugcuggagaacgagagaacccuggacuaccacgacagcaacgugaagaaccuguacgagaaggugagaagccagcugaagaacaacgccaaggagaucggcaacggcugcuucgaguucuaccacaagugcgacaacaccugcauggagagcgugaagaacggcaccuacgacuaccccaaguacagcgaggaggccaagcugaacagagaggagaucgacggcgugaagcuggagagcaccagaaucuaccagauccuggccaucuacagcaccguggccagcagccuggugcugguggugagccugggcgccaucagcuucuggaugugcagcaacggcagccugcagugcagaaucugcaucuga

SEQ ID NO: 163870 - RNA, 1701 nt, Artificial Sequence; identical to SEQ ID NO: 162729
  derived and/or modified CDS sequence (opt4) from hemagglutinin__InfluenzaA__ACZ95867

SEQ ID NO: 163871 - RNA, 1701 nt, Artificial Sequence
  derived and/or modified CDS sequence (opt4) from hemagglutinin__InfluenzaA__ACZ95887
auggaggccauccugguggugcugcuguacaccuucgccaccgccaacgccgacacccugugcaucggcuaccacgccaacaacagcaccgacaccguggacaccgugcuggagaagaacgugaccgugacccacagcgugaaccugcuggaggacaagcacaacggcaagcugugcaagcugagaggcguggccccccugcaccugggcaagugcaacaucgccggcuggauccugggcaaccccgagugcgagagccugagcaccgccagcagcuggagcuacaucguggagaccagcagcagcgacaacggcaccugcuaccccggcgacuucaucgacuacgaggagcugagagagcagcugagcagcgugagcagcuucgagagauucgagaucuuccccaagaccagcagcuggcccaaccacgacagcaacaagggcgugaccgccgccugcccccacgccggcgccaagagcuucuacaagaaccugaucuggcuggugaagaagggcaacagcuaccccaagcugagcaagagcuacaucaacgacaagggcaaggaggugcuggugcuguggggcauccaccaccccagcaccagcgccgaccagcagagccuguaccagaacgccgacgccuacguguucgugggcagcagcagauacagcaagaaguucaagcccgagaucgccaucagacccaaggugagaaaccaggagggcagaaugaacuacuacuggacccugguggagcccggcgacaagaucaccuucgaggccaccggcaaccugguggugcccagauacgccuucgccauggagagaaacgccggcagcggcaucaucaucagcgacacccccgugcacgacugcaacaccaccugccagacccccaagggcgccaucaacaccagccugcccuuccacaacauccaccccaucaccaucggcaagugccccaaguacgugaagagcaccaagcugagacuggccaccggccugagaaacgugcccagcauccagagcagaggccuguucggcgccaucgccggcuucaucgagggcggcuggaccggcaugguggacggcugguacggcuaccaccaccagaacgagcagggcagcggcuacgccgccgaccugaagagcacccagaacgccaucgacgagaucaccaacaaggugaacagcgugaucgagaagaugaacacccaguucaccgccgugggcaaggaguucaaccaccuggagaagagaaucgagaaccugaacaagaagguggacgacggcuuccuggacaucuggaccuacaacgccgagcugcuggugcugcuggagaacgagagaacccuggacuaccacgacagcaacgugaagaaccuguacgagaaggugagaagccagcugaagaacaacgccaaggagaucggcaacggcugcuucgaguucuaccacaagugcgacaacaccugcauggagagcgugaagaacggcaccuacgacuaccccaaguacagcgaggaggccaagcugaacagagaggagaucgacggcgugaagcuggagagcaccagaaucuaccagauccuggccaucuacagcaccguggccagcagccuggugcugguggugagccugggcgccaucagcuucuggaugugcagcaacggcagccugcagugcagaaucugcaucuga

SEQ ID NO: 163872 - RNA, 1701 nt, Artificial Sequence; identical to SEQ ID NO: 162729
  derived and/or modified CDS sequence (opt4) from hemagglutinin__InfluenzaA__ACZ95897

SEQ ID NO: 163873 - RNA, 1701 nt, Artificial Sequence
  derived and/or modified CDS sequence (opt4) from hemagglutinin__InfluenzaA__ACZ95907
augaaggccauccugguggugcugcuguacaccuucgccaccgccaacgccgacacccugugcaucggcuaccacgccaacaacagcaccgacaccguggacaccgugcuggagaagaacgugaccgugacccacagcgugaaccugcuggaggacaagcacaacggcaagcugugcaagcugagaggcguggccccccugcaccugggcaagugcaacaucgccggcuggauccugggcaaccccgagugcgagagccugagcaccgccagcagcuggagcuacaucguggagaccagcagcagcgacaacggcaccugcuaccccggcgacuucaucgacuacgaggagcugagagagcagcugagcagcgugagcagcuucgagagauucgagaucuuccccaagaccagcagcuggcccaaccacgacagcaacaagggcgugaccgccgccugcccccacgccggcgccaagagcuucuacaagaaccugaucuggcuggugaagaagggcaacagcuaccccaagcugagcaagagcuacaucaacgacaagggcaaggaggugcuggugcuguggggcauccaccaccccagcaccagcgccgaccagcagagccuguaccagaacgccgacgccuacguguucgugggcaccagcagauacagcaagaaguucaagcccgagaucgccaucagacccaaggugagagaccaggagggcagaaugaacuacuacuggacccugguggagcccggcgacaagaucaccuucgaggccaccggcaaccugguggugcccagauacgccuucgccauggagagaaacgccggcagcggcaucaucaucagcgacacccccguguacgacugcaacaccaccugccagacccccaagggcgccaucaacaccagccugcccuuccagaacauccaccccaucaccaucggcaagugccccaaguacgugaagagcaccaagcugagacuggccaccggccugagaaacgugcccagcauccagagcagaggccuguucggcgccaucgccggcuucaucgagggcggcuggaccggcaugguggacggcugguacggcuaccaccaccagaacgagcagggcagcggcuacgccgccgaccugaagagcacccagaacgccaucgacgagaucaccaacaaggugaacagcgugaucgagaagaugaacacccaguucaccgccgugggcaaggaguucaaccaccuggagaagagaaucgagaaccugaacaagaagguggacgacggcuuccuggacaucuggaccuacaacgccgagcugcuggugcugcuggagaacgagagaacccuggacuaccacgacagcaacgugaagaaccuguacgagaaggugagaagccagcugaagaacaacgccaaggagaucggcaacggcugcuucgaguucuaccacaagugcgacaacaccugcauggagagcgugaagaacggcaccuacgacuaccccaaguacagcgaggaggccaagcugaacagagaggagaucgacggcgugaagcuggagagcaccagaaucuaccagauccuggccaucuacagcaccguggccagcagccuggugcugguggugagccugggcgccaucagcuucuggaugugcagcaacggcagccugcagugcagaaucugcaucuga

SEQ ID NO: 163874 - RNA, 1701 nt, Artificial Sequence; identical to SEQ ID NO: 162729
  derived and/or modified CDS sequence (opt4) from hemagglutinin__InfluenzaA__ACZ95927

SEQ ID NO: 163875 - RNA, 1701 nt, Artificial Sequence
  derived and/or modified CDS sequence (opt4) from hemagglutinin__InfluenzaA__ACZ95937
auggaggccauccugguggugcugcuguacaccuucgccaccgccaacgccgacacccugugcaucggcuaccacgccaacaacagcaccgacaccguggacaccgugcuggagaagaacgugaccgugacccacagcgugaaccugcuggaggacaagcacaacggcaagcugugcaagcugagaggcguggccccccugcaccugggcaagugcaacaucgccggcuggauccugggcaaccccgagugcgagagccugagcaccgccagcagcuggagcuacaucguggagaccagcagcagcgacaacggcaccugcuaccccggcgacuucaucgacuacgaggagcugagagagcagcugagcagcgugagcagcuucgagagauucgagaucuuccccaagaccagcagcuggcccaaccacgacagcaacaagggcgugaccgccgccugcccccacgccggcgccaagagcuucuacaagaaccugaucuggcuggugaagaagggcaacagcuaccccaagcugagcaagagcuacaucaacgacaagggcaaggaggugcuggugcuguggggcauccaccaccccagcaccaacgccgaccagcagagccuguaccagaacgccgacgccuacguguucgugggcagcagcagauacagcaagaaguucaagcccgagaucgccaucagacccaaggugagagaccaggagggcagaaugaacuacuacuggacccugguggagcccggcgacaagaucaccuucgaggccaccggcaaccugguggugcccagauacgccuucgccauggagagaaacgccggcagcggcaucaucaucagcgacacccccgugcacgacugcaacaccaccugccagacccccaagggcgccaucaacaccagccugcccuuccacaacauccaccccaucaccaucggcaagugccccaaguacgugaagagcaccaagcugagacuggccaccggccugagaaacgugcccagcauccagagcagaggccuguucggcgccaucgccggcuucaucgagggcggcuggaccggcaugguggacggcugguacggcuaccaccaccagaacgagcagggcagcggcuacgccgccgaccugaagagcacccagaacgccaucgacgagaucaccaacaaggugaacagcgugaucgagaagaugaacacccaguucaccgccgugggcaaggaguucaaccaccuggagaagagaaucgagaaccugaacaagaagguggacgacggcuuccuggacaucuggaccuacaacgccgagcugcuggugcugcuggagaacgagagaacccuggacuaccacgacagcaacgugaagaaccuguacgagaaggugagaagccagcugaagaacaacgccaaggagaucggcaacggcugcuucgaguucuaccacaagugcgacaacaccugcauggagagcgugaagaacggcaccuacgacuaccccaaguacagcgaggaggccaagcugaacagagaggagaucgacggcgugaagcuggagagcaccagaaucuaccagauccuggccaucuacagcaccguggccagcagccuggugcugguggugagccugggcgccaucagcuucuggaugugcagcaacggcagccugcagugcagaaucugcaucuga

SEQ ID NO: 163876 - RNA, 1701 nt, Artificial Sequence; identical to SEQ ID NO: 162971
  derived and/or modified CDS sequence (opt4) from hemagglutinin__InfluenzaA__ACZ95947

SEQ ID NO: 163877 - RNA, 1701 nt, Artificial Sequence; identical to SEQ ID NO: 162729
  derived and/or modified CDS sequence (opt4) from hemagglutinin__InfluenzaA__ACZ95957

SEQ ID NO: 163878 - RNA, 1701 nt, Artificial Sequence; identical to SEQ ID NO: 162971
  derived and/or modified CDS sequence (opt4) from hemagglutinin__InfluenzaA__ACZ95967

SEQ ID NO: 163879 - RNA, 1701 nt, Artificial Sequence; identical to SEQ ID NO: 163875
  derived and/or modified CDS sequence (opt4) from hemagglutinin__InfluenzaA__ACZ95977

SEQ ID NO: 163880 - RNA, 1701 nt, Artificial Sequence
  derived and/or modified CDS sequence (opt4) from hemagglutinin__InfluenzaA__ACZ95987
augaaggccauccugguggugcugcuguacaccuucgccaccgccaacgccgacacccugugcaucggcuaccacgccaacaacagcaccgacaccguggacaccgugcuggagaagaacgugaccgugacccacagcgugaaccugcuggaggacaagcacaacggcaagcugugcaagcugagaggcguggccccccugcaccugggcaagugcaacaucgccggcuggauccugggcaaccccgagugcgagagccugagcaccgccagcagcuggagcuacaucguggagaccagcagcagcgacaacggcaccugcuaccccggcgacuucaucgacuacgaggagcugagagagcagcugagcagcgugagcagcuucgagagauucgagaucuuccccaagaccagcagcuggcccaaccacgacagcaacaagggcgugaccgccgccugcccccacgccggcgccaagagcuucuacaagaaccugaucuggcuggugaagaagggcaacagcuaccccaagcugagcaagagcuacaucaacgacaagggcaaggaggugcuggugcuguggggcauccaccaccccagcaccagcgccgaccagcagagccuguaccagaacgccgacgccuacguguucgugggcaccagcagauacagcaagaaguucaagcccgagaucgccaucagacccaaggugagagaccaggagggcagaaugaacuacuacuggacccugguggagcccggcgacaagaucaccuucgaggccaccggcaaccugguggugcccagauacgccuucgccauggagagaaacgccggcagcggcaucaucaucagcgacacccccgugcacgacugcaacaccaccugccagacccccaagggcgccaucaacaccagccugcccuuccagaacauccaccccaucaccaucggcaagugccccaaguacgugaagagcaccaagcugagacuggccaccggccugagaaacauccccagcauccagagcagaggccuguucggcgccaucgccggcuucaucgagggcggcuggaccggcaugaucgacggcugguacggcuaccaccaccagaacgagcagggcagcggcuacgccgccgaccugaagagcacccagaacgccaucgacgagaucaccaacaaggugaacagcgugaucgagaagaugaacacccaguucaccgccgugggcaaggaguucaaccaccuggagaagagaaucgagaaccugaacaagaagguggacgacggcuuccuggacaucuggaccuacaacgccgagcugcuggugcugcuggagaacgagagaacccuggacuaccacgacagcaacgugaagaaccuguacgagaaggugagaagccagcugaagaacaacgccaaggagaucggcaacggcugcuucgaguucuaccacaagugcgacaacaccugcauggagagcgugaagaacggcaccuacgacuaccccaaguacagcgaggaggccaagcugaacagagaggagaucgacggcgugaagcuggagagcaccagaaucuaccagauccuggccaucuacagcaccguggccagcagccuggugcugguggugagccugggcgccaucagcuucuggaugugcagcaacggcagccugcagugcagaaucugcaucuga

SEQ ID NO: 163881 - RNA, 1701 nt, Artificial Sequence; identical to SEQ ID NO: 162729
  derived and/or modified CDS sequence (opt4) from hemagglutinin__InfluenzaA__ACZ95997

SEQ ID NO: 163882 - RNA, 1701 nt, Artificial Sequence; identical to SEQ ID NO: 162729
  derived and/or modified CDS sequence (opt4) from hemagglutinin__InfluenzaA__ACZ96007

SEQ ID NO: 163883 - RNA, 1701 nt, Artificial Sequence; identical to SEQ ID NO: 162716
  derived and/or modified CDS sequence (opt4) from hemagglutinin__InfluenzaA__ACZ96017

SEQ ID NO: 163884 - RNA, 1701 nt, Artificial Sequence; identical to SEQ ID NO: 162729
  derived and/or modified CDS sequence (opt4) from hemagglutinin__InfluenzaA__ACZ96027

SEQ ID NO: 163885 - RNA, 1701 nt, Artificial Sequence; identical to SEQ ID NO: 163875
  derived and/or modified CDS sequence (opt4) from hemagglutinin__InfluenzaA__ACZ96047

SEQ ID NO: 163886 - RNA, 1701 nt, Artificial Sequence
  derived and/or modified CDS sequence (opt4) from hemagglutinin__InfluenzaA__ACZ96057
augaaggccauccugguggugcugcuguacaccuucgccaccgccaacgccgacacccugugcaucggcuaccacgccaacaacagcaccgacaccguggacaccgugcuggagaagaacgugaccgugacccacagcgugaaccugcuggaggacaagcacaacggcaagcugugcaagcugagaggcguggccccccugcaccugggcaagugcaacaucgccggcuggauccugggcaaccccgagugcgagagccugagcaccgccagcagcuggagcuacaucguggagaccagcagcagcgacaacggcaccugcuaccccggcgacuucaucgacuacgaggagcugagagagcagcugagcagcgugagcagcuucgagagauucgagaucuuccccaagaccagcagcuggcccaaccacgacagcaacaagggcgugaccgccgccugccugcacgccggcgccaagagcuucuacaagaaccugaucuggcuggugaagaagggcaacagcuaccccaagcugagcaagagcuacaucaacgacaagggcaaggaggugcuggugcuguggggcauccaccaccccagcaccagcgccgaccagcagagccuguaccagaacgccgacgccuacguguucgugggcaccagcagauacagcaagaaguucaagcccgagaucgccaucagacccaaggugagagaccaggagggcagaaugaacuacuacuggacccugguggagcccggcgacaagaucaccuucgaggccaccggcaaccugguggugcccagauacgccuucgccauggagagaaacgccggcagcggcaucaucaucagcgacacccccgugcacgacugcaacaccaccugccagacccccaagggcgccaucaacaccagccugcccuuccagaacauccaccccaucaccaucggcaagugccccaaguacgugaagagcaccaagcugagacuggccaccggccugagaaacauccccagcauccagagcagaggccuguucggcgccaucgccggcuucaucgagggcggcuggaccggcaugguggacggcugguacggcuaccaccaccagaacgagcagggcagcggcuacgccgccgaccugaagagcacccagaacgccaucgacgagaucaccaacaaggugaacagcgugaucgagaagaugaacacccaguucaccgccgugggcaaggaguucaaccaccuggagaagagaaucgagaaccugaacaagaagguggacgacggcuuccuggacaucuggaccuacaacgccgagcugcuggugcugcuggagaacgagagaacccuggacuaccacgacagcaacgugaagaaccuguacgagaaggugagaagccagcugaagaacaacgccaaggagaucggcaacggcugcuucgaguucuaccacaagugcgacaacaccugcauggagagcgugaagaacggcaccuacgacuaccccaaguacagcgaggaggccaagcugaacagagaggagaucgacggcgugaagcuggagagcaccagaaucuaccagauccuggccaucuacagcaccguggccagcagccuggugcugguggugagccugggcgccaucagcuucuggaugugcagcaacggcagccugcagugcagaaucugcaucuga

SEQ ID NO: 163887 - RNA, 1701 nt, Artificial Sequence
  derived and/or modified CDS sequence (opt4) from hemagglutinin__InfluenzaA__ACZ96069
augaaggccauccugguggugcugcuguacaccuucgccaccgccaacgccgacacccugugcaucggcuaccacgccaacaacagcaccgacaccguggacaccgugcuggagaagaacgugaccgugacccacagcgugaaccugcuggaggacaagcacaacggcaagcugugcaagcugagaggcguggccccccugcaccugggcaagugcaacaucgccggcuggauccugggcaaccccgagugcgagagccugagcaccgccagcagcuggagcuacaucguggagaccagcagcagcgacaacggcaccugcuaccccggcgacuucaucgacuacgaggagcugagagagcagcugagcagcgugagcagcuucgagagauucgagaucuuccccaagaccagcagcuggcccaaccacgacagcaacaagggcgugaccgccgccugcccccacgccggcgccaagagcuucuacaagaaccugaucuggcuggugaagaagggcaacagcuaccccaagcugagcaagagcuacaucaacgacaagggcaaggaggugcuggugcuguggggcauccaccaccccagcaccagcgccgaccagcagagccuguaccagaacgccgacgccuacguguucgugggcaccagcagauacagcaagaaguucaagcccgagaucgccaucagacccaaggugagagaccaggagggcagaaugaacuacuacuggacccugguggagcccggcaacaagaucaccuucgaggccaccggcaaccugguggugcccagauacgccuucgccauggagagaaacgccggcagcggcaucaucaucagcgacacccccgugcacgacugcaacaccaccugccagacccccaagggcgccaucaacaccagccugcccuuccagaacauccaccccaucaccaucggcaagugccccaaguacgugaagagcaccaagcugagacuggccaccggccugagaaacgugcccagcauccagagcagaggccuguucggcgccaucgccggcuucaucgagggcggcuggaccggcaugguggacggcugguacggcuaccaccaccagaacgagcagggcagcggcuacgccgccgaccugaagagcacccagaacgccaucgacgagaucaccaacaaggugaacagcgugaucgagaagaugaacacccaguucaccgccgugggcaaggaguucaaccaccuggagaagagaaucgagaaccugaacaagaagguggacgacggcuuccuggacaucuggaccuacaacgccgagcugcuggugcugcuggagaacgagagaacccuggacuaccacgacagcaacgugaagaaccuguacgagaaggugagaagccagcugaagaacaacgccaaggagaucggcaacggcugcuucgaguucuaccacaagugcgacaacaccugcauggagagcgugaagaacggcaccuacgacuaccccaaguacagcgaggaggccaagcugaacagagaggagaucgacggcgugaagcuggagagcaccagaaucuaccagauccuggccaucuacagcaccguggccagcagccuggugcugguggugagccugggcgccaucagcuucuggaugugcagcaacggcagccugcagugcagaaucugcaucuga

SEQ ID NO: 163888 - RNA, 1701 nt, Artificial Sequence; identical to SEQ ID NO: 163875
  derived and/or modified CDS sequence (opt4) from hemagglutinin__InfluenzaA__ACZ96089

SEQ ID NO: 163889 - RNA, 1701 nt, Artificial Sequence
  derived and/or modified CDS sequence (opt4) from hemagglutinin__InfluenzaA__ACZ96119
augaaggccauccugguggugcugcuguacaccuucgccaccgccaacgccgacacccugugcaucggcuaccacgccaacaacagcaccgacaccguggacaccgugcuggagaagaacgugaccgugacccacagcgugaaccugcuggaggacaagcacaacggcaagcugugcaagcugagaggcguggccccccugcaccugggcaagugcaacaucgccggcuggauccugggcaaccccgagugcgagagccugagcaccgccagcagcuggagcuacaucguggagaccagcagcagcgacaacggcaccugcuaccccggcgacuucaucgacuacgaggagcugagagagcagcugagcagcgugagcagcuucgagagauucgagauguuccccaagaccagcagcuggcccaaccacgacagcaacaagggcgugaccgccgccugcccccacgccggcgccaagagcuucuacaagaaccugaucuggcuggugaagaagggcaacagcuaccccaagcugagcaagagcuacaucaacgacaagggcaaggaggugcuggugcuguggggcauccaccaccccagcaccagcgccgaccagcagagccuguaccagaacgccgacgccuacguguucgugggcaccagcagauacagcaagaaguucaagcccgagaucgccaucagacccaaggugagagaccaggagggcagaaugaacuacuacuggacccugguggagcccggcgacaagaucaccuucgaggccaccggcaaccugguggugcccagauacgccuucgccauggagagaaacgccggcagcggcaucaucaucagcgacacccccgugcacgacugcaacaccaccugccagacccccaagggcgccaucaacaccagccugcccuuccagaacauccaccccaucaccaucggcaagugccccaaguacgugaagagcaccaagcugagacuggccaccggccugagaaacgugcccagcauccagagcagaggccuguucggcgccaucgccggcuucaucgagggcggcuggaccggcaugguggacggcugguacggcuaccaccaccagaacgagcagggcagcggcuacgccgccgaccugaagagcacccagaacgccaucgacgagaucaccaacaaggugaacagcgugaucgagaagaugaacacccaguucaccgccgugggcaaggaguucaaccaccuggagaagagaaucgagaaccugaacaagaagguggacgacggcuuccuggacaucuggaccuacaacgccgagcugcuggugcugcuggagaacgagagaacccuggacuaccacgacagcaacgugaagaaccuguacgagaaggugagaagccagcugaagaacaacgccaaggagaucggcaacggcugcuucgaguucuaccacaagugcgacaacaccugcauggagagcgugaagaacggcaccuacgacuaccccaaguacagcgaggaggccaagcugaacagagaggagaucgacggcgugaagcuggagagcaccagaaucuaccagauccuggccaucuacagcaccguggccagcagccuggugcugguggugagccugggcgccaucagcuucuggaugugcagcaacggcagccugcagugcagaaucugcaucuga

SEQ ID NO: 163890 - RNA, 1701 nt, Artificial Sequence
  derived and/or modified CDS sequence (opt4) from hemagglutinin__InfluenzaA__ACZ96129
augaaggccauccugguggugcugcuguacaccuucgccaccgccaacgccgacacccugugcaucggcuaccacgccaacaacagcaccgacaccguggacaccgugcuggagaagaacgugaccgugacccacagcgugaaccugcuggaggacaagcacaacggcaagcugugcaagcugagaggcguggccccccugcaccugggcaagugcaacaucgccggcuggauccugggcaaccccgagugcgagagccugagcaccgccagcagcuggagcuacaucguggagaccagcagcagcgacaacggcaccugcuaccccggcgaguucaucgacuacgaggagcugagagagcagcugagcagcgugagcagcuucgagagauucgagaucuuccccaagaccagcagcuggcccaaccacgacagcaacaagggcgugaccgccgccugcccccacgccggcgccaagagcuucuacaagaaccugaucuggcuggugaagaagggcaacagcuaccccaagcugagcaagagcuacaucaacgacaagggcaaggaggugcuggugcuguggggcauccaccaccccagcaccagcgccgaccagcagagccuguaccagaacgccgacgccuacguguucgugggcaccagcagauacagcaagaaguucaagcccgagaucgccaucagacccaaggugagagaccaggagggcagaaugaacuacuacuggacccugguggagcccggcgacaagaucaccuucgaggccaccggcaaccugguggugcccagauacgccuucgccauggagagaaacgccggcagcggcaucaucaucagcgacacccccgugcacgacugcaacaccaccugccagacccccaagggcgccaucaacaccagccugcccuuccagaacauccaccccaucaccaucggcaagugccccaaguacgugaagagcaccaagcugagacuggccaccggccugagaaacgugcccagcauccagagcagaggccuguucggcgccaucgccggcuucaucgagggcggcuggaccggcaugguggacggcugguacggcuaccaccaccagaacgagcagggcagcggcuacgccgccgaccugaagagcacccagaacgccaucgacgagaucaccaacaaggugaacagcgugaucgagaagaugaacacccaguucaccgccgugggcaaggaguucaaccaccuggagaagagaaucgagaaccugaacaagaagguggacgacggcuuccuggacaucuggaccuacaacgccgagcugcuggugcugcuggagaacgagagaacccuggacuaccacgacagcaacgugaagaaccuguacgagaaggugagaagccagcugaagaacaacgccaaggagaucggcaacggcugcuucgaguucuaccacaagugcgacaacaccugcauggagagcgugaagaacggcaccuacgacuaccccaaguacagcgaggaggccaagcugaacagagaggagaucgacggcgugaagcuggagagcaccagaaucuaccagauccuggccaucuacagcaccguggccagcagccuggugcugguggugagccugggcgccaucagcuucuggaugugcagcaacggcagccugcagugcagaaucugcaucuga

SEQ ID NO: 163891 - RNA, 1701 nt, Artificial Sequence; identical to SEQ ID NO: 162729
  derived and/or modified CDS sequence (opt4) from hemagglutinin__InfluenzaA__ACZ96149

SEQ ID NO: 163892 - RNA, 1701 nt, Artificial Sequence; identical to SEQ ID NO: 162729
  derived and/or modified CDS sequence (opt4) from hemagglutinin__InfluenzaA__ACZ96159

SEQ ID NO: 163893 - RNA, 1701 nt, Artificial Sequence
  derived and/or modified CDS sequence (opt4) from hemagglutinin__InfluenzaA__ACZ96179
augaaggccauccugguggugcugcuguacaccuucgccaccgccaacgccgacacccugugcaucggcuaccacgccaacaacagcaccgacaccguggacaccgugcuggagaagaacgugaccgugacccacagcgugaaccugcuggaggacaagcacaacggcaagcugugcaagcugagaggcguggccccccugcaccugggcaagugcaacaucgccggcuggauccugggcaaccccgagugcgagagccugagcaccgccagcagcuggagcuacaucguggagaccagcagcagcgacaacggcaccugcuaccccggcgacuucaucgacuacgaggagcugagagagcagcugagcagcgugagcagcuucgagagauucgagaucuuccccaagaccagcagcuggcccaaccacgacagcaacaagggcgugaccgccgccugcccccacgccggcgccaagagcuucuacaagaaccugaucuggcuggugaagaagggcaacagcuaccccaagcugagcaagagcuacaucaacgacaagggcaaggaggugcuggugcuguggggcauccaccaccccagcaccagcgccgaccagcagagccuguaccagaacgccgacgccuacguguucgugggcaccagcagauacagcaagaaguucaagcccgagaucgccaucagacccaaggugagagaccaggagggcagaaugaacuacuacuggacccugguggagcccggcgacaagaucaccuucgaggccaccggcaaccugguggugcccagauacgccuucgccauggagagaaacgccggcagcggcaucaucaucagcgacacccccgugcacgacugcaacaccaccugccagacccccaagggcgccaucaacaccagccugcccuuccagaacauccaccccaucaccaucggcaagugccccaaguacgugaagagcaccaagcugagacuggccaccggccugagaaacgugcccagcauccagagcagaggccuguucggcgccaucgccggcuucaucgagggcggcuggaccggcaugguggacggcugguacggcuaccaccaccagaacgagcagggcagcggcuacgccgccgaccugaagagcacccagaacgccaucgacaagaucaccaacaaggugaacagcgugaucgagaagaugaacacccaguucaccgccgugggcaaggaguucaaccaccuggagaagagaaucgagaaccugaacaagaagguggacgacggcuuccuggacaucuggaccuacaacgccgagcugcuggugcugcuggagaacgagagaacccuggacuaccacgacagcaacgugaagaaccuguacgagaaggugagaagccagcugaagaacaacgccaaggagaucggcaacggcugcuucgaguucuaccacaagugcgacaacaccugcauggagagcgugaagaacggcaccuacgacuaccccaaguacagcgaggaggccaagcugaacagagaggagaucgacggcgugaagcuggagagcaccagaaucuaccagauccuggccaucuacagcaccguggccagcagccuggugcugguggugagccugggcgccaucagcuucuggaugugcagcaacggcagccugcagugcagaaucugcaucuga

SEQ ID NO: 163894 - RNA, 1701 nt, Artificial Sequence; identical to SEQ ID NO: 163886
  derived and/or modified CDS sequence (opt4) from hemagglutinin__InfluenzaA__ACZ96189

SEQ ID NO: 163895 - RNA, 1701 nt, Artificial Sequence; identical to SEQ ID NO: 163893
  derived and/or modified CDS sequence (opt4) from hemagglutinin__InfluenzaA__ACZ96199

SEQ ID NO: 163896 - RNA, 1701 nt, Artificial Sequence; identical to SEQ ID NO: 162729
  derived and/or modified CDS sequence (opt4) from hemagglutinin__InfluenzaA__ACZ96209

SEQ ID NO: 163897 - RNA, 1701 nt, Artificial Sequence
  derived and/or modified CDS sequence (opt4) from hemagglutinin__InfluenzaA__ACZ96219
augaaggccauccugguggugcugcuguacaccuucgccaccgccaacgccgacacccugugcaucggcuaccacgccaacaacagcaccgacaccguggacaccgugcuggagaagaacgugaccgugacccacagcgugaaccugcuggaggacaagcacaacggcaagcugugcaagcugagaggcguggccccccugcaccugggcaagugcaacaucgccggcuggauccugggcaaccccgagugcgagagccugagcaccgccagcagcuggagcuacaucguggagaccagcagcagcgacaacggcaccugcuaccccggcgacuucaucgacuacgaggagcugagagagcagcugagcagcgugagcagcuucgagagauucgagaucuuccccaagaccagcagcuggcccaaccacgacagcaacaagggcgugaccgccgccugcccccacgccggcgccaagagcuucuacaagaaccugaucuggcuggugaagaagggcaacagcuaccccaagcugagcaagagcuacaucaacgacaagggcaaggaggugcuggugcuguggggcauccaccaccccagcaccagcgccgaccagcagagccuguaccagaacgccgacgccuacguguucgugggcaccagcagauacagcaagaaguucaagcccgagaucgccaucagacccaaggugagagaccaggagggcagaaugaacuacuacuggacccugguggagcccggcgacaagaucaaguucgaggccaccggcaaccugguggugcccagauacgccuucgccauggagagaaacgccggcagcggcaucaucaucagcgacacccccgugcacgacugcaacaccaccugccagaccagcaagggcgccaucaacaccagccugcccuuccagaacauccaccccaucaccaucggcaagugccccaaguacgugaagagcaccaagcugagacuggccaccggccugagaaacgugcccagcauccagagcagaggccuguucggcgccaucgccggcuucaucgagggcggcuggaccggcaugguggacggcugguacggcuaccaccaccagaacgagcagggcagcggcuacgccgccgaccugaagagcacccagaacgccaucgacgagaucaccaacaaggugaacagcgugaucgagaagaugaacacccaguucaccgccgugggcaaggaguucaaccaccuggagaagagaaucgagaaccugaacaagaagguggacgacggcuuccuggacaucuggaccuacaacgccgagcugcuggugcugcuggagaacgagagaacccuggacuaccacgacagcaacgugaagaaccuguacgagaaggugagaagccagcugaagaacaacgccaaggagaucggcaacggcugcuucgaguucuaccacaagugcgacaacaccugcauggagagcgugaagaacggcaccuacgacuaccccaaguacagcgaggaggccaagcugaacagagaggagaucgccggcgugaagcuggagagcaccagaaucuaccagauccuggccaucuacagcaccguggccagcagccuggugcugguggugagccugggcgccaucagcuucuggaugugcagcaacggcagccugcagugcagaaucugcaucuga

SEQ ID NO: 163898 - RNA, 1701 nt, Artificial Sequence; identical to SEQ ID NO: 162729
  derived and/or modified CDS sequence (opt4) from hemagglutinin__InfluenzaA__ACZ96229

SEQ ID NO: 163899 - RNA, 1701 nt, Artificial Sequence; identical to SEQ ID NO: 163893
  derived and/or modified CDS sequence (opt4) from hemagglutinin__InfluenzaA__ACZ96239

SEQ ID NO: 163900 - RNA, 1701 nt, Artificial Sequence; identical to SEQ ID NO: 162729
  derived and/or modified CDS sequence (opt4) from hemagglutinin__InfluenzaA__ACZ96249

SEQ ID NO: 163901 - RNA, 1701 nt, Artificial Sequence
  derived and/or modified CDS sequence (opt4) from hemagglutinin__InfluenzaA__ACZ96269
augaaggccauccugguggugcugcuguacaccuucgccaccgccaacgccgacacccugugcaucggcuaccacgccaacaacagcaccgacaccguggacaccgugcuggagagaaacgugaccgugacccacagcgugaaccugcuggaggacaagcacaacggcaagcugugcaagcugagaggcguggccccccugcaccugggcaagugcaacaucgccggcuggauccugggcaaccccgagugcgagagccugagcaccgccagcagcuggagcuacaucguggagaccagcagcagcgacaacggcaccugcuaccccggcgacuucaucgacuacgaggagcugagagagcagcugagcagcgugagcagcuucgagagauucgagaucuuccccaagaccagcagcuggcccaaccacgacagcaacaagggcgugaccgccgccugcccccacgccggcgccaagagcuucuacaagaaccugaucuggcuggugaagaagggcaacagcuaccccaagcugagcaagagcuacaucaacgacaagggcaaggaggugcuggugcuguggggcauccaccaccccagcaccagcgccgaccagcagagccuguaccagaacgccgacgccuacguguucgugggcaccagcagauacagcaagaaguucaagcccgagaucgccaucagacccaaggugagagaccaggagggcagaaugaacuacuacuggacccugguggagcccggcgacaagaucaccuucgaggccaccggcaaccugguggugcccagauacgccuucgccauggagagaaacgccggcagcggcaucaucaucagcgacacccccgugcacgacugcaacaccaccugccagacccccaagggcgccaucaacaccagccugcccuuccagaacauccaccccaucaccaucggcaagugccccaaguacgugaagagcaccaagcugagacuggccaccggccugagaaacgugcccagcauccagagcagaggccuguucggcgccaucgccggcuucaucgagggcggcuggaccggcaugguggacggcugguacggcuaccaccaccagaacgagcagggcagcggcuacgccgccgaccugaagagcacccagaacgccaucgacgagaucaccaacaaggugaacagcgugaucgagaagaugaacacccaguucaccgccgugggcaaggaguucaaccaccuggagaagagaaucgagaaccugaacaagaagguggacgacggcuuccuggacaucuggaccuacaacgccgagcugcuggugcugcuggagaacgagagaacccuggacuaccacgacagcaacgugaagaaccuguacgagaaggugagaagccagcugaagaacaacgccaaggagaucggcaacggcugcuucgaguucuaccacaagugcgacaacaccugcauggagagcgugaagaacggcaccuacgacuaccccaaguacagcgaggaggccaagcugaacagagaggagaucgacggcgugaagcuggagagcaccagaaucuaccagauccuggccaucuacagcaccguggccagcagccuggugcugguggugagccugggcgccaucagcuucuggaugugcagcaacggcagccugcagugcagaaucugcaucuga

SEQ ID NO: 163902 - RNA, 1701 nt, Artificial Sequence; identical to SEQ ID NO: 162729
  derived and/or modified CDS sequence (opt4) from hemagglutinin__InfluenzaA__ACZ96299

SEQ ID NO: 163903 - RNA, 1701 nt, Artificial Sequence; identical to SEQ ID NO: 162729
  derived and/or modified CDS sequence (opt4) from hemagglutinin__InfluenzaA__ACZ96309

SEQ ID NO: 163904 - RNA, 1701 nt, Artificial Sequence
  derived and/or modified CDS sequence (opt4) from hemagglutinin__InfluenzaA__ACZ96319
augaaggccauccugguggugcugcuguacaccuucgccaccgccaacgccgacacccugugcaucggcuaccacgccaacaacagcaccgacaccguggacaccgugcuggagaagaacgugaccgugacccacagcgugaaccugcuggaggacaagcacaacggcaagcugugcaagcugagaggcguggccccccugcaccugggcaucugcaacaucgccggcuggauccugggcaaccccgagugcgagagccugagcaccgccagcagcuggagcuacaucguggagaccagcagcagcgacaacggcaccugcuaccccggcgacuucaucgacuacgaggagcugagagagcagcugagcagcgugagcagcuucgagagauucgagaucuuccccaagaccagcagcuggcccaaccacgacagcaacaagggcgugaccgccgccugcccccacgccggcgccaagagcuucuacaagaaccugaucuggcuggugaagaagggcaacagcuaccccaagcugagcaagagcuacaucaacgacaagggcaaggaggugcuggugcuguggggcauccaccaccccagcaccagcgccgaccagcagagccuguaccagaacgccgacgccuacguguucgugggcaccagcagauacagcaagaaguucaagcccgagaucgccaucagacccaaggugagagaccaggagggcagaaugaacuacuacuggacccugguggagcccggcgacaagaucaccuucgaggccaccggcaaccugguggugcccagauacgccuucgccauggagagaaacgccggcagcggcaucaucaucagcgacacccccgugcacgacugcaacaccaccugccagacccccaagggcgccaucaacaccagccugcccuuccagaacauccaccccaucaccaucggcaagugccccaaguacgugaagagcaccaagcugagacuggccaccggccugagaaacgugcccagcauccagagcagaggccuguucggcgccaucgccggcuucaucgagggcggcuggaccggcaugguggacggcugguacggcuaccaccaccagaacgagcagggcagcggcuacgccgccgaccugaagagcacccagaacgccaucgacgagaucaccaacaaggugaacagcgugaucgagaagaugaacacccaguucaccgccgugggcaaggaguucaaccaccuggagaagagaaucgagaaccugaacaagaagguggacgacggcuuccuggacaucuggaccuacaacgccgagcugcuggugcugcuggagaacgagagaacccuggacuaccacgacagcaacgugaagaaccuguacgagaaggugagaagccagcugaagaacaacgccaaggagaucggcaacggcugcuucgaguucuaccacaagugcgacaacaccugcauggagagcgugaagaacggcaccuacgacuaccccaaguacagcgaggaggccaagcugaacagagaggagaucgacggcgugaagcuggagagcaccagaaucuaccagauccuggccaucuacagcaccguggccagcagccuggugcugguggugagccugggcgccaucagcuucuggaugugcagcaacggcagccugcagugcagaaucugcaucuga

SEQ ID NO: 163905 - RNA, 1701 nt, Artificial Sequence; identical to SEQ ID NO: 163904
  derived and/or modified CDS sequence (opt4) from hemagglutinin__InfluenzaA__ACZ96329

SEQ ID NO: 163906 - RNA, 1701 nt, Artificial Sequence
  derived and/or modified CDS sequence (opt4) from hemagglutinin__InfluenzaA__ACZ96339
augaaggccauccugguggugcugcuguacaccuucgccaccgccaacgccgacacccugugcaucggcuaccacgccaacaacagcaccgacaccguggacaccgugcuggagaagaacgugaccgugacccacagcgugaaccugcuggaggacaagcacaacggcaagcugugcaagcugagaggcguggccccccugcaccugggcaagugcaacaucgccggcuggauccugggcaaccccgagugcgagagccugagcaccgccagcagcuggagcuacaucguggagaccagcagcagcgacaacggcaccugcuaccccggcgacuucaucgacuacgaggagcugagagagcagcugagcagcgugagcagcuucgagagauucgagaucuuccccaagaccagcagcuggcccaaccacgacagcaacaagggcgugaccgccgccugcccccacgccggcgccaagagcuucuacaagaaccugaucuggcuggugaagaagggcaacagcuaccccaagcugagcaagagcuacaucaacgacaagggcaaggaggugcuggugcuguggggcauccaccaccccagcaccagcgccgaccagcagagccuguaccagaacgccgacagcuacguguucgugggcaccagcagauacagcaagaaguucaagcccgagaucgccaucagacccaaggugagagaccaggagggcagaaugaacuacuacuggacccugguggagcccggcgacaagaucaccuucgaggccaccggcaaccugguggugcccagauacgccuucgccauggagagaaacgccggcagcggcaucaucaucagcgacacccccgugcacgacugcaacaccaccugccagacccccgagggcgccaucaacaccagccugcccuuccagaacauccaccccaucaccaucggcaagugccccaaguacgugaagagcaccaagcugagacuggccaccggccugagaaacgugcccagcauccagagcagaggccuguucggcgccaucgccggcuucaucgagggcggcuggaccggcaugguggacggcugguacggcuaccaccaccagaacgagcagggcagcggcuacgccgccgaccugaagagcacccagaacgccaucgacgagaucaccaacaaggugaacagcgugaucaagaagaugaacacccaguucaccgccgugggcaaggaguucaaccaccuggagaagagaaucgagaaccugaacaagaagguggacgacggcuuccuggacaucuggaccuacaacgccgagcugcuggugcugcuggagaacgagagaacccuggacuaccacgacagcaacgugaagaaccuguacgagaaggugagaagccagcugaagaacaacgccaaggagaucggcaacggcugcuucgaguucuaccacaagugcgacaacaccugcauggagagcgugaagaacggcaccuacgacuaccccaaguacagcgaggaggccaagcugaacagagaggagaucgacggcgugaagcuggagagcaccagaaucuaccagauccuggccaucuacagcaccguggccagcagccuggugcugguggugagccugggcgccaucagcuucuggaugugcagcaacggcagccugcagugcagaaucugcaucuga

SEQ ID NO: 163907 - RNA, 1701 nt, Artificial Sequence; identical to SEQ ID NO: 162729
  derived and/or modified CDS sequence (opt4) from hemagglutinin__InfluenzaA__ACZ96349

SEQ ID NO: 163908 - RNA, 1701 nt, Artificial Sequence; identical to SEQ ID NO: 163904
  derived and/or modified CDS sequence (opt4) from hemagglutinin__InfluenzaA__ACZ96359

SEQ ID NO: 163909 - RNA, 1701 nt, Artificial Sequence; identical to SEQ ID NO: 162729
  derived and/or modified CDS sequence (opt4) from hemagglutinin__InfluenzaA__ACZ96372

SEQ ID NO: 163910 - RNA, 1701 nt, Artificial Sequence; identical to SEQ ID NO: 163904
  derived and/or modified CDS sequence (opt4) from hemagglutinin__InfluenzaA__ACZ96382

SEQ ID NO: 163911 - RNA, 1701 nt, Artificial Sequence; identical to SEQ ID NO: 162716
  derived and/or modified CDS sequence (opt4) from hemagglutinin__InfluenzaA__ACZ96392

SEQ ID NO: 163912 - RNA, 1701 nt, Artificial Sequence; identical to SEQ ID NO: 162971
  derived and/or modified CDS sequence (opt4) from hemagglutinin__InfluenzaA__ACZ96405

SEQ ID NO: 163913 - RNA, 1701 nt, Artificial Sequence; identical to SEQ ID NO: 162729
  derived and/or modified CDS sequence (opt4) from hemagglutinin__InfluenzaA__ACZ96415

SEQ ID NO: 163914 - RNA, 1701 nt, Artificial Sequence; identical to SEQ ID NO: 162729
  derived and/or modified CDS sequence (opt4) from hemagglutinin__InfluenzaA__ACZ96425

SEQ ID NO: 163915 - RNA, 1701 nt, Artificial Sequence
  derived and/or modified CDS sequence (opt4) from hemagglutinin__InfluenzaA__ACZ96435
augaaggccauccugguggugcugcuguacaccuucgccaccgccaacgccgacacccugugcaucggcuaccacgccaacaacagcaccgacaccguggacaccgugcuggagaagaacgugaccgugacccacagcgugaaccugcuggaggacaagcacaacggcaagcugugcaagcugagaggcguggcccagcugcaccugggcaagugcaacaucgccggcuggauccugggcaaccccgagugcgagagccugagcaccgccagcagcuggagcuacaucguggagaccagcagcagcgacaacggcaccugcuaccccggcgacuucaucgacuacgaggagcugagagagcagcugagcagcgugagcagcuucgagagauucgagaucuuccccaagaccagcagcuggcccaaccacgacagcaacaagggcgugaccgccgccugcccccacgccggcgccaagagcuucuacaagaaccugaucuggcuggugaagaagggcaacagcuaccccaagcugagcaagagcuacaucaacgacaagggcaaggaggugcuggugcuguggggcauccaccaccccagcaccagcgccgaccagcagagccuguaccagaacgccgacgccuacguguucgugggcaccagcagauacagcaagaaguucaagcccgagaucgccaucagacccaaggugagagaccaggagggcagaaugaacuacuacuggacccugguggagcccggcgacaagaucaccuucgaggccaccggcaaccugauggugcccagauacgccuucgccauggagagaaacgccggcagcggcaucaucaucagcgacacccccgugcacgacugcaacaccaccugccagacccccaagggcgccaucaacaccagccugcccuuccagaacauccaccccaucaccaucggcaagugccccaaguacgugaagagcaccaagcugagacuggccaccggccugagaaacgugcccagcauccagagcagaggccuguucggcgccaucgccggcuucaucgagggcggcuggaccggcaugguggacggcugguacggcuaccaccaccagaacgagcagggcagcggcuacgccgccgaccugaagagcacccagaacgccaucgacgagaucaccaacaaggugaacagcgugaucgagaagaugaacacccaguucaccgccgugggcaaggaguucaaccaccuggagaagagaaucgagaaccugaacaagaagguggacgacggcuuccuggacaucuggaccuacaacgccgagcugcuggugcugcuggagaacgagagaacccuggacuaccacgacagcaacgugaagaaccuguacgagaaggugagaagccagcugaagaacaacgccaaggagaucggcaacggcugcuucgaguucuaccacaagugcgacaacaccugcauggagagcgugaagaacggcaccuacgacuaccccaaguacagcgaggaggccaagcugaacagagaggagaucgacggcgugaagcuggagagcaccagaaucuaccagauccuggccaucuacagcaccguggccagcagccuggugcugguggugagccugggcgccaucagcuucuggaugugcagcaacggcagccugcagugcagaaucugcaucuga

SEQ ID NO: 163916 - RNA, 1701 nt, Artificial Sequence; identical to SEQ ID NO: 162729
  derived and/or modified CDS sequence (opt4) from hemagglutinin__InfluenzaA__ACZ96445

SEQ ID NO: 163917 - RNA, 1701 nt, Artificial Sequence
  derived and/or modified CDS sequence (opt4) from hemagglutinin__InfluenzaA__ACZ96476
augaaggccauccugguggugcugcuguacaccuucgccaccgccuacgccgacacccugugcaucggcuaccacgccaacaacagcaccgacaccguggacaccgugcuggagaagaacgugaccgugacccacagcgugaaccugcuggaggacaagcacaacggcaagcugugcaagcugagaggcguggccccccugcaccugggcaagugcaacaucgccggcuggauccugggcaaccccgagugcgagagccugagcaccgccagcagcuggagcuacaucguggagaccagcagcagcgacaacggcaccugcuaccccggcgacuucaucgacuacgaggagcugagagagcagcugagcagcgugagcagcuucgagagauucgagaucuuccccaagaccagcagcuggcccaaccacgacagcaacaagggcgugaccgccgccugcccccacgccggcgccaagagcuucuacaagaaccugaucuggcuggugaagaagggcaacagcuaccccaagcugagcaagagcuacaucaacgacaagggcaaggaggugcuggugcuguggggcauccaccaccccagcaccagcgccgaccagcagagccuguaccagaacgccgacgccuacguguucgugggcaccagcagauacagcaagaaguucaagcccgagaucgccaucagacccaaggugagagaccaggagggcagaaugaacuacuacuggacccugguggagcccggcgacaagaucaccuucgaggccaccggcaaccugguggugcccagauacgccuucgccauggagagaaacgccggcagcggcaucaucaucagcgacacccccgugcacgacugcaacaccaccugccagacccccaagggcgccaucaacaccagccugcccuuccagaacauccaccccaucaccaucggcaagugccccaaguacgugaagagcaccaagcugagacuggccaccggccugagaaacgugcccagcauccagagcagaggccuguucggcgccaucgccggcuucaucgagggcggcuggaccggcaugguggacggcugguacggcuaccaccaccagaacgagcagggcagcggcuacgccgccgaccugaagagcacccagaacgccaucgacgagaucaccaacaaggugaacagcgugaucgagaagaugaacacccaguucaccgccgugggcaaggaguucaaccaccuggagaagagaaucgagaaccugaacaagaagguggacgacggcuuccuggacaucuggaccuacaacgccgagcugcuggugcugcuggagaacgagagaacccuggacuaccacgacagcaacgugaagaaccuguacgagaaggugagaagccagcugaagaacaacgccaaggagaucggcaacggcugcuucgaguucuaccacaagugcgacaacaccugcauggagagcgugaagaacggcaccuacgacuaccccaaguacagcgaggaggccaagcugaacagagaggagaucgacggcgugaagcuggagagcaccagaaucuaccagauccuggccaucuacagcaccguggccagcagccuggugcugguggugagccugggcgccaucagcuucuggaugugcagcaacggcagccugcagugcagaaucugcaucuga

SEQ ID NO: 163918 - RNA, 1701 nt, Artificial Sequence; identical to SEQ ID NO: 162729
  derived and/or modified CDS sequence (opt4) from hemagglutinin__InfluenzaA__ACZ96496

SEQ ID NO: 163919 - RNA, 1701 nt, Artificial Sequence; identical to SEQ ID NO: 162729
  derived and/or modified CDS sequence (opt4) from hemagglutinin__InfluenzaA__ACZ96506

SEQ ID NO: 163920 - RNA, 1701 nt, Artificial Sequence; identical to SEQ ID NO: 162729
  derived and/or modified CDS sequence (opt4) from hemagglutinin__InfluenzaA__ACZ96526

SEQ ID NO: 163921 - RNA, 1701 nt, Artificial Sequence
  derived and/or modified CDS sequence (opt4) from hemagglutinin__InfluenzaA__ACZ96536
augaaggccauccugguggugcugcuguacaccuucgccaccgccaacgccgacacccugugcaucggcuaccacgccaacaacagcaccgacaccguggacaccgugcuggagaagaacgugaccgugacccacagcgugaacauccuggaggacaagcacaacggcaagcugugcaagcugaagggcguggccccccugcaccugggcaagugcaacaucgccggcuggauccugggcaaccccgagugcgagagccugagcaccgccagcagcuggagcuacaucguggagaccagcagcagcgacaacggcaccugcuaccccggcgacuucaucgacuacgaggagcugagagagcagcugagcagcgugagcagcuucgagagauucgagaucuuccccaagaccagcagcuggcccaaccacgacagcaacaagggcgugaccgccgccugcccccacgccggcgccaagagcuucuacaagaaccugaucuggcuggugaagaagggcaacagcuaccccaagcugagcaagagcuacaucaacgacaagggcaaggaggugcuggugcuguggggcauccaccaccccagcaccagcgccgaccagcagagccuguaccagaacgccgacaccuacguguucgugggcagcagcaaguacagcaagaaguucaagcccgagaucgccaucagacccaaggugagagaccaggagggcagaaugaacuacuacuggacccugguggagcccggcgacaagaucaccuucgaggccaccggcaaccugguggugcccagauacgccuucgccauggagagaaacgccggcagcggcaucaucaucagcgacacccccgugcacgacugcaacaccaccugccagacccccaagggcgccaucaacaccagccugcccuuccagaacauccaccccaucaccaucggcaagugccccaagcacgugaagagcaccaagcugagacuggccaccggccugagaaacgugcccagcauccagagcagaggccuguucggcgccaucgccggcuucaucgagggcggcuggaccggcaugguggacggcugguacggcuaccaccaccagaacgagcagggcagcggcuacgccgccgaccugaagagcacccagaacgccaucgacgagaucaccaacaaggugaacagcgugaucgagaagaugaacacccaguucaccgccgugggcaaggaguucaaccaccuggagaagagaaucgagaaccugaacaagaagguggacgacggcuuccuggacaucuggaccuacaacgccgagcugcuggugcugcuggagaacgagagaacccuggacuaccacgacagcaacgugaagaaccuguacgagaaggugagaagccagcugaagaacaacgccaaggagaucggcaacggcugcuucgaguucuaccacaagugcgacaacaccugcauggagagcgugaagaacggcaccuacgacuaccccaaguacagcgaggaggccaagcugaacagagaggagaucgacggcgugaagcuggagagcaccagaaucuaccagauccuggccaucuacagcaccguggccagcagccuggugcugguggugagccugggcgccaucagcuucuggaugugcagcaacggcagccugcagugcagaaucugcaucuga

SEQ ID NO: 163922 - RNA, 1701 nt, Artificial Sequence; identical to SEQ ID NO: 162729
  derived and/or modified CDS sequence (opt4) from hemagglutinin__InfluenzaA__ACZ96549

SEQ ID NO: 163923 - RNA, 1701 nt, Artificial Sequence
  derived and/or modified CDS sequence (opt4) from hemagglutinin__InfluenzaA__ACZ96559
augaaggccauccugguggugcugcuguacaccuucgccaccgccaacgccgacacccugugcaucggcuaccacgccaacaacagcaccgacaccguggacaccgugcuggagaagaacgugaccgugacccacagcgugaaccugcuggaggacaagcacaacggcaagcugugcaagcugagaggcguggccccccugcaccugggcaagugcaacaucgccggcuggauccugggcaaccccgagugcgagagccugagcaccgccagcagcuggagcuacaucguggagaccagcagcagcgacaacggcaccugcuaccccggcgacuucaucaacuacgaggagcugagagagcagcugagcagcgugagcagcuucgagagauucgagaucuuccccaagaccagcagcuggcccaaccacgacagcaacaagggcgugaccgccgccugcccccacgccggcgccaagagcuucuacaagaaccugaucuggcuggugaagaagggcaacagcuaccccaagcugagcaagagcuacaucaacgacaagggcaaggaggugcuggugcuguggggcauccaccaccccagcaccagcgccgaccagcagagccuguaccagaacgccgacgccuacguguucgugggcaccagcagauacagcaagaaguucaagcccgagaucgccaucagacccaaggugagagaccaggagggcagaaugaacuacuacuggacccugguggagcccggcgacaagaucaccuucgaggccaccggcaaccugguggugcccagauacgccuucgccauggagagaaacgccggcagcggcaucaucaucagcgacacccccgugcacgacugcaacaccaccugccagacccccaagggcgccaucaacaccagccugcccuuccagaacauccaccccaucaccaucggcaagugccccaaguacgugaagagcaccaagcugagacuggccaccggccugagaaacgugcccagcauccagagcagaggccuguucggcgccaucgccggcuucaucgagggcggcuggaccggcaugguggacggcugguacggcuaccaccaccagaacgagcagggcagcggcuacgccgccgaccugaagagcacccagaacgccaucgacgagaucaccaacaaggugaacagcgugaucgagaagaugaacacccaguucaccgccgugggcaaggaguucaaccaccuggagaagagaaucgagaaccugaacaagaagguggacgacggcuuccuggacaucuggaccuacaacgccgagcugcuggugcugcuggagaacgagagaacccuggacuaccacgacagcaacgugaagaaccuguacgagaaggugagaagccagcugaagaacaacgccaaggagaucggcaacggcugcuucgaguucuaccacaagugcgacaacaccugcauggagagcgugaagaacggcaccuacgacuaccccaaguacagcgaggaggccaagcugaacagagaggagaucgacggcgugaagcuggagagcaccagaaucuaccagauccuggccaucuacagcaccguggccagcagccuggugcugguggugagccugggcgccaucagcuucuggaugugcagcaacggcagccugcagugcagaaucugcaucuga

SEQ ID NO: 163924 - RNA, 1701 nt, Artificial Sequence
  derived and/or modified CDS sequence (opt4) from hemagglutinin__InfluenzaA__ACZ96569
auggaggccauccugguggugcugcuguacaccuucgccaccgccaacgccgacacccugugcaucggcuaccacgccaacaacagcaccgacaccguggacaccgugcuggagaagaacgugaccgugacccacagcgugaaccugcuggaggacaagcacaacggcaagcugugcaagcugagaggcguggccccccugcaccugggcaagugcaacaucgccggcuggauccugggcaaccccgagugcgagagccugagcaccgccagcagcuggagcuacaucguggagaccagcagcagcgacaacggcaccugcuaccccggcgacuucaucaacuacgaggagcugagagagcagcugagcagcgugagcagcuucgagagauucgagaucuuccccaagaccagcagcuggcccaaccacgacagcaacaagggcgugaccgccgccugcccccacgccggcgccaagagcuucuacaagaaccugaucuggcuggugaagaagggcaacagcuaccccaagcugagcaagagcuacaucaacgacaagggcaaggaggugcuggugcuguggggcauccaccaccccagcaccagcgccgaccagcagagccuguaccagaacgccgacgccuacguguucgugggcagcagcagauacagcaagaaguucaagcccgagaucgccaucagacccaaggugagagaccaggagggcagaaugaacuacuacuggacccugguggagcccggcgacaagaucaccuucgaggccaccggcaaccugguggugcccagauacgccuucgccauggagagaaacgccggcagcggcaucaucaucagcgacacccccgugcacgacugcaacaccaccugccagacccccaagggcgccaucaacaccagccugcccuuccacaacauccaccccaucaccaucggcaagugccccaaguacgugaagagcaccaagcugagacuggccaccggccugagaaacgugcccagcauccagagcagaggccuguucggcgccaucgccggcuucaucgagggcggcuggaccggcaugguggacggcugguacggcuaccaccaccagaacgagcagggcagcggcuacgccgccgaccugaagagcacccagaacgccaucgacgagaucaccaacaaggugaacagcgugaucgagaagaugaacacccaguucaccgccgugggcaaggaguucaaccaccuggagaagagaaucgagaaccugaacaagaagguggacgacggcuuccuggacaucuggaccuacaacgccgagcugcuggugcugcuggagaacgagagaacccuggacuaccacgacagcaacgugaagaaccuguacgagaaggugagaagccagcugaagaacaacgccaaggagaucggcaacggcugcuucgaguucuaccacaagugcgacaacaccugcauggagagcgugaagaacggcaccuacgacuaccccaaguacagcgaggaggccaagcugaacagagaggagaucgacggcgugaagcuggagagcaccagaaucuaccagauccuggccaucuacagcaccguggccagcagccuggugcugguggugagccugggcgccaucagcuucuggaugugcagcaacggcagccugcagugcagaaucugcaucuga

SEQ ID NO: 163925 - RNA, 1701 nt, Artificial Sequence
  derived and/or modified CDS sequence (opt4) from hemagglutinin__InfluenzaA__ACZ96579
auggaggccauccugguggugcugcuguacaccuucgccaccgccaacgccgacacccugugcaucggcuaccacgccaacaacagcaccgacaccguggacaccgugcuggagaagaacgugaccgugacccacagcgugaaccugcuggaggacaagcacaacggcaagcugugcaagcugagaggcguggccccccugcaccugggcaagugcaacaucgccggcuggauccugggcaaccccgagugcgagagccugagcaccgccagcagcuggagcuacaucguggagaccagcagcagcgacaacggcaccugcuaccccggcgacuucaucgacuacgaggagcugagagagcagcugagcagcgugagcagcuucgagagauucgagaucuuccccaagaccagcagcuggcccaaccacgacagcaacaagggcgugaccgccgccugcccccacgccggcgccaagagcuucuacaagaaccugaucuggcuggugaagaagggcaacagcuaccccaagcugagcaagagcuacaucaacgacaagggcaaggaggugcuggugcuguggggcauccaccaccccagcagcagcgccgaccagcagagccuguaccagaacgccgacgccuacguguucgugggcagcagcagauacagcaagaaguucaagcccgagaucgccaucagacccaaggugagagaccaggagggcagaaugaacuacuacuggacccugguggagcccggcgacaagaucaccuucgaggccaccggcaaccugguggugcccagauacgccuucgccauggagagaaacgccggcagcggcaucaucaucagcgacacccccgugcacgacugcaacaccaccugccagacccccaagggcgccaucaacaccagccugcccuuccacaacauccaccccaucaccaucggcaagugccccaaguacgugaagagcaccaagcugagacuggccaccggccugagaaacgugcccagcauccagagcagaggccuguucggcgccaucgccggcuucaucgagggcggcuggaccggcaugguggacggcugguacggcuaccaccaccagaacgagcagggcagcggcuacgccgccgaccugaagagcacccagaacgccaucgacgagaucaccaacaaggugaacagcgugaucgagaagaugaacacccaguucaccgccgugggcaaggaguucaaccaccuggagaagagaaucgagaaccugaacaagaagguggacgacggcuuccuggacaucuggaccuacaacgccgagcugcuggugcugcuggagaacgagagaacccuggacuaccacgacagcaacgugaagaaccuguacgagaaggugagaagccagcugaagaacaacgccaaggagaucggcaacggcugcuucgaguucuaccacaagugcgacaacaccugcauggagagcgugaagaacggcaccuacgacuaccccaaguacagcgaggaggccaagcugaacagagaggagaucgacggcgugaagcuggagagcaccagaaucuaccagauccuggccaucuacagcaccguggccagcagccuggugcugguggugagccugggcgccaucagcuucuggaugugcagcaacggcagccugcagugcagaaucugcaucuga

SEQ ID NO: 163926 - RNA, 1701 nt, Artificial Sequence; identical to SEQ ID NO: 162729
  derived and/or modified CDS sequence (opt4) from hemagglutinin__InfluenzaA__ACZ96589

SEQ ID NO: 163927 - RNA, 1701 nt, Artificial Sequence
  derived and/or modified CDS sequence (opt4) from hemagglutinin__InfluenzaA__ACZ96599
augaaggccauccugguggugcugcuguacaccuucgccaccgccaacgccgacacccugugcaucggcuaccacgccaacaacagcaccgacaccguggacaccgugcuggagaagaacgugaccgugacccacagcgugaaccugcuggaggacaagcacaacggcaagcugugcaagcugagaggcguggccccccugcaccugggcaagugcaacaucgccggcuggauccugggcaaccccgagugcgagagccugagcaccgccagcagcuggagcuacaucguggagaccagcagcagcgacaacggcaccugcuaccccggcgacuucaucgacuacgaggagcugagagagcagcugagcagcgugagcagcuucgagagauucgagaucuuccccaagaccagcagcuggcccaaccacgacagcaacaagggcgugaccgccgccugcccccacgccggcgccaagagcuucuacaagaaccugaucuggcuggugaagaagggcaacagcuaccccaagcugagcaagagcuacaucaacgacaagggcaaggaggugcuggugcuguggggcauccaccaccccagcaccagcgccgaccagcagagccuguaccagaacgccgacgccuacguguucgugggcaccagcagauacagcaagaaguucaagcccgagaucgccaucagacccaaggugagagagcaggagggcagaaugaacuacuacuggacccugguggagcccggcgacaagaucaccuucgaggccaccggcaaccugguggugcccagauacgccuucgccauggagagaaacaccggcagcggcaucaucaucagcgacacccccgugcacgacugcaacaccaccugccagacccccaagggcgccaucaacaccagccugcccuuccagaacauccacagcaucaccaucggcaagugccccaaguacgugaagagcaccaagcugagacuggccaccggccugagaaacgugcccagcauccagagcagaggccuguucggcgccaucgccggcuucaucgagggcggcuggaccggcaugguggacggcugguacggcuaccaccaccagaacgagcagggcagcggcuacgccgccgaccugaagagcacccagaacgccaucgacgagaucaccaacaaggugaacagcgugaucgagaagaugaacacccaguucaccgccgugggcaaggaguucaaccaccuggagaagagaaucgagaaccugaacaagaagguggacgacggcuuccuggacaucuggaccuacaacgccgagcugcuggugcugcuggagaacgagagaacccuggacuaccacgacagcaacgugaagaaccuguacgagaaggugagaagccagcugaagaacaacgccaaggagaucggcaacggcugcuucgaguucuaccacaagugcgacaacaccugcauggagagcgugaagaacggcaccuacgacuaccccaaguacagcgaggaggccaagcugaacagagaggagaucgacggcgugaagcuggagagcaccagaaucuaccagauccuggccaucuacagcaccguggccagcagccuggugcugguggugagccugggcgccaucagcuucuggaugugcagcaacggcagccugcagugcagaaucugcaucuga

SEQ ID NO: 163928 - RNA, 1701 nt, Artificial Sequence
  derived and/or modified CDS sequence (opt4) from hemagglutinin__InfluenzaA__ACZ96609
augaaggccauccugguggugcugcuguacaccuucgccaccgccaacgccgacacccugugcaucggcuaccacgccaacaacagcaccgacaccguggacaccgugcuggagaagaacgugaccgugacccacagcgugaaccugcuggaggacaagcacaacggcaagcugugcaagcugagaggcguggccccccugcaccugggcaagugcaacaucgccggcuggauccugggcaaccccgagugcgagagccugagcaccgccagcagcuggagcuacaucguggagaccagcagcagcgacaacggcaccugcuaccccggcgacuucaucaacuacgaggagcugagagagcagcugagcagcgugagcagcuucgagagauucgagaucuuccccaagaccagcagcuggcccaaccacgacagcaacaagggcgugaccgccgccugcccccacgccggcgccaagagcuucuacaagaaccugaucuggcuggugaagaagggcaacagcuaccccaagcugagcaagagcuacaucaacgacaagggcaaggaggugcuggugcuguggggcauccaccaccccagcaccagcgccgaccagcagagccuguaccagaacgccgacgccuacguguucgugggcagcagcagauacagcaagaaguucaagcccgagaucgccaucagacccaaggugagagaccaggagggcagaaugaacuacuacuggacccugguggagcccggcgacaagaucaccuucgaggccaccggcaaccugguggugcccagauacgccuucgccauggagagaaacgccggcagcggcaucaucaucagcgacacccccgugcacgacugcaacaccaccugccagacccccaagggcgccaucaacaccagccugcccuuccagaacauccaccccaucaccaucggcaccugccccaaguacgugaagagcaccaagcugagacuggccaccggccugagaaacgugcccagcauccagagcagaggccuguucggcgccaucgccggcuucaucgagggcggcuggaccggcaugguggacggcugguacggcuaccaccaccagaacgagcagggcagcggcuacgccgccgaccugaagagcacccagaacgccaucgacgagaucaccaacaaggugaacagcgugaucgagaagaugaacacccaguucaccgccgugggcaaggaguucaaccaccuggagaagagaaucgagaaccugaacaagaagguggacgacggcuuccuggacaucuggaccuacaacgccgagcugcuggugcugcuggagaacgagagaacccuggacuaccacgacagcaacgugaagaaccuguacgagaaggugagaagccagcugaagaacaacgccaaggagaucggcaacggcugcuucgaguucuaccacaagugcgacaacaccugcauggagagcgugaagaacggcaccuacgacuaccccaaguacagcgaggaggccaagcugaacagagaggagaucgacggcgugaagcuggagagcaccagaaucuaccagauccuggccaucuacagcaccguggccagcagccuggugcugguggugagccugggcgccaucagcuucuggaugugcagcaacggcagccugcagugcagaaucugcaucuga

SEQ ID NO: 163929 - RNA, 1701 nt, Artificial Sequence; identical to SEQ ID NO: 162909
  derived and/or modified CDS sequence (opt4) from hemagglutinin__InfluenzaA__ACZ96619

SEQ ID NO: 163930 - RNA, 1701 nt, Artificial Sequence; identical to SEQ ID NO: 162909
  derived and/or modified CDS sequence (opt4) from hemagglutinin__InfluenzaA__ACZ96629

SEQ ID NO: 163931 - RNA, 1701 nt, Artificial Sequence; identical to SEQ ID NO: 162909
  derived and/or modified CDS sequence (opt4) from hemagglutinin__InfluenzaA__ACZ96639

SEQ ID NO: 163932 - RNA, 1701 nt, Artificial Sequence; identical to SEQ ID NO: 162909
  derived and/or modified CDS sequence (opt4) from hemagglutinin__InfluenzaA__ACZ96649

SEQ ID NO: 163933 - RNA, 1701 nt, Artificial Sequence; identical to SEQ ID NO: 162909
  derived and/or modified CDS sequence (opt4) from hemagglutinin__InfluenzaA__ACZ96659

SEQ ID NO: 163934 - RNA, 1701 nt, Artificial Sequence; identical to SEQ ID NO: 162909
  derived and/or modified CDS sequence (opt4) from hemagglutinin__InfluenzaA__ACZ96669

SEQ ID NO: 163935 - RNA, 1701 nt, Artificial Sequence; identical to SEQ ID NO: 162909
  derived and/or modified CDS sequence (opt4) from hemagglutinin__InfluenzaA__ACZ96679

SEQ ID NO: 163936 - RNA, 1701 nt, Artificial Sequence; identical to SEQ ID NO: 162909
  derived and/or modified CDS sequence (opt4) from hemagglutinin__InfluenzaA__ACZ96689

SEQ ID NO: 163937 - RNA, 1701 nt, Artificial Sequence; identical to SEQ ID NO: 162909
  derived and/or modified CDS sequence (opt4) from hemagglutinin__InfluenzaA__ACZ96699

SEQ ID NO: 163938 - RNA, 1701 nt, Artificial Sequence; identical to SEQ ID NO: 162909
  derived and/or modified CDS sequence (opt4) from hemagglutinin__InfluenzaA__ACZ96719

SEQ ID NO: 163939 - RNA, 1701 nt, Artificial Sequence; identical to SEQ ID NO: 162909
  derived and/or modified CDS sequence (opt4) from hemagglutinin__InfluenzaA__ACZ96729

SEQ ID NO: 163940 - RNA, 1701 nt, Artificial Sequence; identical to SEQ ID NO: 162909
  derived and/or modified CDS sequence (opt4) from hemagglutinin__InfluenzaA__ACZ96739

SEQ ID NO: 163941 - RNA, 1701 nt, Artificial Sequence
  derived and/or modified CDS sequence (opt4) from hemagglutinin__InfluenzaA__ACZ96749
augaagaccauccugguggugcugcuguacaccuucgccaccgccaacgccgacacccugugcaucggcuaccacgccaacaacagcaccgacaccguggacaccgugcuggagaagaacgugaccgugacccacagcgugaaccugcuggaggacaagcacaacggcaagcugugcaagcugagaggcguggccccccugcaccugggcaagugcaacaucgccggcuggauccugggcaaccccgagugcgagagccugagcaccgccagcagcuggagcuacaucguggagaccagcagcagcgacaacggcaccugcuaccccggcgacuucaucgacuacgaggagcugagagagcagcugagcagcgugagcagcuucgagagauucgagaucuuccccaagaccagcagcuggcccaaccacgacagcaacaagggcgugaccgccgccugcccccacgccggcgccaagagcuucuacaagaaccugaucuggcuggugaagaagggcaacagcuaccccaagcugagcaagagcuacaucaacgacaagggcaaggaggugcuggugcuguggggcauccaccaccccagcaccagcgccgaccagcagagccuguaccagaacgccgacgccuacguguucgugggcagcagcagauacagcaagaaguucaagcccgagaucgccaucagacccaaggugagagaccaggagggcagaaugaacuacuacuggacccugguggagcccggcgacaagaucaccuucgaggccaccggcaaccugguggugcccagauacgccuucgccauggagagaaacgccggcagcggcaucaucaucagcgacacccccgugcacgacugcaacaccaccugccagacccccaagggcgccaucaacaccagccugcccuuccagaacauccaccccaucaccaucggcaagugccccaaguacgugaagagcaccaagcugagacuggccaccggccugagaaacgugcccagcauccagagcagaggccuguucggcgccaucgccggcuucaucgagggcggcuggaccggcaugguggacggcugguacggcuaccaccaccagaacgagcagggcagcggcuacgccgccgaccugaagagcacccagaacgccaucgacgagaucaccaacaaggugaacagcgugaucgagaagaugaacacccaguucaccgccgugggcaaggaguucaaccaccuggagaagagaaucgagaaccugaacaagaagguggacgacggcuuccuggacaucuggaccuacaacgccgagcugcuggugcugcuggagaacgagagaacccuggacuaccacgacagcaacgugaagaaccuguacgagaaggugagaagccagcugaagaacaacgccaaggagaucggcaacggcugcuucgaguucuaccacaagugcgacaacaccugcauggagagcgugaagaacggcaccuacgacuaccccaaguacagcgaggaggccaagcugaacagagaggagaucgacggcgugaagcuggagagcaccagaaucuaccagauccuggccaucuacagcaccguggccagcagccuggugcugguggugagccugggcgccaucagcuucuggaugugcagcaacggcagccugcagugcagaaucugcaucuga

SEQ ID NO: 163942 - RNA, 1701 nt, Artificial Sequence; identical to SEQ ID NO: 162716
  derived and/or modified CDS sequence (opt4) from hemagglutinin__InfluenzaA__ACZ96759

SEQ ID NO: 163943 - RNA, 1701 nt, Artificial Sequence; identical to SEQ ID NO: 162716
  derived and/or modified CDS sequence (opt4) from hemagglutinin__InfluenzaA__ACZ96769

SEQ ID NO: 163944 - RNA, 1701 nt, Artificial Sequence; identical to SEQ ID NO: 162716
  derived and/or modified CDS sequence (opt4) from hemagglutinin__InfluenzaA__ACZ96779

SEQ ID NO: 163945 - RNA, 1701 nt, Artificial Sequence; identical to SEQ ID NO: 162716
  derived and/or modified CDS sequence (opt4) from hemagglutinin__InfluenzaA__ACZ96789

SEQ ID NO: 163946 - RNA, 1701 nt, Artificial Sequence
  derived and/or modified CDS sequence (opt4) from hemagglutinin__InfluenzaA__ACZ96809
augaaggccauccugguggugcugcuguacaccuucgccaccgccaacgccgacacccugugcaucggcuaccacgccaacaacagcaccgacaccguggacaccgugcuggagaagaacgugaccgugacccacagcgugaaccugcuggaggacaagcacaacggcaagcugugcaagcugagaggcguggccccccugcaccugggcaagugcaacaucgccggcuggauccugggcaaccccgagugcgagagccugagcaccgccagcagcuggagcuacaucguggagaccagcagcagcgacaacggcaccugcuaccccggcgacuucaucgacuacgaggagcugagagagcagcugagcagcgugagcagcuucgagagauucgagaucuuccccaagaccagcagcuggcccaaccacgacagcaacaagggcgugaccgccgccugcccccacgccggcgccaagagcuucuacaagaaccugaucuggcuggugaagaagggcaacagcuaccccaagcugagcaagagcuacaucaacgacaagggcaaggaggugcuggugcuguggggcauccaccaccccagcaccaacgccgaccagcagagccuguaccagaacgccgacgccuacguguucgugggcaccagcagauacagcaagaaguucaagcccgagaucgccaucagacccaaggugagagaccaggagggcagaaugaacuacuacuggacccugguggagcccggcgacaagaucaccuucgaggccaccggcaaccugguggugcccagauacgccuucgccauggagagaaacgccggcagcggcaucaucaucagcgacacccccgugcacgacugcaacaccaccugccagacccccaagggcgccaucaacaccagccugcccuuccagaacauccaccccaucaccaucggcaagugccccaaguacgugaagagcaccaagcugagacuggccaccggccugagaaacgugcccagcauccagagcagaggccuguucggcgccaucgccggcuucaucgagggcggcuggaccggcaugguggacggcugguacggcuaccaccaccagaacgagcagggcagcggcuacgccgccgaccugaagagcacccagaacgccaucgacgagaucaccaacaaggugaacagcgugaucgagaagaugaacacccaguucgccgccgugggcaaggaguucaaccaccuggagaagagaaucgagaaccugaacaagaagguggacgacggcuuccuggacaucuggaccuacaacgccgagcugcuggugcugcuggagaacgagagaacccuggacuaccacgacagcaacgugaagaaccuguacgagaaggugagaagccagcugaagaacaacgccaaggagaucggcaacggcugcuucgaguucuaccacaagugcgacaacaccugcauggagagcgugaagaacggcaccuacgacuaccccaaguacagcgaggaggccaagcugaacagagaggagaucgacggcgugaagcuggagagcaccagaaucuaccagauccuggccaucuacagcaccguggccagcagccuggugcugguggugagccugggcgccaucagcuucuggaugugcagcaacggcagccugcagugcagaaucugcaucuga

SEQ ID NO: 163947 - RNA, 1701 nt, Artificial Sequence; identical to SEQ ID NO: 162716
  derived and/or modified CDS sequence (opt4) from hemagglutinin__InfluenzaA__ACZ96819

SEQ ID NO: 163948 - RNA, 1701 nt, Artificial Sequence; identical to SEQ ID NO: 162716
  derived and/or modified CDS sequence (opt4) from hemagglutinin__InfluenzaA__ACZ96829

SEQ ID NO: 163949 - RNA, 1701 nt, Artificial Sequence; identical to SEQ ID NO: 162716
  derived and/or modified CDS sequence (opt4) from hemagglutinin__InfluenzaA__ACZ96839

SEQ ID NO: 163950 - RNA, 1701 nt, Artificial Sequence; identical to SEQ ID NO: 163869
  derived and/or modified CDS sequence (opt4) from hemagglutinin__InfluenzaA__ACZ96849

SEQ ID NO: 163951 - RNA, 1701 nt, Artificial Sequence; identical to SEQ ID NO: 162729
  derived and/or modified CDS sequence (opt4) from hemagglutinin__InfluenzaA__ACZ96859

SEQ ID NO: 163952 - RNA, 1701 nt, Artificial Sequence; identical to SEQ ID NO: 162716
  derived and/or modified CDS sequence (opt4) from hemagglutinin__InfluenzaA__ACZ96869

SEQ ID NO: 163953 - RNA, 1701 nt, Artificial Sequence; identical to SEQ ID NO: 162716
  derived and/or modified CDS sequence (opt4) from hemagglutinin__InfluenzaA__ACZ96879

SEQ ID NO: 163954 - RNA, 1701 nt, Artificial Sequence
  derived and/or modified CDS sequence (opt4) from hemagglutinin__InfluenzaA__ACZ96899
augaaggccauccugguggugcugcuguacaccuucgccaccgccaacgccgacacccugugcaucggcuaccacgccaacaacagcaccgacaccguggacaccgugcuggagaagaacgugaccgugacccacagcgugaaccugcuggaggacaagcacaacggcaagcugugcaagcugagaggcguggccccccugcaccugggcaagugcaacaucgccggcuggauccugggcaaccccgagugcgagagccugagcaccgccagcagcuggagcuacaucguggagaccagcagcagcgacaacggcaccugcuaccccggcgacuucaucgacuacgaggagcugagagagcagcugagcagcgugagcagcuucgagagauucgagaucuuccccaagaccagcagcuggcccaaccacgacagcaacaagggcgugaccgccgccugcccccacgccggcgccaagagcuucuacaagaaccugaucuggcuggugaagaagggcaacagcuaccccaagcugagcaagagcuacaucaacgacaagggcaaggaggugcuggugcuguggggcauccaccacagcagcaccagcgccgaccagcagagccuguaccagaacgccgacgccuacguguucgugggcagcagcagauacagcaagaaguucaagcccgagaucgccaucagacccaaggugagagaccaggagggcagaaugaacuacuacuggacccugguggagcccggcgacaagaucaccuucgaggccaccggcaaccugguggugcccagauacgccuucgccauggagagaaacgccggcagcggcaucaucaucagcgacacccccgugcacgacugcaacaccaccugccagacccccaagggcgccaucaacaccagccugcccuuccagaacauccaccccaucaccaucggcaagugccccaaguacgugaagagcaccaagcugagacuggccaccggccugagaaacgugcccagcauccagagcagaggccuguucggcgccaucgccggcuucaucgagggcggcuggaccggcaugguggacggcugguacggcuaccaccaccagaacgagcagggcagcggcuacgccgccgaccugaagagcacccagaacgccaucgacgagaucaccaacaaggugaacagcgugaucgagaagaugaacacccaguucaccgccgugggcaaggaguucaaccaccuggagaagagaaucgagaaccugaacaagaagguggacgacggcuuccuggacaucuggaccuacaacgccgagcugcuggugcugcuggagaacgagagaacccuggacuaccacgacagcaacgugaagaaccuguacgagaaggugagaagccagcugaagaacaacgccaaggagaucggcaacggcugcuucgaguucuaccacaagugcgacaacaccugcauggagagcgugaagaacggcaccuacgacuaccccaaguacagcgaggaggccaagcugaacagagaggagaucgacggcgugaagcuggagagcaccagaaucuaccagauccuggccaucuacagcaccguggccagcagccuggugcugguggugagccugggcgccaucagcuucuggaugugcagcaacggcagccugcagugcagaaucugcaucuga

SEQ ID NO: 163955 - RNA, 1701 nt, Artificial Sequence; identical to SEQ ID NO: 162716
  derived and/or modified CDS sequence (opt4) from hemagglutinin__InfluenzaA__ACZ96909

SEQ ID NO: 163956 - RNA, 1701 nt, Artificial Sequence; identical to SEQ ID NO: 162716
  derived and/or modified CDS sequence (opt4) from hemagglutinin__InfluenzaA__ACZ96919

SEQ ID NO: 163957 - RNA, 1701 nt, Artificial Sequence; identical to SEQ ID NO: 162716
  derived and/or modified CDS sequence (opt4) from hemagglutinin__InfluenzaA__ACZ96929

SEQ ID NO: 163958 - RNA, 1701 nt, Artificial Sequence; identical to SEQ ID NO: 162716
  derived and/or modified CDS sequence (opt4) from hemagglutinin__InfluenzaA__ACZ96939

SEQ ID NO: 163959 - RNA, 1701 nt, Artificial Sequence
  derived and/or modified CDS sequence (opt4) from hemagglutinin__InfluenzaA__ACZ96949
augaaggccauccugguggugcugcuguacaccuucgccaccgccaacgccgacacccugugcaucggcuaccacgccaacaacagcaccgacaccguggacaccgugcuggagaagaacgugaccgugacccacagcgugaaccugcuggaggacaagcacaacggcaagcugugcaagcugagaggcguggccccccugcaccugggcaagugcaacaucgccggcuggauccugggcaaccccgagugcgagagccugagcaccgccagcagcuggagcuacaucguggagaccagcagcagcgacaacggcaccugcuaccccggcgacuucaucgacuacgaggagcugagagagcagcugagcagcgugagcagcuucgagagauucgagaucuuccccaagaccagcagcuggcccaaccacgacagcaacaagggcgugaccgccgccugcccccacgccggcgccaagagcuucuacaagaaccugaucuggcuggugaagaagggcaacagcuaccccaagcugagcaagagcuacaucaacgacaagggcaaggaggugcuggugcuguggggcauccaccaccccagcaccagcgccgaccagcagagccuguaccagaacgccgacgccuacguguucgugggcagcagcagauacagcaagaaguucaagcccgagaucgccaucagacccaaggugagagaccaggagggcagaaugaacuacuacuggacccugguggagcccggcgacaagaucaccuucgaggccaccggcaaccugguggugcccagauacgccuucgccauggagagaaacgccggcagcggcaucaucaucagcgacacccccgugcacgacugcaacaccaccugccagacccccaagggcgccaucaacaccagccugcccuuccagaacauccaccccaucaccaucggcaagugccccaaguacgugaagagcaccaagcugagacuggccaccggccugagaaacgugcccagcauccagagcagaggccuguucggcgccaucgccggcuucaucgagggcggcuggaccggcaugguggacggcugguacggcuaccaccaccagaacgagcagggcagcggcuacgccgccgaccugaagagcacccagaacgccaucgacgagaucaccaacaaggugaacagcgugaucgagaagaugaacacccaguucaccgccgugggcaaggaguucaaccaccuggagaagagaaucgagaaccugaacaagaagguggacgacggcuuccuggacaucuggaccuacaacgccgagaugcuggugcugcuggagaacgagagaacccuggacuaccacgacagcaacgugaagaaccuguacgagaaggugagaagccagcugaagaacaacgccaaggagaucggcaacggcugcuucgaguucuaccacaagugcgacaacaccugcauggagagcgugaagaacggcaccuacgacuaccccaaguacagcgaggaggccaagcugaacagagaggagaucgacggcgugaagcuggagagcaccagaaucuaccagauccuggccaucuacagcaccguggccagcagccuggugcugguggugagccugggcgccaucagcuucuggaugugcagcaacggcagccugcagugcagaaucugcaucuga

SEQ ID NO: 163960 - RNA, 1701 nt, Artificial Sequence; identical to SEQ ID NO: 162716
  derived and/or modified CDS sequence (opt4) from hemagglutinin__InfluenzaA__ACZ97021

SEQ ID NO: 163961 - RNA, 1701 nt, Artificial Sequence; identical to SEQ ID NO: 163083
  derived and/or modified CDS sequence (opt4) from hemagglutinin__InfluenzaA__ACZ97343

SEQ ID NO: 163962 - RNA, 1701 nt, Artificial Sequence; identical to SEQ ID NO: 163083
  derived and/or modified CDS sequence (opt4) from hemagglutinin__InfluenzaA__ACZ97353

SEQ ID NO: 163963 - RNA, 1701 nt, Artificial Sequence; identical to SEQ ID NO: 162716
  derived and/or modified CDS sequence (opt4) from hemagglutinin__InfluenzaA__ACZ97363

SEQ ID NO: 163964 - RNA, 1701 nt, Artificial Sequence
  derived and/or modified CDS sequence (opt4) from hemagglutinin__InfluenzaA__ACZ97383
augaaggccauccugguggugcugcuguacaccuucgccaccgccaacgccgacacccugugcaucggcuaccacgccaacaacagcaccgacaccguggacaccgugcuggagaagaacgugaccgugacccacagcgugaaccugcuggaggacaagcacaacggcaagcugugcaagcugagaggcguggccccccugcaccugggcaagugcaacaucgccggcuggauccugggcaaccccgagugcgagagccugagcaccgccagcagcuggagcuacaucguggagaccagcaccagcgacaacggcaccugcuaccccggcgacuucaucgacuacgaggagcugagagagcagcugagcagcgugagcagcuucgagagauucgagaucuuccccaagaccagcagcuggcccaaccacgacagcaacaagggcgugaccgccgccugcccccacgccggcgccaagagcuucuacaagaaccugaucuggcuggugaagaagggcaacagcuaccccaagcugagcaagagcuacaucaacgacaagggcaaggaggugcuggugcuguggggcauccaccaccccagcaccagcgccgaccagcagagccuguaccagaacgccgacgccuacguguucgugggcagcagcagauacagcaagaaguucaagcccgagaucgccaucagacccaaggugagagaccaggagggcagaaugaacuacuacuggacccugguggagcccggcgacaagaucaccuucgaggccaccggcaaccugguggugcccagauacgccuucgccauggagagaaacgccggcagcggcaucaucaucagcgacacccccgugcacgacugcaacaccaccugccagacccccaagggcgccaucaacaccagccugcccuuccagaacauccaccccaucaccaucggcaagugccccaaguacgugaagagcaccaagcugagacuggccaccggccugagaaacgugcccagcauccagagcagaggccuguucggcgccaucgccggcuucaucgagggcggcuggaccggcaugguggacggcugguacggcuaccaccaccagaacgagcagggcagcggcuacgccgccgaccugaagagcacccagaacgccaucgacgagaucaccaacaaggugaacagcgugaucgagaagaugaacacccaguucaccgccgugggcaaggaguucaaccaccuggagaagagaaucgagaaccugaacaagaagguggacgacggcuuccuggacaucuggaccuacaacgccgagcugcuggugcugcuggagaacgagagaacccuggacuaccacgacagcaacgugaagaaccuguacgagaaggugagaagccagcugaagaacaacgccaaggagaucggcaacggcugcuucgaguucuaccacaagugcgacaacaccugcauggagagcgugaagaacggcaccuacgacuaccccaaguacagcgaggaggccaagcugaacagagaggagaucgacggcgugaagcuggagagcaccagaaucuaccagauccuggccaucuacagcaccguggccagcagccuggugcugguggugagccugggcgccaucagcuucuggaugugcagcaacggcagccugcagugcagaaucugcaucuga

SEQ ID NO: 163965 - RNA, 1701 nt, Artificial Sequence; identical to SEQ ID NO: 162716
  derived and/or modified CDS sequence (opt4) from hemagglutinin__InfluenzaA__ACZ97393

SEQ ID NO: 163966 - RNA, 1701 nt, Artificial Sequence
  derived and/or modified CDS sequence (opt4) from hemagglutinin__InfluenzaA__ACZ98178
augaaggccauccugguggugcugcuguacaccuucgccaccgccaacgccgacacccugugcaucggcuaccacgccaacaacagcaccgacaccguggacaccgugcuggagaagaacgugaccgugacccacagcgugaaccugcuggaggacaagcacuacggcaagcugugcaagcugagaggcguggccccccugcaccugggcaagugcaacaucgccggcuggauccugggcaaccccgagugcgagagccugagcaccgccagcagcuggagcuacaucguggagaccagcagcagcgacaacggcaccugcuaccccggcgacuucaucgacuacgaggagcugagagagcagcugagcagcgugagcagcuucgagagauucgagaucuuccccaagaccagcagcuggcccaaccacgacagcaacaagggcgugaccaccgccugcccccacgccggcgccaagagcuucuacaagaaccugaucuggcuggugaagaagggcaacagcuaccccaagcugagcaagagcuacaucaacgacaagggcaaggaggugcuggugcuguggggcauccaccaccccagcaccagcgccgaccagcagagccuguaccagaacgccgacgccuacguguucgugggcaccagcagauacagcaagaaguucaagcccgagaucgccaucagacccaaggugagagaccaggagggcagaaugaacuacuacuggacccugguggagcccggcgacaagaucaccuucgaggccaccggcaaccugguggugcccagauacgccuucgccauggagagaaacgccggcagcggcaucaucaucagcgacacccccgugcacgacugcaacaccaccugccagacccccaagggcgccaucaacaccagccugcccuuccagaacauccaccccaucaccaucggcaagugccccaaguacgugaagagcaccaagcugagacuggccaccggccugagaaacgugcccagcauccagagcagaggccuguucggcgccaucgccggcuucaucgagggcggcuggaccggcaugguggacggcugguacggcuaccaccaccagaacgagcagggcagcggcuacgccgccgaccugaagagcacccagaacgccaucgacgagaucaccaacaaggugaacagcgugaucgagaagaugaacacccaguucaccgccgugggcaaggaguucaaccaccuggagaagagaaucgagaaccugaacaagaagguggacgacggcuuccuggacaucuggaccuacaacgccgagcugcuggugcugcuggagaacgagagaacccuggacuaccacgacagcaacgugaagaaccuguacgagaaggugagaagccagcugaagaacaacgccaaggagaucggcaacggcugcuucgaguucuaccacaagugcgacaacaccugcauggagagcgugaagaacggcaccuacgacuaccccaaguacagcgaggaggccaagcugaacagagaggagaucgacggcgugaagcuggagagcaccagaaucuaccagauccuggccaucuacagcaccguggccagcagccuggugcugguggugagccugggcgccaucagcuucuggaugugcagcaacggcagccugcagugcagaaucugcaucuga

SEQ ID NO: 163967 - RNA, 1701 nt, Artificial Sequence; identical to SEQ ID NO: 162716
  derived and/or modified CDS sequence (opt4) from hemagglutinin__InfluenzaA__ACZ98188

SEQ ID NO: 163968 - RNA, 1701 nt, Artificial Sequence; identical to SEQ ID NO: 162909
  derived and/or modified CDS sequence (opt4) from hemagglutinin__InfluenzaA__ACZ98198

SEQ ID NO: 163969 - RNA, 1701 nt, Artificial Sequence; identical to SEQ ID NO: 162729
  derived and/or modified CDS sequence (opt4) from hemagglutinin__InfluenzaA__ACZ98208

SEQ ID NO: 163970 - RNA, 1701 nt, Artificial Sequence; identical to SEQ ID NO: 162729
  derived and/or modified CDS sequence (opt4) from hemagglutinin__InfluenzaA__ACZ98218

SEQ ID NO: 163971 - RNA, 1701 nt, Artificial Sequence; identical to SEQ ID NO: 162729
  derived and/or modified CDS sequence (opt4) from hemagglutinin__InfluenzaA__ACZ98228

SEQ ID NO: 163972 - RNA, 1701 nt, Artificial Sequence; identical to SEQ ID NO: 162729
  derived and/or modified CDS sequence (opt4) from hemagglutinin__InfluenzaA__ACZ98238

SEQ ID NO: 163973 - RNA, 1701 nt, Artificial Sequence; identical to SEQ ID NO: 163358
  derived and/or modified CDS sequence (opt4) from hemagglutinin__InfluenzaA__ACZ98248

SEQ ID NO: 163974 - RNA, 1701 nt, Artificial Sequence; identical to SEQ ID NO: 162729
  derived and/or modified CDS sequence (opt4) from hemagglutinin__InfluenzaA__ACZ98258

SEQ ID NO: 163975 - RNA, 1701 nt, Artificial Sequence; identical to SEQ ID NO: 162729
  derived and/or modified CDS sequence (opt4) from hemagglutinin__InfluenzaA__ACZ98268

SEQ ID NO: 163976 - RNA, 1701 nt, Artificial Sequence; identical to SEQ ID NO: 163869
  derived and/or modified CDS sequence (opt4) from hemagglutinin__InfluenzaA__ACZ98278

SEQ ID NO: 163977 - RNA, 1701 nt, Artificial Sequence; identical to SEQ ID NO: 163869
  derived and/or modified CDS sequence (opt4) from hemagglutinin__InfluenzaA__ACZ98288

SEQ ID NO: 163978 - RNA, 1701 nt, Artificial Sequence
  derived and/or modified CDS sequence (opt4) from hemagglutinin__InfluenzaA__ACZ98298
augaaggccauccugguggugcugcuguacaccuucgccaccgccaacgccgacacccugugcaucggcuaccacgccaacaacagcaccgacaccguggacaccgugcuggagaagaacgugaccgugacccacagcgugaaccugcuggaggacaagcacaacggcaagcugugcaagcugagaggcguggccccccugcaccugggcaagugcaacaucgccggcuggauccugggcaaccccgagugcgagagccugagcaccgccagcagcuggagcuacaucguggagaccagcagcagcgacaacggcaccugcuaccccggcgacuucaucgacuacgaggagcugagagagcagcugagcagcgugagcagcuucgagaaguucgagaucuuccccaagaccagcagcuggcccaaccacgacagcaacaagggcgugaccgccgccugcccccacgccggcgccaagagcuucuacaagaaccugaucuggcuggugaagaagggcaacagcuaccccaagcugagcaagagcuacaucaacgacaagggcaaggaggugcuggugcuguggggcauccaccaccccagcaccagcgccgaccagcagagccuguaccagaacgccgacgccuacguguucgugggcagcagcagauacagcaagaaguucaagcccgagaucgccaucagacccaaggugagagaccaggagggcagaaugaacuacuacuggacccugguggagcccggcgacaagaucaccuucgaggccaccggcaaccugguggugcccagauacgccuucgccauggagagaaacgccggcagcggcaucaucaucagcgacacccccgugcacgacugcaacaccaccugccagacccccaagggcgccaucaacaccagccugcccuuccagaacauccaccccaucaccaucggcaagugccccaaguacgugaagagcaccaagcugagacuggccaccggccugagaaacgugcccagcauccagagcagaggccuguucggcgccaucgccggcuucaucgagggcggcuggaccggcaugguggacggcugguacggcuaccaccaccagaacgagcagggcagcggcuacgccgccgaccugaagagcacccagaacgccaucgacggcaucaccaacaaggugaacagcgugaucgagaagaugaacacccaguucaccgccgugggcaaggaguucaaccaccuggagaagagaaucgagaaccugaacaagaagguggacgacggcuuccuggacaucuggaccuacaacgccgagcugcuggugcugcuggagaacgagagaacccuggacuaccacgacagcaacgugaagaaccuguacgagaaggugagaagccagcugaagaacaacgccaaggagaucggcaacggcugcuucgaguucuaccacaagugcgacaacaccugcauggagagcgugaagaacggcaccuacgacuaccccaaguacagcgaggaggccaagcugaacagagaggagaucgacggcgugaagcuggagagcaccagaaucuaccagauccuggccaucuacagcaccguggccagcagccuggugcugguggugagccugggcgccaucagcuucuggaugugcagcaacggcagccugcagugcagaaucugcaucuga

SEQ ID NO: 163979 - RNA, 1701 nt, Artificial Sequence
  derived and/or modified CDS sequence (opt4) from hemagglutinin__InfluenzaA__ACZ98318
augaaggccauccugguggugcugcuguacaccuucgccaccgccaacgccgacacccugugcaucggcuaccacgccaacaacagcaccgacaccguggacaccgugcuggagaagaacgugaccgugacccacagcgugaaccugcuggaggacaagcacaacggcaagcugugcaagcugagaggcguggccccccugcaccugggcaagugcaacaucgccggcuggauccugggcaaccccgagugcgagagccugagcaccgccagcagcuggagcuacaucguggagaccagcagcagcgacaacggcaccugcuaccccggcgacuucaucgacuacgaggagcugagagagcagcugagcagcgugagcagcuucgagagauucgagaucuuccccaagaccagcagcuggcccaaccacgacagcaacaagggcgugaccgccgccugcccccacgccggcgccaagagcuucuacaagaaccugaucuggcuggugaagaagggcaacagcuaccccaagcugagcaagagcuacaucaacgacaagggcaaggaggugcuggugcuguggggcauccaccaccccagcaccagcgccgaccagcagagccuguaccagaacgccgacgccuacguguucgugggcaccagcagauacagcaagaaguucaagcccgagaucgccaucagacccaaggugagagaccaggagggcagaaugaacuacuacuggacccugguggagcccggcgacaagaucaccuucgaggccaccggcaaccugguggugcccagauacgccuucgccauggagagaaacgccggcagcggcaucaucaucagcgacacccccgugcacgacugcaacaccaccugccagacccccaagggcgccaucaacaccagccugcccuuccagaacauccaccccaucaccaucggcaagugccccaaguacgugaagagcaccaagcugagacuggccaccggccugagaaacgugcccagcauccagagcagaggccuguucggcgccaucgccggcuucaucgagggcggcuggaccggcaugguggacggcugguacggcuaccaccaccagaacgagcagggcagcggcuacgccgccgaccugaagagcacccagaacgccaucgacgagaucaccaacaaggugaacagcgugaucgagaagaugaacacccaguucaccgccgugggcaaggaguucaaccaccuggagaagagaaucgagaaccugaacaagaagguggacgacggcuuccuggacaucuggaccuacaacgccgagcugcuggugcugcuggagaacgagagaacccuggacuaccacgacagcaacgugaagaaccuguacgagaaggugagaagccagcugaagaacaacgccaaggagaucggcaacggcugcuucgaguucuaccacaagugcgacaacaccugcauggagagcgugaagaacggcaccuacgacuaccccaaguacagcgaggaggccaagcugaacagagaggagaucgacggcgugaagcuggagagcaccagaaucuaccacauccuggccaucuacagcaccguggccagcagccuggugcugguggugagccugggcgccaucagcuucuggaugugcagcaacggcagccugcagugcagaaucugcaucuga

SEQ ID NO: 163980 - RNA, 1701 nt, Artificial Sequence; identical to SEQ ID NO: 162971
  derived and/or modified CDS sequence (opt4) from hemagglutinin__InfluenzaA__ACZ98328

SEQ ID NO: 163981 - RNA, 1701 nt, Artificial Sequence; identical to SEQ ID NO: 162729
  derived and/or modified CDS sequence (opt4) from hemagglutinin__InfluenzaA__ACZ98338

SEQ ID NO: 163982 - RNA, 1701 nt, Artificial Sequence; identical to SEQ ID NO: 163869
  derived and/or modified CDS sequence (opt4) from hemagglutinin__InfluenzaA__ACZ98348

SEQ ID NO: 163983 - RNA, 1701 nt, Artificial Sequence; identical to SEQ ID NO: 162729
  derived and/or modified CDS sequence (opt4) from hemagglutinin__InfluenzaA__ACZ98358

SEQ ID NO: 163984 - RNA, 1701 nt, Artificial Sequence; identical to SEQ ID NO: 162729
  derived and/or modified CDS sequence (opt4) from hemagglutinin__InfluenzaA__ACZ98368

SEQ ID NO: 163985 - RNA, 1701 nt, Artificial Sequence; identical to SEQ ID NO: 162971
  derived and/or modified CDS sequence (opt4) from hemagglutinin__InfluenzaA__ACZ98388

SEQ ID NO: 163986 - RNA, 1701 nt, Artificial Sequence; identical to SEQ ID NO: 162729
  derived and/or modified CDS sequence (opt4) from hemagglutinin__InfluenzaA__ACZ98398

SEQ ID NO: 163987 - RNA, 1701 nt, Artificial Sequence; identical to SEQ ID NO: 162729
  derived and/or modified CDS sequence (opt4) from hemagglutinin__InfluenzaA__ACZ98408

SEQ ID NO: 163988 - RNA, 1701 nt, Artificial Sequence; identical to SEQ ID NO: 162909
  derived and/or modified CDS sequence (opt4) from hemagglutinin__InfluenzaA__ACZ98418

SEQ ID NO: 163989 - RNA, 1701 nt, Artificial Sequence; identical to SEQ ID NO: 162729
  derived and/or modified CDS sequence (opt4) from hemagglutinin__InfluenzaA__ACZ98428

SEQ ID NO: 163990 - RNA, 1701 nt, Artificial Sequence; identical to SEQ ID NO: 162729
  derived and/or modified CDS sequence (opt4) from hemagglutinin__InfluenzaA__ACZ98438

SEQ ID NO: 163991 - RNA, 1701 nt, Artificial Sequence; identical to SEQ ID NO: 162729
  derived and/or modified CDS sequence (opt4) from hemagglutinin__InfluenzaA__ACZ98448

SEQ ID NO: 163992 - RNA, 1701 nt, Artificial Sequence; identical to SEQ ID NO: 163869
  derived and/or modified CDS sequence (opt4) from hemagglutinin__InfluenzaA__ACZ98458

SEQ ID NO: 163993 - RNA, 1701 nt, Artificial Sequence
  derived and/or modified CDS sequence (opt4) from hemagglutinin__InfluenzaA__ACZ98546
augaaggccauccugguggugcugcuguacaccuucgccaccgccaacgccgacacccugugcaucggcuaccacgccaacaacagcaccgacaccguggacaccgugcuggagaagaacgugaccgugacccacagcgugaaccugcuggaggacaagcacaacggcaagcugugcaagcugagaggcguggccccccugcaccugggcaagugcaacaucgccggcuggauccugggcaaccccgagugcgagagccugagcaccgccagcagcuggagcuacaucguggagaccagcagcagcgacaacggcaccugcuaccccggcgacuucaucgacuacgaggagcugagagagcagcugagcagcgugagcagcuucgagagauucgagaucuuccccaagaccagcagcuggcccaaccacgaccccaacaagggcgugaccgccgccugcccccacgccggcgccaagagcuucuacaagaaccugaucuggcuggugaagaagggcaacagcuaccccaagcugagcaagagcuacaucaacgacaagggcaaggaggugcuggugcuguggggcauccaccaccccagcaccagcgccgaccagcagagccuguaccagaacgccgacgccuacguguucgugggcaccagcagauacagcaagaaguucaagcccgagaucgccaucagacccaaggugagagaccaggagggcagaaugaacuacuacuggacccugguggagcccggcgacaagaucaccuucgaggccaccggcaaccugguggugcccagauacgccuucgccauggagagaaacgccggcagcggcaucaucaucagcgacacccccgugcacgacugcaacaccaccugccagacccccaagggcgccaucaacaccagccugcccuuccagaacauccaccccaucaccaucggcaagugccccaaguacgugaagagcaccaagcugagacugaccaccggccugagaaacgugcccagcauccaguacagaggccuguucggcgccaucaccggcuucaucgagggcggcuggaccggcaugguggacggcugguacggcuaccaccaccagaacgagcagggcagcggcuacgccgccgaccugaagagcacccagaacgccaucgacgagaucaccaacaaggugaacagcgugaucgagaagaugaacacccaguucaccgccgugggcaaggaguucaaccaccuggagaagagaaucgagaaccugaacaagaagguggacgacggcuuccuggacaucuggaccuacaacgccgagcugcuggugcugcuggagaacgagagaacccuggacuaccacgacagcaacgugaagaaccuguacgagaaggugagaagccagcugaagaacaacgccaaggagaucggcaacggcugcuucgaguucuaccacaagugcgacaacaccugcauggagagcgugaagaacggcaccuacgacuaccccaaguacagcgaggaggccaagcugaacagagaggagaucgacggcgugaagcuggagagcaccagaaucuaccagauccuggccaucuacagcaccguggccagcagccuggugcugguggugagccugggcgccaucagcuucuggaugugcagcaacggcagccugcagugcagaaucugcaucuga

SEQ ID NO: 163994 - RNA, 1701 nt, Artificial Sequence
  derived and/or modified CDS sequence (opt4) from hemagglutinin__InfluenzaA__ACZ98560
augaaggccaucagaguggugcugcuguacaccuucgccaccgccaacgccgacacccugugcaucggcuaccacgccaacaacagcaccgacaccguggacaccgugcuggagaagaacgugaccgugacccacagcgugaaccugcuggaggacaagcacaacggcaagcugugcaagcugagaggcguggccccccugcaccugggcaagugcaacaucgccggcuggauccugggcaaccccgagugcgagagccugagcaccgccagcagcuggagcuacaucguggagaccagcagcagcgacaacggcaccugcuaccccggcgacuucaucgacuacgaggagcugagagagcagcugagcagcgugagcagcuucgagagauucgagaucuuccccaagaccagcagcuggcccaaccacgaccccaacaagggcgugaccgccgccugcccccacgccggcgccaagagcuucuacaagaaccugaucuggcuggugaagaagggcaacagcuaccccaagcugagcaagagcuacaucaacgacaagggcaaggaggugcuggugcuguggggcauccaccaccccagcaccagcgccgaccagcagagccuguaccagaacgccgacgccuacguguucgugggcaccagcagauacagcaagaaguucaagcccgagaucgccaucagacccaaggugagagaccaggagggcagaaugaacuacuacuggacccugguggagcccggcgacaagaucaccuucgaggccaccggcaaccugguggugcccagauacgccuucgccauggagagaaacgccggcagcggcaucaucaucagcgacacccccgugcacgacugcaacaccaccugccagacccccaagggcgccaucaacaccagccugcccuuccagaacauccaccccaucaccaucggcaagugccccaaguacgugaagagccccaagcugagacuggccaccggcaugagaaacgugcccuucauccaguacagaggccuguucggcgccaucaccggcuucaucgagggcggcuggaccggcaugguggacggcugguacggcuaccaccaccagaacgagcagggcagcggcuacgccgccgaccugaagagcacccagaacgccaucgacgagaucaccaacaaggugaacagcgugaucgagaagaugaacacccaguucaccgccgugggcaaggaguucaaccaccuggagaagagaaucgagaaccugaacaagaagguggacgacggcuuccuggacaucuggaccuacaacgccgagcugcuggugcugcuggagaacgagagaacccuggacuaccacgacagcaacgugaagaaccuguacgagaaggugagaagccagcugaagaacaacgccaaggagaucggcaacggcugcuucgaguucuaccacaagugcgacaacaccugcauggagagcgugaagaacggcaccuacgacuaccccaaguacagcgaggaggccaagcugaacagagaggagaucgacggcgugaagcuggagagcaccagaaucuaccagauccuggccaucuacagcaccguggccagcagccuggugcugguggugagccugggcgccaucagcuucuggaugugcagcaacggcagccugcagugcagaaucugcaucuga

SEQ ID NO: 163995 - RNA, 1701 nt, Artificial Sequence
  derived and/or modified CDS sequence (opt4) from hemagglutinin__InfluenzaA__ACZ98567
augaaggccauccugguggugcugcuguacaccuucgccaccgccaacgccgacacccugugcaucggcuaccacgccaacaacagcaccgacaccguggacaccgugcuggagaagaacgugaccgugacccacagcgugaaccugcuggaggacaagcacaacggcaagcugugcaagcugagaggcguggccccccugcaccugggcaagugcaacaucgccggcuggauccugggcaaccccgagugcgagagccugagcaccgccagcagcuggagcuacaucguggagaccagcagcagcgacaacggcaccugcuaccccggcgacuucaucgacuacgaggagcugagagagcagcugagcagcgugagcagcuucgagagauucgagaucuuccccaagaccagcagcuggcccaaccacgaccccaacaagggcgugaccgccgccugcccccacgccggcgccaagagcuucuacaagaaccugaucuggcuggugaagaagggcaacagcuaccccaagcugagcaagagcuacaucaacgacaagggcaaggaggugcuggugcuguggggcauccaccaccccagcaccagcgccgaccagcagagccuguaccagaacgccgacgccuacguguucgugggcaccagcagauacagcaagaaguucaagcccgagaucgccaucagacccaaggugagagaccaggagggcagaaugaacuacuacuggacccugguggagcccggcgacaagaucaccuucgaggccaccggcaaccugguggugcccagauacgccuucgccauggagagaaacgccggcagcggcaucaucaucagcgacacccccgugcacgacugcaacaccaccugccagacccccaagggcgccaucaacaccagccugcccuuccagaacauccaccccaucaccaucggcaagugccccaaguacgugaagagccccaagcugagacuggccagcggcaugagaaacgugcccuucauccagagcagaggccuguucggcgccaucaccggcuucaucgaggagggcuggaccggcaugguggacggcugguacggcuuccaccaccagaacgagcagggcagcggcuacgccgccgaccugaagagcacccagaacgccaucgacgagaucaccaacaaggugaacagcgugaucgagaagaugaacacccaguucaccgccgugggcaaggaguucaaccaccuggagaagagaaucgagaaccugaacaagaagguggacgacggcuuccuggacaucuggaccuacaacgccgagcugcuggugcugcuggagaacgagagaacccuggacuaccacgacagcaacgugaagaaccuguacgagaaggugagaagccagcugaagaacaacgccaaggagaucggcaacggcugcuucgaguucuaccacaagugcgacaacaccugcauggagagcgugaagaacggcaccuacgacuaccccaaguacagcgaggaggccaagcugaacagagaggagaucgacggcgugaagcuggagagcaccagaaucuaccagauccuggccaucuacagcaccguggccagcagccuggugcugguggugagccugggcgccaucagcuucuggaugugcagcaacggcagccugcagugcagaaucugcaucuga

SEQ ID NO: 163996 - RNA, 1701 nt, Artificial Sequence; identical to SEQ ID NO: 162716
  derived and/or modified CDS sequence (opt4) from hemagglutinin__InfluenzaA__ACZ98671

SEQ ID NO: 163997 - RNA, 1701 nt, Artificial Sequence; identical to SEQ ID NO: 162716
  derived and/or modified CDS sequence (opt4) from hemagglutinin__InfluenzaA__ACZ98681

SEQ ID NO: 163998 - RNA, 1701 nt, Artificial Sequence; identical to SEQ ID NO: 162729
  derived and/or modified CDS sequence (opt4) from hemagglutinin__InfluenzaA__ACZ98691

SEQ ID NO: 163999 - RNA, 1701 nt, Artificial Sequence
  derived and/or modified CDS sequence (opt4) from hemagglutinin__InfluenzaA__ADA60799
augaaggccauccugguggugcugcuguacaccuucgccaccgccaacgccgacacccugugcaucggcuaccacgccaacaacagcaccgacaccguggacaccgugcuggagagaaacgugaccgugacccacagcgugaaccugcuggaggacaagcacaacggcaagcugugcaagcugagaggcguggccccccugcaccugggcaagugcaacaucgccggcuggauccugggcaaccccgagugcgagagccugagcaccgccagcagcuggagcuacaucguggagaccagcagcagcgacaacggcaccugcuaccccggcgacuucaucgacuacgaggagcugagagagcagcugagcagcgugagcagcuucgagagauucgagaucuuccccaagaccagcagcuggcccaaccacgacagcaacaagggcgugaccgccgccugcccccacgccggcgccaagagcuucuacaagaaccugaucuggcuggugaagaagggcaacagcuaccccaagcugagcaagagcuacaucaacgacaagggcaaggaggugcuggugcuguggggcauccaccaccccagcaccagcgccgaccagcagagccuguaccagaacgccgacgccuacguguucgugggcaccagcagauacagcaagaaguucaagcccgagaucgccaucagacccaaggugagagaccaggagggcagaaugaacuacuacuggacccugguggagcccggcgacaagaucaccuucgaggccaccggcaaccugguggugcccagauacgccuucgccauggagagaaacgccggcagcggcaucaucaucagcgacacccccgugcacgacugcaacaccaccugccagacccccaagggcgccaucaacaccagccugcccuuccagaacauccaccccaucaccaucggcaagugccccaaguacgugaagagcaccaagcugagacuggccaccggccugagaaacauccccagcauccagagcagaggccuguucggcgccaucgccggcuucaucgagggcggcuggaccggcaugguggacggcugguacggcuaccaccaccagaacgagcagggcagcggcuacgccgccgaccugaagagcacccagaacgccaucgacgagaucaccaacaaggugaacagcgugaucgagaagaugaacacccaguucaccgccgugggcaaggaguucaaccaccuggagaagagaaucgagaaccugaacaagaagguggacgacggcuuccuggacaucuggaccuacaacgccgagcugcuggugcugcuggagaacgagagaacccuggacuaccacgacagcaacgugaagaaccuguacgagaaggugagaagccagcugaagaacaacgccaaggagaucggcaacggcugcuucgaguucuaccacaagugcgacaacaccugcauggagagcgugaagaacggcaccuacgacuaccccaaguacagcgaggaggccaagcugaacagagaggagaucgacggcgugaagcuggagagcaccagaaucuaccagauccuggccaucuacagcaccguggccagcagccuggugcugguggugagccugggcgccaucagcuucuggaugugcagcaacggcagccugcagugcagaaucugcaucuga

SEQ ID NO: 164000 - RNA, 1701 nt, Artificial Sequence; identical to SEQ ID NO: 163893
  derived and/or modified CDS sequence (opt4) from hemagglutinin__InfluenzaA__ADA69302

SEQ ID NO: 164001 - RNA, 1701 nt, Artificial Sequence; identical to SEQ ID NO: 163893
  derived and/or modified CDS sequence (opt4) from hemagglutinin__InfluenzaA__ADA69312

SEQ ID NO: 164002 - RNA, 1701 nt, Artificial Sequence; identical to SEQ ID NO: 163893
  derived and/or modified CDS sequence (opt4) from hemagglutinin__InfluenzaA__ADA69322

SEQ ID NO: 164003 - RNA, 1701 nt, Artificial Sequence; identical to SEQ ID NO: 163893
  derived and/or modified CDS sequence (opt4) from hemagglutinin__InfluenzaA__ADA69332

SEQ ID NO: 164004 - RNA, 1701 nt, Artificial Sequence; identical to SEQ ID NO: 163830
  derived and/or modified CDS sequence (opt4) from hemagglutinin__InfluenzaA__ADA70329

SEQ ID NO: 164005 - RNA, 1698 nt, Artificial Sequence
  derived and/or modified CDS sequence (opt4) from hemagglutinin__InfluenzaA__ADA71150
augaaggugaagcugcuggugcugcugugcaccuucaccgccaccuacgccgacaccaucugcaucggcuaccacgccaacaacagcaccgacaccguggacaccgugcuggagaagaacgugaccgugacccacagcgugaaccugguggagaacagccacaacggcaagcugugccugcugaagggcaucgccccccugcagcugggcaacugcagcguggccggcuggauccugggcaaccccgagugcgagcugcugaucagcaaggagagcuggagcuacaucguggagaagcccaaccccgagaacggcaccugcuaccccggccacuucgccgacuacgaggagcugagagagcagcugagcagcgugagcagcuucgagagauucgagaucuuccccaaggagagcagcuggcccaaccacaccgugaccggcgugagcgccagcugcagccacaacggcgagagcagcuucuacagaaaccugcuguggcugaccggcaagaacggccuguaccccaaccugagcaagagcuacgccaacaacaaggagaaggaggugcuggugcuguggggcgugcaccacccccccagcaucagcaaccagaagacccuguaccacaccgagaacgccuacgugagcguggugagcagccacuacagcagaaaguucacccccgagaucgccaagagacccaaggugagagaccaggagggcagaaucaacuacuacuggacccugcuggagcccggcgacaccaucaucuucgaggccaacggcaaccugaucgcccccagauacgccuucgcccugagcagaggcuucggcagcggcaucaucaacagcaacgcccccauggacaagugcgacgccaagugccagaccccccagggcgccaucaacagcagccugcccuuccagaacgugcaccccgugaccaucggcgagugccccaaguacgugagaagcgccaagcugagaauggugaccggccugagaaacauccccagcauccagagcagaggccuguucggcgccaucgccggcuucaucgagggcggcuggaccggcaugguggacggcugguacggcuaccaccaccagaacgagcagggcagcggcuacgccgccgaccagaagagcacccagaacgccaucaacggcaucaccaagaaggugaacagcgugaucgagaagaugaacacccaguucaccgccgugggcaaggaguucaacaagcuggagagaagaauggagaaccugaacaagaagguggacgacggcuucaucgacaucuggaccuacaacgccgagcugcuggugcugcuggagaacgagagaacccuggacuuccacgacagcaacgugaagaaccuguacgagaaggugaagagccagcugaagaacaacgccaaggagaucggcaacggcugcuucgaguucuaccacaagugcaacgacgagugcauggagagcgugaagaacggcaccuacgacuaccccaaguacagcgaggagagcaagcugaacagagagaagaucgacggcgugaagcuggagagcaugggcguguaccagauccuggccaucuacagcaccguggccagcagccuggugcugcuggugagccugggcgccaucagcuucuggaugugcagcaacggcagccugcagugcagaaucugcaucuga

SEQ ID NO: 164006 - RNA, 1701 nt, Artificial Sequence
  derived and/or modified CDS sequence (opt4) from hemagglutinin__InfluenzaA__ADA71152
augaagaccaucaucgcccugagcuacauccugugccugguguucgcccagaagcugcccggcaacgacaacagcaccgccacccugugccugggccaccacgccgugcccaacggcaccaucgugaagaccaucaccaacgaccagaucgaggugaccaacgccaccgagcuggugcagagcagcagcaccggcgagaucugcgacagcccccaccagauccuggacggcggcaacugcacccugaucgacgcccugcugggcgacccccagugcgacggcuuccagaacaagaagugggaccuguucguggagagaagcaaggccuacagcaacugcuaccccuacgacgugcccgacuacgccagccugagaagccugguggccagcagcggcacccuggaguucaacaacgagagcuucaacuggaccggcgugacccagaacggcaccagcagcgccugcaucagaagaagcaacaacagcuucuucagcagacugaacuggcugacccaccugaaguucaaguaccccgcccugaacgugaccaugcccaacaacgagcaguucgacaagcuguacaucuggggcgugcaccaccccggcaccgacaacgaccagaucuuccuguacgcccaggccagcggcagaaucaccgugagcaccaagagaagccagcagaccgugauccccaacaucggcagcagacccagagugagaaacauccccagcagaaucagcaucuacuggaccaucgugaagcccggcgacauccugcugaucaacagcaccggcaaccugaucgcccccagaggcuacuucaagaucagaagcggcaagagcagcaucaugagaagcgacgcccccaucggcaagugcaacagcgagugcaucacccccaacggcagcauccccaacgacaagcccuuccagaacgugaacagaaucaccuacggcgccugccccagauacgugaagcagaacacccugaagcuggccaccggcaugagaaacgugcccgagaagcagaccagaggcaucuucggcgccaucgccggcuucaucgagaacggcugggagggcaugguggacggcugguacggcuucagacaccagaacagcgagggcagaggccaggccgccgaccugaagagcacccaggccgccaucgaccagaucaacggcaagcugaacagacugaucggcaagaccaacgagaaguuccaccagaucgagaaggaguucagcgagguggagggcagaauccaggaccuggagaaguacguggaggacaccaagaucgaccuguggagcuacaacgccgagcugcugguggcccuggagaaccagcacaccaucgaccugaccgacagcgagaugaacaagcuguucgagaagaccaagaagcagcugagagagaacgccgaggacaugggcaacggcugcuucaagaucuaccacaagugcgacaacgccugcaucggcagcaucagaaacggcaccuacgaccacgacguguacagagacgaggcccugaacaacagauuccagaucaagggcguggagcugaagagcggcuacaaggacuggauccuguggaucagcuucgccaucagcugcuuccugcugugcguggcccugcugggcuucaucaugugggccugccagaagggcaacaucagaugcaacaucugcaucuga

SEQ ID NO: 164007 - RNA, 1698 nt, Artificial Sequence
  derived and/or modified CDS sequence (opt4) from hemagglutinin__InfluenzaA__ADA71154
augaaggugaagcugcuggugcugcugugcaccuucaccgccaccuacgccgacaccaucugcaucggcuaccacgccaacaacagcaccgacaccguggacaccgugcuggagaagaacgugaccgugacccacagcgugaaccugcuggagaacagccacaacggcaagcugugccugcugaagggcaucgccccccugcagcugggcaacugcagcguggccggcuggauccugggcaacagcgagugcgagcugcugaucagcaaggagagcuggagcuacaucguggagaagcccaaccccgagaacggcaccugcuacuucggccacuucgccgacuacgaggagcugagagagcaguucggcagcgugagcagcuucgagagauucgagaucuuccccaaggagagcagcuggcccaaccacaccgugaccggcgugagcgccagcugcagccacaacggcgagagcagcuucuacagaaaccugcuguggcugaccggcaagaacggccuguaccccaaccugagcaagagcuacgccaacaacaaggagaaggaggugcuggugcuguggggcgugcaccacccccccagcaucaacgaccagaagacccuguaccacaccgagaacgccuacgugagcguggugagcagccacuacagcagaaaguucacccccgagaucgccaagagacccaaggugagagaccaggagggcagaaucaacuacuacuggacccugcuggagcccagagacaccaucaucuucgaggccaacggcaaccugaucgcccccagauacgccuucgcccugagcagaggcuucggcagcggcaucaucaacagcaacgcccccauggacaagugcgacgccaagugccagaccccccagggcgccaucaacagcagccugcccuuccagaacgugcaccccgugaccaucggcgagugccccaaguacgugagaagcgccaagcugagaauggugaccggccugagaaacauccccagcauccagagcagaggccuguucggcgccaucgccggcuucaucgagggcggcuggaccggcaugguggacggcugguacggcuaccaccaccagaacgagcagggcagcggcuacgccgccgaccagaagagcacccagaacgccaucaacggcaucaccaacaaggugaacagcgugaucgagaagaugaacacccaguucaccgccgugggcaaggaguucaacaagcuggagagaagaauggagaaccugaacaagaagguggacgacggcuucaucgacaucuggaccuacaacgccgagcugcuggugcugcuggagaacgagagaacccuggacuuccacgacagcaacgugaagaaccuguacgagaaggugaagagccagcugaagaacaacgccaaggagaucggcaacggcugcuucgaguucuaccacaagugcaacgacgagugcauggagagcgugaagaacggcaccuacgacuaccccaaguacagcgaggagagcaagcugaacagagagaagaucgacggcgugaagcuggagagcaugggcguguaccagauccuggccaucuacagcaccguggccagcagccuggugcugcuggugagccugggcgccaucagcuucuggaugugcagcaacggcagccugcagugcagaaucugcaucuga

SEQ ID NO: 164008 - RNA, 1698 nt, Artificial Sequence
  derived and/or modified CDS sequence (opt4) from hemagglutinin__InfluenzaA__ADA71158
augaaggugaagcugcuggugcugcugugcaccuucaccgccaccuacgccgacaccaucugcaucggcuaccacgccaacaacagcaccgacaccguggacaccgugcuggagaagaacgugaccgugacccacagcgugaaccugcuggagaacagccacaacggcaagcugugccugcugaagggcaucgccccccugcagcugggcaacugcagcguggccggcuggauccugggcaaccccgagugcgagcugcugaucagcaaggagaccuggagcuacaucguggagaagcccaaccccgagaacggcaccugcuaccccggccacuucgccgacuacgaggagcugagagagcagcugagcagcgugagcagcuucgagagauucgagaucuuccccaaggagagcagcuggcccaaccacaccgugaccggcgugagcgccagcugcagccacaacggcgagagcagcuucuacagaaaccugcuguggcugaccggcaagaacggccuguaccccaaccugagcaagagcuacgccaacaacaaggagaaggaggugcuggugcuguggggcgugcaccacccccccagcaucaacgaccagagaacccuguaccacaccgagaacgccuacgugagcguggugagcagccacuacagcagaaaguucacccccgagaucgccaagagacccaaggugagagaccaggagggcagaaucaacuacuacuggacccugcuggagcccagagacaccaucaucuucgaggccaacggcaaccugaucgcccccagauacgccuucgcccugagcagaggcuucggcagcggcaucaucaacagcaacgcccccauggacaagugcgacgccaagugccagaccccccagggcgccaucaacagcagccugcccuuccagaacgugcaccccgugaccaucggcgagugccccaaguacgugagaagcgccaagcugagaauggugaccggccugagaaacacccccagcauccagagcagaggccuguucggcgccaucgccggcuucaucgagggcggcuggaccggcaugguggacggcugguacggcuaccaccaccagaacgagcagggcagcggcuacgccgccgaccagaagagcacccagaacgccaucaacggcaucaccaacaaggugaacagcgugaucgagaagaugaacacccaguucaccgccgugggcaaggaguucaacaagcuggagagccugauggacauccugaacaagaagguggacgacggcuucaucgacaucuggaccuacaacgccgagcugcuggugcugcuggagaacgagagaacccuggacuuccacgacagcaacgugaagaaccuguacgagaaggugaagagccagcugaagaacaacgccaaggagaucggcaacggcugcuucgaguucuaccacaagugcaacgacgagugcauggagagcgugaagaacggcaccuacgacuaccccaaguacagcgaggagagcaagcugaacagagagaagaucgacggcgugaagcuggagagcaugggcguguaccagauccuggccaucuacagcaccguggccagcagccuggugcugcuggugagccugggcgccaucagcuucuggaugugcagcaacggcagccugcagugcagaaucugcaucuga

SEQ ID NO: 164009 - RNA, 1701 nt, Artificial Sequence; identical to SEQ ID NO: 162494
  derived and/or modified CDS sequence (opt4) from hemagglutinin__InfluenzaA__ADA71162

SEQ ID NO: 164010 - RNA, 1698 nt, Artificial Sequence
  derived and/or modified CDS sequence (opt4) from hemagglutinin__InfluenzaA__ADA71164
augaaggugaagcugcuggugcugcugugcaccuucaccgccaccuacgccgacaccaucugcaucggcuaccacgccaacaacagcaccgacaccguggacaccgugcuggagaagaacgugaccgugacccacagcgugaaccugcuggagaacagccacaacggcaagcugugccugcugaagggcaucgccccccugcagcugggcaacugcagcguggccggcuggauccugggcaaccccgagugcgagcugcuggugagcaaggagagcuggagcuacaucguggagaagcccaaccccgagaacggcaccugcuaccccggccacuucgccgacuacgaggagcugagagagcagcugagcagcgugagcagcuucgagagauucgagaucuuccccaaggagagcagcuggcccaaccacaccgugaccggcgccagcgccagcugcagccacaacggcgagaacagcuucuacagaaaccugcuguggcugaccggcaagaacggccuguaccccaaccugagcaagagcuacgccaacaacaaggagaaggaggugcuggugcuguggggcgugcaccacccccccagcaucgccgaccagaagacccuguaccacaccgagaacgccuacgugagcguggugagcagccacuacagcagaaaguucacccccgagaucgccaagagacccaaggugagagaccaggagggcagaauccacuacuacuggacccugcuggagcccggcgacaccaucaucuucgaggccaacggcaaccugaucgcccccagauacgccuucgcccugagcagaggcuucggcagcggcaucaucaacagcaacgcccccauggacaagugcgacgccaccugccagaccccccagggcgccaucaacagcagccugcccuuccagaacgugcaccccgugaccaucggcgagugccccaaguacgugagaagcgccaagcugagaauggugaccggccugagaaacauccccagcauccagagcagaggccuguucggcgccaucgccggcuucaucgagggcggcuggaccggcaugguggacggcugguacggcuaccaccaccagaacgagcagggcagcggcuacgccgccgaccagaagagcacccagaacgccaucaacggcaucaccaacaaggugaacagcgugaucgagaagaugaacacccaguucaccgccgugggcaaggaguucaacaagcuggagagaagaauggagaaccugaacaagaagguggacgacggcuucaucgacaucuggaccuacaacgccgagcugcuggugcugcuggagaacgagagaacccuggacuuccacgacagcaacgugaagaaccuguacgagaaggugaucagccagcugaagaucaacgccaaggaccugggcuacggcugcuucgaguucuaccacaagugcaacgacgagugcauggagagcgugaagaacggcaccuacgacuaccccaaguacagcgaggagagcaagcugaacagagagaagaucgacggcgugaagcuggagagcaugggcguguaccagauccuggccaucuacagcaccguggccagcagccuggugcugcuggugagccugggcgccaucagcuucuggaugugcagcaacggcagccugcagugcagaaucugcaucuga

SEQ ID NO: 164011 - RNA, 1698 nt, Artificial Sequence
  derived and/or modified CDS sequence (opt4) from hemagglutinin__InfluenzaA__ADA71168
augaaggugaagcugcuggugcugcugugcaccuucaccgccaccuacgccgacaccaucugcaucggcuaccacgccaacaacagcaccgacaccguggacaccgugcuggagaagaacgugaccgugacccacagcgugaaccugcuggaggacaaccacaacggcaagcugugccugcugaagggcaaggccccccugcagcugggcaacugcagcguggccggcuggauccugggcaaccccgagugcggccugcugaucagcaaggagagcuggagcuacaucguggagagacccaaccccgagaacggcaccugcuaccccggccacuucgccgacuacgaggagcugagagagcagcugagcagcgugagcagcuucgagagauucgagaucuuccccaaggagagcagcuggcccaaccacaccgugaccggcgugagcgccagcugcagccacaacggcgagagcagcuucuacaagaaccugcuguggcugaccggcaagaacggccuguaccccaaccugagcaagagcuacgccaacaacaaggagaaggaggugcuggugcuguggggcgugcaccacccccccaacaucggcgugcagaugacccuguaccacaaggagaacgccuacgugagcguggugagcagccacuacagcagaaaguucacccccgagaucgugaagagacccaaggugagagaccaggagggcagaaucaacuacuacuggacccugcuggagcccggcgacaccaucaucuucgaggccaacggcaaccugaucgcccccagauacgccuucgcccugagcagaggcuucggcagcggcaucaucaacagcaacgcccccauggacgagugcgacgccaagugccagaccccccagggcgccaucaacagcagccugcccuuccagaacgugcaccccgugaccaucggcgagugccccaaguacgugagaagcgccaagcugagaauggugaccggccugagaaacauccccagcauccagagcagaggccuguucggcgccaucgccggcuucaucgagggcggcuggaccggcaugguggacggcugguacggcuaccaccaccagaacgagcagggcagcggcuacgccgccgaccagaagagcacccagaacgccaucaacggcaucaccaacaaggugaacagcgugaucgagaagaugaacacccaguucaccgccgugggcaaggaguucaacaagcuggagagaagaauggagaaccugaacaagaagguggacgacggcuucaucgacaucuggaccuacaacgccgagcugcuggugcugcuggagaacgagagaacccuggacuuccacgacagcaacgugaagaaccuguacgagaaggugaagagccagcugaagaacaacgccaaggagaucggcaacggcugcuucgaguucuaccacaagugcaacgacgagugcauggagagcgugaagaacggcaccuacgacuaccccaaguacagcgaggagagcaagcugaacagagagaagaucgacggcgugaagcuggagagcaugggcguguaccagauccuggccaucuacagcaccguggccagcagccuggugcugcuggugagccugggcgccaucagcuucuggaugugcagcaacggcagccugcagugcagaaucugcaucuga

SEQ ID NO: 164012 - RNA, 1698 nt, Artificial Sequence
  derived and/or modified CDS sequence (opt4) from hemagglutinin__InfluenzaA__ADA71170
augaaggugaagcugcuggugcugcugugcaccuucaccgccaccuacgccgacaccaucugcaucggcuaccacgccaacaacagcaccgacaccguggacaccgugcuggagaagaacggcaccgugacccccagcggcaaccugguggagaacagccccaacggcaagcugugccugcugaagggcaucaccccccugcagcugggcaagugcagcguggccggcuggauccugggcaaccccaagugggagcugcuggugagcaaggagagcuggagcuacaucggcaagaagcccaaccccgagaacggcaccugcuaccccggccacuuccccuacuacgaggagcugagagagcagcugagcagcgugagcagcuucgagagauucgagaucuuccccaaggagagcagcuggcccaaccacaccgugaccggcgccagcgccagcugcagccacaacggcgagaacagcuucuacagaaaccugcuguggcugaccggcaagaacggccuguaccccaaccugagcaagagcuacgccaacaacaaggagaaggaggugcuggugcuguggggcgugcaccacccccccaacaucgccgaccagaagacccuguaccacaccgagaacgccuacgugagcguggugagcagccacuacagcagaaaguucacccccgagaucgccaagagacccaaggugagagaccaggagggcagaaucaacuacuacuggacccugcuggagcccggcgacaccaucaucuucgaggccaacggcaaccugaucgcccccagauacgccuucgcccugagcagaggcuucggcagcggcaucaucaacagcaacgcccccauggacaagugcgacgccaagugccagaccccccagggcgccaucaacagcagccugcccuuccagaacgugcaccccgugaccaucggcgagugccccaaguacgugagaagcgccaagcugagaauggugaccggccugagaaacauccccagcauccagagcagaggccuguucggcgccaucgccggcuucaucgagggcggcuggaccggcaugguggacggcugguacggcuaccaccaccagaacgagcagggcagcggcuacgccgccgaccagaagagcacccagaacgccaucaacggcaucaccaacaaggugaacagcgugaucgagaagaugaacacccaguucaccgccgugggcaaggaguucaacaagcuggagagaagaauggagaaccugaacaagaagguggacgacggcuucaucgacaucuggaccuacaacgccgagcugcuggugcugcuggagaacgagagaacccuggacuuccacgacagcaacgugaagaaccuguacgagaaggugaagagccagcugaagaacaacgccaaggagaucggcaacggcugcuucgaguucuaccacaagugcaacgacgagugcauggagagcgugaagaacggcaccuacgacuaccccaaguacagcgaggagagcaagcugaacagagagaagaucgacggcgugaagcuggagagcaugggcguguaccagauccuggccaucuacagcaccguggccagcagccuggugcugcuggugagccugggcgccaucagcuucuggaugugcagcaacggcagccugcagugcagaaucugcaucuga

SEQ ID NO: 164013 - RNA, 1701 nt, Artificial Sequence
  derived and/or modified CDS sequence (opt4) from hemagglutinin__InfluenzaA__ADA71172
augaagaccaucaucgcccugagcuacauccugugccugguguucacccagaagcugcccggcaacgacaacagcaccgccacccugugccugggccaccacgccgugcccaacggcaccaucgugaagaccaucaccaacgaccagaucgaggugaccaacgccaccgagcuggugcagagcagcagcaccggcgagaucugcgacagcccccaccagauccuggacggcgagaacugcacccugaucgacgcccugcugggcgacccccagugcgacggcuuccagaacaagaagugggaccuguucguggagagaagcaaggccuacagcaacugcuaccccuacgacgugcccgacuacgccagccugagaagccugguggccagcagcggcacccuggaguucaacaacgagagcuucaacuggaccggcgugacccagaacggcaccagcagcgccugcaucagaagaagcaacaacagcuucuucagcagacugaacuggcugacccaccugaaguucaaguaccccgcccugaacgugaccaugcccaacaacgagcaguucgacaagcuguacaucuggggcgugcaccaccccggcaccgacaacgaccagaucuuccuguacgcccaggccagcggcagaaucaccgugagcaccaagagaagccagcagaccgugauccccaacaucggcagcagacccagagugagaaacauccccagcagaaucagcaucuacuggaccaucgugaagcccggcgacauccugcugaucaacagcaccggcaaccugaucgcccccagaggcuacuucaagaucagaagcggcaagagcagcaucaugagaagcgacgcccccaucggcaagugcaacagcgagugcaucacccccaacggcagcauccccaacgacaagcccuuccagaacgugaacagaaucaccuacggcgccugccccagauacgugaagcagaacacccugaagcuggccaccggcaugagaaacgugcccgagaagcagaccagaggcaucuucggcgccaucgccggcuucaucgagaacggcugggagggcaugguggacggcugguacggcuucagacaccagaacagcgagggcagaggccaggccgccgaccugaagagcacccaggccgccaucgaccagaucaacggcaagcugaacagacugaucggcaagaccaacgagaaguuccaccagaucgagaaggaguucagcgagguggagggcagaauccaggaccuggagaaguacguggaggacaccaagaucgaccuguggagcuacaacgccgagcugcugguggcccuggagaaccagcacaccaucgaccugaccgacagcgagaugaacaagcuguucgagaagaccaagaagcagcugagagagaacgccgaggacaugggcaacggcugcuucaagaucuaccacaagugcgacaacgccugcaucggcagcaucagaaacggcaccuacgaccacgacguguacagagacgaggcccugaacaacagauuccagaucaagggcguggagcugaagagcggcuacaaggacuggauccuguggaucagcuucgccaucagcugcuuccugcugugcguggcccugcugggcuucaucaugugggccugccagaagggcaacaucagaugcaacaucugcaucuga

SEQ ID NO: 164014 - RNA, 1698 nt, Artificial Sequence
  derived and/or modified CDS sequence (opt4) from hemagglutinin__InfluenzaA__ADA71176
augaaggugaagcugcuggugcugcugugcaccuucaccgccaccuacgccgacaccaucugcaucggcuaccacgccaacaacagcaccgacaccguggacaccgugcuggagaagaacgugaccgugacccacagcgugaaccugcuggagaacagccacaacggcaagcugugccugcugaagggcaucgccccccugcagcugggcaacugcagcguggccggcuggauccugggcaaccccgagugcgagcugcugaucagcaaggagagcuggagcuacaucguggagaagcccaaccccgagaacggcaccugcuaccccggccacuucgccgacuacgaggagcugagagagcagcugagcagcgugagcagcuucgagagauucgagaucuuccccaaggagagcagcuggcccaaccacaccgugaccggcgccagcgccagcugcagccacaacggcgagaacagcuucuacagaaaccugcuguggcugaccggcaagaacggccuguaccccaaccugagcaagagcuacgccaacaacaaggagaaggaggugcuggugcuguggggcgugcaccacccccccaacaucgccaaccagaagacccuguaccacaccgagaacgccuacgugagcguggugagcagccacuacagcagaaaguucacccccgagaucgccaagagacccaaggugagagaccaggagggcagaaucaacuacuacuggacccugcuggagcccggcgacaccaucaucuucgaggccaacggcaaccugaucgcccccagauacgccuucgcccugagcagaggcuucggcagcggcaucaucaacagcaacgcccccauggacaagugcgacgccaccugccagaccccccagggcgccaucaacagcagccugcccuuccagaacgugcaccccgugaccaucggcgagugccccaaguacgugagaagcgccaagcugagaauggugaccggccugagaaacauccccagcauccagagcagaggccuguucggcgccaucgccggcuucaucgagggcggcuggaccggcaugguggacggcugguacggcuaccaccaccagaacgagcagggcagcggcuacgccgccgaccagaagagcacccagaacgccaucaacggcaucaccaacaaggugaacagcgugaucgagaagaugaacacccaguucaccgccgugggcaaggaguucaacaagcuggagagaagaauggagaaccugaacaagaagguggacgacggcuucaucgacaucuggaccuacaacgccgagcugcuggugcugcuggagaacgagagaacccuggacuuccacgacagcaacgugaagaaccuguacgagaaggugaagagccagcugaagaacaacgccaaggagaucggcaacggcugcuucgaguucuaccacaagugcaacgacgagugcauggagagcgugaagaacggcaccuacgacuaccccaaguacagcgaggagagcaagcugaacagagagaagaucgacggcgugaagcuggagagcaugggcguguaccagauccuggccaucuacagcaccguggccagcagccuggugcugcuggugagccugggcgccaucagcuucuggaugugcagcaacggcagccugcagugcagaaucugcaucuga

SEQ ID NO: 164015 - RNA, 1701 nt, Artificial Sequence; identical to SEQ ID NO: 163830
  derived and/or modified CDS sequence (opt4) from hemagglutinin__InfluenzaA__ADA71181

SEQ ID NO: 164016 - RNA, 1701 nt, Artificial Sequence; identical to SEQ ID NO: 163830
  derived and/or modified CDS sequence (opt4) from hemagglutinin__InfluenzaA__ADA71191

SEQ ID NO: 164017 - RNA, 1701 nt, Artificial Sequence
  derived and/or modified CDS sequence (opt4) from hemagglutinin__InfluenzaA__ADA79587
augaaggccauccugguggugcugcuguacaccuucgccaccgccaacgccgacacccugugcaucggcuaccacgccaacaacagcaccgacaccguggacaccgugcuggagaagaacgugaccgugacccacagcgugaaccugcuggaggacaagcacaacggcaagcugugcaagcugagaggcguggccccccugcaccugggcaagugcaacaucgccggcuggauccugggcaaccccgagugcgagagccugagcaccgccaacagcuggagcuacaucguggagaccagcagcagcgacaacggcaccugcuaccccggcgacuucaucgacuacgaggagcugagagagcagcugagcagcgugagcagcuucgagagauucgagaucuuccccaagaccagcagcuggcccaaccacgacagcaacaagggcgugaccgccgccugcccccacgccggcgccaagagcuucuacaagaaccugaucuggcuggugaagaagggcaacagcuaccccaagcugagcaagagcuacaucaacgacaagggcaaggaggugcuggugcuguggggcauccaccaccccagcaccagcgccgaccagcagagccuguaccagaacgccgacgccuacguguucgugggcaccagcagauacagcaagaaguucaagcccgagaucgccaucagacccaaggugagagaccaggagggcagaaugaacuacuacuggacccugguggagcccggcgacaagaucaccuucgaggccaccggcaaccugguggugcccagauacgccuucgccauggagagaaacgccggcagcggcaucaucaucagcgacacccccgugcacgacugcaacaccaccugccagacccccaagggcgccaucaacaccagccugcccuuccagaacauccaccccaucaccaucggcaagugccccaaguacgugaagagcaccaagcugagacuggccaccggccugagaaacauccccagcauccagagcagaggccuguucggcgccaucgccggcuucaucgagggcggcuggaccggcaugguggacggcugguacggcuaccaccaccagaacgagcagggcagcggcuacgccgccgaccugaagagcacccagaacgccaucgacgagaucaccaacaaggugaacagcgugaucgagaagaugaacacccaguucaccgccgugggcaaggaguucaaccaccuggagaagagaaucgagaaccugaacaagaagguggacgacggcuuccuggacaucuggaccuacaacgccgagcugcuggugcugcuggagaacgagagaacccuggacuaccacgacagcaacgugaagaaccuguacgagaaggugagaagccagcugaagaacaacgccaaggagaucggcaacggcugcuucgaguucuaccacaagugcgacaacaccugcauggagagcgugaagaacggcaccuacgacuaccccaaguacagcgaggaggccaagcugaacagagaggagaucgacggcgugaagcuggagagcaccagaaucuaccagauccuggccaucuacagcaccguggccagcagccuggugcugguggugagccugggcgccaucagcuucuggaugugcagcaacggcagccugcagugcagaaucugcaucuga

SEQ ID NO: 164018 - RNA, 1701 nt, Artificial Sequence
  derived and/or modified CDS sequence (opt4) from hemagglutinin__InfluenzaA__ADA79607
augaaggccauccugguggugcugcuguacaccuucgccaccgccaacgccgacacccugugcaucggcuaccacgccaacaacagcaccgacaccguggacaccgugcuggagaagaacgugaccgugacccacagcgugaaccugcuggaggacaagcacaacggcaagcugugcaagcugagaggcguggccccccugcaccugggcaagugcaacaucgccggcuggauccugggcaaccccgagugcgagagccugagcaccgccagcagcuggagcuacaucguggagaccagcagcagcgacaacggcaccugcuaccccggcgacuucaucgacuacgaggagcugagagagcagcugagcagcgugagcagcuucgagagauucgagaucuuccccaagaccagcagcuggcccaaccacgacagcaacaagggcgugaccgccgccugcccccacgccggcgccaagggcuucuacaagaaccugaucuggcuggugaagaagggcaacagcuaccccaagcugagcaagagcuacaucaacgacaagggcaaggaggugcuggugcuguggggcauccaccaccccagcaccagcgccgaccagcagagccuguaccagaacgccgacgccuacguguucgugggcaccagcagauacagcaagaaguucaagcccgagaucgccaucagacccaaggugagagaccaggagggcagaaugaacuacuacuggacccugguggagcccggcgacaagaucaccuucgaggccaccggcaaccugguggugcccagauacgccuucgccauggagagaaacgccggcagcggcaucaucaucagcgacacccccgugcacgacugcaacaccaccugccagacccccaagggcgccaucaacaccagccugcccuuccagaacauccaccccaucaccaucggcaagugccccaaguacgugaagagcaccaagcugagacuggccaccggccugagaaacgugcccagcauccagagcagaggccuguucggcgccaucgccggcuucaucgagggcggcuggaccggcaugguggacggcugguacggcuaccaccaccagaacgagcagggcagcggcuacgccgccgaccugaagagcacccagaacgccaucgacgagaucaccaacaaggugaacagcgugaucgagaagaugaacacccaguucaccgccgugggcaaggaguucaaccaccuggagaagagaaucgagaaccugaacaagaagguggacgacggcuuccuggacaucuggaccuacaacgccgagcugcuggugcugcuggagaacgagagaacccuggacuaccacgacagcaacgugaagaaccuguacgagaaggugagaagccagcugaagaacaacgccaaggagaucggcaacggcugcuucgaguucuaccacaagugcgacaacaccugcauggagagcgugaagaacggcaccuacgacuaccccaaguacagcgaggaggccaagcugaacagagaggagaucgacggcgugaagcuggagagcaccagaaucuaccagauccuggccaucuacagcaccguggccagcagccuggugcugguggugagccugggcgccaucagcuucuggaugugcagcaacggcagccugcagugcagaaucugcaucuga

SEQ ID NO: 164019 - RNA, 1701 nt, Artificial Sequence
  derived and/or modified CDS sequence (opt4) from hemagglutinin__InfluenzaA__ADA83043
augaaggccauccugguggugcugcuguacaccuucgccaccgccaacgccgacacccugugcaucggcuaccacgccaacaacagcaccgacaccguggacaccgugcuggagaagaacgugaccgugacccacagcgugaaccugcuggaggacaagcacaacggcaagcugugcaagcugagaggcguggccccccugcaccugggcaagugcaacaucgccggcuggauccugggcaaccccgagugcgagagccugagcaccgccagcagcuggagcuacaucguggagaccagcagcagcgacaacggcaccugcuaccccggcgacuucaucgacuacgaggagcugagagagcagcugagcagcgugagcagcuucgagagauucgagaucuuccccaagaccagcagcuggcccaaccacgacagcaacaagggcgugaccgccgccugcccccacgccggcgccaagagcuucuacaagaaccugaucuggcuggugaagaagggcaacagcuaccccaagcugagcaagagcuacaucaacgacaagggcaaggaggugcuggugcuguggggcauccaccaccccagcaccagcgccgaccagcagagccuguaccagaacgccgacgccuacguguucgugggcaccagcagauacagcaagaaguucaagcccgagaucgccaucagacccaaggugagagagagagagggcagaaugaacuacuacuggacccugguggagcccggcgacaagaucaccuucgaggccaccggcaaccugguggugcccagauacgccuucgccauggagagaaacgccggcagcggcaucaucaucagcgacacccccgugcacgacugcaacaccaccugccagacccccaagggcgccaucaacaccagccugcccuuccagaacauccaccccaucaccaucggcaagugccccaaguacgugaagagcaccaagcugagacuggccaccggccugagaaacgugcccagcauccagagcagaggccuguucggcgccaucgccggcuucaucgagggcggcuggaccggcaugguggacggcugguacggcuaccaccaccagaacgagcagggcagcggcuacgccgccgaccugaagagcacccagaacgccaucgacgagaucaccaacaaggugaacagcgugaucgagaagaugaacacccaguucaccgccgugggcaaggaguucaaccaccuggagaagagaaucgagaaccugaacaagaagguggacgacggcuuccuggacaucuggaccuacaacgccgagcugcuggugcugcuggagaacgagagaacccuggacuaccacgacagcaacgugaagaaccuguacgagaaggugagaagccagcugaagaacaacgccaaggagaucggcaacggcugcuucgaguucuaccacaagugcgacaacaccugcauggagagcgugaagaacggcaccuacgacuaccccaaguacagcgaggaggccaagcugaacagagaggagaucgacggcgugaagcuggagagcaccagaaucuaccagauccuggccaucuacagcaccguggccagcagccuggugcugguggugagccugggcgccaucagcuucuggaugugcagcaacggcagccugcagugcagaaucugcaucuga

SEQ ID NO: 164020 - RNA, 1701 nt, Artificial Sequence
  derived and/or modified CDS sequence (opt4) from hemagglutinin__InfluenzaA__ADA83044
augaaggccauccugguggugcugcuguacaccuucgccaccgccaacgccgacacccugugcaucggcuaccacgccaacaacagcaccgacaccguggacaccgugcuggagaagaacgugaccgugacccacagcgugaaccugcuggaggacaagcacaacggcaagcugugcaagcugagaggcguggccccccugcaccugggcaagugcaacaucgccggcuggauccugggcaaccccgagugcgagagccugagcaccgccagcagcuggagcuacaucguggagaccagcagcagcaacaacggcaccugcuaccccggcgacuucaucgacuacgaggagcugagagagcagcugagcagcgugagcagcuucgagagauucgagaucuuccccaagaccagcagcuggcccaaccacgacagcaacaagggcgugaccgccgccugcccccacgccggcgccaagagcuucuacaagaaccugaucuggcuggugaagaaggagaacagcuaccccaagcugaacaagagcuacaucaacgacaagggcaaggaggugcuggugcuguggggcauccaccaccccagcaccagcgccgaccagcagagccuguaccagaacgccgacgccuacguguucgugggcaccagcagauacagcaagaaguucaagcccgagaucgccaucagacccaaggugagaggccaggagggcagaaugaacuacuacuggacccugguggagcccggcgacaagaucaccuucgaggccaccggcaaccugguggugcccagauacgccuucgccauggagagaaacgccggcagcggcaucaucaucagcgacacccccgugcacgacugcaacaccaccugccagacccccaagggcgccaucaacaccagccugcccuuccagaacauccaccccaucaccaucggcaagugccccaaguacgugaagagcaccaagcugagacuggccaccggccugagaaacgugcccagcauccagagcagaggccuguucggcgccaucgccggcuucaucgagggcggcuggaccggcaugguggacggcugguacggcuaccaccaccagaacgagcagggcagcggcuacgccgccgaccugaagagcacccagaacgccaucgacgagaucaccaacaaggugaacagcgugaucgagaagaugaacacccaguucaccgccgugggcaaggaguucaaccaccuggagaagagaaucgagaaccugaacaagaagguggacgacggcuuccuggacaucuggaccuacaacgccgagcugcuggugcugcuggagaacgagagaacccuggacuaccacgacagcgacgugaagaaccuguacgagaaggugagaagccagcugaagaacaacgccaaggagaucggcaacggcugcuucgaguucuaccacaagugcgacaacaccugcauggagagcgugaagaacggcaccuacgacuaccccaaguacagcgaggaggccaagcugaacagagaggagaucgacggcgugaagcuggagagcaccagaaucuaccagauccuggccaucuacagcaccguggccagcagccuggugcugguggugagccugggcgccaucagcuucuggaugugcagcaacggcagccugcagugcagaaucugcaucuga

SEQ ID NO: 164021 - RNA, 1701 nt, Artificial Sequence; identical to SEQ ID NO: 162729
  derived and/or modified CDS sequence (opt4) from hemagglutinin__InfluenzaA__ADA83580

SEQ ID NO: 164022 - RNA, 1701 nt, Artificial Sequence; identical to SEQ ID NO: 162729
  derived and/or modified CDS sequence (opt4) from hemagglutinin__InfluenzaA__ADA83587

SEQ ID NO: 164023 - RNA, 1701 nt, Artificial Sequence
  derived and/or modified CDS sequence (opt4) from hemagglutinin__InfluenzaA__ADA83591
augaaggccauccugguggugcugcuguacaccuucgccaccgccaacgccgacacccugugcaucggcuaccacgccaacaacagcaccgacaccguggacaccgugcuggagaagaacgugaccgugacccacagcgugaaccugcuggaggacaagcacaacggcaagcugugcaagcugagaggcguggccccccugcaccugggcaagugcaacaucgccggcuggauccugggcaaccccgagugcgagagccugagcaccgccagcagcuggagcuacaucguggagaccagcagcagcgacaacggcaccugcuaccccggcgacuucaucgacuacgaggagcugagagagcagcugagcagcgugagcagcuucgagagauucgagaucuuccccaagaccagcagcuggcccaaccacgacagcaacaagggcgugaccgccgccugcccccacgccggcgccaagagcuucuacaagaaccugaucuggcuggugaagaagggcaacagcuaccccaagcugagcaagagcuacaucaacgacaagggcaaggaggugcuggugcuguggggcauccaccaccccagcaccagcgccgaccagcagagccuguaccagaacgccgacgccuacguguucgugggcaccagcagauacagcaagaaguucaagcccgagaucagcaucagacccaaggugagagaccaggagggcagaaugaacuacuacuggacccugguggagcccggcgacaagaucaccuucgaggccaccggcaaccugguggugcccagauacgccuucgccauggagagaaacgccggcagcggcaucaucaucagcgacacccccgugcacgacugcaacaccaccugccagacccccaagggcgccaucaacaccagccugcccuuccagaacauccaccccaucaccaucggcaagugccccaaguacgugaagagcaccaagcugagacuggccaccggccugagaaacgugcccagcauccagagcagaggccuguucggcgccaucgccggcuucaucgagggcggcuggaccggcaugguggacggcugguacggcuaccaccaccagaacgagcagggcagcggcuacgccgccgaccugaagagcacccagaacgccaucgacgagaucaccaacaaggugaacagcgugaucgagaagaugaacacccaguucaccgccgugggcaaggaguucaaccaccuggagaagagaaucgagaaccugaacaagaagguggacgacggcuuccuggacaucuggaccuacaacgccgagcugcuggugcugcuggagaacgagagaacccuggacuaccacgacagcaacgugaagaaccuguacgagaaggugagaagccagcugaagaacaacgccaaggagaucggcaacggcugcuucgaguucuaccacaagugcgacaacaccugcauggagagcgugaagaacggcaccuacgacuaccccaaguacagcgaggaggccaagcugaacagagaggagaucgacggcgugaagcuggagagcaccagaaucuaccagauccuggccaucuacagcaccguggccagcagccuggugcugguggugagccugggcgccaucagcuucuggaugugcagcaacggcagccugcagugcagaaucugcaucuga

SEQ ID NO: 164024 - RNA, 1701 nt, Artificial Sequence; identical to SEQ ID NO: 163474
  derived and/or modified CDS sequence (opt4) from hemagglutinin__InfluenzaA__ADA83595

SEQ ID NO: 164025 - RNA, 1701 nt, Artificial Sequence; identical to SEQ ID NO: 162729
  derived and/or modified CDS sequence (opt4) from hemagglutinin__InfluenzaA__ADA83599

SEQ ID NO: 164026 - RNA, 1701 nt, Artificial Sequence; identical to SEQ ID NO: 162729
  derived and/or modified CDS sequence (opt4) from hemagglutinin__InfluenzaA__ADA83603

SEQ ID NO: 164027 - RNA, 1701 nt, Artificial Sequence; identical to SEQ ID NO: 162729
  derived and/or modified CDS sequence (opt4) from hemagglutinin__InfluenzaA__ADA83611

SEQ ID NO: 164028 - RNA, 1701 nt, Artificial Sequence
  derived and/or modified CDS sequence (opt4) from hemagglutinin__InfluenzaA__ADA83615
augaaggccauccugguggugcugcuguacaccuucgccaccgccaacgccgacacccugugcaucggcuaccacgccaacaacagcaccgacaccguggacaccgugcuggagaagaacgugaccgugacccacagcgugaaccugcuggaggacaagcacaacggcaagcugugcaagcugagaggcguggccccccugcaccugggcaagugcaacaucgccggcuggauccugggcaaccccgagugcgagagccugagcaccgccagcagcuggagcuacaucguggagaccagcagcagcgacaacggcaccugcuaccccggcgacuucaucgacuacgaggagcugagagagcagcugagcagcgugagcagcuucgagagauucgagaucuuccccaagaccagcagcuggcccaaccacgacagcaacaagggcgugaccgccgccugcccccacgccggcgccaagagcuucuacaagaaccugaucuggcuggugaagaagggcaacagcuaccccaagcugagcaagagcuacaucaacgacaagggcaaggaggugcuggugcuguggggcauccaccaccccagcaccagcgccgaccagcagagccuguaccagaacgccgacgccuacguguucgugggcaccagcagauacagcaagaaguucaagcccgagaucgccaucagacccaaggugagagaccaggagggcagaaugaacuacuacuggacccugguggagcccggcgacaagaucaccuucgaggccaccggcaaccugguggugcccagauacgccuucgccauggagagaaacgccggcagcggcaucaucaucagcgacacccccgugcacgacugcaacaccaccugccagacccccaagggcgccaucaacaccagccugcccuuccagaacauccaccccaucaccaucggcaagugccccaaguacgugaagagcaccaagcugagacuggccaccggccugagaaacgugcccagcauccagagcagaggccuguucggcgccaucgccggcuucaucgagggcggcuggaccggcaugguggacggcugguacggcuaccaccaccagaacgagcagggcagcggcuacgccgccgaccugaagagcacccagaacgccaucgacgagaucaccaacaaggugaacagcgugaucgagaagaugaacacccaguucaccgccgugggcaaggaguucaaccaccuggagaagagaaucgagaaccugaacaagaagguggacgacggcuuccuggacaucuggaccuacaacgccgagcugcuggugcugcuggagaacgagagaacccuggacuaccacgaccugaacgugaagaaccuguacgagaaggugagaagccagcugaagaacaacgccaaggagaucggcaacggcugcuucgaguucuaccacaagugcgacaacaccugcauggagagcgugaagaacggcaccuacgacuaccccaaguacagcgaggaggccaagcugaacagagaggagaucgacggcgugaagcuggagagcaccagaaucuaccagauccuggccaucuacagcaccguggccagcagccuggugcugguggugagccugggcgccaucagcuucuggaugugcagcaacggcagccugcagugcagaaucugcaucuga

SEQ ID NO: 164029 - RNA, 1701 nt, Artificial Sequence
  derived and/or modified CDS sequence (opt4) from hemagglutinin__InfluenzaA__ADA83622
augaaggccauccugguggugcugcuguacaccuucgccaccgccaacgccgacacccugugcaucggcuaccacgccaacaacagcaccgacaccguggacaccgugcuggagaagaacgugaccgugacccacagcgugaaccugcuggaggacaagcacaacggcaagcugugcaagcugagaggcguggccccccugcaccugggcaagugcaacaucgccggcuggauccugggcaaccccgagugcgagagccugagcaccgccagcagcuggagcuacaucguggagaccagcagcagcgacaacggcaccugcuaccccggcgacuucaucgacuacgaggagcugagagagcagcugagcagcgugagcagcuucgagagauucgagaucuuccccaagaccagcagcuggcccaaccacgacagcaacaagggcgugaccgccgccugcccccacgccggcgccaagagcuucuacaagaaccugaucuggcuggugaagaagggcaacagcuaccccaagcugagcaagagcuacaucaacgacaagggcaaggaggugcuggugcuguggggcauccaccaccccagcaccagcgccgaccagcagagacuguaccagaacgccgacgccuacguguucgugggcaccagcagauacagcaagaagcugaagcccgagaucgccaucagacccaaggugagagaccaggagggcagaaugaacuacuacuggacccugguggagcccggcgacaagaucaccuucgaggccaccggcaaccugguggugcccagauacgccuucgccauggagagaaacgccggcagcggcaucaucaucagcgacacccccgugcacgacugcaacaccaccugccagacccccaagggcgccaucaacaccagccugcccuuccagaacauccaccccaucaccaucggcaagugccccaaguacgugaagagcaccaagcugagacuggccaccggccugagaaacgugcccagcauccagagcagaggccuguucggcgccaucgccggcuucaucgagggcggcuggaccggcaugguggacggcugguacggcuaccaccaccagaacgagcagggcagcggcuacgccgccgaccugaagagcacccagaacgccaucgacgagaucaccaacaaggugaacagcgugaucgagaagaugaacacccaguucaccgccgugggcaaggaguucaaccaccuggagaagagaaucgagaaccugaacaagaagguggacgacggcuuccuggacaucuggaccuacaacgccgagcugcuggugcugcuggagaacgagagaacccuggacuaccacgacagcaacgugaagaaccuguacgagaaggugagaagccagcugaagaacaacgccaaggagaucggcaacggcugcuucgaguucuaccacaagugcgacaacaccugcauggagagcgugaagaacggcaccuacgacuaccccaaguacagcgaggaggccaagcugaacagagaggagaucgacggcgugaagcuggagagcaccagaaucuaccagauccuggccaucuacagcaccguggccagcagccuggugcugguggugagccugggcgccaucagcuucuggaugugcagcaacggcagccugcagugcagaaucugcaucuga

SEQ ID NO: 164030 - RNA, 1701 nt, Artificial Sequence; identical to SEQ ID NO: 162729
  derived and/or modified CDS sequence (opt4) from hemagglutinin__InfluenzaA__ADA83633

SEQ ID NO: 164031 - RNA, 1701 nt, Artificial Sequence; identical to SEQ ID NO: 162729
  derived and/or modified CDS sequence (opt4) from hemagglutinin__InfluenzaA__ADA83637

SEQ ID NO: 164032 - RNA, 1701 nt, Artificial Sequence; identical to SEQ ID NO: 162729
  derived and/or modified CDS sequence (opt4) from hemagglutinin__InfluenzaA__ADA83641

SEQ ID NO: 164033 - RNA, 1701 nt, Artificial Sequence; identical to SEQ ID NO: 162729
  derived and/or modified CDS sequence (opt4) from hemagglutinin__InfluenzaA__ADA83645

SEQ ID NO: 164034 - RNA, 1701 nt, Artificial Sequence; identical to SEQ ID NO: 162729
  derived and/or modified CDS sequence (opt4) from hemagglutinin__InfluenzaA__ADA83648

SEQ ID NO: 164035 - RNA, 1701 nt, Artificial Sequence; identical to SEQ ID NO: 162729
  derived and/or modified CDS sequence (opt4) from hemagglutinin__InfluenzaA__ADA83656

SEQ ID NO: 164036 - RNA, 1701 nt, Artificial Sequence; identical to SEQ ID NO: 162729
  derived and/or modified CDS sequence (opt4) from hemagglutinin__InfluenzaA__ADA83660

SEQ ID NO: 164037 - RNA, 1701 nt, Artificial Sequence
  derived and/or modified CDS sequence (opt4) from hemagglutinin__InfluenzaA__ADA83664
augaaggccauccugguggugcugcuguacaccuucgccaccgccaacgccgacacccugugcaucggcuaccacgccaacaacagcaccgacaccguggacaccgugcuggagaagaacgugaccgugacccacagcgugaaccugcuggaggacaagcacaacggcaagcugugcaagcugagaggcguggccccccugcaccugggcaagugcaacaucgccggcuggauccugggcaaccccgagugcgagagccugagcaccgccagcagcuggagcuacaucguggagaccagcagcagcgacaacggcaccugcuaccccggcgacuucaucgacuacgaggagcugagagagcagcugagcagcgugagcagcuucgagagauucgagaucuuccccaagaccagcagcuggcccaaccacgacagcaacaagggcgugaccgccgccugcccccacgccggcgccaagagcuucuacaagaaccugaucuggcuggugaagaagggcaacagcuaccccaagcugagcaagagcuacaucaacgacaagggcaaggaggugcuggugcuguggggcauccaccaccccagcaccagcgccgaccagcagagccuguaccagaacgccgacgccuacguguucgugggcaccagcagauacagcaagaaguucaagcccgagaccgccaucagacccaaggugagagaccaggagggcagaaugaacuacuacuggacccugguggagcccggcgacaagaucaccuucgaggccaccggcaaccugguggugcccagauacgccuucgccauggagagaaacgccggcagcggcaucaucaucagcgacacccccgugcacgacugcaacaccaccugccagacccccaagggcgccaucaacaccagccugcccuuccagaacauccaccccaucaccaucggcaagugccccaaguacgugaagagcaccaagcugagacuggccaccggccugagaaacgugcccagcauccagagcagaggccuguucggcgccaucgccggcuucaucgagggcggcuggaccggcaugguggacggcugguacggcuaccaccaccagaacgagcagggcagcggcuacgccgccgaccugaagagcacccagaacgccaucgacgagaucaccaacaaggugaacagcgugaucgagaagaugaacacccaguucaccgccgugggcaaggaguucaaccaccuggagaagagaaucgagaaccugaacaagaagguggacgacggcuuccuggacaucuggaccuacaacgccgagcugcuggugcugcuggagaacgagagaacccuggacuaccacgacagcaacgugaagaaccuguacgagaaggugagaagccagcugaagaacaacgccaaggagaucggcaacggcugcuucgaguucuaccacaagugcgacaacaccugcauggagagcgugaagaacggcaccuacgacuaccccaaguacagcgaggaggccaagcugaacagagaggagaucgacggcgugaagcuggagagcaccagaaucuaccagauccuggccaucuacagcaccguggccagcagccuggugcugguggugagccugggcgccaucagcuucuggaugugcagcaacggcagccugcagugcagaaucugcaucuga

SEQ ID NO: 164038 - RNA, 1701 nt, Artificial Sequence
  derived and/or modified CDS sequence (opt4) from hemagglutinin__InfluenzaA__ADA83668
augaaggccauccugguggugcugcuguacaccuucgccaccgccaacgccgacacccugugcaucggcuaccacgccaacaacagcaccgacaccguggacaccgugcuggagaagaacgugaccgugacccacagcgugaaccugcuggaggacaagcacaacggcaagcugugcaagcugagaggcguggccccccugcaccugggcaagugcaacaucgccggcuggauccugggcaaccccgagugcggcagccugagcaccgccagcagcuggagcuacaucguggagaccagcagcagcgacaacggcaccugcuaccccggcgacuucaucgacuacgaggagcugagagagcagcugagcagcgugagcagcuucgagagauucgagaucuuccccaagaccagcagcuggcccaaccacgacagcaacaagggcgugaccgccgccugcccccacgccggcgccaagagcuucuacaagaaccugaucuggcuggugaagaagggcaacagcuaccccaagcugagcaagagcuacaucaacgacaagggcaaggaggugcuggugcuguggggcauccaccaccccagcaccagcgccgaccagcagagccuguaccagaacgccgacgccuacguguucgugggcaccagcagauacagcaagaaguucaagcccgagaucgccaucagacccaaggugagagaccaggagggcagaaugaacuacuacuggacccugguggagcccggcgacaagaucaccuucgaggccaccggcaaccugguggugcccagauacgccuucgccauggagagaaacgccggcagcggcaucaucaucagcgacacccccgugcacgacugcaacaccaccugccagacccccaagggcgccaucaacaccagccugcccuuccagaacauccaccccaucaccaucggcaagugccccaaguacgugaagagcaccaagcugagacuggccaccggccugagaaacgugcccagcauccagagcagaggccuguucggcgccaucgccggcuucaucgagggcggcuggaccggcaugguggacggcugguacggcuaccaccaccagaacgagcagggcagcggcuacgccgccgaccugaagagcacccagaacgccaucgacgagaucaccaacaaggugaacagcgugaucgagaagaugaacacccaguucaccgccgugggcaaggaguucaaccaccuggagaagagaaucgagaaccugaacaagaagguggacgacggcuuccuggacaucuggaccuacaacgccgagcugcuggugcugcuggagaacgagagaacccuggacuaccacgacagcaacgugaagaaccuguacgagaaggugagaagccagcugaagaacaacgccaaggagaucggcaacggcugcuucgaguucuaccacaagugcgacaacaccugcauggagagcgugaagaacggcaccuacgacuaccccaaguacagcgaggaggccaagcugaacagagaggagaucgacggcgugaagcuggagagcaccagaaucuaccagauccuggccaucuacagcaccguggccagcagccuggugcugguggugagccugggcgccaucagcuucuggaugugcagcaacggcagccugcagugcagaaucugcaucuga

SEQ ID NO: 164039 - RNA, 1701 nt, Artificial Sequence; identical to SEQ ID NO: 162729
  derived and/or modified CDS sequence (opt4) from hemagglutinin__InfluenzaA__ADA83672

SEQ ID NO: 164040 - RNA, 1701 nt, Artificial Sequence; identical to SEQ ID NO: 162729
  derived and/or modified CDS sequence (opt4) from hemagglutinin__InfluenzaA__ADA83676

SEQ ID NO: 164041 - RNA, 1701 nt, Artificial Sequence; identical to SEQ ID NO: 162729
  derived and/or modified CDS sequence (opt4) from hemagglutinin__InfluenzaA__ADA83680

SEQ ID NO: 164042 - RNA, 1701 nt, Artificial Sequence
  derived and/or modified CDS sequence (opt4) from hemagglutinin__InfluenzaA__ADA86068
augaaggccauccugguggugcugcuguacaccuucgccaccgccaacgccgacacccugugcaucggcuaccacgccaacaacagcaccgacaccguggacaccgugcuggagaagaacgugaccgugacccacagcguggaccugcuggaggacaagcacaacggcaagcugugcaagcugagaggcguggccccccugcaccugggcaagugcaacaucgccggcuggauccugggcaaccccgagugcgagagccugagcaccgccagcagcuggagcuacaucguggagaccagcagcagcgacaacggcaccugcuaccccggcgacuucaucgacuacgaggagcugagagagcagcugagcagcgugagcagcuucgagagauucgagaucuuccccaagaccagcagcuggcccaaccacgacagcaacaagggcgugaccgccgccugcccccacgccggcgccaagagcuucuacaagaaccugaucuggcuggugaagaagggcaacagcuaccccaagcugagcaagagcuacaucaacgacaagggcaaggaggugcuggugcuguggggcauccaccaccccagcaccagcgccgaccagcagagccuguaccagaacgccgacgccuacguguucgugggcaccagcagauacagcaagaaguucaagcccgagaucgccaucagacccaaggugagaaaccaggagggcagaaugaacuacuacuggacccugguggagcccggcgacaagaucaccuucgaggccaccggcaaccugguggugcccagauacgccuucgccauggagagaaacgccggcagcggcaucaucaucagcgacacccccgugcacgacugcaacaccaccugccagacccccaagggcgccaucaacaccagccugcccuuccagaacauccaccccaucaccaucggcaagugccccaaguacgugaagagcaucaagcugagacuggccaccggccugagaaacgugcccagcauccagagcagaggccuguucggcgccaucgccggcuucaucgagggcggcuggaccggcaugguggacggcugguacggcuaccaccaccagaacgagcagggcagcggcuacgccgccgaccugaagagcacccagaacgccaucgacgagaucaccaacaaggugaacagcgugaucgagaagaugaacacccaguucaccgccgugggcaaggaguucaaccaccuggagaagagaaucgagaaccugaacaagaagguggacgacggcuuccuggacaucuggaccuacaacgccgagcugcuggugcugcuggagaacgagagaacccuggacuaccacgacagcaacgugaagaaccuguacgagaaggugagaagccagcugaagaacaacgccaaggagaucggcaacggcugcuucgaguucuaccacaagugcgacaacaccugcauggagagcgugaagaacggcaccuacgacuaccccaaguacagcgaggaggccaagcugaacagagaggagaucgacggcgugaagcuggagagcaccagaaucuaccagauccuggccaucuacagcaccguggccagcagccuggugcugguggugagccugggcgccaucagcuucuggaugugcagcaacggcagccugcagugcagaaucugcaucuga

SEQ ID NO: 164043 - RNA, 1701 nt, Artificial Sequence
  derived and/or modified CDS sequence (opt4) from hemagglutinin__InfluenzaA__ADA86086
augaaggccauccugguggugcugcuguacaccuucgccaccgccaacgccgacacccugugcaucggcuaccacgccaacaacagcaccgacaccguggacaccgugcuggagaagaacgugaccgugacccacagcgugaaccugcuggaggacaagcacaacggcaagcugugcaagcugagaggcguggccccccugcaccugggcaagugcaacaucgccggcuggauccugggcaaccccgagugcgagagccugagcaccgccagcagcuggagcuacaucguggagaccagcagcagcgacaacggcaccugcuaccccggcgacuucaucgacuacgaggagcugagagagcagcugagcagcgugagcagcuucgagagauucgagaucuuccccaagaccagcagcuggcccaaccacgacagcaacaagggcgugaccgccgccugcccccacgccggcgccaagagcuucuacaagaaccugaucuggcuggugaagaagggcaacagcuaccccaagcugagcaagagcuacaucaacgacaagggcaaggaggugcuggugcuguggggcauccaccaccccagcaccaacgccgaccagcagagccuguaccagaacgccgacgccuacguguucgugggcaccagcagauacagcaagaaguucaagcccgagaucgccaucagacccaaggugagagaccaggagggcagaaugaacuacuacuggacccugguggagcccggcgacaagaucaccuucgaggccaccggcaaccugguggugcccagauacgccuucgccauggagagaaacgccggcagcggcaucaucaucagcgacacccccgugcacgacugcaacaccaccugccagacccccaagggcgccaucaacaccagccugcccuuccagaacauccaccccaucaccaucggcaagugccccaaguacgugaagagcaccaagcugagacuggccaccggccugagaaacgugcccagcauccagagcagaggccuguucggcgccaucgccggcuucaucgagggcggcuggaccggcaugguggacggcugguacggcuaccaccaccagaacgagcagggcagcggcuacgccgccgaccugaagagcacccagaacgccaucgacgagaucaccaacaaggugaacagcgugaucgagaagaugaacacccaguucaccgccgugggcaaggaguucaaccaccuggagaagagaaucgagaaccugaacaagaagguggacgacggcuuccuggacaucuggaccuacaacgccgagcugcuggugcugcuggagaacgagagaacccuggacuaccacgacagcaacgugaagaaccuguacgagaaggugagaagccagcugaagaacaacgccaaggagaucggcaacggcugcuucgaguucuaccacaagugcgacaacaccugcauggagagcgugaagaacggcaccuacgacuaccccaaguacagcgaggaggccaagcugaacagagaggagaucgacggcgugaagcuggagagcaccagaaucuaccagauccuggccaucuacagcaccguggccagcagccuggugcugguggugagccugggcgccaucagcuucuggaugugcagcaacggcagccugcagugcagaaucugcaucuga

SEQ ID NO: 164044 - RNA, 1701 nt, Artificial Sequence
  derived and/or modified CDS sequence (opt4) from hemagglutinin__InfluenzaA__ADA86087
augaaggccauccugguggugcugcuguacaccuucgccaccgccaacgccgacacccugugcaucggcuaccacgccaacaacagcaccgacaccguggacaccgugcuggagaagaacgugaccgugacccacagcgugaaccugcuggaggacaagcacaacggcaagcugugcaagcugagaggcguggccccccugcaccugggcaagugcaacaucgccggcuggauccugggcaaccccgagugcgagagccugagcaccgccagcagcuggagcuacaucguggagaccuucagcagcgacaacggcaccugcuaccccggcgacuucaucgacuacgaggagcugagagagcagcugagcagcgugagcagcuucgagagauucgagaucuuccccaagaccagcagcuggcccaaccacgacagcaacaagggcgugaccgccgccugcccccacgccggcgccaagagcuucuacaagaaccugaucuggcuggugaagaagggcaacagcuaccccaagcugagcaagagcuacaucaacgacaagggcaaggaggugcuggugcuguggggcauccaccaccccagcaccagcgccgaccagcagagccuguaccagaacgccgacgccuacguguucgugggcaccagcagauacagcaagaaguucaagcccgagaucgccaucagacccaaggugagagaccaggagggcagaaugaacuacuacuggacccugguggagcccggcgacaagaucaccuucgaggccaccggcaaccugguggugcccagauacgccuucgccauggagagaaacgccggcagcggcaucaucaucagcgacacccccgugcacgacugcaacaccaccugccagacccccaagggcgcccugaacaccagccugcccuuccagaacauccaccccaucaccaucggcaagugccccaaguacgugaagagcaccaagcugagacuggccaccggccugagaaacgugcccagcauccagagcagaggccuguucggcgccaucgccggcuucaucgagggcggcuggaccggcaugguggacggcugguacggcuaccaccaccagaacgagcagggcagcggcuacgccgccgaccugaagagcacccagaacgccaucgacgagaucaccaacaaggugaacagcgugaucgagaagaugaacacccaguucaccgccgugggcaaggaguucaaccaccuggagaagagaaucgagaaccugaacaagaagguggacgacggcuuccuggacaucuggaccuacaacgccgagcugcuggugcugcuggagaacgagagaacccuggacuaccacgacagcaacgugaagaaccuguacgagaaggugagaaaccagcugaagaacaacgccaaggagaucggcaacggcugcuucgaguucuaccacaagugcgacaacaccugcauggagagcgugaagaacggcaccuacgacuaccccaaguacagcgaggaggccaagcugaacagagaggagaucgacggcgugaagcuggagagcaccagaaucuaccagauccuggccaucuacagcaccguggccagcagccuggugcugguggugagccugggcgccaucagcuucuggaugugcagcaacggcagccugcagugcagaaucugcaucuga

SEQ ID NO: 164045 - RNA, 1701 nt, Artificial Sequence; identical to SEQ ID NO: 163527
  derived and/or modified CDS sequence (opt4) from hemagglutinin__InfluenzaA__ADA86088

SEQ ID NO: 164046 - RNA, 1701 nt, Artificial Sequence
  derived and/or modified CDS sequence (opt4) from hemagglutinin__InfluenzaA__ADB03603
augaaggccauccugaucgugcugcuguacaccuucgccaccgcccacgccgacacccugugcaucggcuaccacgccaacaacagcaccgacaccguggacaccgugcuggagaagaacgugaccgugacccacagcgugaaccugcuggaggacaagcacaacggcaagcugugcaagcugagaggcguggccccccugcaccugggcaagugcaacaucgccggcuggauccugggcaaccccgagugcgagagccugagcaccgccagcagcuggagcuacaucguggagaccagcagcagcgacaacggcaccugcuaccccggcgacuucaucgacuacgaggagcugagagagcagcugagcagcgugagcagcuucgagagauucgagaucuuccccaagaccagcagcuggcccaaccacgacagcaacaagggcgugaccgccgccugcccccacgccggcgccaagagcuucuacaagaaccugaucuggcuggugaagaagggcaacagcuaccccaagcugagcaagagcuacaucaacgacaagggcaaggaggugcuggugcuguggggcauccaccaccccagcaccagcgccgaccagcagagccuguaccagaacgccgacgccuacguguucgugggcaccagcagauacagcaagaaguucaagcccgagaucgccaucagacccaaggugagagaccaggagggcagaauggacuacuacuggacccugguggagcccggcgacaagaucaccuucgaggccaccggcaaccugguggugcccagauacgccuucgccauggagagaaacgccggcagcggcaucaucaucagcgacacccccgugcacgacugcaacaccaccugccagacccccaagggcgccaucaacaccagccugcccuuccagaacauccaccccaucaccaucggcaagugccccaaguacgugaagagcaccaagcugagacuggccaccggccugagaaacgugcccagcauccagagcagaggccuguucggcgccaucgccggcuucaucgagggcggcuggaccggcaugguggacggcugguacggcuaccaccaccagaacgagcagggcagcggcuacgccgccgaccugaagagcacccagaacgccaucgacgagaucaccaacaaggugaacagcgugaucgagaagaugaacacccaguucaccgccgugggcaaggaguucaaccaccuggagaagagaaucgagaaccugaacaagaagguggacgacggcuuccuggacaucuggaccuacaacgccgagcugcuggugcugcuggagaacgagagaacccuggacuaccacgacagcaacgugaagaaccuguacgagaaggugagaagccagcugaagaacaacgccaaggagaucggcaacggcugcuucgaguucuaccacaagugcgacaacaccugcauggagagcgugaagaacggcaccuacgacuaccccaaguacagcgaggaggccaagcugaacagagaggagaucgacggcgugaagcuggagagcaccagaaucuaccagauccuggccaucuacagcaccguggccagcagccuggugcugguggugagccugggcgccaucagcuucuggaugugcagcaacggcagccugcagugcagaaucugcaucuga

SEQ ID NO: 164047 - RNA, 1701 nt, Artificial Sequence; identical to SEQ ID NO: 162716
  derived and/or modified CDS sequence (opt4) from hemagglutinin__InfluenzaA__ADB03604

SEQ ID NO: 164048 - RNA, 1701 nt, Artificial Sequence
  derived and/or modified CDS sequence (opt4) from hemagglutinin__InfluenzaA__ADB03605
augaaggccauccugguggugcugcuguacaccuucgccaccgccaacgccgacacccugugcaucggcuaccacgccaacaacagcaccgacaccguggacaccgugcuggagaagaacgugaccgugacccacagcgugaaccugcuggaggacaagcacaacggcaagcugugcaagcugagaggcguggccccccugcaccugggcaagugcaacaucgccggcuggauccugggcaaccccgagugcgagagccugagcaccgccagcagcuggagcuacaucguggagaccagcagcagcgacaacggcaccugcuaccccggcgacuucaucgacuacgaggagcugagagagcagcugagcagcgugagcagcuucgagagauucgagaucuuccccaagaccagcagcuggcccaaccacgacagcaacaagggcgugaccgccgccugcccccacgccggcgccaagagcuucuacaagaaccugaucuggcuggugaagaagggcaacagcuaccccaagcugagcaagagcuacaucaacgacaagggcaaggaggugcuggugcuguggggcauccaccaccccagcaccagcgccgaccagcagagccuguaccagaacgccgacgccuacguguucgugggcaccagcagauacagcaagaaguucaagcccgagaucgccaucagacccaaggugagagagcaggagggcagaauggacuacuacuggacccugguggagcccggcgacaagaucaccuucgaggccaccggcaaccugguggugcccagauacgccuucgccauggagagaaacgccggcagcggcaucaucaucagcgacacccccgugcacgacugcaacaccaccugccagacccccaagggcgccaucaacaccagccugcccuuccagaacauccaccccaucaccaucggcaagugccccaaguacgugaagagcaccaagcugagacuggccaccggccugagaaacgugcccagcauccagagcagaggccuguucggcgccaucgccggcuucaucgagggcggcuggaccggcaugguggacggcugguacggcuaccaccaccagaacgagcagggcagcggcuacgccgccgaccugaagagcacccagaacgccaucgacgagaucaccaacaaggugaacagcgugaucgagaagaugaacacccaguucaccgccgugggcaaggaguucaaccaccuggagaagagaaucgagaaccugaacaagaagguggacgacggcuuccuggacaucuggaccuacaacgccgagcugcuggugcugcuggagaacgagagaacccuggacuaccacgacagcaacgugaagaaccuguacgagaaggugagaagccagcugaagaacaacgccaaggagaucggcaacggcugcuucgaguucuaccacaagugcgacaacaccugcauggagagcgugaagaacggcaccuacgacuaccccaaguacagcgaggaggccaagcugaacagagaggagaucgacggcgugaagcuggagagcaccagaaucuaccagauccuggccaucuacagcaccguggccagcagccuggugcugguggugagccugggcgccaucagcuucuggaugugcagcaacggcagccugcagugcagaaucugcaucuga

SEQ ID NO: 164049 - RNA, 1701 nt, Artificial Sequence; identical to SEQ ID NO: 162729
  derived and/or modified CDS sequence (opt4) from hemagglutinin__InfluenzaA__ADB03607

SEQ ID NO: 164050 - RNA, 1701 nt, Artificial Sequence; identical to SEQ ID NO: 163082
  derived and/or modified CDS sequence (opt4) from hemagglutinin__InfluenzaA__ADB03609

SEQ ID NO: 164051 - RNA, 1701 nt, Artificial Sequence; identical to SEQ ID NO: 162729
  derived and/or modified CDS sequence (opt4) from hemagglutinin__InfluenzaA__ADB03611

SEQ ID NO: 164052 - RNA, 1701 nt, Artificial Sequence
  derived and/or modified CDS sequence (opt4) from hemagglutinin__InfluenzaA__ADB03612
augaaggccauccugguggugcugcuguacaccuucgccaccgccaacgccgacacccugugcaucggcuaccacgccaacaacagcaccgacaccguggacaccgugcuggagaagaacgugaccgugacccacagcgugaaccugcuggaggacaagcacaacggcaagcugugcaagcugagaggcguggccccccugcaccugggcaagugcaacaucgccggcuggauccugggcaaccccgagugcgagagccugagcaccgccagcagcuggagcuacaucguggagaccagcagcagcgacaacggcaccugcuaccccggcgacuucaucgacuacgaggagcugagagagcagcugagcagcgugagcagcuucgagagauucgagaucuuccccaagaccagcagcuggcccaaccacgacagcaacaagggcgugaccgccgccugcccccacgccggcgccaagagcuucuacaagaaccugaucuggcuggugaagaagggcaacagcuaccccaagcugagcaagagcuacaucaacgacaagggcaaggaggugcuggugcuguggggcauccaccaccccagcaccagcgccgaccagcagagccuguaccagaacgccgacgccuacguguucgugggcaccagcagauacagcaagaaguucaagcccgagaucgccaucagacccaaggugagagaccaggagggcagaaugaacuacuacuggacccugguggagcccggcgacaagaucaccuucgaggccaccggcaaccugguggugcccagauacgccuucgccauggagagaaacgccggcagcggcaucaucaucagcgacacccccgugcacgacugcaacaccaccugccagacccccaagggcgccaucaacaccagccugcccuuccagaacauccaccccaucaccaucggcaagugccccaaguacgugaagagcaccaagcugagacuggccaccggccugagaaacgugcccuucauccagagcagaggccuguucggcgccaucgccggcuucaucgagggcggcuggaccggcaugguggacggcugguacggcuaccaccaccagaacgagcagggcagcggcuacgccgccgaccugaagagcacccagaacgccaucgacgagaucaccaacaaggugaacagcgugaucgagaagaugaacacccaguucaccgccgugggcaaggaguucaaccaccuggagaagagaaucgagaaccugaacaagaagguggacgacggcuuccuggacaucuggaccuacaacgccgagcugcuggugcugcuggagaacgagagaacccuggacuaccacgacagcaacgugaagaaccuguacgagaaggugagaagccagcugaagaacaacgccaaggagaucggcaacggcugcuucgaguucuaccacaagugcgacaacaccugcauggagagcgugaagaacggcaccuacgacuaccccaaguacagcgaggaggccaagcugaacagagaggagaucgacggcgugaagcuggagagcaccagaaucuaccagauccuggccaucuacagcaccguggccagcagccuggugcugguggugagccugggcgccaucagcuucuggaugugcagcaacggcagccugcagugcagaaucugcaucuga

SEQ ID NO: 164053 - RNA, 1701 nt, Artificial Sequence; identical to SEQ ID NO: 162729
  derived and/or modified CDS sequence (opt4) from hemagglutinin__InfluenzaA__ADB03614

SEQ ID NO: 164054 - RNA, 1701 nt, Artificial Sequence
  derived and/or modified CDS sequence (opt4) from hemagglutinin__InfluenzaA__ADB03617
augaaggccauccugguggugcugcuguacaccuucgccaccgccaacgccgacacccugugcaucggcuaccacgccaacaacagcaccgacaccguggacaccgugcuggagaagaacgugaccgugacccacagcgugaaccugcuggaggacaagcacaacggcaagcugugcaagcugagaggcguggccccccugcaccugggcaagugcaacaucgccggcuggauccugggcaaccccgagugcgagagccugagcaccgccagcagcuggagcuacaucguggagaccagcagcagcgacaacggcaccugcuaccccggcgacuucaucgacuacgaggagcugagagagcagcugagcagcgugagcagcuucgagagauucgagaucuuccccaagaccagcagcuggcccaaccacgacagcaacaagggcgugaccgccgccugcccccacgccggcgccaagagcuucuacaagaaccugaucuggcuggugaagaagggcaacagcuaccccaagcugagcaagagcuacaucaacgacaagggcaaggaggugcuggugcuguggggcauccaccaccccagcaccagcgccgaccagcagagccuguaccagaacgccgacgccuacguguucgugggcaccagcagauacagcaagaaguucaagcccgagaucgccaucagacccaaggugagagagcaggagggcagaaugaacuacuacuggacccugguggagcccggcgacaagaucaccuucgaggccaccggcaaccugguggugcccagauacgccuucgccauggagagaaacgccggcagcggcaucaucaucagcgacacccccgugcacgacugcaacaccaccugccagacccccaagggcgccaucaacaccagccugcccuuccagaacauccaccccaucaccaucggcaagugccccaaguacgugaagagcaccaagcugagacuggccaccggccugagaaacgugcccagcauccagagcagaggccuguucggcgccaucgccggcuucaucgagggcggcuggaccggcaugguggacggcugguacggcuaccaccaccagaacgagcagggcagcggcuacgccgccgaccugaagagcacccagaacgccaucgacgagaucaccaacaaggugaacagcgugaucgagaagaugaacacccaguucaccgccgugggcaaggaguucaaccaccuggagaagagaaucgagaaccugaacaagaagguggacgacggcuuccuggacaucuggaccuacaacgccgagcugcuggugcugcuggagaacgagagaacccuggacuaccacgacagcaacgugaagaaccuguacgagaaggugagaagccagcugaagaacaacgccaaggagaucggcaacggcugcuucgaguucuaccacaagugcgacaacaccugcauggagagcgugaagaacggcaccuacgacuaccccaaguacagcaaggaggccaagcugaacagagaggagaucgacggcgugaagcuggagagcaccagaaucuaccagauccuggccaucuacagcaccguggccagcagccuggugcugguggugagccugggcgccaucagcuucuggaugugcagcaacggcagccugcagugcagaaucugcaucuga

SEQ ID NO: 164055 - RNA, 1701 nt, Artificial Sequence; identical to SEQ ID NO: 163082
  derived and/or modified CDS sequence (opt4) from hemagglutinin__InfluenzaA__ADB03619

SEQ ID NO: 164056 - RNA, 1701 nt, Artificial Sequence
  derived and/or modified CDS sequence (opt4) from hemagglutinin__InfluenzaA__ADB03620
augaaggccauccugguggugcugcuguacaccuucgccaccgccaacgccgacacccugugcaucggcuaccacgccaacaacagcaccgacaccguggacaccgugcuggagaagaacgugaccgugacccacagcgugaaccugcuggagggcaagcacaacggcaagcugugcaagcugagaggcguggccccccugcaccugggcaagugcaacaucgccggcuggauccugggcaaccccgagugcgagagccugagcaccgccagcagcuggagcuacaucguggagaccagcagcagcgacaacggcaccugcuaccccggcgacuucaucgacuacgaggagcugagagagcagcugagcagcgugagcagcuucgagagauucgagaucgugcccaagaccagcagcuggcccaaccacgacagcaacaagggcgugaccgccgccugcccccacgccggcgccaagagcuucuacaagaaccugaucuggcuggugaagaagggcaacagcuaccccaagcugagcaagagcuacaucaacgacaagggcaaggaggugcuggugcuguggggcauccaccaccccagcaccagcgccgaccagcagagccuguaccagaacgccgacgccuacguguucgugggcaccagcagauacagcaagaaguucaagcccgagaucgccaucagacccaaggugagagaccaggagggcagaaugaacuacuacuggacccugguggagcccggcgacaagaucaccuucgaggccaccggcaaccugguggugcccagauacgccuucgccauggagagaaacgccggcagcggcaucaucaucagcgacacccccgugcacgacugcaacaccaccugccagacccccaagggcgccaucaacaccagccugcccuuccagaacauccaccccaucaccaucggcaagugccccaaguacgugaagagcaccaagcugagacuggccaccggccugagaaacgugcccagcauccagagcagaggccuguucggcgccaucgccggcuucaucgagggcggcuggaccggcaugguggacggcugguacggcuaccaccaccagaacgagcagggcagcggcuacgccgccgaccugaagagcacccagaacgccaucgacgagaucaccaacaaggugaacagcgugaucgagaagaugaacacccaguucaccgccgugggcaaggaguucaaccaccuggagaagagaaucgagaaccugaacaagaagguggacgacggcuuccuggacaucuggaccuacaacgccgagcugcuggugcugcuggagaacgagagaacccuggacuaccacgacagcaacgugaagaaccuguacgagaaggugagaagccagcugaagaacaacgccaaggagaucggcaacggcugcuucgaguucuaccacaagugcgacaacaccugcauggagagcgugaagaacggcaccuacgacuaccccaaguacagcgaggaggccaagcugaacagagaggagaucgacggcgugaagcuggagagcaccagaaucuaccagauccuggccaucuacagcaccguggccagcagccuggugcugguggugagccugggcgccaucagcuucuggaugugcagcaacggcagccugcagugcagaaucugcaucuga

SEQ ID NO: 164057 - RNA, 1701 nt, Artificial Sequence
  derived and/or modified CDS sequence (opt4) from hemagglutinin__InfluenzaA__ADB03622
augaaggccauccugguggugcugcuguacaccuucgccaccgccaacgccgacacccugugcaucggcuaccacgccaacaacagcaccgacaccguggacaccgugcuggagaagaacgugaccgugacccacagcgugaaccugcuggaggacaagcacaacggcaagcugugcaagcugagaggcguggccccccugcaccugggcaagugcaacaucgccggcuggauccugggcaaccccgagugcgagagccugagcaccgccagcagcuggagcuacaucguggagaccagcagcagcgacaacggcaccugcuaccccggcgacuucaucaacuacgaggagcugagagagcagcugagcagcgugagcagcuucgagagauucgagaucuuccccaagaccagcagcuggcccaaccacgacagcaacaagggcgugaccgccgccugcccccacgccggcgccaagagcuucuacaagaaccugaucuggcuggugaagaagggcaacagcuaccccaagcugagcaagagcuacaucaacgacaagggcaaggaggugcuggugcuguggggcauccaccaccccagcaccagcgccgaccagcagagccuguaccagaacgccgacgccuacguguucgugggcaccagcagauacagcaagaaguucaagcccgagaucgccaucagacccaaggugagagaccaggagggcagaaugaacuacuacuggacccugguggagcccggcgacaagaucaccuucgaggccaccggcaaccugguggugcccagauacgccuucgccauggagagaaacgccggcagcggcaucaucaucagcgacacccccgugcacgacugcaacaccaccugccagacccccaacggcgccaucaacaccagccugcccuuccagaacauccaccccaucaccaucggcaagugccccaaguacgugaagagcaccaagcugagacuggccaccggccugagaaacgugcccagcauccagagcagaggccuguucggcgccaucgccggcuucaucgagggcggcuggaccggcaugguggacggcugguacggcuaccaccaccagaacgagcagggcagcggcuacgccgccgaccugaagagcacccagaacgccaucgacaagaucaccaacaaggugaacagcgugaucgagaagaugaacacccaguucaccgccgugggcaaggaguucaaccaccuggagaagagaaucgagaaccugaacaagaagguggacgacggcuuccuggacaucuggaccuacaacgccgagcugcuggugcugcuggagaacgagagaacccuggacuaccacgacagcaacgugaagaaccuguacgagaaggugagaagccagcugaagaacaacgccaaggagaucggcaacggcugcuucgaguucuaccacaagugcgacaacaccugcauggagagcgugaagaacggcaccuacgacuaccccaaguacagcgaggaggccaagcugaacagagaggagaucgacggcgugaagcuggagagcaccagaaucuaccagauccuggccaucuacagcaccguggccagcagccuggugcugguggugagccugggcgccaucagcuucuggaugugcagcaacggcagccugcagugcagaaucugcaucuga

SEQ ID NO: 164058 - RNA, 1701 nt, Artificial Sequence; identical to SEQ ID NO: 164057
  derived and/or modified CDS sequence (opt4) from hemagglutinin__InfluenzaA__ADB03623

SEQ ID NO: 164059 - RNA, 1701 nt, Artificial Sequence
  derived and/or modified CDS sequence (opt4) from hemagglutinin__InfluenzaA__ADB03628
auggaggccauccugguggugcugcuguacaccuucgccaccgccaacgccgacacccugugcaucggcuaccacgccaacaacagcaccgacaccguggacaccgugcuggagaagaacgugaccgugacccacagcgugaaccugcuggaggacaagcacaacggcaagcugugcaagcugagaggcguggccccccugcaccugggcaagugcaacaucgccggcuggauccugggcaaccccgagugcgagagccugagcaccgccagcagcuggagcuacaucguggagaccagcagcagcgacaacggcaccugcuaccccggcgacuucaucgacuacgaggagcugagagagcagcugagcagcgugagcagcuucgagagauucgagaucuuccccaagaccagcagcuggcccaaccacgacagcaacaagggcgugaccgccgccugcccccacgccggcgccaagagcuucuacaagaaccugaucuggcuggugaagaagggcaacagcuaccccaagcugagcaagagcuacaucaacgacaagggcaaggaggugcuggugcuguggggcauccaccaccccagcaccagcgccgaccagcagagccuguaccagaacgccgacgccuacguguucgugggcaccagcagauacagcaagaaguucaagcccgagaucgccaucagacccaaggugagagaccaggagggcagaaugaacuacuacuggacccugguggagcccggcgacaagaucaccuucgaggccaccggcaaccugguggugcccagauacgccuucgccauggagagaaacgccggcagcggcaucaucaucagcgacacccccgugcacgacugcaacaccaccugccagacccccaagggcgccaucaacaccagccugcccuuccacaacauccaccccaucaccaucggcaagugccccaaguacgugaagagcaccaagcugagacuggccaccggccugagaaacgugcccagcauccagagcagaggccuguucggcgccaucgccggcuucaucgagggcggcuggaccggcaugguggacggcugguacggcuaccaccaccagaacgagcagggcagcggcuacgccgccgaccugaagagcacccagaacgccaucgacgagaucaccaacaaggugaacagcgugaucgagaagaugaacacccaguucaccgccgugggcaaggaguucaaccaccuggagaagagaaucgagaaccugaacaagaagguggacgacggcuuccuggacaucuggaccuacaacgccgagcugcuggugcugcuggagaacgagagaacccuggacuaccacgacagcaacgugaagaaccuguacgagaaggugagaagccagcugaagaacaacgccaaggagaucggcaacggcugcuucgaguucuaccacaagugcgacaacaccugcauggagagcgugaagaacggcaccuacgacuaccccaaguacagcgaggaggccaagcugaacagagaggagaucgacggcgugaagcuggagagcaccagaaucuaccagauccuggccaucuacagcaccguggccagcagccuggugcugguggugagccugggcgccaucagcuucuggaugugcagcaacggcagccugcagugcagaaucugcaucuga

SEQ ID NO: 164060 - RNA, 1701 nt, Artificial Sequence
  derived and/or modified CDS sequence (opt4) from hemagglutinin__InfluenzaA__ADB03629
augaaggccauccugguggugcugcuguacaccuucaccaccgccaacgccgacacccugugcaucggcuaccacgccaacaacagcaccgacaccguggacaccgugcuggagaagaacgugaccgugacccacagcgugaaccugcuggaggacaagcacaacggcaagcugugcaagcugagaggcguggccccccugcaccugggcaagugcaacaucgccggcuggauccugggcaaccccgagugcgagagccugagcaccgccagcagcuggagcuacaucguggagaccagcagcagcgacaacggcaccugcuaccccggcgacuucaucgacuacgaggagcugagagagcagcugagcagcgugagcagcuucgagagauucgagaucuuccccaagaccagcagcuggcccaaccacgacagcaacaagggcgugaccgccgccugcccccacgccggcgccaagagcuucuacaagaaccugaucuggcuggugaagaagggcaacagcuaccccaagcugagcaagagcuacaucaacgacaagggcaaggaggugcuggugcuguggggcauccaccaccccagcaccagcgccgaccagcagagccuguaccagaacgccgacgccuacguguucgugggcaccagcagauacagcaagaaguucaagcccgagaucgccaucagacccaaggugagagagcaggagggcagaaugaacuacuacuggacccugguggagcccggcgacaagaucaccuucgaggccaccggcaaccugguggugcccagauacgccuucgccauggagagaaacgccggcagcggcaucaucaucagcgacacccccgugcacgacugcaacaccaccugccagacccccaagggcgccaucaacaccagccugcccuuccagaacauccacagcaucaccaucggcaagugccccaaguacgugaagagcaccaagcugagacuggccaccggccugagaaacgugcccagcauccagagcagaggccuguucggcgccaucgccggcuucaucgagggcggcuggaccggcaugguggacggcugguacggcuuccaccaccagaacgagcagggcagcggcuacgccgccgaccugaagagcacccagaacgccaucgacgagaucaccaacaaggugaacagcgugaucgagaagaugaacacccaguucaccgccgugggcaaggaguucaaccaccuggagaagagaaucgagaaccugaacaagaagguggacgacggcuuccuggacaucuggaccuacaacgccgagcugcuggugcugcuggagaacgagagaacccuggacuaccacgacagcaacgugaagaaccuguacgagaaggugagaagccagcugaagaacaacgccaaggagaucggcaacggcugcuucgaguucuaccacaagugcgacaacaccugcauggagagcgugaagaacggcaccuacgacuaccccaaguacagcgaggaggccaagcugaacagagaggagaucgacggcgugaagcuggagagcaccagaaucuaccagauccuggccaucuacagcaccguggccagcagccuggugcugguggugagccugggcgccaucagcuucuggaugugcagcaacggcagccugcagugcagaaucugcaucuga

SEQ ID NO: 164061 - RNA, 1701 nt, Artificial Sequence
  derived and/or modified CDS sequence (opt4) from hemagglutinin__InfluenzaA__ADB03630
augaaggccauccugguggugcugcuguacaccuucgccaccgccaacgccgacacccugugcaucggcuaccacgccaacaacagcaccgacaccguggacaccgugcuggagaagaacgugaccgugacccacagcgugaaccugcuggaggacaagcacaacggcaagcugugcaagcugagaggcguggccccccugcaccugggcaagugcaacaucgccggcuggauccugggcaaccccgagugcgagagccugagcaccgccagcagcuggagcuacaucguggagaccagcagcagcgacaacggcaccugcuaccccggcgacuucaucgacuacgaggagcugagagagcagcugagcagcgugagcagcuucgagagauucgagaucuuccccaagaccagcagcuggcccaaccacgacagcaacaagggcgugaccgccgccugcccccacgccggcgccaagagcuucuacaagaaccugaucuggcuggugaagaagggcaacagcuaccccaagcugagcaagagcuacaucaacgacaagggcaaggaggugcuggugcuguggggcauccaccaccccagcaccagcgccgaccagcagagccuguaccagaacgccgacgccuacguguucgugggcaccagcagauacagcaagaaguucaagcccgagaucgccaucagacccaaggugagagaccaggagggcagaaugaacuaccacuggacccugguggagcccggcgacaagaucaccuucgaggccaccggcaaccugguggugcccagauacgccuucgccauggagagaaacgccggcagcggcaucaucaucagcgacacccccgugcacgacugcaacaccaccugccagacccccaagggcgccaucaacaccagccugcccuuccagaacauccaccccaucaccaucggcaagugccccaaguacgugaagagcaccaagcugagacuggccaccggccugagaaacgugcccagcauccagagcagaggccuguucggcgccaucgccggcuucaucgagggcggcuggaccggcaugguggacggcugguacggcuaccaccaccagaacgagcagggcagcggcuacgccgccgaccugaagagcacccagaacgccaucgacgagaucaccaacaaggugaacagcgugaucgagaagaugaacacccaguucaccgccgugggcaaggaguucaaccaccuggagaagagaaucgagaaccugaacaagaagguggacgacggcuuccuggacaucuggaccuacaacgccgagcugcuggugcugcuggagaacgagagaacccuggacuaccacgacagcaacgugaagaaccuguacgagaaggugagaagccagcugaagaacaacgccaaggagaucggcaacggcugcuucgaguucuaccacaagugcgacaacaccugcauggagagcgugaagaacggcaccuacgacuaccccaaguacagcaaggaggccaagcugaacagagaggagaucgacggcgugaagcuggagagcaccagaaucuaccagauccuggccaucuacagcaccguggccagcagccuggugcugguggugagccugggcgccaucagcuucuggaugugcagcaacggcagccugcagugcagaaucugcaucuga

SEQ ID NO: 164062 - RNA, 1701 nt, Artificial Sequence; identical to SEQ ID NO: 163474
  derived and/or modified CDS sequence (opt4) from hemagglutinin__InfluenzaA__ADB25319

SEQ ID NO: 164063 - RNA, 1701 nt, Artificial Sequence; identical to SEQ ID NO: 162729
  derived and/or modified CDS sequence (opt4) from hemagglutinin__InfluenzaA__ADB25321

SEQ ID NO: 164064 - RNA, 1701 nt, Artificial Sequence
  derived and/or modified CDS sequence (opt4) from hemagglutinin__InfluenzaA__ADB27970
augaaggccauccugguggugcugcuguacaccuucgccaccgccaacgccgacacccugugcaucggcuaccacgccaacaacagcaccgacaccguggacaccgugcuggagaagaacgugaccgugacccacagcgugaaccugcuggaggacaagcacaacggcaagcugugcaagcugagaggcguggccccccugcaccugggcaagugcaacaucgccggcuggauccugggcaaccccgagugcgagagccugagcaccgccagcagcuggagcuacaucguggagaccagcagcagcgacaacggcaccugcuaccccggcgacuucaucgacuacgaggagcugagagagcagcugagcagcgugagcagcuucgagagauucgagaucuuccccaagaccagcagcuggcccaaccacgacagcaacaagggcgugaccgccgccugcccccacgccggcgccaagagcuucuacaagaaccugaucuggcuggugaagaagggcaacagcuaccccaagcugagcaagagcuacaucaacgacaagggcaaggaggugcuggugcuguggggcauccaccaccccagcaccagcgccgaccagcagagccuguaccagaacgccgacgccuacguguucgugggcaccagcagauacagcaagaaguucaagcccgagaucgccaucagacccaaggugagagaccaggagggcagaaugaacuacuacuggacccugguggagcccggcgacaagaucaccuucgaggccaccggcaaccugguggugcccagauacgccuucgccauggagagagacgccggcagcggcaucaucaucagcgacacccccgugcacgacugcaacaccaccugccagacccccaagggcgccaucaacaccagccugcccuuccagaacauccaccccaucaccaucggcaagugccccaaguacgugaagagcaccaagcugagacuggccaccggccugagaaacgugcccagcauccagagcagaggccuguucggcgccaucgccggcuucaucgagggcggcuggaccggcaugguggacggcugguacggcuaccaccaccagaacgagcagggcagcggcuacgccgccgaccugaagagcacccagaacgccaucgacgagaucaccaacaaggugaacagcgugaucgagaagaugaacacccaguucaccgccgugggcaaggaguucaaccaccuggagaagagaaucgagaaccugaacaagaagguggacgacggcuuccuggacaucuggaccuacaacgccgagcugcuggugcugcuggagaacgagagaacccuggacuaccacgacagcaacgugaagaaccuguacgagaaggugagaagccagcugaagaacaacgccaaggagaucggcaacggcugcuucgaguucuaccacaagugcgacaacaccugcauggagagcgugaagaacggcaccuacgacuaccccaaguacagcgaggaggccaagcugaacagagaggagaucgacggcgugaagcuggagagcaccagaaucuaccagauccuggccaucuacagcaccguggccagcagccuggugcugguggugagccugggcgccaucagcuucuggaugugcagcaacggcagccugcagugcagaaucugcaucuga

SEQ ID NO: 164065 - RNA, 1701 nt, Artificial Sequence; identical to SEQ ID NO: 162729
  derived and/or modified CDS sequence (opt4) from hemagglutinin__InfluenzaA__ADB27980

SEQ ID NO: 164066 - RNA, 1701 nt, Artificial Sequence; identical to SEQ ID NO: 162729
  derived and/or modified CDS sequence (opt4) from hemagglutinin__InfluenzaA__ADB54352

SEQ ID NO: 164067 - RNA, 1701 nt, Artificial Sequence; identical to SEQ ID NO: 162729
  derived and/or modified CDS sequence (opt4) from hemagglutinin__InfluenzaA__ADB54355

SEQ ID NO: 164068 - RNA, 1698 nt, Artificial Sequence
  derived and/or modified CDS sequence (opt4) from hemagglutinin__InfluenzaA__ADB65926
augaaggugaagcugcuggugcugcugugcaccuucaccgccaccuacgccgacaccaucugcaucggcuaccacgccaacaacagcaccgacaccguggacaccgugcuggagaagaacgugaccgugacccacagcgugaaccugcuggaggacaagcacaacggcaagcugugccugcugaagggcaaggccccccugcagcugggcaacugcagcguggccggcuggauccugggcaaccccgagugcggccugcugaucagcaaggagagcuggagcuacaucguggagagacccaaccccgagaacggcaccugcuaccccggccacuucgccgacuacgaggagcugagagagcagcugagcagcgugagcagcuucgagagauucgagaucuuccccaagggcagcagcuggcccaaccacaccgugaccggcgugagcgccagcugcagccacaacggcgagagcagcuucuacaagaaccugcuguggcugaccggcaagaacggccuguaccccaaccugagcaagagcuacgccaacaacaaggagaaggaggugcuggugcuguggggcgugcaccacccccccaacaucggcgaccagaugacccuguaccacaaggagaacgccuacgugagcguggugagcagccacuacagcagaaaguucacccccgagaucgccaagagacccaaggugagagaccaggagggcagaaucaacuacuacuggacccugcuggagcccggcgacaccaucaucuucgaggccaacggcaaccugaucgcccccagauacgccuucgcccugagcagaggcuucggcagcggcaucaucaacagcaacgcccccauggacgagugcgacgccaagugccagaccccccagggcgccaucaacagcagccugcccuuccagaacgugcaccccgugaccaucggcgagugccccaaguacgugagaagcgccaagcugagaauggugaccggccugagaaacauccccagcauccagagcagaggccuguucggcgccaucgccggcuucaucgagggcggcuggaccggcaugguggacggcugguacggcuaccaccaccagaacgagcagggcagcggcuacgccgccgaccagaagagcacccagaacgccaucaacggcaucaccaacaaggugaacagcgugaucgagaagaugaacacccaguucaccgccgugggcaaggaguucaacaagcuggagagaagaauggagaaccugaacaagaagguggacgacggcuucaucgacguguggaccuacaacgccgagcugcuggugcugcuggagaacgagagaacccuggacuuccacgacagcaacgugaagaaccuguacgagaaggugaagaaccagcugaagaacaacgccaaggagaugggcaacggcugcuucgaguucuaccacaagugcaacgacgagugcauggagagcgugaagaacggcaccuacgacuaccccaaguacagcgaggagagcaagcugagcagagagaagaucgacggcgugaagcuggagagcaugggcguguaccagauccuggccaucuacagcaccguggccagcagccuggugcugcuggugagccugggcgccaucggcuucuggaugugcagcaacggcagccugcagugcagaaucugcaucuga

SEQ ID NO: 164069 - RNA, 1698 nt, Artificial Sequence
  derived and/or modified CDS sequence (opt4) from hemagglutinin__InfluenzaA__ADB80153
augaaggugaagcugcuggcccugcugugcaccuucaccgccaccuacgccgacaccaucugcaucggcuaccacgccaacaacagcaccgacaccguggacaccgugcuggagaagaacgugaccgugacccacagcgugaaccugcuggaggacaaccacaacggcaagcugugccugcugaagggcaucgccccccugcagcugggcaacugcagcguggccggcuggauccugggcaaccccgagugcgagcugcugaucagcaaggagagcuggagcuacaucguggagaagcccaaccccgagaacggcaccugcuaccccggccacuucgccgacuacgaggagcugagagagcagcugagcagcgugagcagcuucgagagauucgagaucuuccccaaggagagcagcuggcccaaccacaccgugaccggcgugagcgccagcugcagccacaacggcgagagcagcuucuacaagaaccugcuguggcugaccggcaagaacggccuguaccccaaccugagcaagagcuucgccaacaacaaggagaaggaggugcuggugcuguggggcgugcaccacccccccaacaucggcgaccagaugacccuguaccacaaggagaacgccuacgugagcguggugagcagccacuacagcagaaaguucacccccgagaucgccaagagacccaaggugagagaccaggagggcagaaucaacuacuacuggacccugcuggagcccggcgacaccaucaucuucgaggccaacggcaaccugaucgcccccagauacgccuucgcccugagcagaggcuucggcagcggcaucaucaacagcaacgcccccauggacgagugcgacgccaagugccagaccccccagggcgccaucaacagcagccugcccuuccagaacgugcaccccgugaccaucggcgagugccccaaguacgugagaagcaccaagcugagaauggugaccggccugagaaacauccccagcauccagagcagaggccuguucggcgccaucgccggcuucaucgagggcggcuggaccggcaugguggacggcugguacggcuaccaccaccagaacgagcagggcagcggcuacgccgccgaccagaagagcacccagaacgccaucaacggcaucaccaacaaggugaacagcgugaucgagaagaugaacacccaguucaccgccgugggcaaggaguucaacaagcuggagagaagaauggagaaccugaacaagaagguggacgacggcuucaucgacguguggaccuacaacgccgagcugcuggugcugcuggagaacgagagaacccuggacuuccacgacagcaacgugaagaaccuguacgagaaggugaagaaccagcugaagaacaacgccaaggagaucggcaacggcugcuucgaguucuaccacaagugcaacgacgagugcauggagagcgugaagaacggcaccuacgacuaccccaaguacagcgaggagagcaagcugagcagagagaagaucgacggcgugaagcuggagagcaugggcguguaccagauccuggccaucuacagcaccguggccagcagccuggugcugcuggugagccugggcgccaucagcuucuggaugugcagcaacggcagccugcagugcagaaucugcaucuga

SEQ ID NO: 164070 - RNA, 1701 nt, Artificial Sequence; identical to SEQ ID NO: 163830
  derived and/or modified CDS sequence (opt4) from hemagglutinin__InfluenzaA__ADB81399

SEQ ID NO: 164071 - RNA, 1701 nt, Artificial Sequence; identical to SEQ ID NO: 163830
  derived and/or modified CDS sequence (opt4) from hemagglutinin__InfluenzaA__ADB81409

SEQ ID NO: 164072 - RNA, 1701 nt, Artificial Sequence
  derived and/or modified CDS sequence (opt4) from hemagglutinin__InfluenzaA__ADB81419
augaaggccauccugguggugcugcuguacaccuucgccaccgccaacgccgacacccugugcaucggcuaccacgccaacaacagcaccgacaccguggacaccgugcuggagaagaacgugaccgugacccacagcgugaaccugcuggaggacaagcacaacggcaagcugugcaagcugagaggcguggccccccugcaccugggcaagugcaacaucgccggcuggauccugggcaaccccgagugcgagagccugagcaccgccagcagcuggagcuacaucguggagaccagcagcagcgacaacggcaccugcuaccccggcgacuucaucgacuacgaggagcugagagagcagcugagcagcgugagcagcuucgagagauucgagaucuuccccaagaccagcagcuggcccaaccacgacagcaacaagggcgugaccgccgccugcccccacgccggcgccaagagcuucuacaagaaccugaucuggcuggugaagaagggcaacagcuaccccaagcugagcaagagcuacaucaacgacaagggcaaggaggugcuggugcuguggggcauccaccaccccagcaccagcgccgaccagcagagccuguaccagaacgccgacgccuacguguucgugggcaccagcagauacagcaagaaguucaagcccgagaucgccaucagacccaaggugagagaccaggagggcagaaugaacuacuacuggacccugguggagcccggcgacaagaucaccuucgaggccaccggcaaccugguggugcccagauacgccuucgccauggagagaaacgccggcagcggcaucaucaucagcgacacccccgugcacgacugcaacaccaccugccagacccccaagggcgccaucaacaccagccugcccuuccagaacauccaccccaucaccaucggcaagugccccaaguacgugaagagcaccaagcugagacuggccaccggccugagaaacauccccagcauccagagcagaggccuguucggcgccaucgccggcuucaucgagggcggcuggaccggcaugguggacggcugguacggcuaccaccaccagaacgagcagggcagcggcuacgccgccgaccugaagagcacccagaacgccaucgacgagaucaccaacaaggugaacagcgugaucgagaagaugaacacccaguucaccgccgugggcaaggaguucaaccaccuggagaagagaaucgagaaccugaacaagaagguggacgacggcuuccuggacaucuggaccuacaacgccgagcugcuggugcugcuggagaacgagagaacccuggacuaccacgacagcaacgugaagaaccuguacgagaaggugagaagccagcugaagaacaacgccaaggagaucggcaacggcugcuucgaguucuaccacaagugcgacaacaccugcauggagagcgugaagaacggcaccuacgacuaccccgaguacagcgaggaggccaagcugaacagagaggagaucgacggcgugaagcuggagagcaccagaaucuaccagauccuggccaucuacagcaccguggccagcagccuggugcugguggugagccugggcgccaucagcuucuggaugugcagcaacggcagccugcagugcagaaucugcaucuga

SEQ ID NO: 164073 - RNA, 1701 nt, Artificial Sequence; identical to SEQ ID NO: 163889
  derived and/or modified CDS sequence (opt4) from hemagglutinin__InfluenzaA__ADB81429

SEQ ID NO: 164074 - RNA, 1701 nt, Artificial Sequence
  derived and/or modified CDS sequence (opt4) from hemagglutinin__InfluenzaA__ADB81439
augaaggccauccugguggugcugcuguacaccuucgccaccgccaacgccgacacccugugcaucggcuaccacgccaacaacagcaccgacaccguggacaccgugcuggagaagaacgugaccgugacccacagcgugaaccugcuggaggacaagcacaacggcaagcugugcaagcugagaggcguggccccccugcaccugggcaagugcaacaucgccggcuggauccugggcaaccccgagugcgagagccugagcaccgccagcagcuggagcuacaucguggagaccagcagcagcgacaacggcaccugcuaccccggcgacuucaucgacuacgaggagcugagagagcagcugagcagcgugagcagcuucgagagauucgagaucuuccccaagaccagcagcuggcccaaccacgaccccaacaagggcgugaccgccgccugcccccacgccggcgccaagagcuucuacaagaaccugaucuggcuggugaagaagggcaacagcuaccccaagcugagcaagagcuacaucaacgacaagggcaaggaggugcuggugcuguggggcauccaccaccccagcaccagcgccgaccagcagagccuguaccagaacgccgacgccuacguguucgugggcaccagcagauacagcaagaaguucaagcccgagaucgccaucagacccaaggugagaaaccaggagggcagaaugaacuacuacuggacccugguggagcccggcgacaagaucaccuucgaggccaccggcaaccugguggugcccagauacgccuucgccauggagagaaacgccggcagcggcaucaucaucagcgacacccccgugcacgacugcaacaccaccugccagacccccaagggcgccaucaacaccagccugcccuuccagaacauccaccccaucaccaucggcaagugccccaaguacgugaagagcaccaagcugagacuggccaccggccugagaaacgugcccagcauccagagcagaggccuguucggcgccaucgccggcuucaucgagggcggcuggaccggcaugguggacggcugguacggcuaccaccaccagaacgagcagggcagcggcuacgccgccgaccugaagagcacccagaacgccaucgacgagaucaccaacaaggugaacagcgugaucgagaagaugaacacccaguucaccgccgugggcaaggaguucaaccaccuggagaagagaaucgagaaccugaacaagaagguggacgacggcuuccuggacaucuggaccuacaacgccgagcugcuggugcugcuggagaacgagagaacccuggacuaccacgacagcaacgugaagaaccuguacgagaaggugagaagccagcugaagaacaacgccaaggagaucggcaacggcugcuucgaguucuaccacaagugcgacaacaccugcauggagagcgugaagaacggcaccuacgacuaccccaaguacagcgaggaggccaagcugaacagagaggagaucgacggcgugaagcuggagagcaccagaaucuaccagauccuggccaucuacagcaccguggccagcagccuggugcugguggugagccugggcgccaucagcuucuggaugugcagcaacggcagccugcagugcagaaucugcaucuga

SEQ ID NO: 164075 - RNA, 1701 nt, Artificial Sequence
  derived and/or modified CDS sequence (opt4) from hemagglutinin__InfluenzaA__ADB81449
augaaggccauccugguggugcugcuguacaccuucgccaccgccaacgccgacacccugugcaucggcuaccacgccaacaacagcaccgacaccguggacaccgugcuggagaagaacgugaccgugacccacagcgugaaccugcuggaggacaagcacaacggcaagcugugcaagcugagaggcguggccccccugcaccugggcaagugcaacaucgccggcuggauccugggcaaccccgagugcgagagccugagcaccgccagcagcuggagcuacaucguggagaccagcagcagcgacaacggcaccugcuaccccggcgacuucaucgacuacgaggagcugagagagcagcugagcagcgugagcagcuucgagagauucgagaucuuccccaagaccagcagcuggcccaaccacgacagcaacaagggcgugaccgccgccugcccccacgccggcgccaagagcuucuacaagaaccugaucuggcuggugaagaagggcaacagcuaccccaagcugaacaagagcuacaucaacgacaagggcaaggaggugcuggugcuguggggcauccaccaccccagcaccagcgccgaccagcagagccuguaccagaacgccgacgccuacguguucgugggcaccagcagauacagcaagaaguucaagcccgagaucgccaucagacccaaggugagagaccaggagggcagaaugaacuacuacuggacccugguggagcccggcgacaagaucaccuucgaggccaccggcaaccugguggugcccagauacgccuucgccauggagagaaacgccggcagcggcaucaucaucagcgacacccccgugcacgacugcaacaccaccugccagacccccaagggcgccaucaacaccagccugcccuuccagaacauccaccccaucaccaucggcaagugccccaaguacgugaagagcaccaagcugagacuggccaccggccugagaaacgugcccagcauccagagcagaggccuguucggcgccaucgccggcuucaucgagggcggcuggaccggcaugguggacggcugguacggcuaccaccaccagaacgagcagggcagcggcuacgccgccgaccugaagagcacccagaacgccaucgacgagaucaccaacaaggugaacagcgugaucgagaagaugaacacccaguucaccgccgugggcaaggaguucaaccaccuggagaagagaaucgagaaccugaacaagaagguggacgacggcuuccuggacaucuggaccuacaacgccgagcugcuggugcugcuggagaacgagagaacccuggacuaccacgacagcaacgugaagaaccuguacgagaaggugagaagccagcugaagaacaacgccaaggagaucggcaacggcugcuucgaguucuaccacaagugcgacaacaccugcauggagagcgugaagaacggcaccuacgacuaccccaaguacagcgaggaggccaagcugaacagagaggagaucgacggcgugaagcuggagagcaccagaaucuaccagauccuggccaucuacagcaccguggccagcagccuggugcugguggugagccugggcgccaucagcuucuggaugugcagcaacggcagccugcagugcagaaucugcaucuga

SEQ ID NO: 164076 - RNA, 1701 nt, Artificial Sequence
  derived and/or modified CDS sequence (opt4) from hemagglutinin__InfluenzaA__ADB81459
augaaggccauccugguggugcugcuguacaccuucgccaccgccaacgccgacacccugugcaucggcuaccacgccaacaacagcaccgacaccguggacaccgugcuggagaagaacgugaccgugacccacagcgugaaccugcuggaggacaagcacaacggcaagcugugcaagcugagaggcguggccccccugcaccugggcaagugcaacaucgccggcuggauccugggcaaccccgagugcgagagccugagcaccgccagcagcuggagcuacaucguggagaccagcagcagcgacaacggcaccugcuaccccggcgacuucaucgacuacgaggagcugagagagcagcugagcagcgugagcagcuucgagagauucgagaucuuccccaagaccagcagcuggcccaaccacgacagcaacaagggcgugaccgccgccugcccccacgccggcgccaagagcuucuacaagaaccugaucuggcuggugaagaagggcaacagcuaccccaagcugaacaagagcuacaucaacgacaagggcaaggaggugcuggugcuguggggcauccaccaccccagcaccagcgccgaccagcagagccuguaccagaacgccgacgccuacguguucgugggcaccagcagauacagcaagaaguucaagcccgagaucgccaucagacccaaggugagagaccaggagggcagaaugaacuacuacuggacccugguggagcccggcgacaagaucaccuucgaggccaccggcaaccugguggugcccagauacgccuucgccauggagagaaacggcggcagcggcaucaucaucagcgacacccccgugcacgacugcaacaccaccugccagacccccaagggcgccaucaacaccagccugcccuuccagaacauccaccccaucaccaucggcaagugccccaaguacgugaagagcaccaagcugagacuggccaccggccugagaaacgugcccagcauccagagcagaggccuguucggcgccaucgccggcuucaucgagggcggcuggaccggcaugguggacggcugguacggcuaccaccaccagaacgagcagggcagcggcuacgccgccgaccugaagagcacccagaacgccaucgacgagaucaccaacaaggugaacagcgugaucgagaagaugaacacccaguucaccgccgugggcaaggaguucaaccaccuggagaagagaaucgagaaccugaacaagaagguggacgacggcuuccuggacaucuggaccuacaacgccgagcugcuggugcugcuggagaacgagagaacccuggacuaccacgacagcaacgugaagaaccuguacgagaaggugagaagccagcugaagaacaacgccaaggagaucggcaacggcugcuucgaguucuaccacaagugcgacaacaccugcauggagagcgugaagaacggcaccuacgacuaccccaaguacagcgaggaggccaagcugaacagagaggagaucgacggcgugaagcuggagagcaccagaaucuaccagauccuggccaucuacagcaccguggccagcagccuggugcugguggugagccugggcgccaucagcuucuggaugugcagcaacggcagccugcagugcagaaucugcaucuga

SEQ ID NO: 164077 - RNA, 1701 nt, Artificial Sequence
  derived and/or modified CDS sequence (opt4) from hemagglutinin__InfluenzaA__ADB82655
augaaggccauccugcuggugcugcugugcacccuggccgccgccaacgccgacacccugugcaucggcuaccacgccaacaacagcaccgacaccguggacaccgugcuggagaagaacgugaccgugacccacagcgugaaccugcuggaggacagacacaacggcaagcugugcaaccugagaggcaaggccccccugcaccugggcaagugcaacaucgccggcuggcugcugggcaaccccgagugcgagcugcuguucgccgugaacagcuggagcuacaucguggagaccagcaacagcgacaacggcaccugcuaccccggcgacuucaccagcuacgaggagcugagagagcagcugagcagcgugagcagcuucgagagauucgagaucuuccccaaggccagcagcuggcccaaccacgagaccaacagaggcgugaccgccgccugccccuacgccggcaccaacggcuucuacagaaaccugaucuggcuggugaagaaggagaacagcuaccccaagcugagaaagagcuacgugaacaacaagaagaaggaggugcuggugcuguggggcauccaccacccccccaccaacaccgaccagcagagccuguaccagaacgccgacgccuacguguucgugggcagcagcaaguacagcagaaaguucaagcccgagaucgccgagagacccaaggugagaggccaggccggcagaaugaacuacuacuggacccugaucgagcccggcgacaccaucaccuucgaggccaccggcaaccugguggcccccagauacgccuucgccaugaacagaggccccgugagcggcaucaucaccagcgacgcccccgugcacgacugcaacgccaccugccagacccccaagggcgccaucaacaccagccugcccuuccagaacauccaccccaucaccaucggcgagugccccaaguacgugaagagcaccagacugagaauggccaccggccugagaaacauccccagcauccagagcagaggccuguucggcgccaucgccggcuucaucgagggcggcuggaccggcaugaucgacggcugguacggcuaccaccaccagaacggccagggcagcggcuacgccgccgaccagaagagcacccagaacgccaucgacagaaucaccaacaaggugaacagcgugaucgagaagaugaacauccaguucaccgccgugggcaaggaguucaaccaccuggagagaagaaucgagaaccugaacaagaagguggacgacggcuuccuggacguguggaccuacaacgccgagcugcuggugcugcuggagaacgagagaacccuggacuuccacgacagcaacgugaagacccuguacgagaaggugaagacccagcugagaaacaacgccaaggagaucggcaacggcugcuucgaguucuaccacaagugcgacgacaccugcauggagagcaucaagaacggcaccuacaacuaccccaaguacagcgaggagagcaagcugaacagagaggagaucgacggcgugaagcuggagagcaccagaaucuaccagauccuggccaucuacagcaccgccgccagcagccuggugcugcuggugagccugggcgccaucggcuucuggaugugcagcaacggcagccugcagugcagaaucugcaucuga

SEQ ID NO: 164078 - RNA, 1701 nt, Artificial Sequence
  derived and/or modified CDS sequence (opt4) from hemagglutinin__InfluenzaA__ADB82656
augaaggccauccugcuggugcugcagugcauccugaccgccgccaacgccgacacccugugcaucggcuaccacgccaacaacagcaccgacaccguggacaccgugcuggagaagaacgugaccgugacccacagcgugaaccugcuggaggacagacacaacggcaagcugugcaagcugaagggcaucgccccccugcaccugggcaagugcaacaucgccggcuggcugcugggcaaccccgagugcgagcugcuguucaaggccaacagcuggagcuacaucguggagaccagcuacagcgacaacggcaccugcuaccccggcgacuucaccaacuacgaggagcugagagagcagcugagcagcgugagcagcuucgagagauucgagauguuccccaaggccaacagcuggcccaaccacgagaccaacaagggcgugaccgccgccugccccuacgccggcgccaacagcuucuacagaaaccugaucuggcuggugaagaagggcaacagcuaccccagacugagcaagagcuacgugaacaacaagaagaaggaggugcuggugcuguggggcauccaccaccccagcaccagcaccgaccagcagagccuguaccagaacgccgacgccuacguguucgugagcagcagcaccuacaacaagagauucaagcccgagaucggcaccagacccaaggugagagaccagagcggcagaaugaacuacuacuggaccaucguggagcccggcgacaccaucaccuucgaggccaccggcaaccugguggcccccagauacgccuucgccaugaagagagacagcggcagcggcaucaucaugagcgacacccccgugcacgacugcaacaccaccugccagacccccaagggcgccaucaacaccagccugcccuuccagaacgugcaccccgugaccaucggcgagugccccaaguacgugaagagcaccaagcugagaauggccaccggccugagaaacauccccagcauccagagcagaggccuguucggcgccaucgccggcuucaucgagggcggcuggaccggcaugaucgacggcugguacggcuaccaccaccagaacgagcagggcagcggcuacgccgccgacagaaagagcacccagaacgccaucgacggcaucaccaacaaggugaacagcaucaucgagaagaugaacauccaguucaccgccgugggcaaggaguucagccaccuggagaagagaguggagaaccugaacaagaagguggacgacggcuuccuggacguguggaccuacaacgccgagcugcuggugcugcuggagaacgagagaacccuggacuaccacgacagcaacgugaagaaccuguacgagaaggugagaagccagcugaagaacaacgccaaggagaucggcaacggcugcuucgaguucuaccacaagugcgacgacagcugcauggagagcaucaagaacgagaccuacgacuacagcaaguacagcgaggagagcagacugaacagagagaagaucgacggcgugaagcuggagagcacccagaucuaccagauccuggccaucuacagcaccguggccagcagccuggugcugcuggugagccugggcgccaucagcuucuggaugugcagcaacggcagccugcagugcagaaucugcaucuga

SEQ ID NO: 164079 - RNA, 1701 nt, Artificial Sequence
  derived and/or modified CDS sequence (opt4) from hemagglutinin__InfluenzaA__ADB82944
augaaggccauccugguggugcugcuguacaccuucgccaccgccaacgccgacacccugugcaucggcuaccacgccaacaacagcaccgacaccguggacaccgugcuggagaagaacgugaccgugacccacagcgugaaccugcuggaggacaagcacaacggcaagcugugcaagcugagaggcguggccccccugcaccugggcaagugcaacaucgccggcuggauccugggcaaccccgagugcgagagccugagcaccgccagcagcuggagcuacaucguggagaccagcagcagcgacaacggcaccugcuaccccggcgacuucaucgacuacgaggagcugagagagcagcugagcagcgugagcagcuucgagagauucgagaucuuccccaagaccagcagcuggcccaaccacgaccccaacaagggcgugaccgccgccugcccccacgccggcgccaagagcuucuacaagaaccugaucuggcuggugaagaagggcaacagcuaccccaagcugagcaagagcuacaucaacgacaagggcaaggaggugcuggugcuguggggcauccaccaccccagcaccagcgccgaccagcagagccuguaccagaacgccgacgccuacguguucgugggcaccagcagauacagcaagaaguucaagcccgagaucgccaucagacccaaggugagagaccaggagggcagaaugaacuacuacuggacccugguggagcccggcgacaagaucaccuucgaggccaccggcaaccugguggugcccagauacgccuucgccauggagagaaacgccggcagcggcaucaucaucagcgacacccccgugcacgacugcaacaccaccugccagacccccaagggcgccaucaacaccagccugcccuuccagaacauccaccccaucaccaucggcaagugccccaaguacgugaagagcaccaagcugagacuggccaccggccugagaaacauccccagcauccagagcagaggccuguucggcgccaucgccggcuucaucgagggcggcuggaccggcaugguggacggcugguacggcuaccaccaccagaacgagcagggcagcggcuacgccgccgaccugaagagcacccagaacgccaucgacgagaucaccaacaaggugaacagcgugaucgagaagaugaacacccaguucaccgccgugggcaaggaguucaaccaccuggagaagagaaucgagaaccugaacaagaagguggacgacggcuuccuggacaucuggaccuacaacgccgagcugcuggugcugcuggagaacgagagaacccuggacuaccacgacagcaacgugaagaaccuguacgagaaggugagaagccagcugaagaacaacgccaaggagaucggcaacggcugcuucgaguucuaccacaagugcgacaacaccugcauggagagcgugaagaacggcaccuacgacuaccccaaguacagcgaggaggccaagcugaacagagaggagaucgacggcgugaagcuggagagcaccagaaucuaccagauccuggccaucuacagcaccguggccagcagccuggugcugguggugagccugggcgccaucagcuucuggaugugcagcaacggcagccugcagugcagaaucugcaucuga

SEQ ID NO: 164080 - RNA, 1701 nt, Artificial Sequence
  derived and/or modified CDS sequence (opt4) from hemagglutinin__InfluenzaA__ADB82950
augaaggccauccugguggugcugcuguacaccuucgccaccgccaacgccgacacccugugcaucggcuaccacgccaacaacagcaccgacaccguggacaccgugcuggagaagaacgugaccgugacccacagcgugaaccugcuggaggacaagcacaacggcaagcugugcaagcugagaggcguggccccccugcaccugggcaagugcaacaucgccggcuggauccugggcaaccccgagugcgagagccugagcaccgccagcagcuggagcuacaucguggagaccagcagcagcgacaacggcaccugcuaccccggcgacuucaucgacuacgaggagcugagagagcagcugagcagcgugagcagcuucgagagauucgagaucuuccccaagaccagcagcuggcccaaccacgacagcaacaagggcgugaccgccgccugcccccacgccggcgccaagagcuucuacaagaaccugaucuggcuggugaagaagggcaacagcuaccccaagcugagcaagagcuacaucaacgacaagggcaaggaggugcuggugcuguggggcauccaccaccccagcaccagcgccgaccagcagagccuguaccagaacgccgacgccuacguguucgugggcaccagcagauacagcaagaaguucgagcccgagaucgccaucagacccaaggugagagaccaggagggcagaaugaacuacuacuggacccugguggagcccggcgacaagaucaccuucgaggccaccggcaaccugguggugcccagauacgccuucgccauggagagaaacgccggcagcggcaucaucaucagcgacacccccgugcacgacugcaacaccaccugccagacccccaagggcgccaucaacaccagccugcccuuccagaacauccaccccaucaccaucggcaagugccccaaguacgugaagagcaccaagcugagacuggccaccggccugagaaacgugcccagcauccagagcagaggccuguucggcgccaucgccggcuucaucgagggcggcuggaccggcaugguggacggcugguacggcuaccaccaccagaacgagcagggcagcggcuacgccgccgaccugaagagcacccagaacgccaucgacgagaucaccaacaaggugaacagcgugaucgagaagaugaacacccaguucaccgccgugggcaaggaguucaaccaccuggagaagagaaucgagaaccugaacaagaagguggacgacggcuuccuggacaucuggaccuacaacgccgagcugcuggugcugcuggagaacgagagaacccuggacuaccacgacagcaacgugaagaaccuguacgagaaggugagaagccagcugaagaacaacgccaaggagaucggcaacggcugcuucgaguucuaccacaagugcgacaacaccugcauggagagcgugaagaacggcaccuacgacuaccccaaguacagcgaggaggccaagcugaacagagaggagaucgacggcgugaagcuggagagcaccagaaucuaccagauccuggccaucuacagcaccguggccagcagccuggugcugguggugagccugggcgccaucagcuucuggaugugcagcaacggcagccugcagugcagaaucugcaucuga

SEQ ID NO: 164081 - RNA, 1701 nt, Artificial Sequence; identical to SEQ ID NO: 163527
  derived and/or modified CDS sequence (opt4) from hemagglutinin__InfluenzaA__ADB89129

SEQ ID NO: 164082 - RNA, 1701 nt, Artificial Sequence; identical to SEQ ID NO: 162729
  derived and/or modified CDS sequence (opt4) from hemagglutinin__InfluenzaA__ADB89139

SEQ ID NO: 164083 - RNA, 1701 nt, Artificial Sequence
  derived and/or modified CDS sequence (opt4) from hemagglutinin__InfluenzaA__ADB89149
augaaggccauccugguggugcugcuguacaccuucgccaccgccaacgccuacacccugugcaucggcuaccacgccaacaacagcaccgacaccguggacaccgugcuggagaagaacgugaccgugacccacagcgugaaccugcuggaggacaagcacaacggcaagcugugcaagcugagaggcguggccccccugcaccugggcaagugcaacaucgccggcuggauccugggcaaccccgagugcgagagccugagcaccgccagcagcuggagcuacaucguggagaccagcagcagcgacaacggcaccugcuaccccggcgacuucaucgacuacgaggagcugagagagcagcugagcagcgugagcagcuucgagagauucgagaucuuccccaagaccagcagcuggcccaaccacgacagcaacaagggcgugaccgccgccugcccccacgugggcgccaagagcuucuacaagaaccugaucuggcuggugaagaagggcaacagcuaccccaagcugagcaagagcuacaucaacgacaagggcaaggaggugcuggugcuguggggcauccaccaccccagcaccagcgccgaccagcagagccuguaccagaacgccgacgccuacguguucgugggcaccagcagauacagcaagaaguucaagcccgagaucgccaucagacccaaggugagaggccaggagggcagaaugaacuacuacuggacccugguggagcccggcgacaagaucaccuucgaggccaccggcaaccugguggugcccagauacgccuucgccauggagagaaacgccggcagcggcaucaucaucagcgacacccccgugcacgacugcaacaccaccugccagacccccaagggcgccaucaacaccagccugcccuuccagaacauccaccccaucaccaucggcaagugccccaaguacgugaagagcaccaagcugagacuggccaccggccugagaaacauccccagcauccagagcagaggccuguucggcgccaucgccggcuucaucgagggcggcuggaccggcaugguggacggcugguacggcuaccaccaccagaacgagcagggcagcggcuacgccgccgaccugaagagcacccagaacgccaucgacgagaucaccaacaaggugaacagcgugaucgagaagaugaacacccaguucaccgccgugggcaaggaguucaaccaccuggagaagagaaucgagaaccugaacaagaagguggacgacggcuuccuggacaucuggaccuacaacgccgagcugcuggugcugcuggagaacgagagaacccuggacuaccacgacagcaacgugaagaaccuguacgagaaggugagaagccagcugaagaacaacgccaaggagaucggcaacggcugcuucgaguucuaccacaagugcgacaacaccugcauggagagcgugaagaacggcaccuacgacuaccccaaguacagcgaggaggccaagcugaacagagaggagaucgacggcgugaagcuggagagcaccagaaucuaccagauccuggccaucuacagcaccguggccagcagccuggugcugguggugagccugggcgccaucagcuucuggaugugcagcaacggcagccugcagugcagaaucugcaucuga

SEQ ID NO: 164084 - RNA, 1701 nt, Artificial Sequence; identical to SEQ ID NO: 163082
  derived and/or modified CDS sequence (opt4) from hemagglutinin__InfluenzaA__ADB89150

SEQ ID NO: 164085 - RNA, 1701 nt, Artificial Sequence
  derived and/or modified CDS sequence (opt4) from hemagglutinin__InfluenzaA__ADB89221
augaaggccauccugguggugcugcuguacaccuucgccaccgccaacgccgacacccugugcaucggcuaccacgccaacaacagcaccgacaccguggacaccgugcuggagaagaacgugaccgugacccacagcgugaaccugcuggaggacaagcacaacggcaagcugugcaagcugagaggcguggccccccugcaccugggcaagugcaacaucgccggcuggauccugggcaaccccgagugcgagagccugagcaccgccagcagcuggagcuacaucguggagaccagcagcagcgacaacggcaccugcuaccccggcgacuucaucgacuacgaggagcugagagagcagcugagcagcgugagcagcuucgagagauucgagaucuuccccaagaccagcagcuggcccaaccacgacagcaacaagggcgugaccgccgccugcccccacgccggcgccaagagcuucuacaagaaccugaucuggcuggugaagaagggcaacagcuaccccaagcugagcaagagcuacaucaacgacaagggcaaggaggugcuggugcuguggggcauccaccaccccagcaccagcgccgaccagcagaaccuguaccagaacgccgacgccuacguguucgugggcagcagcagauacagcaagaaguucaagcccgagaucgccaucagacccaaggugagagaccaggagggcagaaugaacuacuacuggacccugguggagcccggcgacaagaucaccuucgaggccaccggcaaccugguggugcccagauacgccuucgccauggagagaaacgccggcagcggcaucaucaucagcgacacccccgugcacgacugcaacaccaccugccagacccccaagggcgccaucaacaccagccugcccuuccagaacauccaccccaucaccaucggcaagugccccaaguacgugaagagcaccaagcugagacuggccaccggccugagaaacgugcccagcauccagagcagaggccuguucggcgccaucgccggcuucaucgagggcggcuggaccggcaugguggacggcugguacggcuaccaccaccagaacgagcagggcagcggcuacgccgccgaccugaagagcacccagaacgccaucgacgagaucaccaacaaggugaacagcgugaucgagaagaugaacacccaguucaccgccgugggcaaggaguucaaccaccuggagaagagaaucgagaaccugaacaagaagguggacgacggcuuccuggacaucuggaccuacaacgccgagcugcuggugcugcuggagaacgagagaacccuggacuaccacgacagcaacgugaagaaccuguacgagaaggugagaagccagcugaagaacaacgccaaggagaucggcaacggcugcuucgaguucuaccacaagugcgacaacaccugcauggagagcgugaagaacggcaccuacgacuaccccaaguacagcgaggaggccaagcugaacagagaggagaucgacggcgugaagcuggagagcaccagaaucuaccagauccuggccaucuacagcaccguggccagcagccuggugcugguggugagccugggcgccaucagcuucuggaugugcagcaacggcagccugcagugcagaaucugcaucuga

SEQ ID NO: 164086 - RNA, 1701 nt, Artificial Sequence; identical to SEQ ID NO: 162782
  derived and/or modified CDS sequence (opt4) from hemagglutinin__InfluenzaA__ADB89241

SEQ ID NO: 164087 - RNA, 1701 nt, Artificial Sequence; identical to SEQ ID NO: 162729
  derived and/or modified CDS sequence (opt4) from hemagglutinin__InfluenzaA__ADB89251

SEQ ID NO: 164088 - RNA, 1701 nt, Artificial Sequence; identical to SEQ ID NO: 163176
  derived and/or modified CDS sequence (opt4) from hemagglutinin__InfluenzaA__ADB89261

SEQ ID NO: 164089 - RNA, 1701 nt, Artificial Sequence
  derived and/or modified CDS sequence (opt4) from hemagglutinin__InfluenzaA__ADB89271
augaaggccauccugguggugcugcuguacaccuucgccaccgccaacgccgacacccugugcaucggcuaccacgccaacaacagcaccgacaccguggacaccgugcuggagaagaacgugaccgugacccacagcgugaaccugcuggaggacaagcacaacggcaagcugugcaagcugagaggcguggccccccugcaccugggcaagugcaacaucgccggcuggauccugggcaaccccgagugcgagagccugagcaccgccagcagcuggagcuacaucguggagaccagcagcagcgacaacggcaccugcuaccccggcgacuucaucgacuacgaggagcugagagagcagcugagcagcgugagcagcuucgagagauucgagaucuuccccaagaccagcagcuggcccaaccacgacagcaacaagggcgugaccgccgccugcccccacgccggcgccaagagcuucuacaagaaccugaucuggcuggugaagaagggcaacagcuaccccaagcugagcaagagcuacaucaacgacaagggcaaggaggugcuggugcuguggggcauccaccaccccagcaccagcgccgaccagcagagccuguaccagaacgccgacgccuacguguucgugggcagcagcagauacagcaagaaguucaagcccgagaucgccaucagacccaaggugagagaccaggagggcagaaugaacuacuacuggacccugguggagcccggcgacaagaucaccuucgaggccaccggcaaccugguggugcccagauacgccuucgccauggagagaaacgccggcagcggcaucaucaucagcgacacccccgugcacgacugcaacaccaccugccagacccccaagggcgccaucaacaccagccugcccuuccagaacauccaccccaucaccaucggcaagugccccaaguacgugaagagcaccaagcugagacuggccaccggccugagaaacgugcccagcauccagagcagaggccuguucggcgccaucgccggcuucaucgagggcggcuggaccggcaugguggacggcugguacggcuaccaccaccagaacgagcagggcagcggcuacgccgccgaccugaagagcacccagaacgccaucgacgagaucaccaacaaggugaacagcgugaucgagaagaugaacacccaguucaccgccgugggcaaggaguucaaccaccuggagaagagaaucgagaaccugaacaagaagguggacgacggcuuccuggacaucuggaccuacaacgccgagcugcuggugcugcuggagaacgagagaacccuggacuaccacgacagcaacgugaagaaccuguacgagaaggugagaagccagcugaagaacaacgccaaggagaucggcaacggcugcuucgaguucuaccacaagugcgacaacaccugcaugggcagcgugaagaacggcaccuacgacuaccccaaguacagcgaggaggccaagcugaacagagaggagaucgacggcgugaagcuggagagcaccagaaucuaccagauccuggccaucuacagcaccguggccagcagccuggugcugguggugagccugggcgccaucagcuucuggaugugcagcaacggcagccugcagugcagaaucugcaucuga

SEQ ID NO: 164090 - RNA, 1701 nt, Artificial Sequence
  derived and/or modified CDS sequence (opt4) from hemagglutinin__InfluenzaA__ADB89281
augaaggccauccugguggugcugcuguacaccuucgccaccgccaacgccgacacccugugcaucggcuaccacgccaacaacagcaccgacaccguggacaccgugcuggagaagaacgugaccgugacccacagcgugaaccugcuggaggacaagcacaacggcaagcugugcaagcugagaggcguggccccccugcaccugggcaagugcaacaucgccggcuggauccugggcaaccccgagugcgagagccugagcaccgccagcagcuggagcuacaucguggagaccagcagcagcgacaacggcaccugcuaccccggcgacuucaucgacuacgaggagcugagagagcagcugagcagcgugagcagcuucgagagauucgagaucuuccccaagaccagcagcuggcccaaccacgacagcaacaagggcgugaccgccgccugcccccacgccggcgccaagagcuucuacaagaaccugaucuggcuggugaagaagggcaacagcuaccccaagcugagcaagagcuacaucaacgacaagggcaaggaggugcuggugcuguggggcauccaccacccccccaccagcgccgaccagcagagccuguaccagaacgccgacgccuacguguucgugggcaccagcagauacagcaagaaguucaagcccgagaucgccaucagacccaaggugagaggccaggagggcagaaugaacuacuacuggacccugguggagcccggcgacaagaucaccuucgaggccaccggcaaccugguggugcccagauacgccuucgccauggagagaaacgccggcagcggcaucaucaucagcgacacccccgugcacgacugcaacaccaccugccagacccccaagggcgccaucaacaccagccugcccuuccagaacauccaccccaucaccaucggcaagugccccaaguacgugaagagcaccaagcugagacuggccaccggccugagaaacgugcccagcauccagagcagaggccuguucggcgccaucgccggcuucaucgagggcggcuggaccggcaugguggacggcugguacggcuaccaccaccagaacgagcagggcagcggcuacgccgccgaccugaagagcacccagaacgccaucgacgagaucaccaacaaggugaacagcgugaucgagaagaugaacacccaguucaccgccgugggcaaggaguucaaccaccuggagaagagaaucgagaaccugaacaagaagguggacgacggcuuccuggacaucuggaccuacaacgccgagcugcuggugcugcuggagaacgagagaacccuggacuaccacgacagcaacgugaagaaccuguacgagaaggugagaagccagcugaagaacaacgccaaggagaucggcaacggcugcuucgaguucuaccacaagugcgacaacaccugcauggagagcgugaagaacggcaccuacgacuaccccaaguacagcgaggaggccaagcugaacagagaggagaucgacggcgugaagcuggagagcaccagaaucuaccagauccuggccaucuacagcaccguggccagcagccuggugcugguggugagccugggcgccaucagcuucuggaugugcagcaacggcagccugcagugcagaaucugcaucuga

SEQ ID NO: 164091 - RNA, 1701 nt, Artificial Sequence; identical to SEQ ID NO: 162729
  derived and/or modified CDS sequence (opt4) from hemagglutinin__InfluenzaA__ADB89291

SEQ ID NO: 164092 - RNA, 1701 nt, Artificial Sequence; identical to SEQ ID NO: 162729
  derived and/or modified CDS sequence (opt4) from hemagglutinin__InfluenzaA__ADB89301

SEQ ID NO: 164093 - RNA, 1701 nt, Artificial Sequence; identical to SEQ ID NO: 162729
  derived and/or modified CDS sequence (opt4) from hemagglutinin__InfluenzaA__ADB89311

SEQ ID NO: 164094 - RNA, 1701 nt, Artificial Sequence
  derived and/or modified CDS sequence (opt4) from hemagglutinin__InfluenzaA__ADB89321
augaaggccauccugguggugcugcuguacaccuucgccaccgccaacgccgacacccugugcaucggcuaccacgccaacaacagcaccgacaccguggacaccgugcuggagaagaacgugaccgugacccacagcgugaaccugcuggaggacaagcacaacggcaagcugugcaagcugagaggcguggccccccugcaccugggcaagugcaacaucgccggcuggauccugggcaaccccgagugcgagagccugagcaccgccagcagcuggagcuacaucguggagaccagcagcagcgacaacggcaccugcuaccccggcgacuucaucgacuacgaggagcugagagagcagcugagcagcgugagcagcuucgagagauucgagaucuuccccaagaccagcagcuggcccaaccacgacagcaacaagggcgugaccgccgccugcccccacgccggcgccaagagcuucuacaagaaccugaucuggcuggugaagaagggcaacagcuaccccaagcugagcgagagcuacaucaacgacaagggcaaggaggugcuggugcuguggggcauccaccaccccagcaccagcgccgaccagcagagccuguaccagaacgccgacgccuacguguucgugggcaccagcaaguacagcaagaaguucaagcccgagaucgccaucagacccaaggugagagaccaggagggcagaaugaacuacuacuggacccugguggagcccggcgacaagaucaccuucgaggccaccggcaaccugguggugcccagauacgccuucgccauggagagaaacgccggcagcggcaucaucaucagcgacacccccgugcacgacugcaacaccaccugccagacccccaagggcgccaucaacaccagccugcccuuccagaacauccaccccaucaccaucggcaagugccccaaguacgugaagagcaccaagcugagacuggccaccggccugagaaacgugcccagcauccagagcagaggccuguucggcgccaucgccggcuucaucgagggcggcuggaccggcaugguggacggcugguacggcuaccaccaccagaacgagcagggcagcggcuacgccgccgaccugaagagcacccagaacgccaucgacgagaucaccaacaaggugaacagcgugaucgagaagaugaacacccaguucaccgccgugggcaaggaguucaaccaccuggagaagagaaucgagaaccugaacaagaagguggacgacggcuuccuggacaucuggaccuacaacgccgagcugcuggugcugcuggagaacgagagaacccuggacuaccacgacagcaacgugaagaaccuguacgagaaggugagaagccagcugaagaacaacgccaaggagaucggcaacggcugcuucgaguucuaccacaagugcgacaacaccugcauggagagcgugaagaacggcaccuacgacuaccccaaguacagcgaggaggccaagcugaacagagaggagaucgacggcgugaagcuggagagcaccagaaucuaccagauccuggccaucuacagcaccguggccagcagccuggugcugguggugagccugggcgccaucagcuucuggaugugcagcaacggcagccugcagugcagaaucugcaucuga

SEQ ID NO: 164095 - RNA, 1701 nt, Artificial Sequence
  derived and/or modified CDS sequence (opt4) from hemagglutinin__InfluenzaA__ADB89331
augaaggccauccugguggugcugcuguacaccuucgccaccgccaacgccgacacccugugcaucggcuaccacgccaacaacagcaccgacaccguggacaccgugcuggagaagaacgugaccgugacccacagcgugaaccugcuggaggacaagcacaacggcaagcugugcaagcugagaggcguggccccccugcaccugggcaagugcaacaucgccggcuggauccugggcaaccccgagugcgagagccugagcaccgccagcagcuggagcuacaucguggagaccagcagcagcgacaacggcaccugcuaccccggcgacuucaucgacuacgaggagcugagagagcagcugagcagcgugagcagcuucgagagauucgagaucuuccccaagaccagcagcuggcccaaccacgacagcaacaagggcgugaccgccgccugcccccacgccggcgccaagagcuucuacaagaaccugaucuggcuggugaagaagggcaacagcuaccccaagcugagcaagagcuacaucaacgacaagggcaaggaggugcuggugcuguggggcauccaccaccccagcaccagcgccgaccagcagagccuguaccagaacgccgacgccuacguguucgugggcagcagcaaguacagcaagaaguucaagcccgagaucgccaucagacccaaggugagagaccaggagggcagaaugaacuacuacuggacccugguggagcccggcgacaagaucaccuucgaggccaccggcaaccugguggugcccagauacgccuucgccauggagagaaacgccggcagcggcaucaucaucagcgacacccccgugcacgacugcaacaccaccugccagacccccaagggcgccaucaacaccagccugcccuuccagaacauccaccccaucaccaucggcaagugccccaaguacgugaagagcaccaagcugagacuggccaccggccugagaaacgugcccagcauccagagcagaggccuguucggcgccaucgccggcuucaucgagggcggcuggaccggcaugguggacggcugguacggcuaccaccaccagaacgagcagggcagcggcuacgccgccgaccugaagagcacccagaacgccaucgacgagaucaccaacaaggugaacagcgugaucgagaagaugaacacccaguucaccgccgugggcaaggaguucaaccaccuggagaagagaaucgagaaccugaacaagaagguggacgacggcuuccuggacaucuggaccuacaacgccgagcugcuggugcugcuggagaacgagagaacccuggacuaccacgacagcaacgugaagaaccuguacgagaaggugagaagccagcugaagaacaacgccaaggagaucggcaacggcugcuucgaguucuaccacaagugcgacaacaccugcauggagagcgugaagaacggcaccuacgacuaccccaaguacagcgaggaggccaagcugaacagagaggagaucgacggcgugaagcuggagagcaccagaguguaccagauccuggccaucuacagcaccguggccagcagccuggugcugguggugagccugggcgccaucagcuucuggaugugcagcaacggcagccugcagugcagaaucugcaucuga

SEQ ID NO: 164096 - RNA, 1701 nt, Artificial Sequence; identical to SEQ ID NO: 162729
  derived and/or modified CDS sequence (opt4) from hemagglutinin__InfluenzaA__ADB89341

SEQ ID NO: 164097 - RNA, 1701 nt, Artificial Sequence; identical to SEQ ID NO: 162729
  derived and/or modified CDS sequence (opt4) from hemagglutinin__InfluenzaA__ADB89351

SEQ ID NO: 164098 - RNA, 1701 nt, Artificial Sequence; identical to SEQ ID NO: 162729
  derived and/or modified CDS sequence (opt4) from hemagglutinin__InfluenzaA__ADB89361

SEQ ID NO: 164099 - RNA, 1701 nt, Artificial Sequence; identical to SEQ ID NO: 162729
  derived and/or modified CDS sequence (opt4) from hemagglutinin__InfluenzaA__ADB89371

SEQ ID NO: 164100 - RNA, 1701 nt, Artificial Sequence; identical to SEQ ID NO: 163474
  derived and/or modified CDS sequence (opt4) from hemagglutinin__InfluenzaA__ADB89381

SEQ ID NO: 164101 - RNA, 1701 nt, Artificial Sequence
  derived and/or modified CDS sequence (opt4) from hemagglutinin__InfluenzaA__ADB89391
augaaggccauccugguggugcugcuguacaccuucgccaccgccaacgccgacacccugugcaucggcuaccacgccaacaacagcaccgacaccguggacaccgugcuggagaagaacgugaccgugacccacagcgugaaccugcuggaggacaagcacaacggcaagcugugcaagcugagaggcguggccccccugcaccugggcaagugcaacaucgccggcuggauccugggcaaccccgagugcgagagccugagcaccgccagcagcuggagcuacaucguggagaccagcagcagcgacaacggcaccugcuaccccggcgacuucaucgacuacgaggagcugagagagcagcugagcagcgugagcagcuucgagagauucgagaucuuccccaagaccagcagcuggcccaaccacgacagcaacaagggcgugaccgccgccugccugcacgccggcgccaagagcuucuacaagaaccugaucuggcuggugaagaagggcaacagcuaccccaagcugagcaagagcuacaucaacgacaagggcaaggaggugcuggugcuguggggcauccaccaccccagcaccagcgccgaccagcagagccuguaccagaacgccgacgccuacguguucgugggcaccagcagauacagcaagaaguucaagcccgagaucgccaucagacccaaggugagagaccaggagggcagaaugaacuacuacuggacccugguggagcccggcgacaagaucaccuucgaggccaccggcaaccugguggugcccagauacgccuucgccauggagagaaacgccggcagcggcaucaucaucagcgacacccccgugcacgacugcaacaccaccugccagacccccaagggcgccaucaacaccagccugcccuuccagaacauccaccccaucaccaucggcaagugccccaaguacgugaagagcaccaagcugagacuggccaccggccugagaaacgugcccagcauccagagcagaggccuguucggcgccaucgccggcuucaucgagggcggcuggaccggcaugaucgacggcugguacggcuaccaccaccagaacgagcagggcagcggcuacgccgccgaccugaagagcacccagaacgccaucgacgagaucaccaacaaggugaacagcgugaucgagaagaugaacacccaguucaccgccgugggcaaggaguucaaccaccuggagaagagaaucgagaaccugaacaagaagguggacgacggcuuccuggacaucuggaccuacaacgccgagcugcuggugcugcuggagaacgagagaacccuggacuaccacgacagcaacgugaagaaccuguacgagaaggugagaagccagcugaagaacaacgccaaggagaucggcaacggcugcuucgaguucuaccacaagugcgacaacaccugcauggagagcgugaagaacggcaccuacgacuaccccaaguacagcgaggaggccaagcugaacagagaggagaucgacggcgugaagcuggagagcaccagaaucuaccagauccuggccaucuacagcaccguggccagcagccuggugcugguggugagccugggcgccaucagcuucuggaugugcagcaacggcagccugcagugcagaaucugcaucuga

SEQ ID NO: 164102 - RNA, 1701 nt, Artificial Sequence; identical to SEQ ID NO: 162716
  derived and/or modified CDS sequence (opt4) from hemagglutinin__InfluenzaA__ADB89401

SEQ ID NO: 164103 - RNA, 1701 nt, Artificial Sequence; identical to SEQ ID NO: 162729
  derived and/or modified CDS sequence (opt4) from hemagglutinin__InfluenzaA__ADB89411

SEQ ID NO: 164104 - RNA, 1701 nt, Artificial Sequence; identical to SEQ ID NO: 163176
  derived and/or modified CDS sequence (opt4) from hemagglutinin__InfluenzaA__ADB89431

SEQ ID NO: 164105 - RNA, 1701 nt, Artificial Sequence; identical to SEQ ID NO: 163082
  derived and/or modified CDS sequence (opt4) from hemagglutinin__InfluenzaA__ADB89441

SEQ ID NO: 164106 - RNA, 1701 nt, Artificial Sequence; identical to SEQ ID NO: 162729
  derived and/or modified CDS sequence (opt4) from hemagglutinin__InfluenzaA__ADB89461

SEQ ID NO: 164107 - RNA, 1701 nt, Artificial Sequence; identical to SEQ ID NO: 163176
  derived and/or modified CDS sequence (opt4) from hemagglutinin__InfluenzaA__ADB89481

SEQ ID NO: 164108 - RNA, 1701 nt, Artificial Sequence; identical to SEQ ID NO: 163176
  derived and/or modified CDS sequence (opt4) from hemagglutinin__InfluenzaA__ADB89491

SEQ ID NO: 164109 - RNA, 1701 nt, Artificial Sequence
  derived and/or modified CDS sequence (opt4) from hemagglutinin__InfluenzaA__ADB89501
augaaggccauccugguggugcugcuguacaccuucgccaccgccaacgccgacacccugugcaucggcuaccacgccaacaacagcaccgacaccguggacaccgugcuggagaagaacgugaccgugacccacagcgugaaccugcuggaggacaagcacaacggcaagcugugcaagcugagaggcguggccccccugcaccugggcaagugcaacaucgccggcuggauccugggcaaccccgagugcgagagccugagcaccgccagcagcuggagcuacaucguggagaccagcagcagcgacaacggcaccugcuaccccggcgacuucaucgacuacgaggagcugagagagcagcugagcagcgugagcagcuucgagagauucgagaucuuccccaagaccagcagcuggcccaaccacgacagcaacaagggcgugaccgccgccugcccccacgccggcgccaagagcuucuacaagaaccugaucuggcuggugaagaagggcaacagcuaccccaagcugagcaagagcuacaucaacgacaagggcaaggaggugcuggugcuguggggcauccaccaccccagcaccagcgccgaccagcagagccuguaccagaacgccgacgccuacguguucgugggcagcagcagauacagcaagaaguucaagcccgagaucgccaucagacccaaggugagagaccaggagggcagaaugaacuacuacuggacccugguggagcccggcgacaagaucaccuucgaggccaccggcaaccugguggugcccagauacgccuucgccauggagagaaacgccggcagcggcaucaucaucagcgacacccccgugcacgacugcaacaccaccugccagacccccaagggcgccaucaacaccagccugcccuuccagaacauccaccccaucaccaucggcaagugccccaaguacgugaagagcaccaagcugagacuggccaccggccugagaaacgugcccagcauccagagcagaggccuguucggcgccaucgccggcuucaucgagggcggcuggaccggccugguggacggcugguacggcuaccaccaccagaacgagcagggcagcggcuacgccgccgaccugaagagcacccagaacgccaucgacgagaucaccaacaaggugaacagcgugaucgagaagaugaacacccaguucaccgccgugggcaaggaguucaaccaccuggagaagagaaucgagaaccugaacaagaagguggacgacggcuuccuggacaucuggaccuacaacgccgagcugcuggugcugcuggagaacgagagaacccuggacuaccacgacagcaacgugaagaaccuguacgagaaggugagaagccagcugaagaacaacgccaaggagaucggcaacggcugcuucgaguucuaccacaagugcgacaacaccugcauggagagcgugaagaacggcaccuacgacuaccccaaguacagcgaggaggccaagcugaacagagaggagaucgacggcgugaagcuggagagcaccagaaucuaccagauccuggccaucuacagcaccguggccagcagccuggugcugguggugagccugggcgccaucagcuucuggaugugcagcaacggcagccugcagugcagaaucugcaucuga

SEQ ID NO: 164110 - RNA, 1701 nt, Artificial Sequence; identical to SEQ ID NO: 162729
  derived and/or modified CDS sequence (opt4) from hemagglutinin__InfluenzaA__ADB89511

SEQ ID NO: 164111 - RNA, 1701 nt, Artificial Sequence; identical to SEQ ID NO: 163176
  derived and/or modified CDS sequence (opt4) from hemagglutinin__InfluenzaA__ADB89531

SEQ ID NO: 164112 - RNA, 1701 nt, Artificial Sequence; identical to SEQ ID NO: 163176
  derived and/or modified CDS sequence (opt4) from hemagglutinin__InfluenzaA__ADB89541

SEQ ID NO: 164113 - RNA, 1701 nt, Artificial Sequence; identical to SEQ ID NO: 163889
  derived and/or modified CDS sequence (opt4) from hemagglutinin__InfluenzaA__ADB89551

SEQ ID NO: 164114 - RNA, 1701 nt, Artificial Sequence; identical to SEQ ID NO: 162729
  derived and/or modified CDS sequence (opt4) from hemagglutinin__InfluenzaA__ADB89561

SEQ ID NO: 164115 - RNA, 1701 nt, Artificial Sequence; identical to SEQ ID NO: 162729
  derived and/or modified CDS sequence (opt4) from hemagglutinin__InfluenzaA__ADB89571

SEQ ID NO: 164116 - RNA, 1701 nt, Artificial Sequence; identical to SEQ ID NO: 162729
  derived and/or modified CDS sequence (opt4) from hemagglutinin__InfluenzaA__ADB89581

SEQ ID NO: 164117 - RNA, 1701 nt, Artificial Sequence
  derived and/or modified CDS sequence (opt4) from hemagglutinin__InfluenzaA__ADB89591
augaaggccauccugguggugcugcuguacaccuucgccaccgccaacgccgacacccugugcaucggcuaccacgccaacaacagcaccgacaccguggacaccgugcuggagaagaacgugaccgugacccacagcgugaaccugcuggaggacaagcacaacggcaagcugugcaagcugagaggcguggccccccugcaccugggcaagugcaacaucgccggcuggauccugggcaaccccgagugcgagagccugagcaccgccagcagcuggagcuacaucguggagaccagcagcagcgacaacggcaccugcuaccccggcgacuucaucgacuacgaggagcugagagagcagcugagcagcgugagcagcuucgagagauucgagaucuuccccaagaccagcagcuggcccaaccacgacagcaacaagggcgugaccgccgccugcccccacgccggcgccaagagcuucuacaagaaccugaucuggcuggugaagaagggcaacagcuaccccaagcugagcaagagcuacaucaacgacaagggcaaggaggugcuggugcuguggggcauccaccaccccagcaccagcgccgaccagcagagccuguaccagaacgccgacgccuacguguucgugggcaccagcagauacagcaagaaguucaagcccgagaucgccaucagacccaaggugagagagcaggagggcagaaugaacuacuacugggcccugguggagcccggcgacaagaucaccuucgaggccaccggcaaccugguggugcccagauacgccuucgccauggagagaaacgccggcagcggcaucaucaucagcgacacccccgugcacgacugcaacaccaccugccagacccccaagggcgccaucaacaccagccugcccuuccagaacauccacagcaucaccaucggcaagugccccaaguacgugaagagcaccaagcugagacuggccaccggccugagaaacgugcccagcauccagagcagaggccuguucggcgccaucgccggcuucaucgagggcggcuggaccggcaugguggacggcugguacggcuaccaccaccagaacgagcagggcagcggcuacgccgccgaccugaagagcacccagaacgccaucgacgagaucaccaacaaggugaacagcgugaucgagaagaugaacacccaguucaccgccgugggcaaggaguucaaccaccuggagaagagaaucgagaaccugaacaagaagguggacgacggcuuccuggacaucuggaccuacaacgccgagcugcuggugcugcuggagaacgagagaacccuggacuaccacgacagcaacgugaagaaccuguacgagaaggugagaagccagcugaagaacaacgccaaggagaucggcaacggcugcuucgaguucuaccacaagugcgacaacaccugcauggagagcgugaagaacggcaccuacgacuaccccaaguacagcgaggaggccaagcugaacagagaggagaucgacggcgugaagcuggagagcaccagaaucuaccagauccuggccaucuacagcaccguggccagcagccuggugcugguggugagccugggcgccaucagcuucuggaugugcagcaacggcagccugcagugcagaaucugcaucuga

SEQ ID NO: 164118 - RNA, 1701 nt, Artificial Sequence
  derived and/or modified CDS sequence (opt4) from hemagglutinin__InfluenzaA__ADB89601
augaaggccaucaucguggugcugcuguacaccuucgccaccgccaacgccgacacccugugcaucggcuaccacgccaacaacagcaccgacaccguggacaccgugcuggagaagaacgugaccgugacccacagcgugaaccugcuggaggacaagcacaacggcaagcugugcaagcugagaggcguggccccccugcaccugggcaagugcaacaucgccggcuggauccugggcaaccccgagugcgagagccugagcaccgccagcagcuggagcuacaucguggagaccagcagcagcgacaacggcaccugcuaccccggcgacuucaucgacuacgaggagcugagagagcagcugagcagcgugagcagcuucgagagauucgagaucuuccccaagaccagcagcuggcccaaccacgacagcaacaagggcgugaccgccgccugcccccacgccggcgccaagagcuucuacaagaaccugaucuggcuggugaagaagggcaacagcuaccccaagcugagcaagagcuacaucaacgacaagggcaaggaggugcuggugcuguggggcauccaccaccccagcaccagcgccgaccagcagagccuguaccagaacgccgacgccuacguguucgugggcaccagcagauacagcaagaaguucaagcccgagaucgccaucagacccaaggugagagaccaggagggcagaaugaacuacuacuggacccugguggagcccggcgacaagaucaccuucgaggccaccggcaaccugguggugcccagauacgccuucgccauggagagaaacgccggcagcggcaucaucaucagcgacacccccgugcacgacugcaacaccaccugccagacccccaagggcgccaucaacaccagccugcccuuccagaacauccaccccaucaccaucggcaagugccccaaguacgugaagagcaccaagcugagacuggccaccggccugagaaacgugcccagcauccagagcagaggccuguucggcgccaucgccggcuucaucgagggcggcuggaccggcaugguggacggcugguacggcuaccaccaccagaacgagcagggcagcggcuacgccgccgaccugaagagcacccagaacgccaucgacaagaucaccaacaaggugaacagcgugaucgagaagaugaacacccaguucaccgccgugggcaaggaguucaaccaccuggagaagagaaucgagaaccugaacaagaagguggacgacggcuuccuggacaucuggaccuacaacgccgagcugcuggugcugcuggagaacgagagaacccuggacuaccacgacagcaacgugaagaaccuguacgagaaggugagaagccagcugaagaacaacgccaaggagaucggcaacggcugcuucgaguucuaccacaagugcgacaacaccugcauggagagcgugaagaacggcaccuacgacuaccccaaguacagcgaggaggccaagcugaacagagaggagaucgacggcgugaagcuggagagcaccagaaucuaccagauccugaccaucuacagcaccguggccagcagccuggugcugguggugagccugggcgccaucagcuucuggaugugcagcaacggcagccugcagugcagaaucugcaucuga

SEQ ID NO: 164119 - RNA, 1701 nt, Artificial Sequence; identical to SEQ ID NO: 163893
  derived and/or modified CDS sequence (opt4) from hemagglutinin__InfluenzaA__ADB89611

SEQ ID NO: 164120 - RNA, 1701 nt, Artificial Sequence; identical to SEQ ID NO: 163893
  derived and/or modified CDS sequence (opt4) from hemagglutinin__InfluenzaA__ADB89621

SEQ ID NO: 164121 - RNA, 1701 nt, Artificial Sequence
  derived and/or modified CDS sequence (opt4) from hemagglutinin__InfluenzaA__ADB89631
augaaggccauccugaucgugcugcuguacaccuucgccaccgccaacgccgacacccugugcaucggcuaccacgccaacaacagcaccgacaccguggacaccgugcuggagaagaacgugaccgugacccacagcgugaaccugcuggaggacaagcacaacggcaagcugugcaagcugagaggcguggccccccugcaccugggcaagugcaacaucgccggcuggauccugggcaaccccgagugcgagagccugagcaccgccagcagcuggagcuacaucguggagaccagcagcagcgacaacggcaccugcuaccccggcgacuucaucgacuacgaggagcugagagagcagcugagcagcgugagcagcuucgagagauucgagaucuuccccaagaccagcagcuggcccaaccacgacagcaacaagggcgugaccgccgccugcccccacgccggcgccaagagcuucuacaagaaccugaucuggcuggugaagaagggcaacagcuaccccaagcugagcaagagcuacaucaacgacaagggcaaggaggugcuggugcuguggggcauccaccaccccagcaccagcgccgaccagcagagccuguaccagaacgccgacgccuacguguucgugggcaccagcagauacagcaagaaguucaagcccgagaucgccaucagacccaaggugagagaccaggagggcagaaugaacuacuacuggacccugguggagcccggcgacaagaucaccuucgaggccaccggcaaccugguggugcccagauacgccuucgccauggagagaaacgccggcagcggcaucaucaucagcgacacccccgugcacgacugcaacaccaccugccagacccccaagggcgccaucaacaccagccugcccuuccagaacauccaccccaucaccaucggcaagugccccaaguacgugaagagcaccaagcugagacuggccaccggccugagaaacauccccagcauccagagcagaggccuguucggcgccaucgccggcuucaucgagggcggcuggaccggcaugguggacggcugguacggcuaccaccaccagaacgagcagggcagcggcuacgccgccgaccugaagagcacccagaacgccaucgacgagaucaccaacaaggugaacagcgugaucgagaagaugaacacccaguucaccgccgugggcaaggaguucaaccaccuggagaagagaaucgagaaccugaacaagaagguggacgacggcuuccuggacaucuggaccuacaacgccgagcugcuggugcugcuggagaacgagagaacccuggacuaccacgacagcaacgugaagaaccuguacgagaaggugagaagccagcugaagaacaacgccaaggagaucggcaacggcugcuucgaguucuaccacaagugcgacaacaccugcauggagagcgugaagaacggcaccuacgacuaccccaaguacagcgaggaggccaagcugaacagagaggagaucgacggcgugaagcuggagagcaccagaaucuaccagauccuggccaucuacagcaccguggccagcagccuggugcugguggugagccugggcgccaucagcuucuggaugugcagcaacggcagccugcagugcagaaucugcaucuga

SEQ ID NO: 164122 - RNA, 1701 nt, Artificial Sequence; identical to SEQ ID NO: 163893
  derived and/or modified CDS sequence (opt4) from hemagglutinin__InfluenzaA__ADB89641

SEQ ID NO: 164123 - RNA, 1701 nt, Artificial Sequence; identical to SEQ ID NO: 162729
  derived and/or modified CDS sequence (opt4) from hemagglutinin__InfluenzaA__ADB89651

SEQ ID NO: 164124 - RNA, 1701 nt, Artificial Sequence; identical to SEQ ID NO: 162729
  derived and/or modified CDS sequence (opt4) from hemagglutinin__InfluenzaA__ADB89661

SEQ ID NO: 164125 - RNA, 1701 nt, Artificial Sequence; identical to SEQ ID NO: 163893
  derived and/or modified CDS sequence (opt4) from hemagglutinin__InfluenzaA__ADB89671

SEQ ID NO: 164126 - RNA, 1701 nt, Artificial Sequence; identical to SEQ ID NO: 162729
  derived and/or modified CDS sequence (opt4) from hemagglutinin__InfluenzaA__ADB89681

SEQ ID NO: 164127 - RNA, 1701 nt, Artificial Sequence; identical to SEQ ID NO: 162729
  derived and/or modified CDS sequence (opt4) from hemagglutinin__InfluenzaA__ADB89691

SEQ ID NO: 164128 - RNA, 1701 nt, Artificial Sequence; identical to SEQ ID NO: 163831
  derived and/or modified CDS sequence (opt4) from hemagglutinin__InfluenzaA__ADB89701

SEQ ID NO: 164129 - RNA, 1701 nt, Artificial Sequence
  derived and/or modified CDS sequence (opt4) from hemagglutinin__InfluenzaA__ADB89711
augaaggccauccugguggugcugcuguacaccuucgccaccgccaacgccgacacccugugcaucggcuaccacgccaacaacagcaccgacaccguggacaccgugcuggagaagaacgugaccgugacccacagcgugaaccugcuggaggacaagcacaacggcaagcugugcaagcugagaggcguggccccccugcaccugggcaagugcaacaucgccggcuggauccugggcaaccccgagugcgagagccugagcaccgccagcagcuggagcuacaucguggagaccagcagcagcggcaacggcaccugcuaccccggcgacuucaucgacuacgaggagcugagagagcagcugagcagcgugagcagcuucgagagauucgagaucuuccccaagaccagcagcuggcccaaccacgacagcaacaagggcgugaccgccgccugcccccacgccggcgccaagagcuucuacaagaaccugaucuggcuggugaagaagggcaacagcuaccccaagcugagcaagagcuacaucaacgacaagggcaaggaggugcuggugcuguggggcauccaccaccccagcaccagcgccgaccagcagagccuguaccagaacgccgacgccuacguguucgugggcaccagcagauacagcaagaaguucaagcccgagaucgccaucagacccaaggugagagaccaggagggcagaaugaacuaccacuggacccugguggagcccggcgacaagaucaccuucgaggccaccggcaaccugguggugcccagauacgccuucgccauggagagaaacgccggcagcggcaucaucaucagcgacacccccgugcacgacugcaacaccaccugccagacccccaagggcgccaucaacaccagccugcccuuccagaacauccaccccaucaccaucggcaagugccccaaguacgugaagagcaccaagcugagacuggccaccggccugagaaacgugcccagcauccagagcagaggccuguucggcgccaucgccggcuucaucgagggcggcuggaccggcaugguggacggcugguacggcuaccaccaccagaacgagcagggcagcggcuacgccgccgaccugaagagcacccagaacgccaucgacgagaucaccaacaaggugaacagcgugaucgagaagaugaacacccaguucaccgccgugggcaaggaguucaaccaccuggagaagagaaucgagaaccugaacaagaagguggacgacggcuuccuggacaucuggaccuacaacgccgagcugcuggugcugcuggagaacgagagaacccuggacuaccacgacagcaacgugaagaaccuguacgagaaggugagaagccagcugaagaacaacgccaaggagaucggcaacggcugcuucgaguucuaccacaagugcgacaacaccugcauggagagcgugaagaacggcaccuacgacuaccccaaguacagcgaggaggccaagcugaacagagaggagaucgacggcgugaagcuggagagcaccagaaucuaccagauccuggccaucuacagcaccguggccagcagccuggugcugguggugagccugggcgccaucagcuucuggaugugcagcaacggcagccugcagugcagaaucugcaucuga

SEQ ID NO: 164130 - RNA, 1701 nt, Artificial Sequence
  derived and/or modified CDS sequence (opt4) from hemagglutinin__InfluenzaA__ADB89721
augaagaccaucaucgcccugagcuacauccugugccugguguucgcccagaagcugcccggcaacgacaacagcaccgccacccugugccugggccaccacgccgugcccaacggcaccaucgugaagaccaucaccaacgaccagaucgaggugaccaacgccaccgagcuggugcagagcagcagcaccggcgagaucugcgacagcccccaccagauccuggacggcaagaacugcacccugaucgacgcccugcugggcgacccccagugcgacggcuuccagaacaagaagugggaccuguucguggagagaagcaaggccuacagcaacugcuaccccuacgacgugcccgacuacgccagccugagaagccugguggccagcagcggcacccuggaguucgacaacgagagcuucaacuggaccggcgugacccagaacggcaccagcagcgccugcaucagaagaagcaagaacagcuucuucagcagacugaacuggcugacccaccugaacuucaaguaccccgcccugaacgugaccaugcccaacaacgagcaguucgacaagcuguaccuguggggcgugcaccaccccggcaccgacaaggaccagaucuuccuguacgcccaggccagcggcagaaucaccgugagcaccaagagaagccagcagaccgugauccccaacaucggcagcagacccagagugagaaacauccccagcagaaucagcaucuacuggaccaucgugaagcccggcgacauccugcugaucaacagcaccggcaaccugaucgcccccagaggcuacuucaagauccagagcggcaagagcagcaucaugagaagcgacgcccccaucggcaagugcaacagcgagugcaucacccccaacggcagcauccccaacgacaagcccuuccagaacgugaacagaaucaccuacggcgccugccccagauacgugaagcagaacacccugaagcuggccaccggcaugagaaacgugcccgagaagcagaccagaggcaucuucggcgccaucgccggcuucaucgagaacggcugggagggcaugguggacggcugguacggcuucagacaccagaacagcgagggcagaggccaggccgccgaccugaagagcacccaggccgccaucgaccagaucaacggcaagcugaacagacugaucggcaagaccaacgagaaguuccaccagaucgagaaggaguucagcgagguggagggcagaauccaggaccuggagaaguacguggaggacaccaagaucgaccuguggagcuacaacgccgagcugcugguggcccuggagaaccagcacaccaucgaccugaccgacagcgagaugaacaagcuguucgagaagaccaagaagcagcugagagagaacgccgaggacaugggcaacggcugcuucaagaucuaccacaagugcgacaacgccugcaucggcagcaucagaaacggcaccuacgaccacgacguguacagagacgaggcccugaacaacagauuccagaucaagggcguggagcugaagagcggcuacaaggacuggauccuguggaucagcuucgccaucagcugcuuccugcugugcguggcccugcugggcuucaucaugugggccugccagaagggcaacaucagaugcaacaucugcaucuga

SEQ ID NO: 164131 - RNA, 1701 nt, Artificial Sequence
  derived and/or modified CDS sequence (opt4) from hemagglutinin__InfluenzaA__ADB90360
augaaggccauccugguggugcugcuguacaccuucgccaccgccaacgccgacacccugugcaucggcuaccacgccaacaacagcaccgacaccguggacaccgugcuggagaagaacgugaccgugacccacagcgugaaccugcuggaggacaagcacaacggcaagcugugcaagcugagaggcguggccccccugcaccugggcaagugcaacaucgccggcuggauccugggcaaccccgagugcgagagccugagcaccgccagcagcuggagcuacaucguggagaccagcagcagcaacaacggcaccugcuaccccggcgacuucaucgacuacgaggagcugagagagcagcugagcagcgugagcagcuucgagagauucgagaucuuccccaagaccagcagcuggcccaaccacgaccccaacaagggcgugaccgccgccugcccccacgccggcgccaagagcuucuacaagaaccugaucuggcuggugaagaagggcaacagcuaccccaagcugagcaagagcuacaucaacgacaagggcaaggaggugcuggugcuguggggcauccaccaccccagcaccagcgccgaccagcagagccuguaccagaacgccgacgccuacguguucgugggcaccagcagauacagcaagaaguucaagcccgagaucgccaucagacccaaggugagaggccaggagggcagaaugaacuacuacuggacccugguggagcccggcgacaagaucaccuucgaggccaccggcaaccugguggugcccagauacgccuucgccauggagagaaacgccggcagcggcaucaucaucagcgacacccccgugcacgacugcaacaccaccugccagacccccaagggcgccaucaacaccagccugcccuuccagaacauccaccccaucaccaucggcaagugccccaaguacgugaagagcaccaagcugagacuggccaccggccugagaaacauccccagcauccagagcagaggccuguucggcgccaucgccggcuucaucgagggcggcuggaccggcaugguggacggcugguacggcuaccaccaccagaacgagcagggcagcggcuacgccgccgaccugaagagcacccagaacgccaucgacgagaucaccaacaaggugaacagcgugaucgagaagaugaacacccaguucaccgccgugggcaaggaguucaaccaccuggagaagagaaucgagaaccugaacaagaagguggacgacggcuuccuggacaucuggaccuacaacgccgagcugcuggugcugcuggagaacgagagaacccuggacuaccacgacagcaacgugaagaaccuguacgagaaggugagaagccagcugaagaacaacgccaaggagaucggcaacggcugcuucgaguucuaccacaagugcgacaacaccugcauggagagcgugaagaacggcaccuacgacuaccccaaguacagcgaggaggccaagcugaacagagaggagaucgacggcgugaagcuggagagcaccagaaucuaccagauccuggccaucuacagcaccguggccagcagccuggugcugguggugagccugggcgccaucagcuucuggaugugcagcaacggcagccugcagugcagaaucugcaucuga

SEQ ID NO: 164132 - RNA, 1701 nt, Artificial Sequence
  derived and/or modified CDS sequence (opt4) from hemagglutinin__InfluenzaA__ADB90370
augaaggccauccugguggugcugcuguacaccuucgccaccgccaacgccgacacccugugcaucggcuaccacgccaacaacagcaccgacaccguggacaccgugcuggagaagaacgugaccgugacccacagcgugaaccugcuggaggacaagcacaacggcaagcugugcaagcugagaggcguggccccccugcaccugggcaagugcaacaucgccggcuggauccugggcaaccccgagugcgagagccugagcaccgccagcagcuggagcuacaucguggagaccagcagcagcgacaacggcaccugcuaccccggcgacuucaucgacuacgaggagcugagagagcagcugagcagcgugagcagcuucgagagauucgagaucuuccccaagaccagcagcuggcccaaccacgaccccaacaagggcgugaccgccgccugcccccacgccggcgccaagagcuucuacaagaaccugaucuggcuggugaagaagggcaacagcuaccccaagcugagcaagagcuacaucaacgacaagggcaaggaggugcuggugcuguggggcauccaccaccccagcaccagcgccgaccagcagagccuguaccagaacgccgacgccuacguguucgugggcaccagcagauacagcaagaaguucaagcccgagaucgccaucagacccaaggugagaggccaggagggcagaaugaacuacuacuggacccugguggagcccggcgacaagaucaccuucgaggccaccggcaaccugguggugcccagauacgccuucgccauggagagaaacgccggcagcggcaucaucaucagcgacacccccgugcacgacugcaacaccaccugccagacccccaagggcgccaucaacaccagccugcccuuccagaacauccaccccaucaccaucggcaagugccccaaguacgugaagagcaccaagcugagacuggccaccggccugagaaacgugcccagcauccagagcagaggccuguucggcgccaucgccggcuucaucgagggcggcuggaccggcaugguggacggcugguacggcuaccaccaccagaacgagcagggcagcggcuacgccgccgaccugaagagcacccagaacgccaucgacgagaucaccaacaaggugaacagcgugaucgagaagaugaacacccaguucaccgccgugggcaaggaguucaaccaccuggagaagagaaucgagaaccugaacaagaagguggacgacggcuuccuggacaucuggaccuacaacgccgagcugcuggugcugcuggagaacgagagaacccuggacuaccacgacagcaacgugaagaaccuguacgagaaggugagaagccagcugaagaacaacgccaaggagaucggcaacggcugcuucgaguucuaccacaagugcgacaacaccugcauggagagcgugaagaacggcaccuacgacuaccccaaguacagcgaggaggccaagcugaacagagaggagaucgacggcgugaagcuggagagcaccagaaucuaccagauccuggccaucuacagcaccguggccagcagccuggugcugguggugagccugggcgccaucagcuucuggaugugcagcaacggcagccugcagugcagaaucugcaucuga

SEQ ID NO: 164133 - RNA, 1701 nt, Artificial Sequence; identical to SEQ ID NO: 163648
  derived and/or modified CDS sequence (opt4) from hemagglutinin__InfluenzaA__ADB90414

SEQ ID NO: 164134 - RNA, 1701 nt, Artificial Sequence; identical to SEQ ID NO: 163176
  derived and/or modified CDS sequence (opt4) from hemagglutinin__InfluenzaA__ADC32409

SEQ ID NO: 164135 - RNA, 1701 nt, Artificial Sequence
  derived and/or modified CDS sequence (opt4) from hemagglutinin__InfluenzaA__ADC32410
augaaggccauccugguggugcugcuguacaccuucgccaccgccaacgccgacacccugugcaucggcuaccacgccaacaacagcaccgacaccguggacaccgugcuggagaagaacgugaccgugacccacagcgugaaccugcuggaggacaagcacaacggcaagcugugcaagcugagaggcguggccccccugcaccugggcaagugcaacaucgccggcuggauccugggcaaccccgagugcgagagccugagcaccgccagcagcuggagcuacaucguggagaccagcagcagcgacaacggcaccugcuaccccggcgacuucaucgacuacgaggagcugagagagcagcugagcagcgugagcagcuucgagagauucgagaucuuccccaagaccagcagcuggcccaaccacgacagcaacaagggcgugaccgccgccugcccccacgccggcgccaagagcuucuacaagaaccugaucuggcuggugaagaagggcaacagcuaccccaagcugagcaagagcuacaucaacgacaagggcaaggaggugcuggugcuguggggcauccaccaccccagcaccagcgccgaccagcagagccuguaccagaacgccgacgccuacguguucgugggcaccagcagauacagcaagaaguucaagcccgagaucgccaucagacccaaggugagagaccaggagggcagaaugaacuacuacuggacccugguggagcccggcgacaagaucaccuucgaggccaccggcaaccugguggugcccagauacgccuucgccauggagagaaacgccggcagcggcaucaucaucagcgacacccccgugcacgacugcaacaccaccugccagacccccaagggcgccaucaacaccagccugcccuuccagaacauccaccccaucaccaucggcaagugccccaaguacgugaagagcaccaagcugagacuggccaccggccugagaaacgugcccagcauccagagcagaggccuguucggcgccaucgccggcuucaucgagggcggcuggaccggcaugguggacggcugguacggcuaccaccaccagaacgagcagggcagcggcuacgccgccgaccugaagagcacccagaacgccaucgacgagaucaccaacaaggugaacagcgugaucgagaagaugaacacccaguucaccgccgugggcaaggaguucaaccaccuggagaagagaaucgagaaccugaacaagaagguggacgacggcuuccuggacaucuggaccuacaacgccgagcugcuggugcugcuggagaacgagaagacccuggacuaccacgacagcaacgugaagaaccuguacgagaaggugagaagccagcugaagaacaacgccaaggagaucggcaacggcugcuucgaguucuaccacaagugcgacaacaccugcauggagagcgugaagaacggcaccuacgacuaccccaaguacagcgaggaggccaagcugaacagagaggagaucgacggcgugaagcuggagagcaccagaaucuaccagauccuggccaucuacagcaccguggccagcagccuggugcugguggugagccugggcgccaucagcuucuggaugugcagcaacggcagccugcagugcagaaucugcaucuga

SEQ ID NO: 164136 - RNA, 1701 nt, Artificial Sequence
  derived and/or modified CDS sequence (opt4) from hemagglutinin__InfluenzaA__ADC32411
augaaggccauccugguggugcugcuguacaccuucgccaccgccaacgccgacacccugugcaucggcuaccacgccaacaacagcaccgacaccguggacaccgugcuggagaagaacgugaccgugacccacagcgugaaccugcuggaggacaagcacaacggcaagcugugcaagcugagaggcguggccccccugcaccugggcaagugcaacaucgccggcuggauccugggcaaccccgagugcgagagccugagcaccgccagcagcuggagcuacaucguggagaccagcagcagcgacaacggcaccugcuaccccggcgacuucaucgacuacgaggagcugagagagcagcugagcagcgugagcagcuucgagagauucgagaucuuccccaagaccagcagcuggcccaaccacgacagcaacaagggcgugaccgccgccugcccccacgccggcgccaagagcuucuacaagaaccugaucuggcuggugaagaagggcaacagcuaccccaagcugagcaagagcuacaucaacgacaagggcaaggaggugcuggugcuguggggcauccaccaccccagcaccagcgccgaccagcagagccuguaccagaacgccgacgccuacguguucgugggcaccagcagauacagcaagaaguucaagcccgagaucgccaucagacccaaggugagagagcaggagggcagaaugaacuacuacuggacccugguggagcccggcgacaagaucaccuucgaggccaccggcaaccugguggugcccagauacgccuucgccauggagagaaacgccggcagcggcaucaucaucagcgacacccccgugcacgacugcaacaccaccugccagacccccaagggcgccaucaacaccagccugcccuuccagaacauccacagcaucaccaucggcaagugccccaaguacgugaagagcaccaagcugagacuggccaccggccugagaaacgugcccagcauccagagcagaggccuguucggcgccaucgccggcuucaucgagggcggcuggaccggcaugguggacggcugguacggcuaccaccaccagaacgagcagggcagcggcuacgccgccgaccugaagagcacccagaacgccaucgacgagaucaccaacaaggugaacagcgugaucgagaagaugaacacccaguucaccgccgugggcaaggaguucaaccaccuggccaagagaaucgagaaccugaacaagaagguggacgacggcuuccuggacaucuggaccuacaacgccgagcugcuggugcugcuggagaacgagagaacccuggacuaccacgacagcaacgugaagaaccuguacgagaaggugagaagccagcugaagaacaacgccaaggagaucggcaacggcugcuucgaguucuaccacaagugcgacaacaccugcauggagagcgugaagaacggcaccuacgacuaccccaaguacagcgaggaggccaagcugaacagagaggagaucgacggcgugaagcuggagagcaccagaaucuaccagauccuggccaucuacagcaccguggccagcagccuggugcugguggugagccugggcgccaucagcuucuggaugugcagcaacggcagccugcagugcagaaucugcaucuga

SEQ ID NO: 164137 - RNA, 1701 nt, Artificial Sequence; identical to SEQ ID NO: 163082
  derived and/or modified CDS sequence (opt4) from hemagglutinin__InfluenzaA__ADC32412

SEQ ID NO: 164138 - RNA, 1701 nt, Artificial Sequence; identical to SEQ ID NO: 162729
  derived and/or modified CDS sequence (opt4) from hemagglutinin__InfluenzaA__ADC32413

SEQ ID NO: 164139 - RNA, 1701 nt, Artificial Sequence; identical to SEQ ID NO: 163176
  derived and/or modified CDS sequence (opt4) from hemagglutinin__InfluenzaA__ADC32414

SEQ ID NO: 164140 - RNA, 1701 nt, Artificial Sequence; identical to SEQ ID NO: 163176
  derived and/or modified CDS sequence (opt4) from hemagglutinin__InfluenzaA__ADC32415

SEQ ID NO: 164141 - RNA, 1701 nt, Artificial Sequence; identical to SEQ ID NO: 163176
  derived and/or modified CDS sequence (opt4) from hemagglutinin__InfluenzaA__ADC32416

SEQ ID NO: 164142 - RNA, 1701 nt, Artificial Sequence
  derived and/or modified CDS sequence (opt4) from hemagglutinin__InfluenzaA__ADC32417
augaaggccauccugguggugcugcuguacaccuucgccaccgccaacgccgacacccugugcaucggcuaccacgccaacaacagcaccgacaccguggacaccgugcuggagaagaacgugaccgugacccacagcgugaaccugcuggaguacaagcacaacggcaagcugugcaagcugagaggcguggccccccugcaccugggcaagugcaacaucgccggcuggauccugggcaaccccgagugcgagagccugagcaccgccagcagcuggagcuacaucguggagaccagcagcagcgacaacggcaccugcuaccccggcgacuucaucgacuacgaggagcugagagagcagcugagcagcgugagcagcuucgagagauucgagaucuuccccaagaccagcagcuggcccaaccacgacagcaacaagggcgugaccgccgccugcccccacgccggcgccaagagcuucuacaagaaccugaucuggcuggugaagaagggcaacagcuaccccaagcugagcaagagcuacaucaacgacaagggcaaggaggugcuggugcuguggggcauccaccaccccagcaccagcgccgaccagcagagccuguaccagaacgccgacgccuacguguucgugggcaccagcagauacagcaagaaguucaagcccgagaucgccaucagacccaaggugagagagcaggagggcagaaugaacuacuacuggacccugguggagcccggcgacaagaucaccuucgaggccaccggcaaccugguggugcccagauacgccuucgccauggagagaaacgccggcagcggcaucaucaucagcgacacccccgugcacgacugcaacaccaccugccagacccccaagggcgccaucaacaccagccugcccuuccagaacauccaccccaucaccaucggcaagugccccaaguacgugaagagcaccaagcugagacuggccaccggccugagaaacgugcccagcauccagagcagaggccuguucggcgccaucgccggcuucaucgagggcggcuggaccggcaugguggacggcugguacggcuaccaccaccagaacgagcagggcagcggcuacgccgccgaccugaagagcacccagaacgccaucgacgagaucaccaacaaggugaacagcgugaucgagaagaugaacacccaguucaccgccgugggcaaggaguucaaccaccuggagaagagaaucgagaaccugaacaagaagguggacgacggcuuccuggacaucuggaccuacaacgccgagcugcuggugcugcuggagaacgagagaacccuggacuaccacgacagcaacgugaagaaccuguacgagaaggugagaagccagcugaagaacaacgccaaggagaucggcaacggcugcuucgaguucuaccacaagugcaacaacaccugcauggagagcgugaagaacggcaccuacgacuaccccaaguacagcgaggaggccaagcugaacagagaggagaucgacggcgugaagcuggagagcaccagaaucuaccagauccuggccaucuacagcaccguggccagcagccuggugcugguggugagccugggcgccaucagcuucuggaugugcagcaacggcagccugcagugcagaaucugcaucuga

SEQ ID NO: 164143 - RNA, 1701 nt, Artificial Sequence; identical to SEQ ID NO: 163176
  derived and/or modified CDS sequence (opt4) from hemagglutinin__InfluenzaA__ADC32418

SEQ ID NO: 164144 - RNA, 1701 nt, Artificial Sequence
  derived and/or modified CDS sequence (opt4) from hemagglutinin__InfluenzaA__ADC32419
augaaggccauccugguggugcugcuguacaccuucgccaccgccaacgccgacacccugugcaucggcuaccacgccaacaacagcaccgacaccguggacaccgugcuggagaagaacgugaccgugacccacagcgugaaccugcuggaggacaagcacaacggcaagcugugcaagcugagaggcguggccccccugcaccugggcaagugcaacaucgccggcuggauccugggcaaccccgagugcgagagccugagcaccgccagcagcuggagcuacaucguggagaccagcagcagcgacaacggcaccugcuaccccggcgacuucaucgacuacgaggagcugagagagcagcugagcagcgugagcagcuucgagagauucgagaucuuccccaagaccagcagcuggcccaaccacgacagcaacaagggcgugaccgccgccugcccccacgccggcgccaagagcuucuacaagaaccugaucuggcuggugaagaagggcaacagcuaccccaagcugagcaagagcuacaucaacgacaagggcaaggaggugcuggugcuguggggcauccaccaccccagcaccagcgccgaccagcagagccuguaccagaacgccgacgccuacguguucgugggcaccagcagauacagcaagaaguucaagcccgagaucgccaucagacccaaggugagagagcaggagggcagaaugaacuacuacuggacccugguggagcccggcgacaagaucaccuucgaggccaccggcaaccugguggugcccagauacgccuucgccauggagagaaacgccggcagcggcaucaucaucagcgacacccccgugcacgacugcaacaccaccugccagacccccaagggcgccaucaacaccagccugcccuuccagaacauccacagcaucaccaucggcaagugccccaaguacgugaagagcaccaagcugagacuggccaccggccugagaaacgugcccagcauccagagcagaggccuguucggcgccaucgccggcuucaucgagggcggcuggaccggcaugguggacggcugguucggcuaccaccaccagaacgaccagggcagcgccuacgccgccgaccugaagagcacccagaacgccaucgacgagaucaccaacaaggugaacagcgugaucgagaagaugaacacccaguucaccgccgugggcaaggaguucaaccaccuggagaagagaaucgagaaccugaacaagaagguggacgacggcuuccuggacaucuggaccuacaacgccgagcugcuggugcugcuggagaacgagagaacccuggacuaccacgacagcaacgugaagaaccuguacgagaaggugagaagccagcugaagaacaacgccaaggagaucggcaacggcugcuucgaguucuaccacaagugcgacaacaccugcauggagagcgugaagaacggcaccuacgacuaccccaaguacagcgaggaggccaagcugaacagagaggagaucgacggcgugaagcuggagagcaccagaaucuaccagauccuggccaucuacagcaccguggccagcagccuggugcugguggugagccugggcgccaucagcuucuggaugugcagcaacggcagccugcagugcagaaucugcaucuga

SEQ ID NO: 164145 - RNA, 1701 nt, Artificial Sequence; identical to SEQ ID NO: 163176
  derived and/or modified CDS sequence (opt4) from hemagglutinin__InfluenzaA__ADC32420

SEQ ID NO: 164146 - RNA, 1701 nt, Artificial Sequence; identical to SEQ ID NO: 163176
  derived and/or modified CDS sequence (opt4) from hemagglutinin__InfluenzaA__ADC32421

SEQ ID NO: 164147 - RNA, 1701 nt, Artificial Sequence
  derived and/or modified CDS sequence (opt4) from hemagglutinin__InfluenzaA__ADC32422
augaaggccauccugguggugcugcuguacaccuucgccaccgccaacgccgacacccugugcaucggcuaccacgccaacaacagcaccgacaccguggacaccgugcuggagaagaacgugaccgugacccacagcgugaaccugcuggaggacaagcacaacggcaagcugugcaagcugagaggcguggccccccugcaccugggcaagugcaacaucgccggcuggauccugggcaaccccgagugcgagagccugagcaccgccagcagcuggagcuacaucguggagaccagcagcagcgacaacggcaccugcuaccccggcgacuucaucgacuacgaggagcugagagagcagcugagcagcgugagcagcuucgagagauucgagaucuuccccaagaccagcagcuggcccaaccacgacagcaacaagggcgugaccgccgccugcccccacgccggcgccaagagcuucuacaagaaccugaucuggcuggugaagaagggcaacagcuaccccaagcugagcaagagcuacaucaacgacaagggcaaggaggugcuggugcuguggggcauccaccaccccagcaccagcgccgaccagcagagccuguaccagaacgccgacgccuacguguucgugggcaccagcagauacagcaagaaguucaagcccgagaucgccaucagacccaaggugagagagcaggagggcagaaugaacuacuacuggacccugguggagcccggcgacaagaucaccuucgaggccaccggcaaccugauggugcccagauacgccuucgccauggagagaaacgccggcagcggcaucaucaucagcgacacccccgugcacgacugcaacaccaccugccagacccccaagggcgccaucaacaccagccugcccuuccagaacauccacagcaucaccaucggcaagugccccaaguacgugaagagcaccaagcugagacuggccaccggccugagaaacgugcccagcauccagagcagaggccuguucggcgccaucgccggcuucaucgagggcggcuggaccggcaugguggacggcugguacggcuaccaccaccagaacgagcagggcagcggcuacgccgccgaccugaagagcacccagaacgccaucgacgagaucaccaacaaggugaacagcgugaucgagaagaugaacacccaguucaccgccgugggcaaggaguucaaccaccuggagaagagaaucgagaaccugaacaagaagguggacgacggcuuccuggacaucuggaccuacaacgccgagcugcuggugcugcuggagaacgagagaacccuggacuaccacgacagcaacgugaagaaccuguacgagaaggugagaagccagcugaagaacaacgccaaggagaucggcaacggcugcuucgaguucuaccacaagugcgacaacaccugcauggagagcgugaagaacggcaccuacgacuaccccaaguacagcgaggaggccaagcugaacagagaggagaucgacggcgugaagcuggagagcaccagaaucuaccagauccuggccaucuacagcaccguggccagcagccuggugcugguggugagccugggcgccaucagcuucuggaugugcagcaacggcagccugcagugcagaaucugcaucuga

SEQ ID NO: 164148 - RNA, 1701 nt, Artificial Sequence
  derived and/or modified CDS sequence (opt4) from hemagglutinin__InfluenzaA__ADC32423
augaaggccauccugguggugcugcuguacaccuucgccaccgccaacgccgacacccugugcaucggcuaccacgccaacaacagcaccgacaccguggacaccgugcuggagaagaacgugaccgugacccacagcgugaaccugcuggaggacaagcacaacggcaagcugugcaagcugagaggcguggccccccugcaccugggcaagugcaacaucgccggcuggauccugggcaaccccgagugcgagagccugagcaccgccagcagcuggagcuacaucguggagaccagcagcagcgacaacggcaccugcuaccccggcgacuucaucgacuacgaggagcugagagagcagcugagcagcgugagcagcuucgagagauucgagaucuuccccaagaccagcagcuggcccaaccacgacagcaacaagggcgugaccgccgccugcccccacgccggcgccaagagcuucuacaagaaccugaucuggcuggugaagaagggcaacagcuaccccaagcugagcaagagcuacaucaacgacaagggcaaggaggugcuggugcuguggggcauccaccaccccagcaccagcgccgaccagcagagccuguaccagaacgccgacgccuacguguucgugggcaccagcagauacagcaagaaguucaagcccgagaucgccaucagacccaaggugagagagcaggagggcagaaugaacuacuacuggacccugguggagcccggcgacaagaucaccuucgaggccaccggcaaccugguggugcccagauacgccuucgccauggagagaaacgccggcagcggcaucaucaucagcgacacccccgugcacgacugcaacaccaccugccagacccccaagggcgccaucaacaccagccugcccuuccagaacauccacagcaucaccaucggcaagugccccaaguacgugaagagcaccaagcugagacuggccaccggccugagaaacgugcccagcauccagagcagaggccuguucggcgccaucgccggcuucaucgagggcggcuggaccggcaugguggacggcugguacggcuaccaccaccagaacgagcagggcagcggcuacgccgccgaccugaagagcacccagaacgccaucgacgagaucaccaacaaggugaacagcgugaucgagaagaugaacacccaguucaccgccgugggcaaggaguucaaccaccuggagaagagaaucgagaaccugaacaagaaggugaacgacggcuuccuggacaucuggaccuacaacgccgagcugcuggugcugcuggagaacgagagaacccuggacuaccacgacagcaacgugaagaaccuguacgagaaggugagaagccagcugaagaacaacgccaaggagaucggcaacggcugcuucgaguucuaccacaagugcgacaacaccugcauggagagcgugaagaacggcaccuacgacuaccccaaguacagcgaggaggccaagcugaacagagaggagaucgacggcgugaagcuggagagcaccagaaucuaccagauccuggccaucuacagcaccguggccagcagccuggugcugguggugagccugggcgccaucagcuucuggaugugcagcaacggcagccugcagugcagaaucugcaucuga

SEQ ID NO: 164149 - RNA, 1701 nt, Artificial Sequence
  derived and/or modified CDS sequence (opt4) from hemagglutinin__InfluenzaA__ADC32434
augaaggccauccugguggugcugcuguacaccuucgccaccgccaacgccgacacccugugcaucggcuaccacgccaacaacagcaccgacaccguggacaccgugcuggagaagaacgugaccgugacccacagcgugaaccugcuggaggacaagcacaacggcaagcugugcaagcugagaggcguggccccccugcaccugggcaagugcaacaucgccggcuggauccugggcaaccccgagugcgagagccugagcaccgccagcagcuggagcuacaucguggagaccagcagcagcgacaacggcaccugcuaccccggcgacuucaucgacuacgaggagcugagagagcagcugagcagcgugagcagcuucgagagauucgagaucuuccccaagaccagcagcuggcccaaccacgacagcaacaagggcgugaccgccgccugcccccacgccggcgccaagagcuucuacaagaaccugaucuggcuggugaagaagggcaacagcuaccccaagcugagcaagagcuacaucaacgacaagggcaaggaggugcuggugcuguggggcauccaccaccccagcaccagcgccgaccagcagagccuguaccagaacgccgacgccuacguguucgugggcaccagcagauacagcaagaaguucaagcccgagaucgccaucagacccaaggugagagaccaggagggcagaaugaacuacuacuggacccugguggagcccggcgacaagaucaccuucgaggccaccggcaaccugguggugcccagauacgccuucgccauggagagaaacgccggcagcggcaucaucaucagcgacacccccgugcacgacugcaacaccaccugccagacccccaagggcgccaucaacaccagccugcccuuccagaacauccaccccaucaccaucggcaagugccccaaguacgugaagagcaccaagcugagacuggccaccggccugagaaacgugcccagcauccagagcagaggccuguucggcgccaucgccggcuucaucgagggcggcuggaccggcaugguggacggcugguacggcuaccaccaccagaacgagcagggcagcggcuacgccgccgaccugaagagcacccagcacgccaucgacgagaucaccaacaaggugaacagcgugaucgagaagaugaacacccaguucaccgccgugggcaaggaguucaaccaccuggagaagagaaucgagaaccugaacaagaagguggacgacggcuuccuggacaucuggaccuacaacgccgagcugcuggugcugcuggagaacgagagaacccuggacuaccacgacagcaacgugaagaaccuguacgagaaggugagaagccagcugaagaacaacgccaaggagaucggcaacggcugcuucgaguucuaccacaagugcgacaacaccugcauggagagcgugaagaacggcaccuacgacuaccccaaguacagcgaggaggccaagcugaacagagaggagaucgacggcgugaagcuggagagcaccagaaucuaccagauccuggccaucuacagcaccguggccagcagccuggugcugguggugagccugggcgccaucagcuucuggaugugcagcaacggcagccugcagugcagaaucugcaucuga

SEQ ID NO: 164150 - RNA, 1701 nt, Artificial Sequence; identical to SEQ ID NO: 164149
  derived and/or modified CDS sequence (opt4) from hemagglutinin__InfluenzaA__ADC32435

SEQ ID NO: 164151 - RNA, 1701 nt, Artificial Sequence
  derived and/or modified CDS sequence (opt4) from hemagglutinin__InfluenzaA__ADC34940
augaagaccaucaucgcccugagcuacauccugugccugguguucgcccagaagcugcccggcaacgacaacagcaccgccacccugugccugggccaccacgccgugcccaacggcaccaucgugaagaccaucaccaacgaccagaucgaggugaccaacgccaccgagcuggugcagagcagcagcaccggcggcaucugcgacagcccccaccagauccuggacggcgagaacugcacccugaucgacgcccugcugggcgacccccagugcgacggcuuccagaacaagaagugggaccuguucguggagagaagcaaggccuacagcaacugcuaccccuacgacgugcccgacuacgccagccugagaagccugguggccagcagcggcacccuggaguucaacaacgagagauucaacuggaccggcgugacccagaacggcaccagcagcgccugcaagagaggcagcgacaacagcuucuucagcagacugaacuggcugacccaccugaaguucaaguaccccgcccugaacgugaccaugcccaacaacgagaaguucgacaagcuguacaucuggggcgugcaccaccccggcaccgacaacgaccagaucuuccugcacgcccaggccagcggcagaaucaccgugagcaccaagagaagccagcagaccgugauccccaacaucggcagcagacccagagugagaaacauccccagcagaaucagcaucuacuggaccaucgugaagcccggcgacauccugcugaucaacagcaccggcaaccugaucgcccccagaggcuacuucaagaucagaagcggcaagagcagcaucaugaagagcgacgcccccaucggcaagugcaacagcgagugcaucacccccaacggcagcauccccaacgacaagcccuuccagaacgugaacagaaucaccuacggcgccugccccagauacgugaagcagaacacccugaagcuggccaccggcaugagaaacgugcccgagaagcagaccagaggcaucuucggcgccaucgccggcuucaucgagaacggcugggagggcaugguggacggcugguacggcuucagacaccagaacagcgagggcaucggccaggccgccgaccugaagagcacccaggccgccaucaaccagaucaacggcaagcugaacagacugaucggcaagaccaacgagaaguuccaccagaucgagaaggaguucagcgagguggagggcagaauccaggaccuggagaaguacguggaggacaccaagaucgaccuguggagcuacaacgccgagcugcugguggcccuggagaaccagcacaccaucgaccugaccgacagcgagaugaacaagcuguucgagagaaccaagaagcagcugagagagaacgccgaggacaugggcaacggcugcuucaagaucuaccacaagugcgacaacgccugcaucggcagcaucagaaacggcaccuacgaccacgacguguacagagacgaggcccugaacaacagauuccagaucaagggcguggagcugaagagcggcuacaaggacuggauccuguggaucagcuucgccaucagcugcuuccugcugugcguggcccugcugggcuucaucaugugggccugccagaagggcaacaucagaugcaacaucugcaucuga

SEQ ID NO: 164152 - RNA, 1701 nt, Artificial Sequence; identical to SEQ ID NO: 164064
  derived and/or modified CDS sequence (opt4) from hemagglutinin__InfluenzaA__ADC38987

SEQ ID NO: 164153 - RNA, 1701 nt, Artificial Sequence
  derived and/or modified CDS sequence (opt4) from hemagglutinin__InfluenzaA__ADC38997
augaaggccauccugguggugcugcuguacaccuucgccaccgccaacgccgacacccugugcaucggcuaccacgccaacaacagcaccgacaccguggacaccgugcuggagaagaacgugaccgugacccacagcgugaaccugcuggaggacaagcacaacggcaagcugugcaagcugagaggcguggccccccugcaccugggcaagugcaacaucgccggcuggauccugggcaaccccgagugcgagagccugagcaccgccagcagcuggagcuacaucguggagaccagcagcagcgacaacggcaccugcuaccccggcgacuucaucgacuacgaggagcugagagagcagcugagcagcgugagcagcuucgagagauucgagaucuuccccaagaccagcagcuggcccaaccacgacagcaacaagggcgugaccgccgccugcccccacgccggcgccaagagcuucuacaagaaccugaucuggcuggugaagaagggcaacagcuaccccaagcugagcaagagcuacaucaacgacaagggcaaggacgugcuggugcuguggggcauccaccaccccagcaccagcgccgaccagcagagccuguaccagaacgccgacgccuacguguucgugggcaccagcagauacagcaagaaguucaagcccgagaucgccaucagacccaaggugagagaccaggagggcagaaugaacuacuacuggacccugguggagcccggcgacaagaucaccuucgaggccaccggcaaccugguggugcccagauacgccuucgccauggagagaaacgccggcagcggcaucaucaucagcgacacccccgugcacgacugcaacaccaccugccagacccccaagggcgccaucaacaccagccugcccuuccagaacauccaccccaucaccaucggcaagugccccaaguacgugaagagcaccaagcugagacuggccaccggccugagaaacgugcccagcauccagagcagaggccuguucggcgccaucgccggcuucaucgagggcggcuggaccggcaugguggacggcugguacggcuaccaccaccagaacgagcagggcagcggcuacgccgccgaccugaagagcacccagaacgccaucgacgagaucaccaacaaggugaacagcgugaucgagaagaugaacacccaguucaccgccgugggcaaggaguucaaccaccuggagaagagaaucgagaaccugaacaagaagguggacgacggcuuccuggacaucuggaccuacaacgccgagcugcuggugcugcuggagaacgagagaacccuggacuaccacgacagcaacgugaagaaccuguacgagaaggugagaagccagcugaagaacaacgccaaggagaucggcaacggcugcuucgaguucuaccacaagugcgacaacaccugcauggagagcgugaagaacggcaccuacgacuaccccaaguacagcgaggaggccaagcugaacagagaggagaucgacggcgugaagcuggagagcaccagaaucuaccagauccuggccaucuacagcaccguggccagcagccuggugcugguggugagccugggcgccaucagcuucuggaugugcagcaacggcagccugcagugcagaaucugcaucuga

SEQ ID NO: 164154 - RNA, 1701 nt, Artificial Sequence; identical to SEQ ID NO: 163830
  derived and/or modified CDS sequence (opt4) from hemagglutinin__InfluenzaA__ADC39007

SEQ ID NO: 164155 - RNA, 1698 nt, Artificial Sequence
  derived and/or modified CDS sequence (opt4) from hemagglutinin__InfluenzaA__ADC45604
augaaggccaagcugcuggugcugcugugcaccuucaccgccaccuacgccgacaccaucugcaucggcuaccacgccaacaacagcaccgacaccguggacaccgugcuggagaagaacgugaccgugacccacagcgugaaccugcuggagaacagccacaacggcaagcugugccugcugaagggcaucgccccccugcagcugggcaacugcagcguggccggcuggauccugggcaaccccgagugcgagcugcugaucagcaaggagagcuggagcuacaucguggagaagcccaaccccgagaacggcaccugcuaccccggccacuucgccgacuacgaggagcugagagagcagcugagcagcgugagcagcuucgagagauucgagaucuuccccaaggagagcagcuggcccaaccacaccgugaccggcgugagcgccagcugcagccacaacggcgagagcagcuucuacagaaaccugcuguggcugaccggcaagaacggccuguaccccaaccugagcaagagcuacgccaacaacaaggagaaggaggugcuggugcuguggggcgugcaccacccccccaacaucggcgaccagaaggcccuguaccacaccgagaacgccuacgugagcguggugagcagccacuacagcagaaaguucacccccgagaucgccaagagacccaaggugagagaccaggagggcagaaucaacuacuacuggacccugcuggagcccggcgacaccaucaucuucgaggccaacggcaaccugaucgcccccagauacgccuucgcccugagcagaggccugggcagcggcaucaucaacagcaacgcccccauggacaagugcgacgccaagugccagaccccccagggcgccaucaacagcagccugcccuuccagaacgugcaccccgugaccaucggcgagugccccaaguacgugagaagcgccaagcugagaauggugaccggccugagaaacauccccagcauccagagcagaggccuguucggcgccaucgccggcuucaucgagggcggcuggaccggcaugguggacggcugguacggcuaccaccaccagaacgagcagggcagcggcuacgccgccgaccagaagagcacccagaacgccaucaacggcaucaccaacaaggugaacagcgugaucgagaagaugaacacccaguucaccgccgugggcaaggaguucaacaagcuggagagaagaauggagaaccugaacaagaagguggacgacggcuucaucgacaucuggaccuacaacgccgagcugcuggugcugcuggagaacgagagaacccuggacuuccacgacagcaacgugaagaaccuguacgagaaggugaagagccagcugaagaacaacgccaaggagaucggcaacggcugcuucgaguucuaccacaagugcaacgacgagugcauggagagcgugaagaacggcaccuacgacuaccccaaguacagcgaggagagcaagcugaacagagagaagaucgacggcgugaagcuggagagcaugggcguguaccagauccuggccaucuacagcaccguggccagcagccuggugcugcuggugagccugggcgccaucagcuucuggaugugcagcaacggcagccugcagugcagaaucugcaucuga

SEQ ID NO: 164156 - RNA, 1698 nt, Artificial Sequence
  derived and/or modified CDS sequence (opt4) from hemagglutinin__InfluenzaA__ADC45626
augaaggugaagcugcuggugcugcugugcaccuucaccgccaccuacgccgacaccaucugcaucggcuaccacgccaacaacagcaccgacaccguggacaccgugcuggagaagaacgugaccgugacccacagcgugaaccugcuggaggacaaccacaacggcaagcugugccugcugaagggcaucgccccccugcagcugggcaacugcagcguggccggcuggauccugggcaaccccgagugcgagcugcugaucagcaaggagagcuggagcuacaucguggagaagcccaaccccgagaacggcaccugcuaccccggccacuucgccgacuacgaggagcugagagagcagcugagcagcgugagcagcuucgagagauucgagaucuuccccaaggagagcagcuggcccaaccacaccgugaccggcgugagcgccagcugcagccacaacggcgagagcagcuucuacaagaaccugcuguggcugaccggcaagaacggccuguaccccaaccugagcaagagcuacgccaacaacaaggagaaggaggugcuggugcuguggggcgugcaccacccccccaacaucggcaaccagaugacccuguaccacaaggagaacgccuacgugagcguggugagcagccacuacagcagaaaguucacccccgagaucgccaagagacccaaggugagagaccaggagggcagaaucaacuacuacuggacccugcuggagcccggcgacaccaucaucuucgaggccagcggcaaccugaucgcccccagauacgccuucgcccugagcagaggcuucggcagcggcaucaucaacagcaacgcccccauggacgagugcgacgccaagugccagaccccccagggcgccaucaacagcagccugcccuuccagaacgugcaccccgugaccaucggcgagugccccaaguacgugagaagcgccaagcugagaauggugaccggccugagaaacauccccagcauccagagcagaggccuguucggcgccaucgccggcuucaucgagggcggcuggaccggcaugguggacggcugguacggcuaccaccaccagaacgagcagggcagcggcuacgccgccgaccagaagagcacccagaacgccaucaacggcaucaccaacaaggugaacagcgugaucgagaagaugaacacccaguucaccgccgugggcaaggaguucaacaagcuggagagaagaauggagaaccugaacaagaagguggacgacggcuucaucgacguguggaccuacaacgccgagcugcuggugcugcuggagaacgagagaacccuggacuuccacgacagcaacgugaagaaccuguacgagaaggugaagaaccagcugaagaacaacgccaaggagaucggcaacggcugcuucgaguucuaccacaagugcaacgacgagugcauggagagcgugaagaacggcaccuacgacuaccccaaguacagcgaggagagcaagcugagcagagagaagaucgacggcgugaagcuggagagcaugggcguguaccagauccuggccaucuacagcaccguggccagcagccuggugcugcuggugagccugggcgccaucagcuucuggaugugcagcaacggcagccugcagugcagaaucugcaucuga

SEQ ID NO: 164157 - RNA, 1698 nt, Artificial Sequence
  derived and/or modified CDS sequence (opt4) from hemagglutinin__InfluenzaA__ADC45637
augaaggugaagcugcuggugcugcugugcaccuucaccgccaccuacgccgacaccaucugcaucggcuaccacgccaacaacagcaccgacaccguggacaccgugcuggagaagaacgugaccgugacccacagcgugaaccugcuggaggacaaccacaacggcaagcugugccugcugaagggcaucgccccccugcagcugggcaacugcagcguggccggcuggauccugggcaaccccgagugcgagcugcugaucagcaaggagagcuggagcuacaucguggagaagcccaaccccgagaacggcaccugcuaccccggccacuucgccgacuacgaggagcugagagagcagcugagcagcgugagcagcuucgagagauucgagaucuuccccaaggagagcagcuggcccaaccacaccgugaccggcgugagcgccagcugcagccacaacggcgagagcagcuucuacaagaaccugcuguggcugaccggcaagaacggccuguaccccaaccugagcaagagcuacgccaacaacaaggagaaggaggugcuggugcuguggggcgugcaccacccccccaacaucggcgaccagaugacccuguaccacaaggagaacgccuacgugagcguggugagcagccacuacagcagaaaguucacccccgagaucgccaagagacccaaggugagagaccaggagggcagaaucaacuacuacuggacccugcuggagcccggcgacaccaucaucuucgaggccagcggcaaccugaucgcccccagauacgccuucgcccugagcagaggcuucggcagcggcaucaucaacagcaacgcccccauggacgagugcgacgccaagugccagaccccccagggcgccaucaacagcagccugcccuuccagaacgugcaccccgugaccaucggcgagugccccaaguacgugagaagcgccaagcugagaauggugaccggccugagaaacauccccagcauccagagcagaggccuguucggcgccaucgccggcuucaucgagggcggcuggaccggcaugguggacggcugguacggcuaccaccaccagaacgagcagggcagcggcuacgccgccgaccagaagagcacccagaacgccaucaacggcaucaccaacaaggugaacagcgugaucgagaagaugaacacccaguucaccgccgugggcaaggaguucaacaagcuggagagaagaauggagaaccugaacaagaagguggacgacggcuucaucgacguguggaccuacaacgccgagcugcuggugcugcuggagaacgagagaacccuggacuuccacgacagcaacgugaagaaccuguacgagaaggugaagaaccagcugaagaacaacgccaaggagaucggcaacggcugcuucgaguucuaccacaagugcaacgacgagugcauggagagcgugaagaacggcaccuacgacuaccccaaguacagcgaggagagcaagcugagcagagagaagaucgacggcgugaagcuggagagcaugggcguguaccagauccuggccaucuacagcaccguggccagcagccuggugcugcuggugagccugggcgccaucagcuucuggaugugcagcaacggcagccugcagugcagaaucugcaucuga

SEQ ID NO: 164158 - RNA, 1698 nt, Artificial Sequence
  derived and/or modified CDS sequence (opt4) from hemagglutinin__InfluenzaA__ADC45648
augaaggugaagcugcuggugcugcugugcaccuucgccgccaccuacgccgacaccaucugcaucggcuaccacgccaacaacagcaccgacaccguggacaccgugcuggagaagaacgugaccgugacccacagcgugaaccugcuggagaacagccacaacggcaagcugugccugcugaagggcaucgccccccugcagcugggcaacugcagcaucgccggcugggugcugggcaaccccgagugcgagcugcugaucagcaaggagagcuggagcuacaucguggagaagcccaaccccgagaacggcaccugcuaccccggccacuucgccgacuacgaggagcugagagagcagcugagcagcgugagcagcuucgagagauucgagaucuuccccaaggagagcagcuggcccaaccacaccgugaccggcgugagcgccagcugcagccacaacggcgagagcagcuucuacagaaaccugcuguggcugaccggcaagaacggccuguaccccaaccugagcaagagcuacgccaacaacaaggagaaggaggugcuggugcuguggggcgugcaccacccccccaacaucggcgaccagaaggcccuguaccacaccgagaacgccuacgugagcguggugagcagccacuacagcagaaaguucacccccgagaucgccaagagacccaaggugagagaccaggagggcagaaucaacuacuacuggacccugcuggagcccggcgacaccaucaucuucgaggccaacggcaaccugaucgcccccagauacgccuucgcccugagcagaggcuucggcagcggcaucaucaacagcaacgcccccauggacaagugcgacgccaagugccagaccccccagggcgccaucaacagcagccugcccuuccagaacgugcaccccgugaccaucggcgagugccccaaguacgugagaagcgccaagcugagaauggugaccggccugagaaacauccccagcauccagagcagaggccuguucggcgccaucgccggcuucaucgagggcggcuggaccggcaugguggacggcugguacggcuaccaccaccagaacgagcagggcagcggcuacgccgccgaccagaagagcacccagaacgccaucaacggcaucaccaacaaggugaacagcgugaucgagaagaugaacacccaguucaccgccgugggcaaggaguucaacaagcuggagagaagaauggagaaccugaacaagaagguggacgacggcuucaucgacaucuggaccuacaacgccgagcugcuggugcugcuggagaacgagagaacccuggacuuccacgacagcaacgugaagaaccuguacgagaaggugaagagccagcugaagaacaacgccaaggagaucggcaacggcugcuucgaguucuaccacaagugcaacgacgagugcauggagagcgugaagaacggcaccuacgacuaccccaaguacagcgaggagagcaagcugaacagagagaagaucgacggcgugaagcuggagagcaugggcguguaccagauccuggccaucuacagcaccguggccagcagccuggugcugcuggugagccugggcgccaucagcuucuggaugugcagcaacggcagccugcagugcagaaucugcaucuga

SEQ ID NO: 164159 - RNA, 1698 nt, Artificial Sequence
  derived and/or modified CDS sequence (opt4) from hemagglutinin__InfluenzaA__ADC45659
augaaggugaagcugcuggugcugcugugcaccuucaccgccaccuacgccgacaccaucugcaucggcuaccacgccaacaacagcaccgacaccguggacaccgugcuggagaagaacgugaccgugacccacagcgugaaccugcuggagaacagccacaacggcaagcugugccugcugaagggcaucgccccccugcagcugggcaacugcagcguggccggcuggauccugggcaaccccgagugcgagcugcugaucagcaaggagagcuggagcuacaucguggagaagcccaaccccgagaacggcaccugcuaccccggccacuucgccgacuacgaggagcugagagagcagcugagcagcgugagcagcuucgagagauucgagaucuuccccaagaagagcagcuggcccaaccacaccgugaccggcgugagcgccagcugcagccacaacggcgagagcagcuucuacagaaaccugcuguggcugaccgagaagaacggccuguaccccaaccugagcaagagcuacgccaacaacaaggagaaggaggugcuggugcuguggggcgugcaccacccccccaacaucggcgaccagaaggcccuguaccacaccgagaacgccuacgugagcguggugagcagccacuacagcagaaaguucacccccgagaucgccaagagacccaaggugagagaccaggagggcagaaucaacuacuacuggacccugcuggagcccggcgacaccaucaucuucgaggccaacggcaaccugaucgcccccagauacgccuucgcccugagcagaggcuucggcagcggcaucaucaacagcaacgcccccauggacaagugcgacgccaagugccagaccccccagggcgccaucaacagcagccugcccuuccagaacgugcaccccgugaccaucggcgagugccccaaguacgugagaagcgccaagcugagaauggugaccggccugagaaacauccccagcauccagagcagaggccuguucggcgccaucgccggcuucaucgagggcggcuggaccggcaugguggacggcugguacggcuaccaccaccagaacgagcagggcagcggcuacgccgccgaccagaagagcacccagaacgccaucaacggcaucaccaacaaggugaacagcgugaucgagaagaugaacacccaguucaccgccgugggcaaggaguucaacaagcuggagagaagaauggagaaccugaacaagaagguggacgacggcuucaucgacaucuggaccuacaacgccgagcugcuggugcugcuggagaacgagagaacccuggacuuccacgacagcaacgugaagaaccuguacgagaaggugaagagccagcugaagaacaacgccaaggagaucggcaacggcugcuucgaguucuaccacaagugcaacgacgagugcauggagagcgugaagaacggcaccuacgacuaccccaaguacagcgaggagagcaagcugaacagagagaagaucgacggcgugaagcuggagagcaugggcguguaccagauccuggccaucuacagcaccguggccagcagccuggugcugcuggugagccugggcgccaucagcuucuggaugugcagcaacggcagccugcagugcagaaucugcaucuga

SEQ ID NO: 164160 - RNA, 1698 nt, Artificial Sequence
  derived and/or modified CDS sequence (opt4) from hemagglutinin__InfluenzaA__ADC45670
augaaggugaagcugcuggugcugcugugcaccuucaccgccaccuacgccgacaccaucugcaucggcuaccacgccaacaacagcaccgacaccguggacaccgugcuggagaagaacgugaccgugacccacagcgugaaccugcuggagaacagccacaacggcaagcugugccugcugaagggcaucgccccccugcagcugggcaacugcagcguggccggcuggauccugggcaaccccgagugcgagcugcugaucagcaaggagagcuggagcuacaucguggagaagcccaaccccgagaacggcaccugcuaccccggccacuucgccgacuacgaggagcugagagagcagcugagcagcgugagcagcuucgagagauucgagaucuuccccaaggagagcagcuggcccaaccacaccgugaccggcggcagcgccagcugcagccacaacggcgagagcagcuucuacagaaaccugcuguggcugaccggcaagaacggccuguaccccaaccugagcaagagcuacgccaacaacaaggagaaggaggugcuggugcuguggggcgugcaccacccccccaacaucggcgaccagaaggcccuguaccacaccgagaacgccuacgugagcguggugagcagccacuacagcagaaaguucacccccgagaucgccaagagacccaaggugagagaccaggagggcagaaucaacuacuacuggacccugcuggagcccggcgacaccaucaucuucgaggccaacggcaaccugaucgcccccagauacgccuucgcccugagcagaggcuucggcagcggcaucaucaacagcaacgcccccauggacaagugcgacgccaagugccagaccccccagggcgccaucaacagcagccugcccuuccagaacgugcaccccgugaccaucggcgagugccccaaguacgugagaagcgccaagcugagaauggugaccggccugagaaacauccccagcauccagagcagaggccuguucggcgccaucgccggcuucaucgagggcggcuggaccggcaugguggacggcugguacggcuaccaccaccagaacgagcagggcagcggcuacgccgccgaccagaagagcacccagaacgccaucaacggcaucaccaacaaggugaacagcgugaucgagaagaugaacacccaguucaccgccgugggcaaggaguucaacaagcuggagagaagaauggagaaccugaacaagaagguggacgacggcuucaucgacaucuggaccuacaacgccgagcugcuggugcugcuggagaacgagagaacccuggacuuccacgacagcaacgugaagaaccuguacgagaaggugaagagccagcugaagaacaacgccaaggagaucggcaacggcugcuucgaguucuaccacaagugcaacgacgagugcauggagagcgugaagaacggcaccuacgacuaccccaaguacagcgaggagagcaagcugaacagagagaagaucgacggcgugaagcuggagagcaugggcguguaccagauccuggccaucuacagcaccguggccagcagccuggugcugcuggugagccugggcgccaucagcuucuggaugugcagcaacggcagccugcagugcagaaucugcaucuga

SEQ ID NO: 164161 - RNA, 1698 nt, Artificial Sequence
  derived and/or modified CDS sequence (opt4) from hemagglutinin__InfluenzaA__ADC45681
augaaggugaagcugcuggugcugcugugcaccuucaccgccaccuacgccgacaccaucugcaucggcuaccacgccaacaacagcaccgacaccguggacaccgugcuggagaagaacgugaccgugacccacagcgugaaccugcuggaggacaaccacaacggcaagcugugccugcugaagggcaucgccccccugcagcugggcaacugcagcguggccggcuggauccugggcaaccccgagugcgagcugcugaucagcaaggagagcuggagcuacaucguggagaagcccaaccccgagaacggcaccugcuaccccggccacuucgccgacuacgaggagcugagagagcagcugagcagcgccagcagcuucgagagauucgagaucuuccccaaggagagcagcuggcccaaccacaccgugaccggcgugagcgccagcugcagccacaacggcgagagcagcuucuacaagaaccugcuguggcugaccggcaagaacggccuguaccccaaccugagaaagagcuacgccaacaacaaggagaaggaggugcuggugcuguggggcgugcaccacccccccaacaucggcgaccagaugacccuguaccacaaggagaacgccuacgugagcguggugagcagccacuacagcagaaaguucacccccgagaucgccaagagacccaaggugagagaccaggagggcagaaucaacuacuacuggacccugcuggagcccggcgacaccaucaucuucgaggccagcggcaaccugaucgcccccagauacgccuucgcccugagcagaggcuucggcagcggcaucaucaacagcaacgcccccauggacgagugcgacgccaagugccagaccccccagggcgccaucaacagcagccugcccuuccagaacgugcaccccgugaccaucggcgagugccccaaguacgugagaagcgccaagcugagaauggugaccggccugagaaacauccccagcauccagagcagaggccuguucggcgccaucgccggcuucaucgagggcggcuggaccggcaugguggacggcugguacggcuaccaccaccagaacgagcagggcagcggcuacgccgccgaccagaagagcacccagaacgccaucaacggcaucaccaacaaggugaacagcgugaucgagaagaugaacacccaguucaccgccgugggcaaggaguucaacaagcuggagagaagaauggagaaccugaacaagaagguggacgacggcuucaucgacguguggaccuacaacgccgagcugcuggugcugcuggagaacgagagaacccuggacuuccacgacagcaacgugaagaaccuguacgagaaggugaagaaccagcugaagaacaacgccaaggagaucggcaacggcugcuucgaguucuaccacaagugcaacgacgagugcauggagagcgugaagaacggcaccuacgacuaccccaaguacagcgaggagagcaagcugagcagagagaagaucgacggcgugaagcuggagagcaugggcguguaccagauccuggccaucuacagcaccguggccagcagccuggugcugcuggugagccugggcgccaucagcuucuggaugugcagcaacggcagccugcagugcagaaucugcaucuga

SEQ ID NO: 164162 - RNA, 1698 nt, Artificial Sequence
  derived and/or modified CDS sequence (opt4) from hemagglutinin__InfluenzaA__ADC45692
augaaggugaagcugcuggugcugcugugcaccuucaccgccaccuacgccgacaccaucugcaucggcuaccacgccaacaacagcaccgacaccguggacaccgugcuggagaagaacgugaccgugacccacagcgugaaccugcuggagaacagccacaacggcaagcugugccugcugaagggcaucgccccccugcagcugggcaacugcagcguggccggcuggauccugggcaaccccgagugcgagcugcugaucagcaagaagagcuggagcuacaucguggagaagcccaaccccgagaacggcaccugcuaccccggccacuucgccgacuacgaggagcugagagagcagcugagcagcgugagcagcuucgagagauucgagaucuuccccaaggagagcagcuggcccaaccacaccgugaccggcgugagcgccagcugcagccacaacggcgagagcagcuucuacagaaaccugcuguggcugaccggcaagaacggccuguaccccaaccugagcaagagcuacgccaacaacaaggagaaggaggugcuggugcuguggggcgugcaccacccccccaacaucggcgaccagaaggcccuguaccacaccgagaacgccuacgugagcguggugagcagccacuacagcagaaaguucacccccgagaucgccaagagacccaaggugagagaccaggagggcagaaucaacuacuacuggacccugcuggagcccggcgacaccaucaucuucgaggccaacggcaaccugaucgcccccagauacgccuucgcccugagcagaggcuucggcagcggcaucaucaacagcaacgcccccauggacaagugcgacgccaagugccagaccccccagggcgccaucaacagcagccugcccuuccagaacgugcaccccgugaccaucggcgagugccccaaguacgugagaagcgccaagcugagaauggugaccggccugagaaacauccccagcauccagagcagaggccuguucggcgccaucgccggcuucaucgagggcggcuggaccggcaugguggacggcugguacggcuaccaccaccagaacgagcagggcagcggcuacgccgccgaccagaagagcacccagaacgccaucaacggcaucaccaacaaggugaacagcgugaucgagaagaugaacacccaguucaccgccgugggcaaggaguucaacaagcuggagagaagaauggagaaccugaacaagaagguggacgacggcuucaucgacaucuggaccuacaacgccgagcugcuggugcugcuggagaacgagagaacccuggacuuccacgacagcaacgugaagaaccuguacgagaaggugaagagccagcugaagaacaacgccaaggagaucggcaacggcugcuucgaguucuaccacaagugcaacgacgagugcauggagagcgugaagaacggcaccuacgacuaccccaaguacagcgaggagagcaagcugaacagagagaagaucgacggcgugaagcuggagagcaugggcguguaccagauccuggccaucuacagcaccguggccagcagccuggugcugcuggugagccugggcgccaucagcuucuggaugugcagcaacggcagccugcagugcagaaucugcaucuga

SEQ ID NO: 164163 - RNA, 1698 nt, Artificial Sequence; identical to SEQ ID NO: 163230
  derived and/or modified CDS sequence (opt4) from hemagglutinin__InfluenzaA__ADC45703

SEQ ID NO: 164164 - RNA, 1698 nt, Artificial Sequence
  derived and/or modified CDS sequence (opt4) from hemagglutinin__InfluenzaA__ADC45714
augaaggugaagcugcuggugcugcugugcaccuucaccgccaccuacgccgacaccaucugcaucggcuaccacgccaacaacagcaccgacaccguggacaccgugcuggagaagaacgugaccgugacccacagcgugaaccugcuggaggacaaccacaacggcaagcugugccugcugaagggcaucgccccccugcagcugggcaacugcagcguggccggcuggauccugggcaaccccgagugcgagcugcugaucagcaaggagagcuggagcuacaucguggagaagcccaaccccgagaacggcaccugcuaccccggccacuucgccgacuacgaggagcugagagagcagcugagcagcgugagcagcuucgagagauucgagaucuuccccaaggagagcagcuggcccaaccacaccgugaccggcgugagcgccagcugcagccacaacggcgagagcagcuucuacaagaaccugcuguggcugaccggcaagaacggccuguaccccaaccugagcaagagcuacgccaacaacaaggagaaggaggugcuggugcuguggggcgugcaccacccccccaacaucggcgaccagaccacccuguaccacaaggagaacgccuacgugagcguggugagcagccacuacagcagaaaguucacccccgagaucgccaagagacccaaggugagagaccaggagggcagaaucaacuacuacuggacccugcuggagcccggcgacaccaucaucuucgaggccagcggcaaccugaucgcccccagauacgccuucgcccugagcagaggcuucggcagcggcaucaucaacagcaacgcccccauggacgagugcgacgccaagugccagaccccccagggcgccaucaacagcagccugcccuuccagaacgugcaccccgugaccaucggcgagugccccaaguacgugagaagcgccaagcugagaauggugaccggccugagaaacauccccagcauccagagcagaggccuguucggcgccaucgccggcuucaucgagggcggcuggaccggcaugguggacggcugguacggcuaccaccaccagaacgagcagggcagcggcuacgccgccgaccagaagagcacccagaacgccaucaacggcaucaccaacaaggugaacagcgugaucgagaagaugaacacccaguucaccgccgugggcaaggaguucaacaagcuggagagaagaauggagaaccugaacaagaagguggacgacggcuucaucgacguguggaccuacaacgccgagcugcuggugcugcuggagaacgagagaacccuggacuuccacgacagcaacgugaagaaccuguacgagaaggugaagaaccagcugaagaacaacgccaaggagaucggcaacggcugcuucgaguucuaccacaagugcaacgacgagugcauggagagcgugaagaacggcaccuacgacuaccccaaguacagcgaggagagcaagcugagcagagagaagaucgacggcgugaagcuggagagcaugggcguguaccagauccuggccaucuacagcaccguggccagcagccuggugcugcuggugagccugggcgccaucagcuucuggaugugcagcaacggcagccugcagugcagaaucugcaucuga

SEQ ID NO: 164165 - RNA, 1698 nt, Artificial Sequence; identical to SEQ ID NO: 163230
  derived and/or modified CDS sequence (opt4) from hemagglutinin__InfluenzaA__ADC45725

SEQ ID NO: 164166 - RNA, 1698 nt, Artificial Sequence
  derived and/or modified CDS sequence (opt4) from hemagglutinin__InfluenzaA__ADC45736
augaaggugaagcugcuggugcugcugugcaccuucaccgccaccuacgccgacaccaucugcaucggcuaccacgccaacaacagcaccgacaccguggacaccgugcuggagaagaacgugaccgugacccacagcgugaaccugcuggagaacagccacaacggcaagcugugccugcugaagggcaucgccccccugcagcugggcaacugcagcguggccggcuggauccugggcaaccccgagugcgagcugcugaucagcaaggagagcuggagcuacaucguggagaagcccaaccccgagaacggcaccugcuaccccggccacuucgccgacuacgaggagcugagagagcagcugagcagcgugagcagcuucgagagauucgagaucuuccccaaggagagcagcuggcccaaccacaccgugaccggcgugagcgccagcugcagccacaacggcgagagcagcuucuacagaaaccugcuguggcugaccggcaagaacggccuguaccccaaccugagcaagagcuacgccaacaacaaggagaaggaggugcuggugcuguggggcgugcaccacccccccaacaucggcgaccagaaggcccuguaccacaccgagaacaccuacgugagcguggugagcagccacuacagcagaaaguucacccccgagaucgccaagagacccaaggugagagaccaggagggcagaaucaacuacuacuggacccugcuggagcccggcgacaccaucaucuucgaggccaacggcaaccugaucgcccccagauacgccuucgcccugagcagaggcuucggcagcggcaucaucaacagcaacgcccccauggacaagugcgacgccaagugccagaccccccagggcgccaucaacagcagccugcccuuccagaacgugcaccccgugaccaucggcgagugccccaaguacgugagaagcgccaagcugagaauggugaccggccugagaaacauccccagcauccagagcagaggccuguucggcgccaucgccggcuucaucgagggcggcuggaccggcaugguggacggcugguacggcuaccaccaccagaacgagcagggcagcggcuacgccgccgaccagaagagcacccagaacgccaucaacggcaucaccaacaaggugaacagcgugaucgagaagaugaacacccaguucaccgccgugggcaaggaguucaacaagcuggagagaagaauggagaaccugaacaagaagguggacgacggcuucaucgacaucuggaccuacaacgccgagcugcuggugcugcuggagaacgagagaacccuggacuuccacgacagcaacgugaagaaccuguacgagaaggugaagagccagcugaagaacaacgccaaggagaucggcaacggcugcuucgaguucuaccacaagugcaacgacgagugcauggagagcgugaagaacggcaccuacgacuaccccaaguacagcgaggagagcaagcugaacagagagaagaucgacggcgugaagcuggagagcaugggcguguaccagauccuggccaucuacagcaccguggccagcagccuggugcugcuggugagccugggcgccaucagcuucuggaugugcagcaacggcagccugcagugcagaaucugcaucuga

SEQ ID NO: 164167 - RNA, 1698 nt, Artificial Sequence; identical to SEQ ID NO: 162548
  derived and/or modified CDS sequence (opt4) from hemagglutinin__InfluenzaA__ADC45747

SEQ ID NO: 164168 - RNA, 1698 nt, Artificial Sequence
  derived and/or modified CDS sequence (opt4) from hemagglutinin__InfluenzaA__ADC45758
augaaggugaagcugcuggugcugcugugcaccuucaccgccaccuacgccgacaccaucugcaucggcuaccacgccaacaacagcaccgacaccguggacaccgugcuggagaagaacgugaccgugacccacagcgugaaccugcuggagaacagccacaacggcaagcugugccugcugaagggcaucgccccccugcagcugggcaacugcagcguggccggcuggauccugggcaaccccgagugcgagcugcugaucagcaaggagagcuggagcuacaucguggagaagcccaaccccgagaacggcaccugcuaccccggccacuucgccgacuacgaggagcugagagagcagcugagcagcgugagcagcuucgagagauucgagaucuuccccaaggagagcagcuggcccaaccacaccgugaccggcgugagcgccagcugcagccacaacggcgagaacagcuucuacagaaaccugcuguggcugaccggcaagaacggccuguaccccaaccugagcaagagcuacgccaacaacaaggagaaggaggugcuggugcuguggggcgugcaccacccccccaacaucgccgaccagaagacccuguaccacaccgagaacgccuacgugagcguggugagcagccacuacagcagaaaguucacccccgagaucgccaagagacccaaggugagagaccaggagggcagaaucaacuacuacuggacccugcuggagcccggcgacaccaucaucuucgaggccaacggcaaccugaucgcccccagauacgccuucgcccugagcagaggcuucggcagcggcaucaucaacagcaacgcccccauggacaagugcgacgccaagugccagaccccccagggcgccaucaacagcagccugcccuuccagaacgugcaccccgugaccaucggcgagugccccaaguacgugagaagcgccaagcugagaauggugaccggccugagaaacauccccagcauccagagcagaggccuguucggcgccaucgccggcuucaucgagggcggcuggaccggcaugguggacggcugguacggcuaccaccaccagaacgagcagggcagcggcuacgccgccgaccagaagagcacccagaacgccaucaacggcaucaccaacaaggugaacagcgugaucgagaagaugaacacccaguucaccgccgugggcaaggaguucaacaagcuggagagaagaauggagaaccugaacaagaagguggacgacggcuucaucgacaucuggaccuacaacgccgagcugcuggugcugcuggagaacgagagaacccugaacuuccacgacagcaacgugaagaaccuguacgagaaggugaagagccagcugaagaacaacgccaaggagaucggcaacggcugcuucgaguucuaccacaagugcaacgacgagugcauggagagcgugaagaacggcaccuacgacuaccccaaguacagcgaggagagcaagcugaacagagagaagaucgacggcgugaagcuggagagcaugggcguguaccagauccuggccaucuacagcaccguggccagcagccuggugcugcuggugagccugggcgccaucagcuucuggaugugcagcaacggcagccugcagugcagaaucugcaucuga

SEQ ID NO: 164169 - RNA, 1698 nt, Artificial Sequence; identical to SEQ ID NO: 163686
  derived and/or modified CDS sequence (opt4) from hemagglutinin__InfluenzaA__ADC45780

SEQ ID NO: 164170 - RNA, 1698 nt, Artificial Sequence; identical to SEQ ID NO: 163191
  derived and/or modified CDS sequence (opt4) from hemagglutinin__InfluenzaA__ADC45791

SEQ ID NO: 164171 - RNA, 1698 nt, Artificial Sequence
  derived and/or modified CDS sequence (opt4) from hemagglutinin__InfluenzaA__ADC45813
augaaggugaagcugcugauccugcugugcaccuucaccgccaccuacgccgacaccaucugcaucggcuaccacgccaacaacagcaccgacaccguggacaccgugcuggagaagaacgugaccgugacccacagcgugaaccugcuggagaacagccacaacggcaagcugugccugcugaagggcaucgccccccugcagcugggcaacugcagcguggccggcuggauccugggcaaccccgagugcgagcugcugaucagcaaggagagcuggagcuacaucguggagaagcccaaccccgagaacggcaccugcuaccccggccacuucgccgacuacgaggagcugagagagcagcugagcagcgugagcagcuucgagagauucgagaucuuccccaaggagagcagcuggcccaaccacaccgugaccggcgugagcgccagcugcagccacaacggcgagagcagcuucuacagaaaccugcuguggcugaccaugaagaacggccuguaccccaaccugagcaagagcuacgccaacaacaaggagaaggaggugcuggugcuguggggcgugcaccacccccccaacaucggcgaccagaagacccuguacaacaccgagaacgccuacgugagcguggugagcagccacuacagcagaaaguucacccccgagaucgccaagagacccaaggugagagaccaggagggcagaaucaacuacuacuggacccugcuggagcccggcgacaccaucaucuucgaggccaacggcaaccugaucgcccccagauacgccuucgcccugagcagaggcuucggcagcggcaucaucaacagcaacgcccccauggacaagugcgacgccaagugccagaccccccagggcgccaucaacagcagccugcccuuccagaacgugcaccccgugaccaucggcgagugccccaaguacgugagaagcgccaagcugagaauggugaccggccugagaaacauccccagcauccagagcagaggccuguucggcgccaucgccggcuucaucgagggcggcuggaccggcaugguggacggcugguacggcuaccaccaccagaacgagcagggcagcggcuacgccgccgaccagaagagcacccagaacgccaucaacggcaucaccaacaaggugaacagcgugaucgagaagaugaacacccaguucaccgccgugggcaaggaguucaacaagcuggagagaagaauggagaaccugaacaagaagguggacgacggcuucaucgacaucuggaccuacaacgccgagcugcuggugcugcuggagaacgagagaacccuggacuuccacgacagcaacgugaagaaccuguacgagaaggugaagagccagcugaagaacaacgccaaggagaucggcaacggcugcuucgaguucuaccacaagugcaacgacgagugcauggagagcgugaagaacggcaccuacgacuaccccaaguacagcgaggagagcaagcugaacagagagaagaucgacggcgugaagcuggagagcaugggcguguaccagauccuggccaucuacagcaccguggccagcagccuggugcugcuggugagccugggcgccaucagcuucuggaugugcagcaacggcagccugcagugcagaaucugcaucuga

SEQ ID NO: 164172 - RNA, 1698 nt, Artificial Sequence; identical to SEQ ID NO: 163191
  derived and/or modified CDS sequence (opt4) from hemagglutinin__InfluenzaA__ADC45824

SEQ ID NO: 164173 - RNA, 1698 nt, Artificial Sequence
  derived and/or modified CDS sequence (opt4) from hemagglutinin__InfluenzaA__ADC45835
augaaggugaagcugcuggugcugcugugcaccuucaccgccaccuacgccgacaccaucugcaucggcuaccacgccaacaacagcaccgacaccguggacaccgugcuggagaagaacgugaccgugacccacagcgugaaccugcuggagaacagccacaacggcaagcugugccugcugaagggcaucgccccccugcagcugggcaacugcagcguggccggcuggauccugggcaaccccgagugcgagcugcugaucagcaaggagagcuggagcuacaucguggagaagcccaaccccgagaacggcaccugcuaccccggccacuucgccgacuacgaggagcugagagagcagcugagcagcgugagcagcuucgagagauucgagaucuuccccaaggagagcagcuggcccaaccacaccgugaccggcgugagcgccagcugcagccacaacggcgagaacagcuucuacagaaaccugcuguggcugaccggcaagaacggccuguaccccaaccugagcaagagcuacgccaacaacaaggagaaggaggugcuggugcuguggggcgugcaccacccccccaacaucgccgaccagaagacccuguaccacaccgagaacgccuacgugagcguggugagcagccacuacagcagaaaguucacccccgagaucgccaagagacccaaggugagagaccaggagggcagaaucaacuacuacuggacccugcuggagcccggcgacaccaucaucuucgaggccaacggcaaccugaucgcccccagauacgccuucgcccugagcagaggcuucggcagcggcaucaucaacagcaacgcccccauggacaagugcgacgccaagugccagaccccccagggcgccaucaacagcagccugcccuuccagaacgugcaccccgugaccaucggcgagugccccaaguacgugagaagcgccaagcugagaauggugaccggccugagaaacauccccagcauccagagcagaggccuguucggcgccaucgccggcuucaucgagggcggcuggaccggcaugguggacggcugguacggcuaccaccaccagaacgagcagggcagcggcuacgccgccgaccagaagagcacccagaacgccaucaacggcaucaccaacaaggugaacagcgugaucgagaagaugaacacccaguucaccgccgugggcaaggaguucaacaagcuggagagaagaauggagaaccugaacaagaagguggacgacggcuucaucgacaucuggaccuacaacgccgagcugcuggugcugcuggagaacgagagaacccuggacuuccacgacagcaacgugaagaaccuguacgagaaggugaagagccagcugaagaacaacgccaaggagaucggcaacggcugcuucgaguucuaccacaagugcaacgacgagugcauggagagcgugaagaacggcaccuacgacuaccccaaguacagcgaggagagcaagcugaacagagagaagaucgacggcgugacccuggagagcaugggcguguaccagauccuggccaucuacagcaccguggccagcagccuggugcugcuggugagccugggcgccaucagcuucuggaugugcagcaacggcagccugcagugcagaaucugcaucuga

SEQ ID NO: 164174 - RNA, 1698 nt, Artificial Sequence; identical to SEQ ID NO: 162548
  derived and/or modified CDS sequence (opt4) from hemagglutinin__InfluenzaA__ADC45846

SEQ ID NO: 164175 - RNA, 1701 nt, Artificial Sequence; identical to SEQ ID NO: 162729
  derived and/or modified CDS sequence (opt4) from hemagglutinin__InfluenzaA__ADC53558

SEQ ID NO: 164176 - RNA, 1701 nt, Artificial Sequence; identical to SEQ ID NO: 162820
  derived and/or modified CDS sequence (opt4) from hemagglutinin__InfluenzaA__ADD14087

SEQ ID NO: 164177 - RNA, 1701 nt, Artificial Sequence; identical to SEQ ID NO: 162729
  derived and/or modified CDS sequence (opt4) from hemagglutinin__InfluenzaA__ADD14089

SEQ ID NO: 164178 - RNA, 1701 nt, Artificial Sequence; identical to SEQ ID NO: 162729
  derived and/or modified CDS sequence (opt4) from hemagglutinin__InfluenzaA__ADD14093

SEQ ID NO: 164179 - RNA, 1701 nt, Artificial Sequence
  derived and/or modified CDS sequence (opt4) from hemagglutinin__InfluenzaA__ADD14095
augaaggccauccugguggugcugcuguacaccuucgccaccgccaacgccgacacccugugcaucggcuaccacgccaacaacagcaccgacaccguggacaccgugcuggagaagaacgugaccgugacccacagcgugaaccugcuggaggacaagcacaacggcaagcugugcaagcugagaggcguggccccccugcaccugggcaagugcaacaucgccggcuggauccugggcaaccccgagugcgagagccugagcaccgccagcagcuggagcuacaucguggagaccagcagcagcgacaacggcaccugcuaccccggcgacuucaucgacuacgaggagcugagagagcagcugagcagcgugagcagcuucgagagauucgagaucuuccccaagaccagcagcuggcccaaccacgacagcaacaagggcgugaccgccgccugcccccacgccggcgccaagagcuucuacaagaaccugaucuggcuggugaagaagggcaacagcuaccccaagcugagcaagagcuacaucaacgacaagggcaaggaggugcuggugcuguggggcauccaccaccccagcaccagcgccgaccagcagagccuguaccagaacgccgacgccuacguguucgugggcaccagcagauacagcaagaaguucaagcccgagaucgccaucagacccaaggugagagaccaggagggcagaaugaacuacuacuggacccugguggagcccggcgacaagaucaccuucgaggccaccggcaaccuggugcugcccagauacgccuucgccauggagagaaacgccggcagcggcaucaucaucagcgacacccccgugcacgacugcaacaccaccugccagacccccaagggcgccaucaacaccagccugcccuuccagaacauccaccccaucaccaucggcaagugccccaaguacgugaagagcaccaagcugagacuggccaccggccugagaaacgugcccagcauccagagcagaggccuguucggcgccaucgccggcuucaucgagggcggcuggaccggcaugguggacggcugguacggcuaccaccaccagaacgagcagggcagcggcuacgccgccgaccugaagagcacccagaacgccaucgacgagaucaccaacaaggugaacagcgugaucgagaagaugaacacccaguucaccgccgugggcaaggaguucaaccaccuggagaagagaaucgagaaccugaacaagaagguggacgacggcuuccuggacaucuggaccuacaacgccgagcugcuggugcugcuggagaacgagagaacccuggacuaccacgacagcaacgugaagaaccuguacgagaaggugagaagccagcugaagaacaacgccaaggagaucggcaacggcugcuucgaguucuaccacaagugcgacaacaccugcauggagagcgugaagaacggcaccuacgacuaccccaaguacagcgaggaggccaagcugaacagagaggagaucgacggcgugaagcuggagagcaccagaaucuaccagauccuggccaucuacagcaccguggccagcagccuggugcugguggugagccugggcgccaucagcuucuggaugugcagcaacggcagccugcagugcagaaucugcaucuga

SEQ ID NO: 164180 - RNA, 1701 nt, Artificial Sequence; identical to SEQ ID NO: 162729
  derived and/or modified CDS sequence (opt4) from hemagglutinin__InfluenzaA__ADD14097

SEQ ID NO: 164181 - RNA, 1701 nt, Artificial Sequence; identical to SEQ ID NO: 162729
  derived and/or modified CDS sequence (opt4) from hemagglutinin__InfluenzaA__ADD14099

SEQ ID NO: 164182 - RNA, 1701 nt, Artificial Sequence; identical to SEQ ID NO: 162729
  derived and/or modified CDS sequence (opt4) from hemagglutinin__InfluenzaA__ADD14101

SEQ ID NO: 164183 - RNA, 1701 nt, Artificial Sequence
  derived and/or modified CDS sequence (opt4) from hemagglutinin__InfluenzaA__ADD14103
augaaggccauccugguggugcugcugugcaccuucgccaccgccaacgccgacacccugugcaucggcuaccacgccaacaacagcaccgacaccguggacaccgugcuggagaagaacgugaccgugacccacagcgugaaccugcuggaggacaagcacaacggcaagcugugcaagcugagaggcguggccccccugcaccugggcaagugcaacaucgccggcuggauccugggcaaccccgagugcgagagccugagcaccgccagcagcuggagcuacaucguggagaccagcagcagcgacaacggcaccugcuaccccggcgacuucaucgacuacgaggagcugagagagcagcugagcagcgugagcagcuucgagagauucgagaucuuccccaagaccagcagcuggcccaaccacgacagcaacaagggcgugaccgccgccugcccccacgccggcgccaagagcuucuacaagaaccugaucuggcuggugaagaagggcaacagcuaccccaagcugagcaagagcuacaucaacgacaagggcaaggaggugcuggugcuguggggcauccaccaccccagcaccagcgccgaccagcagagccuguaccagaacgccgacgccuacguguucgugggcaccagcagauacagcaagaaguucaagcccgagaucgccaucagacccaaggugagagaccaggagggcagaaugaacuacuacuggacccugguggagcccggcgacaagaucaccuucgaggccaccggcaaccugguggugcccagauacgccuucgccauggagagaaacgccggcagcggcaucaucaucagcgacacccccgugcacgacugcaacaccaccugccagacccccaagggcgccaucaacaccagccugcccuuccagaacauccaccccaucaccaucggcaagugccccaaguacgugaagagcaccaagcugagacuggccaccggccugagaaacgugcccagcauccagagcagaggccuguucggcgccaucgccggcuucaucgagggcggcuggaccggcaugguggacggcugguacggcuaccaccaccagaacgagcagggcagcggcuacgccgccgaccugaagagcacccagaacgccaucgacgagaucaccaacaaggugaacagcgugaucgagaagaugaacacccaguucaccgccgugggcaaggaguucaaccaccuggacaagagaaucgagaaccugaacaagaagaucgacgacggcuuccuggacaucuggaccuacaacgccgagcugcuggugcugcuggagaacgagagaacccuggacuaccacgacagcaacgugaagaaccuguacgagaaggugagaagccagcugaagaacaacgccaaggagaucggcaacggcugcuucgaguucuaccacaagugcgacaacaccugcauggagagcgugaagaacggcaccuacgacuaccccaaguacagcgaggaggccaagcugaacagagaggagaucgacggcgugaagcuggagagcaccagaaucuaccagauccuggccaucuacagcaccguggccagcagccuggugcugguggugagccugggcgccaucagcuucuggaugugcagcaacggcagccugcagugcagaaucugcaucuga

SEQ ID NO: 164184 - RNA, 1701 nt, Artificial Sequence
  derived and/or modified CDS sequence (opt4) from hemagglutinin__InfluenzaA__ADD14111
augaaggccauccugguggugcugcuguacaccuucgccaccgccaacgccgacacccugugcaucggcuaccacgccaacaacagcaccgacaccguggacaccgugcuggagaagaacgugaccgugacccacagcgugaaccugcuggaggacaagcacaacggcaagcugugcaagcugagaggcguggccccccugcaccugggcaagugcaacaucgccggcuggauccugggcaaccccgagugcgagagccugagcaccgccagcagcuggagcuacaucguggagaucagcagcagcgacaacggcaccugcuaccccggcgacuucaucgacuacgaggagcugagagagcagcugagcagcgugagcagcuucgagagauucgagaucuuccccaagaccagcagcuggcccaaccacgacagcaacaagggcgugaccgccgccugcccccacgccggcgccaagagcuucuacaagaaccugaucuggcuggugaagaagggcaacagcuaccccaagcugagcaagagcuacaucaacgacaagggcaaggaggugcuggugcuguggggcauccaccaccccagcaccagcgccgaccagcagagccuguaccagaacgccgacgccuacguguucgugggcaccagcagauacagcaagaaguucaagcccgagaucgccaucagacccaaggugagagaccaggagggcagaaugaacuacuacuggacccugguggagcccggcgacaagaucaccuucgaggccaccggcaaccugguggugcccagauacgccuucgccauggagagaaacgccggcagcggcaucaucaucagcgacacccccgugcacgacugcaacaccaccugccagacccccaagggcgccaucaacaccagccugcccuuccagaacauccaccccaucaccaucggcaagugccccaaguacgugaagagcaccaagcugagacuggccaccggccugagaaacgugcccagcauccagagcagaggccuguucggcgccaucgccggcuucaucgagggcggcuggaccggcaugguggacggcugguacggcuaccaccaccagaacgagcagggcagcggcuacgccgccgaccugaagagcacccagaacgccaucgacgagaucaccaacaaggugaacagcgugaucgagaagaugaacacccaguucaccgccgugggcaaggaguucaaccaccuggagaagagaaucgagaaccugaacaagaagguggacgacggcuuccuggacaucuggaccuacaacgccgagcugcuggugcugcuggagaacgagagaacccuggacuaccacgacagcaacgugaagaaccuguacgagaaggugagaagccagcugaagaacaacgccaaggagaucggcaacggcugcuucgaguucuaccacaagugcgacaacaccugcauggagagcgugaagaacggcaccuacgacuaccccaaguacagcgaggaggccaagcugaacagagaggagaucgacggcgugaagcuggagagcaccagaaucuaccagauccuggccaucuacagcaccguggccagcagccuggugcugguggugagccugggcgccaucagcuucuggaugugcagcaacggcagccugcagugcagaaucugcaucuga

SEQ ID NO: 164185 - RNA, 1701 nt, Artificial Sequence; identical to SEQ ID NO: 162729
  derived and/or modified CDS sequence (opt4) from hemagglutinin__InfluenzaA__ADD14115

SEQ ID NO: 164186 - RNA, 1701 nt, Artificial Sequence; identical to SEQ ID NO: 162729
  derived and/or modified CDS sequence (opt4) from hemagglutinin__InfluenzaA__ADD14117

SEQ ID NO: 164187 - RNA, 1701 nt, Artificial Sequence; identical to SEQ ID NO: 162729
  derived and/or modified CDS sequence (opt4) from hemagglutinin__InfluenzaA__ADD14119

SEQ ID NO: 164188 - RNA, 1701 nt, Artificial Sequence; identical to SEQ ID NO: 162729
  derived and/or modified CDS sequence (opt4) from hemagglutinin__InfluenzaA__ADD14121

SEQ ID NO: 164189 - RNA, 1701 nt, Artificial Sequence; identical to SEQ ID NO: 162729
  derived and/or modified CDS sequence (opt4) from hemagglutinin__InfluenzaA__ADD14123

SEQ ID NO: 164190 - RNA, 1701 nt, Artificial Sequence; identical to SEQ ID NO: 162729
  derived and/or modified CDS sequence (opt4) from hemagglutinin__InfluenzaA__ADD14127

SEQ ID NO: 164191 - RNA, 1701 nt, Artificial Sequence
  derived and/or modified CDS sequence (opt4) from hemagglutinin__InfluenzaA__ADD14129
augaaggccauccugguggugcugcuguacaccuucgccaccgccaacgccgacacccugugcaucggcuaccacgccaacaacagcaccgacaccguggacaccgugcuggagaagaacgugaccgugacccacagcgugaaccugcuggaggacaagcacaacggcaagcugugcaagcugagaggcguggccagccugcaccugggcaagugcaacaucgccggcuggauccugggcaaccccgagugcgagagccugagcaccgccagcagcuggagcuacaucguggagaccagcagcagcgacaacggcaccugcuaccccggcgacuucaucgacuacgaggagcugagagagcagcugagcagcgugagcagcuucgagagauucgagaucuuccccaagaccagcagcuggcccaaccacgacagcaacaagggcgugaccgccgccugcccccacgccggcgccaagagcuucuacaagaaccugaucuggcuggugaagaagggcaacagcuaccccaagcugagcaagagcuacaucaacgacaagggcaaggaggugcuggugcuguggggcauccaccaccccagcaccagcgccgaccagcagagccuguaccagaacgccgacgccuacguguucgugggcaccagcagauacagcaagaaguucaagcccgagaucgccaucagacccaaggugagagaccaggagggcagaaugaacuacuacuggacccugguggagcccggcgacaagaucaccuucgaggccaccggcaaccugguggugcccagauacgccuucgccauggagagaaacgccggcagcggcaucaucaucagcgacacccccgugcacgacugcaacaccaccugccagacccccaagggcgccaucaacaccagccugcccuuccagaacauccaccccaucaccaucggcaagugccccaaguacgugaagagcaccaagcugagacuggccaccggccugagaaacgugcccagcauccagagcagaggccuguucggcgccaucgccggcuucaucgagggcggcuggaccggcaugguggacggcugguacggcuaccaccaccagaacgagcagggcagcggcuacgccgccgaccugaagagcacccagaacgccaucgacgagaucaccaacaaggugaacagcgugaucgagaagaugaacacccaguucaccgccgugggcaaggaguucaaccaccuggagaagagaaucgagaaccugaacaagaagguggacgacggcuuccuggacaucuggaccuacaacgccgagcugcuggugcugcuggagaacgagagaacccuggacuaccacgacagcaacgugaagaaccuguacgagaaggugagaagccagcugaagaacaacgccaaggagaucggcaacggcugcuucgaguucuaccacaagugcgacaacaccugcauggagagcgugaagaacggcaccuacgacuaccccaaguacagcgaggaggccaagcugaacagagaggagaucgacggcgugaagcuggagagcaccagaaucuaccagauccuggccaucuacagcaccguggccagcagccuggugcugguggugagccugggcgccaucagcuucuggaugugcagcaacggcagccugcagugcagaaucugcaucuga

SEQ ID NO: 164192 - RNA, 1701 nt, Artificial Sequence
  derived and/or modified CDS sequence (opt4) from hemagglutinin__InfluenzaA__ADD14133
augaaggccauccugguggugcugcuguacaccuucgccaccgccaacgccgacacccugugcaucggcuaccacgccaacaacagcaccgacaccguggacaccgugcuggagaagaacgugaccgugacccacagcgugaaccugcuggaggacaagcacaacggcaagcugugcaagcugagaggcguggccccccugcaccugggcaagugcaacaucgccggcuggauccugggcaaccccgagugcgagagccugagcaccgccagcagcuggagcuacaucguggagaccagcagcagcgacaacggcaccugcuaccccggcgacuucaucgacuacgaggagcugagagagcagcugagcagcgugagcagcuucgagagauucgagaucuuccccaagaccagcagcuggcccaaccacgacagcaacaagggcgugaccgccgccugcccccacgccggcgccaagagcuucuacaagaaccugaucuggcuggugaagaagggcaacagcuaccccaagcugagcaagagcuacaucaacgacaagggcaaggaggugcuggugcuguggggcauccaccaccccagcaccagcgccgaccagcagagccuguaccagaacguggacgccuacguguucgugggcaccagcagauacagcaagaaguucaagcccgagaucgccaucagacccaaggugagagaccaggagggcagaaugaacuacuacuggacccugguggagcccggcgacaagaucaccuucgaggccaccggcaaccugguggugcccagauacgccuucgccauggagagaaacgccggcuucggcaucaucaucagcgacacccccgugcacgacugcaacaccaccugccagacccccaagggcgccaucaacaccagccugcccuuccagaacauccaccccaucaccaucggcaagugccccaaguacgugaagagcaccaagcugagacuggccaccggccugagaaacgugcccagcauccagagcagaggccuguucggcgccaucgccggcuucaucgagggcggcuggaccggcaugguggacggcugguacggcuaccaccaccagaacgagcagggcagcggcuacgccgccgaccugaagagcacccagaacgccaucgacgagaucaccaacaaggugaacagcgugaucgagaagaugaacacccaguucaccgccgugggcaaggaguucaaccaccuggagaagagaaucgagaaccugaacaagaagguggacgacggcuuccuggacaucuggaccuacaacgccgagcugcuggugcugcuggagaacgagagaacccuggacuaccacgacagcaacgugaagaaccuguacgagaaggugagaagccagcugaagaacaacgccaaggagaucggcaacggcugcuucgaguucuaccacaagugcgacaacaccugcauggagagcgugaagaacggcaccuacgacuaccccaaguacagcgaggaggccaagcugaacagagaggagaucgacggcgugaagcuggagagcaccagaaucuaccagauccuggccaucuacagcaccguggccagcagccuggugcugguggugagccugggcgccaucagcuucuggaugugcagcaacggcagccugcagugcagaaucugcaucuga

SEQ ID NO: 164193 - RNA, 1701 nt, Artificial Sequence; identical to SEQ ID NO: 162820
  derived and/or modified CDS sequence (opt4) from hemagglutinin__InfluenzaA__ADD14135

SEQ ID NO: 164194 - RNA, 1701 nt, Artificial Sequence; identical to SEQ ID NO: 162729
  derived and/or modified CDS sequence (opt4) from hemagglutinin__InfluenzaA__ADD14137

SEQ ID NO: 164195 - RNA, 1701 nt, Artificial Sequence; identical to SEQ ID NO: 163477
  derived and/or modified CDS sequence (opt4) from hemagglutinin__InfluenzaA__ADD14139

SEQ ID NO: 164196 - RNA, 1701 nt, Artificial Sequence; identical to SEQ ID NO: 162729
  derived and/or modified CDS sequence (opt4) from hemagglutinin__InfluenzaA__ADD14143

SEQ ID NO: 164197 - RNA, 1701 nt, Artificial Sequence; identical to SEQ ID NO: 162729
  derived and/or modified CDS sequence (opt4) from hemagglutinin__InfluenzaA__ADD14145

SEQ ID NO: 164198 - RNA, 1701 nt, Artificial Sequence; identical to SEQ ID NO: 162729
  derived and/or modified CDS sequence (opt4) from hemagglutinin__InfluenzaA__ADD14147

SEQ ID NO: 164199 - RNA, 1701 nt, Artificial Sequence
  derived and/or modified CDS sequence (opt4) from hemagglutinin__InfluenzaA__ADD14151
augaaggccauccugguggugcugcuguacaccuucgccaccgccaacgccgacacccugugcaucggcuaccacgccaacaacagcaccgacaccguggacaccgugcuggagaagaacgugaccgugacccacagcgugaaccugcuggaggacaagcacaacggcaagcugugcaagcugagaggcguggccccccugcaccugggcaagugcaacaucgccggcuggauccugggcaaccccgagugcgagagccugagcaccgccagcagcuggagcuacaucguggagaccagcagcagcgacaacggcaccugcuaccccggcgacuucaucgacuacgaggagcugagagagcagcugagcagcgugagcagcuucgagagauucgagaucuuccccaagaccagcagcuggcccaaccacgacagcaacaagggcgugaccgccgccugccccagagccggcgccaagagcuucuacaagaaccugaucuggcuggugaagaagggcaacagcuaccccaagcugagcaagagcuacaucaacgacaagggcaaggaggugcuggugcuguggggcauccaccaccccagcaccagcgccgaccagcagagccuguaccagaacgccgacgccuacguguucgugggcaccagcagauacagcaagaaguucaagcccgagaucgccaucagacccaaggugagagaccaggagggcagaaugaacuacuacuggacccugguggagcccggcgacaagaucaccuucgaggccaccggcaaccugguggugcccagauacgccuucgccauggagagaaacgccggcagcggcaucaucaucagcgacacccccgugcacgacugcaacaccaccugccagacccccaagggcgccaucaacaccagccugcccuuccagaacauccaccccaucaccaucggcaagugccccaaguacgugaagagcaccaagcugagacuggccaccggccugagaaacgugcccagcauccagagcagaggccuguucggcgccaucgccggcuucaucgagggcggcuggaccggcaugguggacggcugguacggcuaccaccaccagaacgagcagggcagcggcuacgccgccgaccugaagagcacccagaacgccaucgacaagaucaccaacaaggugaacagcgugaucgagaagaugaacacccaguucaccgccgugggcaaggaguucaaccaccuggagaagagaaucgagaaccugaacaagaagguggacgacggcuuccuggacaucuggaccuacaacgccgagcugcuggugcugcuggagaacgagagaacccuggacuaccacgacagcaacgugaagaaccuguacgagaaggugagaagccagcugaagaacaacgccaaggagaucggcaacggcugcuucgaguucuaccacaagugcgacaacaccugcauggagagcgugaagaacggcaccuacgacuaccccaaguacagcgaggaggccaagcugaacagagaggagaucgacggcgugaagcuggagagcaccagaaucuaccagauccuggccaucuacagcaccguggccagcagccuggugcugguggugagccugggcgccaucagcuucuggaugugcagcaacggcagccugcagugcagaaucugcaucuga

SEQ ID NO: 164200 - RNA, 1701 nt, Artificial Sequence; identical to SEQ ID NO: 162729
  derived and/or modified CDS sequence (opt4) from hemagglutinin__InfluenzaA__ADD14153

SEQ ID NO: 164201 - RNA, 1701 nt, Artificial Sequence; identical to SEQ ID NO: 162729
  derived and/or modified CDS sequence (opt4) from hemagglutinin__InfluenzaA__ADD14155

SEQ ID NO: 164202 - RNA, 1701 nt, Artificial Sequence; identical to SEQ ID NO: 162729
  derived and/or modified CDS sequence (opt4) from hemagglutinin__InfluenzaA__ADD14157

SEQ ID NO: 164203 - RNA, 1701 nt, Artificial Sequence; identical to SEQ ID NO: 162729
  derived and/or modified CDS sequence (opt4) from hemagglutinin__InfluenzaA__ADD14162

SEQ ID NO: 164204 - RNA, 1701 nt, Artificial Sequence; identical to SEQ ID NO: 162729
  derived and/or modified CDS sequence (opt4) from hemagglutinin__InfluenzaA__ADD14172

SEQ ID NO: 164205 - RNA, 1701 nt, Artificial Sequence; identical to SEQ ID NO: 162729
  derived and/or modified CDS sequence (opt4) from hemagglutinin__InfluenzaA__ADD14182

SEQ ID NO: 164206 - RNA, 1701 nt, Artificial Sequence; identical to SEQ ID NO: 162729
  derived and/or modified CDS sequence (opt4) from hemagglutinin__InfluenzaA__ADD14192

SEQ ID NO: 164207 - RNA, 1701 nt, Artificial Sequence; identical to SEQ ID NO: 162729
  derived and/or modified CDS sequence (opt4) from hemagglutinin__InfluenzaA__ADD14202

SEQ ID NO: 164208 - RNA, 1701 nt, Artificial Sequence
  derived and/or modified CDS sequence (opt4) from hemagglutinin__InfluenzaA__ADD21447
augaaggccauccugguguuccugcuguacaccuucgccaccgccaacgccgacacccugugcaucggcuaccacgccaacaacagcaccgacaccguggacaccgugcuggagaagaacgugaccgugacccacagcgugaaccugcuggaggacagacacaacggcaagcugugcaagcugagaggcguggccccccugcaccugggcaagugcaacaucgccggcuggcugcugggcaaccccgagugcgagcugcuguucaccgccagcagcuggagcuacaucguggagaccagcaacagcgacaacggcaccugcuaccccggcgacuucaucaacuacgaggagcugagagagcagcugagcagcgugagcagcuucgagagauucgagauguuccccaagagcagcagcuggcccaaccacgagaccaacagaggcgugaccgccgccugccccuacgccggcgccaacagcuucuacagaaaccugaucuggcuggugaagaaggagaacagcuaccccaagcugagcaagagcuacaucaacaacaaggagaaggaggugcuggugcuguggggcauccaccacccccccaccagcgccgaccagcagagccuguaccagaacgccgacgccuacguguucgugggcagcagcaaguacaacaagaaguucagacccgagaucgccgccagacccaaggugagaggccagaccggcagaaugaacuacuacuggacccugguggagcccggcgacaccaucaccuucgaggccaccgagaaccugguggugcccagauacgccuucgccaugaagagaggcagcggcagcggcaucaucaucagcgacacccccgugcacgacugcaacaccaccugccagacccccaagggcgccaucaacaccagccugcccuuccagaacauccaccccgugaccaucggcgagugccccaaguacgugaagagcaccaaccugagaauggccaccggccugagaaacauccccagcauccagagcagaggccuguucggcgccaucgccggcuucaucgagggcggcuggaccggcaugaucgacggcugguacggcuaccaccaccagaacgagcagggcagcggcuacgccgccgacagaaagagcacccagaacgccaucgacggcaucaccaacaaggugaacagcgugaucgagaagaugaacacccaguucaccgccgugggcaaggaguucaaccaccuggagaagagaaucgagaaccugaacaagaagguggacgacggccugcuggacguguggaccuacaacgccgagcugcuggugcugcuggagaacgagagaacccuggacuaccacgacagcaacgugaagaaccuguacgagaaggugagaagccagcugaagaacaacgccaaggagaucggcaacggcugcuucgaguucuaccacaagugcgacgacaccugcauggagagcgugagaaacggcgccuacgacuaccccaaguacagcgaggaggccaagcugaacagagaggagaucgacggcgugaagcuggagagcaccagaaucuaccagauccuggccaucuacagcaccguggccagcagccuggugcugcuggugagccugggcgccaucagcuucuggaugugcagcaacggcagccugcagugcagaaucugcaucuga

SEQ ID NO: 164209 - RNA, 1701 nt, Artificial Sequence
  derived and/or modified CDS sequence (opt4) from hemagglutinin__InfluenzaA__ADD21457
augaaggccauccugguguuccugcuguacaccuucgccaccgccaacgccgacacccugugcaucggcuaccacgccaacaacagcaccgacaccguggacaccgugcuggagaagaacgugaccgugacccacagcgugaaccugcuggaggacagacacaacggcaagcugugcaagcugagaggcguggccccccugcaccugggcaagugcaacaucgccggcuggcugcugggcaaccccgagugcgagcugcuguucaccgccagcagcuggagcuacaucguggagaccagcaacagcgacaacggcaccugcuaccccggcgacuucaucaacuacgaggagcugagagagcagcugagcagcgugagcagcuucgagagauucgagauguuccccaagagcagcagcuggcccaaccacgagaccaacagaggcgugaccgccgccugccccuacgccggcgccaacagcuucuacagaaaccugaucuggcuggugaagaaggagaacagcuaccccaagcugagcaagagcuacaucaacaacaaggagaaggaggugcuggugcuguggggcauccaccacccccccaccagcgccgaccagcagagccuguaccagaacgccgacgccuacguguucgugggcagcagcaaguacaacaagaaguucagacccgagaucgccgccagacccaaggugagaggccagaccggcagaaugaacuacuacuggacccugguggagcccggcgacaccaucaccuucgaggccaccggcaaccugguggugcccagauacgccuucgccaugaagagaggcagcggcagcggcaucaucaucagcgacacccccgugcacgacugcaacaccaccugccagacccccaagggcgccgugaacaccagccugcccuuccagaacauccaccccgugaccaucggcgagugccccaaguacgugaagagcaccaaccugagaauggccaccggccugagaaacauccccagcauccagagcagaggccuguucggcgccaucgccggcuucaucgagggcggcuggaccggcaugaucgacggcugguacggcuaccaccaccagaacgagcagggcagcggcuacgccgccgacagaaagagcacccagaacgccaucgacggcaucaccaacaaggugaacagcgugaucgagaagaugaacacccaguucaccgccgugggcaaggaguucaaccaccuggagaagagaaucgagaaccugaacaagaagguggacgacggccugcuggacguguggaccuacaacgccgagcugcuggugcugcuggagaacgagagaacccuggacuaccacgacagcaacgugaagaaccuguacgagaaggugagaagccagcugaagaacaacgccaaggagaucggcaacggcugcuucgaguucuaccacaagugcgacgacaccugcauggagagcgugagaaacggcaccuacgacuaccccaaguacagcgaggaggccaagcugaacagagaggagaucgacggcgugaagcuggagagcaccagaaucuaccagauccuggccaucuacagcaccguggccagcagccuggugcugcuggugagccugggcgccaucagcuucuggaugugcagcaacggcagccugcagugcagaaucugcaucuga

SEQ ID NO: 164210 - RNA, 1698 nt, Artificial Sequence
  derived and/or modified CDS sequence (opt4) from hemagglutinin__InfluenzaA__ADD21467
augaaggccaagcugcuggugcugcugugcaccuucaccgccaccuacgccgacaccaucugcaucggcuaccacgccaacaacagcaccgacaccguggacaccgugcuggagaagaacgugaccgugacccacagcgugaaccugcuggaggacagccacaacggcaagcugugccugcugaagggcaucgccccccugcagcugggcaacugcagcguggccggcuggauccugggcaaccccgagugcgagcugcugaucagcaaggagagcuggagcuacaucguggagacccccaaccccgagaacggcaccugcuaccccggcuacuucgccgacuacgaggagcugagagagcagcugagcagcgugagcagcuucgagagauucgagaucuuccccaaggagagcagcuggcccaaccacaccgugaccggcgugagcgccagcugcagccacaacggcaagagcagcuucuacagaaaccugcuguggcugaccggcaagaacggccuguaccccaaccugagcaagagcuacgccaacaacaaggagaaggaggugcuggugcuguggggcgugcaccacccccccaacaucagagaccagagagcccuguaccacaccgagaacgccuacgugagcguggugagcagccacuacagcagaagauucacccccgagaucgccaagagacccaaggugagaggccaggagggcagaaucaacuacuacuggacccugcuggagcccggcgacaccaucaucuucgaggccaacggcaaccugaucgcccccugguacgccuucgcccugagcagaggcuucggcagcggcaucaucaccagcaacgcccccauggacgagugcgacgccaagugccagaccccccagggcgccaucaacagcagccugcccuuccagaacgugcaccccgugaccaucggcgagugccccaaguacgccagaagcgccaagcugagaauggugaccggccugagaaacauccccagcauccagagcagaggccuguucggcgccaucgccggcuucaucgagggcggcuggaccggcaugguggacggcugguacggcuaccaccaccagaacgagcagggcagcggcuacgccgccgaccagaagagcacccagaacgccaucaacggcaucaccaacaaggugaacagcgugaucgagaagaugaacacccaguucaccgccgugggcaaggaguucaacaagcuggagagaagaauggagaaccugaacaagaagguggacgacggcuuccuggacaucuggaccuacaacgccgagcugcuggugcugcuggagaacgagagaacccuggacuuccacgacagcaacgugaagaaccuguacgagaaggugaagagccagcugaagaacaacgccaaggagaucggcaacggcugcuucgaguucuaccacaagugcaacaacgagugcauggagagcgugaagaacggcaccuacgacuaccccaaguacagcgaggagagcaagcugaacagagagaagaucgacggcgugaagcuggagagcaugggcguguaccagauccuggccaucuacagcaccguggccagcagccuggugcugcuggugagccugggcgccaucagcuucuggaugugcagcaacggcagccugcagugcagaaucugcaucuga

SEQ ID NO: 164211 - RNA, 1701 nt, Artificial Sequence
  derived and/or modified CDS sequence (opt4) from hemagglutinin__InfluenzaA__ADD21560
augaagaccaucaucgccuucagccacauccugugccugaucuacgcccagaagcugcccggcagcgacaacagcauggccacccugugccugggccaccacgccgugcccaacggcacccuggugaagaccaucaccgacgaccagaucgaggugaccaacgccaccgagcuggugcagagcagcagcaccggcagaaucugcaacagcccccaccacauccuggacggcaagaacugcacccugaucgacgcccugcugggcgacccccacugcgacgacuuccagaacaaggagugggaccuguucguggagagaagcaccgccuacagcaacugcuaccccuacuacgugcccgacuacgccagccugagaagccugguggccagcagcggcacccuggaguucacccaggagagcuucaacuggaccggcgugacccaggacggcagcagcuacaccugcagaagaaagagcgugaacagcuucuucagcagacugaacuggcugcacaaccuggacuacaaguaccccgcccugaacgugaccaugcccaacaacgacaaguucgacaagcuguacaucuggggcgugcaccaccccggcaccgacagagaccagaccaaccuguacgugcaggccagcggcagagugaccgugagcaccaagagaagccagcagaccgugauccccaacaucggcagcagacccugggugagaggcgugagcagcaucaucagcaucuacuggaccaucgugaagcccggcgacauccugcugaucaacagcaccggcaaccugaucgcccccagaggcuacuucaagauccagagcggcaagagcagcaucaugagaagcgacgcccccaucggcaacugcaacagcgagugcaucacccccaacggcagcauccccaacgacaagcccuuccagaacgugaacagaaucaccuacggcgccugccccagauacgugaagcagaacacccugaagcuggccaccggcaugagaaacgugcccgagaagcagaccagaggcaucuucggcgccaucgccggcuucaucgagaacggcugggagggcaugguggacggcugguacggcuucagacaccagaacagcgagggcaccggccaggccgccgaccugaagagcacccaggccgccaucaaccagaucaccggcaagcugaacagagugaucaagaagaccaacgagaaguuccaccagaucgagaaggaguucagcgagguggagggcagaauccaggaccuggagaaguacguggaggacaccaagaucgaccuguggagcuacaacgccgagcugcugguggcccuggagaaccagcacaccaucgaccugaccgacagcgagaugaacaagcuguucgagagaaccagaaagcagcugagagagaacgccgaggacaugggcaacggcugcuucaagaucuaccacaagugcgacaacgccugcaucggcagcaucagaaacggcaccuacgaccacgacguguacagagacgaggcccugaacaacagauuccagaucaagagcgugcagcugaagagcggcuacaaggacuggauccuguggaucagcuucgccaugagcugcuuccugcugugcguggugcugcugggcuucaucauguggaccugccagaagggcaacaucaagugcaacaucugcaucuga

SEQ ID NO: 164212 - RNA, 1701 nt, Artificial Sequence; identical to SEQ ID NO: 162716
  derived and/or modified CDS sequence (opt4) from hemagglutinin__InfluenzaA__ADD21734

SEQ ID NO: 164213 - RNA, 1701 nt, Artificial Sequence; identical to SEQ ID NO: 162729
  derived and/or modified CDS sequence (opt4) from hemagglutinin__InfluenzaA__ADD21744

SEQ ID NO: 164214 - RNA, 1701 nt, Artificial Sequence
  derived and/or modified CDS sequence (opt4) from hemagglutinin__InfluenzaA__ADD21764
augaaggccauccugguggugcugcuguacaccuucgccaccgccaacgccgacacccugugcaucggcuaccacgccaacaacagcaccgacaccguggacaccgugcuggagaagaacgugaccgugacccacagcgugaaccugcuggaggacaagcacaacggcaagcugugcaagcugagaggcguggccccccugcaccugggcaagugcaacaucgccggcuggauccugggcaaccccgagugcgagagccugagcaccgccagcagcuggagcuacaucguggagaccagcagcagcgacaacggcaccugcuaccccggcgacuucaucgacuacgaggagcugagagagcagcugagcagcgugagcagcuucgagagauucgagaucuuccccaagaccagcagcuggcccaaccacgacagcaacaagggcgugaccgccgccugcccccacgccggcgccaagagcuucuacaagaaccugaucuggcuggugaagaagggcaacagcuaccccaagcugagcaagagcuacaucaacgacaagggcaaggaggugcuggugcuguggggcauccaccaccccagcaccagcgccgaccagcagagccuguaccagaacgccgacgccuacguguucgugggcaccagcagauacagcaagaaguucaagcccgagaucgccaucagacccaaggugagagaccaggagggcagaaugaacuacuacuggacccugguggagcccggcgacaagaucaccuucgaggccaccggcaaccugguggugcccagauacgccuucgccauggagagaaacgccgagagcggcaucaucaucagcgacacccccgugcacgacugcaacaccaccugccagacccccaagggcgccaucaacaccagccugcccuuccagaacauccaccccaucaccaucggcaagugccccaaguacgugaagagcaccaagcugagacuggccaccggccugagaaacgugcccagcauccagagcagaggccuguucggcgccaucgccggcuucaucgagggcggcuggaccggcaugguggacggcugguacggcuaccaccaccagaacgagcagggcagcggcuacgccgccgaccugaagagcacccagaacgccaucgacgagaucaccaacaaggugaacagcgugaucgagaagaugaacacccaguucaccgccgugggcaaggaguucaaccaccuggagaagagaaucgagaaccugaacaagaagguggacgacggcuuccuggacaucuggaccuacaacgccgagcugcuggugcugcuggagaacgagagaacccuggacuaccacgacagcaacgugaagaaccuguacgagaaggugagaagccagcugaagaacaacgccaaggagaucggcaacggcugcuucgaguucuaccacaagugcgacaacaccugcauggagagcgugaagaacggcaccuacgacuaccccaaguacagcgaggaggccaagcugaacagagaggagaucgacggcgugaagcuggagagcaccagaaucuaccagauccuggccaucuacagcaccguggccagcagccuggugcugguggugagccugggcgccaucagcuucuggaugugcagcaacggcagccugcagugcagaaucugcaucuga

SEQ ID NO: 164215 - RNA, 1701 nt, Artificial Sequence
  derived and/or modified CDS sequence (opt4) from hemagglutinin__InfluenzaA__ADD21774
augaaggccauccugguggugcugcuguacaccuucgccaccgccaacgccgacacccugugcaucggcuaccacgccaacaacagcaccgacaccguggacaccgugcuggagaagaacgugaccgugacccacagcgugaaccugcuggaggacaagcacaacggcaagcugugcaagcugagaggcguggccccccugcaccugggcaagugcaacaucgccggcuggauccugggcaaccccgagugcgagagccugagcaccgccagcagcuggagcuacaucguggagaccagcagcagcgacaacggcaccugcuaccccggcgacuucaucgacuacgaggagcugagagagcagcugagcagcgugagcagcuucgagagauucgagaucuuccccaagaccagcagcuggcccaaccacgacagcaacaagggcgugaccgccgccugcccccacgccggcgccaagagcuucuacaagaaccugaucuggcuggugaagaagggcaacagcuaccccaagcugagcaagagcuacaucaacgacaagggcaaggaggugcuggugcuguggggcauccaccaccccagcaccagcgccgaccagcagagccuguaccagaacgccgacgccuacguguucgugggcagcagcagauacagcaagaaguucaagcccgagaucgccaucagacccaaggugagagaccaggagggcagaaugaacuacuacuggacccugguggagcccggcgacaagaucaccuucgaggccaccggcaaccugguggugcccagauacgccuucgccauggagagaaacgccggcagcggcaucaucaucagcgacacccccgugcacgacugcaacaccaccugccagacccccaagggcgccaucaacaccagccugcccuuccagaacauccaccccaucaccaucggcaagugccccaaguacgugaagagcaccaagcugagacuggccaccggccugagaaacgugcccagcgugcagagcagaggccuguucggcgccaucgccggcuucaucgagggcggcuggaccggcaugguggacggcugguacggcuaccaccaccagaacgagcagggcagcggcuacgccgccgaccugaagagcacccagaacgccaucgacgagaucaccaacaaggugaacagcgugaucgagaagaugaacacccaguucaccgccgugggcaaggaguucaaccaccuggagaagagaaucgagaaccugaacaagaagguggacgacggcuuccuggacaucuggaccuacaacgccgagcugcuggugcugcuggagaacgagagaacccuggacuaccacgacagcaacgugaagaaccuguacgagaaggugagaagccagcugaagaacaacgccaaggagaucggcaacggcugcuucgaguucuaccacaagugcgacaacaccugcauggagagcgugaagaacggcaccuacgacuaccccaaguacagcgaggaggccaagcugaacagagaggagaucgacggcgugaagcuggagagcaccagaaucuaccagauccuggccaucuacagcaccguggccagcagccuggugcugguggugagccugggcgccaucagcuucuggaugugcagcaacggcagccugcagugcagaaucugcaucuga

SEQ ID NO: 164216 - RNA, 1701 nt, Artificial Sequence; identical to SEQ ID NO: 162729
  derived and/or modified CDS sequence (opt4) from hemagglutinin__InfluenzaA__ADD21784

SEQ ID NO: 164217 - RNA, 1701 nt, Artificial Sequence; identical to SEQ ID NO: 163889
  derived and/or modified CDS sequence (opt4) from hemagglutinin__InfluenzaA__ADD21794

SEQ ID NO: 164218 - RNA, 1701 nt, Artificial Sequence; identical to SEQ ID NO: 162729
  derived and/or modified CDS sequence (opt4) from hemagglutinin__InfluenzaA__ADD21804

SEQ ID NO: 164219 - RNA, 1701 nt, Artificial Sequence
  derived and/or modified CDS sequence (opt4) from hemagglutinin__InfluenzaA__ADD21814
augaaggccauccugguggugcugcuguacaccuucgccaccgccaacgccgacacccugugcaucggcuaccacgccaacaacagcaccgacaccguggacaccgugcuggagaagaacgugaccgugacccacagcgugaaccugcuggaggacaagcacaacggcaagcugugcaagcugagaggcguggccccccugcaccugggcaagugcaacaucgccagcuggauccugggcaaccccgagugcgagagccugagcaccgccagcagcuggagcuacaucguggagaccagcagcagcgacaacggcaccugcuaccccggcgacuucaucgacuacgaggagcugagagagcagcugagcagcgugagcagcuucgagagauucgagaucuuccccaagaccagcagcuggcccaaccacgacagcaacaagggcgugaccgccgccugcccccacgccggcgccaagagcuucuacaagaaccugaucuggcuggugaagaagggcaacagcuaccccaagcugagcaagagcuacaucaacgacaagggcaaggaggugcuggugcuguggggcauccaccaccccagcaccagcgccgaccagcagagccuguaccagaacgccgacgccuacguguucgugggcaccagcagauacagcaagaaguucaagcccgagaucgccaucagacccaaggugagagaccaggagggcagaaugaacuacuacuggacccugguggagcccggcgacaagaucaccuucgaggccaccggcaaccugguggugcccagauacgccuucgccauggagagaaacgccggcagcggcaucaucaucagcgacacccccgugcacgacugcaacaccaccugccagacccccaagggcgccaucaacaccagccugcccuuccagaacauccaccccaucaccaucggcaagugccccaaguacgugaagagcaccaagcugagacuggccaccggccugagaaacgugcccagcauccagagcagaggccuguucggcgccaucgccggcuucaucgagggcggcuggaccggcaugguggacggcugguacggcuaccaccaccagaacgagcagggcagcggcuacgccgccgaccugaagagcacccagaacgccaucgacgagaucaccaacaaggugaacagcgugaucgagaagaugaacacccaguucaccgccgugggcaaggaguucaaccaccuggagaagagaaucgagaaccugaacaagaagguggacgacggcuuccuggacaucuggaccuacaacgccgagcugcuggugcugcuggagaacgagagaacccuggacuaccacgacagcaacgugaagaaccuguacgagaaggugagaagccagcugaagaacaacgccaaggagaucggcaacggcugcuucgaguucuaccacaagugcgacaacaccugcauggagagcgugaagaacggcaccuacgacuaccccaaguacagcgaggaggccaagcugaacagagaggagaucgacggcgugaagcuggagagcaccagaaucuaccagauccuggccaucuacagcaccguggccagcagccuggugcugguggugagccugggcgccaucagcuucuggaugugcagcaacggcagccugcagugcagaaucugcaucuga

SEQ ID NO: 164220 - RNA, 1701 nt, Artificial Sequence; identical to SEQ ID NO: 163889
  derived and/or modified CDS sequence (opt4) from hemagglutinin__InfluenzaA__ADD21824

SEQ ID NO: 164221 - RNA, 1701 nt, Artificial Sequence; identical to SEQ ID NO: 163889
  derived and/or modified CDS sequence (opt4) from hemagglutinin__InfluenzaA__ADD21834

SEQ ID NO: 164222 - RNA, 1701 nt, Artificial Sequence; identical to SEQ ID NO: 163893
  derived and/or modified CDS sequence (opt4) from hemagglutinin__InfluenzaA__ADD21844

SEQ ID NO: 164223 - RNA, 1701 nt, Artificial Sequence; identical to SEQ ID NO: 163893
  derived and/or modified CDS sequence (opt4) from hemagglutinin__InfluenzaA__ADD21854

SEQ ID NO: 164224 - RNA, 1701 nt, Artificial Sequence; identical to SEQ ID NO: 163831
  derived and/or modified CDS sequence (opt4) from hemagglutinin__InfluenzaA__ADD21864

SEQ ID NO: 164225 - RNA, 1701 nt, Artificial Sequence
  derived and/or modified CDS sequence (opt4) from hemagglutinin__InfluenzaA__ADD21884
augaaggccauccugguggugcugcuguacaccuucgccaccgccaacgccgacacccugugcaucggcuaccacgccaacaacagcaccgacaccguggacaccgugcuggagaagaacgugaccgugacccacagcgugaaccugcuggaggacaagcacaacggcaagcugugcaagcugagaggcguggccccccugcaccugggcaagugcaacaucgccggcuggauccugggcaaccccgagugcgagagccugagcaccgccagcagcuggagcuacaucguggagaccagcagcagcggcaacggcaccugcuaccccggcgacuucaucgacuacgaggagcugagagagcagcugagcagcgugagcagcuucgagagauucgagaucuuccccaagaccagcagcuggcccaaccacgacagcaacaagggcgugaccgccgccugcccccacgccggcgccaagagcuucuacaagaaccugaucuggcuggugaagaagggcaacagcuaccccaagcugagcaagagcuacaucaacgacaagggcaaggaggugcuggugcuguggggcauccaccaccccagcaccagcgccgaccagcagagccuguaccagaacgccgacgccuacguguucgugggcaccagcagauacagcaagaaguucaagcccgagaucgccaucagacccaaggugagagaccaggagggcagaaugaacuacuacuggacccugguggagcccggcgacaagaucaccuucgaggccaccggcaaccugguggugcccagauacgccuucgccauggagagaaacgccggcagcggcaucaucaucagcgacacccccgugcacgacugcaacaccaccugccagacccccaagggcgccaucaacaccagccugcccuuccagaacauccaccccaucaccaucggcaagugccccaaguacgugaagagcaccaagcugagacuggccaccggccugagaaacgugcccagcauccagagcagaggccuguucggcgccaucgccggcuucaucgagggcggcuggaccggcaugguggacggcugguacggcuaccaccaccagaacgagcagggcagcggcuacgccgccgaccugaagagcacccagaacgccaucgacgagaucaccaacaaggugaacagcgugaucgagaagaugaacacccaguucaccgccgugggcaaggaguucaaccaccuggagaagagaaucgagaaccugaacaagaagguggacgacggcuuccuggacaucuggaccuacaacgccgagcugcuggugcugcuggagaacgagagaacccuggacuaccacgacagcaacgugaagaaccuguacgagaaggugagaagccagcugaagaacaacgccaaggagaucggcaacggcugcuucgaguucuaccacaagugcgacaacaccugcaugggcagcgugaagaacggcaccuacgacuaccccaaguacagcgaggaggccaagcugaacagagaggagaucgacggcgugaagcuggagagcaccagaaucuaccagauccuggccaucuacagcaccguggccagcagccuggugcugguggugagccugggcgccaucagcuucuggaugugcagcaacggcagccugcagugcagaaucugcaucuga

SEQ ID NO: 164226 - RNA, 1701 nt, Artificial Sequence; identical to SEQ ID NO: 163831
  derived and/or modified CDS sequence (opt4) from hemagglutinin__InfluenzaA__ADD21894

SEQ ID NO: 164227 - RNA, 1701 nt, Artificial Sequence
  derived and/or modified CDS sequence (opt4) from hemagglutinin__InfluenzaA__ADD22501
augaaggccauccugguggugcugcuguacaccuucgccaccgccaacgccgacacccugugcaucggcuaccacgccaacaacagcaccgacaccguggacaccgugcuggagaagaacgugaccgugacccacagcgugaaccugcuggaggacaagcacaacggcaagcugugcaagcugagaggcguggccccccugcaccugggcaagugcaacaucgccggcuggauccugggcaaccccgagugcgagagccugagcaccgccagcagcuggagcuacaucguggagaccagcagcagcgacaacggcaccugcuaccccggcgacuucaucgacuacgaggagcugagagagcagcugagcagcgugagcagcuucgagagauucgagaucuuccccaagaccagcagcuggcccaaccacgacagcaacaagggcgugaccgccgccugcccccacgccggcgccaagagcuucuacaagaaccugaucuggcuggugaagaagggcaacagcuaccccaagcugagcaagagcuacaucaacgacaagggcaaggaggugcuggugcuguggggcauccaccaccccagcaccagcgccgaccagcagagccuguaccagaacgccgacgccuacguguucgugggcaccagcaaguacagcaagaaguucaagcccgagaucgccaucagacccaaggugagagaccaggagggcagaaugaacuacuacuggacccugguggagcccggcgacaagaucaccuucgaggccaccggcaaccugguggugcccagauacgccuucgccauggagagaaacgccggcagcggcaucaucaucagcgacacccccgugcacgacugcaacaccaccugccagacccccaagggcgccaucaacaccagccugcccuuccagaacauccaccccaucaccaucggcaagugccccaaguacgugaagagcaccaagcugagacuggccaccggccugagaaacgugcccagcauccagagcagaggccuguucggcgccaucgccggcuucaucgagggcggcuggaccggcaugguggacggcugguacggcuaccaccaccagaacgagcagggcagcggcuacgccgccgaccugaagagcacccagaacgccaucgacgagaucaccaacaaggugaacagcgugaucgagaagaugaacacccaguucaccgccgugggcaaggaguucaaccaccuggagaagagaaucgagaaccugaacaagaagaucgacgacggcuuccuggacaucuggaccuacaacgccgagcugcuggugcugcuggagaacgagagaacccuggacuaccacgacagcaacgugaagaaccuguacgagaaggugagaauccagcugaagaacaacgccaaggagaucggcaacggcugcuucgaguucuaccacaagugcgacaacaccugcauggagagcgugaagaacggcaccuacgacuaccccaaguacagcgaggaggccaagcugaacagagaggagaucgacggcgugaagcuggagagcaccagaaucuaccagauccuggccaucuacagcaccguggccagcagccuggugcugguggugagccugggcgccaucagcuucuggaugugcagcaacggcagccugcagugcagaaucugcaucuga

SEQ ID NO: 164228 - RNA, 1701 nt, Artificial Sequence; identical to SEQ ID NO: 163831
  derived and/or modified CDS sequence (opt4) from hemagglutinin__InfluenzaA__ADD22511

SEQ ID NO: 164229 - RNA, 1701 nt, Artificial Sequence
  derived and/or modified CDS sequence (opt4) from hemagglutinin__InfluenzaA__ADD22521
augaaggccauccugguggugcugcuguacaccuucgccaccgccaacgccgacacccugugcaucggcuaccacgccaacaacagcaccgacaccguggacaccgugcuggagaagaacgugaccgugacccacagcgugaaccugcuggaggacaagcacaacggcaagcugugcaagcugagaggcguggccccccugcaccugggcaagugcaacaucgccggcuggauccugggcaaccccgagugcgagagccugagcaccgccagcagcuggagcuacaucguggagaccagcagcagcgacaacggcaccugcuaccccggcgacuucaucgacuacgaggagcugagagagcagcugagcagcgugagcagcuucgagagauucgagaucuuccccaagaccagcagcuggcccaaccacgacagcaacaagggcgugaccgccgccugcccccacgccggcgccaagagcuucuacaagaaccugaucuggcuggugaagaagggcaacagcuaccccaagcugagcaagagcuacaucaacgacaagggcaaggaggugcuggugcuguggggcauccaccaccccagcaccagcgccgaccagcagagccuguaccagaacgccgacaccuacguguucgugggcaccagcagauacagcaagaaguucaagcccgagaucgccaucagacccaaggugagagaccaggagggcagaaugaacuacuacuggacccugguggagcccggcgacaagaucaccuucgaggccaccggcaaccugguggugcccagauacgccuucgccauggagagaaacgccggcagcggcaucaucaucagcgacacccccgugcacgacugcaacaccaccugccagacccccaagggcgccaucaacaccagccugcccuuccagaacauccaccccaucaccaucggcaagugccccaaguacgugaagagcaccaagcugagacuggccaccggccugagaaacgugcccagcauccagagcagaggccuguucggcgccaucgccggcuucaucgagggcggcuggaccggcaugguggacggcugguacggcuaccaccaccagaacgagcagggcagcggcuacgccgccgaccugaagagcacccagaacgccaucgacgagaucaccaacaaggugaacagcgugaucgagaagaugaacacccaguucaccgccgugggcaaggaguucaaccaccuggagaagagaaucgagaaccugaacaagaagaucgacgacggcuuccuggacaucuggaccuacaacgccgagcugcuggugcugcuggagaacgagagaacccuggacuaccacgacagcaacgugaagaaccuguacgagaaggugagaagccagcugaagaacaacgccaaggagaucggcaacggcugcuucgaguucuaccacaagugcgacaacaccugcauggagagcgugaagaacggcaccuacgacuaccccaaguacagcgaggaggccaagcugaacagagaggagaucgacggcgugaagcuggagagcaccagaaucuaccagauccuggccaucuacagcaccguggccagcagccuggugcugguggugagccugggcgccaucagcuucuggaugugcagcaacggcagccugcagugcagaaucugcaucuga

SEQ ID NO: 164230 - RNA, 1701 nt, Artificial Sequence; identical to SEQ ID NO: 162729
  derived and/or modified CDS sequence (opt4) from hemagglutinin__InfluenzaA__ADD22531

SEQ ID NO: 164231 - RNA, 1701 nt, Artificial Sequence
  derived and/or modified CDS sequence (opt4) from hemagglutinin__InfluenzaA__ADD22541
augaaggccauccugguggugcugcuguacaccuucgccaccgccaacgccgacacccugugcaucggcuaccacgccaacaacagcaccgacaccguggacaccgugcuggagaagaacgugaccgugacccacagcgugaaccugcuggaggacaagcacaacggcaagcugugcaagcugagaggcguggccccccugcaccugggcaagugcaacaucgccggcuggauccugggcaaccccgagugcgagagccugagcaccgccagcagcuggagcuacaucguggagaccagcagcagcggcaacggcaccugcuaccccggcgacuucaucgacuacgaggagcugagagagcagcugagcagcgugagcagcuucgagagauucgagaucuuccccaagaccagcagcuggcccaaccacgacagcaacaagggcgugaccgccgccugcccccacgccggcgccaagagcuucuacaagaaccugaucuggcuggugaagaagggcaacagcuaccccaagcugagcaagagcuacaucaacgacaagggcaaggaggugcuggugcuguggggcauccaccaccccagcaccagcgccgaccagcagagccuguaccagaacgccgacgccuacguguucgugggcaccagcaaguacagcaagaaguucaagcccgagaucgccaucagacccaaggugagagaccaggagggcagaaugaacuacuacuggacccugguggagcccggcgacaagaucaccuucgaggccaccggcaaccugguggugcccagauacgccuucgccauggagagaaacgccggcagcggcaucaucaucagcgacacccccgugcacgacugcaacaccaccugccagacccccaagggcgccaucaacaccagccugcccuuccagaacauccaccccaucaccaucggcaagugccccaaguacgugaagagcaccaagcugagacuggccaccggccugagaaacgugcccagcauccagagcagaggccuguucggcgccaucgccggcuucaucgagggcggcuggaccggcaugguggacggcugguacggcuaccaccaccagaacgagcagggcagcggcuacgccgccgaccugaagagcacccagaacgccaucgacgagaucaccaacaaggugaacagcgugaucgagaagaugaacacccaguucaccgccgugggcaaggaguucaaccaccuggagaagagaaucgagaaccugaacaagaagguggacgacggcuuccuggacaucuggaccuacaacgccgagcugcuggugcugcuggagaacgagagaacccuggacuaccacgacagcaacgugaagaaccuguacgagaaggugagaagccagcugaagaacaacgccaaggagaucggcaacggcugcuucgaguucuaccacaagugcgacaacaccugcauggagagcgugaagaacggcaccuacgacuaccccaaguacagcgaggaggccaagcugaacagagaggagaucgacggcgugaagcuggagagcaccagaaucuaccagauccuggccaucuacagcaccguggccagcagccuggugcugguggugagccugggcgccaucagcuucuggaugugcagcaacggcagccugcagugcagaaucugcaucuga

SEQ ID NO: 164232 - RNA, 1701 nt, Artificial Sequence; identical to SEQ ID NO: 163831
  derived and/or modified CDS sequence (opt4) from hemagglutinin__InfluenzaA__ADD22554

SEQ ID NO: 164233 - RNA, 1701 nt, Artificial Sequence; identical to SEQ ID NO: 163831
  derived and/or modified CDS sequence (opt4) from hemagglutinin__InfluenzaA__ADD22564

SEQ ID NO: 164234 - RNA, 1701 nt, Artificial Sequence
  derived and/or modified CDS sequence (opt4) from hemagglutinin__InfluenzaA__ADD22574
augaaggccauccugguggugcugcuguacaccuucgccaccgccaacgccgacacccugugcaucggcuaccacgccaacaacagcaccgacaccguggacaccgugcuggagaagaacgugaccgugacccacagcgugaaccugcuggaggacaagcacaacggcaagcugugcaagcugagaggcguggccccccugcaccugggcaagugcaacaucgccggcuggauccugggcaaccccgagugcgagagccugagcaccgccagcagcuggagcuacaucguggagaccagcagcagcgacaacggcaccugcuaccccggcgacuucaucgacuacgaggagcugagagagcagcugagcagcgugagcagcuucgagagauucgagaucuuccccaagaccagcagcuggcccaaccacgacagcaacaagggcgugaccgccgccugcccccacgccggcgccaagagcuucuacaagaaccugaucuggcuggugaagaagggcaacagcuaccccaagcugagcaagagcuacaucaacgacaagggcaaggaggugcuggugcuguggggcauccaccaccccagcaccagcgccgaccagcagagccuguaccagaacgccgacaccuacguguucgugggcaccagcagauacagcaagaaguucaagcccgagaucgccaucagacccaaggugagagaccaggagggcagaaugaacuacuacuggacccugguggagcccggcgacaagaucaccuucgaggccaccggcaaccugguggugcccagauacgccuucgccauggagagaaacgccggcagcggcaucaucaucagcgacacccccgugcacgacugcaacaccaccugccagacccugaagggcgccaucaacaccagccugcccuuccagaacauccaccccaucaccaucggcaagugccccaaguacgugaagagcaccaagcugagacuggccaccggccugagaaacgugcccagcauccagagcagaggccuguucggcgccaucgccggcuucaucgagggcggcuggaccggcaugguggacggcugguacggcuaccaccaccagaacgagcagggcagcggcuacgccgccgaccugaagagcacccagaacgccaucgacgagaucaccaacaaggugaacagcgugaucgagaagaugaacacccaguucaccgccgugggcaaggaguucaaccaccuggagaagagaaucgagaaccugaacaagaagaucgacgacggcuuccuggacaucuggaccuacaacgccgagcugcuggugcugcuggagaacgagagaacccuggacuaccacgacagcaacgugaagaaccuguacgagaaggugagaagccagcugaagaacaacgccaaggagaucggcaacggcugcuucgaguucuaccacaagugcgacaacaccugcauggagagcgugaagaacggcaccuacgacuaccccaaguacagcgaggaggccaagcugaacagagaggagaucgacggcgugaagcuggagagcaccagaaucuaccagauccuggccaucuacagcaccguggccagcagccuggugcugguggugagccugggcgccaucagcuucuggaugugcagcaacggcagccugcagugcagaaucugcaucuga

SEQ ID NO: 164235 - RNA, 1701 nt, Artificial Sequence; identical to SEQ ID NO: 163831
  derived and/or modified CDS sequence (opt4) from hemagglutinin__InfluenzaA__ADD22584

SEQ ID NO: 164236 - RNA, 1701 nt, Artificial Sequence; identical to SEQ ID NO: 162729
  derived and/or modified CDS sequence (opt4) from hemagglutinin__InfluenzaA__ADD22594

SEQ ID NO: 164237 - RNA, 1701 nt, Artificial Sequence; identical to SEQ ID NO: 163831
  derived and/or modified CDS sequence (opt4) from hemagglutinin__InfluenzaA__ADD22604

SEQ ID NO: 164238 - RNA, 1701 nt, Artificial Sequence; identical to SEQ ID NO: 163831
  derived and/or modified CDS sequence (opt4) from hemagglutinin__InfluenzaA__ADD22614

SEQ ID NO: 164239 - RNA, 1701 nt, Artificial Sequence; identical to SEQ ID NO: 163831
  derived and/or modified CDS sequence (opt4) from hemagglutinin__InfluenzaA__ADD22624

SEQ ID NO: 164240 - RNA, 1701 nt, Artificial Sequence
  derived and/or modified CDS sequence (opt4) from hemagglutinin__InfluenzaA__ADD22634
augaaggccauccugguggugcugcugugcaccuucgccaccgccaacgccgacacccugugcaucggcuaccacgccaacaacagcaccgacaccguggacaccgugcuggagaagaacgugaccgugacccacagcgugaaccugcuggaggacaagcacaacggcaagcugugcaagcugagaggcguggccccccugcaccugggcaagugcaacaucgccggcuggauccugggcaaccccgagugcgagagccugagcaccgccagcagcuggagcuacaucguggagaccagcagcagcgacaacggcaccugcuaccccggcgacuucaucgacuacgaggagcugagagagcagcugagcagcgugagcagcuucgagagauucgagaucuuccccaagaccagcagcuggcccaaccacgacagcaacaagggcgugaccgccgccugcccccacgccggcgccaagagcuucuacaagaaccugaucuggcuggugaagaagggcaacagcuaccccaagcugagcaagagcuacaucaacgacaagggcaaggaggugcuggugcuguggggcauccaccaccccagcaccagcgccgaccagcagagccuguaccagaacgccgacgccuacguguucgugggcaccagcagauacagcaagaaguucaagcccgagaucgccaucagacccaaggugagagaccaggagggcagaaugaacuacuacuggacccugguggagcccggcgacaagaucaccuucgaggccaccggcaaccugguggugcccagauacgccuucgccauggagagaaacgccggcagcggcaucaucaucagcgacacccccgugcacgacugcaacaccaccugccagacccccaagggcgccaucaacaccagccugcccuuccagaacauccaccccaucaccaucggcaagugccccaaguacgugaagagcaccaagcugagacuggccaccggccugagaaacgugcccagcauccagagcagaggccuguucggcgccaucgccggcuucaucgagggcggcuggaccggcaugguggacggcugguacggcuaccaccaccagaacgagcagggcagcggcuacgccgccgaccugaagagcacccagaacgccaucgacgagaucaccaacaaggugaacagcgugaucgagaagaugaacacccaguucaccgccgugggcaaggaguucaaccaccuggagaagagaaucgagaaccugaacaagaagaucgacgacggcuuccuggacaucuggaccuacaacgccgagcugcuggugcugcuggagaacgagagaacccuggacuaccacgacagcaacgugaagaaccuguacgagaaggugagaagccagcugaagaacaacgccaaggagaucggcaacggcugcuucgaguucuaccacaagugcgacaacaccugcauggagagcgugaagaacggcaccuacgacuaccccaaguacagcgaggaggccaagcugaacagagaggagaucgacggcgugaagcuggagagcaccagaaucuaccagauccuggccaucuacagcaccguggccagcagccuggugcugguggugagccugggcgccaucagcuucuggaugugcagcaacggcagccugcagugcagaaucugcaucuga

SEQ ID NO: 164241 - RNA, 1701 nt, Artificial Sequence
  derived and/or modified CDS sequence (opt4) from hemagglutinin__InfluenzaA__ADD22645
augaaggccauccugguggugcugcuguacaccuucgccaccgccaacgccgacacccugugcaucggcuaccacgccaacaacagcaccgacaccguggacaccgugcuggagaagaacgugaccgugacccacagcgugaaccugcuggaggacaagcacaacggcaagcugugcaagcugagaggcguggccccccugcaccugggcaagugcaacaucgccggcuggauccugggcaaccccgagugcgagagccugagcaccgccagcagcuggagcuacaucguggagaccagcagcagcggcaacggcaccugcuaccccggcgacuucaucgacuacgaggagcugagagagcagcugagcagcgugagcagcuucgagagauucgagaucuuccccaagaccagcagcuggcccaaccacgacagcaacaagggcgugaccgccgccugcccccacgccggcgccaagagcuucuacaagaaccugaucuggcuggugaagaagggcaacagcuaccccaagcugagcaagagcuacaucaacgacaagggcaaggaggugcuggugcuguggggcauccaccaccccagcaccagcgccgaccagcagagccuguaccagaacgccgacgccuacguguucgugggcaccagcagauacagcaagaaguucaagcccgagaucgccaucagacccaaggugagagaccaggagggcagaaugaacuacuacuggacccugguggagcccggcgacaagaucaccuucgaggccaccggcaaccugguggugcccagauacgccuucgccauggagagaaacgccggcagcggcaucaucaucagcgacacccccgugcacgacugcaacaccaccugccagacccccaagggcgccaucaacaccagccugcccuuccagaacauccaccccaucaccaucggcaagugccccaaguacgugaagagcaccaagcugagacuggccaccggccugagaaacgugcccagcauccagagcagaggccuguucggcgccaucgccggcuucaucgagggcggcuggaccggcaugguggacggcugguacggcuaccaccaccagaacgagcagggcagcggcuacgccgccgaccugaagagcacccagaacgccaucgacgagaucaccaacaaggugaacagcgugaucgagaagaugaacacccaguucaccgccgugggcaaggaguucaaccaccuggagaagagaaucgagaaccugaacaagaagguggacgacggcuuccuggacaucuggaccuacaacgccgagcugcuggugcugcuggagaacgagagaacccuggacuaccacgacagcaacgugaagaaccuguacgagaaggugagaagccagcugaagaacaacgccaaggagaucggcaacggcugcuucgaguucuaccacaagugcgacaacaccugcauggagagcgugaagaacggcaccuacgacuaccccaaguacagcgaggaggccaagcugaacagagaggagaucgagggcgugaagcuggagagcaccagaaucuaccagauccuggccaucuacagcaccguggccagcagccuggugcugguggugagccugggcgccaucagcuucuggaugugcagcaacggcagccugcagugcagaaucugcaucuga

SEQ ID NO: 164242 - RNA, 1701 nt, Artificial Sequence
  derived and/or modified CDS sequence (opt4) from hemagglutinin__InfluenzaA__ADD22665
augaaggccauccugguggugcugcuguacaccuucgccaccgccaacgccgacacccugugcaucggcuaccacgccaacaacagcaccgacaccguggacaccgugcuggagaagaacgugaccgugacccacagcgugaaccugcuggaggacaagcacaacggcaagcugugcaagcugagaggcguggccccccugcaccugggcaagugcaacaucgccggcuggauccugggcaaccccgagugcgagagccugagcaccgccagcagcuggagcuacaucguggagaccagcagcagcggcaacggcaccugcuaccccggcgacuucaucgacuacgaggagcugagagagcagcugagcagcgugagcagcuucgagagauucgagaucuuccccaagaccagcagcuggcccaaccacgacagcaacaagggcgugaccgccgccugcccccacgccggcgccaagagcuucuacaagaaccugaucuggcuggugaagaagggcaacagcuaccccaagcugagcaagagcuacaucaacgacaagagaaaggaggugcuggugcuguggggcauccaccaccccagcaccagcgccgaccagcagagccuguaccagaacgccgacgccuacguguucgugggcaccagcaaguacagcaagaaguucaagcccgagaucgccaucagacccaaggugagagaccaggagggcagaaugaacuacuacuggacccugguggagcccggcgacaagaucaccuucgaggccaccggcaaccugguggugcccagauacgccuucgccauggagagaaacgccggcagcggcaucaucaucagcgacacccccgugcacgacugcaacaccaccugccagacccccaagggcgccaucaacaccagccugcccuuccagaacauccaccccaucaccaucggcaagugccccaaguacgugaagagcaccaagcugagacuggccaccggccugagaaacgugcccagcauccagagcagaggccuguucggcgccaucgccggcuucaucgagggcggcuggaccggcaugguggacggcugguacggcuaccaccaccagaacgagcagggcagcggcuacgccgccgaccugaagagcacccagaacgccaucgacgagaucaccaacaaggugaacagcgugaucgagaagaugaacacccaguucaccgccgugggcaaggaguucaaccaccuggagaagagaaucgagaaccugaacaagaagguggacgacggcuuccuggacaucuggaccuacaacgccgagcugcuggugcugcuggagaacgagagaacccuggacuaccacgacagcaacgugaagaaccuguacgagaaggugagaagccagcugaagaacaacgccaaggagaucggcaacggcugcuucgaguucuaccacaagugcgacaacaccugcauggagagcgugaagaacggcaccuacgacuaccccaaguacagcgaggaggccaagcugaacagagaggagaucgacggcgugaagcuggagagcaccagaaucuaccagauccuggccaucuacagcaccguggccagcagccuggugcugguggugagccugggcgccaucagcuucuggaugugcagcaacggcagccugcagugcagaaucugcaucuga

SEQ ID NO: 164243 - RNA, 1701 nt, Artificial Sequence; identical to SEQ ID NO: 163831
  derived and/or modified CDS sequence (opt4) from hemagglutinin__InfluenzaA__ADD22675

SEQ ID NO: 164244 - RNA, 1701 nt, Artificial Sequence; identical to SEQ ID NO: 163831
  derived and/or modified CDS sequence (opt4) from hemagglutinin__InfluenzaA__ADD22685

SEQ ID NO: 164245 - RNA, 1701 nt, Artificial Sequence; identical to SEQ ID NO: 163831
  derived and/or modified CDS sequence (opt4) from hemagglutinin__InfluenzaA__ADD22695

SEQ ID NO: 164246 - RNA, 1701 nt, Artificial Sequence
  derived and/or modified CDS sequence (opt4) from hemagglutinin__InfluenzaA__ADD22722
augaaggccauccugguggugcugcuguacaccuucgccaccgccaacgccgacacccugugcaucggcuaccacgccaacaacagcaccgacaccguggacaccgugcuggagaagaacgugaccgugacccacagcgugaaccugcuggaggacagacacaacggcaagcugugcaagcugagaggcguggccccccugcaccugggcaagugcaacaucgccggcuggauccugggcaaccccgagugcgagagccugagcaccgccagcagcuggagcuacaucguggagaccagcagcagcggcaacggcaccugcuaccccggcgacuucaucgacuacgaggagcugagagagcagcugagcagcgugagcagcuucgagagauucgagaucuuccccaagaccagcagcuggcccaaccacgacagcaacaagggcgugaccgccgccugcccccacgccggcgccaagagcuucuacaagaaccugaucuggcuggugaagaagggcaacagcuaccccaagcugagcaagagcuacaucaacgacaagggcaaggaggugcuggugcuguggggcauccaccaccccagcaccagcgccgaccagcagagccuguaccagaacgccgacgccuacguguucgugggcaccagcagcuacagcaagaaguucaagcccgagaucgccaucagacccaaggugagagaccaggagggcagaaugaacuacuacuggacccugguggagcccggcgacaagaucaccuucgaggccaccggcaaccugguggugcccagauacgccuucgccauggagagaaacgccggcagcggcaucaucaucagcgacacccccgugcacgacugcaacaccaccugccagacccccaagggcgccaucaacaccagccugcccuuccagaacauccaccccaucaccaucggcaagugccccaaguacgugaagagcaccaagcugagacuggccaccggccugagaaacgugcccagcauccagagcagaggccuguucggcgccaucgccggcuucaucgagggcggcuggaccggcaugguggacggcugguacggcuaccaccaccagaacgagcagggcagcggcuacgccgccgaccugaagagcacccagaacgccaucgacgagaucaccaacaaggugaacagcgugaucgagaagaugaacacccaguucaccgccgugggcaaggaguucaaccaccuggagaagagaaucgagaaccugaacaagaagguggacgacggcuuccuggacaucuggaccuacaacgccgagcugcuggugcugcuggagaacgagagaacccuggacuaccacgacagcaacgugaagaaccuguacgagaaggugagaagccagcugaagaacaacgccaaggagaucggcaacggcugcuucgaguucuaccacaagugcgacaacaccugcauggagagcgugaagaacggcaccuacgacuaccccaaguacagcgaggaggccaagcugaacagagaggagaucgacggcgugaagcuggagagcaccagaaucuaccagauccuggccaucuacagcaccguggccagcagccuggugcugguggugagccugggcgccaucagcuucuggaugugcagcaacggcagccugcagugcagaaucugcaucuga

SEQ ID NO: 164247 - RNA, 1701 nt, Artificial Sequence; identical to SEQ ID NO: 164229
  derived and/or modified CDS sequence (opt4) from hemagglutinin__InfluenzaA__ADD22732

SEQ ID NO: 164248 - RNA, 1701 nt, Artificial Sequence
  derived and/or modified CDS sequence (opt4) from hemagglutinin__InfluenzaA__ADD22742
augaaggccauccugguggugcugcuguacaccuucgccaccgccaacgccgacacccugugcaucggcuaccacgccaacaacagcaccgacaccguggacaccgugcuggagaagaacgugaccgugacccacagcgugaaccugcuggaggacaagcacaacggcaagcugugcaagcugagaggcguggccccccugcaccugggcaagugcaacaucgccggcuggauccugggcaaccccgagugcgagagccugagcaccgccagcagcuggagcuacaucguggagaccagcagcagcggcaacggcaccugcuaccccggcgacuucaucgacuacgaggagcugagagagcagcugagcagcgugagcagcuucgagagauucgagaucuuccccaagaccagcagcuggcccaaccacgacagcaacaagggcgugaccgccgccugcccccacgccggcgccaagagcuucuacaagaaccugaucuggcuggugaagaagggcaacagcuaccccaagcugagcaagagcuacaucaacgacaagggcaaggaggugcuggugcuguggggcauccaccaccccagcaccagcgccgaccagcagagccuguaccagaacgccgacgccuacguguucgugggcaccagcagcuacagcaagaaguucaagcccgagaucgccaucagacccaaggugagagaccaggagggcagaaugaacuacuacuggacccugguggagcccggcgacaagaucaccuucgaggccaccggcaaccugguggugcccagauacgccuucgccauggagagaaacgccggcagcggcaucaucaucagcgacacccccgugcacgacugcaacaccaccugccagacccccaagggcgccaucaacaccagccugcccuuccagaacauccaccccaucaccaucggcaagugccccaaguacgugaagagcaccaagcugagacuggccaccggccugagaaacgugcccagcauccagagcagaggccuguucggcgccaucgccggcuucaucgagggcggcuggaccggcaugguggacggcugguacggcuaccaccaccagaacgagcagggcagcggcuacgccgccgaccugaagagcacccagaacgccaucgacgagaucaccaacaaggugaacagcgugaucgagaagaugaacacccaguucaccgccgugggcaaggaguucaaccaccuggagaagagaaucgagaaccugaacaagaagguggacgacggcuuccuggacaucuggaccuacaacgccgagcugcuggugcugcuggagaacgagagaacccuggacuaccacgacagcaacgugaagaaccuguacgagaaggugagaagccagcugaagaacaacgccaaggagaucggcaacggcugcuucgaguucuaccacaagugcgacaacaccugcauggagagcgugaagaacggcaccuacgacuaccccaaguacagcgaggaggccaagcugaacagagaggagaucgacggcgugaagcuggagagcaccagaaucuaccagauccuggccaucuacagcaccguggccagcagccuggugcugguggugagccugggcgccaucagcuucuggaugugcagcaacggcagccugcagugcagaaucugcaucuga

SEQ ID NO: 164249 - RNA, 1701 nt, Artificial Sequence; identical to SEQ ID NO: 162729
  derived and/or modified CDS sequence (opt4) from hemagglutinin__InfluenzaA__ADD22752

SEQ ID NO: 164250 - RNA, 1701 nt, Artificial Sequence; identical to SEQ ID NO: 162820
  derived and/or modified CDS sequence (opt4) from hemagglutinin__InfluenzaA__ADD22762

SEQ ID NO: 164251 - RNA, 1701 nt, Artificial Sequence; identical to SEQ ID NO: 163831
  derived and/or modified CDS sequence (opt4) from hemagglutinin__InfluenzaA__ADD22772

SEQ ID NO: 164252 - RNA, 1701 nt, Artificial Sequence; identical to SEQ ID NO: 163831
  derived and/or modified CDS sequence (opt4) from hemagglutinin__InfluenzaA__ADD22782

SEQ ID NO: 164253 - RNA, 1701 nt, Artificial Sequence
  derived and/or modified CDS sequence (opt4) from hemagglutinin__InfluenzaA__ADD22792
augaaggccauccugguggugcugcuguacaccuucgccaccgccaacgccgacacccugugcaucggcuaccacgccaacaacagcaccgacaccguggacaccgugcuggagaagaacgugaccgugacccacagcgugaaccugcuggaggacaagcacaacggcaagcugugcaagcugagaggcguggccccccugcaccugggcaagugcaacaucgccggcuggauccugggcaaccccgagugcgagagccugagcaccgccagcagcuggagcuacaucguggagaccagcagcagcggcaacggcaccugcuaccccggcgacuucaucaacuacgaggagcugagagagcagcugagcagcgugagcagcuucgagagauucgagaucuuccccaagaccagcagcuggcccaaccacgacagcaacaagggcgugaccgccgccugcccccacgccggcgccaagagcuucuacaagaaccugaucuggcuggugaagaagggcaacagcuaccccaagcugagcaagagcuacaucaacgacaagggcaaggaggugcuggugcuguggggcauccaccaccccagcaccagcgccgaccagcagagccuguaccagaacgccgacgccuacguguucgugggcaccagcagauacagcaagaaguucaagcccgagaucgccaucagacccaaggugagagaccaggagggcagaaugaacuacuacuggacccugguggagcccggcgacaagaucaccuucgaggccaccggcaaccugguggugcccagauacgccuucgccauggagagaaacgccggcagcggcaucaucaucagcgacacccccgugcacgacugcaacaccaccugccagacccccaagggcgccaucaacaccagccugcccuuccagaacauccaccccaucaccaucggcaagugccccaaguacgugaagagcaccaagcugagacuggccaccggccugagaaacgugcccagcauccagagcagaggccuguucggcgccaucgccggcuucaucgagggcggcuggaccggcaugguggacggcugguacggcuaccaccaccagaacgagcagggcagcggcuacgccgccgaccugaagagcacccagaacgccaucgacgagaucaccaacaaggugaacagcgugaucgagaagaugaacacccaguucaccgccgugggcaaggaguucaaccaccuggagaagagaaucgagaaccugaacaagaagguggacgacggcuuccuggacaucuggaccuacaacgccgagcugcuggugcugcuggagaacgagagaacccuggacuaccacgacagcaacgugaagaaccuguacgagaaggugagaagccagcugaagaacaacgccaaggagaucggcaacggcugcuucgaguucuaccacaagugcgacaacaccugcauggagagcgugaagaacggcaccuacgacuaccccaaguacagcgaggaggccaagcugaacagagaggagaucgacggcgugaagcuggagagcaccagaaucuaccagauccuggccaucuacagcaccguggccagcagccuggugcugguggugagccugggcgccaucagcuucuggaugugcagcaacggcagccugcagugcagaaucugcaucuga

SEQ ID NO: 164254 - RNA, 1701 nt, Artificial Sequence; identical to SEQ ID NO: 164229
  derived and/or modified CDS sequence (opt4) from hemagglutinin__InfluenzaA__ADD22802

SEQ ID NO: 164255 - RNA, 1701 nt, Artificial Sequence; identical to SEQ ID NO: 163831
  derived and/or modified CDS sequence (opt4) from hemagglutinin__InfluenzaA__ADD22812

SEQ ID NO: 164256 - RNA, 1701 nt, Artificial Sequence
  derived and/or modified CDS sequence (opt4) from hemagglutinin__InfluenzaA__ADD22822
augaaggccauccugguggugcugcuguacaccuucgccaccgccaacgccgacacccugugcaucggcuaccacgccaacaacagcaccgacaccguggacaccgugcuggagaagaacgugaccgugacccacagcgugaaccugcuggaggacaagcacaacggcaagcugugcaagcugagaggcguggccccccugcaccugggcaagugcaacaucgccggcuggauccugggcaaccccgagugcgagagccugagcaccgccagcagcuggagcuacaucguggagaccagcagcgccgacaacggcaccugcuaccccggcgacuucaucgacuacgaggagcugagagagcagcugagcagcgugagcagcuucgagagauucgagaucuuccccaagaccagcagcuggcccaaccacgacagcaacaagggcgugaccgccgccugcccccacgccggcgccaagagcuucuacaagaaccugaucuggcuggugaagaagggcaacagcuaccccaagcugagcaagagcuacaucaacgacaagggcaaggaggugcuggugcuguggggcauccaccaccccagcaccagcgccgaccagcagagccuguaccagaacgccgacgccuacguguucgugggcaccagcaaguacagcaagaaguucaagcccgagaucgccaucagacccaaggugagagaccaggagggcagaaugaacuacuacuggacccugguggagcccggcgacaagaucaccuucgaggccaccggcaaccugguggugcccagauacgccuucgccauggagagaaacgccggcagcggcaucaucaucagcgacacccccgugcacgacugcaacaccaccugccagacccccaagggcgccaucaacaccagccugcccuuccagaacauccaccccaucaccaucggcaagugccccaaguacgugaagagcaccaagcugagacuggccaccggccugagaaacgugcccagcauccagagcagaggccuguucggcgccaucgccggcuucaucgagggcggcuggaccggcaugguggacggcugguacggcuaccaccaccagaacgagcagggcagcggcuacgccgccgaccugaagagcacccagaacgccaucgacgagaucaccaacaaggugaacagcgugaucgagaagaugaacacccaguucaccgccgugggcaaggaguucaaccaccuggagaagagaaucgagaaccugaacaagaagaucgacgacggcuuccuggacaucuggaccuacaacgccgagcugcuggugcugcuggagaacgagagaacccuggacuaccacgacagcaacgugaagaaccuguacgagaaggugagaagccagcugaagaacaacgccaaggagaucggcaacggcugcuucgaguucuaccacaagugcgacaacaugugcauggagagcgugaagaacggcaccuacgacuaccccaaguacagcgaggaggccaagcugaacagagaggagaucgacggcgugaagcuggagagcaccagaaucuaccagauccuggccaucuacagcaccguggccagcagccuggugcugguggugagccugggcgccaucagcuucuggaugugcagcaacggcagccugcagugcagaaucugcaucuga

SEQ ID NO: 164257 - RNA, 1701 nt, Artificial Sequence; identical to SEQ ID NO: 163831
  derived and/or modified CDS sequence (opt4) from hemagglutinin__InfluenzaA__ADD22832

SEQ ID NO: 164258 - RNA, 1701 nt, Artificial Sequence; identical to SEQ ID NO: 163831
  derived and/or modified CDS sequence (opt4) from hemagglutinin__InfluenzaA__ADD22842

SEQ ID NO: 164259 - RNA, 1701 nt, Artificial Sequence
  derived and/or modified CDS sequence (opt4) from hemagglutinin__InfluenzaA__ADD22852
augaaggccauccugguggugcugcuguacaccuucgccaccgccaacgccgacacccugugcaucggcuaccacgccaacaacagcaccgacaccguggacaccgugcuggagaagaacgugaccgugacccacagcgugaaccugcuggaggacaagcacaacggcaagcugugcaagcugagaggcguggccccccugcaccugggcaagugcaacaucgccggcuggauccugggcaaccccgagugcgagagccugagcaccgccagcagcuggagcuacaucguggagaccagcagcagcgacaacggcaccugcuaccccggcgacuucaucgacuacgaggagcugagagagcagcugagcagcgugagcagcuucgagagauucgagaucuuccccaagaccagcagcuggcccaaccacgacagcaacaagggcgugaccgccgccugcccccacgccggcgccaagagcuucuacaagaaccugaucuggcuggugaagaagggcaacagcuaccccaagcugagcaagagcuacaucaacgacaagggcaaggaggugcuggugcuguggggcauccaccaccccagcaccagcgccgaccagcagagccuguaccagaacgccgacgccuacguguucgugggcaccagcagauacagcaagaaguucaagcccgagaucgccaucagacccaaggugagagaccaggagggcagaaugaacuacuacuggacccugguggagcccggcgacaagaucaccuucgaggccaccggcaaccugguggugcccagauacgccuucgccauggagagaaacgccggcagcggcaucgugaucagcgacacccccgugcacgacugcaacaccaccugccagacccccaagggcgccaucaacaccagccugcccuuccagaacauccaccccaucaccaucggcaagugccccaaguacgugaagagcaccaagcugagacuggccaccggccugagaaacgugcccagcauccagagcagaggccuguucggcgccaucgccggcuucaucgagggcggcuggaccggcaugguggacggcugguacggcuaccaccaccagaacgagcagggcagcggcuacgccgccgaccugaagagcacccagaacgccaucgacgagaucaccaacaaggugaacagcgugaucgagaagaugaacacccaguucaccgccgugggcaaggaguucaaccaccuggagaagagaaucgagaaccugaacaagaagguggacgacggcuuccuggacaucuggaccuacaacgccgagcugcuggugcugcuggagaacgagagaacccuggacuaccacgacagcaacgugaagaaccuguacgagaaggugagaagccagcugaagaacaacgccaaggagaucggcaacggcugcuucgaguucuaccacaagugcgacaacaccugcauggagagcgugaagaacggcaccuacgacuaccccaaguacagcgaggaggccaagcugaacagagaggagaucgacggcgugaagcuggagagcaccagaaucuaccagauccuggccaucuacagcaccguggccagcagccuggugcugguggugagccugggcgccaucagcuucuggaugugcagcaacggcagccugcagugcagaaucugcaucuga

SEQ ID NO: 164260 - RNA, 1701 nt, Artificial Sequence
  derived and/or modified CDS sequence (opt4) from hemagglutinin__InfluenzaA__ADD22941
augaaggccauccugguggugcugcuguacaccuucgccaccgccaacgccgacacccugugcaucggcuaccacgccaacaacagcaccgacaccguggacaccgugcuggagaagaacgugaccgugacccacagcgugaaccugcuggaggacaagcacaacggcaagcugugcaagcugagaggcguggccccccugcaccugggcaagugcaacaucgccggcuggauccugggcaaccccgagugcgagagccugagcaccgccaucagcuggagcuacaucguggagaccagcagcagcggcaacggcaccugcuaccccggcgacuucaucgacuacgaggagcugagagagcagcugagcagcgugagcagcuucgagagauucgagaucuuccccaagaccagcagcuggcccaaccacgacagcaacaagggcgugaccgccgccugcccccacgccggcgccaagagcuucuacaagaaccugaucuggcuggugaagaagggcaacagcuaccccaagcugagcaagagcuacaucaacgacaagggcaaggaggugcuggugcuguggggcauccaccaccccagcaccagcgccgaccagcagagccuguaccagaacgccgacgccuacguguucgugggcaccagcagauacagcaagaaguucaagcccgagaucgccaucagacccaaggugagagaccaggagggcagaaugaacuacuacuggacccugguggagcccggcgacaagaucaccuucgaggccaccggcaaccugguggugcccagauacgccuucgccauggagagaaacgccggcagcggcaucaucaucagcgacacccccgugcacgacugcaacaccaccugccagacccccaagggcgccaucaacaccagccugcccuuccagaacauccaccccaucaccaucggcaagugccccaaguacgugaagagcaccaagcugagacuggccaccggccugagaaacgugcccagcauccagagcagaggccuguucggcgccaucgccggcuucaucgagggcggcuggaccggcaugguggacggcugguacggcuaccaccaccagaacgagcagggcagcggcuacgccgccgaccugaagagcacccagaacgccaucgacgagaucaccaacaaggugaacagcgugaucgagaagaugaacacccaguucaccgccgugggcaaggaguucaaccaccuggagaagagaaucgagaaccugaacaagaagguggacgacggcuuccuggacaucuggaccuacaacgccgagcugcuggugcugcuggagaacgagagaacccuggacuaccacgacagcaacgugaagaaccuguacgagaaggugagaagccagcugaagaacaacgccaaggagaucggcaacggcugcuucgaguucuaccacaagugcgacaacaccugcauggagagcgugaagaacggcaccuacgacuaccccaaguacagcgaggaggccaagcugaacagagaggagaucgacggcgugaagcuggagagcaccagaaucuaccagauccuggccaucuacagcaccguggccagcagccuggugcugguggugagccugggcgccaucagcuucuggaugugcagcaacggcagccugcagugcagaaucugcaucuga

SEQ ID NO: 164261 - RNA, 1701 nt, Artificial Sequence; identical to SEQ ID NO: 163831
  derived and/or modified CDS sequence (opt4) from hemagglutinin__InfluenzaA__ADD22951

SEQ ID NO: 164262 - RNA, 1701 nt, Artificial Sequence; identical to SEQ ID NO: 163831
  derived and/or modified CDS sequence (opt4) from hemagglutinin__InfluenzaA__ADD22961

SEQ ID NO: 164263 - RNA, 1701 nt, Artificial Sequence; identical to SEQ ID NO: 163831
  derived and/or modified CDS sequence (opt4) from hemagglutinin__InfluenzaA__ADD22971

SEQ ID NO: 164264 - RNA, 1701 nt, Artificial Sequence; identical to SEQ ID NO: 163831
  derived and/or modified CDS sequence (opt4) from hemagglutinin__InfluenzaA__ADD23072

SEQ ID NO: 164265 - RNA, 1701 nt, Artificial Sequence
  derived and/or modified CDS sequence (opt4) from hemagglutinin__InfluenzaA__ADD23082
augaaggccauccugguggugcugcuguacaccuucgccaccgccaacgccgacacccugugcaucggcuaccacgccaacaacagcaccgacaccguggacaccgugcuggagaagaacgugaccgugacccacagcgugaaccugcuggaggacaagcacaacggcaagcugugcaagcugagaggcguggccccccugcaccugggcaagugcaacaucgccggcuggauccugggcaaccccgagugcgagagccugagcaccgccagcagcuggagcuacaucguggagaccagcagcagcggcaacggcaccugcuaccccggcgacuucaucgacuacgaggagcugagagagcagcugagcagcgugagcagcuucgagagauucgagaucuuccccaagaccagcagcuggcccaaccacgacagcaacaagggcgugaccgccgccugcccccacgccggcgccaagagcuucuacaagaaccugaucuggcuggugaagaagggcaacagcuaccccaagcugagcaagagcuacaucaacgacaagggcaaggaggugcuggugcuguggggcauccaccaccccagcaccagcgccgaccagcagagccuguaccagaacgccgacaccuacguguucgugggcaccagcagauacagcaagaaguucaagcccgagaucgccaucagacccaaggugagagaccaggagggcagaaugaacuacuacuggacccugguggagcccggcgacaagaucaccuucgaggccaccggcaaccugguggugcccagauacgccuucgccauggagagaaacgccggcagcggcaucaucaucagcgacacccccgugcacgacugcaacaccaccugccagacccccaagggcgccaucaacaccagccugcccuuccagaacauccaccccaucaccaucggcaagugccccaaguacgugaagagcaccaagcugagacuggccaccggccugagaaacgugcccagcauccagagcagaggccuguucggcgccaucgccggcuucaucgagggcggcuggaccggcaugguggacggcugguacggcuaccaccaccagaacgagcagggcagcggcuacgccgccgaccugaagagcacccagaacgccaucgacgagaucaccaacaaggugaacagcgugaucgagaagaugaacacccaguucaccgccgugggcaaggaguucaaccaccuggagaagagaaucgagaaccugaacaagaagguggacgacggcuuccuggacaucuggaccuacaacgccgagcugcuggugcugcuggagaacgagagaacccuggacuaccacgacagcaacgugaagaaccuguacgagaaggugagaagccagcugaagaacaacgccaaggagaucggcaacggcugcuucgaguucuaccacaagugcgacaacaccugcauggagagcgugaagaacggcaccuacgacuaccccaaguacagcgaggaggccaagcugaacagagaggagaucgacggcgugaagcuggagagcaccagaaucuaccagauccuggccaucuacagcaccguggccagcagccuggugcugguggugagccugggcgccaucagcuucuggaugugcagcaacggcagccugcagugcagaaucugcaucuga

SEQ ID NO: 164266 - RNA, 1701 nt, Artificial Sequence
  derived and/or modified CDS sequence (opt4) from hemagglutinin__InfluenzaA__ADD23102
augaaggccauccugguggugcugcuguacaccuucgccaccgccaacgccgacacccugugcaucggcuaccacgccaacaacagcaccgacaccguggacaccgugcuggagaagaacgugaccgugacccacagcgugaaccugcuggaggacaagcacaacggcaagcugugcaagcugagaggcguggccccccugcaccugggcaagugcaacaucgccggcuggauccugggcaaccccgagugcgagagccugagcaccgccagcagcuggagcuacaucguggagaccagcagcagcggcaacggcaccugcuaccccggcgacuucaucgacuacgaggagcugagagagcagcugagcagcgugagcagcuucgagaaguucgagaucuuccccaagaccagcagcuggcccaaccacgacagcaacaagggcgugaccgccgccugcccccacgccggcgccaagagcuucuacaagaaccugaucuggcuggugaagaagggcaacagcuaccccaagcugagcaagagcuacaucaacgacaagggcaaggaggugcuggugcuguggggcauccaccaccccagcaccagcgccgaccagcagagccuguaccagaacgccgacgccuacguguucgugggcaccagcagauacagcaagaaguucaagcccgagaucgccaucagacccaaggugagagaccaggagggcagaaugaacuacuacuggacccugguggagcccggcgacaagaucaccuucgaggccaccggcaaccugguggugcccagauacgccuucgccauggagagaaacgccggcagcggcaucaucaucagcgacacccccgugcacgacugcaacaccaccugccagacccccaagggcgccaucaacaccagccugcccuuccagaacauccaccccaucaccaucggcaagugccccaaguacgugaagagcaccaagcugagacuggccaccggccugagaaacgugcccagcauccagagcagaggccuguucggcgccaucgccggcuucaucgagggcggcuggaccggcaugguggacggcugguacggcuaccaccaccagaacgagcagggcagcggcuacgccgccgaccugaagagcacccagaacgccaucgacgagaucaccaacaaggugaacagcgugaucgagaagaugaacacccaguucaccgccgugggcaaggaguucaaccaccuggagaagagaaucgagaaccugaacaagaagguggacgacggcuuccuggacaucuggaccuacaacgccgagcugcuggugcugcuggagaacgagagaacccuggacuaccacgacagcaacgugaagaaccuguacgagaaggugagaagccagcugaagaacaacgccaaggagaucggcaacggcugcuucgaguucuaccacaagugcgacaacaccugcauggagagcgugaagaacggcaccuacgacuaccccaaguacagcgaggaggccaagcugaacagagaggagaucgacggcgugaagcuggagagcaccagaaucuaccagauccuggccaucuacagcaccguggccagcagccuggugcugguggugagccugggcgccaucagcuucuggaugugcagcaacggcagccugcagugcagaaucugcaucuga

SEQ ID NO: 164267 - RNA, 1701 nt, Artificial Sequence; identical to SEQ ID NO: 163831
  derived and/or modified CDS sequence (opt4) from hemagglutinin__InfluenzaA__ADD23112

SEQ ID NO: 164268 - RNA, 1701 nt, Artificial Sequence; identical to SEQ ID NO: 163831
  derived and/or modified CDS sequence (opt4) from hemagglutinin__InfluenzaA__ADD23122

SEQ ID NO: 164269 - RNA, 1701 nt, Artificial Sequence; identical to SEQ ID NO: 162729
  derived and/or modified CDS sequence (opt4) from hemagglutinin__InfluenzaA__ADD23132

SEQ ID NO: 164270 - RNA, 1701 nt, Artificial Sequence; identical to SEQ ID NO: 163893
  derived and/or modified CDS sequence (opt4) from hemagglutinin__InfluenzaA__ADD23142

SEQ ID NO: 164271 - RNA, 1701 nt, Artificial Sequence
  derived and/or modified CDS sequence (opt4) from hemagglutinin__InfluenzaA__ADD23162
augaaggccauccugguggugcugcuguacaccuucgccaccgccaacgccgacacccugugcaucggcuaccacgccaacaacagcaccgacaccguggacaccgugcuggagaagaacgugaccgugacccacagcgugaaccugcuggaggacaagcacaacggcaagcugugcaagcugagaggcguggccccccugcaccugggcaagugcaacaucgccggcuggauccugggcaaccccgagugcgagagccugagcaccgccagcagcuggagcuacaucguggagaccagcagcagcgacaacggcaccugcuaccccggcgacuucaucgacuacgaggagcugagagagcagcugagcagcgugagcagcuucgagagauucgagaucuuccccaagaccagcagcuggcccaaccacgacagcaacaagggcgugaccgccgccugcccccacgccggcgccaagagcuucuacaagaaccugaucuggcuggugaagaagggcaacagcuaccccaagcugagcaagagcuacaucaacgacaagggcaaggaggugcuggugcuguggggcauccaccaccccagcaccagcgccgaccagcagggccuguaccagaacgccgacgccuacguguucgugggcaccagcagauacagcaagaaguucaagcccgagaucgccaucagacccaaggugagagaccaggagggcagaaugaacuacuacuggacccugguggagcccggcgacaagaucaccuucgaggccaccggcaaccugguggugcccagauacgccuucgccauggagagaaacgccggcagcggcaucaucaucagcgacacccccgugcacgacugcaacaccaccugccagacccccaagggcgccaucaacaccagccugcccuuccagaacauccaccccaucaccaucggcaagugccccaaguacgugaagagcaccaagcugagacuggccaccggccugagaaacgugcccagcauccagagcagaggccuguucggcgccaucgccggcuucaucgagggcggcuggaccggcaugguggacggcugguacggcuaccaccaccagaacgagcagggcagcggcuacgccgccgaccugaagagcacccagaacgccaucgacaagaucaccaacaaggugaacagcgugaucgagaagaugaacacccaguucaccgccgugggcaaggaguucaaccaccuggagaagagaaucgagaaccugaacaagaagguggacgacggcuuccuggacaucuggaccuacaacgccgagcugcuggugcugcuggagaacgagagaacccuggacuaccacgacagcaacgugaagaaccuguacgagaaggugagaagccagcugaagaacaacgccaaggagaucggcaacggcugcuucgaguucuaccacaagugcgacaacaccugcauggagagcgugaagaacggcaccuacgacuaccccaaguacagcgaggaggccaagcugaacagagaggagaucgacggcgugaagcuggagagcaccagaaucuaccagauccuggccaucuacagcaccguggccagcagccuggugcugguggugagccugggcgccaucagcuucuggaugugcagcaacggcagccugcagugcagaaucugcaucuga

SEQ ID NO: 164272 - RNA, 1701 nt, Artificial Sequence; identical to SEQ ID NO: 163893
  derived and/or modified CDS sequence (opt4) from hemagglutinin__InfluenzaA__ADD23172

SEQ ID NO: 164273 - RNA, 1701 nt, Artificial Sequence; identical to SEQ ID NO: 163893
  derived and/or modified CDS sequence (opt4) from hemagglutinin__InfluenzaA__ADD23182

SEQ ID NO: 164274 - RNA, 1701 nt, Artificial Sequence; identical to SEQ ID NO: 163893
  derived and/or modified CDS sequence (opt4) from hemagglutinin__InfluenzaA__ADD23192

SEQ ID NO: 164275 - RNA, 1701 nt, Artificial Sequence; identical to SEQ ID NO: 163893
  derived and/or modified CDS sequence (opt4) from hemagglutinin__InfluenzaA__ADD23202

SEQ ID NO: 164276 - RNA, 1701 nt, Artificial Sequence; identical to SEQ ID NO: 163893
  derived and/or modified CDS sequence (opt4) from hemagglutinin__InfluenzaA__ADD23220

SEQ ID NO: 164277 - RNA, 1701 nt, Artificial Sequence; identical to SEQ ID NO: 163889
  derived and/or modified CDS sequence (opt4) from hemagglutinin__InfluenzaA__ADD23230

SEQ ID NO: 164278 - RNA, 1701 nt, Artificial Sequence; identical to SEQ ID NO: 163893
  derived and/or modified CDS sequence (opt4) from hemagglutinin__InfluenzaA__ADD23240

SEQ ID NO: 164279 - RNA, 1701 nt, Artificial Sequence
  derived and/or modified CDS sequence (opt4) from hemagglutinin__InfluenzaA__ADD23260
augaaggccauccugguggugcugcuguacaccuucgccaccgccaacgccgacacccugugcaucggcuaccacgccaacaacagcaccgacaccguggacaccgugcuggagaagaacgugaccgugacccacagcgugaaccugcuggaggacaagcacaacggcaagcugugcaagcugagaggcguggccccccugcaccugggcaagugcaacaucgccggcuggauccugggcaaccccgagugcgagagccugagcaccgccagcagcuggagcuacaucguggagaccagcagcagcgacaacggcaccugcuaccccggcgacuucaucgacuacgaggagcugagagagcagcugagcagcgugagcagcuucgagagauucgagaucuuccccaagaccagcagcuggcccaaccacgacagcaacaagggcgugaccgccgccugcccccacgccggcgccaagagcuucuacaagaaccugaucuggcuggugaagaagggcaacagcuaccccaagcugagcaagagcuacaucaacgacaagggcaaggaggugcuggugcuguggggcauccaccaccccagcaccagcgccgaccagcagagccuguaccagaacgccgacgccuacguguucgugggcaccagcagauacagcaagaaguucaagcccgagaucgccaucagacccaaggugagagaccaggagggcagaaugaacuacuacuggacccugguggagcccggcgacaagaucaccuucgaggccaccggcaaccugguggugcccagauacgccuucgccauggagagaaacgccggcagcggcaucaucaucagcgacacccccgugcacgacugcaacaccaccugccagacccccgagggcgccaucaacaccagccugcccuuccagaacauccaccccaucaccaucggcaagugccccaaguacgugaagagcaccaagcugagacuggccaccggccugagaaacgugcccagcauccagagcagaggccuguucggcgccaucgccggcuucaucgagggcggcuggaccggcaugguggacggcugguacggcuaccaccaccagaacgagcagggcagcggcuacgccgccgaccugaagagcacccagaacgccaucgacaagaucaccaacaaggugaacagcgugaucgagaagaugaacacccaguucaccgccgugggcaaggaguucaaccaccuggagaagagaaucgagaaccugaacaagaagguggacgacggcuuccuggacaucuggaccuacaacgccgagcugcuggugcugcuggagaacgagagaacccuggacuaccacgacagcaacgugaagaaccuguacgagaaggugagaagccagcugaagaacaacgccaaggagaucggcaacggcugcuucgaguucuaccacaagugcgacaacaccugcauggagagcgugaagaacggcaccuacgacuaccccaaguacagcgaggaggccaagcugaacagagaggagaucgacggcgugaagcuggagagcaccagaaucuaccagauccuggccaucuacagcaccguggccagcagccuggugcugguggugagccugggcgccaucagcuucuggaugugcagcaacggcagccugcagugcagaaucugcaucuga

SEQ ID NO: 164280 - RNA, 1701 nt, Artificial Sequence; identical to SEQ ID NO: 163082
  derived and/or modified CDS sequence (opt4) from hemagglutinin__InfluenzaA__ADD23280

SEQ ID NO: 164281 - RNA, 1701 nt, Artificial Sequence
  derived and/or modified CDS sequence (opt4) from hemagglutinin__InfluenzaA__ADD23290
augaaggccauccugguggugcugcuguacaccuucgccaccgccaacgccgacacccugugcaucggcuaccacgccaacaacagcaccgacaccguggacaccgugcuggagaagaacgugaccgugacccacagcgugaaccugcuggaggacaagcacaacggcaagcugugcaagcugagaggcguggccccccugcaccugggcaagugcaacaucgccggcuggauccugggcaaccccgagugcgagagccugagcaccgccagcagcuggagcuacaucguggagaccagcagcagcgacaacggcaccugcuaccccggcgacuucaucaacuacgaggagcugagagagcagcugagcagcgugagcagcuucgagagauucgagaucuuccccaagaccagcagcuggcccaaccacgacagcaacaagggcgugaccgccgccugcccccacgccggcgccaagagcuucuacaagaaccugaucuggcuggugaagaagggcaacagcuaccccaagcugagcaagagcuacaucaacgacaagggcaaggaggugcuggugcuguggggcauccaccaccccagcaccagcgccgaccagcagagccuguaccagaacgccgacgccuacguguucgugggcaccagcagauacagcaagaaguucaagcccgagaucgccaucagacccaaggugagagaccaggagggcagaaugaacuacuacuggacccugguggagcccggcgacaagaucaccuucgaggccaccggcaaccugguggugcccagauacgccuucgccauggagagaaacgccggcagcggcaucaucaucagcgacacccccgugcacgacugcaacaccaccugccagacccccaagggcgccaucaacaccagccugcccuuccagaacauccaccccaucaccaucggcaagugccccaaguacgugaagagcaccaagcugagacuggccaccggccugagaaacgugcccagcauccagagcagaggccuguucggcgccaucgccggcuucaucgagggcggcuggaccggcaugguggacggcugguacggcuaccaccaccagaacgagcagggcagcggcuacgccgccgaccugaagagcacccagaacgccaucgacaagaucaccaacaaggugaacagcgugaucgagaagaugaacacccaguucaccgccgugggcaaggaguucaaccaccuggagaagagaaucgagaaccugaacaagaagguggacgacggcuuccuggacaucuggaccuacaacgccgagcugcuggugcugcuggagaacgagagaacccuggacuaccacgacagcaacgugaagaaccuguacgagaaggugagaagccagcugaagaacaacgccaaggagaucggcaacggcugcuucgaguucuaccacaagugcgacaacaccugcauggagagcgugaagaacggcaccuacgacuaccccaaguacagcgaggaggccaagcugaacagagaggagaucgacggcgugaagcuggagagcaccagaaucuaccagauccuggccaucuacagcaccguggccagcagccuggugcugguggugagccugggcgccaucagcuucuggaugugcagcaacggcagccugcagugcagaaucugcaucuga

SEQ ID NO: 164282 - RNA, 1701 nt, Artificial Sequence; identical to SEQ ID NO: 163893
  derived and/or modified CDS sequence (opt4) from hemagglutinin__InfluenzaA__ADD23300

SEQ ID NO: 164283 - RNA, 1701 nt, Artificial Sequence; identical to SEQ ID NO: 164281
  derived and/or modified CDS sequence (opt4) from hemagglutinin__InfluenzaA__ADD23310

SEQ ID NO: 164284 - RNA, 1701 nt, Artificial Sequence; identical to SEQ ID NO: 163893
  derived and/or modified CDS sequence (opt4) from hemagglutinin__InfluenzaA__ADD23320

SEQ ID NO: 164285 - RNA, 1701 nt, Artificial Sequence
  derived and/or modified CDS sequence (opt4) from hemagglutinin__InfluenzaA__ADD23330
augaaggccauccugguggugcugcuguacaccuucgccaccgccaacgccgacacccugugcaucggcuaccacgccaacaacagcaccgacaccguggacaccgugcuggagaagaacgugaccgugacccacagcgugaaccugcuggaggacaagcacaacggcaagcugugcaagcugagaggcguggccccccugcaccugggcaagugcaacaucgccggcuggauccugggcaaccccgagugcgagagccugagcaccgccagcagcuggagcuacaucguggagaccagcagcagcgacaacggcaccugcuaccccggcgacuucaucaacuacgaggagcugagagagcagcugagcagcgugagcagcuucgagagauucgagaucuuccccaagaccagcagcuggcccaaccacgacagcaacaagggcgugaccgccgccugcccccacgccggcgccaagagcuucuacaagaaccugaucuggcuggugaagaagggcaacagcuaccccaagcugagcaagagcuacaucaacgacaagggcaaggaggugcuggugcuguggggcauccaccaccccagcaccagcgccgaccagcagagccuguaccagaacgccgacgccuacguguucgugggcaccagcagauacagcaagaaguucaagcccgagaucgccaucagacccaaggugagagaccaggagggcagaaugaacuacuacuggacccugguggagcccggcgacaagaucaccuucgaggccaccggcaaccugguggugcccagauacgccuucgccauggagagaaacgccggcagcggcaucaucaucagcgacacccccgugcacgacugcaacaccaccugccagacccccaagggcgccaucaacaccagccugcccuuccagaacauccaccccaucaccaucggcaagugccccaaguacgugaagagcaccaagcugagacuggccaccggccugagaaacgugcccagcauccagagcagaggccuguucggcgccaucgccggcuucaucgagggcggcuggaccggcaugguggacggcugguacggcuaccaccaccagaacgagcagggcagcggcuacgccgccgaccugaagagcacccagaacgccaucgacaagaucaccaacaaggugaacagcgugaucgagaagaugaacacccaguucaccgccgugggcaaggaguucaaccaccuggagaagagaaucgagaaccugaacaagaagguggacgacggcuuccuggacaucuggaccuacaacgccgagcugcuggugcugcuggagaacgagagaacccuggacuaccacgacagcaacgugaagaaccuguacgagaaggugagaagccagcugaagaccaacgccaaggagaucggcaacggcugcuucgaguucuaccacaagugcgacaacaccugcauggagagcgugaagaacggcaccuacgacuaccccaaguacagcgaggaggccaagcugaacagagaggagaucgacggcgugaagcuggagagcaccagaaucuaccagauccuggccaucuacagcaccguggccagcagccuggugcugguggugagccugggcgccaucagcuucuggaugugcagcaacggcagccugcagugcagaaucugcaucuga

SEQ ID NO: 164286 - RNA, 1701 nt, Artificial Sequence
  derived and/or modified CDS sequence (opt4) from hemagglutinin__InfluenzaA__ADD23355
augaaggccauccugguggugcugcuguacaccuucgccaccgccaacgccgacacccugugcaucggcuaccacgccaacaacagcaccgacaccguggacaccgugcuggagaagaacgugaccgugacccacagcgugaaccugcuggaggacaagcacaacggcaagcugugcaagcugagaggcguggccccccugcaccugggcaagugcaacaucgccggcuggauccugggcaaccccgagugcgagagccugagcaccgccagcagcuggagcuacaucguggagaccagcagcagcgacaacggcaccugcuaccccggcgacuucaucaacuacgaggagcugagagagcagcugagcagcgugagcagcuucgagauguucgagaucuuccccaagaccagcagcuggcccaaccacgacagcaacaagggcgugaccgccgccugcccccacgccggcgccaagagcuucuacaagaaccugaucuggcuggugaagaagggcaacagcuaccccaagcugagcaagagcuacaucaacgacaagggcaaggaggugcuggugcuguggggcauccaccaccccagcaccagcgccgaccagcagagccuguaccagaacgccgacgccuacguguucgugggcaccagcagauacagcaagaaguucaagcccgagaucgccaucagacccaaggugagagaccaggagggcagaaugaacuacuacuggacccugguggagcccggcgacaagaucaccuucgaggccaccggcaaccugguggugcccagauacgccuucgccauggagagaaacgccggcagcggcaucaucaucagcgacacccccgugcacgacugcaacaccaccugccagacccccaagggcgccaucaacaccagccugcccuuccagaacauccaccccaucaccaucggcaagugccccaaguacgugaagagcaccaagcugagacuggccaccggccugagaaacgugcccagcauccagagcagaggccuguucggcgccaucgccggcuucaucgagggcggcuggaccggcaugguggacggcugguacggcuaccaccaccagaacgagcagggcagcggcuacgccgccgaccugaagagcacccagaacgccaucgacaagaucaccaacaaggugaacagcgugaucgagaagaugaacacccaguucaccgccgugggcaaggaguucaaccaccuggagaagagaaucgagaaccugaacaagaagguggacgacggcuuccuggacaucuggaccuacaacgccgagcugcuggugcugcuggagaacgagagaacccuggacuaccacgacagcaacgugaagaaccuguacgagaaggugagaagccagcugaagaacaacgccaaggagaucggcaacggcugcuucgaguucuaccacaagugcgacaacaccugcauggagagcgugaagaacggcaccuacgacuaccccaaguacagcgaggaggccaagcugaacagagaggagaucgacggcgugaagcuggagagcaccagaaucuaccagauccuggccaucuacagcaccguggccagcagccuggugcugguggugagccugggcgccaucagcuucuggaugugcagcaacggcagccugcagugcagaaucugcaucuga

SEQ ID NO: 164287 - RNA, 1701 nt, Artificial Sequence; identical to SEQ ID NO: 164281
  derived and/or modified CDS sequence (opt4) from hemagglutinin__InfluenzaA__ADD23375

SEQ ID NO: 164288 - RNA, 1701 nt, Artificial Sequence; identical to SEQ ID NO: 163893
  derived and/or modified CDS sequence (opt4) from hemagglutinin__InfluenzaA__ADD23385

SEQ ID NO: 164289 - RNA, 1701 nt, Artificial Sequence
  derived and/or modified CDS sequence (opt4) from hemagglutinin__InfluenzaA__ADD23405
augaaggccauccugguggugcugcuguacaccuucgccaccgccaacgccgacacccugugcaucggcuaccacgccaacaacagcaccgacaccguggacaccgugcuggagaagaacgugaccgugacccacagcgugaaccugcuggaggacaagcacaacggcaagcugugcaagcugagaggcguggccccccugcaccugggcaagugcaacaucgccggcuggauccugggcaaccccgagugcgagagccugagcaccgccagcagcuggagcuacaucguggagaccagcagcagcgacaacggcaccugcuaccccggcgacuucaucaacuacgaggagcugagagagcagcugagcagcgugagcagcuucgagagauucgagaucuuccccaagaccagcagcuggcccaaccacgacagcaacaagggcgugaccgccgccugcccccacgccggcgccaagagcuucuacaagaaccugaucuggcuggugaagaagggcaacagcuaccccaagcugagcaagagcuacaucaacgacaagggcaaggaggugcuggugcuguggggcauccaccaccccagcaccagcgccgaccagcagagccuguaccagaacgccgacgccuacguguucgugggcaccagcagauacagcaagaaguucaagcccgagaucgccaucagacccaaggugagagaccaggagggcagaaugaacuacuacuggacccugguggagcccggcgacaagaucaccuucgaggccaccggcaaccugguggugcccagauacgccuucgccauggagagaaacgccggcagcggcaucaucaucagcgacacccccgugcacgacugcaacaccaccugccagacccccaagggcgccaucaacaccagccugcccuuccagaacauccaccccaucaccgugggcaagugccccaaguacgugaagagcaccaagcugagacuggccaccggccugagaaacgugcccagcauccagagcagaggccuguucggcgccaucgccggcuucaucgagggcggcuggaccggcaugguggacggcugguacggcuaccaccaccagaacgagcagggcagcggcuacgccgccgaccugaagagcacccagaacgccaucgacaagaucaccaacaaggugaacagcgugaucgagaagaugaacacccaguucaccgccgugggcaaggaguucaaccaccuggagaagagaaucgagaaccugaacaagaagguggacgacggcuuccuggacaucuggaccuacaacgccgagcugcuggugcugcuggagaacgagagaacccuggacuaccacgacagcaacgugaagaaccuguacgagaaggugagaagccagcugaagaacaacgccaaggagaucggcaacggcugcuucgaguucuaccacaagugcgacaacaccugcauggagagcgugaagaacggcaccuacgacuaccccaaguacagcgaggaggccaagcugaacagagaggagaucgacggcgugaagcuggagagcaccagaaucuaccagauccuggccaucuacagcaccguggccagcagccuggugcugguggugagccugggcgccaucagcuucuggaugugcagcaacggcagccugcagugcagaaucugcaucuga

SEQ ID NO: 164290 - RNA, 1701 nt, Artificial Sequence
  derived and/or modified CDS sequence (opt4) from hemagglutinin__InfluenzaA__ADD23415
augaaggccauccugguggugcugcuguacaccuucgccaccgccaacgccgacacccugugcaucggcuaccacgccaacaacagcaccgacaccguggacaccgugcuggagaagaacgugaccgugacccacagcgugaaccugcuggaggacaagcacaacggcaagcugugcaagcugagaggcguggccccccugcaccugggcaagugcaacaucgccggcuggauccugggcaaccccgagugcgagagccugagcaccgccagcagcuggagcuacaucguggagaccagcagcagcgacaacggcaccugcuaccccggcgacuucaucaacuacgaggagcugagagagcagcugagcagcgugagcagcuucgagagauucgagaucuuccccaagaccagcagcuggcccaaccacgacagcaacaagggcgugaccgccgccugcccccacgccggcgccaagagcuucuacaagaaccugaucuggcuggugaagaagggcaacagcuaccccaagcugagcaagagcuacaucaacgacaagggcaaggaggugcuggugcuguggggcauccaccaccccagcaccagcgccgaccagcagagccuguaccagaacgccgacgccuacguguucgugggcaccagcagauacagcaagaaguucaagcccgagaucgccaucagacccaaggugagagaccaggagggcagaaugaacuacuacuggacccugguggagcccggcgacaagaucaccuucgaggccaccggcaaccugguggugcccagauacgccuucgccauggagagaaacgccgagagcggcaucaucaucagcgacacccccgugcacgacugcaacaccaccugccagacccccaagggcgccaucaacaccagccugcccuuccagaacauccaccccaucaccaucggcaagugccccaaguacgugaagagcaccaagcugagacuggccaccggccugagaaacgugcccagcauccagagcagaggccuguucggcgccaucgccggcuucaucgagggcggcuggaccggcaugguggacggcugguacggcuaccaccaccagaacgagcagggcagcggcuacgccgccgaccugaagagcacccagaacgccaucgacaagaucaccaacaaggugaacagcgugaucgagaagaugaacacccaguucaccgccgugggcaaggaguucaaccaccuggagaagagaaucgagaaccugaacaagaagguggacgacggcuuccuggacaucuggaccuacaacgccgagcugcuggugcugcuggagaacgagagaacccuggacuaccacgacagcaacgugaagaaccuguacgagaaggugagaagccagcugaagaacaacgccaaggagaucggcaacggcugcuucgaguucuaccacaagugcgacaacaccugcauggagagcgugaagaacggcaccuacgacuaccccaaguacagcgaggaggccaagcugaacagagaggagaucgacggcgugaagcuggagagcaccagaaucuaccagauccuggccaucuacagcaccguggccagcagccuggugcugguggugagccugggcgccaucagcuucuggaugugcagcaacggcagccugcagugcagaaucugcaucuga

SEQ ID NO: 164291 - RNA, 1701 nt, Artificial Sequence; identical to SEQ ID NO: 163893
  derived and/or modified CDS sequence (opt4) from hemagglutinin__InfluenzaA__ADD23435

SEQ ID NO: 164292 - RNA, 1701 nt, Artificial Sequence
  derived and/or modified CDS sequence (opt4) from hemagglutinin__InfluenzaA__ADD23465
augaaggccauccuggccgugcugcuguacaccuucgccaccgccaacgccgacacccugugcaucggcuaccacgccaacaacagcaccgacaccguggacaccgugcuggagaagaacgugaccgugacccacagcgugaaccugcuggaggacaagcacaacggcaagcugugcaagcugagaggcguggccccccugcaccugggcaagugcaacaucgccggcuggauccugggcaaccccgagugcgagagccugagcaccgccagcagcuggagcuacaucguggagaccagcagcagcgacaacggcaccugcuaccccggcgacuucaucgacuacgaggagcugagagagcagcugagcagcgugagcagcuucgagagauucgagaucuuccccaagaccagcagcuggcccaaccacgacagcaacaagggcgugaccgccgccugcccccacgccggcgccaagagcuucuacaagaaccugaucuggcuggugaagaagggcaacagcuaccccaagcugagcaagagcuacaucaacgacaagggcaaggaggugcuggugcuguggggcauccaccaccccagcaccagcgccgaccagcagagccuguaccagaacgccgacgccuacguguucgugggcaccagcagauacagcaagaaguucaagcccgagaucgccaucagacccaaggugagagaccaggagggcagaaugaacuacuacuggacccugguggagcccggcgacaagaucaccuucgaggccaccggcaaccugguggugcccagauacgccuucgccauggagagaaacgccggcagcggcaucaucaucagcgacacccccgugcacgacugcaacaccaccugccagacccccaagggcgccaucaacaccagccugcccuuccagaacauccaccccaucaccaucggcaagugccccaaguacgugaagagcaccaagcugagacuggccaccggccugagaaacgugcccagcauccagagcagaggccuguucggcgccaucgccggcuucaucgagggcggcuggaccggcaugguggacggcugguacggcuaccaccaccagaacgagcagggcagcggcuacgccgccgaccugaagagcacccagaacgccaucgacaagaucaccaacaaggugaacagcgugaucgagaagaugaacacccaguucaccgccgugggcaaggaguucaaccaccuggagaagagaaucgagaaccugaacaagaagguggacgacggcuuccuggacaucuggaccuacaacgccgagcugcuggugcugcuggagaacgagagaacccuggacuaccacgacagcaacgugaagaaccuguacgagaaggugagaagccagcugaagaacaacgccaaggagaucggcaacggcugcuucgaguucuaccacaagugcgacaacaccugcauggagagcgugaagaacggcaccuacgacuaccccaaguacagcgaggaggccaagcugaacagagaggagaucgacggcgugaagcuggagagcaccagaaucuaccagauccuggccaucuacagcaccguggccagcagccuggugcugguggugagccugggcgccaucagcuucuggaugugcagcaacggcagccugcagugcagaaucugcaucuga

SEQ ID NO: 164293 - RNA, 1701 nt, Artificial Sequence; identical to SEQ ID NO: 163893
  derived and/or modified CDS sequence (opt4) from hemagglutinin__InfluenzaA__ADD23475

SEQ ID NO: 164294 - RNA, 1701 nt, Artificial Sequence; identical to SEQ ID NO: 163893
  derived and/or modified CDS sequence (opt4) from hemagglutinin__InfluenzaA__ADD23485

SEQ ID NO: 164295 - RNA, 1701 nt, Artificial Sequence
  derived and/or modified CDS sequence (opt4) from hemagglutinin__InfluenzaA__ADD23495
augaaggccauccugguggugcugcuguacaccuucgccaccgccaacgccgacacccugugcaucggcuaccacgccaacaacagcaccgacaccguggacaccgugcuggagaagaacgugaccgugacccacagcgugaaccugcuggaggacaagcacaacggcaagcugugcaagcugagaggcguggccccccugcaccugggcaagugcaacaucgccggcuggauccugggcaaccccgagugcgagagccugagcaccgccagcagcuggagcuacaucguggagaccagcagcagcgacaacggcaccugcuaccccggcgacuucaucgacuacgaggagcugagagagcagcugagcagcgugagcagcuucgagagauucgagaucuuccccaagaccagcagcuggcccaaccacgacagcaacaagggcgugaccgccgccugcccccacgccggcgccagaagcuucuacaagaaccugaucuggcuggugaagaagggcaacagcuaccccaagcugagcaagagcuacaucaacgacaagggcaaggaggugcuggugcuguggggcauccaccaccccagcaccagcgccgaccagcagagccuguaccagaacgccgacgccuacguguucgugggcaccagcagauacagcaagaaguucaagcccgagaucgccaucagacccaaggugagagaccaggagggcagaaugaacuacuacuggacccugguggagcccggcgacaagaucaccuucgaggccaccggcaaccugguggugcccagauacgccuucgccauggagagaaacgccggcagcggcaucaucaucagcgacacccccgugcacgacugcaacaccaccugccagacccccaagggcgccaucaacaccagccugcccuuccagaacauccaccccaucaccaucggcaagugccccaaguacgugaagagcaccaagcugagacuggccaccggccugagaaacgugcccagcauccagagcagaggccuguucggcgccaucgccggcuucaucgagggcggcuggaccggcaugguggacggcugguacggcuaccaccaccagaacgagcagggcagcggcuacgccgccgaccugaagagcacccagaacgccaucgacgagaucaccaacaaggugaacagcgugaucgagaagaugaacacccaguucaccgccgugggcaaggaguucaaccaccuggagaagagaaucgagaaccugaacaagaagguggacgacggcuuccuggacaucuggaccuacaacgccgagcugcuggugcugcuggagaacgagagaacccuggacuaccacgacagcaacgugaagaaccuguacgagaaggugagaagccagcugaagaacaacgccaaggagaucggcaacggcugcuucgaguucuaccacaagugcgacaacaccugcauggagagcgugaagaacggcaccuacgacuaccccaaguacagcgaggaggccaagcugaacagagaggagaucgacggcgugaagcuggagagcaccagaaucuaccagauccuggccaucuacagcaccguggccagcagccuggugcugguggugagccugggcgccaucagcuucuggaugugcagcaacggcagccugcagugcagaaucugcaucuga

SEQ ID NO: 164296 - RNA, 1701 nt, Artificial Sequence
  derived and/or modified CDS sequence (opt4) from hemagglutinin__InfluenzaA__ADD23505
augaaggccauccugguggugcugcuguacaccuucgccaccgccaacgccgacacccugugcaucggcuaccacgccaacaacagcaccgacaccguggacaccgugcuggagaagaacgugaccgugacccacagcgugaaccugcuggaggacaagcacaacggcaagcugugcaagcugagaggcguggccccccugcaccugggcaagugcaacaucgccggcuggauccugggcaaccccgagugcgagagccugagcaccgccagcagcuggagcuacaucguggagaccagcagcagcgacaacggcaccugcuaccccggcgacuucaucgacuacgaggagcugagagagcagcugagcagcgugagcagcuucgagagauucgagaucuuccccaagaccagcagcuggcccaaccacgacagcaacaagggcgugaccgccgccugcccccacgccggcgccaagagcuucuacaagaaccugaucuggcuggugaagaagggcaacagcuaccccaagcugagcaagagcuacaucaacgacaagggcaaggaggugcuggugcuguggggcauccaccaccccagcaccagcgccgaccagcagagccuguaccagaacgccgacgccuacguguucgugggcaccagcagauacagcaagaaguucaagcccgagaucgccaucagacccaaggugagagaccaggagggcagaaugaacuacuacuggacccugaucgagcccggcgacaagaucaccuucgaggccaccggcaaccugguggugcccagauacgccuucgccauggagagaaacgccggcagcggcaucaucaucagcgacacccccgcccacgacugcaacaccaccugccagacccccaagggcgccaucaacaccagccugcccuuccagaacauccaccccaucaccaucggcaagugccccaaguacgugaagagcaccaagcugagacuggccaccggccugagaaacgugcccagcauccagagcagaggccuguucggcgccaucgccggcuucaucgagggcggcuggaccggcaugguggacggcugguacggcuaccaccaccagaacgagcagggcagcggcuacgccgccgaccugaagagcacccagaacgccaucgacaagaucaccaacaaggugaacagcgugaucgagaagaugaacacccaguucaccgccgugggcaaggaguucaaccaccuggagaagagaaucgagaaccugaacaagaagguggacgacggcuuccuggacaucuggaccuacaacgccgagcugcuggugcugcuggagaacgagagaacccuggacuaccacgacagcaacgugaagaaccuguacgagaaggugagaagccagcugaagaacaacgccaaggagaucggcaacggcugcuucgaguucuaccacaagugcgacaacaccugcauggagagcgugaagaacggcaccuacgacuaccccaaguacagcgaggaggccaagcugaacagagaggagaucgacggcgugaagcuggagagcaccagaaucuaccagauccuggccaucuacagcaccguggccagcagccuggugcugguggugagccugggcgccaucagcuucuggaugugcagcaacggcagccugcagugcagaaucugcaucuga

SEQ ID NO: 164297 - RNA, 1701 nt, Artificial Sequence; identical to SEQ ID NO: 163893
  derived and/or modified CDS sequence (opt4) from hemagglutinin__InfluenzaA__ADD23515

SEQ ID NO: 164298 - RNA, 1701 nt, Artificial Sequence; identical to SEQ ID NO: 163893
  derived and/or modified CDS sequence (opt4) from hemagglutinin__InfluenzaA__ADD23994

SEQ ID NO: 164299 - RNA, 1701 nt, Artificial Sequence
  derived and/or modified CDS sequence (opt4) from hemagglutinin__InfluenzaA__ADD24004
augaaggccauccugguggugcugcuguacaccuucgccaccgccaacgccgacacccugugcaucggcuaccacgccaacaacagcaccgacaccguggacaccgugcuggagaagaacgugaccgugacccacagcgugaaccugcuggaggacaagcacaacggcaagcugugcaagcugagaggcguggccccccugcaccugggcaagugcaacaucgccggcuggauccugggcaaccccgagugcgagagccugagcaccgccagcagcuggagcuacaucguggagaccagcagcagcgacaacggcaccugcuaccccggcgacuucaucgacuacgaggagcugagagagcagcugagcagcgugagcagcuucgagagauucgagaucuuccccaagaccagcagcuggcccaaccacgacagcaacaagggcgugaccgccgccugcccccacgccggcgccaagagcuucuacaagaaccugaucuggcuggugaagaagggcaacagcuaccccaagcugagcaagagcuacaucaacgacaagggcaaggaggugcuggugcuguggggcauccaccaccccagcaccagcgccgaccagcagagccuguaccagaacgccgacgccuacguguucgugggcaccagcagauacagcaagaaguucaagcccgagaucgccaucagacccaaggugagagaccaggagggcagaaugaacuacuacuggacccugguggagcccggcgacaagaucaccuucgaggccaccggcaaccugguggugcccagauacgccuucgccauggagagaaacgccggcagcggcaucaucaucagcgacacccccgugcacgacugcaacaccaccugccagacccccaacggcgccaucaacaccagccugcccuuccagaacauccaccccaucaccaucggcaagugccccaaguacgugaagagcaccaagcugagacuggccaccggccugagaaacgugcccagcauccagagcagaggccuguucggcgccaucgccggcuucaucgagggcggcuggaccggcaugguggacggcugguacggcuaccaccaccagaacgagcagggcagcggcuacgccgccgaccugaagagcacccagaacgccaucgacgagaucaccaacaaggugaacagcgugaucgagaagaugaacacccaguucaccgccgugggcaaggaguucaaccaccuggagaagagaaucgagaaccugaacaagaagaucgacgacggcuuccuggacaucuggaccuacaacgccgagcugcuggugcugcuggagaacgagagaacccuggacuaccacgacagcaacgugaagaaccuguacgagaaggugagaagccagcugaagaacaacgccaaggagaucggcaacggcugcuucgaguucuaccacaagugcgacaacaccugcauggagagcgugaagaacggcaccuacgacuaccccaaguacagcgaggaggccaagcugaacagagaggagaucgacggcgugaagcuggagagcaccagaaucuaccagauccuggccaucuacagcaccguggccagcagccuggugcugguggugagccugggcgccaucagcuucuggaugugcagcaacggcagccugcagugcagaaucugcaucuga

SEQ ID NO: 164300 - RNA, 1701 nt, Artificial Sequence; identical to SEQ ID NO: 163831
  derived and/or modified CDS sequence (opt4) from hemagglutinin__InfluenzaA__ADD24014

SEQ ID NO: 164301 - RNA, 1701 nt, Artificial Sequence
  derived and/or modified CDS sequence (opt4) from hemagglutinin__InfluenzaA__ADD52537
augaaggccauccugguggugcugcuguacaccuucgccaccgccaacgccgacacccugugcaucggcuaccacgccaacaacagcaccgacaccguggacaccgugcuggagaagaacgugaccgugacccacagcgugaaccugcuggaggacaagcacaacggcaagcugugcaagcugagaggcguggccccccugcaccugggcaagugcaacaucgccggcuggauccugggcaaccccgagugcgagagccugagcaccgccagcagcuggagcuacaucguggagaccagcagcagcgacaacggcaccugcuaccccggcgacuucaucgacuacgaggagcugagagagcagcugagcagcgugagcagcuucgagagauucgagaucuuccccaagaccagcagcuggcccaaccacgacagcaacaagggcgugaccgccgccugcccccacgccggcgccaagagcuucuacaagaaccugaucuggcuggugaagaagggcaacagcuaccccaagcugagcaagagcuacaucaacgacaagggcaaggaggugcuggugcuguggggcauccaccaccccagcaccagcgccgaccagcagagccuguaccagaacgccgacgccuacguguucgugggcagcagcagauacagcaagaaguucaagcccgagaucgccaucagacccaaggugagagaccaggagggcagaaugaacuacuacuggacccugguggagcccggcgacaagaucaccuucgaggccaccggcaaccugguggugcccagauacgccuucgccauggagagaaacgccggcagcggcaucaucaucagcgacacccccgugcacgacugcaacaccaccugccagacccccaagggcgccaucaacaccagccugcccuuccagaacauccaccccaucaccaucggcaagugccccaaguacgugaagagcaccaagcugagacuggccaccggccugagaaacgugcccagcauccagagcagaggccuguucggcgccaucgccggcuucaucgagggcggcuggaccggcaugguggacggcugguacggcuaccaccaccagaacgagcagggcagcggcuacgccgccgaccugaagagcacccagaacgccaucgacggcaucaccaacaaggugaacagcgugaucgagaagaugaacacccaguucaccgccgugggcaaggaguucaaccaccuggagaagagaaucgagaaccugaacaagaagguggacgacggcuuccuggacaucuggaccuacaacgccgagcugcuggugcugcuggagaacgagagaacccuggacuaccacgacagcaacgugaagaaccuguacgagaaggugagaagccagcugaagaacaacgccaaggagaucggcaacggcugcuucgaguucuaccacaagugcgacaacaccugcauggagagcgugaagaacggcaccuacgacuaccccaaguacagcgaggaggccaagcugaacagagaggagaucgacggcgugaagcuggagagcaccagaaucuaccagauccuggccaucuacagcaccguggccagcagccuggugcugguggugagccugggcgccaucagcuucuggaugugcagcaacggcagccugcagugcagaaucugcaucuga

SEQ ID NO: 164302 - RNA, 1701 nt, Artificial Sequence; identical to SEQ ID NO: 163893
  derived and/or modified CDS sequence (opt4) from hemagglutinin__InfluenzaA__ADD64203

SEQ ID NO: 164303 - RNA, 1701 nt, Artificial Sequence
  derived and/or modified CDS sequence (opt4) from hemagglutinin__InfluenzaA__ADD64204
augaaggccauccugguggugcugcuguacaccuucgccaccgccaacgccgacacccugugcaucggcuaccacgccaacaacagcaccgacaccguggacaccgugcuggagaagaacgugaccgugacccacagcgugaaccugcuggaggacaagcacaacggcaagcugugcaagcugagaggcguggccccccugcaccugggcaagugcaacaucgccggcuggauccugggcaaccccgagugcgagagccugagcaccgccagcagcuggagcuacaucguggagaccagcagcagcgacaacggcaccugcuaccccggcgacuucaucgacuacgaggagcugagagagcagcugagcagcgugagcagcuucgagagauucgagaucuuccccaagaccagcagcuggcccaaccacgaccccaacaagggcgugaccgccgccugcccccacgccggcgccaagagcuucuacaagaaccugaucuggcuggugaagaagggcaacagcuaccccaagcugagcaagagcuacaucaacgacaagggcaaggaggugcuggugcuguggggcauccaccaccccagcaccagcgccgaccagcagagccuguaccagaacgccgacgccuacguguucgugggcaccagcagauacagcaagaaguucaagcccgagaucgccaucagacccaaggugagagaccaggagggcagaaugaacuacuacuggacccugaucgagcccggcgagaagaucaccuucgaggccaccggcaaccugguggugcccagauacgccuucgccauggagagaaacgccggcagcggcaucaucaucagcgacacccccgugcacgacugcaacaccaccugccagacccccaagggcgccaucaacaccagccugcccuuccagaacauccaccccaucaccaucggcaagugccccaaguacgugaagagcaccaagcugagacuggccaccggccugagaaacgugcccagcauccagagcagaggccuguucggcgccaucgccggcuucaucgagggcggcuggaccggcaugguggacggcugguacggcuaccaccaccagaacgagcagggcagcggcuacgccgccgaccugaagagcacccagaacgccaucgacgagaucaccaacaaggugaacagcgugaucgagaagaugaacacccaguucaccgccgugggcaaggaguucaaccaccuggagaagagaaucgagaaccugaacaagaagguggacgacggcuuccuggacaucuggaccuacaacgccgagcugcuggugcugcuggagaacgagagaacccuggacuaccacgacagcaacgugaagaaccuguacgagaaggugagaagccagcugaagaacaacgccagagagaucggcaacggcugcuucgaguucuaccacaagugcgacaacaccugcauggagagcgugaagaacggcaccuacgacuaccccaaguacagcgaggaggccaagcugaacagagaggagaucgacggcgugaagcuggagagcaccagaaucuaccagauccuggccaucuacagcaccguggccagcagccuggugcugguggugagccugggcgccaucagcuucuggaugugcagcaacggcagccugcagugcagaaucugcaucuga

SEQ ID NO: 164304 - RNA, 1701 nt, Artificial Sequence; identical to SEQ ID NO: 162729
  derived and/or modified CDS sequence (opt4) from hemagglutinin__InfluenzaA__ADD64205

SEQ ID NO: 164305 - RNA, 1701 nt, Artificial Sequence; identical to SEQ ID NO: 162729
  derived and/or modified CDS sequence (opt4) from hemagglutinin__InfluenzaA__ADD64206

SEQ ID NO: 164306 - RNA, 1701 nt, Artificial Sequence; identical to SEQ ID NO: 163527
  derived and/or modified CDS sequence (opt4) from hemagglutinin__InfluenzaA__ADD64207

SEQ ID NO: 164307 - RNA, 1701 nt, Artificial Sequence
  derived and/or modified CDS sequence (opt4) from hemagglutinin__InfluenzaA__ADD64208
augaaggccauccugguggugcugcuguacaccuucgccaccgccaacgccgacacccugugcaucggcuaccacgccaacaacagcaccgacaccguggacaccgugcuggagaagaacgugaccgugacccacagcgugaaccugcuggaggacaagcacaacggcaagcugugcaagcugagaggcguggccccccugcaccugggcaagugcaacaucgccggcuggauccugggcaaccccgagugcgagagccugagcaccgccagcagcuggagcuacaucguggagaccagcagcagcgacaacggcaccugcuaccccggcgacuucaucgacuacgaggagcugagagagcagcugagcagcgugagcagcuucgagagauucgagaucuuccccaagaccagcagcuggcccaaccacgaccccaacaagggcgugaccgccgccugcccccacgccggcgccaagagcuucuacaagaaccugaucuggcuggugaagaagggcaacagcuaccccaagcugagcaagagcuacaucaacgacaagggcaaggaggugcuggugcuguggggcauccaccaccccagcaccagcgccgaccagcagagccuguaccagaacgccgacgccuacguguucgugggcaccagcagauacagcaagaaguucaagcccgagaucgccaucagacccaaggugagagaccaggagggcagaaugaacuacuacuggacccugguggagcccggcgacaagaucaccuucgaggccaccggcaaccugguggugcccagauacgccuucgccauggagagaaacgccggcagcggcaucaucaucagcgacacccccgugcacgacugcaacaccaccugccagacccccaagggcgccaucaacaccagccugcccuuccagaacauccaccccaucaccaucggcaagugccccaaguacgugaagagcaccaagcugagacuggccaccggccugagaaacgugcccagcauccagagcagaggccuguucggcgccaucgccggcuucaucgagggcggcuggaccggcaugguggacggcugguacggcuaccaccaccagaacgagcagggcagcggcuacgccgccgaccugaagagcacccagaacgccaucgacgagaucaccaacaaggugaacagcgugaucgagaagaugaacacccaguucaccgccgugggcaaggaguucaaccaccuggagaagagaaucgagaaccugaacaagaagguggacgacggcuuccuggacaucuggaccuacaacgccgagcugcuggugcugcuggagaacgagagaacccuggacuaccacgaccccaacgugaagaaccuguacgagaaggugagaagccagcugaagaacaacgccaaggagaucggcaacggcugcuucgaguucuaccacaagugcgacaacaccugcauggagagcgugaagaacggcaccuacgacuaccccaaguacagcgaggaggccaagcugaacagagaggagaucgacggcgugaagcuggagagcaccagaaucuaccagauccuggccaucuacagcaccguggccagcagccuggugcugguggugagccugggcgccaucagcuucuggaugugcagcaacggcagccugcagugcagaaucugcaucuga

SEQ ID NO: 164308 - RNA, 1701 nt, Artificial Sequence; identical to SEQ ID NO: 163527
  derived and/or modified CDS sequence (opt4) from hemagglutinin__InfluenzaA__ADD64209

SEQ ID NO: 164309 - RNA, 1701 nt, Artificial Sequence; identical to SEQ ID NO: 162729
  derived and/or modified CDS sequence (opt4) from hemagglutinin__InfluenzaA__ADD64210

SEQ ID NO: 164310 - RNA, 1701 nt, Artificial Sequence; identical to SEQ ID NO: 163527
  derived and/or modified CDS sequence (opt4) from hemagglutinin__InfluenzaA__ADD64211

SEQ ID NO: 164311 - RNA, 1701 nt, Artificial Sequence; identical to SEQ ID NO: 162729
  derived and/or modified CDS sequence (opt4) from hemagglutinin__InfluenzaA__ADD64212

SEQ ID NO: 164312 - RNA, 1701 nt, Artificial Sequence; identical to SEQ ID NO: 163527
  derived and/or modified CDS sequence (opt4) from hemagglutinin__InfluenzaA__ADD64213

SEQ ID NO: 164313 - RNA, 1701 nt, Artificial Sequence
  derived and/or modified CDS sequence (opt4) from hemagglutinin__InfluenzaA__ADD64214
augaaggccauccugguggugcugcuguacaccuucgccaccgccaacgccgacacccugugcaucggcuaccacgccaacaacagcaccgacaccguggacaccgugcuggagaagaacgugaccgugacccacagcgugaaccugcuggagaacaagcacaacggcaagcugugcaagcugagaggcguggccccccugcaccugggcaagugcaacaucgccggcuggauccugggcaaccccgagugcgagagcuucagcaccagcagcagcuggagcuacaucguggagaccagcagcagcgacaacggcaccugcuaccccggcgacuucaucgacuacgaggagcugagagagcagcugagcagcgugagcagcuucgagagauucgagaucuuccccaagaccagcagcuggcccaaccacgacagcaacaagggcgugaccgccgccugcccccacgccggcgccaagagcuucuacaagaaccugaucuggcuggugaagaagggcaacagcuaccccaagcugaacaagagcuacaucaacgacaagggcaaggaggugcuggugcuguggggcauccaccaccccagcaccagcgccgaccagcagagccuguaccagaacgccgacgccuacguguucgugggcaccagcagauacagcaagaaguucaagcccgagaucgccaucagacccaaggugagagaccaggagggcagaaugaacuacuacuggacccugguggagcccggcgacaagaucaccuucgaggccaccggcaaccugguggugcccagauacgccuucgccauggagagaaacgccggcagcggcaucaucaucagcgacacccccgugcacgacugcaacaccaccugccagacccccaagggcgccaucaacaccagccugcccuuccagaacauccaccccaucaccaucggcaagugccccaaguacgugaagagcaccaagcugagacuggccaccggccugagaaacgugcccagcauccagagcagaggccuguucggcgccaucgccggcuucaucgagggcggcuggaccggcaugguggacggcugguacggcuaccaccaccagaacgagcagggcagcggcuacgccgccgaccugaagagcacccagaacgccaucgacggcaucaccaacaaggugaacagcgugaucgagaagaugaacacccaguucaccgccgugggcaaggaguucaaccaccuggagaagagaaucgagaaccugaacaagaagguggacgacggcuuccuggacaucuggaccuacaacgccgagcugcuggugcugcuggagaacgagagaacccuggacuaccacgacagcaacgugaagaaccuguacgagaaggugagaagccagcugaagaacaacgccaaggagaucggcaacggcugcuucgaguucuaccacaagugcgacaacaccugcauggagagcgugaagaacggcaccuacgacuaccccaaguacagcgaggaggccaagcugaacagagaggagaucgacggcgugaagcuggagagcaccagaaucuaccagauccuggccaucuacagcaccguggccagcagccuggugcugguggugagccugggcgccaucagcuucuggaugugcagcaacggcagccugcagugcagaaucugcaucuga

SEQ ID NO: 164314 - RNA, 1701 nt, Artificial Sequence; identical to SEQ ID NO: 162729
  derived and/or modified CDS sequence (opt4) from hemagglutinin__InfluenzaA__ADD64215

SEQ ID NO: 164315 - RNA, 1701 nt, Artificial Sequence; identical to SEQ ID NO: 163527
  derived and/or modified CDS sequence (opt4) from hemagglutinin__InfluenzaA__ADD64216

SEQ ID NO: 164316 - RNA, 1701 nt, Artificial Sequence; identical to SEQ ID NO: 163527
  derived and/or modified CDS sequence (opt4) from hemagglutinin__InfluenzaA__ADD64217

SEQ ID NO: 164317 - RNA, 1701 nt, Artificial Sequence
  derived and/or modified CDS sequence (opt4) from hemagglutinin__InfluenzaA__ADD74350
augaaggccauccugguggugcugcuguacaccuucgccaccgccaacgccgacacccugugcaucggcuaccacgccaacaacagcaccgacaccguggacaccgugcuggagaagaacgugaccgugacccacagcgugaacauccuggaggacaagcacaacggcaagcugugcaagcugagaggcguggccccccugcaccugggcaagugcaacaucgccggcuggauccugggcaaccccgagugcgagagccugagcaccgccagcagcuggagcuacaucguggagaccagcagcagcgacaacggcaccugcuaccccggcgacuucaucgacuacgaggagcugagagagcagcugagcagcgugagcagcuucgagagauucgagaucuuccccaagaccagcagcuggcccaaccacgacagcaacaagggcgugaccgccgccugcagccacgccggcgccaagagcuucuacaagaaccugaucuggcuggugaagaagggcaacagcuaccccaagcugagcaagagcuacaucaacgacaagggcaaggaggugcuggugcuguggggcauccaccaccccagcaccagcgccgaccagcagagccuguaccagaacgccgacgccuacguguucgugggcagcagcagauacagcaagaaguucaagcccgagaucgccaucagacccaaggugagagaccaggagggcagaaugaacuacuacuggacccugguggagcccggcgacaagaucaccuucgaggccaccggcaaccugguggugcccagauacgccuucgccauggagagaaacgccggcagcggcaucaucaucagcgacacccccgugcacgacugcaacaccaccugccagacccccaagggcgccaucaacaccagccugcccuuccagaacauccaccccaucaccaucggcaagugccccaaguacgugaagagcaccaagcugagacuggccaccggccugagaaacgugcccagcauccagagcagaggccuguucggcgccaucgccggcuucaucgagggcggcuggaccggcaugguggacggcugguacggcuaccaccaccagaacgagcagggcagcggcuacgccgccgaccugaagagcacccagaacgccaucgacgagaucaccaacaaggugaacagcgugaucgagaagaugaacacccaguucaccgccgugggcaaggaguucaaccaccuggagaagagaaucgagaaccugaacaagaagguggacgacggcuuccuggacaucuggaccuacaacgccgagcugcuggugcugcuggagaacgagagaacccuggacuaccacgacagcaacgugaagaaccuguacgagaaggugagaagccagcugaagaacaacgccaaggagaucggcaacggcugcuucgaguucuaccacaagugcgacaacaccugcauggagagcgugaagaacggcaccuacgacuaccccaaguacagcgaggaggccaagcugaacagagaggagaucgacggcgugaagcuggagagcaccagaaucuaccagauccuggccaucuacagcaccguggccagcagccuggugcugguggugagccugggcgccaucagcuucuggaugugcagcaacggcagccugcagugcagaaucugcaucuga

SEQ ID NO: 164318 - RNA, 1701 nt, Artificial Sequence
  derived and/or modified CDS sequence (opt4) from hemagglutinin__InfluenzaA__ADD74360
augaaggccauccugguggugcugcuguacaccuucgccaccgccaacgccgacacccugugcaucggcuaccacgccaacaacagcaccgacaccguggacaccgugcuggagaagaacgugaccgugacccacagcgugaaccugcuggaggacaagcacaacggcaagcugugcaagcugagaggcguggccccccugcaccugggcaagugcaacaucgccggcuggauccugggcaaccccgagugcgagagccugagcaccgccagcagcuggagcuacaucguggagaccagcagcagcgacaacggcaccugcuaccccggcgacuucaucgacuacgaggagcugagagagcagcugagcagcgugagcagcuucgagagauucgagaucuuccccaagaccagcagcuggcccaaccacgacagcaacaagggcgugaccgccgccugcccccacgccggcgccaagagcuucuacaagaaccugaucuggcuggugaagaagggcaacagcuaccccaagcugagcaagagcuacaucaacgacaagagaaaggaggugcuggugcuguggggcauccaccaccccagcaccagcgccgaccagcagagccuguaccagaacgccgacgccuacguguucgugggcaccagcagauacagcaagaaguucaagcccgagaucgccaucagacccaaggugagagaccaggagggcagaaugaacuacuacuggacccugguggagcccggcgacaagaucaccuucgaggccaccggcaaccugguggugcccagauacgccuucgccauggagagaaacgccggcagcggcaucaucaucagcgacacccccgugcacgacugcaacaccaccugccagacccccaagggcgccaucaacaccagccugcccuuccagaacauccaccccaucaccaucggcaagugccccaaguacgugaagagcaccaagcugagacuggccaccggccugagaaacgugcccagcauccagagcagaggccuguucggcgccaucgccggcuucaucgagggcggcuggaccggcaugguggacggcugguacggcuaccaccaccagaacgagcagggcagcggcuacgccgccgaccugaagagcacccagaacgccaucgacgagaucaccaacaaggugaacagcgugaucgagaagaugaacacccaguucaccgccgugggcaaggaguucaaccaccuggagaagagaaucgagaaccugaacaagaagguggacgacggcuuccuggacaucuggaccuacaacgccgagcugcuggugcugcuggagaacgagagaacccuggacuaccacgacagcaacgugaagaaccuguacgagaaggugagaagccagcugaagaacaacgccaaggagaucggcaacggcugcuucgaguucuaccacaagugcgacaacaccugcauggagagcgugaagaacggcaccuacgacuaccccaaguacagcgaggaggccaagcugaacagagaggagaucgacggcgugaagcuggagagcaccagaaucuaccagauccuggccaucuacagcaccguggccagcagccuggugcugguggugagccugggcgccaucagcuucuggaugugcagcaacggcagccugcagugcagaaucugcaucuga

SEQ ID NO: 164319 - RNA, 1701 nt, Artificial Sequence; identical to SEQ ID NO: 162729
  derived and/or modified CDS sequence (opt4) from hemagglutinin__InfluenzaA__ADD74370

SEQ ID NO: 164320 - RNA, 1701 nt, Artificial Sequence; identical to SEQ ID NO: 162729
  derived and/or modified CDS sequence (opt4) from hemagglutinin__InfluenzaA__ADD74398

SEQ ID NO: 164321 - RNA, 1701 nt, Artificial Sequence
  derived and/or modified CDS sequence (opt4) from hemagglutinin__InfluenzaA__ADD74428
augaaggccauccugguggugcugcuguacaccuucgccaccgccaacgccgacacccugugcaucggcuaccacgccaacaacagcaccgacaccguggacaccgugcuggagaagaacgugaccgugacccacagcgugaaccugcuggaggacaagcacaacggcaagcugugcaagcugagaggcguggccccccugcaccugggcaagugcaacaucgccggcuggauccugggcaaccccgagugcgagagccugagcaccgccagcagcuggagcuacaucguggagaccagcagcagcgacaacggcaccugcuaccccggcgacuucaucaacuacgaggagcugagagagcagcugagcagcgugagcagcuucgagagauucgagaucuuccccaagaccagcagcuggcccaaccacgacagcaacaagggcgugaccgccgccugcccccacgccggcgccaagagcuucuacaagaaccugaucuggcuggugaagaagggcaacagcuaccccaagcugagcaagagcuacaucaacgacaagggcaaggaggugcuggugcuguggggcauccaccaccccagcaccagcgccgaccagcagagccuguaccagaacgccgacgccuacguguucgugggcaccagcagauacagcaagaaguucaagcccgagaucgccaucagacccaaggugagagaccaggagggcagaaugaacuacuacuggacccuggugaagcccggcgacaagaucaccuucgaggccaccggcaaccugguggugcccagauacgccuucgccauggagagaaacgccggcagcggcaucaucaucagcgacacccccgugcacgacugcaacaccaccugccagacccccaagggcgccaucaacaccagccugcccuuccagaacauccaccccaucaccaucggcaagugccccaaguacgugaagagcaccaagcugagacuggccaccggccugagaaacgugcccagcauccagagcagaggccuguucggcgccaucgccggcuucaucgagggcggcuggaccggcaugguggacggcugguacggcuaccaccaccagaacgagcagggcagcggcuacgccgccgaccugaagagcacccagaacgccaucgacaagaucaccaacaaggugaacagcgugaucgagaagaugaacacccaguucaccgccgugggcaaggaguucaaccaccuggagaagagaaucgagaaccugaacaagaagguggacgacggcuuccuggacaucuggaccuacaacgccgagcugcuggugcugcuggagaacgagagaacccuggacuaccacgacagcaacgugaagaaccuguacgagaaggugagaagccagcugaagaacaacgccaaggagaucggcaacggcugcuucgaguucuaccacaagugcgacaacaccugcauggagagcgugaagaacggcaccuacgacuaccccaaguacagcgaggaggccaagcugaacagagaggagaucgacggcgugaagcuggagagcaccagaaucuaccagauccuggccaucuacagcaccguggccagcagccuggugcugguggugagccugggcgccaucagcuucuggaugugcagcaacggcagccugcagugcagaaucugcaucuga

SEQ ID NO: 164322 - RNA, 1701 nt, Artificial Sequence
  derived and/or modified CDS sequence (opt4) from hemagglutinin__InfluenzaA__ADD74438
augaaggccauccugguggugcugcuguacaccuucgccaccgccaacgccgacacccugugcaucggcuaccacgccaacaacagcaccgacaccguggacaccgugcuggagaagaacgugaccgugacccacagcgugaaccugcuggaggacaagcacaacggcaagcugugcaagcugagaggcguggccccccugcaccugggcaagugcaacaucgccggcuggauccugggcaaccccgagugcgagagccugagcaccgccagcagcuggagcuacaucguggagaccagcagcagcgacaacggcaccugcuaccccggcgacuucaucgacuacgaggagcugagagagcagcugagcagcgugagcagcuucgagagauucgagaucuuccccaagaccagcagcuggcccaaccacgacagcaacaagggcgugaccgccgccugcccccacgccggcgccaagagcuucuacaagaaccugaucuggcuggugaagaagggcaacagcuaccccaagcugagcaagagcuacaucaacgacaagggcaaggaggugcuggugcuguggggcauccaccaccccagcaccagcgccgaccagcagagccuguaccagaacgccgacgccuacguguucgugggcaccagcagauacagcaagaaguucaagcccgagaucgccaucagacccaaggugagagaccaggagggcagaaugaacuacuacuggacccugguggagcccggcgacaagaucaccuucgaggccaccggcaaccugguggugcccagauacgccuucgccauggagagaaacgccggcagcggcaucaucaucagcgacacccccgugcacgacugcaacaccaccugccagacccccaagggcgccaucaacaccagccugcccuuccagaacauccaccccaucaccaucggcaagugccccaaguacgugaagagcaccaagcugagacuggccaccggccugagaaacgugcccagcauccagagcagaggccuguucggcgccaucgccggcuucaucgagggcggcuggaccggcaugguggacggcugguacggcuaccaccaccagaacgagcagggcagcggcuacgccgccgaccugaagagcacccagaacgccaucgacgagaucaccaacaaggugaacagcgugaucgagaagaugaacacccaguucaccgccgugggcaaggaguucaaccaccuggagaagagaaucgagaaccugaacaagaagguggacgacggcuuccuggacaucuggaccuacaacgccgagcugcuggugcugcuggagaacgagagaacccuggacuaccacgacagcaacgugaagaaccuguacgagaaggugagaagccagcugaagaacaacgccaaggagaucggcaacggcugcuucgaguucuaccacaagugcgacaacaccugcauggagagcgugaagaacggcaccuacgacuaccccaaguacagcgaggaggccaagcugaacagagaggagaucgacggcgugaagcuggagcccaccagaaucuaccagauccuggccaucuacagcaccguggccagcagccuggugcugguggugagccugggcgccaucagcuucuggaugugcagcaacggcagccugcagugcagaaucugcaucuga

SEQ ID NO: 164323 - RNA, 1701 nt, Artificial Sequence; identical to SEQ ID NO: 162729
  derived and/or modified CDS sequence (opt4) from hemagglutinin__InfluenzaA__ADD74448

SEQ ID NO: 164324 - RNA, 1701 nt, Artificial Sequence; identical to SEQ ID NO: 162729
  derived and/or modified CDS sequence (opt4) from hemagglutinin__InfluenzaA__ADD74458

SEQ ID NO: 164325 - RNA, 1701 nt, Artificial Sequence
  derived and/or modified CDS sequence (opt4) from hemagglutinin__InfluenzaA__ADD74468
augaaggccauccugguggugcugcuguacaccuucgccaccgccaacgccgacacccugugcaucggcuaccacgccaacaacagcaccgacaccguggacaccgugcuggagaagaacgugaccgugacccacagcguggaccugcuggaggacaagcacaacggcaagcugugcaagcugagaggcguggccccccugcaccugggcaagugcaacaucgccggcuggauccugggcaaccccgagugcgagagccugagcaccgccagcagcuggagcuacaucguggagaccagcagcagcgacaacggcaccugcuaccccggcgacuucaucgacuacgaggagcugagagagcagcugagcagcgugagcagcuucgagagauucgagaucuuccccaagaccagcagcuggcccaaccacgacagcaacaagggcgugaccgccgccugcccccacgccggcgccaagagcuucuacaagaaccugaucuggcuggugaagaagggcaacagcuaccccaagcugagcaagagcuacaucaacgacaagggcaaggaggugcuggugcuguggggcauccaccaccccagcaccagcgccgaccagcagagccuguaccagaacgccgacgccuacguguucgugggcaccagcagauacagcaagaaguucaagcccgagaucaccaucagacccaaggugagagaccaggagggcagaaugaacuacuacuggacccugguggagcccggcgacaagaucaccuucgaggccaccggcaaccugguggugcccagauacgccuucgccauggagagaaacgccggcagcggcaucaucaucagcgacacccccgugcacgacugcaacaccaccugccagacccccaagggcgccaucaacaccagccugcccuuccagaacauccaccccaucaccaucggcaagugccccaaguacgugaagagcaccaagcugagacuggccaccggccugagaaacgugcccagcauccagagcagaggccuguucggcgccaucgccggcuucaucgagggcggcuggaccggcaugguggacggcugguacggcuaccaccaccagaacgagcagggcagcggcuacgccgccgaccugaagagcacccagaacgccaucgacgagaucaccaacaaggugaacagcgugaucgagaagaugaacacccaguucaccgccgugggcaaggaguucaaccaccuggagaagagaaucgagaaccugaacaagaagguggacgacggcuuccuggacaucuggaccuacaacgccgagcugcuggugcugcuggagaacgagagaacccuggacuaccacgacagcaacgugaagaaccuguacgagaaggugagaagccagcugaagaacaacgccaaggagaucggcaacggcugcuucgaguucuaccacaagugcgacaacaccugcauggagagcgugaagaacggcaccuacgacuaccccaaguacagcgaggaggccaagcugaacagagaggagaucgacggcgugaagcuggagagcaccagaaucuaccagauccuggccaucuacagcaccguggccagcagccuggugcugguggugagccugggcgccaucagcuucuggaugugcagcaacggcagccugcagugcagaaucugcaucuga

SEQ ID NO: 164326 - RNA, 1701 nt, Artificial Sequence
  derived and/or modified CDS sequence (opt4) from hemagglutinin__InfluenzaA__ADD74488
augaaggccauccugguggugcugcuguacaccuucgccaccgccaacgccgacacccugugcaucggcuaccacgccaacaacagcaccgacaccguggacaccgugcuggagaagaacgugaccgugacccacagcgugaacauccuggaggacaagcacaacggcaagcugugcaagcugagaggcguggccccccugcaccugggcaagugcaacaucgccggcuggauccugggcaaccccgagugcgagagccugagcaccgccagcagcuggagcuacaucguggagaccagcagcagcgacaacggcaccugcuaccccggcgacuucaucgacuacgaggagcugagagagcagcugagcagcgugagcagcuucgagagauucgagaucuuccccaagaccagcagcuggcccaaccacgacagcaacaagggcgugaccgccgccugcccccacgccggcgccaagagcuucuacaagaaccugaucuggcuggugaagaagggcaacagcuaccccaagcugagcaagagcuacaucaacgacaagggcaaggaggugcuggugcuguggggcauccaccaccccagcaccagcgccgaccagcagagccuguaccagaacgccgacgccuacguguucgugggcaccagcagauacagcaagaaguucaagcccgagaucgccaucagacccaaggugagagaccaggagggcagaaugaacuacuacuggacccugguggagcccggcgacaagaucaccuucgaggccaccggcaaccugguggugcccagauacgccuucgccauggagagaaacgccggcagcggcaucaucaucagcgacacccccgugcacgacugcaacaccaccugccagacccccaagggcgccaucaacaccagccugcccuuccagaacauccaccccaucaccaucggcaagugccccaaguacgugaagagcaccaagcugagacuggccaccggccugagaaacgugcccagcauccagagcagaggccuguucggcgccaucgccggcuucaucgagggcggcuggaccggcaugguggacggcugguacggcuaccaccaccagaacgagcagggcagcggcuacgccgccgaccugaagagcacccagaacgccaucgacgagaucaccaacaaggugaacagcgugaucgagaagaugaacacccaguucaccgccgugggcaaggaguucaaccaccuggagaagagaaucgagaaccugaacaagaagguggacgacggcuuccuggacaucuggaccuacaacgccgagcugcuggugcugcuggagaacgagagaacccuggacuaccacgacagcaacgugaagaaccuguacgagaaggugagaagccagcugaagaacaacgccaaggagaucggcaacggcugcuucgaguucuaccacaagugcgacaacaccugcauggagagcgugaagaacggcaccuacgacuaccccaaguacagcgaggaggccaagcugaacagagaggagaucgacggcgugaagcuggagagcaccagaaucuaccagauccuggccaucuacagcaccguggccagcagccuggugcugguggugagccugggcgccaucagcuucuggaugugcagcaacggcagccugcagugcagaaucugcaucuga

SEQ ID NO: 164327 - RNA, 1701 nt, Artificial Sequence; identical to SEQ ID NO: 162729
  derived and/or modified CDS sequence (opt4) from hemagglutinin__InfluenzaA__ADD74498

SEQ ID NO: 164328 - RNA, 1701 nt, Artificial Sequence
  derived and/or modified CDS sequence (opt4) from hemagglutinin__InfluenzaA__ADD74508
augaaggccauccugguggugcugcuguacaccuucgccaccgccaacgccgacacccugugcaucggcuaccacgccaacaacagcaccgacaccguggacaccgugcuggagaagaacgugaccgugacccacagcguggaccugcuggaggacaagcacaacggcaagcugugcaagcugagaggcguggccccccugcaccugggcaagugcaacaucgccggcuggauccugggcaaccccgagugcgagagccugagcaccgccagcagcuggagcuacaucguggagaccagcagcagcgacaacggcaccugcuaccccggcgacuucaucgacuacgaggagcugagagagcagcugagcagcgugagcagcuucgagagauucgagaucuuccccaagaccagcagcuggcccaaccacgacagcaacaagggcgugaccgccgccugcccccacgccgaggccaagagcuucuacaagaaccugaucuggcuggugaagaagggcaacagcuaccccaagcugagcaagagcuacaucaacgacaagggcaaggaggugcuggugcuguggggcauccaccaccccagcaccagcgccgaccagcagagccuguaccagaacgccgacgccuacguguucgugggcaccagcagauacagcaagaaguucaagcccgagaucgccaucagacccaaggugagagaccaggagggcagaaugaacuacuacuggacccugguggagcccggcgacaagaucaccuucgaggccaccggcaaccugguggugcccagauacgccuucgccauggagagaaacgccggcagcggcaucaucaucagcgacacccccgugcacgacugcaacaccaccugccagacccccaagggcgccaucaacaccagccugcccuuccagaacauccaccccaucaccaucggcaagugccccaaguacgugaagagcaccaagcugagacuggccaccggccugagaaacgugcccagcauccagagcagaggccuguucggcgccaucgccggcuucaucgagggcggcuggaccggcaugguggacggcugguacggcuaccaccaccagaacgagcagggcagcggcuacgccgccgaccugaagagcacccagaacgccaucgacgagaucaccaacaaggugaacagcgugaucgagaagaugaacacccaguucaccgccgugggcaaggaguucaaccaccuggagaagagaaucgagaaccugaacaagaagguggacgacggcuuccuggacaucuggaccuacaacgccgagcugcuggugcugcuggagaacgagagaacccuggacuaccacgacagcaacgugaagaaccuguacgagaaggugagaagccagcugaagaacaacgccaaggagaucggcaacggcugcuucgaguucuaccacaagugcgacaacaccugcauggagagcgugaagaacggcaccuacgacuaccccaaguacagcgaggaggccaagcugaacagagaggagaucgacggcgugaagcuggagagcaccagaaucuaccagauccuggccaucuacagcaccguggccagcagccuggugcugguggugagccugggcgccaucagcuucuggaugugcagcaacggcagccugcagugcagaaucugcaucuga

SEQ ID NO: 164329 - RNA, 1701 nt, Artificial Sequence
  derived and/or modified CDS sequence (opt4) from hemagglutinin__InfluenzaA__ADD74518
augaaggccauccugguggugcugcuguacaccuucgccaccgccaacgccgacacccugugcaucggcuaccacgccaacaacagcaccgacaccguggacaccauccuggagaagaacgugaccgugacccacagcgugaaccugcuggaggacaagcacaacggcaagcugugcaagcugagaggcguggccccccugcaccugggcaagugcaacaucgccggcuggauccugggcaaccccgagugcgagagccugagcaccgccagcagcuggagcuacaucguggagaccagcagcagcgacaacggcaccugcuaccccggcgacuucaucgacuacgaggagcugagagagcagcugagcagcgugagcagcuucgagagauucgagaucuuccccaagaccagcagcuggcccaaccacgacagcaacaagggcgugaccgccgccugcccccacgccggcgccaagagcuucuacaagaaccugaucuggcuggugaagaagggcaacagcuaccccaagcugagcaagagcuacaucaacgacaagggcaaggagauccuggugcuguggggcauccaccaccccagcaccagcgccgaccagcagagccuguaccagaacgccgacgccuacguguucgugggcaccagcagauacagcaagaaguucaagcccgagaucgccaucagacccaaggugagagaccaggagggcagaaugaacuacuacuggacccugguggagcccggcgacaagaucaccuucgaggccaccggcaaccugguggugcccagauacgccuucgccauggagagaaacaccggcagcggcaucaucaucagcgacacccccgugcacgacugcaacaccaccugccagacccccaagggcgccaucaacaccagccugcccuuccagaacauccaccccaucaccaucggcaagugccccaaguacgugaagagcaccaagcugagacuggccaccggccugagaaacgugcccagcauccagagcagaggccuguucggcgccaucgccggcuucaucgagggcggcuggaccggcaugguggacggcugguacggcuaccaccaccagaacgagcagggcagcggcuacgccgccgaccugaagagcacccagaacgccaucgacgagaucaccaacaaggugaacagcgugaucgagaagaugaacacccaguucaccgccgugggcaaggaguucaaccaccuggagaagagaaucgagaaccugaacaagaagguggacgacggcuuccuggacaucuggaccuacaacgccgagcugcuggugcugcuggagaacgagagaacccuggacuaccacgacagcaacgugaagaaccuguacgagaaggugagaagccagcugaagaacaacgccaaggagaucggcaacggcugcuucgaguucuaccacaagugcgacaacaccugcauggagagcgugaagaacggcaccuacgacuaccccaaguacagcgaggaggccaagcugaacagagaggagaucgacggcgugaagcuggagagcaccagaaucuaccagauccuggccaucuacagcaccguggccagcagccuggugcugguggugagccugggcgccaucagcuucuggaugugcagcaacggcagccugcagugcagaaucugcaucuga

SEQ ID NO: 164330 - RNA, 1701 nt, Artificial Sequence
  derived and/or modified CDS sequence (opt4) from hemagglutinin__InfluenzaA__ADD74528
augaaggccauccugguggugcugcuguacaccuucgccaccgccaacgccgacacccugugcaucggcuaccacgccaacaacagcaccgacaccguggacaccgugcuggagaagaacgugaccgugacccacagcgugaaccugcuggaggacaagcacaacggcaagcugugcaagcugagaggcguggccccccugcaccugggcaagugcaacaucgccggcuggauccugggcaaccccgagugcgagagccugagcaccgccagcagcuggagcuacaucguggagaccagcagcagcgacaacggcaccugcuaccccggcgacuucaucaacuacgaggagcugagagagcagcugagcagcgugagcagcuucgagagauucgagaucuuccccaagaccagcagcuggcccaaccacgacagcaacaagggcgugaccgccgccugcccccacgccggcgccaagagcuucuacaagaaccugaucuggcuggugaagaagggcaacagcuaccccaagcugagcaagagcuacaucaacgacaagggcaaggaggugcuggugcuguggggcauccaccaccccagcaccagcgccgaccagcagagccuguaccagaacgccgacgccuacguguucgugggcaccagcagauacagcaagaaguuccagcccgagaucgccaucagacccaaggugagagaccaggagggcagaaugaacuacuacuggacccugguggagcccggcgacaagaucaccuucgaggccaccggcaaccugguggugcccagauacgccuucgccauggagagaaacgccggcagcggcaucaucaucagcgacacccccgugcacgacugcaacaccaccugccagacccccaagggcgccaucaacaccagccugcccuuccagaacauccaccccaucaccaucggcaagugccccaaguacgugaagagcaccaagcugagacuggccaccggccugagaaacgugcccagcauccagagcagaggccuguucggcgccaucgccggcuucaucgagggcggcuggaccggcaugguggacggcugguacggcuaccaccaccagaacgagcagggcagcggcuacgccgccgaccugaagagcacccagaacgccaucgacaagaucaccaacaaggugaacagcgugaucgagaagaugaacacccaguucaccgccgugggcaaggaguucaaccaccuggagaagagaaucgagaaccugaacaagaagguggacgacggcuuccuggacaucuggaccuacaacgccgagcugcuggugcugcuggagaacgagagaacccuggacuaccacgacagcaacgugaagaaccuguacgagaaggugagaagccagcugaagaacaacgccaaggagaucggcaacggcugcuucgaguucuaccacaagugcgacaacaccugcauggagagcgugaagaacggcaccuacgacuaccccaaguacagcgaggaggccaagcugaacagagaggagaucgacggcgugaagcuggagagcaccagaaucuaccagauccuggccaucuacagcaccguggccagcagccuggugcugguggugagccugggcgccaucagcuucuggaugugcagcaacggcagccugcagugcagaaucugcaucuga

SEQ ID NO: 164331 - RNA, 1701 nt, Artificial Sequence
  derived and/or modified CDS sequence (opt4) from hemagglutinin__InfluenzaA__ADD74538
augaaggccauccugguggugcugcuguacaccuucgccaccgccaacgccgacacccugugcaucggcuaccacgccaacaacagcaccgacaccguggacaccgugcuggagaagaacgugaccgugacccacagcgugaaccugcuggaggacaagcacaacggcaagcugugcagacugagaggcguggccccccugcaccugggcaagugcaacaucgccggcuggauccugggcaaccccgagugcgagagccugagcaccgccagcagcuggagcuacaucguggagaccagcagcagcgacaacggcaccugcuaccccggcgacuucaucgacuacgaggagcugagagagcagcugagcagcgugagcagcuucgagagauucgagaucuuccccaagaccagcagcuggcccaaccacgacagcaacaagggcgugaccgccgccugcccccacgccggcgccaagagcuucuacaagaaccugaucuggcuggugaagaagggcaacagcuaccccaagcugagcaagagcuacaucaacgacaagggcaaggaggugcuggugcuguggggcauccaccaccccagcaccagcgccgaccagcagagccuguaccagaacgccgacgccuacguguucgugggcaccagcagauacagcaagaaguucaagcccgagaucgccaucagacccaaggugagagaccaggagggcagaaugaacuacuacuggacccugguggagcccggcgacaagaucaccuucgaggccaccggcaaccugguggugcccagauacgccuucgccauggagagaaacgccggcagcggcaucaucaucagcgacacccccguguacgacugcaacaccaccugccagacccccaagggcgccaucaacaccagccugcccuuccagaacauccaccccaucaccaucggcaagugccccaaguacgugaagagcaccaagcugagacuggccaccggccugagaaacgugcccagcauccagagcagaggccuguucggcgccaucgccggcuucaucgagggcggcuggaccggcaugguggacggcugguacggcuaccaccaccagaacgagcagggcagcggcuacgccgccgaccugaagagcacccagaacgccaucgacgagaucaccaacaaggugaacagcgugaucgagaagaugaacacccaguucaccgccgugggcaaggaguucaaccaccuggagaagagaaucgagaaccugaacaagaagguggacgacggcuuccuggacaucuggaccuacaacgccgagcugcuggugcugcuggagaacgagagaacccuggacuaccacgacagcaacgugaagaaccuguacgagaaggugagaagccagcugaagaacaacgccaaggagaucggcaacggcugcuucgaguucuaccacaagugcgacaacaccugcauggagagcgugaagaacggcaccuacgacuaccccaaguacagcgaggaggccaagcugaacagagaggagaucgacggcgugaagcuggagagcaccagaaucuaccagauccuggccaucuacagcaccguggccagcagccuggugcugguggugagccugggcgccaucagcuucuggaugugcagcaacggcagccugcagugcagaaucugcaucuga

SEQ ID NO: 164332 - RNA, 1701 nt, Artificial Sequence; identical to SEQ ID NO: 164326
  derived and/or modified CDS sequence (opt4) from hemagglutinin__InfluenzaA__ADD74548

SEQ ID NO: 164333 - RNA, 1701 nt, Artificial Sequence; identical to SEQ ID NO: 163893
  derived and/or modified CDS sequence (opt4) from hemagglutinin__InfluenzaA__ADD74558

SEQ ID NO: 164334 - RNA, 1701 nt, Artificial Sequence; identical to SEQ ID NO: 164281
  derived and/or modified CDS sequence (opt4) from hemagglutinin__InfluenzaA__ADD74568

SEQ ID NO: 164335 - RNA, 1701 nt, Artificial Sequence
  derived and/or modified CDS sequence (opt4) from hemagglutinin__InfluenzaA__ADD74578
augaaggccauccugguggugcugcuguacaccuucgccaccgccaacgccgacacccugugcaucggcuaccacgccaacaacagcaccgacaccguggacaccgugcuggagaagaacgugaccgugacccacagcgugaaccugcuggaggacaagcacaacggcaagcugugcaagcugagaggcguggccccccugcaccugggcaagugcaacaucgccggcuggauccugggcaaccccgagugcgagagccugagcaccagcagcagcuggagcuacaucguggagaccagcagcagcgacaacggcaccugcuaccccggcgacuucaucgacuacgaggagcugagagagcagcugagcagcgugagcagcuucgagagauucgagaucuuccccaagaccagcagcuggcccaaccacgacagcaacaagggcgugaccgccgccugcccccacgccggcgccaagagcuucuacaagaaccugaucuggcuggugaagaagggcaacagcuaccccaagcugagcaagagcuacaucaacgacaagggcaaggaggugcuggugcuguggggcauccaccaccccagcaccagcaccgaccagcagagccuguaccagaacgccgacgccuacguguucgugggcaccagcagauacagcaagaaguucaagcccgagaucgccaucagacccaaggugagagaccaggagggcagaaugaacuacuacuggacccugguggagcccggcgacaagaucaccuucgaggccaccggcaaccugguggugcccagauacgccuucgccauggagagaaacgccggcagcggcaucaucaucagcgacacccccgugcacgacugcaacaccaccugccagacccccaagggcgccaucaacaccagccugcccuuccagaacauccaccccaucaccaucggcaagugccccaaguacgugaagagcaccaagcugagacuggccaccggccugagaaacgugcccagcauccagagcagaggccuguucggcgccaucgccggcuucaucgagggcggcuggaccggcaugguggacggcugguacggcuaccaccaccagaacgagcagggcagcggcuacgccgccgaccugaagagcacccagaacgccaucgacgagaucaccaacaaggugaacagcgugaucgagaagaugaacacccaguucaccgccgugggcaaggaguucaaccaccuggagaagagaaucgagaaccugaacaagaagguggacgacggcuuccuggacaucuggaccuacaacgccgagcugcuggugcugcuggagaacgagagaacccuggacuaccacgacagcaacgugaagaaccuguacgagaaggugagaagccagcugaagaacaacgccaaggagaucggcaacggcugcuucgaguucuaccacaagugcgacaacaccugcauggagagcgugaagaacggcaccuacgacuaccccaaguacagcgaggaggccaagcugaacagagaggagaucgacggcgugaagcuggagagcaccagaaucuaccagauccuggccaucuacagcaccguggccagcagccuggugcugguggugagccugggcgccaucagcuucuggaugugcagcaacggcagccugcagugcagaaucugcaucuga

SEQ ID NO: 164336 - RNA, 1701 nt, Artificial Sequence
  derived and/or modified CDS sequence (opt4) from hemagglutinin__InfluenzaA__ADD74588
augaaggccauccugguggugcugcuguacaccuucgccaccgccaacgccgacacccugugcaucggcuaccacgccaacaacagcaccgacaccguggacaccgugcuggagaagaacgugaccgugacccacagcgugaaccugcuggaggacaagcacaacggcaagcugugcaagcugagaggcguggccccccugcaccugggcaagugcaacaucgccggcuggauccugggcaaccccgagugcgagagccugagcaccgccagcagcuggagcuacaucguggagaccagcagcagcgacaacggcaccugcuaccccggcgacuucaucgacuacgaggagcugagagagcagcugagcagcgugagcagcuucgagagauucgagaucuuccccaagaccagcagcuggcccaaccacgacagcaacaagggcgugaccgccgccugcccccacgccggcgccaagagcuucuacaagaaccugaucuggcuggugaagaagggcaacagcuaccccaagcugagcaagagcuacaucaacgacaagggcaaggaggugcuggugcuguggggcauccaccaccccagcaccagcgacggccagcagagccuguaccagaacgccgacgccuacguguucgugggcaccagcagauacagcaagaaguucaagcccgagaucgccaucagacccaaggugagagaccaggagggcagaaugaacuacuacuggacccugguggagcccggcgacaagaucaccuucgaggccaccggcaaccugguggugcccagauacgccuucgccauggagagaaacgccggcagcggcaucaucaucagcgacacccccgugcacgacugcaacaccaccugccagacccccaagggcgccaucaacaccagccugcccuuccagaacauccaccccaucaccaucggcaagugccccaaguacgugaagagcaccaagcugagacuggccaccggccugagaaacgugcccagcauccagagcagaggccuguucggcgccaucgccggcuucaucgagggcggcuggaccggcaugguggacggcugguacggcuaccaccaccagaacgagcagggcagcggcuacgccgccgaccugaagagcacccagaacgccaucgacgagaucaccaacaaggugaacagcgugaucgagaagaugaacacccaguucaccgccgugggcaaggaguucaaccaccuggagaagagaaucgagaaccugaacaagaagguggacgacggcuuccuggacaucuggaccuacaacgccgagcugcuggugcugcuggagaacgagagaacccuggacuaccacgacagcaacgugaagaaccuguacgagaaggugagaagccagcugaagaacaacgccaaggagaucggcaacggcugcuucgaguucuaccacaagugcgacaacaccugcauggagagcgugaagaacggcaccuacgacuaccccaaguacagcaaggaggccaagcugaacagagaggagaucgacggcgugaagcuggagagcaccagaaucuaccagauccuggccaucuacagcaccguggccagcagccuggugcugguggugagccugggcgccaucagcuucuggaugugcagcaacggcagccugcagugcagaaucugcaucuga

SEQ ID NO: 164337 - RNA, 1701 nt, Artificial Sequence; identical to SEQ ID NO: 164281
  derived and/or modified CDS sequence (opt4) from hemagglutinin__InfluenzaA__ADD74598

SEQ ID NO: 164338 - RNA, 1701 nt, Artificial Sequence; identical to SEQ ID NO: 164281
  derived and/or modified CDS sequence (opt4) from hemagglutinin__InfluenzaA__ADD74608

SEQ ID NO: 164339 - RNA, 1701 nt, Artificial Sequence; identical to SEQ ID NO: 163893
  derived and/or modified CDS sequence (opt4) from hemagglutinin__InfluenzaA__ADD74618

SEQ ID NO: 164340 - RNA, 1701 nt, Artificial Sequence
  derived and/or modified CDS sequence (opt4) from hemagglutinin__InfluenzaA__ADD74628
augaaggccauccugguggugcugcuguacaccuucgccaccgccaacgccgacacccugugcaucggcuaccacgccaacaacagcaccgacaccguggacaccauccuggagaagaacgugaccgugacccacagcgugaaccugcuggaggacaagcacaacggcaagcugugcaagcugagaggcguggccccccugcaccugggcaagugcaacaucgccggcuggauccugggcaaccccgagugcgagagccugagcaccgccagcagcuggagcuacaucguggagaccagcagcagcgacaacggcaccugcuaccccggcgacuucaucgacuacgaggagcugagagagcagcugagcagcgugagcagcuucgagagauucgagaucuuccccaagaccagcagcuggcccaaccacgacagcaacaagggcgugaccgccgccugcccccacgccggcgccaagagcuucuacaagaaccugaucuggcuggugaagaagggcaacagcuaccccaagcugagcaagagcuacaucaacgacaagggcaaggagauccuggugcuguggggcauccaccaccccagcaccagcgccgaccagcagagccuguaccagaacgccgacgccuacguguucgugggcaccagcagauacagcaagaaguucaagcccgagaucgccaucagacccaaggugagagaccaggagggcagaaugaacuacuacuggacccugguggagcccggcgacaagaucaccuucgaggccaccggcaaccugguggugcccagauacgccuucgccauggagaagaacgccggcagcggcaucaucaucagcgacacccccgugcacgacugcaacaccaccugccagacccccaagggcgccaucaacaccagccugcccuuccagaacauccaccccaucaccaucggcaagugccccaaguacgugaagagcaccaagcugagacuggccaccggccugagaaacgugcccagcauccagagcagaggccuguucggcgccaucgccggcuucaucgagggcggcuggaccggcaugguggacggcugguacggcuaccaccaccagaacgagcagggcagcggcuacgccgccgaccugaagagcacccagaacgccaucgacgagaucaccaacaaggugaacagcgugaucgagaagaugaacacccaguucaccgccgugggcaaggaguucaaccaccuggagaagagaaucgagaaccugaacaagaagguggacgacggcuuccuggacaucuggaccuacaacgccgagcugcuggugcugcuggagaacgagagaacccuggacuaccacgacagcaacgugaagaaccuguacgagaaggugagaagccagcugaagaacaacgccaaggagaucggcaacggcugcuucgaguucuaccacaagugcgacaacaccugcauggagagcgugaagaacggcaccuacgacuaccccaaguacagcgaggaggccaagcugaacagagaggagaucgacggcgugaagcuggagagcaccagaaucuaccagauccuggccaucuacagcaccguggccagcagccuggugcugguggugagccugggcgccaucagcuucuggaugugcagcaacggcagccugcagugcagaaucugcaucuga

SEQ ID NO: 164341 - RNA, 1701 nt, Artificial Sequence; identical to SEQ ID NO: 163830
  derived and/or modified CDS sequence (opt4) from hemagglutinin__InfluenzaA__ADD74648

SEQ ID NO: 164342 - RNA, 1701 nt, Artificial Sequence
  derived and/or modified CDS sequence (opt4) from hemagglutinin__InfluenzaA__ADD74658
augaaggccauccugguggugcugcuguacaccuucgccaccgccaacgccgacacccugugcaucggcuaccacgccaacaacagcaccgacaccguggacaccgugcuggagaagaacgugaccgugacccacagcgugaaccugcuggaggacaagcacaacggcaagcugugcaagcugagaggcguggccccccugcaccugggcaagugcaacaucgccggcuggauccugggcaaccccgagugcgagagccugagcaccgccagcagcuggagcuacaucguggagaccagcagcagcgacaacggcaccugcuaccccggcgacuucaucgacuacgaggagcugagagagcagcugagcagcgugagcagcuucgagagauucgagaucuuccccaagaccagcagcuggcccaaccacgacagcaacaagggcgugaccgccgccugcccccacgccggcgccaagagcuucuacaagaaccugaucuggcuggugaagaagggcaacagcuaccccaagcugagcaagagcuacaucaacgacaagggcaaggaggugcuggugcuguggggcauccaccaccccagcaccagcgccgaccagcagagccuguaccagaacgccgacagcuacguguucgugggcaccagcagauacagcaagaaguucaagcccgagaucgccaucagacccaaggugagagaccaggagggcagaaugaacuacuacuggacccugguggagcccggcgacaagaucaccuucgaggccaccggcaaccugguggugcccagauacgccuucgccauggagagaaacgccggcagcggcaucaucaucagcgacacccccgugcacgacugcaacaccaccugccagacccccgagggcgccaucaacaccagccugcccuuccagaacauccaccccaucaccaucggcaagugccccaaguacgugaagagcaccaagcugagacuggccaccggccugagaaacgugcccagcauccagagcagaggccuguucggcgccaucgccggcuucaucgagggcggcuggaccggcaugguggacggcugguacggcuaccaccaccagaacgagcagggcagcggcuacgccgccgaccugaagagcacccagaacgccaucgacgagaucaccaacaaggugaacagcgugaucgagaagaugaacacccaguucaccgccgugggcaaggaguucaaccaccuggagaagagaaucgagaaccugaacaagaagguggacgacggcuuccuggacaucuggaccuacaacgccgagcugcuggugcugcuggagaacgagagaacccuggacuaccacgacagcaacgugaagaaccuguacgagaaggugagaagccagcugaagaacaacgccaaggagaucggcaacggcugcuucgaguucuaccacaagugcgacaacaccugcauggagagcgugaagaacggcaccuacgacuaccccaaguacagcgaggaggccaagcugaacagagaggagaucgacggcgugaagcuggagagcaccagaaucuaccagauccuggccaucuacagcaccguggccagcagccuggugcugguggugagccugggcgccaucagcuucuggaugugcagcaacggcagccugcagugcagaaucugcaucuga

SEQ ID NO: 164343 - RNA, 1701 nt, Artificial Sequence; identical to SEQ ID NO: 164281
  derived and/or modified CDS sequence (opt4) from hemagglutinin__InfluenzaA__ADD74668

SEQ ID NO: 164344 - RNA, 1701 nt, Artificial Sequence; identical to SEQ ID NO: 164321
  derived and/or modified CDS sequence (opt4) from hemagglutinin__InfluenzaA__ADD74678

SEQ ID NO: 164345 - RNA, 1701 nt, Artificial Sequence; identical to SEQ ID NO: 164281
  derived and/or modified CDS sequence (opt4) from hemagglutinin__InfluenzaA__ADD74688

SEQ ID NO: 164346 - RNA, 1701 nt, Artificial Sequence
  derived and/or modified CDS sequence (opt4) from hemagglutinin__InfluenzaA__ADD74698
augaaggccauccugguggugcugcuguacaccuucgccaccgccaacgccgacacccugugcaucggcuaccacgccaacaacagcaccgacaccguggacaccgugcuggagaagaacgugaccgugacccacagcgugaaccugcuggaggacaagcacaacggcaagcugugcaagcugagaggcguggccccccugcaccugggcaagugcaacaucgccggcuggauccugggcaaccccgagugcgagagccugagcaccgccagcagcuggagcuacaucguggagaccagcagcagcgacaacggcaccugcuaccccggcgacuucaucaacuacgaggagcugagagagcagcugagcagcgugagcagcuucgagagauucgagaucuuccccaagaccagcagcuggcccaaccacgacagcaacaagggcgugaccgccgccugcccccacgccggcgccaagagcuucuacaagaaccugaucuggcuggugaagaagggcaacagcuaccccaagcugagcaagagcuacaucaacgacaagggcaaggaggugcuggugcuguggggcauccaccaccccagcaccagcgccgaccagcagagccuguaccagaacgccgacgccuacguguucgugggcaccagcagauacagcaagaaguucaagcccgagaucgccaucagacccaaggugagagaccaggagggcagaaugaacuacuacuggacccugguggagcccggcgacaagaucaccuucgaggccaccggcaaccugguggugcccagauacgccuucgccauggagagaaacgccggcagcggcaucaucaucagcgacacccccgugcacgacugcaacaccaccugccagacccccaagggcgccaucaacaccagccugcccuuccagaacauccaccccaucaccaucggcaagugccccaaguacgugaagagcaccaagcugagacuggccaccggccugagaaacgugcccagcauccagagcagaggccuguucggcgccaucgccggcuucaucgagggcggcuggaccggcaugguggacggcugguacggcuaccaccaccagaacgagcagggcagcggcuacgccgccgaccugaagagcacccagaacgccaucgacaagaucaccaacaaggugaacagcgugaucgagaagaugaacacccaguucaccgccgugggcaaggaguucaaccaccuggagaagagaaucgagaaccugaacaagaagguggacgacggcuuccuggacaucuggaccuacaacgccgagcugcuggugcugcuggagaacgagagaacccuggacuaccacgacagcaacgugaagaaccuguacgagaaggugagaaaccagcugaagaacaacgccaaggagaucggcaacggcugcuucgaguucuaccacaagugcgacaacaccugcauggagagcgugaagaacggcaccuacgacuaccccaaguacagcgaggaggccaagcugaacagagaggagaucgacggcgugaagcuggagagcaccagaaucuaccagauccuggccaucuacagcaccguggccagcagccuggugcugguggugagccugggcgccaucagcuucuggaugugcagcaacggcagccugcagugcagaaucugcaucuga

SEQ ID NO: 164347 - RNA, 1701 nt, Artificial Sequence; identical to SEQ ID NO: 164281
  derived and/or modified CDS sequence (opt4) from hemagglutinin__InfluenzaA__ADD74708

SEQ ID NO: 164348 - RNA, 1701 nt, Artificial Sequence
  derived and/or modified CDS sequence (opt4) from hemagglutinin__InfluenzaA__ADD74728
augaaggccauccugguggugcugcuguacaccuucgccaccgccaacgccgacacccugugcaucggcuaccacgccaacaacagcaccgacaccguggacaccgugcuggagaagaacgugaccgugacccacagcgugaaccugcuggaggacaagcacaacggcaagcugugcaagcugagaggcguggccccccugcaccugggcaagugcaacaucgccggcuggauccugggcaaccccgagugcgagagccugagcaccgccagcagcuggagcuacaucguggagaccagcagcagcgacaacggcaccugcuaccccggcgacuucaucgacuacgaggagcugagagagcagcugagcagcgugagcagcuucgagagauucgagaucuuccccaagaccagcagcuggcccgaccacgacagcaacaagggcgugaccgccgccugcccccacgccggcgccaagagcuucuacaagaaccugaucuggcuggugaagaagggcaacagcuaccccaagcugagcaagagcuacaucaacgacaagggcaaggaggugcuggugcuguggggcauccaccaccccagcaccagcgccgaccagcagagccuguaccagaacgccgacgccuacguguucgugggcaccagcagauacagcaagaaguucaagcccgagaucgccaucagacccaaggugagagaccaggagggcagaaugaacuacuacuggacccugguggagcccggcgacaagaucaccuucgaggccaccggcaaccugguggugcccagauacgccuucgccauggagagaaacgccggcagcggcaucaucaucagcgacacccccgugcacgacugcaacaccaccugccagacccccaagggcgccaucaacaccagccugcccuuccagaacauccaccccaucaccaucggcaagugccccaaguacgugaagagcaccaagcugagacuggccaccggccugagaaacgugcccagcauccagagcagaggccuguucggcgccaucgccggcuucaucgagggcggcuggaccggcaugguggacggcugguacggcuaccaccaccagaacgagcagggcagcggcuacgccgccgaccugaagagcacccagaacgccaucgacaagaucaccaacaaggugaacagcgugaucgagaagaugaacacccaguucaccgccgugggcaaggaguucaaccaccuggagaagagaaucgagaaccugaacaagaagguggacgacggcuuccuggacaucuggaccuacaacgccgagcugcuggugcugcuggagaacgagagaacccuggacuaccacgacagcaacgugaagaaccuguacgagaaggugagaagccagcugaagaacaacgccaaggagaucggcaacggcugcuucgaguucuaccacaagugcgacaacaccugcauggagagcgugaagaacggcaccuacgacuaccccaaguacagcgaggaggccaagcugaacagagaggagaucgacggcgugaagcuggagagcaccagaaucuaccagauccuggccaucuacagcaccguggccagcagcguggugcugguggugagccugggcgccaucagcuucuggaugugcagcaacggcagccugcagugcagaaucugcaucuga

SEQ ID NO: 164349 - RNA, 1701 nt, Artificial Sequence
  derived and/or modified CDS sequence (opt4) from hemagglutinin__InfluenzaA__ADD74738
augaaggccauccugguggugcugcuguacaccuucgccaccgccaacgccgacacccugugcaucggcuaccacgccaacaacagcaccgacaccguggacaccgugcuggagaagaacgugaccgugacccacagcgugaaccugcuggaggacaagcacaacggcaagcugugcaagcugagaggcguggccccccugcaccugggcaagugcaacaucgccggcuggauccugggcaaccccgagugcgagagccugagcaccgccagaagcuggagcuacaucguggagaccagcagcagcgacaacggcaccugcuaccccggcgacuucaucgacuacgaggagcugagagagcagcugagcagcgugagcagcuucgagagauucgagaucuuccccaagaccagcagcuggcccaaccacgacagcaacaagggcgugaccgccgccugcccccacgccggcgccaagagcuucuacaagaaccugaucuggcuggugaagaagggcaacagcuaccccaagcugagcaagagcuacaucaacgacaagggcaaggaggugcuggugcuguggggcauccaccaccccagcaccagcgccgaccagcagagccuguaccagaacgccgacgccuacguguucgugggcaccagcggcuacagcaagaaguucaagcccgagaucgccaucagacccaaggugagagaccaggagggcagaaugaacuacuacuggacccugguggagcccggcgacaagaucaccuucgaggccaccggcaaccugguggugcccagauacgccuucgccauggagagaaacgccggcagcggcaucaucaucagcgacacccccgugcacgacugcaacaccaccugccagacccccaagggcgccaucaacaccagccugcccuuccagaacauccaccccaucaccaucggcaagugccccaaguacgugaagagcaccaagcugagacuggccaccggccugagaaacgugcccagcauccagagcagaggccuguucggcgccaucgccggcuucaucgagggcggcuggaccggcaugguggacggcugguacggcuaccaccaccagaacgagcagggcagcggcuacgccgccgaccugaagagcacccagaacgccaucgacaagaucaccaacaaggugaacagcgugaucgagaagaugaacacccaguucaccgccgugggcaaggaguucaaccaccuggagaagagaaucgagaaccugaacaagaagguggacgacggcuuccuggacaucuggaccuacaacgccgagcugcuggugcugcuggagaacgagagaacccuggacuaccacgacagcaacgugaagaaccuguacgagaaggugagaagccagcugaagaacaacgccaaggagaucggcaacggcugcuucgaguucuaccacaagugcgacaacaccugcauggagagcgugaagaacggcaccuacgacuaccccaaguacagcgaggaggccaagcugaacagagaggagaucgacggcgugaagcuggagagcaccagaaucuaccagauccuggccaucuacagcaccguggccagcagccuggugcugguggugagccugggcgccaucagcuucuggaugugcagcaacggcagccugcagugcagaaucugcaucuga

SEQ ID NO: 164350 - RNA, 1701 nt, Artificial Sequence; identical to SEQ ID NO: 163893
  derived and/or modified CDS sequence (opt4) from hemagglutinin__InfluenzaA__ADD74748

SEQ ID NO: 164351 - RNA, 1701 nt, Artificial Sequence; identical to SEQ ID NO: 163893
  derived and/or modified CDS sequence (opt4) from hemagglutinin__InfluenzaA__ADD74758

SEQ ID NO: 164352 - RNA, 1701 nt, Artificial Sequence
  derived and/or modified CDS sequence (opt4) from hemagglutinin__InfluenzaA__ADD74768
augaaggccauccugguggugcugcuguacaccuucgccaccgccaacgccgacacccugugcaucggcuaccacgccaacaacagcaccgacaccguggacaccgugcuggagaagaacgugaccgugacccacagcgugaaccugcuggaggacaagcacaacggcaagcugugcaagcugagaggcguggccccccugcaccugggcaagugcaacaucgccggcuggauccugggcaaccccgagugcgagagccugagcaccgccagcagcuggagcuacaucguggagaccagcagcagcgacaacggcaccugcuaccccggcgacuucaucgacuacgaggagcugagagagcagcugagcagcgugagcagcuucgagagauucgagaucuuccccaagaccagcagcuggcccaaccacgacagcaacaagggcgugaccgccgccugcccccacgccggcgccaagagcuucuacaagaaccugaucuggcuggugaagaagggcaacagcuaccccaagcugagcaagagcuacaucaacgacaagggcaaggaggugcuggugcuguggggcauccaccaccccagcaccagcgccgaccagcagagccuguaccagaacgccgacgccuacguguucgugggcaccagcagauacagcaagaaguucaagcccgagaucgccaucagacccaaggugagagaccaggagggcagaaugagcuacuacuggacccugguggagcccggcgacaagaucaccuucgaggccaccggcaaccugguggugcccagauacgccuucgccauggagagaaacgccggcagcggcaucaucaucagcgacacccccgugcacgacugcaacaccaccugccagacccccaagggcgccaucaacaccagccugcccuuccagaacauccaccccaucaccaucggcaagugccccaaguacgugaagagcaccaagcugagacuggccaccggccugagaaacgugcccagcauccagagcagaggccuguucggcgccaucgccggcuucaucgagggcggcuggaccggcaugguggacggcugguacggcuaccaccaccagaacgagcagggcagcggcuacgccgccgaccugaagagcacccagaacgccaucgacaagaucaccaacaaggugaacagcgugaucgagaagaugaacacccaguucaccgccgugggcaaggaguucaaccaccuggagaagagaaucgagaaccugaacaagaagguggacgacggcuuccuggacaucuggaccuacaacgccgagcugcuggugcugcuggagaacgagagaacccuggacuaccacgacagcaacgugaagaaccuguacgagaaggugagaagccagcugaagaacaacgccaaggagaucggcaacggcugcuucgaguucuaccacaagugcgacaacaccugcauggagagcgugaagaacggcaccuacgacuaccccaaguacagcgaggaggccaagcugaacagagaggagaucgacggcgugaagcuggagagcaccagaaucuaccagauccuggccaucuacagcaccguggccagcagccuggugcugguggugagccugggcgccaucagcuucuggaugugcagcaacggcagccugcagugcagaaucugcaucuga

SEQ ID NO: 164353 - RNA, 1701 nt, Artificial Sequence; identical to SEQ ID NO: 163893
  derived and/or modified CDS sequence (opt4) from hemagglutinin__InfluenzaA__ADD74778

SEQ ID NO: 164354 - RNA, 1701 nt, Artificial Sequence; identical to SEQ ID NO: 164281
  derived and/or modified CDS sequence (opt4) from hemagglutinin__InfluenzaA__ADD74788

SEQ ID NO: 164355 - RNA, 1701 nt, Artificial Sequence; identical to SEQ ID NO: 164281
  derived and/or modified CDS sequence (opt4) from hemagglutinin__InfluenzaA__ADD74798

SEQ ID NO: 164356 - RNA, 1701 nt, Artificial Sequence
  derived and/or modified CDS sequence (opt4) from hemagglutinin__InfluenzaA__ADD74808
augaaggccauccugguggugcugcuguacaccuucgccaccgccaacgccgacacccugugcaucggcuaccacgccaacaacagcaccgacaccguggacaccgugcuggagaagaacgugaccgugacccacagcgugaacauccuggaggacaagcacaacggcaagcugugcaagcugagaggcguggccccccugcaccugggcaagugcaacaucgccggcuggauccugggcaaccccgagugcgagagccugagcaccgccagcagcuggagcuacaucguggagaccagcagcagcgacaacggcaccugcuaccccggcgacuucaucgacuacgaggagcugagagagcagcugagcagcgugagcagcuucgagagauucgagaucuuccccaagaccagcagcuggcccaaccacgacagcaacaagggcgugaccgccgccugcccccacgccggcgccaagagcuucuacaagaaccugaucuggcuggugaagaagggcaacagcuaccccaagcugagcaagagcuacaucaacgacaagggcaaggaggugcuggugcuguggggcauccaccaccccagcaccagcgccgaccagcagagccuguaccagaacgccgacgccuacguguucgugggcagcagcagauacagcaagaaguucaagcccgagaucgccaucagacccaaggugagagaccaggagggcagaaugaacuacuacuggacccugguggagcccggcgacaagaucaccuucgaggccaccggcaaccugguggugcccagauacgccuucgccauggagagaaacgccggcagcggcaucaucaucagcgacacccccgugcacgacugcaacaccaccugccagacccccaagggcgccaucaacaccagccugcccuuccagaacauccaccccaucaccaucggcaagugccccaaguacgugaagagcaccaagcugagacuggccaccggccugagaaacgugcccagcauccagagcagaggccuguucggcgccaucgccggcuucaucgagggcggcuggaccggcaugguggacggcugguacggcuaccaccaccagaacgagcagggcagcggcuacgccgccgaccugaagagcacccagaacgccaucgacgagaucaccaacaaggugaacagcgugaucgagaagaugaacacccaguucaccgccgugggcaaggaguucaaccaccuggagaagagaaucgagaaccugaacaagaagguggacgacggcuuccuggacaucuggaccuacaacgccgagcugcuggugcugcuggagaacgagagaacccuggacuaccacgacagcaacgugaagaaccuguacgagaaggugagaagccagcugaagaacaacgccaaggaggugggcaacggcugcuucgaguucuaccacaagugcgacaacaccugcauggagagcgugaagaacggcaccuacgacuaccccaaguacagcgaggaggccaagcugaacagagaggagaucgacggcgugaagcuggagagcaccagaaucuaccagauccuggccaucuacagcaccgccgccagcagccuggugcugguggugagccugggcgccaucagcuucuggaugugcagcaacggcagccugcagugcagaaucugcaucuga

SEQ ID NO: 164357 - RNA, 1701 nt, Artificial Sequence
  derived and/or modified CDS sequence (opt4) from hemagglutinin__InfluenzaA__ADD74818
augaaggccauccugguggugcugcuguacaccuucgccaccgccaacgccgacacccugugcaucggcuaccacgccaacaacagcaccgacaccguggacaccgugcuggagaagaacgugaccgugacccacagcgugaacauccuggaggacaagcacaacggcaagcugugcaagcugagaggcguggccccccugcaccugggcaagugcaacaucgccggcuggauccugggcaaccccgagugcgagagccugagcaccgccagcagcuggagcuacaucguggagaccagcagcagcgacaacggcaccugcuaccccggcgacuucaucgacuacgaggagcugagagagcagcugagcagcgugagcagcuucgagagauucgagaucuuccccaagaccagcagcuggcccaaccacgacagcaacaagggcgugaccgccgccugcccccacgccggcgccaagagcuucuacaagaaccugaucuggcuggugaagaagggcaacagcuaccccaagcugagcaagagcuacaucaacgacaagggcaaggaggugcuggugcuguggggcauccaccaccccagcaccagcgccgaccagcagagccuguaccagaacgccgacgccuacguguucgugggcaccagcagauacagcaagaaguucaagcccgagaucgccaucagacccaaggugagagaccaggagggcagaaugaacuaccacuggacccugguggagcccggcgacaagaucaccuucgaggccaccggcaaccugguggugcccagauacgccuucgccauggagagaaacgccggcagcggcaucaucaucagcgacacccccgugcacgacugcaacaccaccugccagacccccaagggcgccaucaacaccagccugcccuuccagaacauccaccccaucaccaucggcaagugccccaaguacgugaagagcaccaagcugagacuggccaccggccugagaaacgugcccagcauccagagcagaggccuguucggcgccaucgccggcuucaucgagggcggcuggaccggcaugguggacggcugguacggcuaccaccaccagaacgagcagggcagcggcuacgccgccgaccugaagagcacccagaacgccaucgacgagaucaccaacaaggugaacagcgugaucgagaagaugaacacccaguucaccgccgugggcaaggaguucaaccaccuggagaagagaaucgagaaccugaacaagaagguggacgacggcuuccuggacaucuggaccuacaacgccgagcugcuggugcugcuggagaacgagagaacccuggacuaccacgacagcaacgugaagaaccuguacgagaaggugagaagccagcugaagaacaacgccaaggagaucggcaacggcugcuucgaguucuaccacaagugcgacaacaccugcauggagagcgugaagaacggcaccuacgacuaccccaaguacagcgaggaggccaagcugaacagagaggagaucgacggcgugaagcuggagagcaccagaaucuaccagauccuggccaucuacagcaccguggccagcagccuggugcugguggugagccugggcgccaucagcuucuggaugugcagcaacggcagccugcagugcagaaucugcaucuga

SEQ ID NO: 164358 - RNA, 1701 nt, Artificial Sequence
  derived and/or modified CDS sequence (opt4) from hemagglutinin__InfluenzaA__ADD74838
augaaggccauccugguggugcugcuguacaccuucgccaccgccaacgccgacacccugugcaucggcuaccacgccaacaacagcaccgacaccguggacaccgugcuggagaagaacgugaccgugacccacagcgugaaccugcuggaggacaagcacaacggcaagcugugcaagcugagaggcguggccccccugcaccugggcaagugcaacaucgccggcuggauccugggcaaccccgagugcgagagccugagcaccgccagcagcuggagcuacaucguggagaccagcagcagcgacaacggcaccugcuaccccggcgacuucaucaacuacgaggagcugagagagcagcugagcagcgugagcagcuucgagagauucgagaucuuccccaagaccagcagcuggcccaaccacgacagcaacaagggcgugaccgccgccugcccccacgccggcgccaagagcuucuacaagaaccugaucuggcuggugaagaagggcaacagcuaccccaagcugagcaagagcuacaucaacgacaagggcaaggaggugcuggugcuguggggcauccaccaccccagcaccagcgccgaccagcagagccuguaccagaacgccgacgccuacguguucgugggcaccagcagauacagcaagaaguucaagcccgagaucgccaucagacccaaggugagagaccaggagggcagaaugaacuacuacuggacccugguggagcccggcgacaagaucaccuucgaggccaccggcaaccugguggugcccagauacgccuucgccauggagagaaacgccggcagcggcaucaucaucagcgacacccccgugcacgacugcaacaccaccugccagacccccaagggcgccaucaacaccagccugcccuuccagaacgugcaccccaucaccaucggcaagugccccaaguacgugaagagcaccaagcugagacuggccaccggccugagaaacgugcccagcauccagagcagaggccuguucggcgccaucgccggcuucaucgagggcggcuggaccggcaugguggacggcugguacggcuaccaccaccagaacgagcagggcagcggcuacgccgccgaccugaagagcacccagaacgccaucgacaagaucaccaacaaggugaacagcgugaucgagaagaugaacacccaguucaccgccgugggcaaggaguucaaccaccuggagaagagaaucgagaaccugaacaagaagguggacgacggcuuccuggacaucuggaccuacaacgccgagcugcuggugcugcuggagaacgagagaacccuggacuaccacgacagcaacgugaagaaccuguacgagaaggugagaagccagcugaagaacaacgccaaggagaucggcaacggcugcuucgaguucuaccacaagugcgacaacaccugcauggagagcgugaagaacggcaccuacgacuaccccaaguacagcgaggaggccaagcugaacagagaggagaucgacggcgugaagcuggagagcaccagaaucuaccagauccuggccaucuacagcaccguggccagcagccuggugcugguggugagccugggcgccaucagcuucuggaugugcagcaacggcagccugcagugcagaaucugcaucuga

SEQ ID NO: 164359 - RNA, 1701 nt, Artificial Sequence
  derived and/or modified CDS sequence (opt4) from hemagglutinin__InfluenzaA__ADD74848
augaaggccauccugguggugcugcuguacaccuucgccaccgccaacgccgacacccugugcaucggcuaccacgccaacaacagcaccgacaccguggacaccgugcuggagaagaacgugaccgugacccacagcgugaaccugcuggaggacaagcacaacggcaagcugugcaagcugagaggcguggccccccugcaccugggcaagugcaacaucgccggcuggauccugggcaaccccgagugcgagagccugagcaccgccagcagcuggagcuacaucguggagaccagcagcagcgacaacggcaccugcuaccccggcgacuucaucgacuacgaggagcugagagagcagcugagcagcgugagcagcuucgagagauucgagaucuuccccaagaccagcagcuggcccaaccacgacagcaacaagggcgugaccgccgccugcccccacgccggcgccaagagcuucuacaagaaccugaucuggcuggugaagaagggcaacagcuaccccaagcugagcaagagcuacaucaacgacaagggcaaggaggugcuggugcuguggggcauccaccaccccagcaccagcgccgaccagcagagccuguaccagaacgccgacgccuacguguucgugggcaccagcagauacagcaagaaguucaagcccgagaucgccaucagacccaaggugagagaccaggagggcagaaugaacuacuacuggacccugguggagcccggcgacaagaucaccuucgaggccaccggcaaccugguggugcccagauacgccuucgccauggagagaaacgccggcagcggcaucaucaucagcgacacccccgugcacgacugcaacaccaccugccagacccccaagggcgccaucaacaccagccugcccuuccagaacauccaccccaucaccaucggcaagugccccaaguacgugaagagcaccaagcugagacuggccaccggccugagaaacgugcccagcauccagagcagaggccuguucggcgccaucgccggcuucaucgagggcggcuggaccggcaugguggacggcugguacggcuaccaccaccagaacgagcagggcagcggcuacgccgccgaccugaagagcacccagaacgccaucgacaagaucaccaacaaggugaacagcgugaucgagaagaugaacacccaguucaccgccgugggcaaggaguucaaccaccuggagaagagaaucgagaaccugaacaagaagguggacgacggcuuccuggacaucuggaccuacaacgccgagcugcuggugcugcuggagaacgagagaacccuggacuaccacgacagcaacgugaagaaccuguacgagaaggugagaagccagcugaagaacaacgccaaggagaucggcaacggcugcuucgaguucuaccacaagugcgacaacaccugcauggagagcgugaagaacggcaccuacgacuaccccaaguacagcgaggaggccaagcugaacagagaggagaucgacggcgugaagcuggagagcaccagaaucuaccagauccuggccaucuacagcaccguggccagcagccuggugcugaucgugagccugggcgccaucagcuucuggaugugcagcaacggcagccugcagugcagaaucugcaucuga

SEQ ID NO: 164360 - RNA, 1701 nt, Artificial Sequence
  derived and/or modified CDS sequence (opt4) from hemagglutinin__InfluenzaA__ADD74858
augaaggccauccugguggugcugcuguacaccuucgccaccgccaacgccgacacccugugcaucggcuaccacgccaacaacagcaccgacaccguggacaccgugcuggagaagaacgugaccgugacccacagcgugaaccugcuggaggacaagcacaacggcaagcugugcaagcugagaggcguggccccccugcaccugggcaagugcaacaucgccggcuggauccugggcaaccccgagugcgagagccugagcaccgccagcagcuggagcuacaucguggagaccagcagcagcgacaacggcaccugcuaccccggcgacuucaucaacuacgaggagcugagagagcagcugagcagcgugagcagcuucgagagauucgagaucuuccccaagaccagcagcuggcccaaccacgacagcaacaagggcgugaccgccgccugcccccacgccggcaccaagagcuucuacaagaaccugaucuggcuggugaagaagggcaacagcuaccccaagcugagcaagagcuacaucaacgacaagggcaaggaggugcuggugcuguggggcauccaccaccccagcaccagcgccgaccagcagagccuguaccagaacgccgacgccuacguguucgugggcaccagcagauacagcaagaaguucaagcccgagaucgccaucagacccaaggugagagaccaggagggcagaaugaacuacuacuggacccugguggagcccggcgacaagaucaccuucgaggccaccggcaaccugguggugcccagauacgccuucgccauggagagaaacgccggcagcggcaucaucaucagcgacacccccgugcacgacugcaacaccaccugccagacccccaagggcgccaucaacaccagccugcccuuccagaacauccaccccaucaccaucggcaagugccccaaguacgugaagagcaccaagcugagacuggccaccggccugagaaacgugcccagcauccagagcagaggccuguucggcgccaucgccggcuucaucgagggcggcuggaccggcaugguggacggcugguacggcuaccaccaccagaacgagcagggcagcggcuacgccgccgaccugaagagcacccagaacgccaucgacaagaucaccaacaaggugaacagcgugaucgagaagaugaacacccaguucaccgccgugggcaaggaguucaaccaccuggagaagagaaucgagaaccugaacaagaagguggacgacggcuuccuggacaucuggaccuacaacgccgagcugcuggugcugcuggagaacgagagaacccuggacuaccacgacagcaacgugaagaaccuguacgagaaggugagaagccagcugaagaacaacgccaaggagaucggcaacggcugcuucgaguucuaccacaagugcgacaacaccugcauggagagcgugaagaacggcaccuacgacuaccccaaguacagcgaggaggccaagcugaacagagaggagaucgacggcgugaagcuggagagcaccagaaucuaccagauccuggccaucuacagcaccguggccagcagccuggugcugguggugagccugggcgccaucagcuucuggaugugcagcaacggcagccugcagugcagaaucugcaucuga

SEQ ID NO: 164361 - RNA, 1701 nt, Artificial Sequence; identical to SEQ ID NO: 164281
  derived and/or modified CDS sequence (opt4) from hemagglutinin__InfluenzaA__ADD74868

SEQ ID NO: 164362 - RNA, 1701 nt, Artificial Sequence; identical to SEQ ID NO: 164281
  derived and/or modified CDS sequence (opt4) from hemagglutinin__InfluenzaA__ADD74878

SEQ ID NO: 164363 - RNA, 1701 nt, Artificial Sequence
  derived and/or modified CDS sequence (opt4) from hemagglutinin__InfluenzaA__ADD74888
augaaggccauccugguggugcugcuguacaccuucgccaccgccaacgccgacacccugugcaucggcuaccacgccaacaacagcaccgacaccguggacaccgugcuggagaagaacgugaccgugacccacagcguggaccugcuggaggacaagcacaacggcaagcugugcaagcugagaggcguggccccccugcaccugggcaagugcaacaucgccggcuggauccugggcaaccccgagugcgagagccugagcaccgccagcagcuggagcuacaucguggagaccagcagcagcgacaacggcaccugcuaccccggcgacuucaucgacuacgaggagcugagagagcagcugagcagcgugagcagcuucgagagauucgagaucuuccccaagaccaacagcuggcccaaccacgacagcaacaagggcgugaccgccgccugcccccacgccggcgccaagagcuucuacaagaaccugaucuggcuggugaagaagggcaacagcuaccccaagcugagcaagagcuacaucaacgacaagggcaaggaggugcuggugcuguggggcauccaccaccccagcaccagcgccgaccagcagagccuguaccagaacgccgacgccuacguguucgugggcaccagcagauacagcaagaaguucaagcccgagaucgccaucagacccaaggugagagaccaggagggcagaaugaacuacuacuggacccugguggagcccggcgacaagaucaccuucgaggccaccggcaaccugguggugcccagauacgccuucgccauggagagaaacgccggcagcggcaucaucaucagcgacacccccgugcacgacugcaacaccaccugccagacccccaagggcgccaucaacaccagccugcccuuccagaacauccaccccaucaccaucggcaagugccccaaguacgugaagagcaccaagcugagacuggccaccggccugagaaacgugcccagcauccagagcagaggccuguucggcgccaucgccggcuucaucgagggcggcuggaccggcaugguggacggcugguacggcuaccaccaccagaacgagcagggcagcggcuacgccgccgaccugaagagcacccagaacgccaucgacgagaucaccaacaaggugaacagcgugaucgagaagaugaacacccaguucaccgccgugggcaaggaguucaaccaccuggagaagagaaucgagaaccugaacaagaagguggacgacggcuuccuggacaucuggaccuacaacgccgagcugcuggugcugcuggagaacgagagaacccuggacuaccacgacagcaacgugaagaaccuguacgagaaggugagaagccagcugaagaacaacgccaaggagaucggcaacggcugcuucgaguucuaccacaagugcgacaacaccugcauggagagcgugaagaacggcaccuacgacuaccccaaguacagcgaggaggccaagcugaacagagaggagaucgacggcgugaagcuggagagcaccagaaucuaccagauccuggccaucuacagcaccguggccagcagccuggugcugguggugagccugggcgccaucagcuucuggaugugcagcaacggcagccugcagugcagaaucugcaucuga

SEQ ID NO: 164364 - RNA, 1701 nt, Artificial Sequence
  derived and/or modified CDS sequence (opt4) from hemagglutinin__InfluenzaA__ADD74898
augaaggccauccugguggugcugcuguacaccuucaccaccgccaacgccgacacccugugcaucggcuaccacgccaacaacagcaccgacaccguggacaccgugcuggagaagaacgugaccgugacccacagcgugaaccugcuggaggacaagcacaacggcaagcugugcaagcugagaggcguggccccccugcaccugggcaagugcaacaucgccggcuggauccugggcaaccccgagugcgagagccugagcaccgccagcagcuggagcuacaucguggagaccagcagcagcgacaacggcaccugcuaccccggcgacuucaucaacuacgaggagcugagagagcagcugagcagcgugagcagcuucgagagauucgagaucuuccccaagaccagcagcuggcccaaccacgacagcaacaagggcgugaccgccgccugcccccacgccggcgccaagagcuucuacaagaaccugaucuggcuggugaagaagggcaacagcuaccccaagcugagcaagagcuacaucaacgacaagggcaaggaggugcuggugcuguggggcauccaccaccccagcaccagcgccgaccagcagagccuguaccagaacgccgacgccuacguguucgugggcaccagcagauacagcaagaaguucaagcccgagaucgccaucagacccaaggugagagaccaggagggcagaaugaacuacuacuggacccugguggagcccggcgacaagaucaccuucgaggccaccggcaaccugguggugcccagauacgccuucgccauggagagaaacgccggcagcggcaucaucaucagcgacacccccgugcacgacugcaacaccaccugccagacccccaagggcgccaucaacaccagccugcccuuccagaacauccaccccaucaccaucggcaagugccccaaguacgugaagagcaccaagcugagacuggccaccggccugagaaacgugcccagcauccagagcagaggccuguucggcgccaucgccggcuucaucgagggcggcuggaccggcaugguggacggcugguacggcuaccaccaccagaacgagcagggcagcggcuacgccgccgaccugaagagcacccagaacgccaucgacaagaucaccaacaaggugaacagcgugaucgagaagaugaacacccaguucaccgccgugggcaaggaguucaaccaccuggagaagagaaucgagaaccugaacaagaagguggacgacggcuuccuggacaucuggaccuacaacgccgagcugcuggugcugcuggagaacgagagaacccuggacuaccacgacagcaacgugaagaaccuguacgagaaggugagaagccagcugaagaacaacgccaaggagaucggcaacggcugcuucgaguucuaccacaagugcgacaacaccugcauggagagcgugaagaacggcaccuacgacuaccccaaguacagcgaggaggccaagcugaacagagaggagaucgacggcgugaagcuggagagcaccagaaucuaccagauccuggccaucuacagcaccguggccagcagccuggugcugguggugagccugggcgccaucagcuucuggaugugcagcaacggcagccugcagugcagaaucugcaucuga

SEQ ID NO: 164365 - RNA, 1701 nt, Artificial Sequence
  derived and/or modified CDS sequence (opt4) from hemagglutinin__InfluenzaA__ADD74908
augaaggccauccugguggugcugcuguacaccuucgccaccgccaacgccgacacccugugcaucggcuaccacgccaacaacagcaccgacaccguggacaccgugcuggagaagaacgugaccgugacccacagcgugaaccugcuggaggacaagcacaacggcaagcugugcaagcugagaggcguggccccccugcaccugggcaagugcaacaucgccggcuggauccugggcaaccccgagugcgagagccugagcaccgccagcagcuggagcuacaucguggagaccagcagcagcgacaacggcaccugcuaccccggcgacuucaucgacuacgaggagcugagagagcagcugagcagcgugagcagcuucgagagauucgagaucuuccccaagaccagcagcuggcccaaccacgacagcaacaagggcgugaccgccgccugcccccacgccggcgccaagagcuucuacaagaaccugaucuggcuggugaagaagggcaacagcuaccccaagcugagcaagagcuacaucaacgacaagggcaaggaggugcuggugcuguggggcauccaccaccccagcaccagcgccgaccagcagagccuguaccagaacgccgacgccuacguguucgugggcaccagcagauacagcaagaaguucaagcccgagaucgccaucagacccaaggugagagaccaggagggcagaaugaacuacuacuggacccugguggagcccggcgacaagaucaccuucgaggccaccggcaaccugguggugcccagauacgccuucaccauggagagaaacgccggcagcggcaucaucaucagcgacacccccgugcacgacugcaacaccaccugccagacccccaagggcgccaucaacaccagccugcccuuccagaacauccaccccaucaccaucggcaagugccccaaguacgugaagagcaccaagcugagacuggccaccggccugagaaacgugcccagcauccagagcagaggccuguucggcgccaucgccggcuucaucgagggcggcuggaccggcaugguggacggcugguacggcuaccaccaccagaacgagcagggcagcggcuacgccgccgaccugaagagcacccagaacgccaucgacgagaucaccaacaaggugaacagcgugaucgagaagaugaacacccaguucaccgccgugggcaaggaguucaaccaccuggagaagagaaucgagaaccugaacaagaagguggacgacggcuuccuggacaucuggaccuacaacgccgagcugcuggugcugcuggagaacgagagaacccuggacuaccacgacagcaacgugaagaaccuguacgagaaggugagaagccagcugaagaacaacgccaaggagaucggcaacggcugcuucgaguucuaccacaagugcgacaacaccugcauggagagcgugaagaacggcaccuacgacuaccccaaguacagcgaggaggccaagcugaacagagaggagaucgacggcgugaagcuggagagcaccagaaucuaccagauccuggccaucuacagcaccguggccagcagccuggugcugguggugagccugggcgccaucagcuucuggaugugcagcaacggcagccugcagugcagaaucugcaucuga

SEQ ID NO: 164366 - RNA, 1701 nt, Artificial Sequence; identical to SEQ ID NO: 164359
  derived and/or modified CDS sequence (opt4) from hemagglutinin__InfluenzaA__ADD74918

SEQ ID NO: 164367 - RNA, 1701 nt, Artificial Sequence; identical to SEQ ID NO: 164281
  derived and/or modified CDS sequence (opt4) from hemagglutinin__InfluenzaA__ADD74928

SEQ ID NO: 164368 - RNA, 1701 nt, Artificial Sequence; identical to SEQ ID NO: 164359
  derived and/or modified CDS sequence (opt4) from hemagglutinin__InfluenzaA__ADD74938

SEQ ID NO: 164369 - RNA, 1701 nt, Artificial Sequence
  derived and/or modified CDS sequence (opt4) from hemagglutinin__InfluenzaA__ADD74958
augaaggccauccugguggugcugcuguacaccuucgccaccgccaacgccgacacccugugcaucggcuaccacgccaacaacagcaccgacaccguggacaccgugcuggagaagaacgugaccgugacccacagcgugaaccugcuggagaacaagcacaacggcaagcugugcaagcugagaggcguggccccccugcaccugggcaagugcaacaucgccggcuggauccugggcaaccccgagugcgagagccugagcaccgccagcagcuggagcuacaucguggagaccagcagcagcgacaacggcaccugcuaccccggcgacuucaucaacuacgaggagcugagagagcagcugagcagcgugagcagcuucgagagauucgagaucuuccccaagaccagcagcuggcccaaccacgacagcaacaagggcgugaccgccgccugcccccacgccggcgccaagagcuucuacaagaaccugaucuggcuggugaagaagggcaacagcuaccccaagcugagcaagagcuacaucaacgacaagggcaaggaggugcuggugcuguggggcauccaccaccccagcaccagcgccgaccagcagagccuguaccagaacgccgacgccuacguguucgugggcaccagcagauacagcaagaaguucaagcccgagaucgccaucagacccaaggugagagaccaggagggcagaaugaacuacuacuggacccugguggagcccggcgacaagaucaccuucgaggccaccggcaaccugguggugcccagauacgccuucgccauggagagaaacgccggcagcggcaucaucaucagcgacacccccgugcacgacugcaacaccaccugccagacccccaagggcgccaucaacaccagccugcccuuccagaacauccaccccaucaccaucggcaagugccccaaguacgugaagagcaccaagcugagacuggccaccggccugagaaacgugcccagcauccagagcagaggccuguucggcgccaucgccggcuucaucgagggcggcuggaccggcaugguggacggcugguacggcuaccaccaccagaacgagcagggcagcggcuacgccgccgaccugaagagcacccagaacgccaucgacaagaucaccaacaaggugaacagcgugaucgagaagaugaacacccaguucaccgccgugggcaaggaguucaaccaccuggagaagagaaucgagaaccugaacaagaagguggacgacggcuuccuggacaucuggaccuacaacgccgagcugcuggugcugcuggagaacgagagaacccuggacuaccacgacagcaacgugaagaaccuguacgagaaggugagaagccagcugaagaacaacgccaaggagaucggcaacggcugcuucgaguucuaccacaagugcgacaacaccugcauggagagcgugaagaacggcaccuacgacuaccccaaguacagcgaggaggccaagcugaacagagaggagaucgacggcgugaagcuggagagcaccagaaucuaccagauccuggccaucuacagcaccguggccagcagccuggugcugguggugagccugggcgccaucagcuucuggaugugcagcaacggcagccugcagugcagaaucugcaucuga

SEQ ID NO: 164370 - RNA, 1701 nt, Artificial Sequence; identical to SEQ ID NO: 163893
  derived and/or modified CDS sequence (opt4) from hemagglutinin__InfluenzaA__ADD74968

SEQ ID NO: 164371 - RNA, 1701 nt, Artificial Sequence
  derived and/or modified CDS sequence (opt4) from hemagglutinin__InfluenzaA__ADD74998
augaaggccauccugguggugcugcuguacaccuucgccaccgccaacgccgacacccugugcaucggcuaccacgccaacaacagcaccgacaccguggacaccgugcuggagaagaacgugaccgugacccacagcgugaaccugcuggaggacaagcacaacggcaagcugugcaagcugagaggcguggccccccugcaccugggcaagugcaacaucgccggcuggauccugggcaaccccgagugcgagagccugagcaccgccagcagcuggagcuacaucguggagaccagcagcagcgacaacggcaccugcuaccccggcgacuucaucgacuacgaggagcugagagagcagcugagcagcgugagcagcuucgagagauucgagaucuuccccaagaccagcagcuggcccaaccacgacagcaacaagggcgugaccgccgccugcccccacgccggcgccaagagcuucuacaagaaccugaucuggcuggugaagaagggcaacagcuaccccaagcugagcaagagcuacaucaacgacaagggcaaggaggugcuggugcuguggggcauccaccaccccagcaccagcgccgaccagcagagccuguaccagaacgccgacgccuacguguucgugggcaccagcagauacagcaagaaguucaagcccgagaucgccaucagacccaaggugagagaccaggagggcagaaugaacuacuacuggacccugguggagcccggcgacaagaucaccuucgaggccaccggcaaccugguggugcccagauacgccuucgccauggagagaaacgccggcagcggcaucaucaucagcgacacccccgugcacgacugcaacaccaccugccagacccccaagggcgccaucaacaccagccugcccuuccagaacauccaccccaucaccaucggcaagugccccaaguacgugaagagcaccaagcugagacuggccaccggccugagaaacgugcccagcauccagagcagaggccuguucggcgccaucgccggcuucaucgagggcggcuggaccggcaugguggacggcugguacggcuaccaccaccagaacgagagaggcagcggcuacgccgccgaccugaagagcacccagaacgccaucgacaagaucaccaacaaggugaacagcgugaucgagaagaugaacacccaguucaccgccgugggcaaggaguucaaccaccuggagaagagaaucgagaaccugaacaagaagguggacgacggcuuccuggacaucuggaccuacaacgccgagcugcuggugcugcuggagaacgagagaacccuggacuaccacgacagcaacgugaagaaccuguacgagaaggugagaagccagcugaagaacaacgccaaggagaucggcaacggcugcuucgaguucuaccacaagugcgacaacaccugcauggagagcgugaagaacggcaccuacgacuaccccaaguacagcgaggaggccaagcugaacagagaggagaucgacggcgugaagcuggagagcaccagaaucuaccagauccuggccaucuacagcaccguggccagcagccuggugcugguggugagccugggcgccaucagcuucuggaugugcagcaacggcagccugcagugcagaaucugcaucuga

SEQ ID NO: 164372 - RNA, 1701 nt, Artificial Sequence; identical to SEQ ID NO: 163893
  derived and/or modified CDS sequence (opt4) from hemagglutinin__InfluenzaA__ADD75008

SEQ ID NO: 164373 - RNA, 1701 nt, Artificial Sequence; identical to SEQ ID NO: 163893
  derived and/or modified CDS sequence (opt4) from hemagglutinin__InfluenzaA__ADD75018

SEQ ID NO: 164374 - RNA, 1701 nt, Artificial Sequence; identical to SEQ ID NO: 163893
  derived and/or modified CDS sequence (opt4) from hemagglutinin__InfluenzaA__ADD75028

SEQ ID NO: 164375 - RNA, 1701 nt, Artificial Sequence; identical to SEQ ID NO: 163830
  derived and/or modified CDS sequence (opt4) from hemagglutinin__InfluenzaA__ADD75058

SEQ ID NO: 164376 - RNA, 1701 nt, Artificial Sequence; identical to SEQ ID NO: 164149
  derived and/or modified CDS sequence (opt4) from hemagglutinin__InfluenzaA__ADD75088

SEQ ID NO: 164377 - RNA, 1701 nt, Artificial Sequence; identical to SEQ ID NO: 162729
  derived and/or modified CDS sequence (opt4) from hemagglutinin__InfluenzaA__ADD75098

SEQ ID NO: 164378 - RNA, 1701 nt, Artificial Sequence
  derived and/or modified CDS sequence (opt4) from hemagglutinin__InfluenzaA__ADD75108
augaaggccauccugguggugcugcuguacaccuucgccaccgccaacgccgacacccugugcaucggcuaccacgccaacaacagcaccgacaccguggacaccgugcuggagaagaacgugaccgugacccacagcgugaaccugcuggaggacaagcacaacggcaagcugugcaagcugagaggcguggccccccugcaccugggcaagugcaacaucgccggcuggauccugggcaaccccgagugcgagagccugagcaccgccagcagcuggagcuacaucguggagaccagcagcagcgacaacggcaccugcuaccccggcgacuucaucgacuacgaggagcugagagagcagcugagcagcgugagcagcuucgagagauucgagaucuuccccaagaccagcagcuggcccaaccacgacagcaacaagggcgugaccgccgccugcccccacgccggcgccaagagcuucuacaagaaccugaucuggcuggugaagaagggcaacagcuaccccaagcugagcaagagcuacaucaacgacaagggcaaggaggugcuggugcuguggggcauccaccaccccagcaccagcgccgaccagcagagccuguaccagaacgccgacgccuacguguucgugggcaccagcagauacagcaagaaguucaagcccgagaucgccaucagacccaaggugagagaccaggagggcagaaugaacuacuacuggacccugguggagcccggcgacaagaucaccuucgaggccaccggcaaccugguggugcccagauacgccuucgccauggagagaaacgccggcagcggcaucaucaucagcgacacccccgugcacgacugcaacaccaccugccagacccccaagggcgccaucaacaccagccugcccuuccagaacauccaccccaucaccaucggcaagugccccaaguacgugaagagcaccaagcugagacuggccaccggccugagaaacauccccagcauccagagcagaggccuguucggcgccaucgccggcuucaucgagggcggcuggaccggcaugguggacggcugguacggcuaccaccaccagaacgagcagggcagcggcuacgccgccgaccugaagagcacccagaacgccaucgacaagaucaccaacaaggugaacagcgugaucgagaagaugaacacccaguucaccgccgugggcaaggaguucaaccaccuggagaagagaaucgagaaccugaacaagaagguggacgacggcuuccuggacaucuggaccuacaacgccgagcugcuggugcugcuggagaacgagagaacccuggacuaccacgacagcaacgugaagaaccuguacgagaaggugagaagccagcugaagaacaacgccaaggagaucggcaacggcugcuucgaguucuaccacaagugcgacaacaccugcauggagagcgugaagaacggcaccuacgacuaccccaaguacagcgaggaggccaagcugaacagagaggagaucgacggcgugaagcuggagagcaccagaaucuaccagauccuggccaucuacagcaccguggccagcagccuggugcugguggugagccugggcgccaucagcuucuggaugugcagcaacggcagccugcagugcagaaucugcaucuga

SEQ ID NO: 164379 - RNA, 1701 nt, Artificial Sequence; identical to SEQ ID NO: 162729
  derived and/or modified CDS sequence (opt4) from hemagglutinin__InfluenzaA__ADD75118

SEQ ID NO: 164380 - RNA, 1701 nt, Artificial Sequence; identical to SEQ ID NO: 163176
  derived and/or modified CDS sequence (opt4) from hemagglutinin__InfluenzaA__ADD75128

SEQ ID NO: 164381 - RNA, 1701 nt, Artificial Sequence; identical to SEQ ID NO: 162729
  derived and/or modified CDS sequence (opt4) from hemagglutinin__InfluenzaA__ADD75138

SEQ ID NO: 164382 - RNA, 1701 nt, Artificial Sequence; identical to SEQ ID NO: 163893
  derived and/or modified CDS sequence (opt4) from hemagglutinin__InfluenzaA__ADD75148

SEQ ID NO: 164383 - RNA, 1701 nt, Artificial Sequence; identical to SEQ ID NO: 162729
  derived and/or modified CDS sequence (opt4) from hemagglutinin__InfluenzaA__ADD75158

SEQ ID NO: 164384 - RNA, 1701 nt, Artificial Sequence
  derived and/or modified CDS sequence (opt4) from hemagglutinin__InfluenzaA__ADD84494
augaaggccauccugguggugcugcuguacaccuucgccaccgccaacgccgacacccugugcaucggcuaccacgccaacaacagcaccgacaccguggacaccgugcuggagaagaacgugaccgugacccacagcgugaaccugcuggaggacaagcacaacggcaagcugugcaagcugagaggcguggccccccugcaccugggcaagugcaacaucgccggcuggauccugggcaaccccgagugcgagagccugagcaccgccagcagcuggagcuacaucguggagaccagcagcagcgacaacggcaccugcuaccccggcgacuucaucgacuacgaggagcugagagagcagcugagcagcgugagcagcuucgagagauucgagaucuuccccaagaucagcagcuggcccaaccacgaccccaacaagggcgugaccgccgccugcccccacgccggcgccaagagcuucuacaagaaccugaucuggcuggugaagaagggcaacagcuaccccaagcugagcaagagcuacaucaacgacaagggcaaggaggugcuggugcuguggggcauccaccaccccagcaccagcgccgaccagcagagccuguaccagaacgccgacgccuacguguucgugggcaccagcagauacagcaagaaguucaagcccgagaucgccaucagacccaaggugagagaccaggagggcagaaugaacuacuacuggacccugguggagcccggcgacaagaucaccuucgaggccaccggcaaccugguggugcccagauacgccuucgccauggagagaaacgccggcagcggcaucaucaucagcgacacccccgugcacggcugcaacaccaccugccagacccccaagggcgccaucaacaccagccugcccuuccagaacauccaccccaucaccaucggcaagugccccaaguacgugaagagcaccaagcugagacuggccaccggccugagaaacgugcccagcauccagagcagaggccuguucggcgccaucgccggcuucaucgagggcggcuggaccggcaugguggacggcugguacggcuaccaccaccagaacgagcagggcagcggcuacgccgccgaccugaagagcacccagaacgccaucgacgagaucaccaacaaggugaacagcgugaucgagaagaugaacacccaguucaccgccgugggcaaggaguucaaccaccuggagaagagaaucgagaaccugaacaagaagguggacgacggcuuccuggacaucuggaccuacaacgccgagcugcuggugcugcuggagaacgagagaacccuggacuaccacgacagcaacgugaagaaccuguacgagaaggugagaagccagcugaagaacaacgccaaggagaucggcaacggcugcuucgaguucuaccacaagugcgacaacaccugcauggagagcgugaagaacggcaccuacgacuaccccaaguacagcgaggaggccaagcugaacagagaggagaucgacggcgugaagcuggagagcaccagaaucuaccagauccuggccaucuacagcaccguggccagcagccuggugcugguggugagccugggcgccaucagcuucuggaugugcagcaacggcagccugcagugcagaaucugcaucuga

SEQ ID NO: 164385 - RNA, 1701 nt, Artificial Sequence
  derived and/or modified CDS sequence (opt4) from hemagglutinin__InfluenzaA__ADD84495
augaaggccauccugguggugcugcuguacaccuucgccaccgccaacgccgacacccugugcaucggcuaccacgccaacaacagcaccgacaccguggacaccgugcuggagaagaacgugaccgugacccacagcgugaaccugcuggaggacaagcacaacggcaagcugugcaagcugagaggcguggccccccugcaccugggcaagugcaacaucgccggcuggauccugggcaaccccgagugcgagagccugagcaccgccagcagcuggagcuacaucguggagaccagcagcagcgacaacggcaccugcuaccccggcgacuucaucgacuacgaggagcugagagagcagcugagcagcgugagcagcuucgagagauucgagaucuuccccaagaucagcagcuggcccaaccacgaccccaacaagggcgugaccgccgccugcccccacgccggcgccaagagcuucuacaagaaccugaucuggcuggugaagaagggcaacagcuaccccaagcugagcaagagcuacaucaacgacaagggcaaggaggugcuggugcuguggggcauccaccaccccagcaccagcgccgaccagcagagccuguaccagaacgccgacgccuacguguucgugggcaccagcagauacagcaagaaguucaagcccgagaucgccaucagacccaaggugagagaccaggagggcagaaugaacuacuacuggacccugguggagcccggcgacaagaucaccuucgaggccaccggcaaccugguggugcccagauacgccuucgccauggagagaaacgccggcagcggcaucaucaucagcgacacccccgugcacgacugcaacaccaccugccagacccccaagggcgccaucaacaccagccugcccuuccagaacauccaccccaucaccaucggcaagugccccaaguacgugaagagcaccaagcugagacuggccaccggccugagaaacgugcccagcauccagagcagaggccuguucggcgccaucgccggcuucaucgagggcggcuggaccggcaugguggacggcugguacggcuaccaccaccagaacgagcagggcagcggcuacgccgccgaccugaagagcacccagaacgccaucgacgagaucaccaacaaggugaacagcgugaucgagaagaugaacacccaguucaccgccgugggcaaggaguucaaccaccuggagaagagaaucgagaaccugaacaagaagguggacgacggcuuccuggacaucuggaccuacaacgccgagcugcuggugcugcuggagaacgagagaacccuggacuaccacgacagcaacgugaagaaccuguacgagaaggugagaagccagcugaagaacaacgccaaggagaucggcaacggcugcuucgaguucuaccacaagugcgacaacaccugcauggagagcgugaagaacggcaccuacgacuaccccaaguacagcgaggaggccaagcugaacagagaggagaucgacggcgugaagcuggagagcaccagaaucuaccagauccuggccaucuacagcaccguggccagcagccuggugcugguggugagccugggcgccaucagcuucuggaugugcagcaacggcagccugcagugcagaaucugcaucuga

SEQ ID NO: 164386 - RNA, 1701 nt, Artificial Sequence
  derived and/or modified CDS sequence (opt4) from hemagglutinin__InfluenzaA__ADD84496
augaaggccauccugguggugcugcuguacaccuucgccaccgccaacgccgacacccugugcaucggcuaccacgccaacaacagcaccgacaccguggacaccgugcuggagaagaacgugaccgugacccacagcgugaaccugcuggaggacaagcacaacggcaagcugugcaagcugagaggcguggccccccugcaccugggcaagugcaacaucgccggcuggauccugggcaaccccgagugcgagagccugagcaccgccagcagcuggagcuacaucguggagaccagcagcagcgacaacggcaccugcuaccccggcgacuucaucgacuacgaggagcugagagagcagcugagcagcgugagcagcuucgagagauucgagaucuuccccaagaucagcagcuggcccaaccacgaccccaacaagggcgugaccgccgccugcccccacgccggcgccaagagcuucuacaagaaccugaucuggcuggugaagaagggcaacagcuaccccaagcugagcaagagcuacaucaacgacaagggcaaggaggugcuggugcuguggggcauccaccaccccagcaccagcgccgaccagcagagccuguaccagaacgccgacgccuacguguucgugggcagcagcagauacagcaagaaguucaagcccgagaucgccaucagacccaaggugagagaccaggagggcagaaugaacuacuacuggacccugguggagcccggcgacaagaucaccuucgaggccaccggcaaccugguggugcccagauacgccuucgccauggagagaaacgccggcagcggcaucaucaucagcgacacccccgugcacgacugcaacaccaccugccagacccccaagggcgccaucaacaccagccugcccuuccagaacauccaccccaucaccaucggcaagugccccaaguacgugaagagcaccaagcugagacuggccaccggccugagaaacgugcccagcauccagagcagaggccuguucggcgccaucgccggcuucaucgagggcggcuggaccggcaugguggacggcugguacggcuaccaccaccagaacgagcagggcagcggcuacgccgccgaccugaagagcacccagaacgccaucgacgagaucaccaacaaggugaacagcgugaucgagaagaugaacacccaguucaccgccgugggcaaggaguucaaccaccuggagaagagaaucgagaaccugaacaagaagguggacgacggcuuccuggacaucuggaccuacaacgccgagcugcuggugcugcuggagaacgagagaacccuggacuaccacgacagcaacgugaagaaccuguacgagaaggugagaagccagcugaagaacaacgccaaggagaucggcaacggcugcuucgaguucuaccacaagugcgacaacaccugcauggagagcgugaagaacggcaccuacgacuaccccaaguacagcgaggaggccaagcugaacagagaggagaucgacggcgugaagcuggagagcaccagaaucuaccagauccuggccaucuacagcaccguggccagcagccuggugcugguggugagccugggcgccaucagcuucuggaugugcagcaacggcagccugcagugcagaaucugcaucuga

SEQ ID NO: 164387 - RNA, 1701 nt, Artificial Sequence; identical to SEQ ID NO: 164385
  derived and/or modified CDS sequence (opt4) from hemagglutinin__InfluenzaA__ADD84497

SEQ ID NO: 164388 - RNA, 1701 nt, Artificial Sequence
  derived and/or modified CDS sequence (opt4) from hemagglutinin__InfluenzaA__ADD84498
augaaggccauccugguggugcugcuguacaccuucgccaccgccaacgccgacacccugugcaucggcuaccacgccaacaacagcaccgacaccguggugaccgugcuggagaagaacgugaccgugacccacagcgugaaccugcuggaggacaagcacaacggcaagcugugcaagcugagaggcguggccccccugcaccugggcaagugcaacaucgccggcuggauccugggcaaccccgagugcgagagccugagcaccgccagcagcuggagcuacaucguggagaccagcagcagcgacaacggcaccugcuaccccggcgacuucaucgacuacgaggagcugagagagcagcugagcagcgugagcagcuucgagagauucgagaucuuccccaagaucagcagcuggcccaaccacgaccccaacaagggcgugaccgccgccugcccccacgccggcgccaagagcuucuacaagaaccugaucuggcuggugaagaagggcaacagcuaccccaagcugagcaagagcuacaucaacgacaagggcaaggaggugcuggugcuguggggcauccaccaccccagcaccagcgccgaccagcagagccuguaccagaacgccgacgccuacguguucgugggcagcagcagauacagcaagaaguucaagcccgagaucgccaucagacccaaggugagagaccaggagggcagaaugaacuacuacuggacccugguggagcccggcgacaagaucaccuucgaggccaccggcaaccugguggugcccagauacgccuucgccauggagagaaacgccggcagcggcaucaucaucagcgacacccccgugcacgacugcaacaccaccugccagacccccaagggcgccaucaacaccagccugcccuuccagaacauccaccccaucaccaucggcaagugccccaaguacgugaagagcaccaagcugagacuggccaccggccugagaaacgugcccagcauccagagcagaggccuguucggcgccaucgccggcuucaucgagggcggcuggaccggcaugguggacggcugguacggcuaccaccaccagaacgagcagggcagcggcuacgccgccgaccugaagagcacccagaacgccaucgacgagaucaccaacaaggugaacagcgugaucgagaagaugaacacccaguucaccgccgugggcaaggaguucaaccaccuggagaagagaaucgagaaccugaacaagaagguggacgacggcuuccuggacaucuggaccuacaacgccgagcugcuggugcugcuggagaacgagagaacccuggacuaccacgacagcaacgugaagaaccuguacgagaaggugagaagccagcugaagaacaacgccaaggagaucggcaacggcugcuucgaguucuaccacaagugcgacaacaccugcauggagagcgugaagaacggcaccuacgacuaccccaaguacagcgaggaggccaagcugaacagagaggagaucgacggcgugaagcuggagagcaccagaaucuaccagauccuggccaucuacagcaccguggccagcagccuggugcugguggugagccugggcgccaucagcuucuggaugugcagcaacggcagccugcagugcagaaucugcaucuga

SEQ ID NO: 164389 - RNA, 1701 nt, Artificial Sequence; identical to SEQ ID NO: 164385
  derived and/or modified CDS sequence (opt4) from hemagglutinin__InfluenzaA__ADD84499

SEQ ID NO: 164390 - RNA, 1701 nt, Artificial Sequence
  derived and/or modified CDS sequence (opt4) from hemagglutinin__InfluenzaA__ADD92535
augaaggccauccugguggugcugcuguacaccuucgccaccgccaacgccgacacccugugcaucggcuaccacgccaacaacagcaccgacaccguggacaccgugcuggagaagaacgugaccgugacccacagcgugaaccugcuggaggacaagcacaacggcaagcugugcaagcugagaggcguggccccccugcaccugggcaagugcaacaucgccggcuggauccugggcaaccccgagugcgagagccugagcaccgccagcagcuggagcuacaucguggagaccagcagcagcgacaacggcaccugcuaccccggcgacuucaucgacuacgaggagcugagagagcagcugagcagcgugagcagcuucgagagauucgagaucuuccccaagaccagcagcuggcccaaccacgacagcaacaagggcgugaccgccgccugcccccacgccggcgccaagagcuucuacaagaaccugaucuggcuggugaagaagggcaacagcuaccccaagcugagcaagagcuacaucaacgacaagggcaaggaggugcuggugcuguggggcauccaccaccccagcaccagcgccgaccagcagagccuguaccagaacgccgacgccuacguguucgugggcaccagcagauacagcaagaaguucaagcccgagaucgccaucagacccaaggugagagacagagagggcagaaugaacuacuacuggacccugguggagcccggcgacaagaucaccuucgaggccaccggcaaccugguggugcccagauacgccuucgccauggagagaaacgccggcagcggcaucaucaucagcgacacccccgugcacgacugcaacaccaccugccagacccccaagggcgccaucaacaccagccugcccuuccagaacauccaccccaucaccaucggcaagugccccaaguacgugaagagcaccaagcugagacuggccaccggccugagaaacgugcccagcauccagagcagaggccuguucggcgccaucgccggcuucaucgagggcggcuggaccggcaugguggacggcugguacggcuaccaccaccagaacgagcagggcagcggcuacgccgccgaccugaagagcacccagaacgccaucgacgagaucaccaacagagugaacagcgugaucgagaagaugaacacccaguucaccgccgugggcaaggaguucaaccaccuggagaagagaaucgagaaccugaacaagaagguggacggcggcuuccuggacaucuggaccuacaacgccgagcugcuggugcugcuggagaacgagagaacccuggacuaccacgacagcaacgugaagaaccuguacgagaaggugagaagccagcugaagaacaacgccaaggagaucggcaacggcugcuucgaguucuaccacaagugcgacaacaccugcauggagagcgugaagaacggcaccuacgacuaccccaaguacagcgaggaggccaagcugaacagagaggagaucgacggcgugaagcuggagagcaccagaaucuaccagauccuggccaucuacagcaccguggccagcagccuggugcugguggugagccugggcgccaucagcuucuggaugugcagcaacggcagccugcagugcagaaucugcaucuga

SEQ ID NO: 164391 - RNA, 1701 nt, Artificial Sequence; identical to SEQ ID NO: 164317
  derived and/or modified CDS sequence (opt4) from hemagglutinin__InfluenzaA__ADD96766

SEQ ID NO: 164392 - RNA, 1701 nt, Artificial Sequence; identical to SEQ ID NO: 162909
  derived and/or modified CDS sequence (opt4) from hemagglutinin__InfluenzaA__ADD96776

SEQ ID NO: 164393 - RNA, 1701 nt, Artificial Sequence; identical to SEQ ID NO: 162909
  derived and/or modified CDS sequence (opt4) from hemagglutinin__InfluenzaA__ADD96786

SEQ ID NO: 164394 - RNA, 1701 nt, Artificial Sequence; identical to SEQ ID NO: 164214
  derived and/or modified CDS sequence (opt4) from hemagglutinin__InfluenzaA__ADD96796

SEQ ID NO: 164395 - RNA, 1701 nt, Artificial Sequence
  derived and/or modified CDS sequence (opt4) from hemagglutinin__InfluenzaA__ADD96806
augaaggccauccugguggugcugcuguacacccuggccaccgccaacgccgacacccugugcaucggcuaccacgccaacaacagcaccgacaccguggacaccgugcuggagaagaacgugaccgugacccacagcgugaaccugcuggaggacaagcacaacggcaagcugugcaagcugagaggcguggccccccugcaccugggcaagugcaacaucgccggcuggauccugggcaaccccgagugcgagagccugagcaccgccagcagcuggagcuacaucguggagaccagcagcagcgacaacggcaccugcuaccccggcgacuucaucgacuacgaggagcugagagagcagcugagcagcgugagcagcuucgagagauucgagaucuuccccaagaccagcagcuggcccaaccacgacagcaacaagggcgugaccgccgccugcccccacgccggcgccaagagcuucuacaagaaccugaucuggcuggugaagaagggcaacagcuaccccaagcugagcaagagcuacaucaacgacaagggcaaggaggugcuggugcuguggggcauccaccaccccagcaccagcgccgaccagcagagccuguaccagaacgccgacgccuacguguucgugggcaccagcagauacagcaagaaguucaagcccgagaucgccaucagacccaaggugagagaccaggagggcagaaugaacuacuacuggacccugguggagcccggcgacaagaucaccuucgaggccaccggcaaccugguggugcccagauacgccuucgccauggagagaaacgccggcagcggcaucaucaucagcgacacccccgugcacgacugcaacaccaccugccagacccccaagggcgccaucaacaccagccugcccuuccagaacauccaccccaucaccaucggcaagugccccaaguacgugaagagcaccaagcugagacuggccaccggccugagaaacgugcccagcauccagagcagaggccuguucggcgccaucgccggcuucaucgagggcggcuggaccggcaugguggacggcugguacggcuaccaccaccagaacgagcagggcagcggcuacgccgccgaccugaagagcacccagaacgccaucgacgagaucaccaacaaggugaacagcgugaucgagaagaugaacacccaguucaccgccgugggcaaggaguucaaccaccuggagaagagaaucgagaaccugaacaagaagguggacgacggcuuccuggacaucuggaccuacaacgccgagcugcuggugcugcuggagaacgagagaacccuggacuaccacgacagcaacgugaagaaccuguacgagaaggugagaagccagcugaagaacaacgccaaggagaucggcaacggcugcuucgaguucuaccacaagugcgacaacaccugcauggagagcgugaagaacggcaccuacgacuaccccaaguacagcgaggaggccaagcugaacagagaggagaucgacggcgugaagcuggagagcaccagaaucuaccagauccuggccaucuacagcaccguggccagcagccuggugcugguggugagccugggcgccaucagcuucuggaugugcagcaacggcagccugcagugcagaaucugcaucuga

SEQ ID NO: 164396 - RNA, 1701 nt, Artificial Sequence; identical to SEQ ID NO: 163893
  derived and/or modified CDS sequence (opt4) from hemagglutinin__InfluenzaA__ADD96816

SEQ ID NO: 164397 - RNA, 1701 nt, Artificial Sequence
  derived and/or modified CDS sequence (opt4) from hemagglutinin__InfluenzaA__ADD96826
augaaggccauccugguggugcugcuguacaccuucgccaccgccaacgccgacacccugugcaucggcuaccacgccaacaacagcaccgacaccguggacaccgugcuggagaagaacgugaccgugacccacagcgugaaccugcuggaggacaagcacaacggcaagcugugcaagcugagaggcguggccccccugcaccugggcaagugcaacaucgccggcuggauccugggcaaccccgagugcgagagccugagcaccgccagcagcuggagcuacaucguggagaccagcagcagcgacaacggcaccugcuaccccggcgacuucaucgacuacgaggagcugagagagcagcugagcagcgugagcagcuucgagagauucgagaucuuccccaagaccagcagcuggcccaaccacgacagcaacaagggcgugaccgccgccugcccccacgccggcgccaagagcuucuacaagaaccugaucuggcuggugaagaagggcaacagcuaccccaagcugagcaagagcuacaucaacgacaagggcaaggaggugcuggugcuguggggcauccaccaccccagcaccagcgccgaccagcagagccuguaccagaacgccgacgccuacguguucgugggcaccagcagauacagcaagaaguucaagcccgagaucgccaucagacccaaggugauggaccaggagggcagaaugaacuacuacuggacccugguggagcccggcgacaagaucaccuucgaggccaccggcaaccugguggugcccagauacgccuucgccauggagagaaacgccggcagcggcaucaucaucagcgacacccccgugcacgacugcaacaccaccugccagacccccaagggcgccaucaacaccagccugcccuuccagaacauccaccccaucaccaucggcaagugccccaaguacgugaagagcaccaagcugagacuggccaccggccugagaaacgugcccagcauccagagcagaggccuguucggcgccaucgccggcuucaucgagggcggcuggaccggcaugguggacggcugguacggcuaccaccaccagaacgagcagggcagcggcuacgccgccgaccugaagagcacccagaacgccaucgacgagaucaccaacaaggugaacagcgugaucgagaagaugaacacccaguucgccgccgugggcaaggaguucaaccaccuggagaagagaaucgagaaccugaacaagaagguggacgacggcuuccuggacaucuggaccuacaacgccgagcugcuggugcugcuggagaacgagagaacccuggacuaccacgacagcaacgugaagaaccuguacgagaaggugagaagccagcugaagaacaacgccaaggagaucggcaacggcugcuucgaguucuaccacaagugcgacaacaccugcauggagagcgugaagaacggcaccuacgacuaccccaaguacagcgaggaggccaagcugaacagagaggagaucgacggcgugaagcuggagagcaccagaaucuaccagauccuggccaucuacagcaccguggccagcagccuggugcugguggugagccugggcgccaucagcuucuggaugugcagcaacggcagccugcagugcagaaucugcaucuga

SEQ ID NO: 164398 - RNA, 1701 nt, Artificial Sequence; identical to SEQ ID NO: 162729
  derived and/or modified CDS sequence (opt4) from hemagglutinin__InfluenzaA__ADD96836

SEQ ID NO: 164399 - RNA, 1701 nt, Artificial Sequence; identical to SEQ ID NO: 162729
  derived and/or modified CDS sequence (opt4) from hemagglutinin__InfluenzaA__ADD96846

SEQ ID NO: 164400 - RNA, 1701 nt, Artificial Sequence; identical to SEQ ID NO: 164281
  derived and/or modified CDS sequence (opt4) from hemagglutinin__InfluenzaA__ADD96856

SEQ ID NO: 164401 - RNA, 1701 nt, Artificial Sequence; identical to SEQ ID NO: 163082
  derived and/or modified CDS sequence (opt4) from hemagglutinin__InfluenzaA__ADD96886

SEQ ID NO: 164402 - RNA, 1701 nt, Artificial Sequence; identical to SEQ ID NO: 164356
  derived and/or modified CDS sequence (opt4) from hemagglutinin__InfluenzaA__ADD96896

SEQ ID NO: 164403 - RNA, 1701 nt, Artificial Sequence; identical to SEQ ID NO: 163893
  derived and/or modified CDS sequence (opt4) from hemagglutinin__InfluenzaA__ADD96906

SEQ ID NO: 164404 - RNA, 1701 nt, Artificial Sequence; identical to SEQ ID NO: 163893
  derived and/or modified CDS sequence (opt4) from hemagglutinin__InfluenzaA__ADD96916

SEQ ID NO: 164405 - RNA, 1701 nt, Artificial Sequence; identical to SEQ ID NO: 163893
  derived and/or modified CDS sequence (opt4) from hemagglutinin__InfluenzaA__ADD96926

SEQ ID NO: 164406 - RNA, 1701 nt, Artificial Sequence
  derived and/or modified CDS sequence (opt4) from hemagglutinin__InfluenzaA__ADD96936
augaaggccauccugguggugcugcuguacaccuucgccaccgccaacgccgacacccugugcaucggcuaccacgccaacaacagcaccgacaccguggacaccgugcuggagaagaacgugaccgugacccacagcgugaacauccuggaggacaagcacaacggcaagcugugcaagcugagaggcguggccccccugcaccugggcaagugcaacaucgccggcuggauccugggcaaccccgagugcgagagccugagcaccgccagcagcuggagcuacaucguggagaccagcagcagcgacaacggcaccugcuaccccggcgacuucaucgacuacgaggagcugagagagcagcugagcagcgugagcagcuucgagagauucgagaucuuccccaagaccagcagcuggcccaaccacgacagcaacaagggcgugaccgccgccugcccccacgccggcgccaagagcuucuacaagaaccugaucuggcugaucaagaagggcaacagcuaccccaagcugagcaagagcuacaucaacgacaagggcaaggaggugcuggugcuguggggcauccaccaccccagcaccagcgccgaccagcagagccuguaccagaacgccgacgccuacguguucgugggcaccagcagauacagcaagaaguucaagcccgagaucgccaucagacccaaggugagagaccaggagggcagaaugaacuacuacuggacccugguggagcccggcgacaagaucaccuucgaggccaccggcaaccugguggugcccagauacgccuucgccauggagagaaacgccggcagcggcaucaucaucagcgacacccccgugcacgacugcaacaccaccugccagacccccaagggcgccaucaacaccagccugcccuuccagaacauccaccccaucaccaucggcaagugccccaaguacgugaagagcaccaagcugagacuggccaccggccugagaaacgugcccagcauccagagcagaggccuguucggcgccaucgccggcuucaucgagggcggcuggaccggcaugguggacggcugguacggcuaccaccaccagaacgagcagggcagcggcuacgccgccgaccugaagagcacccagaacgccaucgacgagaucaccaacaaggugaacagcgugaucgagaagaugaacacccaguucaccgccgugggcaaggaguucaaccaccuggagaagagaaucgagaaccugaacaagaagguggacgacggcuuccuggacaucuggaccuacaacgccgagcugcuggugcugcuggagaacgagagaacccuggacuaccacgacagcaacgugaagaaccuguacgagaaggugagaagccagcugaagaacaacgccaaggagaucggcaacggcugcuucgaguucuaccacaagugcgacaacaccugcauggagagcgugaagaacggcaccuacgacuaccccaaguacagcgaggaggccaagcugaacagagaggagaucgacggcgugaagcuggagagcaccagaaucuaccagauccuggccaucuacagcaccguggccagcagccuggugcugguggugagccugggcgccaucagcuucuggaugugcagcaacggcagccugcagugcagaaucugcaucuga

SEQ ID NO: 164407 - RNA, 1701 nt, Artificial Sequence
  derived and/or modified CDS sequence (opt4) from hemagglutinin__InfluenzaA__ADD96946
augaaggccauccugguggugcugcuguacaccuucgccaccgccaacgccgacacccugugcaucggcuaccacgccaacaacagcaccgacaccguggacaccgugcuggagaagaacgugaccgugacccacagcgugaaccugcuggaggacaagcacaacggcaagcugugcaagcugagaggcguggccccccugcaccugggcaagugcaacaucgccggcuggauccugggcaaccccgagugcgagagccugagcaccgccagcagcuggagcuacaucguggagaccagcagcagcgacaacggcaccugcuaccccggcgacuucaucgacuacgaggagcugagagagcagcugagcagcgugagcagcuucaagagauucgagaucuuccccaagaccagcagcuggcccaaccacgacagcaacaagggcgugaccgccgccugcccccacgccggcgccaagagcuucuacaagaaccugaucuggcuggugaagaagggcaacagcuaccccaagcugagcaagagcuacaucaacgacaagggcaaggaggugcuggugcuguggggcauccaccaccccagcaccagcgccgaccagcagagccuguaccagaacgccgacgccuacguguucgugggcaccagcagauacagcaagaaguucaagcccgagaucgccaucagacccaaggugagagaccaggagggcagaaugaacuacuacuggacccugguggagcccggcgacaagaucaccuucgaggccaccggcaaccugguggugcccagauacgccuucgccauggagagaaacgccggcagcggcaucaucaucagcgacacccccgugcacgacugcaacaccaccugccagacccccaagggcgccaucaacaccagccugcccuuccagaacauccaccccaucaccaucggcgagugccccaaguacgugaagagcaccaagcugagacuggccaccggccugagaaacgugcccagcauccagagcagaggccuguucggcgccaucgccggcuucaucgagggcggcuggaccggcaugguggacggcugguacggcuaccaccaccagaacgagcagggcagcggcuacgccgccgaccugaagagcacccagaacgccaucgacaagaucaccaacaaggugaacagcgugaucgagaagaugaacacccaguucaccgccgugggcaaggaguucaaccaccuggagaagagaaucgagaaccugaacaagaagguggacgacggcuuccuggacaucuggaccuacaacgccgagcugcuggugcugcuggagaacgagagaacccuggacuaccacgacagcaacgugaagaaccuguacgagaaggugagaagccagcugaagaacaacgccaaggagaucggcaacggcugcuucgaguucuaccacaagugcgacaacaccugcauggagagcgugaagaacggcaccuacgacuaccccaaguacagcgaggaggccaagcugaacagagaggagaucgacggcgugaagcuggagagcaccagaaucuaccagauccuggccaucuacagcaccguggccagcagccuggugcugguggugagccugggcgccaucagcuucuggaugugcagcaacggcagccugcagugcagaaucugcaucuga

SEQ ID NO: 164408 - RNA, 1701 nt, Artificial Sequence
  derived and/or modified CDS sequence (opt4) from hemagglutinin__InfluenzaA__ADD96956
augaaggccauccugguggugcugcuguacaccuucgccaccgccaacgccgacacccugugcaucggcuaccacgccaacaacagcaccgacaccguggacaccgugcuggagaagaacgugaccgugacccacagcgugaaccugcuggaggacaagcacaacggcaagcugugcaagcugagaggcguggccccccugcaccugggcaagugcaacaucgccggcuggauccugggcaaccccgagugcgagagccugagcaccgccagcagcuggagcuacaucguggagaccagcagcagcgacaacggcaccugcuaccccggcgacuucaucgacuacgaggagcugagagagcagcugagcagcgugagcagcuucgagagauucgagaucuuccccaagaccagcagcuggcccaaccacgacagcaacaagggcgugaccgccgccugcccccacgccggcgccaagagcuucuacaagaaccugaucuggcuggugaagaagggcaacagcuaccccaagcugagcaagagcuacaucaacgacaagggcaaggaggugcuggugcuguggggcauccaccaccccagcaccagcgccgaccagcagagccuguaccagaacgccgacgccuacguguucgugggcaccagcagauacagcaagaaguucaagcccgagaucgccaucagacccaaggugagagagcaggagggcagaaugaacuacuacuggacccuggugaagcccggcgacaagaucaccuucgaggccaccggcaaccugguggugcccagauacgccuucgccauggagagaaacgccggcagcggcaucaucaucagcgacacccccgugcacgacugcaacaccaccugccagacccccaagggcgccaucaacaccagccugcccuuccagaacauccacagcaucaccaucggcaagugccccaaguacgugaagagcaccaagcugagacuggccaccggccugagaaacgugcccagcauccagagcagaggccuguucggcgccaucgccggcuucaucgagggcggcuggaccggcaugguggacggcugguacggcuaccaccaccagaacgagcagggcagcggcuacgccgccgaccugaagagcacccagaacgccaucgacgagaucaccaacaaggugaacagcgugaucgagaagaugaacacccaguucaccgccgugggcaaggaguucaaccaccuggagaagagaaucgagaaccugaacaagaagguggacgacggcuuccuggacaucuggaccuacaacgccgagcugcuggugcugcuggagaacgagagaacccuggacuaccacgacagcaacgugaagaaccuguacgagaaggugagaagccagcugaagaacaacgccaaggagaucggcaacggcugcuucgaguucuaccacaagugcgacaacaccugcauggagagcgugaagaacggcaccuacgacuaccccaaguacagcgaggaggccaagcugaacagagaggagaucgacggcgugaagcuggagagcaccagaaucuaccagauccuggccaucuacagcaccguggccagcagccuggugcugguggugagccugggcgccaucagcuucuggaugugcagcaacggcagccugcagugcagaaucugcaucuga

SEQ ID NO: 164409 - RNA, 1701 nt, Artificial Sequence; identical to SEQ ID NO: 162729
  derived and/or modified CDS sequence (opt4) from hemagglutinin__InfluenzaA__ADD96976

SEQ ID NO: 164410 - RNA, 1701 nt, Artificial Sequence; identical to SEQ ID NO: 162729
  derived and/or modified CDS sequence (opt4) from hemagglutinin__InfluenzaA__ADD96986

SEQ ID NO: 164411 - RNA, 1701 nt, Artificial Sequence
  derived and/or modified CDS sequence (opt4) from hemagglutinin__InfluenzaA__ADD97035
augaaggccauccugguggugcugcuguacaccuucgccaccgccaacgccgacacccugugcaucggcuaccacgccaacaacagcaccgacaccguggacaccgugcuggagaagaacgugaccgugacccacagcgugaaccugcuggaggacaagcacaacggcaagcugugcaagcugagaggcguggccccccugcaccugggcaagugcaacaucgccggcuggauccugggcaaccccgagugcgagagccugagcaccgccagcagcuggagcuacaucguggagaccagcagcagcgacaacggcaccugcuaccccggcgacuucaucgacuacgaggagcugagagagcagcugagcagcgugagcagcuucgagagauucgagaucuuccccaagaccagcagcuggcccaaccacgacagcaacaagggcgugaccgccgccugcccccacgccggcgccaagagcuucuacaagaaccugaucuggcuggugaagaagggcaacagcuaccccaagcugagcaagagcuacaucaacgacaagggcaaggaggugcuggugcuguggggcauccaccaccccagcaccagcgccgaccagcagagccuguaccagaacgccgacgccuacguguucgugggcaccagcagauacagcaagaaguucaagcccgagaucgccaucagacccaaggugagagaccaggagggcagaaugaacuacuacuggacccugguggagcccggcgacaagaucaccuucgaggccaccggcaaccugguggugcccagauacgccuucgccauggagagaaacgccggcagcggcaucaucaucagcgacacccccgugcacgacugcaacaccaccugccagacccccaagggcgccaucaacaccagccugcccuuccagaacauccaccccaucaccaucggcaagugccccaaguacgugaagagcaccaagcugagaauggccaccggccugagaaacgugcccagcauccagagcagaggccuguucggcgccaucgccggcuucaucgagggcggcuggaccggcaugguggacggcugguacggcuaccaccaccagaacgagcagggcagcggcuacgccgccgaccugaagagcacccagaacgccaucgacgagaucaccaacaaggugaacagcgugaucgagaagaugaacacccaguucaccgccgugggcaaggaguucaaccaccuggagaagagaaucgagaaccugaacaagaagguggacgacggcuuccuggacaucuggaccuacaacgccgagcugcuggugcugcuggagaacgagagaacccuggacuaccacgacagcaacgugaagaaccuguacgagaaggugagaagccagcugaagaacaacgccaaggagaucggcaacggcugcuucgaguucuaccacaagugcgacaacaccugcauggagagcgugaagaacggcaccuacgacuaccccaaguacagcgaggaggccaagcugaacagagaggagaucgacggcgugaagcuggagagcaccagaaucuaccagauccuggccaucuacagcaccguggccagcagccuggugcugguggugagccugggcgccaucagcuucuggaugugcagcaacggcagccugcagugcagaaucugcaucuga

SEQ ID NO: 164412 - RNA, 1701 nt, Artificial Sequence
  derived and/or modified CDS sequence (opt4) from hemagglutinin__InfluenzaA__ADD97045
augaaggccauccugguggugcugcuguacaccuucgccaccgccaacgccgacacccugugcaucggcuaccacgccaacaacagcaccgacaccguggacaccgugcuggagaagaacgugaccgugacccacagcgugaaccugcuggaggacaagcacaacggcaagcugugcaagcugagaggcguggccccccugcaccugggcaagugcaacaucgccggcuggauccugggcaaccccgagugcgagagccugagcaccgccagcagcuggagcuacaucguggagaccagcagcagcgacaacggcaccugcuaccccggcgacuucaccgacuacgaggagcugagagagcagcugagcagcgugagcagcuucgagagauucgagaucuuccccaagaccagcagcuggcccaaccacgacagcaacaagggcgugaccgccgccugcccccacgccggcgccaagagcuucuacaagaaccugaucuggcuggugaagaagggcaacagcuaccccaagcugagcaagagcuacaucaacgacaagggcaaggaggugcuggugcuguggggcauccaccaccccagcaccagcgccgaccagcagagccuguaccagaacgccgacgccuacguguucgugggcaccagcagauacagcaagaaguucaagcccgagaucgccaucagacccaaggugagagaccaggagggcagaaugaacuacuacuggacccugguggagcccggcgacaagaucaccuucgaggccaccggcaaccugguggugcccagauacgccuucgccauggagagaaacgccggcagcggcaucaucaucagcgacacccccgugcacgacugcaacaccaccugccagacccccaagggcgccaucaacaccagccugcccuuccagaacauccaccccaucaccaucggcaagugccccaaguacgugaagagcaccaagcugagacuggccaccggccugagaaacgugcccagcauccagagcagaggccuguucggcgccaucgccggcuucaucgagggcggcuggaccggcaugguggacggcugguacggcuaccaccaccagaacgagcagggcagcggcuacgccgccgaccugaagagcacccagaacgccaucgacgagaucaccaacaaggugaacagcgugaucgagaagaugaacacccaguucaccgccgugggcaaggaguucaaccaccuggagaagagaaucgagaaccugaacaagaagguggacgacggcuuccuggacaucuggaccuacaacgccgagcugcuggugcugcuggagaacgagagaacccuggacuaccacgacagcaacgugaagaaccuguacgagaaggugagaagccagcugaagaacaacgccaaggagaucggcaacggcugcuucgaguucuaccacaagugcgacaacaccugcauggagagcgugaagaacggcaccuacgacuaccccaaguacagcgaggaggccaagcugaacagagaggagaucgacggcgugaagcuggagagcaccagaaucuaccagauccuggccaucuacagcaccguggccagcagccuggugcugguggugagccugggcgccaucagcuucuggaugugcagcaacggcagccugcagugcagaaucugcaucuga

SEQ ID NO: 164413 - RNA, 1701 nt, Artificial Sequence; identical to SEQ ID NO: 164412
  derived and/or modified CDS sequence (opt4) from hemagglutinin__InfluenzaA__ADD97055

SEQ ID NO: 164414 - RNA, 1701 nt, Artificial Sequence; identical to SEQ ID NO: 164412
  derived and/or modified CDS sequence (opt4) from hemagglutinin__InfluenzaA__ADD97123

SEQ ID NO: 164415 - RNA, 1701 nt, Artificial Sequence
  derived and/or modified CDS sequence (opt4) from hemagglutinin__InfluenzaA__ADD97161
augaaggccauccugguggugcugcuguacaccuucgccaccgccaacgccgacacccugugcaucggcuaccacgccaacaacagcaccgacaccguggacaccgugcuggagaagaacgugaccgugacccacagcgugaaccugcuggaggacaagcacaacggcaagcugugcaagcugagaggcguggccccccugcaccugggcaagugcaacaucgccggcuggauccugggcaaccccgagugcgagagccugagcaccgccagcagcuggagcuacaucguggagaccagcagcagcgacaacggcaccugcuaccccggcgacuucaucgacuacgaggagcugagagagcagcugagcagcgugagcagcuucgagagauucgagaucuuccccaagaccagcagcuggcccaaccacgacagcaacaagggcgugaccgccgccugcccccacgccggcgccaagagcuucuacaagaaccugaucuggcuggugaagaagggcaagagcuaccccaagcugagcaagagcuacaucaacgacaagggcaagaaggugcuggugcuguggggcauccaccaccccagcaccagcgccgaccagcagagccuguaccagaacgccgacgccuacguguucgugggcaccagcagauacagcaagaaguucaagcccgagaucgccaucagacccaaggugagagaccaggagggcagaaugaacuacuacuggacccugguggagcccggcgacaagaucaccuucgaggccaccggcaaccugguggugcccagauacgccuucgccauggagagaaacgccggcagcggcaucaucaucagcgacacccccgugcacgacugcaacaccaccugccagacccccaagggcgccaucaacaccagccugcccuuccagaacauccaccccaucaccaucggcaagugccccaaguacgugaagagcaccaagcugagacuggccaccggccugagaaacgugcccagcauccagagcagaggccuguucggcgccaucgccggcuucaucgagggcggcuggaccggcaugguggacggcugguacggcuaccaccaccagaacgagcagggcagcggcuacgccgccgaccugaagagcacccagaacgccaucgacgagaucaccaacaaggugaacagcgugaucgagaagaugaacacccaguucaccgccgugggcaaggaguucaaccaccuggagaagagaaucgagaaccugaacaagaagguggacgacggcuuccuggacaucuggaccuacaacgccgagcugcuggugcugcuggagaacgagagaacccuggacuaccacgacagcaacgugaagaaccuguacgagaaggugagaagccagcugaagaacaacgccaaggagaucggcaacggcugcuucgaguucuaccacaagugcgacaacaccugcauggagagcgugaagaacggcaccuacgacuaccccaaguacagcgaggaggccaagcugaacagagaggagaucgacggcgugaagcuggagagcaccagaaucuaccagauccuggccaucuacagcaccguggccagcagccuggugcugguggugagccugggcgccaucagcuucuggaugugcagcaacggcagccugcagugcagaaucugcaucuga

SEQ ID NO: 164416 - RNA, 1701 nt, Artificial Sequence
  derived and/or modified CDS sequence (opt4) from hemagglutinin__InfluenzaA__ADD97171
augaaggccauccugguggugcugcuguacaccuucgccaccgccaacgccgacacccugugcaucggcuaccacgccaacaacagcaccgacaccguggacaccgugcuggagaagaacgugaccgugacccacagcgugaaccugcuggaggacaagcacaacggcaagcugugcaagcugagaggcguggccccccugcaccugggcaagugcaacaucgccggcuggauccugggcaaccccgagugcgagagccugagcaccgccagcagcuggagcuacaucguggagaccagcagcagcgacaacggcaccugcuaccccggcgacuucaucgacuacgaggagcugagagagcagcugagcagcgugagcagcuucgagagauucgagaucuuccccaagaccagcagcuggcccaaccacgacagcaacaagggcgugaccgccgccugcccccacgccggcgccaagagcuucuacaagaaccugaucuggcuggugaagaagggcaacagcuaccccaagcugagcaagagcuacaucaacgacaagggcaaggaggugcuggugcuguggggcauccaccaccccagcaccagcgccgaccagcagagccuguaccagaacgccgacgccuacguguucgugggcaccagcagauacagcaagaaguucaagcccgagaucgccaucagacccaaggugagagaccaggagggcagaaugaacuacuacuggacccugguggagcccggcgacaagaucaccuucgaggccaccggcaaccugguggugcccagauacgccuucgccauggagagaaacgccggcagcggcaucaucaucagcgacacccccgugcacgacugcaacaccaccugccagacccccaagggcgccaucaacaccagccugcccuuccagaacauccaccccaucaccaucggcaagugccccaaguacgugaagagcaccaagcugagacuggccaccggccugagaaacgugcccagcauccagagcagaggccuguucggcgccaucgccggcuucaucgagggcggcuggaccggcaugguggacggcugguacggcuaccaccaccagaacgagcagggcagcggcuacgccgccgaccugaagagcacccagaacgccaucgacgagaucaccaacaaggugaacagcgugaucgagaagaugaacacccaguucaccgccgugggcaaggaguucaaccaccuggagaagagaaucgagaaccugaacaagaagguggacgacggcuuccuggacaucuggaccuacaacgccgagcugcuggugcugcuggagaacgagagaacccuggacuaccacgacagcaacgugaagaaccuguacgagaaggugagaagccagcugaagaacaacgccaaggagaucggcaacggcugcuucgaguucuaccacaagugcgacaacaccugcauggagagcgugaagaacggcaccuacgacuaccccaaguacagcgaggaggccaagcugaacagagaggagaucgacggcgugaagcuggagagcaccagaaucuaccagauccuggccaucuacagcaccguggccagcagccuggugcugguggugagccugggcgccgugagcuucuggaugugcagcaacggcagccugcagugcagaaucugcaucuga

SEQ ID NO: 164417 - RNA, 1701 nt, Artificial Sequence; identical to SEQ ID NO: 162729
  derived and/or modified CDS sequence (opt4) from hemagglutinin__InfluenzaA__ADD97181

SEQ ID NO: 164418 - RNA, 1701 nt, Artificial Sequence; identical to SEQ ID NO: 162729
  derived and/or modified CDS sequence (opt4) from hemagglutinin__InfluenzaA__ADD97201

SEQ ID NO: 164419 - RNA, 1701 nt, Artificial Sequence; identical to SEQ ID NO: 164412
  derived and/or modified CDS sequence (opt4) from hemagglutinin__InfluenzaA__ADD97211

SEQ ID NO: 164420 - RNA, 1701 nt, Artificial Sequence; identical to SEQ ID NO: 162729
  derived and/or modified CDS sequence (opt4) from hemagglutinin__InfluenzaA__ADD97231

SEQ ID NO: 164421 - RNA, 1701 nt, Artificial Sequence
  derived and/or modified CDS sequence (opt4) from hemagglutinin__InfluenzaA__ADD97241
augaaggccauccugguggugcugcuguacaccuucgccaccgccaacgccgacacccugugcaucggcuaccacgccaacaacagcaccgacaccguggacaccgugcuggagaagaacgugaccgugacccacagcgugaaccugcuggaggacaagcacaacggcaagcugugcaagcugagaggcguggccccccugcaccugggcaagugcaacaucgccggcuggauccugggcaaccccgagugcgagagccugagcaccgccagcagcuggagcuacaucguggagaccagcagcagcgacaacggcaccugcuaccccggcgacuucaccgacuacgaggagcugagagagcagcugagcagcgugagcagcuucgagagauucgagaucuuccccaagaccagcagcuggcccaaccacgacagcaacaagggcgugaccgccgccugcccccacgccggcgccaagagcuucuacaagaaccugaucuggcuggugaagaagggcaacagcuaccccaagcugagcaagagcuacaucaacgacaagggcaaggaggugcuggugcuguggggcauccaccaccccagcaccagcgccgaccagcagagccuguaccagaacgccgacgccuacguguucgugggcaccagcagauacagcaagaaguucaagcccgagaucgccaucagacccaaggugagagaccaggagggcagaaugaacuacuacuggacccugguggagcccggcgacaagaucaccuucgaggccaccggcaaccugguggugcccagauacgccuucgccauggagagaaacgccggcagcggcaucaucaucagcgacacccccgugcacaacugcaacaccaccugccagacccccaagggcgccaucaacaccagccugcccuuccagaacauccaccccaucaccaucggcaagugccccaaguacgugaagagcaccaagcugagacuggccaccggccugagaaacgugcccagcauccagagcagaggccuguucggcgccaucgccggcuucaucgagggcggcuggaccggcaugguggacggcugguacggcuaccaccaccagaacgagcagggcagcggcuacgccgccgaccugaagagcacccagaacgccaucgacgagaucaccaacaaggugaacagcgugaucgagaagaugaacacccaguucaccgccgugggcaaggaguucaaccaccuggagaagagaaucgagaaccugaacaagaagguggacgacggcuuccuggacaucuggaccuacaacgccgagcugcuggugcugcuggagaacgagagaacccuggacuaccacgacagcaacgugaagaaccuguacgagaaggugagaagccagcugaagaacaacgccaaggagaucggcaacggcugcuucgaguucuaccacaagugcgacaacaccugcauggagagcgugaagaacggcaccuacgacuaccccaaguacagcgaggaggccaagcugaacagagaggagaucgacggcgugaagcuggagagcaccagaaucuaccagauccuggccaucuacagcaccguggccagcagccuggugcugguggugagccugggcgccaucagcuucuggaugugcagcaacggcagccugcagugcagaaucugcaucuga

SEQ ID NO: 164422 - RNA, 1701 nt, Artificial Sequence; identical to SEQ ID NO: 164412
  derived and/or modified CDS sequence (opt4) from hemagglutinin__InfluenzaA__ADD97251

SEQ ID NO: 164423 - RNA, 1701 nt, Artificial Sequence; identical to SEQ ID NO: 162729
  derived and/or modified CDS sequence (opt4) from hemagglutinin__InfluenzaA__ADD97261

SEQ ID NO: 164424 - RNA, 1701 nt, Artificial Sequence
  derived and/or modified CDS sequence (opt4) from hemagglutinin__InfluenzaA__ADD97271
augaaggccauccugguggugcugcuguacaccuucgccaccgccaacgccgacacccugugcaucggcuaccacgccaacaacagcaccgacaccguggacaccgugcuggagaagaacgugaccgugacccacagcgugaaccugcuggaggacaagcacaacggcaagcugugcaagcugagaggcgugaccccccugcaccugggcaagugcaacaucgccggcuggauccugggcaaccccgagugcgagagccugagcaccgccagcagcuggagcuacaucguggagaccagcagcagcgacaacggcaccugcuaccccggcgacuucaucgacuacgaggagcugagagagcagcugagcagcgugagcagcuucgagagauucgagaucuuccccaagaccagcagcuggcccaaccacgacagcaacaagggcgugaccgccgccugcccccacgccggcgccaagagcuucuacaagaaccugaucuggcuggugaagaagggcaacagcuaccccaagcugagcaagagcuacaucaacgacaagggcaaggaggugcuggugcuguggggcauccaccaccccagcaccagcgccgaccagcagagccuguaccagaacgccgacgccuacguguucgugggcaccagcagauacagcaagaaguucaagcccgagaucgccaucagacccaaggugagagaccaggagggcagaaugaacuacuacuggacccugguggagcccggcgacaagaucaccuucgaggccaccggcaaccugguggugcccagauacgccuucgccauggagagaaacgccggcagcggcaucaucaucagcgacacccccgugcacgacugcaacaccaccugccagacccccaagggcgccaucaacaccagccugcccuuccagaacauccaccccaucaccaucggcaagugccccaaguacgugaagagcaccaagcugagacuggccaccggccugagaaacauccccagcauccagagcagaggccuguucggcgccaucgccggcuucaucgagggcggcuggaccggcaugguggacggcugguacggcuaccaccaccagaacgagcagggcagcggcuacgccgccgaccugaagagcacccagaacgccaucgacgagaucaccaacaaggugaacagcgugaucgagaagaugaacacccaguucaccgccgugggcaaggaguucaaccaccuggagaagagaaucgagaaccugaacaagaagguggacgacggcuuccuggacaucuggaccuacaacgccgagcugcuggugcugcuggagaacgagagaacccuggacuaccacgacagcaacgugaagaaccuguacgagaaggugagaagccagcugaagaacaacgccaaggagaucggcaacggcugcuucgaguucuaccacaagugcgacaacaccugcauggagagcgugaagaacggcaccuacgacuaccccaaguacagcgaggaggccaagcugaacagagaggagaucgacggcgugaagcuggagagcaccagaaucuaccagauccuggccaucuacagcaccguggccagcagccuggugcugguggugagccugggcgccaucagcuucuggaugugcagcaacggcagccugcagugcagaaucugcaucuga

SEQ ID NO: 164425 - RNA, 1701 nt, Artificial Sequence; identical to SEQ ID NO: 164416
  derived and/or modified CDS sequence (opt4) from hemagglutinin__InfluenzaA__ADD97281

SEQ ID NO: 164426 - RNA, 1701 nt, Artificial Sequence; identical to SEQ ID NO: 162729
  derived and/or modified CDS sequence (opt4) from hemagglutinin__InfluenzaA__ADD97291

SEQ ID NO: 164427 - RNA, 1701 nt, Artificial Sequence
  derived and/or modified CDS sequence (opt4) from hemagglutinin__InfluenzaA__ADD97311
augaaggccauccugguggugcugcuguacaccuucgccaccgccaacgccgacacccugugcaucggcuaccacgccaacaacagcaccgacaccguggacaccauccuggagaagaacgugaccgugacccacagcgugaaccugcuggaggacaagcacaacggcaagcugugcaagcugagaggcguggccccccugcaccugggcaagugcaacaucgccggcuggauccugggcaaccccgagugcgagagccugagcaccgccagcagcuggagcuacaucguggagaccagcagcagcgacaacggcaccugcuaccccggcgacuucaucgacuacgaggagcugagagagcagcugagcagcgugagcagcuucgagagauucgagaucuuccccaagaccagcagcuggcccaaccacgacagcaacaagggcgugaccgccgccugcccccacgccggcgccaagagcuucuacaagaaccugaucuggcuggugaagaagggcaacagcuaccccaagcugagcaagagcuacaucaacgacaagggcaaggagauccuggugcuguggggcauccaccaccccagcaccaucgccgaccagcagagccuguaccagaacgccgacgccuacguguucgugggcaccagcagauacagcaagaaguucaagcccgagaucgccaucagacccaaggugagagaccaggagggcagaaugaaguacuacuggacccugguggagcccggcgacaagaucaccuucgaggccaccggcaaccugguggugcccagauacgccuucgccauggagagaaacgccggcagcggcaucaucaucagcgacacccccgugcacaacugcaacaccaccugccagaccagcaagggcgccaucaacaccagccugcccuuccagaacauccaccccaucaccaucggcaagugccccaaguacgugaagagcaccaagcugagacuggccaccggccugagaaacgugcccagcauccagagcagaggccuguucggcgccaucgccggcuucaucgagggcggcuggaccggcaugguggacggcugguacggcuaccaccaccagaacgagcagggcagcggcuacgccgccgaccugaagagcacccagaacgccaucgacgagaucaccaacaaggugaacagcgugaucgagaagaugaacacccaguucaccgccgugggcaaggaguucaaccaccuggagaagagaaucgagaaccugaacaagaagguggacgacggcuuccuggacaucuggaccuacaacgccgagcugcuggugcugcuggagaacgagagaacccuggacuaccacgacagcaacgugaagaaccuguacgagaaggugagaagccagcugaagaacaacgccaaggagaucggcaacggcugcuucgaguucuaccacaagugcgacaacaccugcauggagagcgugaagaacggcaccuacgacuaccccaaguacagcgaggaggccaagcugaacagagaggagaucgacggcgugaagcuggagagcaccagaaucuaccagauccuggccaucuacagcaccguggccagcagccuggugcugguggugagccugggcgccaucagcuucuggaugugcagcaacggcagccugcagugcagaaucugcaucuga

SEQ ID NO: 164428 - RNA, 1701 nt, Artificial Sequence; identical to SEQ ID NO: 164412
  derived and/or modified CDS sequence (opt4) from hemagglutinin__InfluenzaA__ADD97321

SEQ ID NO: 164429 - RNA, 1701 nt, Artificial Sequence; identical to SEQ ID NO: 163893
  derived and/or modified CDS sequence (opt4) from hemagglutinin__InfluenzaA__ADD97331

SEQ ID NO: 164430 - RNA, 1701 nt, Artificial Sequence
  derived and/or modified CDS sequence (opt4) from hemagglutinin__InfluenzaA__ADD97341
augaaggccauccugguggugcugcuguacaccuucgccaccgugaacgccgacacccugugcaucggcuaccacgccaacaacagcaccgacaccguggacaccgugcuggagaagaacgugaccgugacccacagcgugaaccugcuggaggacaagcacaacggcaagcugugcaagcugagaggcguggccccccugcaccugggcaagugcaacaucgccggcuggauccugggcaaccccgagugcgagagccugagcaccgccagcagcuggagcuacaucguggagaccagcagcagcgacaacggcaccugcuaccccggcgacuucaucgacuacgaggagcugagagagcagcugagcagcgugagcagcuucgagagauucgagaucuuccccaagaccagcagcuggcccaaccacgacagcaacaagggcgugaccgccgccugcccccacgccggcgccaagagcuucuacaagaaccugaucuggcuggugaagaagggcaacagcuaccccaagcugagcaagagcuacaucaacgacaagggcaaggaggugcuggugcuguggggcauccaccaccccagcaccagcaccgaccagcagagccuguaccagaacgccgacgccuacguguucgugggcaccagcagauacagcaagaaguucaagcccgagaucgccaucagacccaaggugagagaccaggagggcagaaugaacuacuacuggacccugguggagcccggcgacaagaucaccuucgaggccaccggcaaccugguggugcccagauacgccuucgccauggagagaaacgccggcagcggcaucaucaucagcgacacccccgugcacgacugcaacaccaccugccagacccccaagggcgccaucaacaccagccugcccuuccagaacauccaccccaucaccaucggcaagugccccaaguacgugaagagcaccaagcugagacuggccaccggccugagaaacauccccagcauccagagcagaggccuguucggcgccaucgccggcuucaucgagggcggcuggaccggcaugguggacggcugguacggcuaccaccaccagaacgagcagggcagcggcuacgccgccgaccugaagagcacccagaacgccaucgacgagaucaccaacaaggugaacagcgugaucgagaagaugaacacccaguucaccgccgugggcaaggaguucaaccaccuggagaagagaaucgagaaccugaacaagaagguggacgacggcuuccuggacaucuggaccuacaacgccgagcugcuggugcugcuggagaacgagagaacccuggacuaccacgacagcaacgugaagaaccuguacgagaaggugagaagccagcugaagaacaacgccaaggagaucggcaacggcugcuucgaguucuaccacaagugcgacaacaccugcauggagagcgugaagaacggcaccuacgacuaccccaaguacagcgaggaggccaagcugaacagagaggagaucgacggcgugaagcuggagagcaccagaaucuaccagauccuggccaucuacagcaccguggccagcagccuggugcugguggugagccugggcgccaucagcuucuggaugugcagcaacggcagccugcagugcagaaucugcaucuga

SEQ ID NO: 164431 - RNA, 1701 nt, Artificial Sequence; identical to SEQ ID NO: 163893
  derived and/or modified CDS sequence (opt4) from hemagglutinin__InfluenzaA__ADD97351

SEQ ID NO: 164432 - RNA, 1701 nt, Artificial Sequence; identical to SEQ ID NO: 163893
  derived and/or modified CDS sequence (opt4) from hemagglutinin__InfluenzaA__ADD97361

SEQ ID NO: 164433 - RNA, 1701 nt, Artificial Sequence
  derived and/or modified CDS sequence (opt4) from hemagglutinin__InfluenzaA__ADD97371
augaaggccauccugguggugcugcuguacaccuucgccaccgccaacgccgacacccugugcaucggcuaccacgccaacaacagcaccgacaccguggacaccgugcuggagaagaacgugaccgugacccacagcgugaaccugcuggaggacaagcacaacggcaagcugugcaagcugagaggcguggccccccugcaccugggcaagugcaacaucgccggcuggauccugggcaaccccgagugcgagagccugagcaccgccagcagcuggagcuacaucguggagaccagcagcagcgacaacggcaccugcuaccccggcgacuucaucgacuacgaggagcugagagagcagcugagcagcgugagcagcuucgagagauucgagaucuuccccaagaccagcagcuggcccaaccacgacagcaacaagggcgugaccgccgccugcccccacgccggcgccaagagcuucuacaagaaccugaucuggcuggugaagaagggcaacagcuaccccaagcugagcaagagcuacaucaacgacaagggcaaggaggugcuggugcuguggggcauccaccaccccagcaccagcgccgaccagcagagccuguaccagaacgccgacgccuacguguucgugggcaccagcagauacagcaagaaguucaagcccgagaucgccaucagacccaaggugagagagcaggagggcagaaugaacuacuacuggacccugguggagcccggcgacaagaucaccuucgaggccaccggcaaccugguggugcccagauacgccuucgccauggagagaaacgccggcagcggcaucaucaucagcgacacccccgugcacgacugcaacaccaccugccagacccccaagggcgccaucaacaccagccugcccuuccagaacauccaccccaucaccaucggcaagugccccaaguacgugaagagcaccaagcugagacuggccaccggccugagaaacgugcccagcauccagagcagaggccuguucggcgccaucgccggcuucaucgagggcggcuggaccggcaugguggacggcugguacggcuaccaccaccagaacgagcagggcagcggcuacgccgccgaccugaagagcacccagaacgccaucgacgagaucaccaacaaggugaacagcgugaucgagaagaugaacacccaguucaccgccgugggcaaggaguucaaccaccuggagaagagaaucgagaaccugaacaagaagguggacgacggcuuccuggacaucuggaccuacaacgccgagcugcuggugcugcuggagaacgagagaacccuggacuaccacgacagcaacgugaagaaccuguacgagaaggugagaagccagcugaagaacaacgccaaggagaucggcaacggcugcuucgaguucuaccacaagugcgacaacaccugcauggagagcgugaagaacggcaccuacgacuaccccaaguacagcgaggaggccaagcugaacagagaggagaucgacggcgugaagcuggagagcaccagaaucuaccagauccuggccaucuacagcaccguggccagcagccuggugcugguggugagccugggcgccaucagcuucuggaugugcagcaacggcagccugcagugcagagugugcaucuga

SEQ ID NO: 164434 - RNA, 1701 nt, Artificial Sequence; identical to SEQ ID NO: 163893
  derived and/or modified CDS sequence (opt4) from hemagglutinin__InfluenzaA__ADD97381

SEQ ID NO: 164435 - RNA, 1701 nt, Artificial Sequence; identical to SEQ ID NO: 162729
  derived and/or modified CDS sequence (opt4) from hemagglutinin__InfluenzaA__ADD97391

SEQ ID NO: 164436 - RNA, 1701 nt, Artificial Sequence; identical to SEQ ID NO: 163893
  derived and/or modified CDS sequence (opt4) from hemagglutinin__InfluenzaA__ADD97411

SEQ ID NO: 164437 - RNA, 1701 nt, Artificial Sequence; identical to SEQ ID NO: 163893
  derived and/or modified CDS sequence (opt4) from hemagglutinin__InfluenzaA__ADD97421

SEQ ID NO: 164438 - RNA, 1701 nt, Artificial Sequence; identical to SEQ ID NO: 162729
  derived and/or modified CDS sequence (opt4) from hemagglutinin__InfluenzaA__ADD97431

SEQ ID NO: 164439 - RNA, 1701 nt, Artificial Sequence
  derived and/or modified CDS sequence (opt4) from hemagglutinin__InfluenzaA__ADD97441
augaaggccauccugguggugcugcuguacaccuucgccaccgccaacgccgacacccugugcaucggcuaccacgccaacaacagcaccgacaccguggacaccauccuggagaagaacgugaccgugacccacagcgugaaccugcuggaggacaagcacaacggcaagcugugcaagcugagaggcguggccccccugcaccugggcaagugcaacaucgccggcuggauccugggcaaccccgagugcgagagccugagcaccgccagcagcuggagcuacaucguggagaccagcagcagcgacaacggcaccugcuaccccggcgacuucaucgacuacgaggagcugagagagcagcugagcagcgugagcagcuucgagagauucgagaucuuccccaagaccagcagcuggcccaaccacgacagcaacaagggcgugaccgccgccugcccccacgccggcgccaagagcuucuacaagaaccugaucuggcuggugaagaagggcaacagcuaccccaagcugagcaagagcuacaucaacgacaagggcaaggagauccuggugcuguggggcauccaccaccccagcaccagcgccgaccagcagagccuguaccagaacgccgacgccuacguguucgugggcaccagcagauacagcaagaaguucaagcccgagaucgccaucagacccaaggugagagaccaggagggcagaaugaacuacuacuggacccugguggagcccggcgacaagaucaccuucgaggccaccggcaaccugguggugcccagauacgccuucgccauggagagaaacgccggcagcggcaucaucaucagcgacacccccgugcacgacugcaacaccaccugccagacccccaagggcgccaucaacaccagccugcccuuccagaacauccaccccaucaccaucggcaagugccccaaguacgugaagagcaccaagcugagacuggccaccggccugagaaacgugcccagcauccagagcagaggccuguucggcgccaucgccggcuucaucgagggcggcuggaccggcaugguggacggcugguacggcuaccaccaccagaacgagcagggcagcggcuacgccgccgaccugaagagcacccagaacgccaucgacgagaucaccaacaaggugaacagcgugaucgagaagaugaacacccaguucaccgccgugggcaaggaguucaaccaccuggagaagagaaucgagaaccugaacaagaagguggacgacggcuuccuggacaucuggaccuacaacgccgagcugcuggugcugcuggagaacgagagaacccuggacuaccacgacagcaacgugaagaaccuguacgagaaggugagaagccagcugaagaacaacgccaaggagaucggcaacggcugcuucgaguucuaccacaagugcgacaacaccugcauggagagcgugaagaacggcaccuacgacuaccccaaguacagcgaggaggccaagcugaacagagaggagaucgacggcgugaagcuggagagcaccagaaucuaccagauccuggccaucuacagcaccguggccagcagccuggugcugguggugagccugggcgccaucagcuucuggaugugcagcaacggcagccugcagugcagaaucugcaucuga

SEQ ID NO: 164440 - RNA, 1701 nt, Artificial Sequence; identical to SEQ ID NO: 164433
  derived and/or modified CDS sequence (opt4) from hemagglutinin__InfluenzaA__ADD97451

SEQ ID NO: 164441 - RNA, 1701 nt, Artificial Sequence; identical to SEQ ID NO: 164433
  derived and/or modified CDS sequence (opt4) from hemagglutinin__InfluenzaA__ADD97461

SEQ ID NO: 164442 - RNA, 1701 nt, Artificial Sequence; identical to SEQ ID NO: 164281
  derived and/or modified CDS sequence (opt4) from hemagglutinin__InfluenzaA__ADD97471

SEQ ID NO: 164443 - RNA, 1701 nt, Artificial Sequence; identical to SEQ ID NO: 164281
  derived and/or modified CDS sequence (opt4) from hemagglutinin__InfluenzaA__ADD97481

SEQ ID NO: 164444 - RNA, 1701 nt, Artificial Sequence
  derived and/or modified CDS sequence (opt4) from hemagglutinin__InfluenzaA__ADD97491
augaaggccauccugguggugcugcuguacaccuucgccaccgccaacgccgacacccugugcaucggcuaccacgccaacaacagcaccgacaccguggacaccgugcuggagaagaacgugaccgugacccacagcgugaaccugcuggaggacaagcacaacggcaagcugugcaagcugagaggcgaggccccccugcaccugggcaagugcaacaucgccggcuggauccugggcaaccccgagugcgagagccugagcaccgccagcagcuggagcuacaucguggagaccagcagcagcgacaacggcaccugcuaccccggcgacuucaucaacuacgaggagcugagagagcagcugagcagcgugagcagcuucgagagauucgagaucuuccccaagaccagcagcuggcccaaccacgacagcaacaagggcgugaccgccgccugcccccacgccggcgccaagagcuucuacaagaaccugaucuggcuggugaagaagggcaacagcuaccccaagcugagcaagagcuacaucaacgacaagggcaaggaggugcuggugcuguggggcauccaccaccccagcaccagcgccgaccagcagagccuguaccagaacgccgacgccuacguguucgugggcaccagcagauacagcaagaaguucaagcccgagaucgccaucagacccaaggugagagaccaggagggcagaaugaacuacuacuggacccugguggagcccggcgacaagaucaccuucgaggccaccggcaaccugguggugcccagauacgccuucgccauggagagaaacgccggcagcggcaucaucaucagcgacacccccgugcacgacugcaacaccaccugccagacccccaagggcgccaucaacaccagccugcccuuccagaacauccaccccaucaccaucggcaagugccccaaguacgugaagagcaccaagcugagacuggccaccggccugagaaacgugcccagcauccagagcagaggccuguucggcgccaucgccggcuucaucgagggcggcuggaccggcaugguggacggcugguacggcuaccaccaccagaacgagcagggcagcggcuacgccgccgaccugaagagcacccagaacgccaucgacaagaucaccaacaaggugaacagcgugaucgagaagaugaacacccaguucaccgccgugggcaaggaguucaaccaccuggagaagagaaucgagaaccugaacaagaagguggacgacggcuuccuggacaucuggaccuacaacgccgagcugcuggugcugcuggagaacgagagaacccuggacuaccacgacagcaacgugaagaaccuguacgagaaggugagaagccagcugaagaacaacgccaaggagaucggcaacggcugcuucgaguucuaccacaagugcgacaacaccugcauggagagcgugaagaacggcaccuacgacuaccccaaguacagcgaggaggccaagcugaacagagaggagaucgacggcgugaagcuggagagcaccagaaucuaccagauccuggccaucuacagcaccguggccagcagccuggugcugguggugagccugggcgccaucagcuucuggaugugcagcaacggcagccugcagugcagaaucugcaucuga

SEQ ID NO: 164445 - RNA, 1701 nt, Artificial Sequence; identical to SEQ ID NO: 164444
  derived and/or modified CDS sequence (opt4) from hemagglutinin__InfluenzaA__ADD97501

SEQ ID NO: 164446 - RNA, 1701 nt, Artificial Sequence; identical to SEQ ID NO: 163082
  derived and/or modified CDS sequence (opt4) from hemagglutinin__InfluenzaA__ADD97511

SEQ ID NO: 164447 - RNA, 1701 nt, Artificial Sequence
  derived and/or modified CDS sequence (opt4) from hemagglutinin__InfluenzaA__ADD97531
augaaggccauccugguggugcugcuguacaccuucgccaccgccaacgccgacacccugugcaucggcuaccacgccaacaacagcaccgacaccguggacaccauccuggagaagaacgugaccgugacccacagcgugaaccugcuggaggacaagcacaacggcaagcugugcaagcugagaggcguggccccccugcaccugggcaagugcaacaucgccggcuggauccugggcaaccccgagugcgagagccugagcaccgccagcagcuggagcuacaucguggagaccagcagcagcgacaacggcaccugcuaccccggcgacuucaucgacuacgaggagcugagagagcagcugagcagcgugagcagcuucgagagauucgagaucuuccccaagaccagcagcuggcccaaccacgacagcaacaagggcgugaccgccgccugcccccacgccggcgccaagagcuucuacaagaaccugaucuggcuggugaagaagggcaacagcuaccccaagcugagcaagagcuacaucaacgacaagggcaaggagauccuggugcuguggggcauccaccaccccagcaccaucgccgaccagcagagccuguaccagaacgccgacgccuacguguucgugggcaccagcagauacagcaagaaguucaagcccgagaucgccaucagacccaaggugagagaccaggagggcagaaugaaguacuacuggacccugguggagcccggcgacaagaucaccuucgaggccaccggcaaccugguggugcccagauacgccuucgccauggagagaaacgccggcagcggcaucaucaucagcgacacccccgugcacaacugcaacaccaccugccagacccccaagggcgccaucaacaccagccugcccuuccagaacauccaccccaucaccaucggcaagugccccaaguacgugaagagcaccaagcugagacuggccaccggccugagaaacgugcccagcauccagagcagaggccuguucggcgccaucgccggcuucaucgagggcggcuggaccggcaugguggacggcugguacggcuaccaccaccagaacgagcagggcagcggcuacgccgccgaccugaagagcacccagaacgccaucgacgagaucaccaacaaggugaacagcgugaucgagaagaugaacacccaguucaccgccgugggcaaggaguucaaccaccuggagaagagaaucgagaaccugaacaagaagguggacgacggcuuccuggacaucuggaccuacaacgccgagcugcuggugcugcuggagaacgagagaacccuggacuaccacgacagcaacgugaagaaccuguacgagaaggugagaagccagcugaagaacaacgccaaggagaucggcaacggcugcuucgaguucuaccacaagugcgacaacaccugcauggagagcgugaagaacggcaccuacgacuaccccaaguacagcgaggaggccaagcugaacagagaggagaucgacggcgugaagcuggagagcaccagaaucuaccagauccuggccaucuacagcaccguggccagcagccuggugcugguggugagccugggcgccaucagcuucuggaugugcagcaacggcagccugcagugcagaaucugcaucuga

SEQ ID NO: 164448 - RNA, 1701 nt, Artificial Sequence
  derived and/or modified CDS sequence (opt4) from hemagglutinin__InfluenzaA__ADD97541
augaaggccauccugguggugcugcuguacaccuucgccaccgccaacgccgacacccugugcaucggcuaccacgccaacaacagcaccgacaccguggacaccgugcuggagaagaacgugaccgugacccacagcgugaaccugcuggaggacaagcacaacggcaagcugugcaagcugagaggcguggccccccugcaccugggcaagugcaacaucgccggcuggauccugggcaaccccgagugcgagagccugagcaccgccagcagcuggagcuacaucguggagaccagcagcagcgacaacggcaccugcuaccccggcgacuucaucgacuacgaggagcugagagagcagcugagcagcgugagcagcuucgagagauucgagaucuuccccaagaccagcagcuggcccaaccacgacagcaacaagggcgugaccgccgccugcccccacaccggcgccaagagcuucuacaagaaccugaucuggcuggugaagaagggcaacagcuaccccaagcugagcaagagcuacaucaacgacaagggcaaggaggugcuggugcuguggggcauccaccaccccagcaccagcaccgaccagcagagccuguaccagaacgccgacgcccacguguucgugggcaccagcagauacagcaagaaguucaagcccgagaucgccaucagacccaaggugagagaccaggagggcagaaugaacuacuacuggacccugguggagcccggcgacaagaucaccuucgaggccaccggcaaccugguggugcccagauacgccuucgccauggagagaaacgccggcagcggcaucaucaucagcgacacccccgugcacgacugcaacaccaccugccagacccccaagggcgccaucaacaccagccugcccuuccagaacauccaccccaucaccaucggcaagugccccaaguacgugaagagcaccaagcugagacuggccaccggccugagaaacauccccagcauccagagcagaggccuguucggcgccaucgccggcuucaucgagggcggcuggaccggcaugguggacggcugguacggcuaccaccaccagaacgagcagggcagcggcuacgccgccgaccugaagagcacccagaacgccaucgacgagaucaccaacaaggugaacagcgugaucgagaagaugaacacccaguucaccgccgugggcaaggaguucaaccaccuggagaagagaaucgagaaccugaacaagaagguggacgacggcuuccuggacaucuggaccuacaacgccgagcugcuggugcugcuggagaacgagagaacccuggacuaccacgacagcaacgugaagaaccuguacgagaaggugagaagccagcugaagaacaacgccaaggagaucggcaacggcugcuucgaguucuaccacaagugcgacaacaccugcauggagagcgugaagaacggcaccuacgacuaccccaaguacagcgaggaggccaagcugaacagagaggagaucgacggcgugaagcuggagagcaccagaaucuaccagauccuggccaucuacagcaccguggccagcagccuggugcugguggugagccugggcgccaucagcuucuggaugugcagcaacggcagccugcagugcagaaucugcaucuga

SEQ ID NO: 164449 - RNA, 1701 nt, Artificial Sequence; identical to SEQ ID NO: 164281
  derived and/or modified CDS sequence (opt4) from hemagglutinin__InfluenzaA__ADD97551

SEQ ID NO: 164450 - RNA, 1701 nt, Artificial Sequence; identical to SEQ ID NO: 163893
  derived and/or modified CDS sequence (opt4) from hemagglutinin__InfluenzaA__ADD97561

SEQ ID NO: 164451 - RNA, 1701 nt, Artificial Sequence
  derived and/or modified CDS sequence (opt4) from hemagglutinin__InfluenzaA__ADD97571
augaaggccauccugguggugcugcuguacaccuucgccaccgccaacgccgacacccugugcaucggcuaccacgccaacaacagcaccgacaccguggacaccgugcuggagaagaacgugaccgugacccacagcgugaaccugcuggaggacaagcacaacggcaagcugugcaagcugagaggcguggccccccugcaccugggcaagugcaacaucgccggcuggauccugggcaaccccgagugcgagagccugagcaccgccagcagcuggagcuacaucguggagaccagcagcagcgacaacggcaccugcuaccccggcgacuucaucaacuacgaggagcugagagagcagcugagcagcgugagccuguucgagagauucgagaucuuccccaagaccagcagcuggcccaaccacgacagcaacaagggcgugaccgccgccugcccccacgccggcgccaagagcuucuacaagaaccugaucuggcuggugaagaagggcaacagcuaccccaagcugagcaagagcuacaucaacgacaagggcaaggaggugcuggugcuguggggcauccaccaccccagcaccagcgccgaccagcagagccuguaccagaacgccgacgccuacguguucgugggcaccagcagauacagcaagaaguucaagcccgagaucgccaucagacccaaggugagagaccaggagggcagaaugaacuacuacuggacccugguggagcccggcgacaagaucaccuucgaggccaccggcaaccugguggugcccagauacgccuucgccauggagagaaacgccggcagcggcaucaucaucagcgacacccccgugcacgacugcaacaccaccugccagacccccaagggcgccaucaacaccagccugcccuuccagaacauccaccccaucaccaucggcaagugccccaaguacgugaagagcaccaagcugagacuggccaccggccugagaaacgugcccagcauccagagcagaggccuguucggcgccaucgccggcuucaucgagggcggcuggaccggcaugguggacggcugguacggcuaccaccaccagaacgagcagggcagcggcuacgccgccgaccugaagagcacccagaacgccaucgacaagaucaccaacaaggugaacagcgugaucgagaagaugaacacccaguucaccgccgugggcaaggaguucaaccaccuggagaagagaaucgagaaccugaacaagaagguggacgacggcuuccuggacaucuggaccuacaacgccgagcugcuggugcugcuggagaacgagagaacccuggacuaccacgacagcaacgugaagaaccuguacgagaaggugagaagccagcugaagaacaacgccaaggagaucggcaacggcugcuucgaguucuaccacaagugcgacaacaccugcauggagagcgugaagaacggcaccuacgacuaccccaaguacagcgaggaggccaagcugaacagagaggagaucgacggcgugaagcuggagagcaccagaaucuaccagauccuggccaucuacagcaccguggccagcagccuggugcugguggugagccugggcgccaucagcuucuggaugugcagcaacggcagccugcagugcagaaucugcaucuga

SEQ ID NO: 164452 - RNA, 1701 nt, Artificial Sequence; identical to SEQ ID NO: 162729
  derived and/or modified CDS sequence (opt4) from hemagglutinin__InfluenzaA__ADD97581

SEQ ID NO: 164453 - RNA, 1701 nt, Artificial Sequence; identical to SEQ ID NO: 162729
  derived and/or modified CDS sequence (opt4) from hemagglutinin__InfluenzaA__ADD97591

SEQ ID NO: 164454 - RNA, 1701 nt, Artificial Sequence; identical to SEQ ID NO: 162729
  derived and/or modified CDS sequence (opt4) from hemagglutinin__InfluenzaA__ADD97688

SEQ ID NO: 164455 - RNA, 1701 nt, Artificial Sequence; identical to SEQ ID NO: 164281
  derived and/or modified CDS sequence (opt4) from hemagglutinin__InfluenzaA__ADD97698

SEQ ID NO: 164456 - RNA, 1701 nt, Artificial Sequence; identical to SEQ ID NO: 164281
  derived and/or modified CDS sequence (opt4) from hemagglutinin__InfluenzaA__ADD97888

SEQ ID NO: 164457 - RNA, 1701 nt, Artificial Sequence
  derived and/or modified CDS sequence (opt4) from hemagglutinin__InfluenzaA__ADD97898
augaaggccauccugguggugcugcuguacaccuucgccaccgccaacgccgacacccugugcaucggcuaccacgccaacaacagcaccgacaccguggacaccgugcuggagaagaacgugaccgugacccacagcgugaaccugcuggaggacaagcacaacggcaagcugugcaagcugagaggcguggccccccugcaccugggcaagugcaacaucgccggcuggauccugggcaaccccgagugcgagagccugagcaccgccagcagcuggagcuacaucguggagaccagcagcagcgacaacggcaccugcuaccccggcgacuucaucgacuacgaggagcugagagagcagcugagcagcgugagcagcuucgagagauucgagaucuuccccaagaccagcagcuggcccaaccacgacagcaacaagggcgugaccgccgccugcccccacgccggcgccaagagcuucuacaagaaccugaucuggcuggugaagaagggcaacagcuaccccaagcugagcaagagcuacaucaacgacaagggcaaggaggugcuggugcuguggggcauccaccaccccagcaccagcaccgaccagcagagccuguaccagaacgccgacgccuacguguucgugggcaccagcagauacagcaagaaguucaagcccgagaucgccaucagacccaaggugagagaccaggagggcagaaugaacuacuacuggacccugguggagcccggcgacaagaucaccuucgaggccaccggcaaccugguggugcccagauacgccuucgccauggagagaaacgccggcagcggcaucaucaucagcgacacccccgugcacgacugcaacaccaccugccagacccccaagggcgccaucaacaccagccugcccuuccagaacauccaccccaucaccaucggcaagugccccaaguacgugaagagcaccaagcugagacuggccaccggccugagaaacauccccagcauccagagcagaggccuguucggcgccaucgccggcuucaucgagggcggcuggaccggcaugguggacggcugguacggcuaccaccaccagaacgagcagggcagcggcuacgccgccgaccugaagagcacccagaacgccaucgacgagaucaccaacaaggugaacagcgugaucgagaagaugaacacccaguucaccgccgugggcaaggaguucaaccaccuggagaagagaaucgagaaccugaacaagaagguggacgacggcuuccuggacaucuggaccuacaacgccgagcugcuggugcugcuggagaacgagagaacccuggacuaccacgacagcaacgugaagaaccuguacgagaaggugagaagccagcugaagaacaacgccaaggagaucggcaacggcugcuucgaguucuaccacaagugcgacaacaccugcauggagagcgugaagaacggcaccuacgacuaccccaaguacagcgaggaggccaagcugaacagagaggagaucgacggcgugaagcuggagagcaccagaaucuaccagauccuggccaucuacagcaccguggccagcagccuggugcugguggugagccugggcgccaucagcuucuggaugugcagcaacggcagccugcagugcagaaucugcaucuga

SEQ ID NO: 164458 - RNA, 1701 nt, Artificial Sequence; identical to SEQ ID NO: 163082
  derived and/or modified CDS sequence (opt4) from hemagglutinin__InfluenzaA__ADD97908

SEQ ID NO: 164459 - RNA, 1701 nt, Artificial Sequence; identical to SEQ ID NO: 163893
  derived and/or modified CDS sequence (opt4) from hemagglutinin__InfluenzaA__ADD97918

SEQ ID NO: 164460 - RNA, 1701 nt, Artificial Sequence
  derived and/or modified CDS sequence (opt4) from hemagglutinin__InfluenzaA__ADD97928
augaaggccauccugguggugcugcuguacaccuucgccaccgccaacgccgacacccugugcaucggcuaccacgccaacaacagcaccgacaccguggacaccgugcuggagaagaacgugaccgugacccacagcgugaaccugcuggaggacaagcacaacggcaagcugugcaagcugagaggcguggccccccugcaccugggcaagugcaacaucgccggcuggauccugggcaaccccgagugcgagagccugagcaccgccagcagcuggagcuacaucguggagaccagcagcagcggcaacggcaccugcuaccccggcgacuucaucgacuacgaggagcugagagagcagcugagcagcgugagcagcuucgagagauucgagaucuuccccaagaccagcagcuggcccaaccacgacagcaacaagggcgugaccgccgccugcccccacgccggcgccaagagcuucuacaagaaccugaucuggcuggugaagaagggcaacagcuaccccaagcugagcaagagcuacaucaacgacaagggcaaggaggugcuggugcuguggggcauccaccaccccagcaccagcgccgaccagcagagccuguaccagaacgccgacgccuacguguucgugggcaccagcagauacagcaagaaguucaagcccgagaucgccaucagacccaaggugagagaccaggagggcagaaugaacuacuacuggacccugguggagcccggcgacaagaucaccuucgaggccaccggcaaccugguggugcccagauacgccuucgccauggagagaaacgccggcagcggcaucaucaucagcgacacccccgugcacgacugcaacaccaccugccagacccccaagggcgccaucaacaccagccugcccuuccagaacauccaccccaucaccaucggcaagugccccaaguacgugaagagcaccaagcugagacuggccaccggccugagaaacgugcccagcauccagagcagaggccuguucggcgccaucgccggcuucaucgagggcggcuggaccggcaugguggacggcugguacggcuaccaccaccagaacgagcagggcagcggcuacgccgccgaccugaagagcacccagaacgccaucgacggcaucaccaacaaggugaacagcgugaucgagaagaugaacacccaguucaccgccgugggcaaggaguucaaccaccuggagaagagaaucgagaaccugaacaagaagguggacgacggcuuccuggacaucuggaccuacaacgccgagcugcuggugcugcuggagaacgagagaacccuggacuaccacgacagcaacgugaagaaccuguacgagaaggugagaagccagcugaagaacaacgccaaggagaucggcaacggcugcuucgaguuccaccacaagugcgacaacaccugcauggagagcgugaagaacggcaccuacgacuaccccaaguacagcgaggaggccaagcugaacagagaggagaucgacggcgugaagcuggagagcaccagaaucuaccagauccuggccaucuacagcaccguggccagcagccuggugcugguggugagccugggcgccaucagcuucuggaugugcagcaacggcagccugcagugcagaaucugcaucuga

SEQ ID NO: 164461 - RNA, 1701 nt, Artificial Sequence
  derived and/or modified CDS sequence (opt4) from hemagglutinin__InfluenzaA__ADD97938
augaaggccauccugguggugcugcuguacaccuucgccaccgccaacgccgacacccugugcaucggcuaccacgccaacaacagcaccgacaccguggacaccauccuggagaagaacgugaccgugacccacagcgugaaccugcuggaggacaagcacaacggcaagcugugcaagcugagaggcguggccccccugcaccugggcaagugcaacaucgccggcuggauccugggcaaccccgagugcgagagccugagcaccgccagcagcuggagcuacaucguggagaccagcagcagcgacaacggcaccugcuaccccggcgacuucaucgacuacgaggagcugagagagcagcugagcagcgugagcagcuucgagagauucgagaucuuccccaugaccagcagcuggcccaaccacgacagcaacaagggcgugaccgccgccugcccccacgccggcgccaagagcuucuacaagaaccugaucuggcuggugaagaagggcaacagcuaccccaagcugagcaagagcuacaucaacgacaagggcaaggagauccuggugcuguggggcauccaccaccccagcaccagcgccgaccagcagagccuguaccagaacgccgacgccuacguguucgugggcaccagcagauacagcaagaaguucaagcccgagaucgccaucagacccaaggugagagaccaggagggcagaaugaacuacuacuggacccugguggagcccggcgacaagaucaccuucgaggccaccggcaaccugguggugcccagauacgccuucgccauggagagaaacgccggcagcggcaucaucaucagcgacacccccgugcacgacugcaacaccaccugccagacccccaagggcgccaucaacaccagccugcccuuccagaacauccaccccaucaccaucggcaagugccccaaguacgugaagagcaccaagcugagacuggccaccggccugagaaacgugcccagcauccagagcagaggccuguucggcgccaucgccggcuucaucgagggcggcuggaccggcaugguggacggcugguacggcuaccaccaccagaacgagcagggcagcggcuacgccgccgaccugaagagcacccagaacgccaucgacgagaucaccaacaaggugaacagcgugaucgagaagaugaacacccaguucaccgccgugggcaaggaguucaaccaccuggagaagagaaucgagaaccugaacaagaagguggacgacggcuuccuggacaucuggaccuacaacgccgagcugcuggugcugcuggagaacgagagaacccuggacuaccacgacagcaacgugaagaaccuguacgagaaggugagaagccagcugaagaacaacgccaaggagaucggcaacggcugcuucgaguucuaccacaagugcgacaacaccugcauggagagcgugaagaacggcaccuacgacuaccccaaguacagcgaggaggccaagcugaacagagaggagaucgacggcgugaagcuggagagcaccagaaucuaccagauccuggccaucuacagcaccguggccagcagccuggugcugguggugagccugggcgccaucagcuucuggaugugcagcaacggcagccugcagugcagaaucugcaucuga

SEQ ID NO: 164462 - RNA, 1701 nt, Artificial Sequence
  derived and/or modified CDS sequence (opt4) from hemagglutinin__InfluenzaA__ADD97948
augaaggccauccugcuggugcugcuguacaccuucgccaccgccaacgccgacacccugugcaucggcuaccacgccaacaacagcaccgacaccguggacaccgugcuggagaagaacgugaccgugacccacagcgugaaccugcuggaggacaagcacaacggcaagcugugcaagcugagaggcguggccccccugcaccugggcaagugcaacaucgccggcuggauccugggcaaccccgagugcgagagccugagcaccgccagcagcuggagcuacaucguggagaccagcagcagcgacaacggcaccugcuaccccggcgacuucaucgacuacgaggagcugagagagcagcugagcagcgugagcagcuucgagagauucgagauguuccccaagaccagcagcuggcccaaccacgacagcaacaagggcgugaccgccgccugcccccacgccggcgccaagagcuucuacaagaaccugaucuggcuggugaagaagggcaacagcuaccccaagcugagcaagagcuacaucaacgacaagggcaaggaggugcuggugcuguggggcauccaccaccccagcaccagcgccgaccagcagagccuguaccagaacgccgacgccuacguguucgugggcaccagcagauacagcaagaaguucaagcccgagaucgccaucagacccaaggugagagaccaggagggcagaaugaacuacuacuggacccugguggagcccggcgacaagaucaccuucgaggccaccggcaaccugguggugcccagauacgccuucgccauggagagaaacgccggcagcggcaucaucaucagcgacacccccgugcacgacugcaacaccaccugccagacccccaagggcgccaucaacaccagccugcccuuccagaacauccaccccaucaccaucggcaagugccccaaguacgugaagagcaccaagcugagacuggccaccggccugagaaacgugcccagcauccagagcagaggccuguucggcgccaucgccggcuucaucgagggcggcuggaccggcaugguggacggcugguacggcuaccaccaccagaacgagcagggcagcggcuacgccgccgaccugaagagcacccagaacgccaucgacgagaucaccaacaaggugaacagcgugaucgagaagaugaacacccaguucaccgccgugggcaaggaguucaaccaccuggagaagagaaucgagaaccugaacaagaagguggacgacggcuuccuggacaucuggaccuacaacgccgagcugcuggugcugcuggagaacgagagaacccuggacuaccacgacagcaacgugaagaaccuguacgagaaggugagaagccagcugaagaacaacgccaaggagaucggcaacggcugcuucgaguucuaccacaagugcgacaacaccugcauggagagcgugaagaacggcaccuacgacuaccccaaguacagcgaggaggccaagcugaacagagaggagaucgacggcgugaagcuggagagcaccagaaucuaccagauccuggccaucuacagcaccguggccagcagccuggugcugguggugagccugggcgccaucagcuucuggaugugcagcaacggcagccugcagugcagaaucugcaucuga

SEQ ID NO: 164463 - RNA, 1701 nt, Artificial Sequence
  derived and/or modified CDS sequence (opt4) from hemagglutinin__InfluenzaA__ADD97958
augaaggccauccugguggugcugcuguacaccuucgccaccgccaacgccgacacccugugcaucggcuaccacgccaacaacagcaccgacaccguggacaccgugcuggagaagaacgugaccgugacccacagcgugaaccugcuggaggacaagcacaacggcaagcugugcaagcugagaggcguggccccccugcaccugggcaagugcaacaucgccggcuggauccugggcaaccccgagugcgagagccugagcaccgccagcagcuggagcuacaucguggagaccagcagcagcgacaacggcaccugcuaccccggcgacuucaucgacuacgaggagcugagagagcagcugagcagcgugagcagcuucgagagauucgagaucuuccccaagaccagcagcuggcccaaccacgacagcaacaagggcgugaccgccgccugcccccacgccggcgccaagagcuucuacaagaaccugaucuggcuggugaagaagggcaacagcuaccccaagcugagcaagagcuacaucaacgacaagggcaaggaggugcuggugcuguggggcauccaccaccccagcaccagcgccgaccagcagagccuguaccagaacgccgacgccuacguguucgugggcaccagcagauacagcaagaaguuccagcccgagaucgccaucagacccaaggugagagaccaggagggcagaaugaacuacuacuggacccugcuggagcccggcgacaagaucaccuucgaggccaccggcaaccugguggugcccagauacgccuucgccauggagagaaacgccggcagcggcaucaucaucagcgacacccccgugcacgacugcaacaccaccugccagacccccaagggcgccaucaacaccagccugcccuuccagaacauccaccccaucaccaucggcaagugccccaaguacgugaagagcaccaagcugagacuggccaccggccugagaaacgugcccagcauccagagcagaggccuguucggcgccaucgccggcuucaucgagggcggcuggaccggcaugguggacggcugguacggcuaccaccaccagaacgagcagggcagcggcuacgccgccgaccugaagagcacccagaacgccaucgacgagaucaccaacaaggugaacagcgugaucgagaagaugaacacccaguucaccgccgugggcaaggaguucaaccaccuggagaagagaaucgagaaccugaacaagaagguggacgacggcuuccuggacaucuggaccuacaacgccgagcugcuggugcugcuggagaacgagagaacccuggacuaccacgacagcaacgugaagaaccuguacgagaaggugagaagccagcugaagaacaacgccaaggagaucggcaacggcugcuucgaguucuaccacaagugcgacaacaccugcauggagagcgugaagaacggcaccuacgacuaccccaaguacagcgaggaggccaagcugaacagagaggagaucgacggcgugaagcuggagagcaccagaaucuaccagauccuggccaucuacagcaccguggccagcagccuggugcugguggugagccugggcgccaucagcuucuggaugugcagcaacggcagccugcagugcagaaucugcaucuga

SEQ ID NO: 164464 - RNA, 1701 nt, Artificial Sequence; identical to SEQ ID NO: 162729
  derived and/or modified CDS sequence (opt4) from hemagglutinin__InfluenzaA__ADD97968

SEQ ID NO: 164465 - RNA, 1701 nt, Artificial Sequence; identical to SEQ ID NO: 164457
  derived and/or modified CDS sequence (opt4) from hemagglutinin__InfluenzaA__ADD97978

SEQ ID NO: 164466 - RNA, 1701 nt, Artificial Sequence; identical to SEQ ID NO: 164411
  derived and/or modified CDS sequence (opt4) from hemagglutinin__InfluenzaA__ADD97988

SEQ ID NO: 164467 - RNA, 1701 nt, Artificial Sequence
  derived and/or modified CDS sequence (opt4) from hemagglutinin__InfluenzaA__ADD97998
augaaggccauccugguggugcugcuguacaccuucgccaccgccaacgccgacacccugugcaucggcuaccacgccaacaacagcaccgacaccguggacaccgugcuggagaagaacgugaccgugacccacagcgugaaccugcuggaggacaagcacaacggcaagcugugcaagcugagaggcguggccccccugcaccugggcaagugcaacaucgccggcuggauccugggcaaccccgagugcgagagccugagcaccgccagcagcuggagcuacaucguggagaccagcagcagcgacaacggcaccugcuaccccggcgacuucaucgacuacgaggagcugagagagcagcugagcagcgugagcagcuucgagagauucgagaucuuccccaaggccagcagcuggcccaaccacgacagcaacaagggcgugaccgccgccugcccccacgccggcgccaagagcuucuacaagaaccugaucuggcuggugaagaagggcaacagcuaccccaagcugagcaagagcuacaucaacgacaagggcaaggaggugcuggugcuguggggcauccaccaccccagcaccagcgccgaccagcagagccuguaccagaacgccgacgccuacguguucgugggcaccagcagauacagcaagaaguucaagcccgagaucgccaucagacccaaggugagagaccaggagggcagaaugaacuacuacuggacccugguggagcccggcgacaagaucaccuucgaggccaccggcaaccugguggugcccagauacgccuucgagauggagagaaacgccggcagcggcaucaucaucagcgacacccccgugcacgacugcaacaccaccugccagacccccaagggcgccaucaacaccagccugcccuuccagaacauccaccccaucaccaucggcaagugccccaaguacgugaagagcaccaagcugagacuggccaccggccugagaaacgugcccagcauccagagcagaggccuguucggcgccaucgccggcuucaucgagggcggcuggaccggcaugguggacggcugguacggcuaccaccaccagaacgagcagggcagcggcuacgccgccgaccugaagagcacccagaacgccaucgacgagaucaccaacaaggugaacagcgugaucgagaagaugaacacccaguucaccgccgugggcaaggaguucaaccaccuggagaagagaaucgagaaccugaacaagaagguggacgacggcuuccuggacaucuggaccuacaacgccgagcugcuggugcugcuggagaacgagagaacccuggacuaccacgacagcaacgugaagaaccuguacgagaaggugagaagccagcugaagaacaacgccaaggagaucggcaacggcugcuucgaguucuaccacaagugcgacaacaccugcauggagagcgugaagaacggcaccuacgacuaccccaaguacagcgaggaggccaagcugaacagagaggagaucgacggcgugaagcuggagagcaccagaaucuaccagauccuggccaucuacagcaccguggccagcagccuggugcugguggugagccugggcgccaucagcuucuggaugugcagcaacggcagccugcagugcagaaucugcaucuga

SEQ ID NO: 164468 - RNA, 1701 nt, Artificial Sequence; identical to SEQ ID NO: 164281
  derived and/or modified CDS sequence (opt4) from hemagglutinin__InfluenzaA__ADD98008

SEQ ID NO: 164469 - RNA, 1701 nt, Artificial Sequence
  derived and/or modified CDS sequence (opt4) from hemagglutinin__InfluenzaA__ADD98018
augaaggccauccugguggugcugcuguacaccuucgccaccgccaacgccgacacccugugcaucggcuaccacgccaacaacagcaccgacaccguggacaccgugcuggagaagaacgugaccgugacccacagcgugaaccugcuggaggacaagcacaacggcaagcugugcaagcugagaggcguggccccccugcaccugggcaagugcaacaucgccggcuggauccugggcaaccccgagugcgagagccugagcaccgccagcagcuggagcuacaucguggagaccagcagcagcgacaacggcaccugcuaccccggcgacuucaucgacuacgaggagcugagagagcagcugagcagcgugagcagcuucgagagauucgagaucuuccccaagaccagcagcuggcccaaccacgacagcaacaagggcgugaccgccgccugcccccacgccggcgccaagagcuucuacaagaaccugaucuggcuggugaagaagggcaacagcuaccccaagcugagcaagagcuacaucaacgacaagggcaaggagauccuggugcuguggggcauccaccaccccagcaccagcgccgaccagcagagccuguaccagaacgccgacgccuacguguucgugggcaccagcagauacagcaagaaguucaagcccgagaucgccaccagacccaaggugagagagcaggagggcagaaugaacuacuacuggacccugguggagcccggcgacaagaucaccuucgaggccaccggcaaccugguggugcccagauacgccuucgccauggagagaaacgccggcagcggcaucaucaucagcgacacccccgugcacgacugcaacaccaccugccagacccccaagggcgccaucaacaccagccugcccuuccagaacauccacagcaucaccaucggcaagugccccaaguacgugaagagcaccaagcugagacuggccaccggccugagaaacgugcccagcauccagagcagaggccuguucggcgccaucgccggcuucaucgagggcggcuggaccggcaugguggacggcugguacggcuaccaccaccagaacgagcagggcagcggcuacgccgccgaccugaagagcacccagaacgccaucgacgagaucaccaacaaggugaacagcgugaucgagaagaugaacacccaguucaccgccgugggcaaggaguucaaccaccuggagaagagaaucgagaaccugaacaagaagguggacgacggcuuccuggacaucuggaccuacaacgccgagcugcuggugcugcuggagaacgagagaacccuggacuaccacgacagcaacgugaagaaccuguacgagaaggugagaagccagcugaagaacaacgccaaggagaucggcaacggcugcuucgaguucuaccacaagugcgacaacaccugcauggagagcgugaagaacggcaccuacgacuaccccaaguacagcgaggaggccaagcugaacagagaggagaucgacggcgugaagcuggagagcaccagaaucuaccagauccuggccaucuacagcaccguggccagcagccuggugcugguggugagccugggcgccaucagcuucuggaugugcagcaacggcagccugcagugcagaaucugcaucuga

SEQ ID NO: 164470 - RNA, 1701 nt, Artificial Sequence; identical to SEQ ID NO: 164433
  derived and/or modified CDS sequence (opt4) from hemagglutinin__InfluenzaA__ADD98028

SEQ ID NO: 164471 - RNA, 1701 nt, Artificial Sequence
  derived and/or modified CDS sequence (opt4) from hemagglutinin__InfluenzaA__ADD98038
augaaggccauccugguggugcugcuguacaccuucgccaccgccaacgccgacacccugugcaucggcuaccacgccaacaacagcaccgacaccguggacaccgugcuggagaagaacgugaccgugacccacagcgugaaccugcuggaggacaagcacaacggcaagcugugcaagcugagaggcguggccccccugcaccugggcaagugcaacaucgccggcuggauccugggcaaccccgagugcgagagcaucagcaccgccagcagcuggagcuacaucguggagaccagcagcagcgacaacggcaccugcuaccccggcgacuucaucgacuacgaggagcugagagagcagcugagcagcgugagcagcuucgagagauucgagaucuuccccaaggccagcagcuggcccaaccacgacagcaacaagggcgugaccgccgccugcccccacgccggcgccaagagcuucuacaagaaccugaucuggcuggugaagaagggcaacagcuaccccaagcugagcaagagcuacaucaacgacaagggcaaggaggugcuggugcuguggggcauccaccaccccagcaccagcgccgaccagcagagccuguaccagaacgccgacgccuacguguucgugggcaccagcagauacagcaagaaguucaagcccgagaucgccaucagacccaaggugagagaccaggagggcagaaugaacuacuacuggacccugguggagcccggcgacaagaucaccuucgaggccaccggcaaccugguggugcccagauacgccuucgagauggagagaaacgccggcagcggcaucaucaucagcgacacccccgugcacgacugcaacaccaccugccagacccccaagggcgccaucaacaccagccugcccuuccagaacauccaccccaucaccaucggcaagugccccaaguacgugaagagcaccaagcugagacuggccaccggccugagaaacgugcccagcauccagagcagaggccuguucggcgccaucgccggcuucaucgagggcggcuggaccggcaugguggacggcugguacggcuaccaccaccagaacgagcagggcagcggcuacgccgccgaccugaagagcacccagaacgccaucgacgagaucaccaacaaggugaacagcgugaucgagaagaugaacacccaguucaccgccgugggcaaggaguucaaccaccuggagaagagaaucgagaaccugaacaagaagguggacgacggcuuccuggacaucuggaccuacaacgccgagcugcuggugcugcuggagaacgagagaacccuggacuaccacgacagcaacgugaagaaccuguacgagaaggugagaagccagcugaagaacaacgccaaggagaucggcaacggcugcuucgaguucuaccacaagugcgacaacaccugcauggagagcgugaagaacggcaccuacgacuaccccaaguacagcgaggaggccaagcugaacagagaggagaucgacggcgugaagcuggagagcaccagaaucuaccagauccuggccaucuacagcaccguggccagcagccuggugcugguggugagccugggcgccaucagcuucuggaugugcagcaacggcagccugcagugcagaaucugcaucuga

SEQ ID NO: 164472 - RNA, 1701 nt, Artificial Sequence; identical to SEQ ID NO: 164457
  derived and/or modified CDS sequence (opt4) from hemagglutinin__InfluenzaA__ADD98048

SEQ ID NO: 164473 - RNA, 1701 nt, Artificial Sequence; identical to SEQ ID NO: 162729
  derived and/or modified CDS sequence (opt4) from hemagglutinin__InfluenzaA__ADD98058

SEQ ID NO: 164474 - RNA, 1701 nt, Artificial Sequence; identical to SEQ ID NO: 162729
  derived and/or modified CDS sequence (opt4) from hemagglutinin__InfluenzaA__ADD98068

SEQ ID NO: 164475 - RNA, 1701 nt, Artificial Sequence; identical to SEQ ID NO: 162971
  derived and/or modified CDS sequence (opt4) from hemagglutinin__InfluenzaA__ADD98078

SEQ ID NO: 164476 - RNA, 1701 nt, Artificial Sequence
  derived and/or modified CDS sequence (opt4) from hemagglutinin__InfluenzaA__ADD98098
augaaggccauccugguggugcugcuguacaccuucgccaccgccaacgccgacacccugugcaucggcuaccacgccaacaacagcaccgacaccguggacaccauccuggagaagaacgugaccgugacccacagcgugaaccugcuggaggacaagcacaacggcaagcugugcaagcugagaggcguggccccccugcaccugggcaagugcaacaucgccggcuggauccugggcaaccccgagugcgagagccugagcaccgccagcagcuggagcuacaucguggagaccagcagcagcgacaacggcaccugcuaccccggcgacuucaucgacuacgaggagcugagagagcagcugagcagcgugagcagcuucgagagauucgagaucuuccccaagaccagcagcuggcccaaccacgacagcaacaagggcgugaccgccgccugcccccacgccggcgccaagagcuucuacaagaaccugaucuggcuggugaagaagggcaacagcuaccccaagcugagcaagagcuacaucaacgacaagggcaaggaggugcuggugcuguggggcauccaccaccccagcaccagcagcgaccagcagagccuguaccagaacgccgacgccuacguguucgugggcaccagcagauacagcaagaaguucaagcccgagaucgccaucagacccaaggugagagaccaggagggcagaaugaacuacuacuggacccugguggagcccggcgacaagaucaccuucgaggccaccggcaaccugguggugcccagauacgccuucgccguggagagaaacgccggcagcggcaucaucaucagcgacacccccgugcacgacugcaacaccaccugccagacccccaagggcgccaucaacaccagccugcccuuccagaacauccaccccaucaccaucggcaagugccccaaguacgugaagagcaccaagcugagacuggccaccggccugagaaacgugcccagcauccagagcagaggccuguucggcgccaucgccggcuucaucgagggcggcuggaccggcaugguggacggcugguacggcuaccaccaccagaacgagcagggcagcggcuacgccgccgaccugaagagcacccagaacgccaucgacgagaucaccaacaaggugaacagcgugaucgagaagaugaacacccaguucaccgccgugggcaaggaguucaaccaccuggagaagagaaucgagaaccugaacaagaagguggacgacggcuuccuggacaucuggaccuacaacgccgagcugcuggugcugcuggagaacgagagaacccuggacuaccacgacagcaacgugaagaaccuguacgagaaggugagaagccagcugaagaacaacgccaaggagaucggcaacggcugcuucgaguucuaccacaagugcgacaacaccugcauggagagcgugaagaacggcaccuacgacuaccccaaguacagcgaggaggccaagcugaacagagaggagaucgacggcgugaagcuggagagcaccagaaucuaccagauccuggccaucuacagcaccguggccagcagccuggugcugguggugagccugggcgccaucagcuucuggaugugcagcaacggcagccugcagugcagaaucugcaucuga

SEQ ID NO: 164477 - RNA, 1701 nt, Artificial Sequence; identical to SEQ ID NO: 164444
  derived and/or modified CDS sequence (opt4) from hemagglutinin__InfluenzaA__ADD98118

SEQ ID NO: 164478 - RNA, 1701 nt, Artificial Sequence; identical to SEQ ID NO: 164444
  derived and/or modified CDS sequence (opt4) from hemagglutinin__InfluenzaA__ADD98128

SEQ ID NO: 164479 - RNA, 1701 nt, Artificial Sequence
  derived and/or modified CDS sequence (opt4) from hemagglutinin__InfluenzaA__ADD98138
augaaggccauccugguggugcugcuguacaccuucgccaccgccaacgccgacacccugugcaucggcuaccacgccaacaacagcaccgacaccguggacaccgugcuggagaagaacgugaccgugacccacagcgugaaccugcuggaggacaagcacaacggcaagcugugcaagcugagaggcguggccccccugcaccugggcaagugcaacaucgccggcuggauccugggcaaccccgagugcgagagccugagcaccgccagcagcuggagcuacaucguggagaccagcagcagcgacaacggcaccugcuaccccggcgacuucaucaacuacgaggagcugagagagcagcugagcagcgugagcagcuucgagagauucgagaucuuccccaagaccagcagcuggcccaaccacgacagcaacaagggcgugaccgccgccugcccccacgccggcgccaagagcuucuacaagaaccugaucuggcuggugaagaagggcaacagcuaccccaagcugagcaagagcuacaucaacgacaagggcaaggaggugcuggugcuguggggcauccaccaccccagcaccagcaccgaccagcagagccuguaccagaacgccgacgccuacguguucgugggcaccagcagauacagcaagaaguucaagcccgagaucgccaucagacccaaggugagagaccaggagggcagaaugaacuacuacuggacccugguggagcccggcgacaagaucaccuucgaggccaccggcaaccugguggugcccagauacgccuucgccauggagagaaacaccggcagcggcaucaucaucagcgacacccccgugcacgacugcaacaccaccugccagacccccaacggcgccaucaacaccagccugcccuuccagaacauccaccccaucaccaucggcaagugccccaaguacgugaagagcaccaagcugagacuggccaccggccugagaaacgugcccagcauccagagcagaggccuguucggcgccaucgccggcuucaucgagggcggcuggaccggcaugguggacggcugguacggcuaccaccaccagaacgagcagggcagcggcuacgccgccgaccugaagagcacccagaacgccaucgacaagaucaccaacaaggugaacagcgugaucgagaagaugaacacccaguucaccgccgugggcaaggaguucaaccaccuggagaagagaaucgagaaccugaacaagaagguggacgacggcuuccuggacaucuggaccuacaacgccgagcugcuggugcugcuggagaacgagagaacccuggacuaccacgacagcaacgugaagaaccuguacgagaaggugagaagccagcugaagaacaacgccaaggagaucggcaacggcugcuucgaguucuaccacaagugcgacaacaccugcauggagagcgugaagaacggcaccuacgacuaccccaaguacagcgaggaggccaagcugaacagagaggagaucgacggcgugaagcuggagagcaccagaaucuaccagauccuggccaucuacagcaccguggccagcagccuggugcugguggugagccugggcgccaucagcuucuggaugugcagcaacggcagccugcagugcagaaucugcaucuga

SEQ ID NO: 164480 - RNA, 1701 nt, Artificial Sequence
  derived and/or modified CDS sequence (opt4) from hemagglutinin__InfluenzaA__ADD98148
augaaggccauccugguggugcugcuguacaccuucgccaccgccaacgccgacacccugugcaucggcuaccacgccaacaacagcaccgacaccguggacaccgugcuggagaagaacgugaccgugacccacagcgugaaccugcuggaggacaagcacaacggcaagcugugcaagcugagaggcguggccccccugcaccugggcaagugcaacaucgccggcuggauccugggcaaccccgagugcgagagccugagcaccgccagcagcuggagcuacaucguggagaccagcagcagcgacaacggcaccugcuaccccggcgacuucaucgacuacgaggagcugagagagcagcugagcagcgugagcagcuucgagagauucgagaucuuccccaagaccagcagcuggcccaaccacgacagcaacaagggcgugaccgccgccugcccccacgccggcgccaagagcuucuacaagaaccugaucuggcuggugaagaagggcaacagcuaccccaagcugagcaagagcuacaucaacgacaagggcaaggaggugcuggugcuguggggcauccaccaccccagcaccagcgccgaccagcagagccuguaccagaacgccgacgccuacguguucgugggcaccagcagauacagcaagaaguucaagcccgagaucgccaucagacccaaggugagagaccaggagggcagaaugaacuacuacuggacccugguggagcccggcgacaagaucaccuucgaggccaccggcaaccugguggugcccagauacgccuucgccauggagagaaacgccggcagcggcaucuucaucagcgacacccccgugcacgacugcaacaccaccugccagacccccaagggcgccaucaacaccagccugcccuuccagaacauccaccccaucaccaucggcaagugccccaaguacgugaagagcaccaagcugagacuggccaccggccugagaaacgugcccagcauccagagcagaggccuguucggcgccaucgccggcuucaucgagggcggcuggaccggcaugguggacggcugguacggcuaccaccaccagaacgagcagggcagcggcuacgccgccgaccugaagagcacccagaacgccaucgacaagaucaccaacaaggugaacagcgugaucgagaagaugaacacccaguucaccgccgugggcaaggaguucaaccaccuggagaagagaaucgagaaccugaacaagaagguggacgacggcuuccuggacaucuggaccuacaacgccgagcugcuggugcugcuggagaacgagagaacccuggacuaccacgacagcaacgugaagaaccuguacgagaaggugagaagccagcugaagaacaacgccaaggagaucggcaacggcugcuucgaguucuaccacaagugcgacaacaccugcauggagagcgugaagaacggcaccuacgacuaccccaaguacagcgaggaggccaagcugaacagagaggagaucgacggcgugaagcuggagagcaccagaaucuaccagauccuggccaucuacagcaccguggccagcagccuggugcugguggugagccugggcgccaucagcuucuggaugugcagcaacggcagccugcagugcagaaucugcaucuga

SEQ ID NO: 164481 - RNA, 1701 nt, Artificial Sequence
  derived and/or modified CDS sequence (opt4) from hemagglutinin__InfluenzaA__ADD98158
augaaggccauccugguggugcugcuguacaccuucgccaccgccaacgccgacacccugugcaucggcuaccacgccaacaacagcaccgacaccguggacaccgugcuggagaagaacgugaccgugacccacagcgugaaccugcuggaggacaagcacaacggcaagcugugcgagcugagaggcguggccccccugcaccugggcaagugcaacaucgccggcuggauccugggcaaccccgagugcgagagccugagcaccgccagcagcuggagcuacaucguggagaccagcagcagcgacaacggcaccugcuaccccggcgacuucaucgacuacgaggagcugagagagcagcugagcagcgugagcagcuucgagagauucgagaucuuccccaagaccagcagcuggcccaaccacgacagcaacaagggcgugaccgccgccugcccccacgccggcgccaagagcuucuacaagaaccugaucuggcuggugaagaagggcaacagcuaccccaagcugagcaagagcuacaucaacgacaagggcaaggaggugcuggugcuguggggcauccaccaccccagcaccagcgccgaccagcagagccuguaccagaacgccgacgccuacguguucgugggcaccagcagauacagcaagaaguucaagcccgagaucgccaucagacccaaggugagagaccaggagggcagaaugaacuacuacuggacccugguggagcccggcgacaagaucaccuucgaggccaccggcaaccuggugauccccagauacgccuucgccauggagagaaacgccggcagcggcaucaucaucagcgacacccccgugcacgacugcaacaccaccugccagacccccaagggcgccaucaacaccagccugcccuuccagaacauccaccccaucaccaucggcaagugccccaaguacgugaagagcaccaagcugagacuggccaccggccugagaaacgugcccagcauccagagcagaggccuguucggcgccaucgccggcuucaucgagggcggcuggaccggcaugguggacggcugguacggcuaccaccaccagaacgagcagggcagcggcuacgccgccgaccugaagagcacccagaacgccaucgacaagaucaccaacaaggugaacagcgugaucgagaagaugaacacccaguucaccgccgugggcaaggaguucaaccaccuggagaagagaaucgagaaccugaacaagaagguggacgacggcuuccuggacaucuggaccuacaacgccgagcugcuggugcugcuggagaacgagagaacccuggacuaccacgacagcaacgugaagaaccuguacgagaaggugagaagccagcugaagaacaacgccaaggagaucggcaacggcugcuucgaguucuaccacaagugcgacaacaccugcauggagagcgugaagaacggcaccuacgacuaccccaaguacagcgaggaggccaagcugaacagagaggagaucgacggcgugaagcuggagagcaccagaaucuaccagauccuggccaucuacagcaccguggccagcagccuggugcugguggugagccugggcgccaucagcuucuggaugugcagcaacggcagccugcagugcagaaucugcaucuga

SEQ ID NO: 164482 - RNA, 1701 nt, Artificial Sequence
  derived and/or modified CDS sequence (opt4) from hemagglutinin__InfluenzaA__ADD98168
augaaggccauccugguggugcugcuguacaccuucgccaccgccaacgccgacacccugugcaucggcuaccacgccaacaacagcaccgacaccguggacaccgugcuggagaagaacgugaccgugacccacagcaucaacauccuggaggacaagcacaacggcaagcugugcaagcugagaggcguggccccccugcaccugggcaagugcaacaucgccggcuggauccugggcaaccccgagugcgagagccugagcaccgccagcagcuggagcuacaucguggagaccagcagcagcgacaacggcaccugcuaccccggcgacuucaucgacuacgaggagcugagagagcagcugagcagcgugagcagcuucgagagauucgagaucuuccccaagaccagcagcuggcccaaccacgacagcaacaagggcgugaccgccgccugcccccacgccggcgccaagagcuucuacaagaaccugaucuggcuggugaagaagggcaacagcuaccccaagcugagcaagagcuacaucaacgacaagggcaaggaggugcuggugcuguggggcauccaccaccccagcaccagcgccgaccagcagagccuguaccagaacgccgacgccuacguguucgugggcaccagcagauacagcaagaaguucaagcccgagaucgccaucagacccaaggugagagaccaggagggcagaaugaacuacuacuggacccugguggagcccggcgacaagaucaccuucgaggccaccggcaaccugguggugcccaaguacgccuucgccauggagagaaacgccggcagcggcaucaucaucagcgacacccccgugcacgacugcaacaccaccugccagacccccaagggcgccaucaacaccagccugcccuuccagaacauccaccccaucaccaucggcaagugccccaaguacgugaagagcaccaagcugagacuggccaccggccugagaaacgugcccagcauccagagcagaggccuguucggcgccaucgccggcuucaucgagggcggcuggaccggcaugguggacggcugguacggcuaccaccaccagaacgagcagggcagcggcuacgccgccgaccugaagagcacccagaacgccaucgacgagaucaccaacaaggugaacagcgugaucgagaagaugaacacccaguucaccgccgugggcaaggaguucaaccaccuggagaagagaaucgagaaccugaacaagaagguggacgacggcuuccuggacaucuggaccuacaacgccgagcugcuggugcugcuggagaacgagagaacccuggacuaccacgacagcaacgugaagaaccuguacgagaaggugagaagccagcugaagaacaacgccaaggagaucggcaacggcugcuucgaguucuaccacaagugcgacaacaccugcauggagagcgugaagaacggcaccuacgacuaccccaaguacagcgaggaggccaagcugaacagagaggagaucgacggcgugaagcuggagagcaccagaaucuaccagauccuggccaucuacagcaccguggccagcagccuggugcugguggugagccugggcgccaucagcuucuggaugugcagcaacggcagccugcagugcagaaucugcaucuga

SEQ ID NO: 164483 - RNA, 1701 nt, Artificial Sequence; identical to SEQ ID NO: 163901
  derived and/or modified CDS sequence (opt4) from hemagglutinin__InfluenzaA__ADD98188

SEQ ID NO: 164484 - RNA, 1701 nt, Artificial Sequence
  derived and/or modified CDS sequence (opt4) from hemagglutinin__InfluenzaA__ADD98198
augaaggccauccugguggugcugcuguacaccuucgccaccgccaacgccgacacccugugcaucggcuaccacgccaacaacagcaccgacaccguggacaccgugcuggagaagaacgugaccgugacccacagcgugaaccugcuggaggacaagcacaacggcaagcugugcaagcugagaggcguggccccccugcaccugggcaagugcaacaucgccggcuggauccugggcaaccccgagugcgagagccugagcaccgccagcagcuggagcuacaucguggagaccagcagcagcgacaacggcaccugcuaccccggcgacuucaucgacuacgaggagcugagagagcagcugagcagcgugagcagcuucgagagauucgagaucuuccccaagaccagcagcuggcccaaccacgacagcaacaagggcgugaccgccgccugcccccacgccggcgccaagagcuucuacaagaaccugaucuggcuggugaagaagggcaacagcuaccccaagcugagcaagagcuacaucaacgacaagggcaaggaggugcuggugcuguggggcauccaccaccccagcaccagcgccgaccagcagagccuguaccagaacgccgacgccuacguguucgugggcaccagcagauacagcaagaaguucaagcccgagaucgccaucagacccaaggugagagaccaggagggcagaaugaacuacuacuggacccugguggagcccggcgacaagaucaccuucgaggccaccggcaaccugguggugcccagauacgccuucgccauggagagaaacgccggcagcggcaucaucaucagcgacacccccgugcacgacugcaacaccaccugccagacccccaagggcgccaucaacaccagccugcccuuccagaacauccaccccaucaccaucggcaagugccccaaguacgugaagagcaccaagaugagacuggccaccggccugagaaacgugcccagcauccagagcagaggccuguucggcgccaucgccggcuucaucgagggcggcuggaccggcaugguggacggcugguacggcuaccaccaccagaacgagcagggcagcggcuacgccgccgaccugaagagcacccagaacgccaucgacgagaucaccaacaaggugaacagcgugaucgagaagaugaacacccaguucaccgccgugggcaaggaguucaaccaccuggagaagagaaucgagaaccugaacaagaagguggacgacggcuuccuggacaucuggaccuacaacgccgagcugcuggugcugcuggagaacgagagaacccuggacuaccacgacagcaacgugaagaaccuguacgagaaggugagaagccagcugaagaacaacgccaaggagaucggcaacggcugcuucgaguucuaccacaagugcgacaacaccugcauggagagcgugaagaacggcaccuacgacuaccccaaguacagcgaggaggccaagcugaacagagaggagaucgacggcgugaagcuggagagcaccagaaucuaccagauccuggccaucuacagcaccguggccagcagccuggugcugguggugagccugggcgccaucagcuucuggaugugcagcaacggcagccugcagugcagaaucugcaucuga

SEQ ID NO: 164485 - RNA, 1701 nt, Artificial Sequence; identical to SEQ ID NO: 162729
  derived and/or modified CDS sequence (opt4) from hemagglutinin__InfluenzaA__ADD98208

SEQ ID NO: 164486 - RNA, 1701 nt, Artificial Sequence; identical to SEQ ID NO: 162909
  derived and/or modified CDS sequence (opt4) from hemagglutinin__InfluenzaA__ADE20321

SEQ ID NO: 164487 - RNA, 1701 nt, Artificial Sequence; identical to SEQ ID NO: 162909
  derived and/or modified CDS sequence (opt4) from hemagglutinin__InfluenzaA__ADE20331

SEQ ID NO: 164488 - RNA, 1701 nt, Artificial Sequence; identical to SEQ ID NO: 162909
  derived and/or modified CDS sequence (opt4) from hemagglutinin__InfluenzaA__ADE20341

SEQ ID NO: 164489 - RNA, 1701 nt, Artificial Sequence; identical to SEQ ID NO: 164317
  derived and/or modified CDS sequence (opt4) from hemagglutinin__InfluenzaA__ADE20351

SEQ ID NO: 164490 - RNA, 1701 nt, Artificial Sequence; identical to SEQ ID NO: 162909
  derived and/or modified CDS sequence (opt4) from hemagglutinin__InfluenzaA__ADE20375

SEQ ID NO: 164491 - RNA, 1701 nt, Artificial Sequence; identical to SEQ ID NO: 164317
  derived and/or modified CDS sequence (opt4) from hemagglutinin__InfluenzaA__ADE20388

SEQ ID NO: 164492 - RNA, 1701 nt, Artificial Sequence; identical to SEQ ID NO: 162909
  derived and/or modified CDS sequence (opt4) from hemagglutinin__InfluenzaA__ADE20628

SEQ ID NO: 164493 - RNA, 1701 nt, Artificial Sequence; identical to SEQ ID NO: 164317
  derived and/or modified CDS sequence (opt4) from hemagglutinin__InfluenzaA__ADE20638

SEQ ID NO: 164494 - RNA, 1701 nt, Artificial Sequence; identical to SEQ ID NO: 162909
  derived and/or modified CDS sequence (opt4) from hemagglutinin__InfluenzaA__ADE20648

SEQ ID NO: 164495 - RNA, 1701 nt, Artificial Sequence; identical to SEQ ID NO: 162909
  derived and/or modified CDS sequence (opt4) from hemagglutinin__InfluenzaA__ADE20658

SEQ ID NO: 164496 - RNA, 1701 nt, Artificial Sequence; identical to SEQ ID NO: 164317
  derived and/or modified CDS sequence (opt4) from hemagglutinin__InfluenzaA__ADE20668

SEQ ID NO: 164497 - RNA, 1701 nt, Artificial Sequence; identical to SEQ ID NO: 164317
  derived and/or modified CDS sequence (opt4) from hemagglutinin__InfluenzaA__ADE20678

SEQ ID NO: 164498 - RNA, 1701 nt, Artificial Sequence; identical to SEQ ID NO: 162909
  derived and/or modified CDS sequence (opt4) from hemagglutinin__InfluenzaA__ADE20688

SEQ ID NO: 164499 - RNA, 1701 nt, Artificial Sequence; identical to SEQ ID NO: 162909
  derived and/or modified CDS sequence (opt4) from hemagglutinin__InfluenzaA__ADE20708

SEQ ID NO: 164500 - RNA, 1701 nt, Artificial Sequence; identical to SEQ ID NO: 162909
  derived and/or modified CDS sequence (opt4) from hemagglutinin__InfluenzaA__ADE20718

SEQ ID NO: 164501 - RNA, 1701 nt, Artificial Sequence
  derived and/or modified CDS sequence (opt4) from hemagglutinin__InfluenzaA__ADE20728
augaaggccauccugguggugcugcuguacaccuucgccaccgccaacgccgacacccugugcaucggcuaccacgccaacaacagcaccgacaccguggacaccgugcuggagaagaacgugaccgugacccacagcgugaacauccuggaggacaagcacaacggcaagcugugcaagcugaagggcguggccccccugcaccugggcaagugcaacaucgccggcuggauccugggcaaccccgagugcgagagccugagcaccgccagcagcuggagcuacaucguggagaccagcagcagcgacaacggcaccugcuaccccggcgacuucaucgacuacgaggagcugagagagcagcugagcagcgugagcagcuucgagagauucgagaucuuccccaagaccagcagcuggcccaaccacgacagcaacaagggcgugaccgccgccugcccccacgccggcgccaagagcuucuacaagaaccugaucuggcuggugaagaagggcaacagcuaccccaagcugagcaagagcuacaucaacgacaagggcaaggaggugcuggugcuguggggcauccaccaccccagcaccagcgccgaccagcagagccuguaccagaacgccgacgccuacguguucgugggcagcagcaaguacagcaagaaguucaagcccgagaucgccaucagacccaaggugagagaccaggagggcagaaugaacuacuacuggacccugguggagcccggcgacaagaucaccuucgaggccaccggcaaccugguggugcccagauacgccuucgccauggagagaaacgccggcagcggcaucaucaucagcgacacccccgugcacgacugcaacaccaccugccagacccccaagggcgccaucaacaccagccugcccuuccagaacauccaccccaucaccaucggcaagugccccaaguacgugaagagcaccaagcugagacuggccaccggccugagaaacgugcccagcauccagagcagaggccuguucggcgccaucgccggcuucaucgagggcggcuggaccggcaugguggacggcugguacggcuaccaccaccagaacgagcagggcagcggcuacgccgccgaccugaagagcacccagaacgccaucgacgagaucaccaacaaggugaacagcgugaucgagaagaugaacacccaguucaccgccgugggcaaggaguucaaccaccuggagaagagaaucgagaaccugaacaagaagguggacgacggcuuccuggacaucuggaccuacaacgccgagcugcuggugcugcuggagaacgagagaacccuggacuaccacgacagcaacgugaagaaccuguacgagaaggugagaagccagcugaagaacaacgccaaggagaucggcaacggcugcuucgaguucuaccacaagugcgacaacaccugcauggagagcgugaagaacggcaccuacgacuaccccaaguacagcgaggaggccaagcugaacagagaggagaucgacggcgugaagcuggagagcaccagaaucuaccagauccuggccaucuacagcaccguggccagcagccuggugcugguggugagccugggcgccaucagcuucuggaugugcagcaacggcagccugcagugcagaaucugcaucuga

SEQ ID NO: 164502 - RNA, 1701 nt, Artificial Sequence; identical to SEQ ID NO: 162909
  derived and/or modified CDS sequence (opt4) from hemagglutinin__InfluenzaA__ADE20738

SEQ ID NO: 164503 - RNA, 1701 nt, Artificial Sequence; identical to SEQ ID NO: 162909
  derived and/or modified CDS sequence (opt4) from hemagglutinin__InfluenzaA__ADE20748

SEQ ID NO: 164504 - RNA, 1701 nt, Artificial Sequence; identical to SEQ ID NO: 164501
  derived and/or modified CDS sequence (opt4) from hemagglutinin__InfluenzaA__ADE20758

SEQ ID NO: 164505 - RNA, 1701 nt, Artificial Sequence; identical to SEQ ID NO: 162909
  derived and/or modified CDS sequence (opt4) from hemagglutinin__InfluenzaA__ADE20768

SEQ ID NO: 164506 - RNA, 1701 nt, Artificial Sequence
  derived and/or modified CDS sequence (opt4) from hemagglutinin__InfluenzaA__ADE20778
augaaggccauccugguggugcugcuguacaccuucgccaccgccaacgccgacacccugugcaucggcuaccacgccaacaacagcaccgacaccguggacaccgugcuggagaagaacgugaccgugacccacagcgugaacauccuggaggacaagcacaacggcaagcugugcaagcugaagggcguggccccccugcaccugggcaagugcaacaucgccggcuggauccugggcaaccccgagugcgagagccugagcaccgccagcagcuggagcuacaucguggagaccagcagcagcgacaacggcaccugcuaccccggcgacuucaucgacuacgaggagcugagagagcagcugagcagcgugagcagcuucgagagauucgagaucuuccccaagaccagcagcuggcccaaccacgacagcaacaagggcgugaccgccgccugcccccacgccggcgccaagagcuucuacaagaaccugaucuggcuggugaagaagggcaacagcuaccccaagcugagcaagagcuacaucaacgacaagggcaagaaggugcuggugcuguggggcauccaccaccccagcaccagcgccgaccagcagagccuguaccagaacgccgacgccuacguguucgugggcagcagcaaguacagcaagaaguucaagcccgagaucgccaucagacccaaggugagagaccaggagggcagaaugaacuacuacuggacccugguggagcccggcgacaagaucaccuucgaggccaccggcaaccugguggugcccagauacgccuucgccauggagagaaacgccggcagcggcaucaucaucagcgacacccccgugcacgacugcaacaccaccugccagacccccaagggcgccaucaacaccagccugcccuuccagaacauccaccccaucaccaucggcaagugccccaaguacgugaagagcaccaagcugagacuggccaccggccugagaaacgugcccagcauccagagcagaggccuguucggcgccaucgccggcuucaucgagggcggcuggaccggcaugguggacggcugguacggcuaccaccaccagaacgagcagggcagcggcuacgccgccgaccugaagagcacccagaacgccaucgacgagaucaccaacaaggugaacagcgugaucgagaagaugaacacccaguucaccgccgugggcaaggaguucaaccaccuggagaagagaaucgagaaccugaacaagaagguggacgacggcuuccuggacaucuggaccuacaacgccgagcugcuggugcugcuggagaacgagagaacccuggacuaccacgacagcaacgugaagaaccuguacgagaaggugagaagccagcugaagaacaacgccaaggagaucggcaacggcugcuucgaguucuaccacaagugcgacaacaccugcauggagagcgugaagaacggcaccuacgacuaccccaaguacagcgaggaggccaagcugaacagagaggagaucgacggcgugaagcuggagagcaccagaaucuaccagauccuggccaucuacagcaccguggccagcagccuggugcugguggugagccugggcgccaucagcuucuggaugugcagcaacggcagccugcagugcagaaucugcaucuga

SEQ ID NO: 164507 - RNA, 1701 nt, Artificial Sequence; identical to SEQ ID NO: 163893
  derived and/or modified CDS sequence (opt4) from hemagglutinin__InfluenzaA__ADE20788

SEQ ID NO: 164508 - RNA, 1701 nt, Artificial Sequence
  derived and/or modified CDS sequence (opt4) from hemagglutinin__InfluenzaA__ADE20808
augaaggccauccugguggugcugcuguacaccuucgccaccgccaacgccgacacccugugcaucggcuaccacgccaacaacagcaccgacaccguggacaccgugcuggagaagaacgugaccgugacccacagcgugaaccugcuggaggacaagcacaacggcaagcugugcaagcugagaggcguggccccccugcaccugggcaagugcaacaucgccggcuggauccugggcaaccccgagugcgagagccugagcaccgccagcagcuggagcuacaucguggagaccagcagcagcgacaacggcaccugcuaccccggcgacuucaucgacuacgaggagcugagagagcagcugagcagcgugagcagcuucgagagauucgagaucuuccccaagaccagcagcuggcccaaccacgacagcaacaagggcgugaccgccgccugcccccacgccggcgccaagagcuucuacaagaaccugaucuggcuggugaagaagggcaacagcuaccccaagcugagcaagagcuacaucaacgacaaggagaaggaggugcuggugcuguggggcauccaccaccccagcaccagcgccgaccagcagagccuguaccagaacgccgacgccuacguguucgugggcaccagcagauacagcaagaaguucaagcccgagaucgccaucagacccaaggugagagaccaggagggcagaaugaacuacuacuggacccugguggagcccggcgacaagaucaccuucgaggccaccggcaaccugguggugcccagauacgccuucgccauggagagaaacgccggcagcggcaucaucaucagcgacacccccgugcacgacugcaacaccaccugccagacccccaagggcgccaucaacaccagccugcccuuccagaacauccaccccaucaccaucggcaagugccccaaguacgugaagagcaccaagcugagacuggccaccggccugagaaacgugcccagcauccagagcagaggccuguucggcgccaucgccggcuucaucgagggcggcuggaccggcaugguggacggcugguacggcuaccaccaccagaacgagcagggcagcggcuacgccgccgaccugaagagcacccagaacgccaucgacaagaucaccaacaaggugaacagcgugaucgagaagaugaacacccaguucaccgccgugggcaaggaguucaaccaccuggagaagagaaucgagaaccugaacaagaagguggacgacggcuuccuggacaucuggaccuacaacgccgagcugcuggugcugcuggagaacgagagaacccuggacuaccacgacagcaacgugaagaaccuguacgagaaggugagaagccagcugaagaacaacgccaaggagaucggcaacggcugcuucgaguucuaccacaagugcgacaacaccugcauggagagcgugaagaacggcaccuacgacuaccccaaguacagcgaggaggccaagcugaacagagaggagaucgacggcgugaagcuggagagcaccagaaucuaccagauccuggccaucuacagcaccguggccagcagccuggugcugguggugagccugggcgccaucagcuucuggaugugcagcaacggcagccugcagugcagaaucugcaucuga

SEQ ID NO: 164509 - RNA, 1701 nt, Artificial Sequence; identical to SEQ ID NO: 163893
  derived and/or modified CDS sequence (opt4) from hemagglutinin__InfluenzaA__ADE20818

SEQ ID NO: 164510 - RNA, 1701 nt, Artificial Sequence; identical to SEQ ID NO: 164451
  derived and/or modified CDS sequence (opt4) from hemagglutinin__InfluenzaA__ADE20828

SEQ ID NO: 164511 - RNA, 1701 nt, Artificial Sequence
  derived and/or modified CDS sequence (opt4) from hemagglutinin__InfluenzaA__ADE20848
augaaggccauccugguggugcugcuguacaccuucgccaccgccaacgccgacacccugugcaucggcuaccacgccaacaacagcaccgacaccguggacaccgugcuggagaagaacgugaccgugacccacagcgugaaccugcuggaggacaagcacaacggcaagcugugcaagcugagaggcguggccccccugcaccugggcaagugcaacaucgccggcuggauccugggcaaccccgagugcgagagccugagcaccgccagcagcuggagcuacaucguggagaccagcagcagcgacaacggcaccugcuaccccggcgacuucaucaacuacgaggagcugagagagcagcugagcagcgugagcagcuucgagagauucgagaucuuccccaagaccagcagcuggcccaaccacgacagcaacaagggcgugaccgccgccugcccccacgccggcgccaagagcuucuacaagaaccugaucuggcuggugaagaagggcaacagcuaccccaagcugagcaagagcuacaucaacgacaagggcaaggaggugcuggugcuguggggcauccaccaccccagcaccagcgccgaccagcagagccuguaccagaacgccgacgccuacguguucgugggcaccagcagauacagcaagaaguucaagcccgagaucgccaucagacccaaggugagagaccaggagggcagaaugaacuacuacuggacccugguggagcccggcgacaagaucaccuucgaggccaccggcaaccugguggugcccagauacgccuucgccauggagagaaacgccggcagcggcaucaucaucagcgacacccccgugcacgacugcaacaccaccugccagacccccaagggcgccaucaacaccagccugcccuuccagaacauccaccccaucaccaucggcaagugccccaaguacgugaagagcaccaagcugagacuggccaccggccugagaaacgugcccagcauccagagcagaggccuguucggcgccaucgccggcuucaucgagggcggcuggaccggcaugaucgacggcugguacggcuaccaccaccagaacgagcagggcagcggcuacgccgccgaccugaagagcacccagaacgccaucgacaagaucaccaacaaggugaacagcgugaucgagaagaugaacacccaguucaccgccgugggcaaggaguucaaccaccuggagaagagaaucgagaaccugaacaagaagguggacgacggcuuccuggacaucuggaccuacaacgccgagcugcuggugcugcuggagaacgagagaacccuggacuaccacgacagcaacgugaagaaccuguacgagaaggugagaagccagcugaagaacaacgccaaggagaucggcaacggcugcuucgaguucuaccacaagugcgacaacaccugcauggagagcgugaagaacggcaccuacgacuaccccaaguacagcgaggaggccaagcugaacagagaggagaucgacggcgugaagcuggagagcaccagaaucuaccagauccuggccaucuacagcaccguggccagcagccuggugcugguggugagccugggcgccaucagcuucuggaugugcagcaacggcagccugcagugcagaaucugcaucuga

SEQ ID NO: 164512 - RNA, 1701 nt, Artificial Sequence; identical to SEQ ID NO: 163893
  derived and/or modified CDS sequence (opt4) from hemagglutinin__InfluenzaA__ADE20858

SEQ ID NO: 164513 - RNA, 1701 nt, Artificial Sequence
  derived and/or modified CDS sequence (opt4) from hemagglutinin__InfluenzaA__ADE20868
augaaggccauccugguggugcugcuguacaccuucgccaccgccaacgccgacacccugugcaucggcuaccacgccaacaacagcaccgacaccguggacaccgugcuggagaagaacgugaccgugacccacagcgugaaccugcuggagggcaagcacaacggcaagcugugcaagcugagaggcguggccccccugcaccugggcaagugcaacaucgccggcuggauccugggcaaccccgagugcgagagccugaccaccgccagcagcuggagcuacaucguggagaccagcagcagcgacaacggcaccugcuaccccggcgacuucaucgacuacgaggagcugagagagcagcugagcagcgugagcagcuucgagagauucgagauguuccccaagaccagcagcuggcccaaccacgacagcaacaagggcgugaccgccgccugcccccacgccggcgccaagagcuucuacaagaaccugaucuggcuggugaagaagggcaacagcuaccccaagcugagcaagagcuacaucaacgacaagggcaaggaggugcuggugcuguggggcauccaccaccccagcaccagcgccgaccagcagagccuguaccagaacgccgacgccuacguguucgugggcaccagcagauacagcaagaaguucaagcccgagaucgccaucagacccaaggugagagaccaggagggcagaaugaacuacuacuggacccugguggagcccggcgacaagaucaccuucgaggccaccggcaaccugguggugcccagauacgccuucgccauggagagaaacgccggcagcggcaucaucaucagcgacacccccgugcacgacugcaacaccaccugccagacccccaagggcgccaucaacaccagccugcccuuccagaacauccaccccaucaccaucggcaagugccccaaguacgugaagagcaccaagcugagacuggccaccggccugagaaacgugcccagcauccagagcagaggccuguucggcgccaucgccggcuucaucgagggcggcuggaccggcaugguggacggcugguacggcuaccaccaccagaacgagcagggcagcggcuacgccgccgaccugaagagcacccagaacgccaucgacgagaucaccaacaaggugaacagcgugaucgagaagaugaacacccaguucaccgccgugggcaaggaguucaaccaccuggagaagagaaucgagaaccugaacaagaagguggacgacggcuuccuggacaucuggaccuacaacgccgagcugcuggugcugcuggagaacgagagaacccuggacuaccacgacagcaacgugaagaaccuguacgagaaggugagaagccagcugaagaacaacgccaaggagaucggcaacggcugcuucgaguucuaccacaagugcgacaacaccugcauggagagcgugaagaacggcaccuacgacuaccccaaguacagcgaggaggccaagcugaacagagaggagaucgacggcgugaagcuggagagcaccagaaucuaccagauccuggccaucuacagcaccguggccagcagccuggugcugguggugagccugggcgccaucagcuucuggaugugcagcaacggcagccugcagugcagaaucugcaucuga

SEQ ID NO: 164514 - RNA, 1701 nt, Artificial Sequence; identical to SEQ ID NO: 164447
  derived and/or modified CDS sequence (opt4) from hemagglutinin__InfluenzaA__ADE20878

SEQ ID NO: 164515 - RNA, 1701 nt, Artificial Sequence; identical to SEQ ID NO: 163831
  derived and/or modified CDS sequence (opt4) from hemagglutinin__InfluenzaA__ADE20888

SEQ ID NO: 164516 - RNA, 1701 nt, Artificial Sequence
  derived and/or modified CDS sequence (opt4) from hemagglutinin__InfluenzaA__ADE20898
augaaggccauccugguggugcugcuguacaccuucgccaccgccaacgccgacacccugugcaucggcuaccacgccaacaacagcaccgacaccguggacaccauccuggagaagaacgugaccgugacccacagcgugaaccugcuggaggacaagcacaacggcaagcugugcaagcugagaggcguggccccccugcaccugggcaagugcaacaucgccggcuggauccugggcaaccccgagugcgagagccugagcaccgccagcagcuggagcuacaucguggagaccagcagcagcgacaacggcaccugcuaccccggcgacuucaucgacuacgaggagcugagagagcagcugagcagcgugagcagcuucgagagauucgagaucuuccccaagaccagcagcuggcccaaccacgacagcaacaagggcgugaccgccgccugcccccacgccggcgccaagagcuucuacaagaaccugaucuggcuggugaagaagggcaacagcuaccccaagcugagcaagagcuacaucaacgacaagggcaaggagauccuggugcuguggggcauccaccaccccagcaccagcgccgaccagcagagccuguaccagaacgccgacgccuacguguucgugggcaccagcagauacagcaagaaguucaagcccgagaucgccaucagacccaaggugagagaccaggagggcagaaugaacuacuacuggacccugguggagcccggcgacaagaucaccuucgaggccaccggcaaccugguggugcccagauacgccuucgccauggagagaaacgccggcagcggcaucaucaucagcgacacccccgugcacgacugcaacaccaccugccagacccccaagggcgccaucaacaccagccugcccuuccagaacauccaccccaucaccaucggcaagugccccaaguacgugaagagcaccaagcugagacuggccaccggccugagaaacgugcccagcauccagagcagaggccuguucggcgccaucgccggcuucaucgagggcggcuggaccggcaugguggacggcugguacggcuaccaccaccagaacgagcagggcagcggcuacgccgccgaccugaagagcacccagaacgccaucgacgagaucaccaacaaggugaacagcgugaucgagaagaugaacacccaguucaccgccgugggcaaggaguucaaccaccuggagaagagaaucgagaaccugaacaagaagguggacgacggcuuccuggacaucuggaccuacaacgccgagcugcuggugcugcuggagaacgagagaacccuggacuaccacgacagcaacgugaagaaccuguacgagaaggugagaagccagcugaagaacaacgccaaggagaucggcaacggcugcuucgaguucuaccacaagugcgacaacaccugcauggagggcgugaagaacggcaccuacgacuaccccaaguacagcgaggaggccaagcugaacagagaggagaucgacggcgugaagcuggagagcaccagaaucuaccagauccuggccaucuacagcaccguggccagcagccuggugcugguggugagccugggcgccaucagcuucuggaugugcagcaacggcagccugcagugcagaaucugcaucuga

SEQ ID NO: 164517 - RNA, 1701 nt, Artificial Sequence; identical to SEQ ID NO: 164480
  derived and/or modified CDS sequence (opt4) from hemagglutinin__InfluenzaA__ADE20908

SEQ ID NO: 164518 - RNA, 1701 nt, Artificial Sequence
  derived and/or modified CDS sequence (opt4) from hemagglutinin__InfluenzaA__ADE20918
augaaggccauccugguggugcugcuguacaccuucgccaccgccaacgccgacacccugugcaucggcuaccacgccaacaacagcaccgacaccguggacaccgugcuggagaagaacgugaccgugacccacagcgugaacauccuggaggacaagcacaacggcaagcugugcaagcugagaggcguggccccccugcaccugggcaagugcaacaucgccggcuggauccugggcaaccccgagugcgagagccugagcaccgccagcagcuggagcuacaucguggagaccagcagcagcgacaacggcaccugcuaccccggcgacuucaucgacuacgaggagcugagagagcagcugagcagcgugagcagcuucgagagauucgagaucuuccccaagaccagcagcuggcccaaccacgacagcaacaagggcgugaccgccgccugcccccacgccggcgccaagagcuucuacaagaaccugaucuggcuggugaagaagggcaacagcuaccccaagcugagcaagagcuacaucaacgacaagggcaaggaggugcuggugcuguggggcauccaccaccccagcaccagcgccgaccagcagagccuguaccagaacgccgacgccuacguguucgugggcaccagcagauacagcaagaaguucaagcccgagaucgccaucagacccaaggugagagaccaggagggcagaaugaacuacuacuggauccugguggagcccggcgacaagaucaccuucgaggccaccggcaaccugguggugcccagauacgccuucgccauggagagaaacgccggcagcggcaucaucaucagcgacacccccgugcacgacugcaacaccaccugccagacccccaagggcgccaucaacaccagccugcccuuccagaacauccaccccaucaccaucggcaagugccccaaguacgugaagagcaccaagcugagacuggccaccggccugagaaacgugcccagcauccagagcagaggccuguucggcgccaucgccggcuucaucgagggcggcuggaccggcaugguggacggcugguacggcuaccaccaccagaacgagcagggcagcggcuacgccgccgaccugaagagcacccagaacgccaucgacgagaucaccaacaaggugaacagcgugaucgagaagaugaacacccaguucaccgccgugggcaaggaguucaaccaccuggagaagagaaucgagaaccugaacaagaagguggacgacggcuuccuggacaucuggaccuacaacgccgagcugcuggugcugcuggagaacgagagaacccuggacuaccacgacagcaacgugaagaaccuguacgagaaggugagaagccagcugaagaacaacgccaaggagaucggcaacggcugcuucgaguucuaccacaagugcgacaacaccugcauggagagcgugaagaacggcaccuacgacuaccccaaguacagcgaggaggccaagcugaacagagaggagaucgacggcgugaagcuggagagcaccagaaucuaccagauccuggccaucuacagcaccguggccagcagccuggugcugguggugagccugggcgccaucagcuucuggaugugcagcaacggcagccugcagugcagaaucugcaucuga

SEQ ID NO: 164519 - RNA, 1701 nt, Artificial Sequence; identical to SEQ ID NO: 163082
  derived and/or modified CDS sequence (opt4) from hemagglutinin__InfluenzaA__ADE20928

SEQ ID NO: 164520 - RNA, 1701 nt, Artificial Sequence
  derived and/or modified CDS sequence (opt4) from hemagglutinin__InfluenzaA__ADE20948
augaaggccauccugguggugcugcuguacaccuucgccaccgccaacgccgacacccugugcaucggcuaccacgccaacaacagcaccgacaccguggacaccgugcuggagaagaacgugaccgugacccacagcgugaaccugcuggaggacaagcacaacggcaagcugugcaagcugagaggcguggccccccugcaccugggcaagugcaacaucgccggcuggauccugggcaaccccgagugcgagagccugagcaccgccagcagcuggagcuacaucguggagaccagcagcagcgacaacggcaccugcuaccccggcgacuucaucaacuacgaggagcugagagagcagcugagcagcgugagcagcuucgagagauucgagaucuuccccaagaccagcagcuggcccaaccacgacagcaacaagggcgugaccgccgccugcccccacgccggcgccaagagcuucuacaagaaccugaucuggcuggugaagaagggcaacagcuaccccaagcugagcaagagcuacaucaacgacaagggcaaggaggugcuggugcuguggggcauccaccaccccagcaccagcgccgaccagcagagccuguaccagaacgccgacagcuacguguucgugggcaccagcagauacagcaagaaguucaagcccgagaucgccaucagacccaaggugagagaccaggagggcagaaugaacuacuacuggacccugguggagcccggcgacaagaucaccuucgaggccaccggcaaccugguggugcccagauacgccuucgccauggagagaaacgccggcagcggcaucaucaucagcgacacccccgugcacgacugcaacaccaccugccagacccccaagggcgccaucaacaccagccugcccuuccagaacauccaccccaucaccaucggcaagugccccaaguacgugaagagcaccaagcugagacuggccaccggccugagaaacgugcccagcauccagagcagaggccuguucggcgccaucgccggcuucaucgagggcggcuggaccggcaugguggacggcugguacggcuaccaccaccagaacgagcagggcagcggcuacgccgccgaccugaagagcacccagaacgccaucgacaagaucaccaacaaggugaacagcgugaucgagaagaugaacacccaguucaccgccgugggcaaggaguucaaccaccuggagaagagaaucgagaaccugaacaagaagguggacgacggcuuccuggacaucuggaccuacaacgccgagcugcuggugcugcuggagaacgagagaacccuggacuaccacgacagcaacgugaagaaccuguacgagaaggugagaagccagcugaagaacaacgccaaggagaucggcaacggcugcuucgaguucuaccacaagugcgacaacaccugcauggagagcgugaagaacggcaccuacgacuaccccaaguacagcgaggaggccaagcugaacagagaggagaucgacggcgugaagcuggagagcaccagaaucuaccagauccuggccaucuacagcaccguggccagcagccuggugcugguggugagccugggcgccaucagcuucuggaugugcagcaacggcagccugcagugcagaaucugcaucuga

SEQ ID NO: 164521 - RNA, 1701 nt, Artificial Sequence
  derived and/or modified CDS sequence (opt4) from hemagglutinin__InfluenzaA__ADE20968
augaaggccauccugguggugcugcuguacaccuucgccaccgccaacgccgacacccugugcaucggcuaccacgccaacaacagcaccgacaccguggacaccgugcuggagaagaacgugaccgugacccacagcgugaaccugcuggaggacaagcacaacggcaagcugugcaagcugagaggcgaggccccccugcaccugggcaagugcaacaucgccggcuggauccugggcaaccccgagugcgagagccugagcaccgccagcagcuggagcuacaucguggagaccagcagcagcgacaacggcaccugcuaccccggcgacuucaucaacuacgaggagcugagagagcagcugagcagcgugagcagcuucgagagauucgagaucuuccccaagaccagcagcuggcccaaccacgacagcaacaagggcgugaccgccgccugcccccacagcggcgccaagagcuucuacaagaaccugaucuggcuggugaagaagggcaacagcuaccccaagcugagcaagagcuacaucaacgacaagggcaaggaggugcuggugcuguggggcauccaccaccccagcaccagcgccgaccagcagagccuguaccagaacgccgacgccuacguguucgugggcaccagcagauacagcaagaaguucaagcccgagaucgccaucagacccaaggugagagaccaggagggcagaaugaacuacuacuggacccugguggagcccggcgacaagaucaccuucgaggccaccggcaaccugguggugcccagauacgccuucgccauggagagaaacgccggcagcggcaucaucaucagcgacacccccgugcacgacugcaacaccaccugccagacccccaagggcgccaucaacaccagccugcccuuccagaacauccaccccaucaccaucggcaagugccccaaguacgugaagagcaccaagcugagacuggccaccggccugagaaacgugcccagcauccagagcagaggccuguucggcgccaucgccggcuucaucgagggcggcuggaccggcaugguggacggcugguacggcuaccaccaccagaacgagcagggcagcggcuacgccgccgaccugaagagcacccagaacgccaucgacaagaucaccaacaaggugaacagcgugaucgagaagaugaacacccaguucaccgccgugggcaaggaguucaaccaccuggagaagagaaucgagaaccugaacaagaagguggacgacggcuuccuggacaucuggaccuacaacgccgagcugcuggugcugcuggagaacgagagaacccuggacuaccacgacagcaacgugaagaaccuguacgagaaggugagaagccagcugaagaacaacgccaaggagaucggcaacggcugcuucgaguucuaccacaagugcgacaacaccugcauggagagcgugaagaacggcaccuacgacuaccccaaguacagcgaggaggccaagcugaacagagaggagaucgacggcgugaagcuggagagcaccagaaucuaccagauccuggccaucuacagcaccguggccagcagccuggugcugguggugagccugggcgccaucagcuucuggaugugcagcaacggcagccugcagugcagaaucugcaucuga

SEQ ID NO: 164522 - RNA, 1701 nt, Artificial Sequence; identical to SEQ ID NO: 163893
  derived and/or modified CDS sequence (opt4) from hemagglutinin__InfluenzaA__ADE20978

SEQ ID NO: 164523 - RNA, 1701 nt, Artificial Sequence
  derived and/or modified CDS sequence (opt4) from hemagglutinin__InfluenzaA__ADE20988
augaaggccauccugguggugcugcuguacaccuucgccaccgccaacgccgacacccugugcaucggcuaccacgccaacaacagcaccgacaccguggacaccgugcuggagaagaacgugaccgugacccacagcgugaaccugcuggaggacaagcacaacggcaagcugugcaagcugagaggcguggccccccugcaccugggcaagugcaacaucgccggcuggauccugggcaaccccgagugcgagagccugagcaccgccagcagcuggagcuacaucguggagaccagcagcagcgacaacggcaccugcuaccccggcgacuucaucgacuacgaggagcugagagagcagcugagcagcgugagcagcuucgagagauucgagaucuuccccaagaccagcagcuggcccaaccacgacagcaacaagggcgugaccgccgccugcccccacgccggcgccaagagcuucuacaagaaccugaucuggcuggugaagaagggcaacagcuaccccaagcugagcaagagcuacaucaacgacaagggcaaggaggugcuggugcuguggggcauccaccaccccagcaccagcaccgaccagcagagccuguaccagaacgccgacgccuacguguucgugggcaccagcagauacagcaagaaguucaagcccgagaucgccaucagacccaaggugagagaccaggagggcagaaugaacuacuacuggacccugguggagcccggcgacaagaucaccuucgaggccaccggcaaccugguggugcccagauacgccuucgccauggagagaaacgccggcagcggcaucaucaucagcgacacccccgugcacgacugcaacaccaccugccagacccccaagggcgccaucaacaccagccugcccuuccagaacauccaccccaucaccaucggcaagugccccaaguacgugaagagcaccaagcugagacuggccaccggccugagaaacauccccagcauccagagcagaggccuguucggcgccaucgccggcuucaucgagggcggcuggaccggcaugguggacggcugguacggcuaccaccaccagaacgagcagggcagcggcuacgccgccgaccugaagagcacccagaacgccaucgacgagaucaccaacaaggugaacagcgugaucgagaagaugaacacccaguucaccgccgugggcaaggaguucaaccaccuggagaagagaaucgagaaccugaacaagaagguggacgacggcuuccuggacaucuggaccuacaacgccgagcugcuggugcugcuggagaacgagagaacccuggacuaccacgacagcaacgugaagaaccuguacgagaaggugagaagccagcugaagaacaacgccaaggagaucggcaacggcugcuucgaguucuaccacaagugcgacaacaccugcauggagagcgugaagaacggcaccuacgacuaccccaaguacagcgaggaggccaagcugaagagagaggagaucgacggcgugaagcuggagagcaccagaaucuaccagauccuggccaucuacagcaccguggccagcagccuggugcugguggugagccugggcgccaucagcuucuggaugugcagcaacggcagccugcagugcagaaucugcaucuga

SEQ ID NO: 164524 - RNA, 1701 nt, Artificial Sequence; identical to SEQ ID NO: 163893
  derived and/or modified CDS sequence (opt4) from hemagglutinin__InfluenzaA__ADE20998

SEQ ID NO: 164525 - RNA, 1701 nt, Artificial Sequence; identical to SEQ ID NO: 164057
  derived and/or modified CDS sequence (opt4) from hemagglutinin__InfluenzaA__ADE21008

SEQ ID NO: 164526 - RNA, 1701 nt, Artificial Sequence
  derived and/or modified CDS sequence (opt4) from hemagglutinin__InfluenzaA__ADE21018
augaaggccauccugguggugcugcuguacaccuucgccaccgccaacgccgacacccugugcaucggcuaccacgccaacaacagcaccgacaccguggacaccgugcuggagaagaacgugaccgugacccacagcgugaaccugcuggaggacaagcacaacggcaagcugugcaagcugagaggcguggccccccugcaccugggcaagugcaacaucgccggcuggauccugggcaaccccgagugcgagagccugagcaccgccagcagcuggagcuacaucguggagaccagcagcagcgacaacggcaccugcuaccccggcgacuucaucgacuacgaggagcugagagagcagcugagcagcgugagcagcuucgagagauucgagaucuuccccaagaccagcagcuggcccaaccacgacagcaacaagggcgugaccaccgccugcccccacgccggcgccaagagcuucuacaagaaccugaucuggcuggugaagaagggcaacagcuaccccaagcugagcaagagcuacaucaacgacaagggcaaggaggugcuggugcuguggggcauccaccaccccagcaccagcaccgaccagcagagccuguaccagaacgccgacgccuacguguucgugggcaccagcagauacagcaagaaguucaagcccgagaucgccaucagacccaaggugagagaccaggagggcagaaugaacuacuacuggacccugguggagcccggcgacaagaucaccuucgaggccaccggcaaccugguggugcccagauacgccuucgccauggagagaaacgccggcagcggcaucaucaucagcgacacccccgugcacgacugcaacaccaccugccagacccccaagggcgccaucaacaccagccugcccuuccagaacauccaccccaucaccaucggcaagugccccaaguacgugaagagcaccaagcugagacuggccaccggccugagaaacauccccagcauccagagcagaggccuguucggcgccaucgccggcuucaucgagggcggcuggaccggcaugguggacggcugguacggcuaccaccaccagaacgagcagggcagcggcuacgccgccgaccugaagagcacccagaacgccaucgacgagaucaccaacaaggugaacagcgugaucgagaagaugaacacccaguucaccgccgugggcaaggaguucaaccaccuggagaagagaaucgagaaccugaacaagaagguggacgacggcuuccuggacaucuggaccuacaacgccgagcugcuggugcugcuggagaacgagagaacccuggacuaccacgacagcaacgugaagaaccuguacgagaaggugagaagccagcugaagaacaacgccaaggagaucggcaacggcugcuucgaguucuaccacaagugcgacaacaccugcauggagagcgugaagaacggcaccuacgacuaccccaaguacagcgaggaggccaagcugaacagagaggagaucgacggcgugaagcuggagagcaccagaaucuaccagauccuggccaucuacagcaccguggccagcagccuggugcugguggugagccugggcgccaucagcuucuggaugugcagcaacggcagccugcagugcagaaucugcaucuga

SEQ ID NO: 164527 - RNA, 1701 nt, Artificial Sequence; identical to SEQ ID NO: 164467
  derived and/or modified CDS sequence (opt4) from hemagglutinin__InfluenzaA__ADE21028

SEQ ID NO: 164528 - RNA, 1701 nt, Artificial Sequence; identical to SEQ ID NO: 164457
  derived and/or modified CDS sequence (opt4) from hemagglutinin__InfluenzaA__ADE21038

SEQ ID NO: 164529 - RNA, 1701 nt, Artificial Sequence; identical to SEQ ID NO: 164480
  derived and/or modified CDS sequence (opt4) from hemagglutinin__InfluenzaA__ADE21048

SEQ ID NO: 164530 - RNA, 1701 nt, Artificial Sequence
  derived and/or modified CDS sequence (opt4) from hemagglutinin__InfluenzaA__ADE21058
augaaggccauccugguggugcugcuguacaccuucgccaccgccaacgccgacacccugugcaucggcuaccacgccaacaacagcaccgacaccguggacaccgugcuggagaagaacgugaccgugacccacagcgugaaccugcuggaggacaagcacaacggcaagcugugcaagcugagaggcguggccccccugcaccugggcaagugcaacaucgccggcuggauccugggcaaccccgagugcgagagccugagcaccgccagcagcuggagcuacaucguggagaccagcagcagcgacaacggcaccugcuaccccggcgacuucaucgacuacgaggagcugagagagcagcugagcagcgugagcagcuucgagagauucgagaucuuccccaagaccagcagcuggcccaaccacgacagcaacaagggcgugaccgccgccugcccccacgccggcgccaagagcuucuacaagaaccugaucuggcuggugaagaagggcaacagcuaccccaagcugagcaagagcuacaucaacgacaagggcaaggaggugcuggugcuguggggcauccaccaccccagcaccagcgccgaccagcagagccuguaccagaacgccgacgccuacguguucgugggcaccagcagauacagcaagaaguucaagcccgagaucgccaucagacccaaggugagagaccaggagggcagaaucaacuacuacuggacccugguggagcccggcgacaagaucaccuucgaggccaccggcaaccugguggugcccagauacgccuucgccauggagagaaacgccggcagcggcaucaucaucagcgacacccccgcccacgacugcaacaccaccugccagacccccaagggcgccaucaacaccagccugcccuuccagaacauccaccccaucaccaucggcaagugccccaaguacgugaagagcaccaagcugagacuggccaccggccugagaaacgugcccagcauccagagcagaggccuguucggcgccaucgccggcuucaucgagggcggcuggaccggcaugguggacggcugguacggcuaccaccaccagaacgagcagggcagcggcuacgccgccgaccugaagagcacccagaacgccaucgacaagaucaccaacaaggugaacagcgugaucgagaagaugaacacccaguucaccgccgugggcaaggaguucaaccaccuggagaagagaaucgagaaccugaacaagaagguggacgacggcuuccuggacaucuggaccuacaacgccgagcugcuggugcugcuggagaacgagagaacccuggacuaccacgacagcaacgugaagaaccuguacgagaaggugagaagccagcugaagaacaacgccaaggagaucggcaacggcugcuucgaguucuaccacaagugcgacaacaccugcauggagagcgugaagaacggcaccuacgacuaccccaaguacagcgaggaggccaagcugaacagagaggagaucgacggcgugaagcuggagagcaccagaaucuaccagauccuggccaucuacagcaccguggccagcagccuggugcugguggugagccugggcgccaucagcuucuggaugugcagcaacggcagccugcagugcagaaucugcaucuga

SEQ ID NO: 164531 - RNA, 1701 nt, Artificial Sequence
  derived and/or modified CDS sequence (opt4) from hemagglutinin__InfluenzaA__ADE21068
augaaggccauccugguggugcugcuguacaccuucgccaccgccaacgccgacacccugugcaucggcuaccacgccaacaacagcaccgacaccguggacaccgugcuggagaagaacgugaccgugacccacagcgugaaccugcuggaggacaagcacaacggcaagcugugcaagcugagaggcguggccccccugcaccugggcaagugcaacaucgccggcuggauccugggcaaccccgagugcgagagccugagcaccgccagcagcuggagcuacaucguggagaccagcagcagcgacaacggcaccugcuaccccggcgacuucaucgacuacgaggagcugagagagcagcugagcagcgugagcagcuucgagagauucgagaucuuccccaagaccagcagcuggcccaaccacgacagcaacaagggcgugaccgccgccugcccccacgccggcgccaagagcuucuacaagaaccugaucuggcuggugaagaagggcaacagcuaccccaagcugagcaagagcuacaucaacgacaagggcaaggaggugcuggugcuguggggcauccaccaccccagcaccagcgccgaccagcagagccuguaccagaacgccgacgccuacguguucgugggcaccagcagauacagcaagaaguucaagcccgagaucgccaucagacccaaggugagagagcaggagggcagaaugaacuacuacuggacccugguggagcccggcgacaagaucaccuucgaggccaccggcaaccugguggugcccagauacgccuucgccauggagagaaacgccggcagcggcaucaucaucagcgacacccccgugcacgacugcaacaccaccugccagacccccaagggcgccaucaacaccagccugcccuuccagaacauccacagcaucaccaucggcaagugccccaaguacgugaagagcaccaagcugagacuggccaccggccugagaaacgugcccagcauccagagcagaggccuguucggcgccaucgccggcuucaucgagggcggcuggaccggcaugguggacggcugguacggcuaccaccaccagaacgagcagggcagcggcuacgccgccgaccugaagagcacccagaacgccaucgacgagaucaccaacaaggugaacagcgugaucgagaagaugaacacccaguucaccgccgugggcaaggaguucaaccaccuggagaagagaaucgagaaccugaacaagaagguggacgacggcuuccuggacaucuggaccuacaacgccgagcugcuggugcugcuggagaacgagagaacccuggacuaccacgacagcaacgugaagaaccuguacgagaaggugagaagccagcugaagaacaacgccaaggagaccggcaacggcugcuucgaguucuaccacaagugcgacaacaccugcauggagagcgugaagaacggcaccuacgacuaccccaaguacagcgaggaggccaagcugaacagagaggagaucgacggcgugaagcuggagagcaccagaaucuaccagauccuggccaucuacagcaccguggccagcagccuggugcugguggugagccugggcgccaucagcuucuggaugugcagcaacggcagccugcagugcagaaucugcaucuga

SEQ ID NO: 164532 - RNA, 1698 nt, Artificial Sequence
  derived and/or modified CDS sequence (opt4) from hemagglutinin__InfluenzaA__ADE28761
augaaggugaagcugcuggugcugcugugcaccuucaccgccaccuacgccgacaccaucugcaucggcuaccacgccaacaacagcaccgacaccguggacaccgugcuggagaagaacgugaccgugacccacagcgugaaccugcuggagaacagccacaacggcaagcugugccugcugaagggcaucgccccccugcagcugggcaacugcagcguggccggcuggauccugggcaaccccgagugcgagcugcugaucagcaaggagagcuggagcuacaucguggagaagcccaaccccgagaacggcaccugcuaccccggccacuucgccgacuacgaggagcugagagagcagcugagcagcgugagcagcuucgagagauucgagaucuuccccaaggagagcagcuggcccaaccacaccgugaccggcgugagcgccagcugcagccacaacggcgagagcagcuucuacagaaaccugcuguggcugaccggcaagaacggccuguaccccaaccugagcaagagcuacgccaacaacaaggagaaggaggugcuggugcuguggggcgugcaccacccccccaacaucggcaaccagaagacccuguaccacaccgagaacgccuacgugagcguggugagcagccacuacagcagaaaguucacccccgagaucgccaagagacccaaggugagagaccaggagggcagaaucaacuacuacuggacccugcuggagcccggcgacaccaucaucuucgaggccaacggcaaccugaucgcccccagauacgccuucgcccugagcagaggcuucggcagcggcaucaucaacagcaacgcccccauggacaagugcgacgccaagugccagaccccccagggcgccaucaacagcagccugcccuuccagaacgugcaccccgugaccaucggcgagugccccaaguacgugagaagcgccaagcugagaauggugaccggccugagaaacauccccagcauccagagcagaggccuguucggcgccaucgccggcuucaucgagggcggcuggaccggcaugguggacggcugguacggcuaccaccaccagaacgagcagggcagcggcuacgccgccgaccagaagagcacccagaacgccaucaacggcaucaccaacaaggugaacagcgugaucgagaagaugaacacccaguucaccgccgugggcaaggaguucaacaagcuggagagaagaauggagaaccugaacaagaagguggacgacggcuucaucgacaucuggaccuacaacgccgagcugcuggugcugcuggagaacgagagaacccuggacuuccacgagagcaacgugaagaaccuguacgagaaggugaagagccagcugaagaacaacgccaaggagaucggcaacggcugcuucgaguucuaccacaagugcaacgacgagugcauggagagcgugaagaacggcaccuacgacuaccccaaguacagcgaggagagcaagcugaacagagagaagaucgacggcgugaagcuggagagcauggagguguaccagauccuggccaucuacagcaccguggccagcagccuggugcugcuggugagccugggcgccaucagcuucuggaugugcagcaacggcagccugcagugcagaaucugcaucuga

SEQ ID NO: 164533 - RNA, 1701 nt, Artificial Sequence; identical to SEQ ID NO: 162909
  derived and/or modified CDS sequence (opt4) from hemagglutinin__InfluenzaA__ADE28780

SEQ ID NO: 164534 - RNA, 1701 nt, Artificial Sequence; identical to SEQ ID NO: 164317
  derived and/or modified CDS sequence (opt4) from hemagglutinin__InfluenzaA__ADE28790

SEQ ID NO: 164535 - RNA, 1701 nt, Artificial Sequence; identical to SEQ ID NO: 164501
  derived and/or modified CDS sequence (opt4) from hemagglutinin__InfluenzaA__ADE28800

SEQ ID NO: 164536 - RNA, 1701 nt, Artificial Sequence; identical to SEQ ID NO: 163893
  derived and/or modified CDS sequence (opt4) from hemagglutinin__InfluenzaA__ADE28810

SEQ ID NO: 164537 - RNA, 1701 nt, Artificial Sequence
  derived and/or modified CDS sequence (opt4) from hemagglutinin__InfluenzaA__ADE28820
augaaggccauccugguggugcugcuguacaccuucgccaccgccaacgccgacacccugugcaucggcuaccacgccaacaacagcaccgacaccguggacaccgugcuggagaagaacgugaccgugacccacagcgugaaccugcuggaggacaagcacaacggcaagcugugcaagcugagaggcguggccccccugcaccugggcaagugcaacaucgccggcuggauccugggcagccccgagugcgagagccugagcaccgccagcagcuggagcuacaucguggagaccagcagcagcgacaacggcaccugcuaccccggcgacuucaucgacuacgaggagcugagagagcagcugagcagcgugagcagcuucgagagauucgagaucuuccccaagaccagcagcuggcccaaccacgacagcaacaagggcgugaccgccgccugcccccacgccggcgccaagagcuucuacaagaaccugaucuggcuggugaagaagggcaacagcuaccccaagcugagcaagagcuacaucaacgacaagggcaaggaggugcuggugcuguggggcauccaccaccccagcaccagcgccgaccagcagagccuguaccagaacgccgacgccuacguguucgugggcaccagcagauacagcaagaaguucaagcccgagaucgccaucagacccaaggugagagaccaggagggcagaaugaacuacuacuggacccugguggagcccggcgacaagaucaccuucgaggccaccggcaaccugguggugcccagauacgccuucgccauggagagaaacgccggcagcggcaucaucaucagcgacacccccgugcacgacugcaacaccaccugccagacccccaagggcgccaucaacaccagccugcccuuccagaacauccaccccaucaccaucggcaagugccccaaguacgugaagagcaccaagcugagacuggccaccggccugagaaacgugcccagcauccagagcagaggccuguucggcgccaucgccggcuucaucgagggcggcuggaccggcaugguggacggcugguacggcuaccaccaccagaacgagcagggcagcggcuacgccgccgaccugaagagcacccagaacgccaucgacaagaucaccaacaaggugaacagcgugaucgagaagaugaacacccaguucaccgccgugggcaaggaguucaaccaccuggagaagagaaucgagaaccugaacaagaagguggacgacggcuuccuggacaucuggaccuacaacgccgagcugcuggugcugcuggagaacgagagaacccuggacuaccacgacagcaacgugaagaaccuguacgagaaggugagaagccagcugaagaacaacgccaaggagaucggcaacggcugcuucgaguucuaccacaagugcgacaacaccugcauggagagcgugaagaacggcaccuacgacuaccccaaguacagcgaggaggccaagcugaacagagaggagaucgacggcgugaagcuggagagcaccagaaucuaccagauccuggccaucuacagcaccguggccagcagccuggugcugguggugagccugggcgccaucagcuucuggaugugcagcaacggcagccugcagugcagaaucugcaucuga

SEQ ID NO: 164538 - RNA, 1701 nt, Artificial Sequence; identical to SEQ ID NO: 162909
  derived and/or modified CDS sequence (opt4) from hemagglutinin__InfluenzaA__ADE28830

SEQ ID NO: 164539 - RNA, 1701 nt, Artificial Sequence; identical to SEQ ID NO: 162909
  derived and/or modified CDS sequence (opt4) from hemagglutinin__InfluenzaA__ADE28840

SEQ ID NO: 164540 - RNA, 1701 nt, Artificial Sequence; identical to SEQ ID NO: 162909
  derived and/or modified CDS sequence (opt4) from hemagglutinin__InfluenzaA__ADE28850

SEQ ID NO: 164541 - RNA, 1701 nt, Artificial Sequence; identical to SEQ ID NO: 162909
  derived and/or modified CDS sequence (opt4) from hemagglutinin__InfluenzaA__ADE28881

SEQ ID NO: 164542 - RNA, 1701 nt, Artificial Sequence; identical to SEQ ID NO: 162909
  derived and/or modified CDS sequence (opt4) from hemagglutinin__InfluenzaA__ADE28891

SEQ ID NO: 164543 - RNA, 1701 nt, Artificial Sequence; identical to SEQ ID NO: 164412
  derived and/or modified CDS sequence (opt4) from hemagglutinin__InfluenzaA__ADE28911

SEQ ID NO: 164544 - RNA, 1701 nt, Artificial Sequence; identical to SEQ ID NO: 163893
  derived and/or modified CDS sequence (opt4) from hemagglutinin__InfluenzaA__ADE28921

SEQ ID NO: 164545 - RNA, 1701 nt, Artificial Sequence; identical to SEQ ID NO: 163893
  derived and/or modified CDS sequence (opt4) from hemagglutinin__InfluenzaA__ADE28931

SEQ ID NO: 164546 - RNA, 1701 nt, Artificial Sequence; identical to SEQ ID NO: 163082
  derived and/or modified CDS sequence (opt4) from hemagglutinin__InfluenzaA__ADE28951

SEQ ID NO: 164547 - RNA, 1701 nt, Artificial Sequence
  derived and/or modified CDS sequence (opt4) from hemagglutinin__InfluenzaA__ADE28961
augaaggccauccugguggugcugcuguacaccuucgccaccgccaacgccgacacccugugcaucggcuaccacgccaacaacagcaccgacaccguggacaccgugcuggagaagaacgugaccgugacccacagcgugaaccugcuggaggacaagcacaacggcaagcugugcaagcugagaggcguggccccccugcaccugggcaagugcaacguggccggcuggauccugggcaaccccgagugcgagagccugagcaccgccagcagcuggagcuacaucguggagaccagcagcagcgacaacggcaccugcuaccccggcgacuucaucgacuacgaggagcugagagagcagcugagcagcgugagcagcuucgagagauucgagaucuuccccaagaccagcagcuggcccaaccacgacagcaacaagggcgugaccgccgccugcccccacgccggcgccaagagcuucuacaagaaccugaucuggcuggugaagaagggcaacagcuaccccaagcugagcaagagcuacaucaacgacaagggcaaggaggugcuggugcuguggggcauccaccaccccagcaccagcgccgaccagcagagccuguaccagaacgccgacgccuacguguucgugggcaccagcagauacagcaagaaguucaagcccgagaucgccaucagacccaaggugagagaccaggagggcagaaugaacuacuacuggacccugguggagcccggcgacaagaucaccuucgaggccaccggcaaccugguggugcccagauacgccuucgccauggagagaaacgccggcagcggcaucaucaucagcgacacccccgugcacgacugcaacaccaccugccagacccccaagggcgccaucaacaccagccugcccuuccagaacauccaccccaucaccaucggcaagugccccaaguacgugaagagcaccaagcugagacuggccaccggccugagaaacgugcccagcauccagagcagaggccuguucggcgccaucgccggcuucaucgagggcggcuggaccggcaugguggacggcugguacggcuaccaccaccagaacgagcagggcagcggcuacgccgccgaccugaagagcacccagaacgccaucgacgagaucaccaacaaggugaacagcgugaucgagaagaugaacacccaguucaccgccgugggcaaggaguucaaccaccuggagaagagaaucgagaaccugaacaagaagguggacgacggcuuccuggacaucuggaccuacaacgccgagcugcuggugcugcuggagaacgagagaacccuggacuaccacgacagcaacgugaagaaccuguacgagaaggugagaagccagcugaagaacaacgccaaggagaucggcaacggcugcuucgaguucuaccacaagugcgacaacaccugcauggagagcgugaagaacggcaccuacgacuaccccaaguacagcgaggaggccaagcugaacagagaggagaucgacggcgugaagcuggagagcaccagaaucuaccagauccuggccaucuacagcaccguggccagcagccuggugcugguggugagccugggcgccaucagcuucuggaugugcagcaacggcagccugcagugcagaaucugcaucuga

SEQ ID NO: 164548 - RNA, 1701 nt, Artificial Sequence; identical to SEQ ID NO: 164433
  derived and/or modified CDS sequence (opt4) from hemagglutinin__InfluenzaA__ADE28971

SEQ ID NO: 164549 - RNA, 1701 nt, Artificial Sequence
  derived and/or modified CDS sequence (opt4) from hemagglutinin__InfluenzaA__ADE28981
augaaggccauccugguggugcugcuguacaccuucgccaccgccaacgccgacacccugugcaucggcuaccacgccaacaacagcaccgagaccguggacaccgugcuggagaagaacgugaccgugacccacagcgugaaccugcuggaggacaagcacaacggcaagcugugcaagcugagaggcguggccccccugcaccugggcaagugcaacaucgccggcuggauccugggcaaccccgagugcgagagccugagcaccgccagcagcuggagcuacaucguggagaccagcagcagcgacaacggcaccugcuaccccggcgacuucaucgacuacgaggagcugagagagcagcugagcagcgugagcagcuucgagagauucgagaucuuccccaagaccagcagcuggcccaaccacgacagcaacaagggcgugaccgccgccugcccccacgccggcgccaagagcuucuacaagaaccugaucuggcuggugaagaagggcaacagcuaccccaagcugagcaagagcuacaucaacgacaagggcaaggaggugcuggugcuguggggcauccaccaccccagcaccagcgccgaccagcagagccuguaccagaacgccgacgccuacguguucgugggcaccagcagauacagcaagaaguucaagcccgagaucgccaucagacccaaggugagagaccaggagggcagaaugaacuacuacuggacccugguggagcccggcgacaagaucaccuucgaggccaccggcaaccugguggugcccagauacgccuucgccauggagagaaacgccggcagcggcaucaucaucagcgacacccccgugcacgacugcaacaccaccugccagacccccaagggcgccaucaacaccagccugcccuuccagaacauccaccccaucaccaucggcaagugccccaaguacgugaagagcaccaagcugagacuggccaccggccugagaaacgugcccagcauccagagcagaggccuguucggcgccaucgccggcuucaucgagggcggcuggaccggcaugguggacggcugguacggcuaccaccaccagaacgagcagggcagcggcuacgccgccgaccugaagagcacccagaacgccaucgacaagaucaccaacaaggugaacagcgugaucgagaagaugaacacccaguucaccgccgugggcaaggaguucaaccaccuggagaagagaaucgagaaccugaacaagaagguggacgacggcuuccuggacaucuggaccuacaacgccgagcugcuggugcugcuggagaacgagagaacccuggacuaccacgacagcaacgugaagaaccuguacgagaaggugagaagccagcugaagaacaacgccaaggagaucggcaacggcugcuucgaguucuaccacaagugcgacaacaccugcauggagagcgugaagaacggcaccuacgacuaccccaaguacagcgaggaggccaagcugaacagagaggagaucgacggcgugaagcuggagagcaccagaaucuaccagauccuggccaucuacagcaccguggccagcagccuggugcugguggugagccugggcgccaucagcuucuggaugugcagcaacggcagccugcagugcagaaucugcaucuga

SEQ ID NO: 164550 - RNA, 1701 nt, Artificial Sequence; identical to SEQ ID NO: 163893
  derived and/or modified CDS sequence (opt4) from hemagglutinin__InfluenzaA__ADE28991

SEQ ID NO: 164551 - RNA, 1701 nt, Artificial Sequence
  derived and/or modified CDS sequence (opt4) from hemagglutinin__InfluenzaA__ADE29001
augaaggccauccugguggugcugcuguacaccuucgccaccgccaacgccgacacccugugcaucggcuaccacgccaacaacagcaccgacaccguggacaccgugcuggagagaaacgugaccgugacccacagcgugaaccugcuggaggacaagcacaacggcaagcugugcaagcugaagggcguggccccccugcaccugggcaagugcaacaucgccggcuggauccugggcaaccccgagugcgagagccugagcaccgccagcagcuggagcuacaucguggagaccagcagcagcgacaacggcaccugcuaccccggcgacuucaucgacuacgaggagcugagagagcagcugagcagcgugagcagcuucgagagauucgagaucuuccccaagaccagcagcuggcccaaccacgacagcaacaagggcgugaccgccgccugcccccacgccggcgccaagagcuucuacaagaaccugaucuggcuggugaagaagggcaacagcuaccccaagcugagcaagagcuacaucaacgacaagggcaaggaggugcuggugcuguggggcauccaccaccccagcaccagcgccgaccagcagagccuguaccagaacgccgacgccuacguguucgugggcaccagcagauacagcaagaaguucaagcccgagaucgccaucagacccaaggugagagaccaggagggcagaaugaacuacuacuggacccugguggagcccggcgacaagaucaccuucgaggccaccggcaaccugguggugcccagauacgccuucgccauggagagaaacgccggcagcggcaucaucaucagcgacacccccgugcacgacugcaacaccaccugccagacccccaagggcgccaucaacaccagccugcccuuccagaacauccaccccaucaccaucggcaagugccccaaguacgugaagagcaccaagcugagacuggccaccggccugagaaacgugcccagcauccagagcagaggccuguucggcgccaucgccggcuucaucgagggcggcuggaccggcaugguggacggcugguacggcuaccaccaccagaacgagcagggcagcggcuacgccgccgaccugaagagcacccagaacgccaucgacgagaucaccaacaaggugaacagcgugaucgagaagaugaacacccaguucaccgccgugggcaaggaguucaaccaccuggagaagagaaucgagaaccugaacaagaagguggacgacggcuuccuggacaucuggaccuacaacgccgagcugcuggugcugcuggagaacgagagaacccuggacuaccacgacagcaacgugaagaaccuguacgagaaggugagaagccagcugaagaacaacgccaaggagaucggcaacggcugcuucgaguucuaccacaagugcgacaacaccugcauggagagcgugaagaacggcaccuacgacuaccccaaguacagcgaggaggccaagcugaacagagaggagaucgacggcgugaagcuggagagcaccagaaucuaccagauccuggccaucuacagcaccguggccagcagccuggugcugguggugagccugggcgccaucagcuucuggaugugcagcaacggcagccugcagugcagaaucugcaucuga

SEQ ID NO: 164552 - RNA, 1701 nt, Artificial Sequence; identical to SEQ ID NO: 162971
  derived and/or modified CDS sequence (opt4) from hemagglutinin__InfluenzaA__ADE29011

SEQ ID NO: 164553 - RNA, 1701 nt, Artificial Sequence
  derived and/or modified CDS sequence (opt4) from hemagglutinin__InfluenzaA__ADE29021
augaaggccauccugguggugcugcuguacaccuucgccaccgccaacgccgacacccugugcaucggcuaccacgccaacaacagcaccgacaccguggacaccgugcuggagaagaacgugaccgugacccacagcgugaaccugcuggaggacaagcacaacggcaagcugugcaagcugagaggcguggccccccugcaccugggcaagugcaacaucgccggcuggauccugggcaaccccgagugcgagagccugagcaccgccagcagcuggagcuacaucguggagaccagcggcagcgacaacggcaccugcuaccccggcgacuucaucgacuacgaggagcugagagagcagcugagcagcgugagcagcuucgagagauucgagaucuuccccaagaccagcagcuggcccaaccacgacagcaacaagggcgugaccgccgccugcccccacgccggcgccaagagcuucuacaagaaccugaucuggcuggugaagaagggcaacagcuaccccaagcugagcaagagcuacaucaacgacaagggcaaggaggugcuggugcuguggggcauccaccaccccagcaccagcaccgaccagcagagccuguaccagaacgccgacgccuacgugagcgugggcaccagcagauacagcaagaaguucaagcccgagaucgccaucagacccaaggugagagaccaggagggcagaaugaacuacuacuggacccugguggagcccggcgacaagaucaccuucgaggccaccggcaaccugguggugcccagauacgccuucgccauggagagaaacgccggcagcggcaucaucaucagcgacacccccgugcacgacugcaacaccaccugccagacccccaagggcgccaucaacaccagccugcccuuccagaacauccaccccaucaccaucggcaagugccccaaguacgugaagagcaccaagcugagacuggccaccggccugagaaacgugcccagcauccagagcagaggccuguucggcgccaucgccggcuucaucgagggcggcuggaccggcaugguggacggcugguacggcuaccaccaccagaacgagcagggcagcggcuacgccgccgaccugaagagcacccagaacgccaucgacaagaucaccaacaaggugaacagcgugaucgagaagaugaacacccaguucaccgccgugggcaaggaguucaaccaccuggagaagagaaucgagaaccugaacaagaagguggacgacggcuuccuggacaucuggaccuacaacgccgagcugcuggugcugcuggagaacgagagaacccuggacuaccacgacagcaacgugaagaaccuguacgagaaggugagaagccagcugaagaacaacgccaaggagaucggcaacggcugcuucgaguucuaccacaagugcgacaacaccugcauggagagcgugaagaacggcaccuacgacuaccccaaguacagcgaggaggccaagcugaacagagaggagaucgacggcgugaagcuggagagcaccagaaucuaccagauccuggccaucuacagcaccguggccagcagccuggugcugguggugagccugggcgccaucagcuucuggaugugcagcaacggcagccugcagugcagaaucugcaucuga

SEQ ID NO: 164554 - RNA, 1701 nt, Artificial Sequence; identical to SEQ ID NO: 164378
  derived and/or modified CDS sequence (opt4) from hemagglutinin__InfluenzaA__ADE29031

SEQ ID NO: 164555 - RNA, 1701 nt, Artificial Sequence
  derived and/or modified CDS sequence (opt4) from hemagglutinin__InfluenzaA__ADE29041
augaaggccauccugguggugcugcuguacaccuucgccaccgccaacgccgacacccugugcaucggcuaccacgccaacaacagcaccgacaccguggacaccgugcuggagaagaacgugaccgugacccacagcgugaaccugcuggaggacaagcacaacggcaagcugugcaagcugagaggcguggccccccugcaccugggcaagugcaacaucgccggcuggauccugggcaaccccgagugcgagagccugagcaccgccagcagcuggagcuacaucguggagaccagcagcagcgacaacggcaccugcuaccccggcgacuucaucgacuacgaggagcugagagagcagcugagcagcgugagcagcuucgagagauucgagaucuuccccaagaccagcagcuggcccaaccacgacagcaacaagggcgugaccgccgccugcccccacgccggcgccaagagcuucuacaagaaccugaucuggcuggugaagaagggcaacagcuaccccaagcugagcaagagcuacaucaacgacaagggcaaggaggugcuggugcuguggggcauccaccaccccagcaccagcgccgaccagcagagccuguaccagaacgccgacgccuacguguucgugggcaccagcagauacagcaagaaguucaagcccgagaucgccaucagacccaaggugagagaccaggagggcagaaugaacuacuacuggacccugguggagcccggcgacaagaucaccuucgaggccaccggcaaccugguggugcccagauacgccuucgccauggagaagaacgccggcagcggcaucaucaucagcgacacccccgugcacgacugcaacaccaccugccagacccccaagggcgccaucaacaccagccugcccuuccagaacauccaccccaucaccaucggcaagugccccaaguacgugaagagcaccaagcugagacuggccaccggccugagaaacgugcccagcauccagagcagaggccuguucggcgccaucgccggcuucaucgagggcggcuggaccggcaugguggacggcugguacggcuaccaccaccagaacgagcagggcagcggcuacgccgccgaccugaagagcacccagaacgccaucgacgagaucaccaacaaggugaacagcgugaucgagaagaugaacacccaguucaccgccgugggcaaggaguucaaccaccuggagaagagaaucgagaaccugaacaagaagguggacgacggcuuccuggacaucuggaccuacaacgccgagcugcuggugcugcuggagaacgagagaacccuggacuaccacgacagcaacgugaagaaccuguacgagaaggugagaagccagcugaagaacaacgccaaggagaucggcaacggcugcuucgaguucuaccacaagugcgacaacaccugcauggagagcgugaagaacggcaccuacgacuaccccaaguacagcgaggaggccaagcugaacagagaggagaucgacggcgugaagcuggagagcaccagaaucuaccagauccuggccaucuacagcaccguggccagcagccuggugcugguggugagccugggcgccaucagcuucuggaugugcagcaacggcagccugcagugcagaaucugcaucuga

SEQ ID NO: 164556 - RNA, 1701 nt, Artificial Sequence; identical to SEQ ID NO: 164378
  derived and/or modified CDS sequence (opt4) from hemagglutinin__InfluenzaA__ADE29051

SEQ ID NO: 164557 - RNA, 1701 nt, Artificial Sequence
  derived and/or modified CDS sequence (opt4) from hemagglutinin__InfluenzaA__ADE29085
augaaggccauccugguggugcugcuguacaccuucgccaccgccaacgccgacacccugugcaucggcuaccacgccaacaacagcaccgacaccguggacaccgugcuggagaagaacgugaccgugacccacagcgugaaccugcuggaggacaagcacaacggcaagcugugcaagcugagaggcguggccccccugcaccugggcaagugcaacaucgccggcuggauccugggcaaccccgagugcgagagccugagcaccgccagcagcuggagcuacaucguggagacccccagcagcgacaacggcaccugcuaccccggcgacuucaucgacuacgaggagcugagagagcagcugagcagcgugagcagcuucgagagauucgagaucuuccccaagaccagcagcuggcccaaccacgacagcaacaagggcgugaccgccgccugcccccacgccgaggccaagagcuucuacaagaaccugaucuggcuggugaagaagggcaacagcuaccccaagcugagcaagagcuacaucaacgacaagggcaaggaggugcuggugcuguggggcauccaccaccccagcaccagcgccgaccagcagagccuguaccagaacgccgacgccuacguguucgugggcagcagcagauacagcaagaccuucaagcccgagaucgccaucagacccaaggugagagacagagagggcagaaugaacuacuacuggacccugguggagcccggcgacaagaucaccuucgaggccaccggcaaccugguggugcccagauacgccuucgccauggagagaaacgccggcagcggcaucaucaucagcgacacccccgugcacgacugcaacaccaccugccagacccccaagggcgccaucaacaccagccugcccuuccagaacauccaccccaucaccaucggcaagugccccaaguacgugaagagcaccaagcugagacuggccaccggccugagaaacauccccagcauccagagcagaggccuguucggcgccaucgccggcuucaucgagggcggcuggaccggcaugguggacggcugguacggcuaccaccaccagaacgagcagggcagcggcuacgccgccgaccugaagagcacccagaacgccaucgacgagaucaccaacaaggugaacagcgugaucgagaagaugaacacccaguucaccgccgugggcaaggaguucaaccaccuggagaagagaaucgagaaccugaacaagaagguggacgacggcuuccuggacaucuggaccuacaacgccgagcugcuggugcugcuggagaacgagagaacccuggacuaccacgacagcaacgugaagaaccuguacgagaaggugagaagccagcugaagaacaacgccaaggagaucggcaacggcugcuucgaguucuaccacaagugcgacaacaccugcauggagagcgugaagaacggcaccuacgacuaccccaaguacagcgaggaggccaagcugaacagagaggagaucgacggcgugaagcuggagagcaccagaaucuaccagauccuggccaucuacagcaccguggccagcagccuggugcugguggugagccugggcgccaucagcuucuggaugugcagcaacggcagccugcagugcagaaucugcaucuga

SEQ ID NO: 164558 - RNA, 1701 nt, Artificial Sequence
  derived and/or modified CDS sequence (opt4) from hemagglutinin__InfluenzaA__ADE29095
augaaggccauccugguggugcugcuguacaccuucgccaccgccaacgccgacacccugugcaucggcuaccacgccaacaacagcaccgacaccguggacaccgugcuggagaagaacgugaccgugacccacagcgugaaccugcuggaggacaagcacaacggcaagcugugcaagcugagaggcguggccccccugcaccugggcaagugcaacaucgccggcuggauccugggcaaccccgagugcgagagccugagcaccgccagcagcuggagcuacaucguggagacccccagcagcgacaacggcaccugcuaccccggcgacuucaucgacuacgaggagcugagagagcagcugagcagcgugagcagcuucgagagauucgagaucuuccccaagaccagcagcuggcccaaccacgacagcaacaagggcgugaccgccgccugcccccacgccggcgccaagagcuucuacaagaaccugaucuggcuggugaagaagggcaacagcuaccccaagcugagcaagagcuacaucaacgacaagggcaaggaggugcuggugcuguggggcauccaccaccccagcaccagcgccgaccagcagagccuguaccagaacgccgacgccuacguguucgugggcagcagcagauacagcaagaccuucaagcccgagaucgccaucagacccaaggugagagacagagagggcagaaugaacuacuacuggacccugguggagcccggcgacaagaucaccuucgaggccaccggcaaccugguggugcccagauacgccuucgccauggagagaaacgccggcagcggcaucaucaucagcgacacccccgugcacgacugcaacaccaccugccagacccccaagggcgccaucaacaccagccugcccuuccagaacauccaccccaucaccaucggcaagugccccaaguacgugaagagcaccaagcugagacuggccaccggccugagaaacauccccagcauccagagcagaggccuguucggcgccaucgccggcuucaucgagggcggcuggaccggcaugguggacggcugguacggcuaccaccaccagaacgagcagggcagcggcuacgccgccgaccugaagagcacccagaacgccaucgacgagaucaccaacaaggugaacagcgugaucgagaagaugaacacccaguucaccgccgugggcaaggaguucaaccaccuggagaagagaaucgagaaccugaacaagaagguggacgacggcuuccuggacaucuggaccuacaacgccgagcugcuggugcugcuggagaacgagagaacccuggacuaccacgacagcaacgugaagaaccuguacgagaaggugagaagccagcugaagaacaacgccaaggagaucggcaacggcugcuucgaguucuaccacaagugcgacaacaccugcauggagagcgugaagaacggcaccuacgacuaccccaaguacagcgaggaggccaagcugaacagagaggagaucgacggcgugaagcuggagagcaccagaaucuaccagauccuggccaucuacagcaccguggccagcagccuggugcugguggugagccugggcgccaucagcuucuggaugugcagcaacggcagccugcagugcagaaucugcaucuga

SEQ ID NO: 164559 - RNA, 1701 nt, Artificial Sequence; identical to SEQ ID NO: 163648
  derived and/or modified CDS sequence (opt4) from hemagglutinin__InfluenzaA__ADE34191

SEQ ID NO: 164560 - RNA, 1701 nt, Artificial Sequence; identical to SEQ ID NO: 163648
  derived and/or modified CDS sequence (opt4) from hemagglutinin__InfluenzaA__ADE34202

SEQ ID NO: 164561 - RNA, 1701 nt, Artificial Sequence
  derived and/or modified CDS sequence (opt4) from hemagglutinin__InfluenzaA__ADE34213
augaagaccaucaucgcccugagcuacauccugugccugguguucgcccagaagcugcccggcaacgacaacagcaccgccacccugugccugggccaccacgccgugcccaacggcaccaucgugaagaccaucaccaacgaccagaucgaggugaccaacgccaccgagcuggugcagagcagcagcaccggcgagaucugcgacagcccccaccagauccuggacggcgagaacugcacccugaucgacgcccugcugggcgacccccagugcgacggcuuccagaacaagaagugggaccuguucguggagagaagaaaggccuacagcaacugcuaccccuacgacgugcccgacuacgccagccugagaagccugguggccagcagcggcacccuggaguucaacaacgagagcuucaacuggaccggcgugacccagaacggcaccagcagcgccugcaucagaagaagcaacaacagcuucuucagcagacugaacuggcugacccaccugaaguucaaguaccccgcccugaacgugaccaugcccaacaacgagcaguucgacaagcuguacaucuggggcgugcaccaccccggcaccgacaacgaccagaucuuccuguacgcccaggccagcggcagaaucaccgugagcaccaagagaagccagcagaccgugauccccaacaucggcagcagacccagagugagaaacauccccagcagaaucagcaucuacuggaccaucgugaagcccggcgacauccugcugaucaacagcaccggcaaccugaucgcccccagaggcuacuucaagaucagaagcggcaagagcagcaucaugagaagcgacgcccccaucggcaagugcaacagcgagugcaucacccccaacggcagcauccccaacgacaagcccuuccagaacgugaacagaaucaccuacggcgccugccccagauacgugaagcagaacacccugaagcuggccaccggcaugagaaacgugcccgagaagcagaccagaggcaucuucggcgccaucgccggcuucaucgagaacggcugggagggcaugguggacggcugguacggcuucagacaccagaacagcgagggcagaggccaggccgccgaccugaagagcacccaggccgccaucgaccagaucaacggcaagcugaacagacugaucggcaagaccaacgagaaguuccaccagaucgagaaggaguucagcgagguggagggcagaauccaggaccuggagaaguacguggaggacaccaagaucgaccuguggagcuacaacgccgagcugcugguggcccuggagaaccagcacaccaucgaccugaccgacagcgagaugaacaagcuguucgagaagaccaagaagcagcugagagagaacgccgaggacaugggcaacggcugcuucaagaucuaccacaagugcgacaacgccugcaucggcagcaucagaaacggcaccuacgaccacgacguguacagagacgaggcccugaacaacagauuccagaucaagggcguggagcugaagagcggcuacaaggacuggauccuguggaucagcuucgccaucagcugcuuccugcugugcguggcccugcugggcuucaucaugugggccugccagaagggcaacaucagaugcaacaucugcaucuga

SEQ ID NO: 164562 - RNA, 1701 nt, Artificial Sequence; identical to SEQ ID NO: 163648
  derived and/or modified CDS sequence (opt4) from hemagglutinin__InfluenzaA__ADE34224

SEQ ID NO: 164563 - RNA, 1701 nt, Artificial Sequence
  derived and/or modified CDS sequence (opt4) from hemagglutinin__InfluenzaA__ADE34235
augaagaccaucaucgcccugagcuacauccugugccugguguucgcccagaagcugcccggcaacgacaacagcaccgccacccugugccugggccaccacgccgugcccaacggcaccaucgugaagaccaucaccaacgaccagaucgaggugaccaacgccaccgagcuggugcagagcagcagcaccggcgagaucugcgacagcccccaccagauccuggacggcaagaacugcacccugaucgacgcccugcugggcgacccccagugcgacggcuuccagaacaagaagugggaccuguucguggagagaagcaaggccuacagcaacugcuaccccuacgacgugcccgacuacgccagccugagaagccugguggccagcagcggcacccuggaguucaacaacgagagcuucaacuggaccggcgugacccaggacggcaccagcagcgccugcaucagaagaagcaagaacagcuucuucagcagacugaacuggcugacccaccugaacuucaaguaccccgcccugaacgugaccaugcccaacaacgagcaguucgacaagcuguacaucuggggcgugcaccaccccggcaccgacaaggaccagaucuuccuguacgcccaggccagcggcagaaccaccgugagcaccaagagaagccagcagaccgccauccccaacaucggcagcagacccagagugagaaacauccccagcagaaucagcaucuacuggaccaucgugaagcccggcgacauccugcugaucaacagcaccggcaaccugaucgcccccagaggcuacuucaagaucagaagcggcaagagcagcaucaugagaagcgacgcccccaucggcaagugcaacagcgagugcaucacccccaacggcagcauccccaacgacaagcccuuccagaacgugaacagaaucaccuacggcgccugccccagauacgugaagcagaacacccugaagcuggccaccggcaugagaaacgugcccgagaagcagaccagaggcaucuucggcgccaucgccggcuucaucgagaacggcugggagggcaugguggacggcugguacggcuucagacaccagaacagcgagggcagaggccaggccgccgaccugaagagcacccaggccgccaucgaccagaucaacggcaagcugaacagacugaucggcaagaccaacgagaaguuccaccagaucgagaaggaguucagcgagguggagggcagaauccaggaccuggagaaguacguggaggacaccaagaucgaccuguggagcuacaacgccgagcugcugguggcccuggagaaccagcacaccaucgaccugaccgacagcgagaugaacaagcuguucgagaagaccaagaagcagcugagagagaacgccgaggacaugggcaacggcugcuucaagaucuaccacaagugcgacaacgccugcaucggcagcaucagaaacggcaccuacgaccacgacguguacagagacgaggcccugaacaacagauuccagaucaagggcguggagcugaagagcggcuacaaggacuggauccuguggaucagcuucgccaucagcugcuuccugcugugcguggcccugcugggcuucaucaugugggccugccagaagggcaacaucagaugcaacaucugcaucuga

SEQ ID NO: 164564 - RNA, 1701 nt, Artificial Sequence; identical to SEQ ID NO: 163648
  derived and/or modified CDS sequence (opt4) from hemagglutinin__InfluenzaA__ADE34246

SEQ ID NO: 164565 - RNA, 1701 nt, Artificial Sequence; identical to SEQ ID NO: 163673
  derived and/or modified CDS sequence (opt4) from hemagglutinin__InfluenzaA__ADE34257

SEQ ID NO: 164566 - RNA, 1701 nt, Artificial Sequence
  derived and/or modified CDS sequence (opt4) from hemagglutinin__InfluenzaA__ADE34268
augaagaccaucaucgcccugagcuacauccugugccugguguucgcccagaagcugcccggcaacgacaacagcaccgccacccugugccugggccaccacgccgugcccaacggcaccaucgugaagaccaucaccaacgaccagaucgaggugaccaacgccaccgagcuggugcagagcagcagcaccggcgagaucugcgacagcccccaccagauccuggacggcaagaacugcacccugaucgacgcccugcugggcgacccccagugcgacggcuuccagaacaagaagugggaccuguucguggagagaagcaaggccuacagcaacugcuaccccuacgaggugcccgacuacgccagccugagaagccugguggccagcagcggcacccuggaguucaacaacgagagcuucaacuggaccggcgugacccaggacggcaccagcagcgccugcaucagaagaagcaagaacagcuucuucagcagacugaacuggcugacccaccugaacuucaaguaccccgcccugaacgugaccaugcccaacaacgagcaguucgacaagcuguacaucuggggcgugcaccaccccggcaccgacaaggaccagaucuuccuguacgcccaggccagcggcagaaucaccgugagcaccaagagaagccagcagaccgccauccccaacaucggcagcagacccagagugagaaacauccccagcagaaucagcaucuacuggaccaucgugaagcccggcgacauccugcugaucaacagcaccggcaaccugaucgcccccagaggcuacuucaagaucagaagcggcaagagcagcaucaugagaagcgacgcccccaucggcaagugcaacagcgagugcaucacccccaacggcagcauccccaacgacaagcccuuccagaacgugaacagaaucaccuacggcgccugccccagauacgugaagcagaacacccugaagcuggccaccggcaugagaaacgugcccgagaagcagaccagaggcaucuucggcgccaucgccggcuucaucgagaacggcugggagggcaugguggacggcugguacggcuucagacaccagaacagcgagggcagaggccaggccgccgaccugaagagcacccaggccgccaucgaccagaucaacggcaagcugaacagacugaucggcaagaccaacgagaaguuccaccagaucgagaaggaguucagcgagguggagggcagaauccaggaccuggagaaguacguggaggacaccaagaucgaccuguggagcuacaacgccgagcugcugguggcccuggagaaccagcacaccaucgaccugaccgacagcgagaugaacaagcuguucgagaagaccaagaagcagcugagagagaacgccgaggacaugggcaacggcugcuucaagaucuaccacaagugcgacaacgccugcaucggcagcaucagaaacggcaccuacgaccacgacguguacagagacgaggcccugaacaacagauuccagaucaagggcguggagcugaagagcggcuacaaggacuggauccuguggaucagcuucgccaucagcugcuuccugcugugcguggcccugcugggcuucaucaugugggccugccagaagggcaacaucagaugcaacaucugcaucuga

SEQ ID NO: 164567 - RNA, 1701 nt, Artificial Sequence
  derived and/or modified CDS sequence (opt4) from hemagglutinin__InfluenzaA__ADE45499
augaaggccauccugguggugcugcuguacaccuucgccaccgccaacgccgacacccugugcaucggcuaccacgccaacaacagcaccgacaccguggacaccgugcuggagaagaacgugaccgugacccacagcgugaaccugcuggaggacaagcacaacggcaagcugugcaagcugagaggcguggccccccugcaccugggcaagugcaacaucgccggcuggauccugggcaaccccgagugcgagagccugagcaccgccagcagcuggagcuacaucguggagaccagcagcagcgacaacggcaccugcuaccccggcgacuucaucgacuacgaggagcugagagagcagcugagcagcgugagcagcuucaagagauucgagaucuuccccaagaccagcagcuggcccaaccacgaccccaacaagggcgugaccgccgccugcccccacgccggcgccaagagcuucuacaagaaccugaucuggcuggugaagaagggcaacagcuaccccaagcugagcaagagcuacaucaacgacaagggcaaggaggugcuggugcuguggggcauccaccaccccagcaccagcgccgaccagcagagccuguaccagaacgccgacgccuacguguucgugggcaccagcagauacagcaagaaguucaagcccgagaucgccaucagacccaaggugagagaccaggagggcagaaugaacuacuacuggacccugguggagcccggcgacaagaucaccuucgaggccaccggcaaccugguggugcccagauacgccuucgccauggagagaaacgccggcagcggcaucaucaucagcgacacccccgugcacgacugcaacaccaccugccagacccccaagggcgccaucaacaccagccugcccuuccagaacauccaccccaucaccaucggcaagugccccaaguacgugaagagcaccaagcugagacuggccaccggccugagaaacgugcccagcauccagagcagaggccuguucggcgccaucgccggcuucaucgagggcggcuggaccggcaugguggacggcugguacggcuaccaccaccagaacgagcagggcagcggcuacgccgccgaccugaagagcacccagaacgccaucgacgagaucaccaacaaggugaacagcgugaucgagaagaugaacacccaguucaccgccgugggcaaggaguucaaccaccuggagaagagaaucgagaaccugaacaagaagguggacgacggcuuccuggacaucuggaccuacaacgccgagcugcuggugcugcuggagaacgagagaacccuggacuaccacgacagcaacgugaagaaccuguacgagaaggugagaagccagcugaagaacaacgccaaggagaucggcaacggcugcuucgaguucuaccacaagugcgacaacaccugcauggagagcgugaagaacggcaccuacgacuaccccaaguacagcgaggaggccaagcugaacagagaggagaucgacggcgugaagcuggagagcaccagaaucuaccagauccuggccaucuacagcaccguggccagcagccuggugcugguggugagccugggcgccaucagcuucuggaugugcagcaacggcagccugcagugcagaaucugcaucuga

SEQ ID NO: 164568 - RNA, 1701 nt, Artificial Sequence; identical to SEQ ID NO: 163527
  derived and/or modified CDS sequence (opt4) from hemagglutinin__InfluenzaA__ADE45501

SEQ ID NO: 164569 - RNA, 1701 nt, Artificial Sequence
  derived and/or modified CDS sequence (opt4) from hemagglutinin__InfluenzaA__ADE45503
augaaggccauccugguggugcugcuguacaccuucgccaccgccaacgccgacacccugugcaucggcuaccacgccaacaacagcaccgacaccguggacaccgugcuggagaagaacgugaccgugacccacagcgugaaccugcuggaggacaagcacaacggcaagcugugcaagcugagaggcguggccccccugcaccugggcaagugcaacaucgccggcuggauccugggcaaccccgagugcgagagccugagcaccgccagcagcuggagcuacaucguggagaccagcagcagcgacaacggcaccugcuaccccggcgacuucaucgacuacgaggagcugagagagcagcugagcagcgugagcagcuucgagagauucgagaucuuccccaagaccagcagcuggcccaaccacgaccccaacaagggcgugaccgccgccugcccccacgccggcgccaagagcuucuacaagaaccugaucuggcuggugaagaagggcaacagcuaccccaagcugagcaagagcuacaucaacgacaagggcaaggaggugcuggugcuguggggcauccaccaccccagcaccagcgccgaccagcagagccuguaccagaacgccgacgccuacguguucgugggcaccagcagauacagcaagaaguucaagcccgagaucgccaucagacccaaggugagagaccaggagggcagaaugaacuacuacuggacccugguggagcccggcgacaagaucaccuucgaggccaccggcaaccugguggugcccagauacgccuucgccauggagagaaacgccggcagcggcaucaucaucagcgacacccccgugcacgacugcaacaccaccugccagacccccaagggcgccaucaacaccagccugcccuuccagaacauccaccccaucaccaucggcaagugccccaaguacgugaagagcaccaagcugagacuggccaccggccugagaaacgugcccagcauccagagcagaggccuguucggcgccaucgccggcuucaucgagggcggcuggaccggcaugguggacggcugguacggcuaccaccaccagaacgagcagggcagcggcuacgccgccgaccugaagagcacccagaacgccaucgacgagaucaccaacaaggugaacagcgugaucgagaagaugaacacccaguucaccgccgugggcaaggaguucaaccaccuggagaagagaaucgagaaccugaacaagaagguggacgacggcuuccuggacaucuggaccuacaacgccgagcugcuggugcugcuggagaacgagagaacccuggacuaccacgacagcaacgugaagaaccuguacgagaaggugagaagccagcugaagaacaacgccaaggagaucggcaacggcugcuucgaguucuaccacaagugcgacaacaccugcauggagagcgugaagaacggcaccuacgacuaccccaaguacagcgaggaggccaagcugaacagagaggagaucgacggcgugaagcuggagagcaccagaguguaccagauccuggccaucuacagcaccguggccagcagccuggugcugguggugagccugggcgccaucagcuucuggaugugcagcaacggcagccugcagugcagaaucugcaucuga

SEQ ID NO: 164570 - RNA, 1701 nt, Artificial Sequence; identical to SEQ ID NO: 162729
  derived and/or modified CDS sequence (opt4) from hemagglutinin__InfluenzaA__ADE45505

SEQ ID NO: 164571 - RNA, 1701 nt, Artificial Sequence; identical to SEQ ID NO: 163082
  derived and/or modified CDS sequence (opt4) from hemagglutinin__InfluenzaA__ADE45507

SEQ ID NO: 164572 - RNA, 1701 nt, Artificial Sequence; identical to SEQ ID NO: 163082
  derived and/or modified CDS sequence (opt4) from hemagglutinin__InfluenzaA__ADE45509

SEQ ID NO: 164573 - RNA, 1701 nt, Artificial Sequence; identical to SEQ ID NO: 163527
  derived and/or modified CDS sequence (opt4) from hemagglutinin__InfluenzaA__ADE45511

SEQ ID NO: 164574 - RNA, 1701 nt, Artificial Sequence
  derived and/or modified CDS sequence (opt4) from hemagglutinin__InfluenzaA__ADE45513
augaaggccauccugguggugcugcuguacaccuucgccaccgccaacgccgacacccugugcaucggcuaccacgccaacaacagcaccgacaccguggacaccgugcuggagaagaacgugaccgugacccacagcgugaaccugcuggaggacaagcacaacggcaagcugugcaagcugagaggcguggccccccugcaccugggcaagugcaacaucgccggcuggauccugggcaaccccgagugcgagagccugagcaccgccagcagcuggagcuacaucguggagaccagcagcagcgacaacggcaccugcuaccccggcgacuucaucgacuacgaggagcugagagagcagcugagcagcgugagcagcuucgagagauucgagaucuuccccaagaccagcagcuggcccaaccacgaccccaacaagggcgugaccgccgccugcccccacgccggcgccaagagcuucuacaagaaccugaucuggcuggugaagaagggcaacagcuaccccaagcugagcaagagcuacaucaacgacaagggcaaggaggugcuggugcuguggggcauccaccaccccagcaccagcgccgaccagcagagccuguaccagaacgccgacgccuacgccuucgugggcaccagcagauacagcaagaaguucaagcccgagaucgccaucagacccaaggugagagaccaggagggcagaaucaacuacuacuggacccugguggagcccggcgacaagaucaucuucgaggccaccggcaaccugguggugcccagauacgccuucgccauggagagaaacgccggcagcggcaucaucaucagcgacacccccgcccacgacugcaacaccaccugccagacccccaagggcgccaucaacaccagccugcccuuccagaacauccaccccaucaccaucggcaagugccccaaguacgugaagagcaccaagcugagacuggccaccggccugagaaacgugcccagcauccagagcagaggccuguucggcgccaucgccggcuucaucgagggcggcuggaccggcaugguggacggcugguacggcuaccaccaccagaacgagcagggcagcggcuacgccgccgaccugaagagcacccagaacgccaucgacgagaucaccaacaaggugaacagcgugaucgagaagaugaacacccaguucaccgccgugggcaaggaguucaaccaccuggagaagagaaucgagaaccugaacaagaagguggacgacggcuuccuggacaucuggaccuacaacgccgagcugcuggugcugcuggagaacgagagaacccuggacuaccacgacagcaacgugaagaaccuguacgagaaggugagaagccagcugaagaacaacgccaaggagaucggcaacggcugcuucgaguucuaccacaagugcgacaacaccugcauggagagcgugaagaacggcaccuacgacuaccccaaguacagcgaggaggccaagcugaacagagaggagaucgacggcgugaagcuggagagcaccagaaucuaccagauccuggccaucuacagcaccguggccagcagccuggugcugguggugagccugggcgccaucagcuucuggaugugcagcaacggcagccugcagugcagaaucugcaucuga

SEQ ID NO: 164575 - RNA, 1701 nt, Artificial Sequence
  derived and/or modified CDS sequence (opt4) from hemagglutinin__InfluenzaA__ADE75388
augaaggccauccugguggugcugcuguacaccuucgccaccgccaacgccgacacccugugcaucggcuaccacgccaacaacagcaccgacaccguggacaccgugcuggagaagaacgugaccgugacccacagcgugaaccugcuggaggacaagcacaacggcaagcugugcaagcugagaggcguggccccccugcaccugggcaagugcaacaucgccggcuggauccugggcaaccccgagugcgagagccugagcaccgccagcagcuggagcuacaucguggagaccagcagcagcgagaacggcaccugcuaccccggcgacuucaucgacuacgaggagcugagagagcagcugagcagcgugagcagcuucgagagauucgagaucuuccccaagaccagcagcuggcccaaccacgacagcaacaagggcgugaccgccgccugcccccacgccggcgccaagagcuucuacaagaaccugaucuggcuggugaagaagggcaacagcuaccccaagcugagcaagagcuacaucaacgacaagggcaaggaggugcuggugcuguggggcauccaccaccccagcaccagcgccgaccagcagagccuguaccagaacgccgacgccuacguguucgugggcaccagcagauacagcaagaaguucaagcccgagaucgccaucagacccaaggugagagaccaggagggcagaaugaacuacuacuggacccugguggagcccggcgacaagaucaccuucgaggccaccggcaaccugguggugcccagauacgccuucgccauggagagaaacgccggcagcggcaucaucaucagcgacacccccgugcacgacugcaacaccaccugccagacccccaagggcgccaucaacaccagccugcccuuccagaacauccaccccaucaccaucggcaagugccccaaguacgugaagagcaccaagcugagacuggccaccggccugagaaacgugcccagcauccagagcagaggccuguucggcgccaucgccggcuucaucgagggcggcuggaccggcaugguggacggcugguacggcuaccaccaccagaacgagcagggcagcggcuacgccgccgaccugaagagcacccagaacgccaucgacgagaucaccaacaaggugaacagcgugaucgagaagaugaacacccaguucaccgccgugggcaaggaguucaaccaccuggagaagagaaucgagaaccugaacaagaagguggacgacggcuuccuggacaucuggaccuacaacgccgagcugcuggugcugcuggagaacgagagaacccuggacuaccacgacagcaacgugaagaaccuguacgagaaggugagaagccagcugaagaacaacgccaaggagaucggcaacggcugcuucgaguucuaccacaagugcgacaacaccugcauggagagcgugaagaacggcaccuacgacuaccccaaguacagcgaggaggccaagcugaacagagaggagaucgacggcgugaagcuggagagcaccagaaucuaccagauccuggccaucuacagcaccguggccagcagccuggugcugguggugagccugggcgccaucagcuucuggaugugcagcaacggcagccugcagugcagaaucugcaucuga

SEQ ID NO: 164576 - RNA, 1701 nt, Artificial Sequence; identical to SEQ ID NO: 162729
  derived and/or modified CDS sequence (opt4) from hemagglutinin__InfluenzaA__ADE75390

SEQ ID NO: 164577 - RNA, 1701 nt, Artificial Sequence; identical to SEQ ID NO: 162729
  derived and/or modified CDS sequence (opt4) from hemagglutinin__InfluenzaA__ADF10067

SEQ ID NO: 164578 - RNA, 1701 nt, Artificial Sequence; identical to SEQ ID NO: 162729
  derived and/or modified CDS sequence (opt4) from hemagglutinin__InfluenzaA__ADF10077

SEQ ID NO: 164579 - RNA, 1701 nt, Artificial Sequence
  derived and/or modified CDS sequence (opt4) from hemagglutinin__InfluenzaA__ADF10087
augaaggccauccugguggugcugcuguacaccuucgccaccgccaacgccgacacccugugcaucggcuaccacgccaacaacagcaccgacaccguggacaccgugcuggagaagaacgugaccgugacccacagcgugaaccugcuggaggacaagcacaacggcaagcugugcaagcugagaggcguggccccccugcaccugggcaagugcaacaucgccggcuggauccugggcaaccccgagugcgagagccugagcaccgccagcagcuggagcuacaucguggagaccagcagcagcgacaacggcaccugcuaccccggcgacuucaucgacuacgaggagcugagagagcagcugagcagcgugagcagcuucgagagauucgagaucuuccccaagaccagcagcuggcccaaccacgacagcaacaagggcgugaccgccgccugcccccacgccggcgccaagagcuucuacaagaaccugaucuggcuggugaagaagggcaacagcuaccccaagcugagcaagagcuacaucaacgacaagggcaaggaggugcuggugcuguggggcauccaccaccccagcaccagcgccgaccagcagagccuguaccagaacgccgacgccuacguguucgugggcaccagcagauacagcaagaaguucaagcccgagaucgccaucagacccaaggugagagaccaggagggcagaaugaacuacuacuggacccugguggagcccggcgacaagaucaccuucgaggccaccggcaaccugguggugcccagauacgccuucgccaugaagagaaacgccggcagcggcaucaucaucagcgacacccccgugcacgacugcaacaccaccugccagacccccaagggcgccaucaacaccagccugcccuuccagaacauccaccccaucaccaucggcaagugccccaaguacgugaagagcaccaagcugagacuggccaccggccugagaaacgugcccagcauccagagcagaggccuguucggcgccaucgccggcuucaucgagggcggcuggaccggcaugguggacggcugguacggcuaccaccaccagaacgagcagggcagcggcuacgccgccgaccugaagagcacccagaacgccaucgacgagaucaccaacaaggugaacagcgugaucgagaagaugaacacccaguucaccgccgugggcaaggaguucaaccaccuggagaagagaaucgagaaccugaacaagaagguggacgacggcuuccuggacaucuggaccuacaacgccgagcugcuggugcugcuggagaacgagagaacccuggacuaccacgacagcaacgugaagaaccuguacgagaaggugagaaaccagcugaagaacaacgccaaggagaucggcaacggcugcuucgaguucuaccacaagugcgacaacaccugcauggagagcgugaagaacggcaccuacgacuaccccaaguacagcgaggaggccaagcugaacagagaggagaucgacggcgugaagcuggagagcaccagaaucuaccagauccuggccaucuacagcaccguggccagcagccuggugcugguggugagccugggcgccaucagcuucuggaugugcagcaacggcagccugcagugcagaaucugcaucuga

SEQ ID NO: 164580 - RNA, 1701 nt, Artificial Sequence
  derived and/or modified CDS sequence (opt4) from hemagglutinin__InfluenzaA__ADF10097
auggaggccauccugguggugcugcuguacaccuucgccaccgccaacgccgacacccugugcaucggcuaccacgccaacaacagcaccgacaccguggacaccgugcuggagaagaacgugaccgugacccacagcgugaaccugcuggaggacaagcacaacggcaagcugugcaagcugagaggcguggccccccugcaccugggcaagugcaacaucgccggcuggauccugggcaaccccgagugcgagagccugagcaccgccagcagcuggagcuacaucguggagaccagcagcagcgacaacggcaccugcuaccccggcgacuucaucgacuacgaggagcugagagagcagcugagcagcgugagcagcuucgagagauucgagaucuuccccaagaccagcagcuggcccaaccacgacagcaacaagggcgugaccgccgccugcccccacgccggcgccaagagcuucuacaagaaccugaucuggcuggugaagaagggcaacagcuaccccaagcugagcaagagcuacaucaacgacaagggcaaggaggugcuggugcuguggggcauccaccaccccagcaccagcgccgaccagcagagccuguaccagaacgccgacgccuacguguucgugggcagcagcaaguacagcaagaaguucaagcccgagaucgccaucagacccaaggugagagaccaggagggcagaaugaacuacuacuggacccugguggagcccggcgacaagaucaccuucgaggccaccggcaaccugguggugcccagauacgccuucgccauggagagaaacgccggcagcggcaucaucaucagcgacacccccgugcacgacugcaacaccaccugccagacccccaagggcgccaucaacaccagccugcccuuccacaacauccaccccaucaccaucggcaagugccccaaguacgugaagagcaccaagcugagacuggccaccggccugagaaacgugcccagcauccagagcagaggccuguucggcgccaucgccggcuucaucgagggcggcuggaccggcaugguggacggcugguacggcuaccaccaccagaacgagcagggcagcggcuacgccgccgaccugaagagcacccagaacgccaucgacgagaucaccaacaaggugaacagcgugaucgagaagaugaacacccaguucaccgccgugggcaaggaguucaaccaccuggagaagagaaucgagaaccugaacaagaagguggacgacggcuuccuggacaucuggaccuacaacgccgagcugcuggugcugcuggagaacgagagaacccuggacuaccacgacagcaacgugaagaaccuguacgagaaggugagaagccagcugaagaacaacgccaaggagaucggcaacggcugcuucgaguucuaccacaagugcgacaacaccugcauggagagcgugaagaacggcaccuacgacuaccccaaguacagcgaggaggccaagcugaacagagaggagaucgacggcgugaagcuggagagcaccaagaucuaccagauccuggccaucuacagcaccguggccagcagccuggugcugguggugagccugggcgccaucagcuucuggaugugcagcaacggcagccugcagugcagaaucugcaucuga

SEQ ID NO: 164581 - RNA, 1701 nt, Artificial Sequence
  derived and/or modified CDS sequence (opt4) from hemagglutinin__InfluenzaA__ADF10107
auggaggccauccugguggugcugcuguacaccuucgccaccgccaacgccgacacccugugcaucggcuaccacgccaacaacagcaccgacaccguggacaccgugcuggagaagaacgugaccgugacccacagcgugaaccugcuggaggacaagcacaacggcaagcugugcaagcugagaggcguggccccccugcaccugggcaagugcaacaucgccggcuggauccugggcaaccccgagugcgagagccugagcaccgccagcagcuggagcuacaucguggagaccagcagcagcgacaacggcaccugcuaccccggcgacuucaucgacuacgaggagcugagagagcagcugagcagcgugagcagcuucgagagauucgagaucuuccccaagaccagcagcuggcccaaccacgacagcaacaagggcgugaccgccgccugcccccacgccggcgccaagagcuucuacaagaaccugaucuggcuggugaagaagggcaacagcuaccccaagcugagcaagagcuacaucaacgacaagggcaaggaggugcuggugcuguggggcauccaccacccccccaccagcgccgaccagcagagccuguaccagaacgccgacgccuacguguucgugggcagcagcaaguacagcaagaaguucaagcccgagaucgccaucagacccaaggugagagaccaggagggcagaaugaacuacuacuggacccugguggagcccggcgacaagaucaccuucgaggccaccggcaaccugguggugcccagauacgccuucgccauggagagaaacgccggcagcggcaucaucaucagcgacacccccgcccacgacugcaacaccaccugccagacccccaagggcgccaucaacaccagccugcccuuccacaacauccaccccaucaccaucggcaagugccccaaguacgugaagagcaccaagcugagacuggccaccggccugagaaacgugcccagcauccagagcagaggccuguucggcgccaucgccggcuucaucgagggcggcuggaccggcaugguggacggcugguacggcuaccaccaccagaacgagcagggcagcggcuacgccgccgaccugaagagcacccagaacgccaucgacgagaucaccaacaaggugaacagcgugaucgagaagaugaacacccaguucaccgccgugggcaaggaguucaaccaccuggagaagagaaucgagaaccugaacaagaagguggacgacggcuuccuggacaucuggaccuacaacgccgagcugcuggugcugcuggagaacgagagaacccuggacuaccacgacagcaacgugaagaaccuguacgagaaggugagaagccagcugaagaacaacgccaaggagaucggcaacggcugcuucgaguucuaccacaagugcgacaacaccugcauggagagcgugaagaacggcaccuacgacuaccccaaguacagcgaggaggccaagcugaacagagaggagaucgacggcgugaagcuggagagcaccaagaucuaccagauccuggccaucuacagcaccguggccagcagccuggugcugguggugagccugggcgccaucagcuucuggaugugcagcaacggcagccugcagugcagaaucugcaucuga

SEQ ID NO: 164582 - RNA, 1701 nt, Artificial Sequence; identical to SEQ ID NO: 162729
  derived and/or modified CDS sequence (opt4) from hemagglutinin__InfluenzaA__ADF10117

SEQ ID NO: 164583 - RNA, 1701 nt, Artificial Sequence; identical to SEQ ID NO: 164433
  derived and/or modified CDS sequence (opt4) from hemagglutinin__InfluenzaA__ADF10127

SEQ ID NO: 164584 - RNA, 1701 nt, Artificial Sequence; identical to SEQ ID NO: 162729
  derived and/or modified CDS sequence (opt4) from hemagglutinin__InfluenzaA__ADF10137

SEQ ID NO: 164585 - RNA, 1701 nt, Artificial Sequence
  derived and/or modified CDS sequence (opt4) from hemagglutinin__InfluenzaA__ADF10154
augaaggccauccugguggugcugcuguacaccuucgccaccgccaacgccgacacccugugcaucggcuaccacgccaacaacagcaccgacaccguggacaccgugcuggagaagaacgugaccgugacccacagcgugaaccugcuggaggacaagcacaacggcaagcugugcaagcugagaggcguggccccccugcaccugggcaagugcaacaucgccggcuggauccugggcaaccccgagugcgagagccugagcaccgccagcagcuggagcuacaucguggagaccagcagcagcgacaacggcaccugcuaccccggcgacuucaucgacuacgaggagcugagagagcagcugagcagcgugagcagcuucgagagauucgagaucuuccccaagaccagcagcuggcccgaccacgacagcaacaagggcgugaccgccgccugcccccacgccggcgccaagagcuucuacaagaaccugaucuggcuggugaagaagggcaacagcuaccccaagcugagcaagagcuacaucaacgacaagggcaaggaggugcuggugcuguggggcauccaccaccccagcaccagcgccgaccagcagagccuguaccagaacgccgacgccuacguguucgugggcaccagcagauacagcaagaaguucaagcccgagaucgccaucagacccaaggugagagagcaggagggcagaaugaacuacuacuggacccugguggagcccggcgacaagaucaccuucgaggccaccggcaaccugguggugcccagauacgccuucgccauggagagaaacgccggcagcggcaucaucaucagcgacacccccgugcacgacugcaacaccaccugccagacccccaagggcgccaucaacaccagccugcccuuccagaacauccaccccaucaccaucggcaagugccccaaguacgugaagagcaccaagcugagacuggccaccggccugagaaacgugcccagcauccagagcagaggccuguucggcgccaucgccggcuucaucgagggcggcuggaccggcaugguggacggcugguacggcuaccaccaccagaacgagcagggcagcggcuacgccgccgaccugaagagcacccagaacgccaucgacgagaucaccaacaaggugaacagcgugaucgagaagaugaacacccaguucaccgccgugggcaaggaguucaaccaccuggagaagagaaucgagaaccugaacaagaagguggacgacggcuuccuggacaucuggaccuacaacgccgagcugcuggugcugcuggagaacgagagaacccuggacuaccacgacagcaacgugaagaaccuguacgagagagugagaagccagcugaagaacaacgccaaggagaucggcaacggcugcuucgaguucuaccacaagugcgacaacaccugcauggagagcgugaagaacggcaccuacgacuaccccaaguacagcgaggaggccaagcugaacagagaggagaucgacggcgugaagcuggagagcaccagaaucuaccagauccuggccaucuacagcaccguggccagcagccuggugcugguggugagccugggcgccaucagcuucuggaugugcagcaacggcagccugcagugcagaaucugcaucuga

SEQ ID NO: 164586 - RNA, 1701 nt, Artificial Sequence
  derived and/or modified CDS sequence (opt4) from hemagglutinin__InfluenzaA__ADF10174
augaaggccauccugguggugcugcuguacaccuucgccaccgccaacgccgacacccugugcaucggcuaccacgccaacaacagcaccgacaccguggacaccgugcuggagaagaacgugaccgugacccacagcgugaaccugcuggaggacaagcacaacggcaagcugugcaagcugagaggcguggccccccugcaccugggcaagugcaacaucgccggcuggauccugggcaaccccgagugcgagagccugagcaccgccagcagcuggagcuacaucguggagaccagcagcagcgacaacggcaccugcuaccccggcgacuucaucgacuacgaggagcugagagagcagcugagcagcgugagcagcuucgagagauucgagaucuuccccaagaccagcagcuggcccaaccacgacagcaacaagggcgugaccgccgccugcccccacgccggcgccaagagcuucuacaagaaccugaucuggcuggugaagaagggcaacagcuaccccaagcugagcaagagcuacaucaacgacaagggcaaggaggugcuggugcuguggggcauccaccaccccagcaccagcgccgaccagcagagccuguaccagaacgccgacgccuacguguucgugggcaccagcagauacagcaagaaguucaagcccgagaucgccaucagacccaaggugagagagcaggagggcagaaugaacuacuacuggacccugguggagcccggcgacaagaucaccuucgaggccaccggcaaccugguggugcccagauacgccuucgccauggagagaaacgccggcagcggcaucaucaucagcgacacccccgugcacgacugcaacaccaccugccagacccccaagggcgccaucaacaccagccugcccuuccagaacauccaccccaucaccaucggcaagugccccaaguacgugaagagcaccaagcugagacuggccaccggccugagaaacgugcccagcauccagagcagaggccuguucggcgccaucgccggcuucaucgagggcggcuggaccggcaugguggacggcugguacggcuaccaccaccagaacgagcagggcagcggcuacgccgccgaccugaagagcacccagaacgccaucgacgagaucaccaacaaggugaacagcgugaucgagaagaugaacacccaguucaccgccgugggcaaggaguucaaccaccuggagaagagaaucgagaaccugaacaagaagguggacgacggcuuccuggacaucuggaccuacaacgccgagcugcuggugcugcuggagaacgagagaacccuggacuaccacgacagcaacgugaagaaccuguacgagagagugagaagccagcugaagaacaacgccaaggagaucggcaacggcugcuucgaguucuaccacaagugcgacaacaccugcauggagagcgugaagaacggcaccuacgacuaccccaaguacagcgaggaggccaagcugaacagagaggagaucgacggcgugaagcuggagagcaccagaaucuaccagauccuggccaucuacagcaccguggccagcagccuggugcugguggugagccugggcgccaucagcuucuggaugugcagcaacggcagccugcagugcagaaucugcaucuga

SEQ ID NO: 164587 - RNA, 1701 nt, Artificial Sequence; identical to SEQ ID NO: 164586
  derived and/or modified CDS sequence (opt4) from hemagglutinin__InfluenzaA__ADF10190

SEQ ID NO: 164588 - RNA, 1701 nt, Artificial Sequence; identical to SEQ ID NO: 164433
  derived and/or modified CDS sequence (opt4) from hemagglutinin__InfluenzaA__ADF10237

SEQ ID NO: 164589 - RNA, 1701 nt, Artificial Sequence; identical to SEQ ID NO: 164586
  derived and/or modified CDS sequence (opt4) from hemagglutinin__InfluenzaA__ADF10262

SEQ ID NO: 164590 - RNA, 1701 nt, Artificial Sequence
  derived and/or modified CDS sequence (opt4) from hemagglutinin__InfluenzaA__ADF10288
augaaggccauccugguggugcugcuguacaccuucgccaccgccaacgccgacacccugugcaucggcuaccacgccaacaacagcaccgacaccguggacaccgugcuggagaagaacgugaccgugacccacagcgugaaccugcuggaggacaagcacaacggcaagcugugcaagcugagaggcguggccccccugcaccugggcaagugcaacaucgccggcuggauccugggcaaccccgagugcgagagccugagcaccgccagcagcuggagcuacaucguggagaccagcagcagcgacaacggcaccugcuaccccggcgacuucaucgacuacgaggagcugagagagcagcugagcagcgugagcagcuucgagagauucgagaucuuccccaagaccagcagcuggcccaaccacgacagcaacaagggcgugaccgccgccugcccccacgccggcgccaagagcuucuacaagaaccugaucuggcuggugaagaagggcaacagcuaccccaagcugagcaagagcuacaucaacgacaagggcaaggaggugcuggugcuguggggcauccaccaccccagcaccagcgccgaccagcagagccuguaccagaacgccgacgccuacguguucgugggcaccagcagauacagcaagaaguucaagcccgagaucgccaucagacccaaggugagagagcaggagggcagaaugaacuacuacuggacccugguggagcccggcgacaagaucaccuucgaggccaccggcaaccugguggugcccagauacgccuucgccauggagagaaacgccggcagcggcaucaucaucagcgacacccccgugcacgacugcaacaccaccugccagacccccaagggcgccaucaacaccagccugcccuuccagaacauccaccccaucaccaucggcaagugccccaaguacgugaagagcaccaagcugagacuggccaccggccugagaaacgugcccagcauccagagcagaggccuguucggcgccaucgccggcuucaucgagggcggcuggaccggcaugguggacggcugguacggcuaccaccaccagaacgagcagggcagcggcuacgccgccgaccugaagagcacccagaacgccaucgacgagaucaccaacaaggugaacagcgugaucgagaagaugaacacccaguucaccgccgugggcaaggaguucaaccaccuggagaagagaaucgagaaccugaacaagaagguggacgacggcuuccuggacaucuggaccuacaacgccgagcugcuggugcugcuggagaacgagagaacccuggacuaccacgacagcaacgugaagaaccuguacgagagagugagaagccagcugaagaacaacgccaaggagaucggcaacggcugcuucgaguucuaccacaagugcgacaacaccugcauggagagcgugaagaacggcaccuacgacuaccccaaguacagcgaggaggccaagcugaacagagaggagaucgacggcgugaagcuggagagcaccagaaucuaccagauccuggccaucuacagcaccguggccagcagccuggugcugguggugagccugggcgccaucagcuucuggaugugcagcaacggcagccugcagugcagagugugcaucuga

SEQ ID NO: 164591 - RNA, 1701 nt, Artificial Sequence; identical to SEQ ID NO: 164433
  derived and/or modified CDS sequence (opt4) from hemagglutinin__InfluenzaA__ADF10302

SEQ ID NO: 164592 - RNA, 1701 nt, Artificial Sequence; identical to SEQ ID NO: 164433
  derived and/or modified CDS sequence (opt4) from hemagglutinin__InfluenzaA__ADF10335

SEQ ID NO: 164593 - RNA, 1701 nt, Artificial Sequence; identical to SEQ ID NO: 164433
  derived and/or modified CDS sequence (opt4) from hemagglutinin__InfluenzaA__ADF10359

SEQ ID NO: 164594 - RNA, 1701 nt, Artificial Sequence; identical to SEQ ID NO: 164586
  derived and/or modified CDS sequence (opt4) from hemagglutinin__InfluenzaA__ADF10369

SEQ ID NO: 164595 - RNA, 1701 nt, Artificial Sequence; identical to SEQ ID NO: 164586
  derived and/or modified CDS sequence (opt4) from hemagglutinin__InfluenzaA__ADF10390

SEQ ID NO: 164596 - RNA, 1701 nt, Artificial Sequence; identical to SEQ ID NO: 164433
  derived and/or modified CDS sequence (opt4) from hemagglutinin__InfluenzaA__ADF10528

SEQ ID NO: 164597 - RNA, 1701 nt, Artificial Sequence; identical to SEQ ID NO: 164586
  derived and/or modified CDS sequence (opt4) from hemagglutinin__InfluenzaA__ADF10598

SEQ ID NO: 164598 - RNA, 1701 nt, Artificial Sequence; identical to SEQ ID NO: 164586
  derived and/or modified CDS sequence (opt4) from hemagglutinin__InfluenzaA__ADF10670

SEQ ID NO: 164599 - RNA, 1701 nt, Artificial Sequence; identical to SEQ ID NO: 164586
  derived and/or modified CDS sequence (opt4) from hemagglutinin__InfluenzaA__ADF10724

SEQ ID NO: 164600 - RNA, 1701 nt, Artificial Sequence; identical to SEQ ID NO: 164433
  derived and/or modified CDS sequence (opt4) from hemagglutinin__InfluenzaA__ADF10757

SEQ ID NO: 164601 - RNA, 1701 nt, Artificial Sequence
  derived and/or modified CDS sequence (opt4) from hemagglutinin__InfluenzaA__ADF10828
augaaggccauccugguggugcugcuguacaccuucgccaccgccaacgccgacacccugugcaucggcuaccacgccaacaacagcaccgacaccguggacaccgugcuggagaagaacgugaccgugacccacagcgugaaccugcuggaggacaagcacaacggcaagcugugcaagcugagaggcguggccccccugcaccugggcaagugcaacaucgccggcuggauccugggcaaccccgagugcgagagccugagcaccgccagcagcuggagcuacaucguggagaccagcagcagcgacaacggcaccugcuaccccggcgacuucaucgacuacgaggagcugagagagcagcugagcagcgugagcagcuucgagagauucgagaucuuccccaagaccagcagcuggcccaaccacgacagcaacaagggcgugaccgccgccugcccccacgccggcgccaagagcuucuacaagaaccugaucuggcuggugaagaagggcaacagcuaccccaagcugagcaagagcuacaucaacgacaagggcaaggaggugcuggugcuguggggcauccaccaccccagcaccagcaccgaccagcagagccuguaccagaacgccgacgccuacguguucgugggcaccagcagauacagcaagaaguucaagcccgagaucgccaucagacccaaggugagagaccaggagggcagaaugaacuacuacuggacccugguggagcccggcgacaagaucaccuucgaggccaccggcaaccugguggugcccagauacgccuucgccauggagagaaacgccggcagcggcaucaucaucagcgacacccccgugcacgacugcaacaccaccugccagacccccaagggcgccaucaacaccagccugcccuuccagaacauccaccccaucaccaucggcaagugccccaaguacgugaagagcaccaagcugagacuggccaccggccugagaaacgugcccagcauccagagcagaggccuguucggcgccaucgccggcuucaucgagggcggcuggaccggcaugguggacggcugguacggcuaccaccaccagaacgagcagggcagcggcuacgccgccgaccugaagagcacccagaacgccaucgacaagaucaccaacaaggugaacagcgugaucgagaagaugaacacccaguucaccgccgugggcaaggaguucaaccaccuggagaagagaaucgagaaccugaacaagaagguggacgacggcuuccuggacaucuggaccuacaacgccgagcugcuggugcugcuggagaacgagagaacccuggacuaccacgacagcaacgugaagaaccuguacgagaaggugagaagccagcugaagaacaacgccaaggagaucggcaacggcugcuucgaguucuaccacaagugcgacaacaccugcauggagagcgugaagaacggcaccuacgacuaccccaaguacagcgaggaggccaagcugaacagagaggagaucgacggcgugaagcuggagagcaccagaaucuaccagauccuggccaucuacagcaccguggccagcagccuggugcugguggugagccugggcgccaucagcuucuggaugugcagcaacggcagccugcagugcagaaucugcaucuga

SEQ ID NO: 164602 - RNA, 1701 nt, Artificial Sequence; identical to SEQ ID NO: 162729
  derived and/or modified CDS sequence (opt4) from hemagglutinin__InfluenzaA__ADF10874

SEQ ID NO: 164603 - RNA, 1701 nt, Artificial Sequence; identical to SEQ ID NO: 163352
  derived and/or modified CDS sequence (opt4) from hemagglutinin__InfluenzaA__ADF10929

SEQ ID NO: 164604 - RNA, 1701 nt, Artificial Sequence; identical to SEQ ID NO: 163352
  derived and/or modified CDS sequence (opt4) from hemagglutinin__InfluenzaA__ADF10996

SEQ ID NO: 164605 - RNA, 1701 nt, Artificial Sequence; identical to SEQ ID NO: 162729
  derived and/or modified CDS sequence (opt4) from hemagglutinin__InfluenzaA__ADF27367

SEQ ID NO: 164606 - RNA, 1701 nt, Artificial Sequence; identical to SEQ ID NO: 162729
  derived and/or modified CDS sequence (opt4) from hemagglutinin__InfluenzaA__ADF27369

SEQ ID NO: 164607 - RNA, 1701 nt, Artificial Sequence
  derived and/or modified CDS sequence (opt4) from hemagglutinin__InfluenzaA__ADF27370
augaaggccauccuggugauccugcuguacaccuucgccaccgccaacgccgacacccugugcaucggcuaccacgccaacaacagcaccgacaccguggacaccgugcuggagaagaacgugaccgugacccacagcgugaaccugcuggaggacaagcacaacggcaagcugugcaagcugagaggcguggccccccugcaccugggcaagugcaacaucgccggcuggauccugggcaaccccgagugcgagagccugagcaccgccagcagcuggagcuacaucguggagaccagcagcagcgacaacggcaccugcuaccccggcgacuucaucgacuacgaggagcugagagagcagcugagcagcgugagcagcuucgagagauucgagaucuuccccaagaccagcagcuggcccaaccacgacagcaacaagggcgugaccgccgccugcccccacgccggcgccaagagcuucuacaagaaccugaucuggcuggugaagaagggcaacagcuaccccaagcugagcaagagcuacaucaacgacaagggcaaggaggugcuggugcuguggggcauccaccaccccagcaccagcgccgaccagcagagccuguaccagaacgccgacgccuacgugcuggugggcaccagcagauacagcaagaaguucaagcccgagaucgccaucagacccaaggugagagaccaggagggcagaaugaacuacuacuggacccugguggagcccggcgacaagaucaccuucgaggccaccggcaaccugguggugcccagauacgccuucgccauggagagaaacgccggcagcggcaucaucaucagcgacacccccgugcacgacugcaacaccaccugccagacccccaagggcgccaucaacaccagccugcccuuccagaacauccaccccaucaccaucggcaagugccccaaguacgugaagagcaccaagcugagacuggccaccggccugagaaacgugcccagcauccagagcagaggccuguucggcgccaucgccggcuucaucgagggcggcuggaccggcaugguggacggcugguacggcuaccaccaccagaacgagcagggcagcggcuacgccgccgaccugaagagcacccagaacgccaucgacaagaucaccaacaaggugaacagcgugaucgagaagaugaacacccaguucaccgccgugggcaaggaguucaaccaccuggagaagagaaucgagaaccugaacaagaagguggacgacggcuuccuggacaucuggaccuacaacgccgagcugcuggugcugcuggagaacgagagaacccuggacuaccacgacagcaacgugaagaaccuguacgagaaggugagaagccagcugaagaacaacgccaaggagaucggcaacggcugcuucgaguucuaccacaagugcgacaacaccugcauggagagcgugaagaacggcaccuacgacuaccccaaguacagcgaggaggccaagcugaacagagaggagaucgacggcgugaagcuggagagcaccagaaucuaccagauccuggccaucuacagcaccguggccagcagccuggugcugguggugagccugggcgccaucagcuucuggaugugcagcaacggcagccugcagugcagaaucugcaucuga

SEQ ID NO: 164608 - RNA, 1701 nt, Artificial Sequence; identical to SEQ ID NO: 163901
  derived and/or modified CDS sequence (opt4) from hemagglutinin__InfluenzaA__ADF27371

SEQ ID NO: 164609 - RNA, 1701 nt, Artificial Sequence
  derived and/or modified CDS sequence (opt4) from hemagglutinin__InfluenzaA__ADF27372
augaaggccauccugguggugcugcuguacaccuucgccaccgccaacgccgacacccugugcaucggcuaccacaccaacaacagcaccgacaccguggacaccgugcuggagaagaacgugaccgugacccacagcgugaaccugcuggaggacaagcacaacggcaagcugugcaagcugagaggcguggccccccugcaccugggcaagugcaacaucgccggcuggauccugggcaaccccgagugcgagagccugagcaccgccagcagcuggagcuacaucguggagaccagcagcagcgacaacggcaccugcuaccccggcgacuucaucgacuacgaggagcugagagagcagcugagcagcgugagcagcuucgagagauucgagaucuuccccaagaccagcagcuggcccaaccacgacagcaacaagggcgugaccgccgccugcccccacgccggcgccaagagcuucuacaagaaccugaucuggcuggugaagaagggcaacagcuaccccaagcugagcaagagcuacaucaacgacaagggcaaggaggugcuggugcuguggggcauccaccaccccagcaccagcgccgaccagcagagccuguaccagaacgccgacgccuacguguucgugggcaccagcagauacagcaagaaguucaagcccgagaucgccaucagacccaaggugagagaccaggagggcagaaugaacuacuacuggacccugguggagcccggcgacaagaucaccuucgaggccaccggcaaccugguggugcccagauacgccuucgccauggagagaaacgccggcagcggcaucaucaucagcgacacccccgugcacgacugcaacaccaccugccagacccccaagggcgccaucaacaccagccugcccuuccagaacauccaccccaucaccaucggcaagugccccaaguacgugaagagcaccaagcugagacuggccaccggccugagaaacgugcccagcauccagagcagaggccuguucggcgccaucgccggcuucaucgagggcggcuggaccggcaugguggacggcugguacggcuaccaccaccagaacgagcagggcagcggcuacgccgccgaccugaagagcacccagaacgccaucgacaagaucaccaacaaggugaacagcgugaucgagaagaugaacacccaguucaccgccgugggcaaggaguucaaccaccuggagaagagaaucgagaaccugaacaagaagguggacgacggcuuccuggacaucuggaccuacaacgccgagcugcuggugcugcuggagaacgagagaacccuggacuaccacgacagcaacgugaagaaccuguacgagaaggugagaagccagcugaagaacaacgccaaggagaucggcaacggcugcuucgaguucuaccacaagugcgacaacaccugcauggagagcgugaagaacggcaccuacgacuaccccaaguacagcgaggaggccaagcugaacagagaggagaucgacggcgugaagcuggagagcaccagaaucuaccagauccuggccaucuacagcaccguggccagcagccuggugcugguggugagccugggcgccaucagcuucuggaugugcagcaacggcagccugcagugcagaaucugcaucuga

SEQ ID NO: 164610 - RNA, 1701 nt, Artificial Sequence
  derived and/or modified CDS sequence (opt4) from hemagglutinin__InfluenzaA__ADF27373
auggaggccauccugguggugcugcuguacaccuucgccaccgccaacgccgacacccugugcaucggcuaccacgccaacaacagcaccgacaccguggacaccgugcuggagaagaacgugaccgugacccacagcgugaaccugcuggaggacaagcacaacggcaagcugugcaagcugagaggcguggccccccugcaccugggcaagugcaacaucgccggcuggauccugggcaaccccgagugcgagagccugagcaccgccagcagcuggagcuacaucguggagaccagcagcagcgacaacggcaccugcuaccccggcgacuucaucgacuacgaggagcugaucgagcagcugagcagcgugagcagcuucgagagauucgagaucuuccccaagaccagcagcuggcccaaccacgacagcaacaagggcgugaccgccgccugcccccacgccggcgccaagagcuucuacaagaaccugaucuggcuggugaagaagggcaacagcuaccccaagcugagcaagagcuacaucaacgacaagggcaaggaggugcuggugcuguggggcauccaccaccccagcaccagcgccgaccagcagagccuguaccagaacgccgacgccuacguguucgugggcagcagcagauacagcaagaaguucaagcccgagaucgccaucagacccaaggugagagaccaggagggcagaaugaacuacuacuggacccugguggagcccggcgacaagaucaccuucgaggccaccggcaaccugguggugcccagauacgccuucgccauggagagaaacgccggcagcggcaucaucaucagcgacacccccgugcacgacugcaacaccaccugccagacccccaagggcgccaucaacaccagccugcccuuccacaacauccaccccaucaccaucggcaagugccccaaguacgugaagagcaccaagcugagacuggccaccggccugagaaacgugcccagcauccagaccagaggccuguucggcgccaucgccggcuucaucgagggcggcuggaccggcaugguggacggcugguacggcuaccaccaccagaacgagcagggcagcggcuacgccgccgaccugaagagcacccagaacgccaucgacgagaucaccaacaaggugaacagcgugaucgagaagaugaacacccaguucaccgccgugggcaaggaguucaaccaccuggagaagagaaucgagaaccugaacaagaagguggacgacggcuuccuggacaucuggaccuacaacgccgagcugcuggugcugcuggagaacgagagaacccuggacuaccacgacagcaacgugaagaaccuguacgagaaggugagaagccagcugaagaacaacgccaaggagaucggcaacggcugcuucgaguucuaccacaagugcgacaacaccugcauggagagcgugaagaacggcaccuacgacuaccccaaguacagcgaggaggccaagcugaacagagaggagaucgacggcgugaagcuggagagcaccagaaucuaccagauccuggccaucuacagcaccguggccagcagccuggugcugguggugagccugggcgccaucagcuucuggaugugcagcaacggcagccugcagugcagaaucugcaucuga

SEQ ID NO: 164611 - RNA, 1701 nt, Artificial Sequence; identical to SEQ ID NO: 162971
  derived and/or modified CDS sequence (opt4) from hemagglutinin__InfluenzaA__ADF27374

SEQ ID NO: 164612 - RNA, 1701 nt, Artificial Sequence
  derived and/or modified CDS sequence (opt4) from hemagglutinin__InfluenzaA__ADF27375
auggaggccauccugguggugcugcuguacaccuucgccaccgccaacgccgacacccugugcaucggcuaccacgccaacaacagcaccgacaccguggacaccgugcuggagaagaacgugaccgugacccacagcgugaaccugcuggaggacaagcacaacggcaagcugugcaagcugagaggcguggccccccugcaccugggcaagugcaacaucgccggcuggauccugggcaaccccgagugcgagagccugagcaccgccagcagcuggagcuacaucguggagaccagcagcagcgacaacggcaccugcuaccccggcgacuucaucgacuacgaggagcugagagagcagcugagcagcgugagcagcuucgagagauucgagaucuuccccaagaccagcagcuggcccaaccacgacagcaacaagggcgugaccgccgccugcccccacgccggcgccaagagcuucuacaagaaccugaucuggcuggugaagaagggcaacagcuaccccaagcugagcaagagcuacaucaacgacaagggcaaggaggugcuggugcuguggggcauccaccaccccagcaccagcgccgaccagcagagccuguaccagaacgccgacgccuacguguucgugggcagcagcagauacagcaagaaguucaagcccgagaucgccaucagacccaaggugagagaccaggagggcagaaugaacuacuacuggacccugguggagcccggcgacaagaucaccuucgaggccaccggcaaccugguggugcccagauacgccuucgccauggagagaaacgccggcagcggcaucaucaucagcgacacccccgugcacgacugcaacaccaccugccagacccccaagggcgccaucaacaccagccugcccuuccacaacauccaccccaucaccaucggcaagugccccaaguacgugaagagcaccaagcugagacuggccaccggccugagaaacgugcccagcauccagagcagaggccuguucggcgccaucgccggcuucaucgagggcggcuggaccggcaugguggacggcugguacggcuaccaccaccagaacgagcagggcagcggcuacgccgccgaccagaagagcacccagaacgccaucgacgagaucaccaacaagaucaacagcgugaucgagaagaugaacacccaguucaccgccgugggcaaggaguucaaccaccuggagaagagaaucgagaaccugaacaagaagguggacgacggcuuccuggacaucuggaccuacaacgccgagcugcuggugcugcuggagaacgagagaacccuggacuaccacgacagcaacgugaagaaccuguacgagaaggugagaagccagcugaagaacaacgccaaggagaucggcaacggcugcuucgaguucuaccacaagugcgacaacaccugcauggagagcgugaagaacggcaccuacgacuaccccaaguacagcgaggaggccaagcugaacagagaggagaucgacggcgugaagcuggagagcaccagaaucuaccagauccuggccaucuacagcaccguggccagcagccuggugcugguggugagccugggcgccaucagcuucuggaugugcagcaacggcagccugcagugcagaaucugcaucuga

SEQ ID NO: 164613 - RNA, 1701 nt, Artificial Sequence
  derived and/or modified CDS sequence (opt4) from hemagglutinin__InfluenzaA__ADF27376
augaaggccauccugguggugcugcuguacaccuucgugaccgccaacgccgacacccugugcaucggcuaccacgccaacaacagcaccgacaccguggacaccgugcuggagaagaacgugaccgugacccacagcgugaaccugcuggaggacaagcacaacggcaagcugugcaagcugagaggcguggccccccugcaccugggcaagugcaacaucgccggcuggauccugggcaaccccgagugcgagagccugagcaccgccagcagcuggagcuacaucguggagaccagcaacagcgacaacggcaccugcuaccccggcgacuucaucgacuacgaggagcugagagagcagcugagcagcgugagcagcuucgagagauucgagaucuuccccaagaccagcagcuggcccaaccacgacagcaacaagggcgugaccgccgccugcccccacgccggcgccaagagcuucuacaagaaccugaucuggcuggugaagaagggcaacagcuaccccaagcugagcaagagcuacaucaacgacaagggcaaggaggugcuggugcuguggggcauccaccaccccagcaccagcgccgaccagcagagccuguaccagaacgccgacgccuacguguucgugggcaccagcagauacagcaagaaguucaagcccgagaucgagaucagacccaaggugagagaccaggagggcagaaugaacuacuacuggacccugguggagcccggcgacaagaucaccuucgaggccaccggcaaccugguggugcccagauacgccuucgccauggagagaaacgccggcagcggcaucaucaucagcgacacccccgugcacgacugcaacaccaccugccagacccccaagggcgccaucaacaccagccugcccuuccagaacauccaccccaucaccaucggcaagugccccaaguacgugaagagcaccaagcugagacuggccaccggccugagaaacgugcccagcauccagagcagaggccuguucggcgccaucgccggcuucaucgagggcggcuggaccggcaugguggacggcugguacggcuaccaccaccagaacgagcagggcagcggcuacgccgccgaccugaagagcacccagaacgccaucgacaagaucaccaacaaggugaacagcgugaucgagaagaugaacacccaguucaccgccgugggcaaggaguucaaccaccuggagaagagaaucgagaaccugaacaagaagguggacgacggcuuccuggacaucuggaccuacaacgccgagcugcuggugcugcuggagaacgagagaacccuggacuaccacgacagcaacgugaagaaccuguacgagaaggugagaagccagcugaagaacaacgccaaggagaucggcaacggcugcuucgaguucuaccacaagugcgacaacaccugcauggagagcgugaagaacggcaccuacgacuaccccaaguacagcgaggaggccaagcugaacagagaggagaucgacggcgugaagcuggagagcaccagaaucuaccagauccuggccaucuacagcaccguggccagcagccuggugcugguggugagccugggcgccaucagcuucuggaugugcagcaacggcagccugcagugcagaaucugcaucuga

SEQ ID NO: 164614 - RNA, 1701 nt, Artificial Sequence
  derived and/or modified CDS sequence (opt4) from hemagglutinin__InfluenzaA__ADF27378
augaaggccauccugguggugcugcuguacaccuucgugaccgccaacgccgacacccugugcaucggcuaccacgccaacaacagcaccgacaccguggacaccgugcuggagaagaacgugaccgugacccacagcgugaaccugcuggaggacaagcacaacggcaagcugugcaagcugagaggcguggccccccugcaccugggcaagugcaacaucgccggcuggauccugggcaaccccgagugcgagagccugagcaccgccagcagcuggagcuacaucguggagaccagcaacagcgacaacggcaccugcuaccccggcgacuucaucgacuacgaggagcugagagagcagcugagcagcgugagcagcuucgagagauucgagaucuuccccaagaccagcagcuggcccaaccacgacagcaacaagggcgugaccgccgccugcccccacgccggcgccaagagcuucuacaagaaccugaucuggcuggugaagaagggcaacagcuaccccaagcugagcaagagcuacaucaacgacaagggcaaggaggugcuggugcuguggggcauccaccaccccagcaccagcgccgaccagcagagccuguaccagaacgccgacgccuacguguucgugggcaccagcagauacagcaagaaguucaagcccgagaucgccaucagacccaaggugagagaccaggagggcagaaugaacuacuacuggacccugguggagcccggcgacaagaucaccuucgaggccaccggcaaccugguggugcccagauacgccuucgccauggagagaaacgccggcagcggcaucaucaucagcgacacccccgugcacgacugcaacaccaccugccagacccccaagggcgccaucaacaccagccugcccuuccagaacauccaccccaucaccaucggcaagugccccaaguacgugaagagcaccaagcugagacuggccaccggccugagaaacgugcccagcauccagagcagaggccuguucggcgccaucgccggcuucaucgagggcggcuggaccggcaugguggacggcugguacggcuaccaccaccagaacgagcagggcagcggcuacgccgccgaccugaagagcacccagaacgccaucgacaagaucaccaacaaggugaacagcgugaucgagaagaugaacacccaguucaccgccgugggcaaggaguucaaccaccuggagaagagaaucgagaaccugaacaagaagguggacgacggcuuccuggacaucuggaccuacaacgccgagcugcuggugcugcuggagaacgagagaacccuggacuaccacgacagcaacgugaagaaccuguacgagaaggugagaagccagcugaagaacaacgccaaggagaucggcaacggcugcuucgaguucuaccacaagugcgacaacaccugcauggagagcgugaagaacggcaccuacgacuaccccaaguacagcgaggaggccaagcugaacagagaggagaucgacggcgugaagcuggagagcaccagaaucuaccagauccuggccaucuacagcaccguggccagcagccuggugcugguggugagccugggcgccaucagcuucuggaugugcagcaacggcagccugcagugcagaaucugcaucuga

SEQ ID NO: 164615 - RNA, 1701 nt, Artificial Sequence
  derived and/or modified CDS sequence (opt4) from hemagglutinin__InfluenzaA__ADF27389
augaaggccauccugguggugcugcuguacaccuucgccaccgccaacgccgacacccugugcaucggcuaccacgccaacaacagcaccgacaccguggacaccgugcuggagaagaacgugaccgugacccacagcgugaaccugcuggaggacaagcacaacggcaagcugugcaagcugagaggcguggccccccugcaccugggcaagugcaacaucgccggcuggauccugggcaaccccgagugcgagagccugagcaccgccagcagcuggagcuacaucguggagaccagcagcagcgacaacggcaccugcuaccccggcgacuucaucgacuacgaggagcugagagagcagcugagcagcgugagcagcuucgagagauucgagaucuuccccaagaccagcagcuggcccaaccacgacagcaacaagggcgugaccgccgccugcccccacgccggcgccaagagcuucuacaagaaccugaucuggcuggugaagaagggcaacagcuaccccaagcugagcaagagcuacaucaacgacaagggcaaggaggugcuggugcuguggggcauccaccaccccagcaccagcgccgaccagcagagccuguaccagaacgccgacgccuacguguucgugggcaccagcagauacagcaagaaguucaagcccgagaucgccaucagacccaaggugagagaccaggagggcagaaugaacuacuacuggacccugguggagcccggcgacaagaucaccuucgaggccaccggcaaccugguggugcccagauacgccuucgccauggagagaaacgccggcagcggcaucaucaccagcgacacccccgugcacgacugcaacaccaccugccagacccccaagggcgccaucaacaccagccugcccuuccagaacauccaccccaucaccaucggcaagugccccaaguacgugaagagcaccaagcugagacuggccaccggccugagaaacgugcccagcauccagagcagaggccuguucggcgccaucgccggcuucaucgagggcggcuggaccggcaugguggacggcugguacggcuaccaccaccagaacgagcagggcagcggcuacgccgccgaccugaagagcacccagaacgccaucgacgagaucaccaacaaggugaacagcgugaucgagaagaugaacacccaguucaccgccgugggcaaggaguucaaccaccuggagaagagaaucgagaaccugaacaagaagguggacgacggcuuccuggacaucuggaccuacaacgccgagcugcuggugcugcuggagaacgagagaacccuggacuaccacgacagcaacgugaagaaccuguacgagaaggugagaagccagcugaagaacaacgccaaggagaucggcaacggcugcuucgaguucuaccacaagugcgacaacaccugcauggagagcgugaagaacggcaccuacgacuaccccaaguacagcgaggaggccaagcugaacagagaggagaucgacggcgugaagcuggagagcaccagaaucuaccagauccuggccaucuacagcaccguggccagcagccuggugcugguggugagccugggcgccaucagcuucuggaugugcagcaacggcagccugcagugcagaaucugcaucuga

SEQ ID NO: 164616 - RNA, 1701 nt, Artificial Sequence
  derived and/or modified CDS sequence (opt4) from hemagglutinin__InfluenzaA__ADF27399
augaaggccauccugguggugcugcuguacaccuucgccaccgccaacgccgacacccugugcaucggcuaccacgccaacaacagcaccgacaccguggacaccgugcuggagaagaacgugaccgugacccacagcgugaaccugcuggaggacaagcacaacggcaagcugugcaagcugagaggcguggccccccugcaccugggcaagugcaacaucgccggcuggauccugggcaaccccgagugcgagagccugagcaccgccagcagcuggagcuacaucguggagaccagcagcagcgacaacggcaccugcuaccccggcgacuucaucgacuacgaggagcugagagagcagcugagcagcgugagcagcuucgagagauucgagaucuuccccaagaccagcagcuggcccaaccacgacagcaacaagggcgugaccgccgccugcccccacgccggcgccaagagcuucuacaagaaccugaucuggcuggugaagaagggcaacagcuaccccaagcugagcaagagcuacaucaacgacaagggcaaggaggugcuggugcuguggggcauccaccaccccagcaccagcgccgaccagcagagccuguaccagaacgccgacgccuacguguucgugggcaccagcagauacagcaagaaguucaagcccgagaucgccaucagacccaaggugagagaccaggagggcagaaugaacuacuacuggacccugguggagcccggcgacaagaucaccuucgaggccaccggcaaccugguggugcccagauacgccuucgccauggagagaaacgccggcagcggcaucaucaucagcgacacccccgugcacgacugcaacaccaccugccagacccccaagggcgccaucaacaccagccugcccuuccagaacauccaccccaucaccaucggcgagugccccaaguacgugaagagcaccaagcugagacuggccaccggccugagaaacgugcccagcauccagagcagaggccuguucggcgccaucgccggcuucaucgagggcggcuggaccggcaugguggacggcugguacggcuaccaccaccagaacgagcagggcagcggcuacgccgccgaccugaagagcacccagaacgccaucgacgagaucaccaacaaggugaacagcgugaucgagaagaugaacacccaguucaccgccgugggcaaggaguucaaccaccuggagaagagaaucgagaaccugaacaagaagguggacgacggcuuccuggacaucuggaccuacaacgccgagcugcuggugcugcuggagaacgagagaacccuggacuaccacgacagcaacgugaagaaccuguacgagaaggugagaagccagcugaagaacaacgccaaggagaucggcaacggcugcuucgaguucuaccacaagugcgacaacaccugcauggagagcgugaagaacggcaccuacgacuaccccaaguacagcgaggaggccaagcugaacagagaggagaucgacggcgugaagcuggagagcaccagaaucuaccagauccuggccaucuacagcaccguggccagcagccuggugcugguggugagccugggcgccaucagcuucuggaugugcagcaacggcagccugcagugcagaaucugcaucuga

SEQ ID NO: 164617 - RNA, 1701 nt, Artificial Sequence; identical to SEQ ID NO: 163893
  derived and/or modified CDS sequence (opt4) from hemagglutinin__InfluenzaA__ADF27409

SEQ ID NO: 164618 - RNA, 1701 nt, Artificial Sequence; identical to SEQ ID NO: 164601
  derived and/or modified CDS sequence (opt4) from hemagglutinin__InfluenzaA__ADF27419

SEQ ID NO: 164619 - RNA, 1701 nt, Artificial Sequence
  derived and/or modified CDS sequence (opt4) from hemagglutinin__InfluenzaA__ADF27429
augaaggccauccugguggugcugcuguacaccuucgccaccgccaacgccgacacccugugcaucggcuaccacgccaacaacagcaccgacaccguggacaccgugcuggagaagaacgugaccgugacccacagcgugaaccugcuggaggacaagcacaacggcaagcugugcaagcugagaggcguggccccccugcaccugggcaagugcaacaucgccggcuggauccugggcaaccccgagugcgagagccugagcaccgccagcagcuggagcuacaucguggagaccagcagcagcgacaacggcaccugcuaccccggcgacuucaucgacuacgaggagcugagagagcagcugagcagcgugagcagcuucgagagauucgagaucuuccccaagaccagcagcuggcccaaccacgacagcaacaagggcgugaccgccgccugcccccacgccggcgccaagagcuucuacaagaaccugaucuggcuggugaagaagggcaacagcuaccccaagcugagcaaguucuacaucaacgacaagggcaaggaggugcuggugcuguggggcauccaccaccccagcaccagcgccgaccagcagagccuguaccagaacgccgacgccuacguguucgugggcaccagcagauacagcaagaaguucaagcccgagaucgccaucagacccaaggugagagaccaggagggcagaaugaacuacuacuggacccugguggagcccggcgacaagaucaccuucgaggccaccggcaaccugguggugcccagauacgccuucgccauggagagaaacgccggcagcggcaucaucaucagcgacacccccgugcacgacugcaacaccaccugccagacccccaagggcgccaucaacaccagccugcccuuccagaacauccaccccaucaccaucggcaagugccccaaguacgugaagagcaccaagcugagacuggccaccggccugagaaacgugcccagcauccagagcagaggccuguucggcgccaucgccggcuucaucgagggcggcuggaccggcaugguggacggcugguacggcuaccaccaccagaacgagcagggcagcggcuacgccgccgaccugaagagcacccagaacgccaucgacaagaucaccaacaaggugaacagcgugaucgagaagaugaacacccaguucaccgccgugggcaaggaguucaaccaccuggagaagagaaucgagaaccugaacaagaagguggacgacggcuuccuggacaucuggaccuacaacgccgagcugcuggugcugcuggagaacgagagaacccuggacuaccacgacagcaacgugaagaaccuguacgagaaggugagaagccagcugaagaacaacgccaaggagaucggcaacggcugcuucgaguucuaccacaagugcgacaacaccugcaugaagagcgugaagaacggcaccuacgacuaccccaaguacagcgaggaggccaagcugaacagagaggagaucgacggcgugaagcuggagagcaccagaaucuaccagauccuggccaucuacagcaccguggccagcagccuggugcugguggugagccugggcgccaucagcuucuggaugugcagcaacggcagccugcagugcagaaucugcaucuga

SEQ ID NO: 164620 - RNA, 1701 nt, Artificial Sequence; identical to SEQ ID NO: 162729
  derived and/or modified CDS sequence (opt4) from hemagglutinin__InfluenzaA__ADF27439

SEQ ID NO: 164621 - RNA, 1701 nt, Artificial Sequence
  derived and/or modified CDS sequence (opt4) from hemagglutinin__InfluenzaA__ADF27449
augaaggccauccugguggugcugcuguacaccuucgccaccgugaacgccgacacccugugcaucggcuaccacgccaacaacagcaccgacaccguggacaccgugcuggagaagaacgugaccgugacccacagcgugaaccugcuggaggacaagcacaacggcaagcugugcaagcugagaggcguggccccccugcaccugggcaagugcaacaucgccggcuggauccugggcaaccccgagugcgagagccugagcaccgccagcagcuggagcuacaucguggagaccagcagcagcgacaacggcaccugcuaccccggcgacuucaucgacuacgaggagcugagagagcagcugagcagcgugagcagcuucgagagauucgagaucuuccccaagaccagcagcuggcccaaccacgacagcaacaagggcgugaccgccgccugcccccacgccggcgccaagagcuucuacaagaaccugaucuggcuggugaagaagggcaacagcuaccccaagcugagcaagagcuacaucaacgacaagggcaaggaggugcuggugcuguggggcauccaccaccccagcaccagcgccgaccagcagagccuguaccagaacgccgacgccuacguguucgugggcaccagcagauacagcaagaaguucaagcccgagaucgccaucagacccaaggugagagaccaggagggcagaaugaacuacuacuggacccugguggagcccggcgacaagaucaccuucgaggccaccggcaaccugguggugcccagauacgccuucgccauggagagaaacgccggcagcggcaucaucaucagcgacacccccgugcacgacugcaacaccaccugccagacccccaagggcgccaucaacaccagccugcccuuccagaacauccaccccaucaccaucggcaagugccccaaguacgugaagagcaccaagcugagacuggccaccggccugagaaacauccccagcauccagagcagaggccuguucggcgccaucgccggcuucaucgagggcggcuggaccggcaugguggacggcugguacggcuaccaccaccagaacgagcagggcagcggcuacgccgccgaccugaagagcacccagaacgccaucgacgagaucaccaacaaggugaacagcgugaucgagaagaugaacacccaguucaccgccgugggcaaggaguucaaccaccuggagaagagaaucgagaaccugaacaagaagguggacgacggcuuccuggacaucuggaccuacaacgccgagcugcuggugcugcuggagaacgagagaacccuggacuaccacgacagcaacgugaagaaccuguacgagaaggugagaagccagcugaagaacaacgccaaggagaucggcaacggcugcuucgaguucuaccacaagugcgacaacaccugcauggagagcgugaagaacggcaccuacgacuaccccaaguacagcgaggaggccaagcugaacagagaggagaucgacggcgugaagcuggagagcaccagaaucuaccagauccuggccaucuacagcaccguggccagcagccuggugcugguggugagccugggcgccaucagcuucuggaugugcagcaacggcagccugcagugcagaaucugcaucuga

SEQ ID NO: 164622 - RNA, 1701 nt, Artificial Sequence; identical to SEQ ID NO: 163889
  derived and/or modified CDS sequence (opt4) from hemagglutinin__InfluenzaA__ADF27459

SEQ ID NO: 164623 - RNA, 1701 nt, Artificial Sequence; identical to SEQ ID NO: 162729
  derived and/or modified CDS sequence (opt4) from hemagglutinin__InfluenzaA__ADF27469

SEQ ID NO: 164624 - RNA, 1701 nt, Artificial Sequence
  derived and/or modified CDS sequence (opt4) from hemagglutinin__InfluenzaA__ADF27479
augaaggccauccugguggugcugcuguacaccuucgccaccgccaacgccgacacccugugcaucggcuaccacgccaacaacagcaccgacaccguggacaccgugcuggagaagaacgugaccgugacccacagcgugaaccugcuggaggacaagcacaacggcaagcugugcaagcugagaggcguggccccccugcaccugggcaagugcaacaucgccggcuggauccugggcaaccccgagugcgagagccugagcaccgccagcagcuggagcuacaucguggagaccagcagcagcgacaacggcaccugcuaccccggcgacuucaucgacuacgaggagcugagagagcagcugagcagcgugagcagcuucgagagauucgagaucuuccccaagaccagcagcuggcccaaccacgacagcaacaagggcgugaccgccgccugcccccacgccggcgccaagagcuucuacaagaaccugaucuggcuggugaagaagggcaacagcuaccccaagcugagcaagagcuacaucaacgacaagggcaaggaggugcuggugcuguggggcauccaccaccccagcaccagcgccgaccagcagagccuguaccagaacgccgacgccuacguguucgugggcaccagcagauacagcaagaaguucaagcccgagaucgccaucagacccaaggugagagaccaggagggcagaaugaacuacuacuggacccugguggagcccggcgacaagaucaccuucgaggccaccggcaaccugguggugcccagauacgccuucgccauggagagaaacgccggcagcggcaucaucaucagcgacacccccgugcacgacugcaacaccaccugccagacccccaagggcgccaucaacaccagccugcccuuccagaacauccaccccaucaccaucggcaagugccccaaguacgugaagagcaccaagcugagacuggccaccggccugagaaacgugcccagcauccacagcagaggccuguucggcgccaucgccggcuucaucgagggcggcuggaccggcaugguggacggcugguacggcuaccaccaccagaacgagcagggcagcggcuacgccgccgaccugaagagcacccagaacgccaucgacaagaucaccaacaaggugaacagcgugaucgagaagaugaacacccaguucaccgccgugggcaaggaguucaaccaccuggagaagagaaucgagaaccugaacaagaagguggacgacggcuuccuggacaucuggaccuacaacgccgagcugcuggugcugcuggagaacgagagaacccuggacuaccacgacagcaacgugaagaaccuguacgagaaggugagaagccagcugaagaacaacgccaaggagaucggcaacggcugcuucgaguucuaccacaagugcgacaacaccugcauggagagcgugaagaacggcaccuacgacuaccccaaguacagcgaggaggccaagcugaacagagaggagaucgacggcgugaagcuggagagcaccagaaucuaccagauccuggccaucuacagcaccguggccagcagccuggugcugguggugagccugggcgccaucagcuucuggaugugcagcaacggcagccugcagugcagaaucugcaucuga

SEQ ID NO: 164625 - RNA, 1701 nt, Artificial Sequence
  derived and/or modified CDS sequence (opt4) from hemagglutinin__InfluenzaA__ADF27489
augaaggccauccugguggugcugcuguacaccuucgccaccgccaacgccgacacccugugcaucggcuaccacgccaacaacagcaccgacaccguggacaccgugcuggagaagaacgugaccgugacccacagcgugaaccugcuggaguacaagcacaacggcaagcugugcaagcugagaggcguggccccccugcaccugggcaagugcaacaucgccggcuggauccugggcaaccccgagugcgagagccugagcaccgccagcagcuggagcuacaucguggagaccagcagcagcgacaacggcaccugcuaccccggcgacuucaucgacuacgaggagcugagagagcagcugagcagcgugagcagcuucgagagauucgagaucuuccccaagaccagcagcuggcccaaccacgacagcaacaagggcgugaccgccgccugcccccacgccggcgccaagagcuucuacaagaaccugaucuggcuggugaagaagggcaacagcuaccccaagcugagcaagagcuacaucaacgacaagggcaaggaggugcuggugcuguggggcauccaccaccccagcaccagcgccgaccagcagagccuguaccagaacgccgacgccuacguguucgugggcaccagcagauacagcaagaaguucaagcccgagaucgccaucagacccaaggugagagaccaggagggcagaaugaacuacuacuggacccugguggagcccggcgacaagaucaccuucgaggccaccggcaaccugguggugcccagauacgccuucgccauggagagaaacgccggcagcggcaucaucaucagcgacacccccgugcacgacugcaacaccaccugccagacccccaagggcgccaucaacaccagccugcccuuccagaacauccaccccaucaccaucggcgagugccccaaguacgugaagagcaccaagcugagacuggccaccggccugagaaacgugcccagcauccagagcagaggccuguucggcgccaucgccggcuucaucgagggcggcuggaccggcaugguggacggcugguacggcuaccaccaccagaacgagcagggcagcggcuacgccgccgaccugaagagcacccagaacgccaucgacgagaucaccaacaaggugaacagcgugaucgagaagaugaacacccaguucaccgccgugggcaaggaguucaaccaccuggagaagagaaucgagaaccugaacaagaagguggacgacggcuuccuggacaucuggaccuacaacgccgagcugcuggugcugcuggagaacgagagaacccuggacuaccacgacagcaacgugaagaaccuguacgagaaggugagaagccagcugaagaacaacgccaaggagaucggcaacggcugcuucgaguucuaccacaagugcgacaacaccugcauggagagcgugaagaacggcaccuacgacuaccccaaguacagcgaggaggccaagcugaacagagaggagaucgacggcgugaagcuggagagcaccagaaucuaccagauccuggccaucuacagcaccguggccagcagccuggugcugguggugagccugggcgccaucagcuucuggaugugcagcaacggcagccugcagugcagaaucugcaucuga

SEQ ID NO: 164626 - RNA, 1701 nt, Artificial Sequence; identical to SEQ ID NO: 163893
  derived and/or modified CDS sequence (opt4) from hemagglutinin__InfluenzaA__ADF27499

SEQ ID NO: 164627 - RNA, 1701 nt, Artificial Sequence; identical to SEQ ID NO: 162729
  derived and/or modified CDS sequence (opt4) from hemagglutinin__InfluenzaA__ADF27509

SEQ ID NO: 164628 - RNA, 1701 nt, Artificial Sequence; identical to SEQ ID NO: 164326
  derived and/or modified CDS sequence (opt4) from hemagglutinin__InfluenzaA__ADF27529

SEQ ID NO: 164629 - RNA, 1701 nt, Artificial Sequence; identical to SEQ ID NO: 163901
  derived and/or modified CDS sequence (opt4) from hemagglutinin__InfluenzaA__ADF27539

SEQ ID NO: 164630 - RNA, 1701 nt, Artificial Sequence; identical to SEQ ID NO: 163901
  derived and/or modified CDS sequence (opt4) from hemagglutinin__InfluenzaA__ADF27549

SEQ ID NO: 164631 - RNA, 1701 nt, Artificial Sequence; identical to SEQ ID NO: 162729
  derived and/or modified CDS sequence (opt4) from hemagglutinin__InfluenzaA__ADF27559

SEQ ID NO: 164632 - RNA, 1701 nt, Artificial Sequence
  derived and/or modified CDS sequence (opt4) from hemagglutinin__InfluenzaA__ADF27569
augaaggccauccugguggugcugcuguacaccuucgccaccgccaacgccgacacccugugcaucggcuaccacgccaacaacagcaccgacaccguggacaccgugcuggagaagaacgugaccgugacccacagcgugaaccugcuggaggacaagcacaacggcaagcugugcaagcugagaggcguggccccccugcaccugggcaagugcaacaucgccggcuggauccugggcaaccccgagugcgagagccugagcaccgccagcagcuggagcuacaucguggagaccagcagcagcgacaacggcaccugcuaccccggcgacuucaucgacuacgaggagcugagagagcagcugagcagcgugagcagcuucgagagauucgagaucuuccccaagaccagcagcuggcccaaccacgacagcaacaagggcgugaccgccgccugcccccacgccggcgccaagagcuucuacaagaaccugaucuggcuggugaagaagggcaacagcuaccccaagcugagcaagagcuacaucaacgacaagggcaaggaggugcuggugcuguggggcauccaccaccccagcaccagcgccgaccagcagagccuguaccagaacgccgacgccuacguguucgugggcaccagcagauacagcaagaaguucaagcccgagaucgccaucagacccaaggugagagaccaggagggcagagugaacuacuacuggacccugguggagcccggcgacaagaucaccuucgaggccaccggcaaccugguggugcccagauacgccuucgccauggagagaaacgccggcagcggcaucaucaucagcgacacccccgugcacgacugcaacaccaccugccagacccccaagggcgccaucaacaccagccugcccuuccagaacauccaccccaucaccaucggcaagugccccaaguacgugaagagcaccaagcugagacuggccaccggccugagaaacgugcccagcauccagagcagaggccuguucggcgccaucgccggcuucaucgagggcggcuggaccggcaugguggacggcugguacggcuaccaccaccagaacgagcagggcagcggcuacgccgccgaccugaagagcacccagaacgccaucgacaagaucaccaacaaggugaacagcgugaucgagaagaugaacacccaguucaccgccgugggcaaggaguucaaccaccuggagaagagaaucgagaaccugaacaagaagguggacgacggcuuccuggacaucuggaccuacaacgccgagcugcuggugcugcuggagaacgagagaacccuggacuaccacgacagcaacgugaagaaccuguacgagaaggugagaagccagcugaagaacaacgccaaggagaucggcaacggcugcuucgaguucuaccacaagugcgacaacaccugcauggagagcgugaagaacggcaccuacgacuaccccaaguacagcgaggaggccaagcugaacagagaggagaucgacggcgugaagcuggagagcaccagaaucuaccagauccuggccaucuacagcaccguggccagcagccuggugcugguggugagccugggcgccaucagcuucuggaugugcagcaacggcagccugcagugcagaaucugcaucuga

SEQ ID NO: 164633 - RNA, 1701 nt, Artificial Sequence; identical to SEQ ID NO: 163901
  derived and/or modified CDS sequence (opt4) from hemagglutinin__InfluenzaA__ADF27579

SEQ ID NO: 164634 - RNA, 1701 nt, Artificial Sequence
  derived and/or modified CDS sequence (opt4) from hemagglutinin__InfluenzaA__ADF27589
augaaggccauccugguggugcugcuguacaccuucgccaccgccaacgccgacacccugugcaucggcuaccacgccaacaacagcaccgacaccguggacaccgugcuggagaagaacgugaccgugacccacagcgugaaccugcuggaggacaagcacaacggcaagcugugcaagcugagaggcguggccccccugcaccugggcaagugcaacaucgccggcuggauccugggcaaccccgagugcgagagccugagcaccgccagcagcuggagcuacaucguggagaccagcagcagcgacaacggcaccugcuaccccggcgacuucaucgacuacgaggagcugagagagcagcugagcagcgugagcagcuucgagagauucgagaucuuccccaagaccagcagcuggcccaaccacgacagcaacaagggcgugaccgccgccugcccccacgccggcgccaagagcuucuacaagaaccugaucuggcuggugaagaagggcaacagcuaccccaagcugagcaagagcuacaucaacgacaagggcaaggaggugcuggugcuguggggcauccaccaccccagcaccagcgccgaccagcagagccuguaccagaacgccgacgccuacguguucgugggcaccagcagauacagcaagaaguucaagcccgagaucgccaucagacccaaggugagagaccaggagggcagaaugaacuacuacuggacccugguggagcccggcgacaagaucaccuucgaggccaccggcaaccugguggugcccagauacgccuucgccauggagagaaacgccggcagcggcaucaucaucagcgacaccagcgugcacgacugcaacaccaccugccagacccccaagggcgccaucaacaccagccugcccuuccagaacauccaccccaucaccaucggcaagugccccaaguacgugaagagcaccaagcugagacuggccaccggccugagaaacgugcccagcauccagagcagaggccuguucggcgccaucgccggcuucaucgagggcggcuggaccggcaugguggacggcugguacggcuaccaccaccagaacgagcagggcagcggcuacgccgccgaccugaagagcacccagaacgccaucgacgagaucaccaacaaggugaacagcgugaucgagaagaugaacacccaguucaccgccgugggcaaggaguucaaccaccuggagaagagaaucgagaaccugaacaagaagguggacgacggcuuccuggacaucuggaccuacaacgccgagcugcuggugcugcuggagaacgagagaacccuggacuaccacgacagcaacgugaagaaccuguacgagaaggugagaagccagcugaagaacaacgccaaggagaucggcaacggcugcuucgaguucuaccacaagugcgacaacaccugcauggagagcgugaagaacggcaccuacgacuaccccaaguacagcgaggaggccaagcugaacagagaggagaucgacggcgugaagcuggagagcaccagaaucuaccagauccuggccaucuacagcaccguggccagcagccuggugcugguggugagccugggcgccaucagcuucuggaugugcagcaacggcagccugcagugcagaaucugcaucuga

SEQ ID NO: 164635 - RNA, 1701 nt, Artificial Sequence
  derived and/or modified CDS sequence (opt4) from hemagglutinin__InfluenzaA__ADF27599
augaaggccauccugguggugcugcuguacaccuucgccaccgccaacgccgacacccugugcaucggcuaccacgccaacaacagcaccgacaccguggacaccgugcuggagaagaacgugaccgugacccacagcgugaaccugcuggaggacaagcacaacggcaagcugugcaagcugagaggcguggccccccugcaccugggcaagugcaacaucgccggcuggauccugggcaaccccgagugcgagagccugagcaccgccagcagcuggagcuacaucguggagaccagcagcagcgacaacggcaccugcuaccccggcgacuucaucgacuacgaggagcugagagagcagcugagcagcgugagcagcuucgagagauucgagaucuuccccaagaccagcagcuggcccaaccacgacagcaacaagggcgugaccgccgccugcccccacgccggcgccaagagcuucuacaagaaccugaucuggcuggugaagaagggcaacagcuaccccaagcugagcaagagcuacaucaacgacaagggcaaggaggugcuggugcuguggggcauccaccaccccagcaccagcgccgaccagcagagccuguaccagaacgccgacgccuacguguucgugggcaccagcagauacagcaagaaguucaagcccgagaucgccaucagacccaaggugagagaccaggagggcagaaugaacuacuacuggacccugguggagcccggcgacaagaucaccuucgaggccaccggcaaccugguggugcccagauacgccuucaccauggagagaaacgccggcagcggcaucaucaucagcgacacccccgugcacgacugcaacaccaccugccagacccccaagggcgccaucaacaccagccugcccuuccagaacauccaccccaucaccaucggcaagugccccaaguacgugaagagcaccaagcugagacuggccaccggccugagaaacgugcccagcauccagagcagaggccuguucggcgccaucgccggcuucaucgagggcggcuggaccggcaugguggacggcugguacggcuaccaccaccagaacgagcagggcagcggcuacgccgccgaccugaagagcacccagaacgccaucgacgagaucaccaacaaggugaacagcgugaucgagaagaugaacacccaguucaccgccgugggcaaggaguucaaccaccuggagaagagaaucgagaaccugaacaagaagguggacgacggcuuccuggacaucuggaccuacaacgccgagcugcuggugcugcuggagaacgagagaacccuggacuaccacgacagcaacgugaagaaccuguacgagaaggugagaagccagcugaagagcaacgccaaggagaucggcaacggcugcuucgaguucuaccacaagugcgacaacaccugcauggagagcgugaagaacggcaccuacgacuaccccaaguacagcgaggaggccaagcugaacagagaggagaucgacggcgugaagcuggagagcaccagaaucuaccagauccuggccaucuacagcaccguggccagcagccuggugcugguggugagccugggcgccaucagcuucuggaugugcagcaacggcagccugcagugcagaaucugcaucuga

SEQ ID NO: 164636 - RNA, 1701 nt, Artificial Sequence
  derived and/or modified CDS sequence (opt4) from hemagglutinin__InfluenzaA__ADF27609
augaaggccauccugguggugcugcuguacaccuucgccaccgccaacgccgacacccugugcaucggcuaccacgccaacaacagcaccgacaccguggacaccgugcuggagaagaacgugaccgugacccacagcgugaaccugcuggaggacaagcacaacggcaagcugugcaagcugagaggcguggccccccugcaccugggcaagugcaacaucgccggcuggauccugggcaaccccgagugcgagagccugagcaccgccagcagcuggagcuacaucguggagaccagcagcagcgacaacggcaccugcuaccccggcgacuucaucgacuacgaggagcugagagagcagcugagcagcgugagcagcuucgagagauucgagaucuuccccaagaccagcagcuggcccaaccacgacagcaacaagggcgugaccgccgccugcccccaggccggcgccaagagcuucuacaagaaccugaucuggcuggugaagaagggcaacagcuaccccaagcugagcaagagcuacaucaacgacaagggcaaggaggugcuggugcuguggggcauccaccaccccagcaccagcgccgaccagcagagccuguaccagaacgccgacgccuacguguucgugggcaccagcagauacagcaagaaguucaagcccgagaucgccaucagacccaaggugagagaccaggagggcagaaugaacuacuacuggacccugguggagcccggcgacaagaucaccuucgaggccaccggcaaccugguggugcccagauacgccuucgccauggagagaaacgccggcagcggcaucaucaucagcgacacccccgugcacgacugcaacaccaccugccagacccccaagggcgccaucaacaccagccugcccuuccagaacauccaccccaucaccaucggcaagugccccaaguacgugaagagcaccaagcugagacuggccaccggccugagaaacgugcccagcauccagagcagaggccuguucggcgccaucgccggcuucaucgagggcggcuggaccggcaugguggacggcugguacggcuaccaccaccagaacgagcagggcagcggcuacgccgccgaccugaagagcacccagaacgccaucgacgagaucaccaacaaggugaacagcgugaucgagaagaugaacacccaguucaccgccgugggcaaggaguucaaccaccuggagaagagaaucgagaaccugaacaagaagguggacgacggcuuccuggacaucuggaccuacaacgccgagcugcuggugcugcuggagaacgagagaacccuggacuaccacgacagcaacgugaagaaccuguacgagaaggugagaagccagcugaagaacaacgccaaggagaucggcaacggcugcuucgaguucuaccacaagugcgacaacaccugcauggagagcgugaagaacggcaccuacgacuaccccaaguacagcgaggaggccaagcugaacagagaggagaucgacggcgugaagcuggagagcaccagaaucuaccagauccuggccaucuacagcaccguggccagcagccuggugcugguggugagccugggcgccaucagcuucuggaugugcagcaacggcagccugcagugcagaaucugcaucuga

SEQ ID NO: 164637 - RNA, 1701 nt, Artificial Sequence
  derived and/or modified CDS sequence (opt4) from hemagglutinin__InfluenzaA__ADF27619
augaaggccauccugguggugcugcuguacaccuucgccaccgccaacgccgacacccugugcaucggcuaccacgccaacaacagcaccgacaccguggacaccgugcuggagaagaacgugaccgugacccacagcgugaaccugcuggaggacaagcacaacggcaagcugugcaagcugagaggcguggugccccugcaccugggcaagugcaacaucgccggcuggauccugggcaaccccgagugcgagagccugagcaccgccagcagcuggagcuacaucguggagaccagcagcagcgacaacggcaccugcuaccccggcgacuucaucgacuacgaggagcugagagagcagcugagcagcgugagcagcuucgagagauucgagaucuuccccaagaccagcagcuggcccaaccacgacagcaacaagggcgugaccgccgccugcccccacgccggcgccaagagcuucuacaagaaccugaucuggcuggugaagaagggcaacagcuaccccaagcugagcaagagcuacaucaacgacaagggcaaggaggugcuggugcuguggggcauccaccaccccagcaccagcgccgaccagcagagccuguaccagaacgccgacgccuacguguucgugggcaccagcagauacagcaagaaguucaagcccgagaucgccaucagacccaaggugagagaccaggagggcagaaugaacuacuacuggacccugguggagcccggcgacaagaucaccuucgaggccaccggcaaccugguggugcccagauacgccuucgccauggagagaaacgccggcagcggcaucaucaucagcgacacccccgugcacgacugcaacaccaccugccagacccccaagggcgccaucaacaccagccugcccuuccagaacauccaccccaucaccaucggcaagugccccaaguacgugaagagcaccaagcugagacuggccaccggccugagaaacgugcccagcauccagagcagaggccuguucggcgccaucgccggcuucaucgagggcggcuggaccggcaugguggacggcugguacggcuaccaccaccagaacgagcagggcagcggcuacgccgccgaccugaagagcacccagaacgccaucgacaagaucaccaacaaggugaacagcgugaucgagaagaugaacacccaguucaccgccgugggcaaggaguucaaccaccuggagaagagaaucgagaaccugaacaagaagguggacgacggcuuccuggacaucuggaccuacaacgccgagcugcuggugcugcuggagaacgagagaacccuggacuaccacgacagcaacgugaagaaccuguacgagaaggugagaagccagcugaagaacaacgccaaggagaucggcaacggcugcuucgaguucuaccacaagugcgacaacaccugcauggagagcgugaagaacggcaccuacgacuaccccaaguacagcgaggaggccaagcugaacagagaggagaucgacggcgugaagcuggagagcaccagaaucuaccagauccuggccaucuacagcaccguggccagcagccuggugcugguggugagccugggcgccaucagcuucuggaugugcagcaacggcagccugcagugcagaaucugcaucuga

SEQ ID NO: 164638 - RNA, 1701 nt, Artificial Sequence; identical to SEQ ID NO: 163901
  derived and/or modified CDS sequence (opt4) from hemagglutinin__InfluenzaA__ADF27629

SEQ ID NO: 164639 - RNA, 1701 nt, Artificial Sequence
  derived and/or modified CDS sequence (opt4) from hemagglutinin__InfluenzaA__ADF27649
augaaggccauccugguggugcugcuguacaccuucgccaccgccaacgccgacacccugugcaucggcuaccacgccaacaacagcaccgacaccguggacaccgugcuggagaagaacgugaccgugacccacagcgugaaccugcuggaggacaagcacaacggcaagcugugcaagcugagaggcguggccccccugcaccugggcaagugcaacaucgccggcuggauccugggcaaccccgagugcgagagccugagcaccgccagcagcuggagcuacaucguggagaccagcagcagcgacaacggcaccugcuaccccggcgacuucaucgacuacgaggagcugagagagcagcugagcagcgugagcagcuucgagagauucgagaucuuccccaagaccagcagcuggcccaaccacgacagcaacaagggcgugaccgccgccugcccccacgccggcgccaagagcuucuacaagaaccugaucuggcuggugaagaagggcaacagcuaccccaagcugagcaagagcuacaucaacgacaagggcaaggaggugcuggugcuguggggcauccaccaccccagcaccagcgccgaccagcagagccuguaccagaacgccgacgccuacguguucgugggcaccagcagauacagcaagaaguucaagcccgagaucgccaucagacccaaggugagagaccaggagggcagaaugaacuacuacuggacccugguggagcccggcgacaagaucaccuucgaggccaccggcaaccugguggugcccagauacgccuucgccauggagagaaacgccggcagcggcaucaucaucagcgacacccccgugcacgacugcaacaccaccugccagacccccaagggcgccaucaacaccagccugcccuuccagaacauccaccccaucaccaucggcaagugccccaaguacgugaagagcaccaagcugagacuggccaccggccugagaaacgugcccagcauccagcccagaggccuguucggcgccaucgccggcuucaucgagggcggcuggaccggcaugguggacggcugguacggcuaccaccaccagaacgagcagggcagcggcuacgccgccgaccugaagagcacccagaacgccaucgacaagaucaccaacaaggugaacagcgugaucgagaagaugaacacccaguucaccgccgugggcaaggaguucaaccaccuggagaagagaaucgagaaccugaacaagaagguggacgacggcuuccuggacaucuggaccuacaacgccgagcugcuggugcugcuggagaacgagagaacccuggacuaccacgacagcaacgugaagaaccuguacgagaaggugagaagccagcugaagaacaacgccaaggagaucggcaacggcugcuucgaguucuaccacaagugcgacaacaccugcauggagagcgugaagaacggcaccuacgacuaccccaaguacagcgaggaggccaagcugaacagagaggagaucgacggcgugaagcuggagagcaccagaaucuaccagauccuggccaucuacagcaccguggccagcagccuggugcugguggugagccugggcgccaucagcuucuggaugugcagcaacggcagccugcagugcagaaucugcaucuga

SEQ ID NO: 164640 - RNA, 1701 nt, Artificial Sequence; identical to SEQ ID NO: 163901
  derived and/or modified CDS sequence (opt4) from hemagglutinin__InfluenzaA__ADF27659

SEQ ID NO: 164641 - RNA, 1701 nt, Artificial Sequence; identical to SEQ ID NO: 164378
  derived and/or modified CDS sequence (opt4) from hemagglutinin__InfluenzaA__ADF27669

SEQ ID NO: 164642 - RNA, 1701 nt, Artificial Sequence; identical to SEQ ID NO: 163830
  derived and/or modified CDS sequence (opt4) from hemagglutinin__InfluenzaA__ADF27679

SEQ ID NO: 164643 - RNA, 1701 nt, Artificial Sequence; identical to SEQ ID NO: 164439
  derived and/or modified CDS sequence (opt4) from hemagglutinin__InfluenzaA__ADF27689

SEQ ID NO: 164644 - RNA, 1701 nt, Artificial Sequence
  derived and/or modified CDS sequence (opt4) from hemagglutinin__InfluenzaA__ADF27699
augaaggccauccugguggugcugcuguacaccuucgccaccgccaacgccgacacccugugcaucggcuaccacgccaacaacagcaccgacaccguggacaccgugcuggagaagaacgugaccgugacccacagcgugaaccugcuggaggacaagcacaacggcaagcugugcaagcugagaggcguggccccccugcaccugggcaagugcaacaucgccggcuggauccugggcaaccccgagugcgagagccugagcaccgccagcagcuggagcuacaucguggagaccagcagcagcgacaacggcaccugcuaccccggcgacuucaucgacuacgaggagcugagagagcagcugagcagcgugagcagcuucgagagauucgagauguuccccaagaccagcagcuggcccaaccacgacagcaacaagggcgugaccgccgccugcccccacgccggcgccaagagcuucuacaagaaccugaucuggcuggugaagaagggcaacagcuaccccaagcugagcaagagcuacaucaacgacaagggcaaggaggugcuggugcuguggggcauccaccaccccagcaccagcgccgaccagcagagccuguaccagaacgccgacgccuacguguucgugggcaccagcagauacagcaagaaguucaagcccgagaucgccaucagacccaaggugagagaccaggagggcagaaugaacuacuacuggacccugguggagcccggcgacaagaucaccuucgaggccaccggcaaccugguggugcccagauacgccuucgccauggagagaaacgccggcagcggcaucaucaucagcgacacccccgugcacaacugcaacaccaccugccagacccccaagggcgccaucaacaccagccugcccuuccagaacauccaccccaucaccaucggcaagugccccaaguacgugaagagcaccaagcugagacuggccaccggccugagaaacgugcccagcauccagagcagaggccuguucggcgccaucgccggcuucaucgagggcggcuggaccggcaugguggacggcugguacggcuaccaccaccagaacgagcagggcagcggcuacgccgccgaccugaagagcacccagaacgccaucgacgagaucaccaacaaggugaacagcgugaucgagaagaugaacacccaguucaccgccgugggcaaggaguucaaccaccuggagaagagaaucgagaaccugaacaagaagguggacgacggcuuccuggacaucuggaccuacaacgccgagcugcuggugcugcuggagaacgagagaacccuggacuaccacgacagcaacgugaagaaccuguacgagaaggugagaagccagcugaagaacaacgccaaggaggugggcaacggcugcuucgaguucuaccacaagugcgacaacaccugcauggagagcgugaagaacggcaccuacgacuaccccaaguacagcgaggaggccaagcugaacagagaggagaucgacggcgugaagcuggagagcaccagaaucuaccagauccuggccaucuacagcaccguggccagcagccuggugcugguggugagccugggcgccaucagcuucuggaugugcagcaacggcagccugcagugcagaaucugcaucuga

SEQ ID NO: 164645 - RNA, 1701 nt, Artificial Sequence
  derived and/or modified CDS sequence (opt4) from hemagglutinin__InfluenzaA__ADF27709
augaaggccauccugguggugcugcuguacaccuucgccaccgccaacgccgacacccugugcaucggcuaccacgccaacaacagcaccgacaccguggacaccgugcuggagaagaacgugaccgugacccacagcgugaaccugcuggaggacaagcacaacggcaagcugugcaagcugagaggcguggccccccugcaccugggcaagugcaacaucgccggcuggauccugggcaaccccgagugcgagagccugagcaccgccagcagcuggagcuacaucguggagaucagcagcagcgacaacggcaccugcuaccccggcgacuucaucaacuacgaggagcugagagagcagcugagcagcgugagcagcuucgagagauucgagaucuuccccaagaccagcagcuggcccaaccacgacagcaacaagggcgugaccgccgccugcccccacgccggcgccaagagcuucuacaagaaccugaucuggcuggugaagaagggcaacagcuaccccaagcugagcaagagcuacaucaacgacaagggcaaggaggugcuggugcuguggggcauccaccaccccagcaccagcgccgaccagcagagccuguaccagaacgccgacgccuacguguucgugggcaccagcagauacagcaagaaguucaagcccgagaucgccaucagacccaaggugagagaccaggagggcagaaugaacuacuacuggacccugguggagcccggcgacaagaucaccuucgaggccaccggcaaccugguggugcccagauacgccuucgccauggagagaaacgccggcagcggcaucaucaucagcgacacccccgugcacgacugcaacaccaccugccagacccccaagggcgccaucaacaccagccugcccuuccagaacauccaccccaucaccaucggcaagugccccaaguacgugaagagcaccaagcugagacuggccaccggccugagaaacgugcccagcauccagagcagaggccuguucggcgccaucgccggcuucaucgagggcggcuggaccggcaugguggacggcugguacggcuaccaccaccagaacgagcagggcagcggcuacgccgccgaccugaagagcacccagaacgccaucgacaagaucaccaacaaggugaacagcgugaucgagaagaugaacacccaguucaccgccgugggcaaggaguucaaccaccuggagaagagaaucgagaaccugaacaagaagguggacgacggcuuccuggacaucuggaccuacaacgccgagcugcuggugcugcuggagaacgagagaacccuggacuaccacgacagcaacgugaagaaccuguacgagaaggugagaagccagcugaagaacaacgccaaggagaucggcaacggcugcuucgaguucuaccacaagugcgacaacaccugcauggagagcgugaagaacggcaccuacgacuaccccaaguacagcgaggaggccaagcugaacagagaggagaucgacggcgugaagcuggagagcaccagaaucuaccagauccuggccaucuacagcaccguggccagcagccuggugcugguggugagccugggcgccaucagcuucuggaugugcagcaacggcagccugcagugcagaaucugcaucuga

SEQ ID NO: 164646 - RNA, 1701 nt, Artificial Sequence; identical to SEQ ID NO: 163893
  derived and/or modified CDS sequence (opt4) from hemagglutinin__InfluenzaA__ADF27785

SEQ ID NO: 164647 - RNA, 1701 nt, Artificial Sequence
  derived and/or modified CDS sequence (opt4) from hemagglutinin__InfluenzaA__ADF27795
augaaggccauccugguggugcugcuguacaccuucgccaccgccaacgccgacacccugugcaucggcuaccacgccaacaacagcaccgacaccguggacaccgugcuggagaagaacgugaccgugacccacagcgugaaccugcuggaggacaagcacaacggcaagcugugcaagcugagaggcguggccccccugcaccugggcaagugcaacaucgccggcuggauccugggcaaccccgagugcgagagccugagcaccgccagcagcuggagcuacaucguggagaccagcagcagcgacaacggcaccugcuaccccggcgacuucaucgacuacgaggagcugagagagcagcugagcagcgugagcagcuucgagagauucgagaucuuccccaagaccagcagcuggcccaaccacgacagcaacaagggcgugaccgccgccugcccccacgccggcgccaagagcuucuacaagaaccugaucuggcuggugaagaagggcaacagcuaccccaagcugagcaagagcuacaucaacgacaagggcaaggaggugcuggugcuguggggcauccaccaccccagcaccagcgccgaccagcagagccuguaccagaacgccgacgccuacguguucgugggcaccagcagauacagcaagaaguucaagcccgagaucgccaucagacccaaggugagagaccaggagggcagaaugaacuacuacuggacccuggugaagcccggcgacaagaucaccuucgaggccaccggcaaccugguggugcccagauacgccuucgccauggagagaaacgccggcagcggcaucaucaucagcgacacccccgugcacgacugcaacaccaccugccagacccccaagggcgccaucaacaccagccugcccuuccagaacauccaccccaucaccaucggcaagugccccaaguacgugaagagcaccaagcugagacuggccaccggccugagaaacgugcccagcauccagagcagaggccuguucggcgccaucgccggcuucaucgagggcggcuggaccggcaugguggacggcugguacggcuaccaccaccagaacgagcagggcagcggcuacgccgccgaccugaagagcacccagaacgccaucgacgagaucaccaacaaggugaacagcgugaucgagaagaugaacacccaguucaccgccgugggcaaggaguucaaccaccuggagaagagaaucgagaaccugaacaagaagguggacgacggcuuccuggacaucuggaccuacaacgccgagcugcuggugcugcuggagaacgagagaacccuggacuaccacgacagcaacgugaagaaccuguacgagaaggugagaagccagcugaagaacaacgccaaggagaucggcaacggcugcuucgaguucuaccacaagugcgacaacaccugcauggagagcgugaagaacggcaccuacgacuaccccaaguacagcgaggaggccaagcugaacagagaggagaucgacggcgugaagcuggagagcaccagaaucuaccagauccuggccaucuacagcaccguggccagcagccuggugcugguggugagccugggcgccaucagcuucuggaugugcagcaacggcagccugcagugcagaaucugcaucuga

SEQ ID NO: 164648 - RNA, 1701 nt, Artificial Sequence; identical to SEQ ID NO: 163901
  derived and/or modified CDS sequence (opt4) from hemagglutinin__InfluenzaA__ADF27805

SEQ ID NO: 164649 - RNA, 1701 nt, Artificial Sequence
  derived and/or modified CDS sequence (opt4) from hemagglutinin__InfluenzaA__ADF27815
augaaggccauccugguggugcugcuguacaccuucgccaccgccaacgccgacacccugugcaucggcuaccacgccaacaacagcaccgacaccguggacaccgugcuggagaagaacgugaccgugacccacagcgugaaccugcuggaggacaagcacaacggcaagcugugcaagcugagaggcguggccccccugcaccugggcaagugcaacaucgccggcuggauccugggcaaccccgagugcgagagccugagcaccgccagcagcuggagcuacaucguggagaccagcagcagcgacaacggcaccugcuaccccggcgacuucaucgacuacgaggagcugagagagcagcugagcagcgugagcagcuucgagagauucgagaucuuccccaagaccagcagcuggcccaaccacgacagcaacaagggcgugaccgccgccugcccccacgacggcgccaagagcuucuacaagaaccugaucuggcuggugaagaagggcaacagcuaccccaagcugagcaagagcuacaucaacgacaagggcaaggaggugcuggugcuguggggcauccaccaccccagcaccagcgccgaccagcagagccuguaccagaacgccgacgccuacguguucgugggcaccagcagauacagcaagaaguucaagcccgagaucgccaucagacccaaggugagagaccaggagggcagaaugaacuacuacuggacccugguggagcccggcgacaagaucaccuucgaggccaccggcaaccugguggugcccagauacgccuucgccauggagagaaacgccggcagcggcaucaucaucagcgacacccccgugcacgacugcaacaccaccugccagacccccaagggcgccaucaacaccagccugcccuuccagaacauccaccccaucaccaucggcaagugccccaaguacgugaagagcaccaagcugagacuggccaccggccugagaaacgugcccagcauccagagcagaggccuguucggcgccaucgccggcuucaucgagggcggcuggaccggcaugguggacggcugguacggcuaccaccaccagaacgagcagggcagcggcuacgccgccgaccugaagagcacccagaacgccaucgacaagaucaccaacaaggugaacagcgugaucgagaagaugaacacccaguucaccgccgugggcaaggaguucaaccaccuggagaagagaaucgagaaccugaacaagaagguggacgacggcuuccuggacaucuggaccuacaacgccgagcugcuggugcugcuggagaacgagagaacccuggacuaccacgacagcaacgugaagaaccuguacgagaaggugagaagccagcugaagaacaacgccaaggagaucggcaacggcugcuucgaguucuaccacaagugcgacaacaccugcauggagagcgugaagaacggcaccuacgacuaccccaaguacagcgaggaggccaagcugaacagagaggagaucgacggcgugaagcuggagagcaccagaaucuaccagauccuggccaucuacagcaccguggccagcagccuggugcugguggugagccugggcgccaucagcuucuggaugugcagcaacggcagccugcagugcagaaucugcaucuga

SEQ ID NO: 164650 - RNA, 1701 nt, Artificial Sequence
  derived and/or modified CDS sequence (opt4) from hemagglutinin__InfluenzaA__ADF27825
augaaggccauccugguggugcugcuguacaccuucgccaccgccaacgccgacacccugugcaucggcuaccacgccaacaacagcaccgacaccguggacaccgugcuggagagaaacgugaccgugacccacagcgugaaccugcuggaggacaagcacaacggcaagcugugcaagcugagaggcguggccccccugcaccugggcaagugcaacaucgccggcuggauccugggcaaccccgagugcgagagccugagcaccgccagcagcuggagcuacaucguggagaccagcagcagcgacaacggcaccugcuaccccggcgacuucaucgacagcgaggagcugagagagcagcugagcagcgugagcagcuucgagagauucgagaucuuccccaagaccagcagcuggcccaaccacgacagcaacaagggcgugaccgccgccugcccccacgccggcgccaagagcuucuacaagaaccugaucuggcuggugaagaagggcaacagcuaccccaagcugagcaagagcuacaucaacgacaagggcaaggaggugcuggugcuguggggcauccaccaccccagcaccagcgccgaccagcagagccuguaccagaacgccgacgccuacguguucgugggcaccagcagauacagcaagaaguucaagcccgagaucgccaucagacccaaggugagagaccaggagggcagaaugaacuacuacuggacccugguggagcccggcgacaagaucaccuucgaggccaccggcaaccugguggugcccagauacgccuucgccauggagagaaacgccggcagcggcaucaucaucagcgacacccccgugcacgacugcaacaccaccugccagacccccaagggcgccaucaacaccagccugcccuuccagaacauccaccccaucaccaucggcaagugccccaaguacgugaagagcaccaagcugagacuggccaccggccugagaaacgugcccagcauccagagcagaggccuguucggcgccaucgccggcuucaucgagggcggcuggaccggcaugguggacggcugguacggcuaccaccaccagaacgagcagggcagcggcuacgccgccgaccugaagagcacccagaacgccaucgacgagaucaccaacaaggugaacagcgugaucgagaagaugaacacccaguucaccgccgugggcaaggaguucaaccaccuggagaagagaaucgagaaccugaacaagaagguggacgacggcuuccuggacaucuggaccuacaacgccgagcugcuggugcugcuggagaacgagagaacccuggacuaccacgacagcaacgugaagaaccuguacgagaaggugagaagccagcugaagaacaacgccaaggagaucggcaacggcugcuucgaguucuaccacaagugcgacaacaccugcauggagagcgugaagaacggcaccuacgacuaccccaaguacagcgaggaggccaagcugaacagagaggagaucgacggcgugaagcuggagagcaccagaaucuaccagauccuggccaucuacagcaccguggccagcagccuggugcugguggugagccugggcgccaucagcuucuggaugugcagcaacggcagccugcagugcagaaucugcaucuga

SEQ ID NO: 164651 - RNA, 1701 nt, Artificial Sequence
  derived and/or modified CDS sequence (opt4) from hemagglutinin__InfluenzaA__ADF27845
augaaggccauccugguggugcugcuguacaccuucgccaccgccaacgccgacacccugugcaucggcuaccacgccaacaacagcaccgacaccguggacaccgugcuggagaagaacgugaccgugacccacagcgccaaccugcuggaggacaagcacaacggcaagcugugcaagcugagaggcguggccccccugcaccugggcaagugcaacaucgccggcuggauccugggcaaccccgagugcgagagccugagcaccgccagcagcuggagcuacaucguggagaccagcagcagcgacaacggcaccugcuaccccggcgacuucaucgacuacgaggagcugagagagcagcugagcagcgugagcagcuucgagagauucgagaucuuccccaagaccagcagcuggcccaaccacgacagcaacaagggcgugaccgccgccugcccccacgccggcgccaagagcuucuacaagaaccugaucuggcuggugaagaagggcaacagcuaccccaagcugagcaagagcuacaucaacgacaagggcaaggaggugcuggugcuguggggcauccaccaccccagcaccaacgccgaccagcagagccuguaccagaacgccgacgccuacguguucgugggcaccagcagauacagcaagaaguucaagcccgagaucgccaucagacccaaggugagagaccaggagggcagaaugaacuacuacuggacccugguggagcccggcgacaagaucaccuucgaggccaccggcaaccugguggugcccagauacgccuucgccauggagagaaacgccggcagcggcaucaucaucagcgacacccccgugcacgacugcaacaccaccugccagacccccaagggcgccaucaacaccagccugcccuuccagaacauccaccccaucaccaucggcaagugccccaaguacgugaagagcaccaagcugagacuggccaccggccugagaaacgugcccagcauccagagcagaggccuguucggcgccaucgccggcuucaucgagggcggcuggaccggcaugguggacggcugguacggcuaccaccaccagaacgagcagggcagcggcuacgccgccgaccugaagagcacccagaacgccaucgacgagaucaccaacaaggugaacagcgugaucgagaagaugaacacccaguucaccgccgugggcaaggaguucaaccaccuggagaagagaaucgagaaccugaacaagaagguggacgacggcuuccuggacaucuggaccuacaacgccgagcugcuggugcugcuggagaacgagagaacccuggacuaccacgacagcaacgugaagaaccuguacgagaaggugagaagccagcugaagaacaacgccaaggagaucggcaacggcugcuucgaguucuaccacaagugcgacaacaccugcauggagagcgugaagaacggcaccuacgacuaccccaaguacagcgaggaggccaagcugaacagagaggagaucgacggcgugaagcuggagagcaccagaaucuaccagauccuggccaucuacagcaccguggccagcagccuggugcugguggugagccugggcgccaucagcuucuggaugugcagcaacggcagccugcagugcagaaucugcaucuga

SEQ ID NO: 164652 - RNA, 1701 nt, Artificial Sequence; identical to SEQ ID NO: 163893
  derived and/or modified CDS sequence (opt4) from hemagglutinin__InfluenzaA__ADF27855

SEQ ID NO: 164653 - RNA, 1701 nt, Artificial Sequence; identical to SEQ ID NO: 163893
  derived and/or modified CDS sequence (opt4) from hemagglutinin__InfluenzaA__ADF27865

SEQ ID NO: 164654 - RNA, 1701 nt, Artificial Sequence; identical to SEQ ID NO: 163893
  derived and/or modified CDS sequence (opt4) from hemagglutinin__InfluenzaA__ADF27875

SEQ ID NO: 164655 - RNA, 1701 nt, Artificial Sequence; identical to SEQ ID NO: 163893
  derived and/or modified CDS sequence (opt4) from hemagglutinin__InfluenzaA__ADF27885

SEQ ID NO: 164656 - RNA, 1701 nt, Artificial Sequence; identical to SEQ ID NO: 162729
  derived and/or modified CDS sequence (opt4) from hemagglutinin__InfluenzaA__ADF27895

SEQ ID NO: 164657 - RNA, 1701 nt, Artificial Sequence
  derived and/or modified CDS sequence (opt4) from hemagglutinin__InfluenzaA__ADF27915
augaaggccauccugguggugcugcuguacaccuucgccaccgccaacgccgacacccugugcaucggcuaccacgccaacaacagcaccgacaccguggacaccgugcuggagaagaacgugaccgugacccacagcgugaaccugcuggaggacaagcacaacggcaagcugugcaagcugagaggcguggccccccugcaccugggcaagugcaacaucgccggcuggauccugggcaaccccgagugcgagagccugagcaccgccagcagcuggagcuacaucguggagaccagcagcagcgacaacggcaccugcuaccccggcgacuucaucgacuacgaggagcugagagagcagcugagcagcgugagcagcuucgagagauucgagaucuuccccaagaccagcagcuggcccaaccacgacagcaacaagggcgugaccgccgccugcccccacgccggcgccaagagcuucuacaagaaccugaucuggcuggugaagaagggcaacagcuaccccaagcugagcaagagcuacaucaacgacaagggcaaggaggugcuggugcuguggggcauccaccaccccagcgccagcgccgaccagcagagccuguaccagaacgccgacgccuacguguucgugggcaccagcagauacagcaagaaguucaagcccgagaucgccaucagacccaaggugagagaccaggagggcagaaugaacuacuacuggacccugguggagcccggcgacaagaucaccuucgaggccaccggcaaccugguggugcccagauacgccuucgccauggagagaaacgccggcagcggcaucaucaucagcgacacccccgugcacgacugcaacaccaccugccagacccccaagggcgccaucaacaccagccugcccuuccagaacauccaccccaucaccaucggcaagugccccaaguacgugaagagcaccaagcugagacuggccaccggccugagaaacgugcccagcauccagagcagaggccuguucggcgccaucgccggcuucaucgagggcggcuggaccggcaugguggacggcugguacggcuaccaccaccagaacgagcagggcagcggcuacgccgccgaccugaagagcacccagaacgccaucgacaagaucaccaacaaggugaacagcgugaucgagaagaugaacacccaguucaccgccgugggcaaggaguucaaccaccuggagaagagaaucgagaaccugaacaagaagguggacgacggcuuccuggacaucuggaccuacaacgccgagcugcuggugcugcuggagaacgagagaacccuggacuaccacgacagcaacgugaagaaccuguacgagaaggugagaagccagcugaagaacaacgccaaggagaucggcaacggcugcuucgaguucuaccacaagugcgacaacaccugcauggagagcgugaagaacggcaccuacgacuaccccaaguacagcgaggaggccaagcugaacagagaggagaucgacggcgugaagcuggagagcaccagaaucuaccagauccuggccaucuacagcaccguggccagcagccuggugcugguggugagccugggcgccaucagcuucuggaugugcagcaacggcagccugcagugcagaaucugcaucuga

SEQ ID NO: 164658 - RNA, 1701 nt, Artificial Sequence
  derived and/or modified CDS sequence (opt4) from hemagglutinin__InfluenzaA__ADF27925
augaaggccauccugguggugcugcuguacaccuucgccaccgccaacgccgacacccugugcaucggcuaccacgccaacaacagcaccgacaccguggacaccgugcuggagaagaacgugaccgugacccacagcgugaaccugcuggaggacaagcacaacggcaagcugugcaagcugagaggcguggccccccugcaccugggcaagugcaacaucgccggcuggauccugggcaaccccgagugcgagagccugagcaccgccagcagcuggagcuacaucguggagaccagcagcagcgacaacggcaccugcuaccccggcgacuucaucgacuacgaggagcugagagagcagcugagcagcgugagcagcuucgagagauucgagaucuuccccaagaccagcagcuggcccaaccacgacagcaacaagggcgugaccgccgccugcccccacgccggcgccaagagcuucuacaagaaccugaucuggcuggugaagaagggcaacagcuaccccaagcugagcaacagcuacaucaacgacaagggcaaggaggugcuggugcuguggggcauccaccaccccagcaccagcgccgaccagcagagccuguaccagaacgccgacgccuacguguucgugggcaccagcagauacagcaagaaguucaagcccgagaucgccaucagacccaaggugagagaccaggagggcagaaugaacuacuacuggacccugguggagcccggcgacaagaucaccuucgaggccaccggcaaccugguggugcccagauacgccuucgccauggagagaaacgccggcagcggcaucaucaucagcgacacccccgcccacgacugcaacaccaccugccagacccccaagggcgccaucaacaccagccugcccuuccagaacauccaccccaucaccaucggcaagugccccaaguacgugaagagcaccaagcugagaauggccaccggccugagaaacgugcccagcauccagagcagaggccuguucggcgccaucgccggcuucaucgagggcggcuggaccggcaugguggacggcugguacggcuaccaccaccagaacgagcagggcagcggcuacgccgccgaccugaagagcacccagaacgccaucgacgagaucaccaacaaggugaacagcgugaucgagaagaugaacacccaguucaccgccgugggcaaggaguucaaccaccuggagaagagaaucgagaaccugaacaagaagguggacgacggcuuccuggacaucuggaccuacaacgccgagcugcuggugcugcuggagaacgagagaacccuggacuaccacgacagcaacgugaagaaccuguacgagaaggugagaagccagcugaagaacaacgccaaggagaucggcaacggcugcuucgaguucuaccacaagugcgacaacaccugcauggagagcgugaagaacggcaccuacgacuaccccaaguacagcgaggaggccaagcugaacagagaggagaucgacggcgugaagcuggagagcaccagaaucuaccagauccuggccaucuacagcaccguggccagcagccuggugcugguggugagccugggcgccaucagcuucuggaugugcagcaacggcagccugcagugcagaaucugcaucuga

SEQ ID NO: 164659 - RNA, 1701 nt, Artificial Sequence
  derived and/or modified CDS sequence (opt4) from hemagglutinin__InfluenzaA__ADF27935
augaaggccauccugguggugcugcuguacaccuucgccaccgccaacgccgacacccugugcaucggcuaccacgccaacaacagcaccgacaccguggacaccgugcuggagaagaacgugaccgugacccacagcgugaaccugcuggaggacaagcacaacggcaagcugugcaagcugagaggcguggccccccugcaccugggcaagugcaacaucgccggcuggauccugggcaaccccaagugcgagagccugagcaccgagagcagcuggagcuacaucguggagaccagcagcagcgacaacggcaccugcuaccccggcgacuucaucaacuacgaggagcugagagagcagcugagcagcgugagcagcuucgagagauucgagaucuuccccaagaccagcagcuggcccaaccacgacagcaacaagggcgugaccgccgccugcccccacgccggcgccaagagcuucuacaagaaccugaucuggcuggugaagaagggcaacagcuaccccaagcugagcaagagcuacaucaacgacaagggcaaggaggugcuggugcuguggggcauccaccaccccagcaccagcgccgaccagcagagccuguaccagaacgccgacgccuacguguucgugggcaccagcagauacagcaagaaguucaagcccgagaucgccaucagacccaaggugagagaccaggagggcagaaugaacuacuacuggacccugguggagcccggcgacaagaucaccuucgaggccaccggcaaccugguggugcccagauacgccuucgccauggagagaaacgccggcagcggcaucaucaucagcgacacccccgugcacgacugcaacaccaccugccagacccccaagggcgccaucaacaccagccugcccuuccagaacauccaccccaucaccaucggcaagugccccaaguacgugaagagcaccaagcugagacuggccaccggccugagaaacgugcccagcauccagagcagaggccuguucggcgccaucgccggcuucaucgagggcggcuggaccggcaugguggacggcugguacggcuaccaccaccagaacgagcagggcagcggcuacgccgccgaccugaagagcacccagaacgccaucgacaagaucaccaacaaggugaacagcgugaucgagaagaugaacacccaguucaccgccgugggcaaggaguucaaccaccuggagaagagaaucgagaaccugaacaagaagguggacgacggcuuccuggacaucuggaccuacaacgccgagcugcuggugcugcuggagaacgagagaacccuggacuaccacgacagcaacgugaagaaccuguacgagaaggugagaagccagcugaagaacaacgccaaggagaucggcaacggcugcuucgaguucuaccacaagugcgacaacaccugcauggagagcgugaagaacggcaccuacgacuaccccaaguacagcgaggaggccaagcugaacagagaggagaucgacggcgugaagcuggagagcaccagaaucuaccagauccuggccaucuacagcaccguggccagcagccuggugcugguggugagccugggcgccaucagcuucuggaugugcagcaacggcagccugcagugcagaaucugcaucuga

SEQ ID NO: 164660 - RNA, 1701 nt, Artificial Sequence
  derived and/or modified CDS sequence (opt4) from hemagglutinin__InfluenzaA__ADF27955
augaaggccauccugguggugcugcuguacaccuucgccaccgccaacgccgacacccugugcaucggcuaccacgccaacaacagcaccgacaccguggacaccgugcuggagaagaacgugaccgugacccacagcgugaaccugcuggaggacaagcacaacggcaagcugugcaagcugagaggcguggccccccugcaccugggcaagugcaacaucgccggcuggauccugggcaaccccgagugcgagagccugagcaccgccagcagcuggagcuacaucguggagaccagcagcagcgacaacggcaccugcuaccccggcgacuucaucgacuacgaggagcugagagagcagcugagcagcgugagcagcuucgagagauucgagaucuuccccaagaccagcagcuggcccaaccacgacagcaacaagggcgugaccgccgccugcccccacgccggcgccaagagcuucuacaagaaccugaucuggcuggugaagaagggcaacagcuaccccaagcugagcaacagcuacaucaacgacaagggcaaggaggugcuggugcuguggggcauccaccaccccagcaccagcgccgaccagcagagccuguaccagaacgccgacgccuacguguucgugggcaccagcagauacagcaagaaguucaagcccgagaucgccaucagacccaaggugagagaccaggagggcagaaugaacuacuacuggacccugguggagcccggcgacaagaucaccuucgaggccaccggcaaccugguggugcccagauacgccuucgccauggagagaaacgccggcagcggcaucaucaucagcgacacccccgugcacgacugcaacaccaccugccagacccccaagggcgccaucaacaccagccugcccuuccagaacauccaccccaucaccaucggcaagugccccaaguacgugaagagcaccaagcugagacuggccaccggccugagaaacgugcccagcauccagagcagaggccuguucggcgccaucgccggcuucaucgagggcggcuggaccggcaugguggacggcugguacggcuaccaccaccagaacgagcagggcagcggcuacgccgccgaccugaagagcacccagaacgccaucgacaagaucaccaacaaggugaacagcgugaucgagaagaugaacacccaguucaccgccgugggcaaggaguucaaccaccuggagaagagaaucgagaaccugaacaagaagguggacgacggcuuccuggacaucuggaccuacaacgccgagcugcuggugcugcuggagaacgagagaacccuggacuaccacgacagcaacgugaagaaccuguacgagaaggugagaagccagcugaagaacaacgccaaggagaucggcaacggcugcuucgaguucuaccacaagugcgacaacaccugcauggagagcgugaagaacggcaccuacgacuaccccaaguacagcgaggaggccaagcugaacagagaggagaucgacggcgugaagcuggagagcaccagaaucuaccagauccuggccaucuacagcaccguggccagcagccuggugcugguggugagccugggcgccaucagcuucuggaugugcagcaacggcagccugcagugcagaaucugcaucuga

SEQ ID NO: 164661 - RNA, 1701 nt, Artificial Sequence
  derived and/or modified CDS sequence (opt4) from hemagglutinin__InfluenzaA__ADF27965
augaaggccauccugguggugcugcuguacaccuucgccaccgccaacgccgacacccugugcaucggcuaccacgccaacaacagcaccgacaccguggacaccgugcuggagaagaacgugaccgugacccacagcgugaaccugcuggaggacaagcacaacggcaagcugugcaagcugagaggcguggccccccugcaccugggcaagugcaacaucgccggcuggauccugggcaaccccgagugcgagagccugagcaccgccagcagcuggagcuacaucguggagaccagcagcagcgacaacggcaccugcuaccccggcgacuucaucgacuacgaggagcugagagagcagcugagcagcgugagcagcuucgagagauucgagaucuuccccaagaccagcagcuggcccaaccacgacagcaacaagggcgugaccgccgccugcccccacgccggcgccaagagcuucuacaagaaccugaucuggcuggugaagaagggcaacagcuaccccaagcugagcaagagcuacaucaacgacaagggcaagaaggugcuggugcuguggggcauccaccaccccagcaccagcgccgaccagcagagccuguaccagaacgccgacgccuacguguucgugggcaccagcagauacagcaagaaguucaagcccgagaucgccaucagacccaaggugagagaccaggagggcagaaugaacuacuacuggacccugguggagcccggcgacaagaucaccuucgaggccaccggcaaccugguggugcccagauacgccuucgccauggagagaaacgccggcagcggcaucaucaucagcgacacccccgugaacgacugcaacaccaccugccagacccccaagggcgccaucaacaccagccugcccuuccagaacauccaccccaucaccaucggcaagugccccaaguacgugaagagcaccaagcugagacuggccaccggccugagaaacgugcccagcauccagagcagaggccuguucggcgccaucgccggcuucaucgagggcggcuggaccggcaugguggacggcugguacggcuaccaccaccagaacgagcagggcagcggcuacgccgccgaccugaagagcacccagaacgccaucgacaagaucaccaacaaggugaacagcgugaucgagaagaugaacacccaguucaccgccgugggcaaggaguucaaccaccuggagaagagaaucgagaaccugaacaagaagguggacgacggcuuccuggacaucuggaccuacaacgccgagcugcuggugcugcuggagaacgagagaacccuggacuaccacgacagcaacgugaagaaccuguacgagaaggugagaagccagcugaagaacaacgccaaggagaucggcaacggcugcuucgaguucuaccacaagugcgacaacaccugcauggagagcgugaagaacggcaccuacgacuaccccaaguacagcgaggaggccaagcugaacagagaggagaucgacggcgugaagcuggagagcaccagaaucuaccagauccuggccaucuacagcaccguggccagcagccuggugcugguggugagccugggcgccaucagcuucuggaugugcagcaacggcagccugcagugcagaaucugcaucuga

SEQ ID NO: 164662 - RNA, 1701 nt, Artificial Sequence; identical to SEQ ID NO: 163893
  derived and/or modified CDS sequence (opt4) from hemagglutinin__InfluenzaA__ADF27975

SEQ ID NO: 164663 - RNA, 1701 nt, Artificial Sequence; identical to SEQ ID NO: 163901
  derived and/or modified CDS sequence (opt4) from hemagglutinin__InfluenzaA__ADF27985

SEQ ID NO: 164664 - RNA, 1701 nt, Artificial Sequence
  derived and/or modified CDS sequence (opt4) from hemagglutinin__InfluenzaA__ADF27995
augaaggccauccugguggugcugcuguacaccuucgccaccgccaacgccgacacccugugcaucggcuaccacgccaacaacagcaccgacaccguggacaccgugcuggagaagaacgugaccgugacccacagcgccaaccugcuggaggacaagcacaacggcaagcugugcaagcugagaggcguggccccccugcaccugggcaagugcaacaucgccggcuggauccugggcaaccccgagugcgagagccugagcaccgccagcagcuggagcuacaucguggagaccagcagcagcgacaacggcaccugcuaccccggcgacuucaucgacuacgaggagcugagagagcagcugagcagcgugagcagcuucgagagauucgagaucuuccccaagaccagcagcuggcccaaccacgacagcaacaagggcgugaccgccgccugcccccacgccggcgccaagagcuucuacaagaaccugaucuggcuggugaagaagggcaacagcuaccccaagcugagcaagagcuacaucaacgacaagggcaaggaggugcuggugcuguggggcauccaccaccccagcaccaacgccgaccagcagagccuguaccagaacgccgacgccuacguguucgugggcaccagcagauacagcaagaaguucaagcccgagaucgccaucagacccaaggugagagaccaggagggcagaaugaacuacuacuggacccugguggagcccggcgacaagaucaccuucgaggccaccggcaaccugguggugcccagauacgccuucgccauggagagaaacgccggcagcggcaucaucaucagcgacacccccgcccacgacugcaacaccaccugccagacccccaagggcgccaucaacaccagccugcccuuccagaacauccaccccaucaccaucggcaagugccccaaguacgugaagagcaccaagcugagacuggccaccggccugagaaacauccccagcauccagagcagaggccuguucggcgccaucgccggcuucaucgagggcggcuggaccggcaugguggacggcugguacggcuaccaccaccagaacgagcagggcagcggcuacgccgccgaccugaagagcacccagaacgccaucgacgagaucaccaacaaggugaacagcgugaucgagaagaugaacacccaguucaccgccgugggcaaggaguucaaccaccuggagaagagaaucgagaaccugaacaagaagguggacgacggcuuccuggacaucuggaccuacaacgccgagcugcuggugcugcuggagaacgagagaacccuggacuaccacgacagcaacgugaagaaccuguacgagaaggugagaagccagcugaagaacaacgccaaggagaucggcaacggcugcuucgaguucuaccacaagugcgacaacaccugcauggagagcgugaagaacggcaccuacgacuaccccaaguacagcgaggaggccaagcugaacagagaggagaucgacggcgugaagcuggagagcaccagaaucuaccagauccuggccaucuacagcaccguggccagcagccuggugcugguggugagccugggcgccaucagcuucuggaugugcagcaacggcagccugcagugcagaaucugcaucuga

SEQ ID NO: 164665 - RNA, 1701 nt, Artificial Sequence; identical to SEQ ID NO: 164281
  derived and/or modified CDS sequence (opt4) from hemagglutinin__InfluenzaA__ADF28005

SEQ ID NO: 164666 - RNA, 1701 nt, Artificial Sequence; identical to SEQ ID NO: 164281
  derived and/or modified CDS sequence (opt4) from hemagglutinin__InfluenzaA__ADF28015

SEQ ID NO: 164667 - RNA, 1701 nt, Artificial Sequence; identical to SEQ ID NO: 163893
  derived and/or modified CDS sequence (opt4) from hemagglutinin__InfluenzaA__ADF28025

SEQ ID NO: 164668 - RNA, 1701 nt, Artificial Sequence; identical to SEQ ID NO: 163893
  derived and/or modified CDS sequence (opt4) from hemagglutinin__InfluenzaA__ADF28045

SEQ ID NO: 164669 - RNA, 1701 nt, Artificial Sequence
  derived and/or modified CDS sequence (opt4) from hemagglutinin__InfluenzaA__ADF28055
augaaggccauccugguggugcugcuguacaccuucgccaccgccaacgccgacacccugugcaucggcuaccacgccaacaacagcaccgacaccguggacaccgugcuggagaagaacgugaccgugacccacagcgugaaccugcuggaggacaagcacaacggcaagcugugcaagcugagaggcguggccccccugcaccugggcaagugcaacaucgccggcuggauccugggcaaccccgagugcgagagccugagcaccgccagcagcuggagcuacaucguggagaccagcagcagcgacaacggcaccugcuaccccggcgacuucaucgacuacgaggagcugagagagcagcugagcagcgugagcagcuucgagagauucgagaucuuccccaagaccagcagcuggcccaacuacgacagcaacaagggcgugaccgccgccugcccccacgccggcgccaagagcuucuacaagaaccugaucuggcuggugaagaagggcaacagcuaccccaagcugagcaagagcuacaucaacgacaagggcaaggaggugcuggugcuguggggcauccaccaccccagcaccagcgccgaccagcagagccuguaccagaacgccgacgccuacguguucgugggcaccagcagauacagcaagaaguucaagcccgagaucgccaucagacccaaggugagagaccaggagggcagaaugaacuacuacuggacccugguggagcccggcgacaagaucaccuucgaggccaccggcaaccugguggugcccagauacgccuucgccauggagagaaacgccggcagcggcaucaucaucagcgacacccccgugcacgacugcaacaccaccugccagacccccaagggcgccaucaacaccagccugcccuuccagaacauccaccccaucaccaucggcaagugccccaaguacgugaagagcaccaagcugagacuggccaccggccugagaaacgugcccagcauccagagcagaggccuguucggcgccaucgccggcuucaucgagggcggcuggaccggcaugguggacggcugguacggcuaccaccaccagaacgagcagggcagcggcuacgccgccgaccugaagagcacccagaacgccaucgacaagaucaccaacaaggugaacagcgugaucgagaagaugaacacccaguucaccgccgugggcaaggaguucaaccaccuggagaagagaaucgagaaccugaacaagaagguggacgacggcuuccuggacaucuggaccuacaacgccgagcugcuggugcugcuggagaacgagagaacccuggacuaccacgacagcaacgugaagaaccuguacgagaaggugagaagccagcugaagaacaacgccaaggagaucggcaacggcugcuucgaguucuaccacaagugcgacaacaccugcauggagagcgugaagaacggcaccuacgacuaccccaaguacagcgaggaggccaagcugaacagagaggagaucgacggcgugaagcuggagagcaccagaaucuaccagauccuggccaucuacagcaccguggccagcagccuggugcugguggugagccugggcgccaucagcuucuggaugugcagcaacggcagccugcagugcagaaucugcaucuga

SEQ ID NO: 164670 - RNA, 1701 nt, Artificial Sequence; identical to SEQ ID NO: 163893
  derived and/or modified CDS sequence (opt4) from hemagglutinin__InfluenzaA__ADF28065

SEQ ID NO: 164671 - RNA, 1701 nt, Artificial Sequence; identical to SEQ ID NO: 162911
  derived and/or modified CDS sequence (opt4) from hemagglutinin__InfluenzaA__ADF28075

SEQ ID NO: 164672 - RNA, 1701 nt, Artificial Sequence; identical to SEQ ID NO: 163830
  derived and/or modified CDS sequence (opt4) from hemagglutinin__InfluenzaA__ADF28085

SEQ ID NO: 164673 - RNA, 1701 nt, Artificial Sequence; identical to SEQ ID NO: 162909
  derived and/or modified CDS sequence (opt4) from hemagglutinin__InfluenzaA__ADF28107

SEQ ID NO: 164674 - RNA, 1701 nt, Artificial Sequence; identical to SEQ ID NO: 164281
  derived and/or modified CDS sequence (opt4) from hemagglutinin__InfluenzaA__ADF28117

SEQ ID NO: 164675 - RNA, 1701 nt, Artificial Sequence
  derived and/or modified CDS sequence (opt4) from hemagglutinin__InfluenzaA__ADF29918
augaaggccauccugguggugcugcuguacaccuucgccaccgccaacgccgacacccugugcaucggcuaccacgccaacaacagcaccgacaccguggacaccgugcuggagaagaacgugaccgugacccacagcgugaaccugcuggaggacaagcacaacggcaagcugugcaagcugagaggcguggccccccugcaccugggcaagugcaacaucgccggcuggauccugggcaaccccgagugcgagagccugagcaccgccagcagcuggagcuacaucguggagaccagcagcagcgacaacggcaccugcuaccccggcgacuucaucgacuacgaggagcugagagagcagcugagcagcgugagcagcuucgagagauucgagaucuuccccaagaccagcagcuggcccaaccacgacagcaacaagggcgugaccgccgccugcccccacgccggcgccaagagcuucuacaagaaccugaucuggcuggugaagaagggcaacagcuaccccaagcugagcagaagcuacaucaacgacaagggcaaggaggugcuggugcuguggggcauccaccaccccagcaccagcgccgaccagcagagccuguaccagaacgccgacgccuacguguucgugggcaccagcagauacagcaagaaguucaagcccgagaucgccaucagacccaaggugagaaaccaggagggcagaaugaacuacuacuggacccugguggagcccggcgacaagaucaccuucgaggccaccggcaaccugguggugcccagauacgccuucgccauggagagaaacgccggcagcggcaucaucaucagcgacacccccgugcacgacugcaacaccaccugccagacccccaagggcgccaucaacaccagccugcccuuccagaacauccaccccaucaccaucggcaagugccccaaguacgugaagagcaccaagcugagacuggccaccggccugagaaacgugcccagcauccagagcagaggccuguucggcgccaucgccggcuucaucgagggcggcuggaccggcaugguggacggcugguacggcuaccaccaccagaacgagcagggcagcggcuacgccgccgaccugaagagcacccagaacgccaucgacgagaucaccaacaaggugaacagcgugaucgagaagaugaacacccaguucaccgccgugggcaaggaguucaaccaccuggagaagagaaucgagaaccugaacaagaagguggacgacggcuuccuggacaucuggaccuacaacgccgagcugcuggugcugcuggagaacgagagaacccuggacuaccacgacagcaacgugaagaaccuguacgagaaggugagaagccagcugaagaacaacgccaaggagaucggcaacggcugcuucgaguucuaccacaagugcgacaacaccugcauggagagcgugaagaacggcaccuacgacuaccccaaguacagcgaggaggccaagcugaacagagaggagaucgacggcgugaagcuggagagcaccagaaucuaccagauccuggccaucuacagcaccguggccagcagccuggugcugguggugagccugggcgccaucagcuucuggaugugcagcaacggcagccugcagugcagaaucugcaucuga

SEQ ID NO: 164676 - RNA, 1701 nt, Artificial Sequence
  derived and/or modified CDS sequence (opt4) from hemagglutinin__InfluenzaA__ADF42689
augaaggccauccugguggugcugcuguacaccuucgccaccgccaacgccgacacccugugcaucggcuaccacgccaacaacagcaccgacaccguggacaccgugcuggagaagaacgugaccgugacccacagcgugaaccugcuggaggacaagcacaacggcaagcugugcaagcugagaggcguggccccccugcaccugggcaagugcaacaucgccggcuggauccugggcaaccccgagugcgagagccugagcaccgccagcagcuggagcuacaucguggagaccagcagcagcgacaacggcaccugcuaccccggcgacuucaucgacuacgaggagcugagagagcagcugagcagcgugagcagcuucgagagauucgagaucuuccccaagaccagcagcuggcccaaccacgacagcaacaagggcgugaccgccgccugcccccacgccggcgccaagagcuucuacaagaaccugaucuggcuggugaagaagggcaacagcuaccccaagcugagcaagagcuacaucaacgacaagggcaaggaggugcuggugcuguggggcauccaccaccccagcaccagcgccgaccagcagagccuguaccagaacgccgacgccuacguguucgugggcaccagcagauacagcaagaaguucaagcccgagaucgccaucagacccaaggugagagaccaggagggcagaaugaacuacuacuggacccugguggagcccggcgacaagaucaccuucgaggccaccggcaaccugguggugcccagauacgccuucgccauggagagaaacgccggcagcggcaucaucaucagcgacacccccgugcacgacugcaacaccaccugccagacccccaagggcgccaucaacaccagccugcccuuccagaacauccaccccaucaccaucggcaagugccccaaguacgugaagagcaccaagcugagacuggccaccggccugagaaacgugcccagcauccagagcagaggccuguucggcgccaucgccggcuucaucgagggcggcuggaccggcaugguggacggcugguacggcuaccaccaccagaacgagcagggcagcggcuacgccgccgaccugaagagcacccagaacgccaucgacgagaucaccaacaaggugaacagcgugaucgagaagaugaacacccaguucaccgccgugggcaaggaguucaaccaccuggagaagagaaucgagaaccugaacaagaagguggacgacggcuuccuggacaucuggaccuacaacgccgagcugcuggugcugcuggagaacgagagaacccuggacuaccacgacagcaacgugaagaaccuguacgagaaggugagaagccagcugaagaacaacgccaaggagaucggcaacggcugcuucgaguucuaccacaagugcgacaacaccugcauggagagcgugaagaacggcaccuacgacuaccccaaguacagcgaggaggccaagcugaacagagaggagaucgacggcgugaagcuggagagcaccagaaucuaccagauccuggccaucuacagcaccguggccagcagccuggugcuggccgugagccugggcgccaucggcuucuggaugugcagcaacggcagccugcagugcagaaucugcaucuga

SEQ ID NO: 164677 - RNA, 1701 nt, Artificial Sequence
  derived and/or modified CDS sequence (opt4) from hemagglutinin__InfluenzaA__ADF42699
augaaggccauccugguggugcugcuguacaccuucgccaccgccaacgccgacacccugugcaucggcuaccacgccaacaacagcaccgacaccguggacaccgugcuggagaagaacgugaccgugacccacagcgugaaccugcuggaggacaagcacaacggcacccugugcaagcugagaggcguggccccccugcaccugggcaagugcaacaucgccggcuggauccugggcaaccccgagugcgagagccugagcaccgccagcagcuggagcuacaucguggagaccagcagcagcgacaacggcaccugcuaccccggcgacuucaucgacuacgaggagcugagagagcagcugagcagcgugagcagcuucgagagauucgagauguuccccaagaccagcagcuggcccaaccacgacagcaacaagggcgugaccgccgccugcccccacgccggcgccaagagcuucuacaagaaccugaucuggcuggugaagaagggcaacagcuaccccaagcugagcaagagcuacaucaacgacaagggcaaggaggugcuggugcuguggggcauccaccaccccagcaccagcgccgaccagcagagccuguaccagaacgccgacgccuacguguucgugggcaccagcagauacagcaagaaguucaagcccgagaucgccaucagacccaaggugagagaccaggagggcagaaugaacuacuacuggacccugguggagcccggcgacaagaucaccuucgaggccaccggcaaccugguggugcccagauacgccuucgccauggagagaaacgccggcagcggcaucaucaucagcgacacccccgugcacgacugcaacaccaccugccagacccccaagggcgccaucaacaccagccugcccuuccagaacauccaccccaucaccaucggcaagugccccaaguacgugaagagcaccaagcugagacuggccaccggccugagaaacgugcccagcauccagagcagaggccuguucggcgccaucgccggcuucaucgagggcggcuggaccggcaugguggacggcugguacggcuaccaccaccagaacgagcagggcagcggcuacgccgccgaccugaagagcacccagaacgccaucgacgagaucaccaacaaggugaacagcgugaucgagaagaugaacacccaguucaccgccgugggcaaggaguucaaccaccuggagaagagaaucgagaaccugaacaagaagguggacgacggcuuccuggacaucuggaccuacaacgccgagcugcuggugcugcuggagaacgagagaacccuggacuaccacgacagcaacgugaagaaccuguacgagaaggugagaagccagcugaagaacaacgccaaggagaucggcaacggcugcuucgaguucuaccacaagugcgacaacaccugcauggagagcgugaagaacggcaccuacgacuaccccaaguacagcgaggaggccaagcugaacagagaggagaucgacggcgugaagcuggagagcaccagaaucuaccagauccuggccaucuacagcaccguggccagcagccuggugcugguggugagccugggcgccaucagcuucuggaugugcagcaacggcagccugcagugcagaaucugcaucuga

SEQ ID NO: 164678 - RNA, 1701 nt, Artificial Sequence; identical to SEQ ID NO: 163893
  derived and/or modified CDS sequence (opt4) from hemagglutinin__InfluenzaA__ADF42709

SEQ ID NO: 164679 - RNA, 1701 nt, Artificial Sequence; identical to SEQ ID NO: 163893
  derived and/or modified CDS sequence (opt4) from hemagglutinin__InfluenzaA__ADF42719

SEQ ID NO: 164680 - RNA, 1701 nt, Artificial Sequence; identical to SEQ ID NO: 163893
  derived and/or modified CDS sequence (opt4) from hemagglutinin__InfluenzaA__ADF42729

SEQ ID NO: 164681 - RNA, 1701 nt, Artificial Sequence; identical to SEQ ID NO: 163893
  derived and/or modified CDS sequence (opt4) from hemagglutinin__InfluenzaA__ADF42739

SEQ ID NO: 164682 - RNA, 1701 nt, Artificial Sequence
  derived and/or modified CDS sequence (opt4) from hemagglutinin__InfluenzaA__ADF58349
augaaggccauccugguggugcugcuguacaccuucgccaccgccaacgccgacacccugugcaucggcuaccacgccaacaacagcaccgacaccguggacaccgugcuggagaagaacgugaccgugacccacagcgugaaccugcuggaggacaagcacaacggcaagcugugcaagcugagaggcguggccccccugcaccugggcaagugcaacaucgccggcuggauccugggcaaccccgagugcgagagccugagcaccgccagcagcuggagcuacaucguggagaccagcagcagcgacaacggcaccugcuaccccggcgacuucaucgacuacgaggagcugagagagcagcugagcagcgugagcagcuucgagagauucgagaucuuccccaagaccagcagcuggcccgaccacgacagcaacaagggcgugaccgccgccugcccccacgccggcgccaagagcuucuacaagaaccugaucuggcuggugaagaagggcaacagcuaccccaagcugagcaagagcuacaucaacgacaagggcaaggaggugcuggugcuguggggcauccaccaccccagcaccagcgccgaccagcagagccuguaccagaacgccgacgccuacguguucgugggcaccagcagauacagcaagaaguucaagcccgagaucgccaucagacccaaggugagagagagagagggcagaaugaacuacuacuggacccugguggagcccggcgacaagaucaccuucgaggccaccggcaaccugguggugcccagauacgccuucgccauggagagaaacgccggcagcggcaucaucaucagcgacacccccgugcacgacugcaacaccaccugccagacccccaagggcgccaucaacaccagccugcccuuccagaacauccaccccaucaccaucggcaagugccccaaguacgugaagagcaccaagcugagacuggccaccggccugagaaacgugcccagcauccagagcagaggccuguucggcgccaucgccggcuucaucgagggcggcuggaccggcaugguggacggcugguacggcuaccaccaccagaacgagcagggcagcggcuacgccgccgaccugaagagcacccagaacgccaucgacgagaucaccaacaaggugaacagcgugaucgagaagaugaacacccaguucaccgccgugggcaaggaguucaaccaccuggagaagagaaucgagaaccugaacaagaagguggacgacggcuuccuggacaucuggaccuacaacgccgagcugcuggugcugcuggagaacgagagaacccuggacuaccacgacagcaacgugaagaaccuguacgagaaggugagaagccagcugaagaacaacgccaaggagaucggcaacggcugcuucgaguucuaccacaagugcgacaacaccugcauggagagcgugaagaacggcaccuacgacuaccccaaguacagcgaggaggccaagcugaacagagaggagaucgacggcgugaagcuggagagcaccagaaucuaccagauccuggccaucuacagcaccguggccagcagccuggugcugguggugagccugggcgccaucagcuucuggaugugcagcaacggcagccugcagugcagaaucugcaucuga

SEQ ID NO: 164683 - RNA, 1701 nt, Artificial Sequence; identical to SEQ ID NO: 164326
  derived and/or modified CDS sequence (opt4) from hemagglutinin__InfluenzaA__ADF58351

SEQ ID NO: 164684 - RNA, 1701 nt, Artificial Sequence
  derived and/or modified CDS sequence (opt4) from hemagglutinin__InfluenzaA__ADF80454
augaaggccauccugguggugcugcuguacaccuucgccaccgccaacgccgacacccugugcaucggcuaccacgccaacaacagcaccgacaccguggacaccgugcuggagaagaacgugaccgugacccacagcgugaaccugcuggaggacaagcacaacggcaagcugugcaagcugagaggcguggccccccugcaccugggcaagugcaacaucgccggcuggauccugggcaaccccgagugcgagagccugagcaccgccagcagcuggagcuacaucguggagaccagcagcagcgacaacggcaccugcuaccccggcgacuucaucgacuacgaggagcugagagagcagcugagcagcgugagcagcuucgagagauucgagaucuuccccaagaccagcagcuggcccaaccacgacagcaacaagggcgugaccgccgccugcccccacgccggcgccaagagcuucuacaagaaccugaucuggcuggugaagaagggcaacagcuaccccaagcugagcaagagcuacaucaacgacaagggcaaggaggugcuggugcuguggggcauccaccaccccagcaccagcgccgaccagcagagccuguaccagaacgccgacgccuacguguucgugggcaccagcagauacagcaagaaguucaagcccgagaucgccaucagacccaaggugagagaccaggagggcagaaugaacuacuacuggacccugguggagcccggcgacaagaucaccuucgaggccaccggcaaccugguggugcccagauacgccuucgccauggagagaaacgccggcagcggcaucaucaucagcgacacccccgugcacgacugcaacaccaccugccagacccccgagggcgccaucaacaccagccugcccuuccagaacauccaccccaucaccaucggcaagugccccaaguacgugaagagcaccaagcugagacuggccaccggccugagaaacgugcccagcauccagagcagaggccuguucggcgccaucgccggcuucaucgagggcggcuggaccggcaugguggacggcugguacggcuaccaccaccagaacgagcagggcagcggcuacgccgccgaccugaagagcacccagaacgccaucgacgagaucaccaacaaggugaacagcaucaucgagaagaugaacacccaguucaccgccgugggcaaggaguucaaccaccuggagaagagaaucgagaaccugaacaagaagguggacgacggcuuccuggacaucuggaccuacaacgccgagcugcuggugcugcuggagaacgagagaacccuggacuaccacgacagcaacgugaagaaccuguacgagaaggugagaagccagcugaagaacaacgccaaggagaucggcaacggcugcuucgaguucuaccacaagugcgacgacaccugcauggagagcgugaagaacggcaccuacgacuaccccaaguacagcgaggaggccaagcugaacagagaggagaucgacggcgugaagcuggagagcaccagaaucuaccagauccuggccaucuacagcaccguggccagcagccuggugcugguggugagccugggcgccaucagcuucuggaugugcagcaacggcagccugcagugcagaaucugcaucuga

SEQ ID NO: 164685 - RNA, 1701 nt, Artificial Sequence
  derived and/or modified CDS sequence (opt4) from hemagglutinin__InfluenzaA__ADF80462
augaaggccauccugguggugcugcuguacaccuucgccaccgccaacgccgacacccugugcaucggcuaccacgccaacaacagcaccgacaccguggacaccgugcuggagaagaacgugaccgugacccacagcgugaaccugcuggaggacaagcacaacggcaagcugugcaagcugagaggcguggccccccugcaccugggcaagugcaacaucgccggcuggauccugggcaaccccgagugcgagagccugagcaccgccagcagcuggagcuacaucguggagaccagcaacagcgacaacggcaccugcuaccccggcgacuucaucgacuacgaggagcugagagagcagcugagcagcgugagcagcuucgagagauucgagaucuuccccaagaucagcagcuggcccaaccacgacagcaacaagggcgugaccgccgccugcccccacgccggcgccaagagcuucuacaagaaccugaucuggcuggugaagaagggcaacagcuaccccaagcugagcaagagcuacaucaacgacaagggcaaggaggugcuggugcuguggggcauccaccaccccagcaccagcgccgaccagcagagccuguaccagaacgccgacgccuacguguucgugggcaccagcagauacagcaagaaguucaagcccgagaucgccaucagacccaaggugagagaccaggagggcagaaugaacuacuacuggacccugguggagcccggcgacaagaucaccuucgaggccaccggcaaccugguggugcccagauacgccuucgccauggagagaaacgccggcagcggcaucaucaucagcgacacccccgugcacgacugcaacaccaccugccagacccccaagggcgccaucaacaccagccugcccuuccagaacauccaccccaucaccaucggcaagugccccaaguacgugaagagcaccaagcugagacuggccaccggccugagaaacgugcccagcauccagagcagaggccuguucggcgccaucgccggcuucaucgagggcggcuggaccggcaugguggacggcugguacggcuaccaccaccagaacgagcagggcagcggcuacgccgccgaccugaagagcacccagaacgccaucgacgagaucaccaacaaggugaacagcgugaucgagaagaugaacacccaguucaccgccgugggcaaggaguucaaccaccuggagaagagaaucgagaaccugaacaagaagguggacgacggcuuccuggacaucuggaccuacaacgccgagcugcuggugcugcuggagaacgagagaacccuggacuaccacgacagcaacgugaagaaccuguacgagaaggugagaagccagcugaagaacaacgccaaggagaucggcaacggcugcuucgaguucuaccacaagugcgacaacaccugcauggagagcgugaagaacggcaccuacgacuaccccaaguacagcgaggaggccaagcugaacagagaggagaucgacggcgugaagcuggagagcaccagaaucuaccagauccuggccaucuacagcaccguggccagcagccuggugcugguggugagccugggcgccaucagcuucuggaugugcagcaacggcagccugcagugcagaaucugcaucuga

SEQ ID NO: 164686 - RNA, 1701 nt, Artificial Sequence; identical to SEQ ID NO: 162729
  derived and/or modified CDS sequence (opt4) from hemagglutinin__InfluenzaA__ADF80470

SEQ ID NO: 164687 - RNA, 1701 nt, Artificial Sequence
  derived and/or modified CDS sequence (opt4) from hemagglutinin__InfluenzaA__ADF80478
augaaggccauccugguggugcugcuguacaccuucgccaccgccaacgccgacacccugugcaucggcuaccacgccaacaacagcaccgacaccguggacaccgugcuggagaagaacgugaccgugacccacagcgugaaccugcuggaggacaagcacaacggcaagcugugcaagcugagaggcguggccccccugcaccugggcaagugcaacaucgccggcuggauccugggcaaccccgagugcgagagccugagcaccgccagcagcuggagcuacaucguggagaccagcagcagcgacaacggcaccugcuaccccggcgacuucaucgacuacgaggagcugagagagcagcugagcagcgugagcagcuucgagagauucgagaucuuccccaagaccagcagcuggcccaaccacgaccccaacaagggcgugaccgccgccugcccccacgccggcgccaagagcuucuacaagaaccugaucuggcuggugaagaagggcaacagcuaccccaagcugagcaagagcuacaucaacgacaagggcaaggaggugcuggugcuguggggcauccaccaccccagcaccagcgccgaccagcagagccuguaccagaacgccgacgccuacguguucgugggcaccagcagauacagcaagaaguucaagcccgagaucgccaucagacccaaggugagagaccaggagggcagaaugaacuacuacuggacccugguggagcccggcgacaagaucaccuucgaggccaccggcaaccugauggugcccagauacgccuucgccauggagagaaacgccggcagcggcaucaucaucagcgacacccccgugcacgacugcaacaccaccugccagacccccaagggcgccaucaacaccagccugcccuuccagaacauccaccccaucaccaucggcaagugccccaaguacgugaagagcaccaagcugagacuggccaccggccugagaaacgugcccagcauccagagcagaggccuguucggcgccaucgccggcuucaucgagggcggcuggaccggcaugguggacggcugguacggcuaccaccaccagaacgagcagggcagcggcuacgccgccgaccugaagagcacccagaacgccaucgacgagaucaccaacaaggugaacagcgugaucgagaagaugaacacccaguucaccgccgugggcaaggaguucaaccaccuggagaagagaaucgagaaccugaacaagaagguggacgacggcuuccuggacaucuggaccuacaacgccgagcugcuggugcugcuggagaacgagagaacccuggacuaccacgacagcaacgugaagaaccuguacgagaaggugagaagccagcugaagaacaacgccaaggagaucggcaacggcugcuucgaguucuaccacaagugcgacaacaccugcauggagagcgugaagaacggcaccuacgacuaccccaaguacagcgaggaggccaagcugaacagagaggagaucgacggcgugaagcuggagagcaccagaaucuaccagauccuggccaucuacagcaccguggccagcagccuggugcugguggugagccugggcgccaucagcuucuggaugugcagcaacggcagccugcagugcagaaucugcaucuga

SEQ ID NO: 164688 - RNA, 1701 nt, Artificial Sequence
  derived and/or modified CDS sequence (opt4) from hemagglutinin__InfluenzaA__ADF80494
augaaggccauccugguggugcugcuguacaccuucgccaccgccaacgccgacacccugugcaucggcuaccacgccaacaacagcaccgacaccguggacaccgugcuggagaagaacgugaccgugacccacagcgugaaccugcuggaggacaagcacaacggcaagcugugcaagcugagaggcguggccccccugcaccugggcaagugcaacaucgccggcuggauccugggcaaccccgagugcgagagccugagcaccgccagcagcuggagcuacaucguggagaccagcagcagcgacaacggcaccugcuaccccggcgacuucaucgacuacgaggagcugagagagcagcugagcagcgugagcagcuucgagagauucgagaucuuccccaagaccagcagcuggcccaaccacgacagcaacaagggcgugaccgccgccugcccccacgccggcgccaagagcuucuacaagaaccugaucuggcuggugaagaagggcaacagcuaccccaagcugagcaagagcuacaucaacgacaagggcaaggaggugcuggugcuguggggcauccaccaccccagcaccagcgccgaccagcagagccuguaccagaacgccgacgccuacguguucgugggcaccagcagauacagcaagaaguucaagcccgagaucgccaucagacccaaggugagagaccaggagggcagaaugaacuacuacuggacccugguggagcccggcgacaagaucaccuucgaggccaccggcaaccugcuggugcccagauacgccuucgccauggagagaaacgccggcagcggcaucaucaucagcgacacccccgugcacgacugcaacaccaccugccagacccccaagggcgccaucaacaccagccugcccuuccagaacauccaccccaucaccaucggcaagugccccaaguacgugaagagcaccaagcugagacuggccaccggccugagaaacgugcccagcauccagagcagaggccuguucggcgccaucgccggcuucaucgagggcggcuggaccggcaugguggacggcugguacggcuaccaccaccagaacgagcagggcagcggcuacgccgccgaccugaagagcacccagaacgccaucgacgagaucaccaacaaggugaacagcgugaucgagaagaugaacacccaguucaccgccgugggcaaggaguucaaccaccuggagaagagaaucgagaaccugaacaagaagguggacgacggcuuccuggacaucuggaccuacaacgccgagcugcuggugcugcuggagaacgagagaacccuggacuaccacgacagcaacgugaagaaccuguacgagaaggugagaagccagcugaagaccaacgccaaggagaucggcaacggcugcuucgaguucuaccacaagugcgacaacaccugcauggagagcgugaagaacggcaccuacgacuaccccaaguacagcgaggaggccaagcugaacagagaggagaucgacggcgugaagcuggagagcaccagaaucuaccagauccuggccaucuacagcaccguggccagcagccuggugcugguggugagccugggcgccaucagcuucuggaugugcagcaacggcagccugcagugcagaaucugcaucuga

SEQ ID NO: 164689 - RNA, 1701 nt, Artificial Sequence; identical to SEQ ID NO: 164688
  derived and/or modified CDS sequence (opt4) from hemagglutinin__InfluenzaA__ADF80498

SEQ ID NO: 164690 - RNA, 1701 nt, Artificial Sequence; identical to SEQ ID NO: 163353
  derived and/or modified CDS sequence (opt4) from hemagglutinin__InfluenzaA__ADF80502

SEQ ID NO: 164691 - RNA, 1701 nt, Artificial Sequence
  derived and/or modified CDS sequence (opt4) from hemagglutinin__InfluenzaA__ADF80506
augaaggccauccugguggugcugcuguacaccuucgccaccgccaacgccgacacccugugcaucggcuaccacgccaacaacagcaccgacaccguggacaccgugcuggagagaaacgugaccgugacccacagcgugaaccugcuggaggacaagcacaacggcaagcugugcaagcugagaggcguggccccccugcaccugggcaagugcagcaucgccggcuggauccugggcaaccccgagugcgagagccugagcaccgccagcagcuggagcuacaucguggagaccagcagcagcgacaacggcaccugcuaccccggcgacuucaucgacuacgaggagcugagagagcagcugagcagcgugagcagcuucgagagauucgagaucuuccccaagaccagcagcuggcccaaccacgaccccaacaagggcgugaccgccgccugcccccacgccggcgccaagagcuucuacaagaaccugaucuggcuggugaagaaggagaacagcuaccccaagcugagcaagagcuacaucaacgacaagggcaaggaggugcuggugcuguggggcauccaccaccccagcaccagcgccgaccagcagagccuguaccagaacgccgacgccuacguguucgugggcaccagcagauacagcaagaaguucaagcccgagaucgccaucagacccaaggugagagaccaggagggcagaaugaacuacuacuggacccugguggagcccggcgacaagaucaccuucgaggccaccggcaaccugguggugcccagauacgccuucgccauggagagaaacgccggcagcggcaucaucaucagcgacacccccgugcacgacugcaacaccaccugccagacccccaagggcgccaucaacaccagccugcccuuccagaacauccaccccaucaccaucggcaagugccccaaguacgugaagagcaccaagcugagacuggccaccggccugagaaacgugcccagcauccagagcagaggccuguucggcgccaucgccggcuucaucgagggcggcuggaccggcaugguggacggcugguacggcuaccaccaccagaacgagcagggcagcggcuacgccgccgaccugaagagcacccagaacgccaucgacgagaucaccaacaaggugaacagcgugaucgagaagaugaacacccaguucaccgccgugggcaaggaguucaaccaccuggagaagagaaucgagaaccugaacaagaagguggacgacggcuuccuggacaucuggaccuacaacgccgagcugcuggugcugcuggagaacgagagaacccuggacuaccacgacagcaacgugaagaaccuguacgagaaggugagaagccagcugaagaacaacgccaaggagaucggcaacggcugcuucgaguucuaccacaagugcgacaacaccugcauggagagcgugaagaacggcaccuacgacuaccccaaguacagcgaggaggccaagcugaacagagaggagaucgacggcgugaagcuggagagcaccagaaucuaccagauccuggccaucuacagcaccguggccagcagccuggugcugguggugagccugggcgccaucagcuucuggaugugcagcaacggcagccugcagugcagaaucugcaucuga

SEQ ID NO: 164692 - RNA, 1701 nt, Artificial Sequence
  derived and/or modified CDS sequence (opt4) from hemagglutinin__InfluenzaA__ADF83741
augaagaccaucaucgcccugagcuacauccugugccugguguucgcccagaagcugcccggcaacgacaacagcaccgccacccugugccugggccaccacgccgugcccaacggcaccaucgugaagaccaucaccaacgaccagaucgaggugaccaacgccaccgagcuggugcagagcagcagcaccggcgagaucugcgacagcccccaccagauccuggacggcaagaacugcacccugaucgacgcccugcugggcgacccccagugcgacggcuuccagaacaagaagugggaccuguucguggagagaagcaaggccuacagcaacugcuaccccuacgacgugcccgacuacgccagccugagaagccugguggccagcagcggcacccuggaguucaacaacgagagcuucaacuggaccggcgugacccagaacggcaccagcagcgccugcaucagaagaagcaagaacagcuucuucagcagacugaacuggcugacccaccugaacuucaaguaccccgcccugaacgugaccaugcccaacaacgagcaguucgacaagcuguacaucuggggcgugcaccaccccggcaccgacaaggaccagaucuuccuguacgcccaggccagcggcagaaucaccgugagcaccaagagaagccagcagaccgccauccccaacaucggcagcagacccagagugagaaacauccccagcagaaucagcaucuacuggaccaucgugaagcccggcgacauccugcugaucaacagcaccggcaaccugaucgcccccagaggcuacuucaagaucagaagcggcaagagcagcgugaugagaagcgacgcccccaucggcaagugcaacagcgacugcaucacccccaacggcagcauccccaacgacaagcccuuccagaacgugaacagaaucaccuacggcgccugccccagauacgugaagcagaacacccugaagcuggccaccggcaugagaaacgugcccgagaagcagaccagaggcaucuucggcgccaucgccggcuucaucgagaacggcugggagggcaugguggacggcugguacggcuucagacaccagaacagcgagggcagaggccaggccgccgaccugaagagcacccaggccgccaucgaccagaucaacggcaagcugaacagacugaucggcaagaccaacgagaaguuccaccagaucgagaaggaguucagcgagguggagggcagaauccaggaccuggagaaguacguggaggacaccaagaucgaccuguggagcuacaacgccgagcugcugguggcccuggagaaccagcacaccaucgaccugaccgacagcgagaugaacaagcuguucgagaagaccaagaagcagcugagagagaacgccgaggacaugggcaacggcugcuucaagaucuaccacaagugcgacaacgccugcaucggcagcaucagaaacggcaccuacgaccacgacguguacagagacgaggcccugaacaacagauuccagaucaagggcguggagcugaagagcggcuacaaggacuggauccuguggaucagcuucgccaucagcugcuuccugcugugcguggcccugcugggcuucaucaugugggccugccagaagggcaacaucagaugcaacaucugcaucuga

SEQ ID NO: 164693 - RNA, 1701 nt, Artificial Sequence; identical to SEQ ID NO: 163471
  derived and/or modified CDS sequence (opt4) from hemagglutinin__InfluenzaA__ADF83752

SEQ ID NO: 164694 - RNA, 1701 nt, Artificial Sequence; identical to SEQ ID NO: 164281
  derived and/or modified CDS sequence (opt4) from hemagglutinin__InfluenzaA__ADF83763

SEQ ID NO: 164695 - RNA, 1701 nt, Artificial Sequence; identical to SEQ ID NO: 164281
  derived and/or modified CDS sequence (opt4) from hemagglutinin__InfluenzaA__ADF83773

SEQ ID NO: 164696 - RNA, 1701 nt, Artificial Sequence
  derived and/or modified CDS sequence (opt4) from hemagglutinin__InfluenzaA__ADF83783
augaaggccauccugguggugcugcuguacaccuucgccaccgccaacgccgacacccugugcaucggcuaccacgccaacaacagcaccgacaccguggacaccgugcuggagaagaacgugaccgugacccacagcgugaaccugcuggaggacaagcacaacggcaagcugugcaagcugagaggcguggccccccugcaccugggcaagugcaacaucgccggcuggauccugggcaaccccgagugcgagagccugagcaccgccagcagcuggagcuacaucguggagaccagcagcagcgacaacggcaccugcuaccccggcgacuucaucgacuacgaggagcugagagagcagcugagcagcgugagcagcuucgagagauucgagaucuuccccaagaccagcagcuggcccaaccacgacagcaacaagggcgugaccgccgccugcccccacgccggcgccaagagcuucuacaagaaccugaucuggcuggugaagaagggcaacagcuaccccaagcugagcaagagcuacaucaacgacaagggcaaggaggugcuggugcuguggggcauccaccaccccagcaccagcgccgaccagcagagccuguaccagaacgccgacgccuacguguucgugggcaccagcagauacagcaagaaguucaagcccgagaucgccaucagacccaaggugagagaccaggagggcagaaugaacuacuacuggacccugguggagcccggcgacaagaucaccuucgaggccaccggcaaccugguggugcccagauacgccuucgccauggagagaaacgccggcagcggcaucaucaucagcgacacccccgugcacgacugcaacaccaccugccagacccccaagggcgccaucaacaccagccugcccuuccagaacauccaccccaccaccaucggcaagugccccaaguacgugaagagcaccaagcugagacuggccaccggccugagaaacgugcccagcauccagagcagaggccuguucggcgccaucgccggcuucaucgagggcggcuggaccggcaugguggacggcugguacggcuaccaccaccagaacgagcagggcagcggcuacgccgccgaccugaagagcacccagaacgccaucgacgagaucaccaacaaggugaacagcgugaucgagaagaugaacacccaguucaccgccgugggcaaggaguucaaccaccuggagaagagaaucgagaaccugaacaagaagguggacgacggcuuccuggacaucuggaccuacaacgccgagcugcuggugcugcuggagaacgagagaacccuggacuaccacgacagcaacgugaagaaccuguacgagaaggugagaagccagcugaagaacaacgccaaggagaucggcaacggcugcuucgaguucuaccacaagugcgacaacaccugcauggagagcgugaagaacggcaccuacgacuaccccaaguacagcgaggaggccaagcugaacagagaggagaucgacggcgugaagcuggagagcaccagaaucuaccagauccuggccaucuacagcaccguggccagcagccuggugcugguggugagccugggcgccaucagcuucuggaugugcagcaacggcagccugcagugcagaaucugcaucuga

SEQ ID NO: 164697 - RNA, 1701 nt, Artificial Sequence; identical to SEQ ID NO: 164356
  derived and/or modified CDS sequence (opt4) from hemagglutinin__InfluenzaA__ADF83793

SEQ ID NO: 164698 - RNA, 1701 nt, Artificial Sequence
  derived and/or modified CDS sequence (opt4) from hemagglutinin__InfluenzaA__ADF83803
augaaggccauccugguggugcugcuguacaccuucgccaccgccaacgccgacacccugugcaucggcuaccacgccaacaacagcaccgacaccguggacaccgugcuggagaagaacgugaccgugacccacagcgugaaccugcuggaggacaagcacaacggcaagcugugcaagcugagaggcguggccccccugcaccugggcaagugcaacaucgccggcuggauccugggcaaccccgagugcgagacccugagcaccgccagcagcuggagcuacaucguggagaccagcagcagcgacaacggcaccugcuaccccggcgacuucaucgacuacgaggagcugagagagcagcugagcagcgugagcagcuucgagagauucgagaucuuccccaagaccagcagcuggcccaaccacgacagcaacaagggcgugaccgccgccugcccccacgccggcgccaagagcuucuacaagaaccugaucuggcuggugaagaagggcaacagcuaccccaagcugagcaagagcuacaucaacgacaagggcaaggaggugcuggugcuguggggcauccaccaccccagcaccagcgccgaccagcagagccuguaccagaacgccgacgccuacguguucgugggcaccagcagauacagcaagaaguucaagcccgagaucgccaucagacccaaggugagagaccaggagggcagaaugaacuacuacuggacccugguggagcccggcgacaagaucaccuucgaggccaccggcaaccugguggugcccagauacgccuucgccauggagagaaacgccggcagcggcaucaucaucagcgacacccccgugcacgacugcaacaccaccugccagacccccaagggcgccaucaacaccagccugcccuuccagaacgugcaccccaucaccaucggcaagugccccaaguacgugaagagcaccaagcugagacuggccaccggccugagaaacgugcccagcauccagagcagaggccuguucggcgccaucgccggcuucaucgagggcggcuggaccggcaugguggacggcugguacggcuaccaccaccagaacgagcagggcagcggcuacgccgccgaccugaagagcacccagaacgccaucgacgagaucaccaacaaggugaacagcgugaucgagaagaugaacacccaguucaccgccgugggcaaggaguucaaccaccuggagaagagaaucgagaaccugaacaagaagguggacgacggcuuccuggacaucuggaccuacaacgccgagcugcuggugcugcuggagaacgagagaacccuggacuaccacgacagcaacgugaagaaccuguacgagaaggugagaagccagcugaagaacaacgccaaggagaccggcaacggcugcuucgaguucuaccacaagugcgacaacaccugcauggagagcgugaagaacggcaccuacgacuaccccaaguacagcgaggaggccaagcugaacagagaggagaucgacggcgugaagcuggagagcaccagaaucuaccagauccuggccaucuacagcaccguggccagcagccuggugcugguggugagccugggcgccaucagcuucuggaugugcagcaacggcagccugcagugcagaaucugcaucuga

SEQ ID NO: 164699 - RNA, 1701 nt, Artificial Sequence
  derived and/or modified CDS sequence (opt4) from hemagglutinin__InfluenzaA__ADF83813
augaaggccauccugguggugcugcuguacaccuucgccaccgccaacgccgacacccugugcaucggcuaccacgccaacaacagcaccgacaccguggacaccgugcuggagaagaacgugaccgugacccacagcgugaaccugcuggaggacaagcacaacggcaagcugugcaagcugagaggcguggccccccugcaccugggcaagugcaacaucgccggcuggauccugggcaaccccgagugcgagagccugagcaccgccagcagcuggagcuacaucguggagaccagcagcagcgacaacggcaccugcuaccccggcgacuucaucgacuacgaggagcugagagagcagcugagcagcgugagcagcuucgagagauucgagaucuuccccaagaccagcagcuggcccaaccacgacagcaacaagggcgugaccgccgccugcccccacgccggcgccaagagcuucuacaagaaccugaucuggcuggugaagaagggcaacagcuaccccaagcugagcaagagcuacaucaacgacaagggcaaggaggugcuggugcuguggggcauccaccaccccagcaccagcaccgaccagcagagccuguaccagaacgccgacgccuacguguucgugggcaccagcagauacagcaagaaguucaagcccgagaucgccaucagacccaaggugagagaccaggagggcagaaugaacuacuacuggacccugguggagcccggcgacaagaucaccuucgaggccaccggcaaccugguggugcccagauacgccuucgccauggagagaaacgccggcagcggcaucaucaucagcgacacccccgugcacgacugcaacaccaccugccagacccccaagggcgccaucaacaccagccugcccuuccagaacauccaccccaucaccaucggcaagugccccaaguacgugaagagcaccaagcugagacuggccaccggccugagaaacgugcccagcauccagagcagaggccuguucggcgccaucgccggcuucaucgagggcggcuggaccggcaugguggacggcugguacggcuaccaccaccagaacgagcagggcagcggcuacgccgccgaccugaagagcacccagaacgccaucgacgagaucaccaacaaggugaacagcgugaucgagaagaugaacacccaguucaccgccgugggcaaggaguucaaccaccuggagaagagaaucgagaaccugaacaagaagguggacgacggcuuccuggacaucuggaccuacaacgccgagcugcuggugcugcuggagaacgagagaacccuggacuaccacgacagcaacgugaagaaccuguacgagaaggugagaagccagcugaagaacaacgccaaggagaucggcaacggcugcuucgaguucuaccacaagugcgacaacaccugcauggagagcgugaagaacggcaccuacgacuaccccaaguacagcgaggaggccaagcugaacagagaggagaucgacggcgugaagcuggagagcaccagaaucuaccagauccuggccaucuacagcaccguggccagcagccuggugcugguggugagccugggcgccaucagcuucuggaugugcagcaacggcagccugcagugcagaaucugcaucuga

SEQ ID NO: 164700 - RNA, 1701 nt, Artificial Sequence
  derived and/or modified CDS sequence (opt4) from hemagglutinin__InfluenzaA__ADF83823
augaaggccauccugguggugcugcuguacaccuucgccaccgccaacgccgacacccugugcaucggcuaccacgccaacaacagcaccgacaccguggacaccgugcuggagaagaacgugaccgugacccacagcgugaaccugcuggaggacaagcacaacggcaagcugugcaagcugagaggcguggccccccugcaccugggcaagugcaacaucgccggcuggauccugggcaaccccgagugcgagagccugagcaccgccagcagcuggagcuacaucguggagaccagcagcagcgacaacggcaccugcuaccccggcgacuucaucgacuacgaggagcugagagagcagcugagcagcgugagcagcuucgagagauucgagaucuuccccaagaccagcagcuggcccaaccacgacagcaacaagggcgugaccgccgccugcccccacgccggcgccaagagcuucuacaagaaccugaucuggcuggugaagaagggcaacagcuaccccaagcugagcaagagcuacaucaacgacaagggcaaggaggugcuggugcuguggggcauccaccaccccagcaccagcgccgaccagcagagccuguaccagaacgccgacagcuacguguucgugggcaccagcagauacagcaagaaguucaagcccgagaucgccaucagacccaaggugagagaccaggagggcagaaugaacuacuacuggacccugguggagcccggcgacaagaucaccuucgaggccaccggcaaccugguggugcccagauacgccuucgccauggagagaaacgccggcagcggcaucaucaucagcgacacccccgugcacgacugcaacaccaccugccagacccccaagggcgccaucaacaccagccugcccuuccagaacauccaccccaucaccaucggcaagugccccaaguacgugaagagcaccaagcugagacuggccaccggccugagaaacauccccagcauccagagcagaggccuguucggcgccaucgccggcuucaucgagggcggcuggaccggcaugguggacggcugguacggcuaccaccaccagaacgagcagggcagcggcuacgccgccgaccugaagagcacccagaacgccaucgacgagaucaccaacaaggugaacagcgugaucgagaagaugaacacccaguucaccgccgugggcaaggaguucaaccaccuggagaagagaaucgagaaccugaacaagaagguggacgacggcuuccuggacaucuggaccuacaacgccgagcugcuggugcugcuggagaacgagagaacccuggacuaccacgacagcaacgugaagaaccuguacgagaaggugagaagccagcugaagaacaacgccaaggagaucggcaacggcugcuucgaguucuaccacaagugcgacaacaccugcauggagagcgugaagaacggcaccuacgacuaccccaaguacagcgaggaggccaagcugaacagagaggagaucgacggcgugaagcuggagagcaccagaaucuaccagauccuggccaucuacagcaccguggccagcagccuggugcugguggugagccugggcgccaucagcuucuggaugugcagcaacggcagccugcagugcagaaucugcaucuga

SEQ ID NO: 164701 - RNA, 1701 nt, Artificial Sequence; identical to SEQ ID NO: 164281
  derived and/or modified CDS sequence (opt4) from hemagglutinin__InfluenzaA__ADF83833

SEQ ID NO: 164702 - RNA, 1701 nt, Artificial Sequence; identical to SEQ ID NO: 164281
  derived and/or modified CDS sequence (opt4) from hemagglutinin__InfluenzaA__ADF83843

SEQ ID NO: 164703 - RNA, 1701 nt, Artificial Sequence; identical to SEQ ID NO: 164281
  derived and/or modified CDS sequence (opt4) from hemagglutinin__InfluenzaA__ADF83853

SEQ ID NO: 164704 - RNA, 1701 nt, Artificial Sequence
  derived and/or modified CDS sequence (opt4) from hemagglutinin__InfluenzaA__ADF83873
augaaggccauccugguggugcugcuguacaccuucgccaccgccaacgccgacacccugugcaucggcuaccacgccaacaacagcaccgacaccguggacaccgugcuggagaagaacgugaccgugacccacagcgugaaccugcuggaggacaagcacaacggcaagcugugcaagcugagaggcguggccccccugcaccugggcaagugcaacaucgccggcuggauccugggcaaccccgagugcgagagccugagcaccgccaacagcuggagcuacaucguggagaccagcagcagcgacaacggcaccugcuaccccggcgacuucaucgacuacgaggagcugagagagcagcugagcagcgugagcagcuucgagagauucgagaucuuccccaagaccagcagcuggcccaaccacgacagcaacaagggcgugaccgccgccugcccccacgccggcgccaagagcuucuacaagaaccugaucuggcuggugaagaagggcaacagcuaccccaagcugagcaagagcuacaucaacgacaagggcaaggaggugcuggugcuguggggcauccaccaccccagcaccagcaccgaccagcagagccuguaccagaacgccgacgccuacguguucgugggcaccagcagauacagcaagaaguucaagcccgagaucgccaucagacccaaggugagagaccaggagggcagaaugaacuacuacuggacccugguggagcccggcgacaagaucaccuucgaggccaccggcaaccugguggugcccagauacgccuucgccauggagagaaacgccggcagcggcaucaucaucagcgacacccccgugcacgacugcaacaccaccugccagacccccaagggcgccaucaacaccagccugcccuuccagaacauccaccccaucaccaucggcaagugccccaaguacgugaagagcaccaagcugagacuggccaccggccugagaaacgugcccagcauccagagcagaggccuguucggcgccaucgccggcuucaucgagggcggcuggaccggcaugguggacggcugguacggcuaccaccaccagaacgagcagggcagcggcuacgccgccgaccugaagagcacccagaacgccaucgacaagaucaccaacaaggugaacagcgugaucgagaagaugaacacccaguucaccgccgugggcaaggaguucaaccaccuggagaagagaaucgagaaccugaacaagaagguggacgacggcuuccuggacaucuggaccuacaacgccgagcugcuggugcugcuggagaacgagagaacccuggacuaccacgacagcaacgugaagaaccuguacgagaaggugagaagccagcugaagaacaacgccaaggagaucggcaacggcugcuucgaguucuaccacaagugcgacaacaccugcauggagagcgugaagaacggcaccuacgacuaccccaaguacagcgaggaggccaagcugaacagagaggagaucgacggcgugaagcuggagagcaccagaaucuaccagauccuggccaucuacagcaccguggccagcagccuggugcugguggugagccugggcgccaucagcuucuggaugugcagcaacggcagccugcagugcagaaucugcaucuga

SEQ ID NO: 164705 - RNA, 1701 nt, Artificial Sequence; identical to SEQ ID NO: 163893
  derived and/or modified CDS sequence (opt4) from hemagglutinin__InfluenzaA__ADF83885

SEQ ID NO: 164706 - RNA, 1701 nt, Artificial Sequence
  derived and/or modified CDS sequence (opt4) from hemagglutinin__InfluenzaA__ADF83895
augaaggccauccugguggugcugcuguacaccuucgccaccgugaacgccgacacccugugcaucggcuaccacgccaacaacagcaccgacaccguggacaccgugcuggagaagaacgugaccgugacccacagcgugaaccugcuggaggacaagcacaacggcaagcugugcaagcugagaggcguggccccccugcaccugggcaagugcaacaucgccggcuggauccugggcaaccccgagugcgagagccugagcaccgccagcagcuggagcuacaucguggagaccagcagcagcgacaacggcaccugcuaccccggcgacuucaucgacuacgaggagcugagagagcagcugagcagcgugagcagcuucgagagauucgagaucuuccccaagaccagcagcuggcccaaccacgacagcaacaagggcgugaccgccgccugcccccacgccggcgccaagagcuucuacaagaaccugaucuggcuggugaagaagggcaacagcuaccccaagcugagcaagagcuacaucaacgacaagggcaaggaggugcuggugcuguggggcauccaccaccccagcaccagcgccgaccagcagagccuguaccagaacgccgacgccuacguguucgugggcaccagcagauacagcaagaaguucaagcccgagaucgccaucagacccaaggugagagaccaggagggcagaaugaacuacuacuggacccugguggagcccggcgacaagaucaccuucgaggccaccggcaaccugguggugcccagauacgccuucgccauggagagaaacgccggcagcggcaucaucaucagcgacacccccgugcacgacugcaacaccaccugccagacccccaagggcgccaucaacaccagccugcccuuccagaacauccaccccaucaccaucggcaagugccccaaguacgugaagagcaccaagcugagacuggccaccggccugagaaacgugcccagcauccagagcagaggccuguucggcgccaucgccggcuucaucgagggcggcuggaccggcaugguggacggcugguacggcuaccaccaccagaacgagcagggcagcggcuacgccgccgaccugaagagcacccagaacgccaucgacaagaucaccaacaaggugaacagcgugaucgagaagaugaacacccaguucaccgccgugggcaaggaguucaaccaccuggagaagagaaucgagaaccugaacaagaagguggacgacggcuuccuggacaucuggaccuacaacgccgagcugcuggugcugcuggagaacgagagaacccuggacuaccacgacagcaacgugaagaaccuguacgagaagaucagaagccagcugaagaacaacgccaaggagaucggcaacggcugcuucgaguucuaccacaagugcgacaacaccugcauggagagcgugaagaacggcaccuacgacuaccccaaguacagcgaggaggccaagcugaacagagaggagaucgacggcgugaagcuggagagcaccagaaucuaccagauccuggccaucuacagcaccguggccagcagccuggugcugguggugagccugggcgccaucagcuucuggaugugcagcaacggcagccugcagugcagaaucugcaucuga

SEQ ID NO: 164707 - RNA, 1701 nt, Artificial Sequence; identical to SEQ ID NO: 164281
  derived and/or modified CDS sequence (opt4) from hemagglutinin__InfluenzaA__ADF83915

SEQ ID NO: 164708 - RNA, 1701 nt, Artificial Sequence
  derived and/or modified CDS sequence (opt4) from hemagglutinin__InfluenzaA__ADF84441
augaaggccauccugguggugcugcuguacaccuucgccaccgccaacgccgacacccugugcaucggcuaccacgccaacaacagcaccgacaccguggacaccgugcuggagaagaacgugaccgugacccacagcgugaaccugcuggaggacaagcacaacggcaagcugugcaagcugagaggcguggccccccugcaccugggcaagugcaacaucgccggcuggauccugggcaaccccgagugcgagagccugagcaccgccagcagcuggagcuacaucguggagaccagcagcagcgacaacggcaccugcuaccccggcgacuucaucaacuacgaggagcugagagagcagcugagcagcgugagcagcuucgagagauucgagaucuuccccaagaccagcagcuggcccagccacgacagcaacaagggcgugaccgccgccugcccccacgccggcgccaagagcuucuacaagaaccugaucuggcuggugaagaagggcaacagcuaccccaagcugagcaagagcuacaucaacgacaagggcaaggaggugcuggugcuguggggcauccaccaccccagcaccagcgccgaccagcagagccuguaccagaacgccgacgccuacguguucgugggcaccagcagauacagcaagaaguucaagcccgagaucgccaucagacccaaggugagagaccaggagggcagaaugaacuacuacuggacccugguggagcccggcgacaagaucaccuucgaggccaccggcaaccugguggugcccagauacgccuucgccauggagagaaacgccggcagcggcaucaucaucagcgacacccccgugcacgacugcaacaccaccugccagacccccaagggcgccaucaacaccagccugcccuuccagaacauccaccccaucaccaucggcaagugccccaaguacgugaagagcaccaagcugagacuggccaccggccugagaaacgugcccagcauccagagcagaggccuguucggcgccaucgccggcuucaucgagggcggcuggaccggcaugguggacggcugguacggcuaccaccaccagaacgagcagggcagcggcuacgccgccgaccugaagagcacccagaacgccaucgacaagaucaccaacaaggugaacagcgugaucgagaagaugaacauccaguucaccgccgugggcaaggaguucaaccaccuggagaagagaaucgagaaccugaacaagaagguggacgacggcuuccuggacaucuggaccuacaacgccgagcugcuggugcugcuggagaacgagagaacccuggacuaccacgacagcaacgugaagaaccuguacgagaaggugagaagccagcugaagaacaacgccaaggagaucggcaacggcugcuucgaguucuaccacaagugcgacaacaccugcauggagagcgugaagaacggcaccuacgacuaccccaaguacagcgaggaggccaagcugaacagagaggagaucgacggcgugaagcuggagagcaccagaaucuaccagauccuggccaucuacagcaccguggccagcagccuggugcugguggugagccugggcgccaucagcuucuggaugugcagcaacggcagccugcagugcagaaucugcaucuga

SEQ ID NO: 164709 - RNA, 1701 nt, Artificial Sequence; identical to SEQ ID NO: 163893
  derived and/or modified CDS sequence (opt4) from hemagglutinin__InfluenzaA__ADF84459

SEQ ID NO: 164710 - RNA, 1701 nt, Artificial Sequence; identical to SEQ ID NO: 164281
  derived and/or modified CDS sequence (opt4) from hemagglutinin__InfluenzaA__ADF84469

SEQ ID NO: 164711 - RNA, 1701 nt, Artificial Sequence; identical to SEQ ID NO: 164342
  derived and/or modified CDS sequence (opt4) from hemagglutinin__InfluenzaA__ADF84479

SEQ ID NO: 164712 - RNA, 1701 nt, Artificial Sequence; identical to SEQ ID NO: 164281
  derived and/or modified CDS sequence (opt4) from hemagglutinin__InfluenzaA__ADF84489

SEQ ID NO: 164713 - RNA, 1701 nt, Artificial Sequence; identical to SEQ ID NO: 164281
  derived and/or modified CDS sequence (opt4) from hemagglutinin__InfluenzaA__ADF85017

SEQ ID NO: 164714 - RNA, 1701 nt, Artificial Sequence; identical to SEQ ID NO: 164281
  derived and/or modified CDS sequence (opt4) from hemagglutinin__InfluenzaA__ADF87152

SEQ ID NO: 164715 - RNA, 1701 nt, Artificial Sequence
  derived and/or modified CDS sequence (opt4) from hemagglutinin__InfluenzaA__ADF87162
augaaggccauccugguggugcugcuguacaccuucgccaccgccaacgccgacacccugugcaucggcuaccacgccaacaacagcaccgacaccguggacaccgugcuggagaagaacgugaccgugacccacagcgugaaccugcuggaggacaagcacaacggcaagcugugcaagcugagaggcguggccccccugcaccugggcaagugcaacaucgccggcuggauccugggcaaccccgagugcgagagccugagcaccgccagcagcuggagcuacaucguggagaccagcagcagcgacaacggcaccugcuaccccggcgacuucaucgacuacgaggagcugagagagcagcugagcagcgugagcagcuucgagagauucgagaucuuccccaagaccagcagcuggcccaaccacgacagcaacaagggcgugaccgccgccugcccccacgccggcgccaagagcuucuacaagaaccugaucuggcuggugaagaagggcaacagcuaccccaagcugagcaagagcuacaucaacgacaagggcaaggaggugcuggugcuguggggcauccaccaccccagcaccagcgccgaccagcagagccuguaccagaacgccgacagcuacguguucgugggcaccagcaaguacagcaagaaguucaagcccgagaucgccaucagacccaaggugagagaccaggagggcagaaugaacuacuacuggacccugguggagcccggcgacaagaucaccuucgaggccaccggcaaccugguggugcccagauacgccuucgccauggagagaaacgccggcagcggcaucaucaucagcgacacccccgugcacgacugcaacaccaccugccagacccccgagggcgccaucaacaccagccugcccuuccagaacauccaccccaucaccaucggcaagugccccaaguacgugaagagcaccaagcugagacuggccaccggccugagaaacgugcccagcauccagagcagaggccuguucggcgccaucgccggcuucaucgagggcggcuggaccggcaugguggacggcugguacggcuaccaccaccagaacgagcagggcagcggcuacgccgccgaccugaagagcacccagaacgccaucgacgagaucaccaacaaggugaacagcgugaucgagaagaugaacacccaguucaccgccgugggcaaggaguucaaccaccuggagaagagaaucgagaaccugaacaagaagguggacgacggcuuccuggacaucuggaccuacaacgccgagcugcuggugcugcuggagaacgagagaacccuggacuaccacgacagcaacgugaagaaccuguacgagaaggugagaagccagcugaagaacaacgccaaggagaucggcaacggcugcuucgaguucuaccacaagugcgacaacaccugcauggagagcgugaagaacggcaccuacgacuaccccaaguacagcgaggaggccaagcugaacagagaggagaucgacggcgugaagcuggagagcaccagaaucuaccagauccuggccaucuacagcaccguggccagcagccuggugcugguggugagccugggcgccaucagcuucuggaugugcagcaacggcagccugcagugcagaaucugcaucuga

SEQ ID NO: 164716 - RNA, 1701 nt, Artificial Sequence; identical to SEQ ID NO: 164281
  derived and/or modified CDS sequence (opt4) from hemagglutinin__InfluenzaA__ADF87172

SEQ ID NO: 164717 - RNA, 1701 nt, Artificial Sequence
  derived and/or modified CDS sequence (opt4) from hemagglutinin__InfluenzaA__ADF87182
augaacgccauccugguggugcugcuguacaccuucgccaccgccaacgccgacacccugugcaucggcuaccacgccaacaacagcaccgacaccguggacacccugcuggagaagaacgugaccgugacccacagcgugaaccugcuggaggacaagcacaacggcaagcugugcaagcugagaggcguggccccccugcaccugggcaagugcaacaucgccggcuggauccugggcaaccccgagugcgagagccugagcaccgccagcagcuggagcuacaucguggagaccagcagcagcgacaacggcaccugcuaccccggcgacuucaucgacuacgaggagcugagagagcagcugagcagcgugagcagcuucgagagauucgagaucuuccccaagaccagcagcuggcccaaccacgacagcaacaagggcgugaccgccgccugcccccacgccggcgccaagagcuucuacaagaaccugaucuggcuggugaagaagggcaacagcuaccccaagcugagcaagagcuacaucaacgacaagggcaaggaggugcuggugcuguggggcauccaccaccccagcaccagcgccgaccagcagagccuguaccagaacgccgacgccuacguguucgugggcaccagcagauacagcaagaaguucaagcccgagaucgccaucagacccaaggugagagaccaggagggcagaaugaacuaccacuggacccugguggagcccggcgacaagaucaccuucgaggccaccggcaaccugguggugcccagauacgccuucgccauggagagaaacgccggcagcggcaucaucaucagcgacgcccccgugcacgacugcaacaccaccugccagacccccaagggcgccaucaacaccagccugcccuuccagaacauccaccccaucaccaucggcaagugccccaaguacgugaagagcaccaagcugagacuggccaccggccugagaaacgugcccagcauccagagcagaggccuguucggcgccaucgccggcuucaucgagggcggcuggaccggcaugguggacggcugguacggcuaccaccaccagaacgagcagggcagcggcuacgccgccgaccugaagagcacccagaacgccaucgacgagaucaccaacaagaucaacagcgugaucgagaagaugaacacccaguucaccgccgugggcaaggaguucaaccaccuggagaagagaaucgagaaccugaacaagaagguggacgacggcuuccuggacaucuggaccuacaacgccgagcugcuggugcugcuggagaacgagagaacccuggacuaccacgacagcaacgugaagaaccuguacgagaaggugagaagccagcugaagaacaacgccaaggagaucggcaacggcugcuucgaguucuaccacaagugcgacaacaccugcauggagagcgugaagaacggcaccuacgacuaccccaaguacagcgaggaggccaagcugaacagagaggagaucgacggcgugaagcuggagagcaccagaaucuaccagauccuggccaucuacagcaccguggccagcagccuggugcugguggugagccugggcgccaucagcuucuggaugugcagcaacggcagccugcagugcagaaucugcaucuga

SEQ ID NO: 164718 - RNA, 1701 nt, Artificial Sequence; identical to SEQ ID NO: 164281
  derived and/or modified CDS sequence (opt4) from hemagglutinin__InfluenzaA__ADF87192

SEQ ID NO: 164719 - RNA, 1701 nt, Artificial Sequence
  derived and/or modified CDS sequence (opt4) from hemagglutinin__InfluenzaA__ADF87202
augaaggccauccugguggugcugcuguacaccuucgccaccgccaacgccgacacccugugcaucggcuaccacgccaacaacagcaccgacaccguggacaccgugcuggagaagaacgugaccgugacccacagcgugaaccugcuggaggacaagcacaacggcaagcugugcaagcugagaggcguggccccccugcaccugggcaagugcaacaucgccggcuggauccugggcaaccccgagugcgagagccugagcaccgccagcagcuggagcuacaucguggagaccagcagcagcgacaacggcaccugcuaccccggcgacuucaucgacuacgaggagcugagagagcagcugagcagcgugagcagcuucgagagauucgagaucuuccccaagaccagcagcuggcccaaccacgacagcaacaagggcgugaccgccgccugcccccacgccggcgccaagagcuucuacaagaaccugaucuggcuggugaagaagggcaacagcuaccccaagcugagcaagagcuacaucaacgacaagggcaaggaggugcuggugcuguggggcauccaccaccccagcaccagcgccgaccagcagagccuguaccagaacgccgacgccuacguguucgugggcaccagcagauacagcaagaaguucaagcccgagaucgccaucagacccaaggugagagaccaggagggcagaaugaacuacuacuggacccugguggagcccggcgacaagaucaccuucgaggccaccggcaaccugguggugcccagauacgccuucgccauggagagaaacgccggcagcggcaucaucaucagcgacacccccgugcacgacugcaacaccaccugccagacccccaagggcgccaucaacaccagccugcccuuccagaacauccaccccaucaccaucggcaagugccccaaguacgugaagagcaccaagcugagacuggccaccggccugagaaacgugcccagcauccagagcagaggccuguucggcgccaucgccggcuucaucgagggcggcuggaccggcaugguggacggcugguacggcuaccaccaccagaacgagcagggcagcggcuucgccgccgaccugaagagcacccagaacgccaucgacaagaucaccaacaaggugaacagcgugaucgagaagaugaacacccaguucaccgccgugggcaaggaguucaaccaccuggagaagagaaucgagaaccugaacaagaagguggacgacggcuuccuggacaucuggaccuacaacgccgagcugcuggugcugcuggagaacgagagaacccuggacuaccacgacagcaacgugaagaaccuguacgagaaggugagaagccagcugaagaacaacgccaaggagaucggcaacggcugcuucgaguucuaccacaagugcgacaacaccugcauggagagcgugaagaacggcaccuacgacuaccccaaguacagcgaggaggccaagcugaacagagaggagaucgacggcgugaagcuggagagcaccagaaucuaccagauccuggccaucuacagcaccguggccagcagccuggugcugguggugagccugggcgccaucagcuucuggaugugcagcaacggcagccugcagugcagaaucugcaucuga

SEQ ID NO: 164720 - RNA, 1701 nt, Artificial Sequence; identical to SEQ ID NO: 164281
  derived and/or modified CDS sequence (opt4) from hemagglutinin__InfluenzaA__ADF87212

SEQ ID NO: 164721 - RNA, 1701 nt, Artificial Sequence; identical to SEQ ID NO: 164444
  derived and/or modified CDS sequence (opt4) from hemagglutinin__InfluenzaA__ADF87232

SEQ ID NO: 164722 - RNA, 1701 nt, Artificial Sequence; identical to SEQ ID NO: 164281
  derived and/or modified CDS sequence (opt4) from hemagglutinin__InfluenzaA__ADF87242

SEQ ID NO: 164723 - RNA, 1701 nt, Artificial Sequence
  derived and/or modified CDS sequence (opt4) from hemagglutinin__InfluenzaA__ADF87252
augaaggccauccugguggugcugcuguacaccuucgccaccgccaacgccgacacccugugcaucggcuaccacgccaacaacagcaccgacaccguggacaccgugcuggagaagaacgugaccgugacccacagcgugaaccugcuggaggacaagcacaacggcaagcugugcaagcugagaggcguggccccccugcaccugggcaagugcaacaucgccggcuggauccugggcaaccccgagugcgagagccugagcaccgccagcagcuggagcuacaucguggagaccagcagcagcgacaacggcaccugcuaccccggcgacuucaucaacuacgaggagcugagagagcagcugagcagcgugagcagcuucgagagauucgagaucuuccccaagaccagcagcuggcccaaccacgacagcaacaagggcgugaccgccgccugcccccacgccggcgccaagagcuucuacaagaaccugaucuggcuggugaagaagggcaagagcuaccccaagcugagcaagagcuacaucaacgacaagggcaaggaggugcuggugcuguggggcauccaccaccccagcaccagcgccgaccagcagagccuguaccagaacgccgacgccuacguguucgugggcaccagcagauacagcaagaaguucaagcccgagaucgccaucagacccaaggugagagaccaggagggcagaaugaacuacuacuggacccugguggagcccggcgacaagaucaccuucgaggccaccggcaaccugguggugcccagauacgccuucgccauggagagaaacgccggcagcggcaucaucaucagcgacacccccgugcacgacugcaacaccaccugccagacccccaagggcgccaucaacaccagccugcccuuccagaacauccaccccaucaccaucggcaagugccccaaguacgugaagagcaccaagcugagacuggccaccggccugagaaacgugcccagcauccagagcagaggccuguucggcgccaucgccggcuucaucgagggcggcuggaccggcaugguggacggcugguacggcuaccaccaccagaacgagcagggcagcggcuacgccgccgaccugaagagcacccagaacgccaucgacaagaucaccaacaaggugaacagcgugaucgagaagaugaacacccaguucaccgccgugggcaaggaguucaaccaccuggagaagagaaucgagaaccugaacaagaagguggacgacggcuuccuggacaucuggaccuacaacgccgagcugcuggugcugcuggagaacgagagaacccuggacuaccacgacagcaacgugaagaaccuguacgagaaggugagaagccagcugaagaacaacgccaaggagaucggcaacggcugcuucgaguucuaccacaagugcgacaacaccugcauggagagcgugaagaacggcaccuacgacuaccccaaguacagcgaggaggccaagcugaacagagaggagaucgacggcgugaagcuggagagcaccagaaucuaccagauccuggccaucuacagcaccguggccagcagccuggugcugguggugagccugggcgccaucagcuucuggaugugcagcaacggcagccugcagugcagaaucugcaucuga

SEQ ID NO: 164724 - RNA, 1701 nt, Artificial Sequence; identical to SEQ ID NO: 164281
  derived and/or modified CDS sequence (opt4) from hemagglutinin__InfluenzaA__ADF87262

SEQ ID NO: 164725 - RNA, 1701 nt, Artificial Sequence; identical to SEQ ID NO: 163893
  derived and/or modified CDS sequence (opt4) from hemagglutinin__InfluenzaA__ADF87272

SEQ ID NO: 164726 - RNA, 1701 nt, Artificial Sequence; identical to SEQ ID NO: 163893
  derived and/or modified CDS sequence (opt4) from hemagglutinin__InfluenzaA__ADF87282

SEQ ID NO: 164727 - RNA, 1701 nt, Artificial Sequence
  derived and/or modified CDS sequence (opt4) from hemagglutinin__InfluenzaA__ADF87292
augaaggccauccugguggugcugcuguacaccuucgccaccgccaacgccgacacccugugcaucggcuaccacgccaacaacagcaccgacaccguggacaccgugcugaagaagaacgugaccgugacccacagcgugaaccugcuggaggacaagcacaacggcaagcugugcaagcugagaggcguggccccccugcaccugggcaagugcaacaucgccggcuggauccugggcaaccccgagugcgagagccugagcaccgccggcagcuggagcuacaucguggagaccagcagcagcgacaacggcaccugcuaccccggcgacuucaucgacuacgaggagcugagagagcagcugagcagcgugagcagcuucgagagauucgagaucuuccccaagaccagcagcuggcccaaccacgacagcaacaagggcgugaccgccgccugcccccacgccggcgccaagagcuucuacaagaaccugaucuggcuggugaagaagggcaacagcuaccccaagcugagcaagagcuacaucaacgacaagggcaaggaggugcuggugcuguggggcauccaccaccccagcaccagcgccgaccagcagagccuguaccagaacgccgacgccuacguguucgugggcaccagcagauacagcaagaaguucaagcccgagaucgccaucagacccaaggugagagaccaggagggcagaaugaacuacuacuggacccugguggagcccggcgacaagaucaccuucgaggccaccggcaaccugguggugcccagauacgccuucgccauggagagaaacgccggcagcggcaucaucaucagcgacacccccgugcacgacugcaacaccaccugccagacccccaagggcgccaucaacaccagccugcccuuccagaacauccaccccaucaccaucggcaagugccccaaguacgugaagagcaccaagcugagacuggccaccggccugagaaacgugcccagcauccagagcagaggccuguucggcgccaucgccggcuucaucgagggcggcuggaccggcaugguggacggcugguacggcuaccaccaccagaacgagcagggcagcggcuacgccgccgaccugaagagcacccagaacgccaucgacgagaucaccaacaaggugaacagcgugaucgagaagaugaacacccaguucaccgccgugggcaaggaguucaaccaccuggagaagagaaucgagaaccugaacaagaagguggacgacggcuuccuggacaucuggaccuacaacgccgagcugcuggugcugcuggagaacgagagaacccuggacuaccacgacagcaacgugaagaaccuguacgagaaggugagaagccagcugaagaacaacgccaaggagaucggcaacggcugcuucgaguucuaccacaagugcgacaacaugugcauggagagcgugaagaacggcaccuacgacuaccccaaguacagcgaggaggccaagcugaacagagaggagaucgacggcgugaagcuggagagcaccagaaucuaccagauccuggccaucuacagcaccguggccagcagccuggugcugguggugagccugggcgccaucagcuucuggaugugcagcaacggcagccugcagugcagaaucugcaucuga

SEQ ID NO: 164728 - RNA, 1701 nt, Artificial Sequence; identical to SEQ ID NO: 163893
  derived and/or modified CDS sequence (opt4) from hemagglutinin__InfluenzaA__ADF87302

SEQ ID NO: 164729 - RNA, 1701 nt, Artificial Sequence
  derived and/or modified CDS sequence (opt4) from hemagglutinin__InfluenzaA__ADF87331
augaaggccauccugguggugcugcuguacaccuucgccaccgccaacgccgacacccugugcaucggcuaccacgccaacaacagcaccgacaccguggacaccgugcuggagaagaacgugaccgugacccacagcgugaaccugcuggaggacaagcacaacggcaagcugugcaagcugagaggcguggccccccugcaccugggcaagugcaacaucgccggcuggauccugggcaaccccgagugcgagagccugagcaccgccagcagcuggagcuacaucguggagaccagcaacagcgacaacggcaccugcuaccccggcgacuucaucaacuacgaggagcugagagagcagcugagcagcgugagcagcuucgagagauucgagaucuuccccaagaccagcagcuggcccaaccacgacagcaacaagggcaucaccgccgccugcccccacgccggcgccaagagcuucuacaagaaccugaucuggcuggugaagaagggcaacagcuaccccaagcugagcaagagcuacaucaacgacaagggcaaggaggugcuggugcuguggggcauccaccaccccagcaccagcgccgaccagcagagccuguaccagaacgccgacgccuacguguucgugggcagcagcagauacagcaagaaguucaagcccgagaucgccaucagacccaaggugagagaccaggagggcagaaugaacuacuacuggacccugguggagcccggcgacaagaucaccuucgaggccaccggcaaccugguggugcccagauacgccuucgccauggagagaaacgccggcagcggcaucaucaucagcgacacccccgugcacgacugcaacaccaccugccagacccccaagggcgccaucaacaccagccugcccuuccagaacauccaccccaucaccaucggcaagugccccaaguacgugaagagcaccaagcugagacuggccaccggccugagaaacgugcccagcauccagagcagaggccuguucggcgccaucgccggcuucaucgagggcggcuggaccggcaugguggacggcugguacggcuaccaccaccagaacgagcagggcagcggcuacgccgccgaccugaagagcacccagaacgccaucgacaagaucaccaacaaggugaacagcgugaucgagaagaugaacacccaguucaccgccgugggcaaggaguucaaccaccuggagaagagaaucgagaaccugaacaagaagguggacgacggcuuccuggacaucuggaccuacaacgccgagcugcuggugcugcuggagaacgagagaacccuggacuaccacgacagcaacgugaagaaccuguacgagaaggugagaagccagcugaagaacaacgccaaggagaucggcaacggcugcuucgaguucuaccacaagugcgacaacaccugcauggagagcgugaagaacggcaccuacgacuaccccaaguacagcgaggaggccaagcugaacagagaggagaucgacggcgugaagcuggagagcaccagaaucuaccagauccuggccaucuacagcaccguggccagcagccuggugcugguggugagccugggcgccaucagcuucuggaugugcagcaacggcagccugcagugcagaaucugcaucuga

SEQ ID NO: 164730 - RNA, 1701 nt, Artificial Sequence; identical to SEQ ID NO: 162729
  derived and/or modified CDS sequence (opt4) from hemagglutinin__InfluenzaA__ADF87341

SEQ ID NO: 164731 - RNA, 1701 nt, Artificial Sequence
  derived and/or modified CDS sequence (opt4) from hemagglutinin__InfluenzaA__ADF87351
augaaggccauccugguggugcugcuguacaccuucgccaccgccaacgccgacacccugugcaucggcuaccacgccaacaacagcaccgacaccguggacaccgugcuggagaagaacgugaccgugacccacagcgugaaccugcuggaggacaagcacaacggcaagcugugcaagcugagaggcguggccccccugcaccugggcaagugcaacaucgccggcuggauccugggcaaccccgagugcgacagccugagcaccgccagcagcuggagcuacaucguggagaccagcagcagcgacaacggcaccugcuaccccggcgacuucaucgacuacgaggagcugagagagcagcugagcagcgugagcagcuucgagagauucgagauguuccccaagaccagcagcuggcccaaccacgacagcaacaagggcgugaccgccgccugcccccacgccggcgccaagagcuucuacaagaaccugaucuggcuggugaagaagggcaacagcuaccccaagcugagcaagagcuacaucaacgacaagggcaaggaggugcuggugcuguggggcauccaccaccccagcaccagcgccgaccagcagagccuguaccagaacgccgacgccuacguguucgugggcaccagcagauacagcaagaaguucaagcccgagaucgccaucagacccaaggugagagaccaggagggcagaaugaacuacuacuggacccugguggagcccggcgacaagaucaccuucgaggccaccggcaaccugguggugcccagauacgccuucgccauggagagaaacgccggcagcggcaucaucaucagcgacacccccgugcacgacugcaacaccaccugccagacccccaagggcgccaucaacaccagccugcccuuccagaacauccaccccaucaccaucggcaagugccccaaguacgugaagagcaccaagcugagacuggccaccggccugagaaacgugcccagcauccagagcagaggccuguucggcgccaucgccggcuucaucgagggcggcuggaccggcaugguggacggcugguacggcuaccaccaccagaacgagcagggcagcggcuacgccgccgaccugaagagcacccagaacgccaucgacgagaucaccaacaaggugaacagcgugaucgagaagaugaacacccaguucaccgccgugggcaaggaguucaaccaccuggagaagagaaucgagaaccugaacaagaagguggacgacggcuuccuggacaucuggaccuacaacgccgagcugcuggugcugcuggagaacgagagaacccuggacuaccacgacagcaacgugaagaaccuguacgagaaggugagaagccagcugaagaacaacgccaaggagaucggcaacggcugcuucgaguucuaccacaagugcgacaacaccugcauggagagcgugaagaacggcaccuacgacuaccccaaguacagcgaggaggccaagcugaacagagaggagaucgacggcgugaagcuggagagcaccagaaucuaccagauccuggccaucuacagcaccguggccagcagccuggugcugguggugagccugggcgccaucagcuucuggaugugcagcaacggcagccugcagugcagaaucugcaucuga

SEQ ID NO: 164732 - RNA, 1701 nt, Artificial Sequence; identical to SEQ ID NO: 164356
  derived and/or modified CDS sequence (opt4) from hemagglutinin__InfluenzaA__ADF87361

SEQ ID NO: 164733 - RNA, 1701 nt, Artificial Sequence; identical to SEQ ID NO: 163893
  derived and/or modified CDS sequence (opt4) from hemagglutinin__InfluenzaA__ADF87371

SEQ ID NO: 164734 - RNA, 1701 nt, Artificial Sequence
  derived and/or modified CDS sequence (opt4) from hemagglutinin__InfluenzaA__ADG08115
augaaggccauccugguggugcugcuguacaccuucgccaccgccaacgccgacacccugugcaucggcuaccacgccaacaacagcaccgacaccguggacaccgugcuggagaagaacgugaccgugacccacagcgugaaccugcuggaggacaagcacaacggcaagcugugcaagcugagaggcguggccccccugcaccugggcaagugcaacaucgccggcuggauccugggcaaccccgagugcgagagccugagcaccgccagcagcuggagcuacaucguggagaccagcagcagcggcaacggcaccugcuaccccggcgacuucaucgacuacgaggagcugagagagcagcugagcagcgugagcagcuucgagagauucgagaucuuccccaagaccagcagcuggcccaaccacgacagcaacaagggcgugaccgccgccugcccccacgccggcgccaagagcuucuacaagaaccugaucuggcuggugaagaagggcaacagcuaccccaagcugagcaagagcuacaucaacgacaagggcaaggaggugcuggugcuguggggcauccaccaccccagcaccagcgccgaccagcagagccuguaccagaacgccgacgccuacguguucgugggcaccagcagauacagcaagaaguucaagcccgagaucgccaucagacccaaggugagaggccaggagggcagaaugaacuacuacuggacccugguggagcccggcgacaagaucaccuucgaggccaccggcaaccugguggugcccagauacgccuucgccauggagagaaacgccggcagcggcaucaucaucagcgacacccccgugcacgacugcaacaccaccugccagacccccaagggcgccaucaacaccagccugcccuuccagaacauccaccccaucaccaucggcaagugccccaaguacgugaagagcaccaagcugagacuggccaccggccugagaaacgugcccagcauccagagcagaggccuguucggcgccaucgccggcuucaucgagggcggcuggaccggcaugguggacggcugguacggcuaccaccaccagaacgagcagggcagcggcuacgccgccgaccugaagagcacccagaacgccaucgacgagaucaccaacaaggugaacagcgugaucgagaagaugaacacccaguucaccgccgugggcaaggaguucaaccaccuggagaagagaaucgagaaccugaacaagaagguggacgacggcuuccuggacaucuggaccuacaacgccgagcugcuggugcugcuggagaacgagagaacccuggacuaccacgacagcaacgugaagaaccuguacgagaaggugagaagccagcugaagaacaacgccaaggagaucggcaacggcugcuucgaguucuaccacaagugcgacaacaccugcauggagagcgugaagaacggcaccuacgacuaccccaaguacagcgaggaggccaagcugaacagagaggagaucgacggcgugaagcuggagagcaccagaaucuaccagauccuggccaucuacagcaccguggccagcagccuggugcugguggugagccugggcgccaucagcuucuggaugugcagcaacggcagccugcagugcagaaucugcaucuga

SEQ ID NO: 164735 - RNA, 1701 nt, Artificial Sequence; identical to SEQ ID NO: 163471
  derived and/or modified CDS sequence (opt4) from hemagglutinin__InfluenzaA__ADG21004

SEQ ID NO: 164736 - RNA, 1701 nt, Artificial Sequence; identical to SEQ ID NO: 163471
  derived and/or modified CDS sequence (opt4) from hemagglutinin__InfluenzaA__ADG21006

SEQ ID NO: 164737 - RNA, 1701 nt, Artificial Sequence
  derived and/or modified CDS sequence (opt4) from hemagglutinin__InfluenzaA__ADG21008
augaagaccaucaucgcccugagcuacauccugugccugguguucgcccagaagauccccggcaacgacaacagcaccgccacccugugccugggccaccacgccgugcccaacggcaccaucgugaagaccaucaccaacgaccagaucgaggugaccaacgccaccgagcuggugcagagcagcagcaccggcgagaucugcgacagcccccaccagauccuggacggcgagaacugcacccugaucgacgcccugcugggcgacccccagugcgacggcuuccagaacaagaagugggaccuguucguggagagaagcaagagcuacagcaacugcuaccccuacgacgugcccgacuacgccagccugagaagccugguggccagcagcggcacccuggaguucaacaacgagagcuucaacuggaccggcgugacccagaacggcaccagcagcgccugcaucagaaagagcaacaacagcuucuucagcagacugaacuggcugacccaccugaaguucaaguaccccgcccugaacgugaccaugcccaacaacgagcaguucgacaagcuguacaucuggggcgugcaccaccccggcaccgacaacgaccagaucuuccuguacgcccaggccagcggcagaaucaccgugagcaccaagagaagccagcagaccgugauccccaacaucggcagcagacccagagugagaaacauccccagcagaaucagcaucuacuggaccaucgugaagcccggcgacauccugcugaucaacagcaccggcaaccugaucgcccccagaggcuacuucaagaucagaagcggcaagagcagcaucaugagaagcgacgcccccaucggcaagugcaacagcgagugcaucacccccaacggcagcauccccaacgacaagcccuuccagaacgugaacagaaucaccuacggcgccugccccagauacgugaagcagaacacccugaagcuggccaccggcaugagaaacgugcccgagaagcagaccagaggcaucuucggcgccaucgccggcuucaucgagaacggcugggagggcaugguggacggcugguacggcuucagacaccagaacagcgagggcagaggccaggccgccgaccugaagagcacccaggccgccaucgaccagaucaacggcaagcugaacagacugaucggcaagaccaacgagaaguuccaccagaucgagaaggaguucagcgagguggagggcagaauccaggaccuggagaaguacguggaggacaccaagaucgaccuguggagcuacaacgccgagcugcugguggcccuggagaaccagcacaccaucgaccugaccgacagcgagaugaacaagcuguucgagaagaccaagaagcagcugagagagaacgccgaggacaugggcaacggcugcuucaagaucuaccacaagugcgacaacgccugcaucggcagcaucagaaacggcaccuacgaccacgacguguacagagacgaggcccugaacaacagauuccagaucaagggcguggagcugaagagcggcuacaaggacuggauccuguggaucagcuucgccaucagcugcuuccugcugugcguggcccugcugggcuucaucaugugggccugccagaagggcaacaucagaugcaacaucugcaucuga

SEQ ID NO: 164738 - RNA, 1701 nt, Artificial Sequence
  derived and/or modified CDS sequence (opt4) from hemagglutinin__InfluenzaA__ADG21009
augaagaccaucaucgcccugagcuacauccugugccugguguucgcccagaagcugcccggcaacgacaacagcaccgccacccugugccugggccaccacgccgugcccaacggcaccaucgugaagaccaucaccaacgaccagaucgaggugaccaacgccaccgagcuggugcagagcagcagcaccggcgagaucugcaacagcccccaccagauccuggacggcgagaacugcacccugaucgacgcccugcugggcgacccccagugcgacggcuuccagaacaagaagugggaccuguucguggagagaagcaaggccuacagcaacugcuaccccuacgacgugcccgacuacgccagccugagaagccugguggccagcagcggcacccuggaguucaacaacgagagcuucaacuggaccggcgugacccagaacggcaccagcagcgccugcaucagaagaagcaacaacagcuucuucagcagacugaacuggcugacccaccugagauucaaguaccccgcccugaacgugaccaugcccaacaacgagcaguucgacaagcuguacaucuggggcgugcaccaccccggcaccgacaacgaccagaucuuccuguacgcccaggccagcggcagaaucaccgugagcaccaagagaagccagcagaccgugauccccaacaucggcagcagacccagagugagaaacauccccagcagaaucagcaucuacuggaccaucgugaagcccggcgacauccugcugaucaacagcaccggcaaccugaucgcccccagaggcuacuucaagaucagaagcggcaagagcagcaucaugagaagcgacgcccccaucggcaagugcaacagcgagugcaucacccccaacggcagcauccccaacgacaagcccuuccagaacgugaacagaaucaccuacggcgccugccccagauacgugaagcagaacacccugaagcuggccaccggcaugagaaacgugcccgagaagcagaccagaggcaucuucggcgccaucgccggcuucaucgagaacggcugggagggcaugguggacggcugguacggcuucagacaccagaacagcgagggcagaggccaggccgccgaccugaagagcacccaggccgccaucgaccagaucaacggcaagcugaacagacugaucggcaagaccaacgagaaguuccaccagaucgagaaggaguucagcgagguggagggcagaauccaggaccuggagaaguacguggaggacaccaagaucgaccuguggagcuacaacgccgagcugcugguggcccuggagaaccagcacaccaucgaccugaccgacagcgagaugaacaagcuguucgagaagaccaagaagcagcugagagagaacgccgaggacaugggcaacggcugcuucaagaucuaccacaagugcgacaacgccugcaucggcagcaucagaaacggcaccuacgaccacgacguguacagagacgaggcccugaacaacagauuccagaucaagggcguggagcugaagagcggcuacaaggacuggauccuguggaucagcuucgccaucagcugcuuccugcugugcguggcccugcugggcuucaucaugugggccugccagaagggcaacaucagaugcaacaucugcaucuga

SEQ ID NO: 164739 - RNA, 1701 nt, Artificial Sequence; identical to SEQ ID NO: 163471
  derived and/or modified CDS sequence (opt4) from hemagglutinin__InfluenzaA__ADG21010

SEQ ID NO: 164740 - RNA, 1701 nt, Artificial Sequence
  derived and/or modified CDS sequence (opt4) from hemagglutinin__InfluenzaA__ADG21011
augaagaccaucaucgcccugagcuacauccugugccugguguucgcccagaagcugcccggcaacgacaacagcaccgccacccugugccugggccaccacgccgugcccaacggcaccaucgugaagaccaucaccaacgaccagaucgaggugaccaacgccaccgagcuggugcagagcagcagcaccggcgagaucugcgacagcccccaccagauccuggacggcgagaacugcacccugaucgacgcccugcugggcgacccccagugcgacggcuuccagaacaagaagugggaccuguucguggagagaagcaaggccuacagcaacugcuaccccuacgacgugcccgacuacgccagccugagaagccugguggccagcagcggcacccuggaguucaacaacgagagcuucaacuggaccggcgugacccagaacggcaccagcagcgccugcaucagaagaagcaacaacagcuucuucagcagacugaacuggcugacccaccugaacuucaaguaccccgcccugaacgugaccaugcccaacaacgagcaguucgacaagcuguacaucuggggcgugcaccaccccggcaccgacaaggaccagaucuuccuguacgcccaggccagcggcagaaucaccgugagcaccaagagaagccagcaggccgugauccccaacaucggcagcagacccagagugagagacauccccagcagaaucagcaucuacuggaccaucgugaagcccggcgacauccugcugaucaacagcaccggcaaccugaucgcccccagaggcuacuucaagaucagaagcggcaagagcagcaucaugagaagcgacgcccccaucggcaagugcaacagcgagugcaucacccccaacggcagcauccccaacgacaagcccuuccagaacgugaacagaaucaccuacggcgccugccccagauacgugaagcagaacacccugaagcuggccaccggcaugagaaacgugcccgagaagcagaccagaggcaucuucggcgccaucgccggcuucaucgagaacggcugggagggcaugguggacggcugguacggcuucagacaccagaacagcgagggcagaggccaggccgccgaccugaagagcacccaggccgccaucgaccagaucaacggcaagcugaacagacugaucggcaagaccaacgagaaguuccaccagaucgagaaggaguucagcgagguggagggcagaauccaggaccuggagaaguacguggaggacaccaagaucgaccuguggagcuacaacgccgagcugcugguggcccuggagaaccagcacaccaucgaccugaccgacagcgagaugaacaagcuguucgagaagaccaagaagcagcugagagagaacgccgaggacaugggcaacggcugcuucaagaucuaccacaagugcgacaacgccugcaucggcagcaucagaaacggcaccuacgaccacgacguguacagagacgaggcccugaacaacagauuccagaucaagggcguggagcugaagagcggcuacaaggacuggauccuguggaucagcuucgccaucagcugcuuccugcugugcguggcccugcugggcuucaucaugugggccugccagaagggcaacaucagaugcaacaucugcaucuga

SEQ ID NO: 164741 - RNA, 1701 nt, Artificial Sequence; identical to SEQ ID NO: 163471
  derived and/or modified CDS sequence (opt4) from hemagglutinin__InfluenzaA__ADG21012

SEQ ID NO: 164742 - RNA, 1701 nt, Artificial Sequence; identical to SEQ ID NO: 163471
  derived and/or modified CDS sequence (opt4) from hemagglutinin__InfluenzaA__ADG21013

SEQ ID NO: 164743 - RNA, 1701 nt, Artificial Sequence
  derived and/or modified CDS sequence (opt4) from hemagglutinin__InfluenzaA__ADG21014
augaagaccaucaucgcccugagcuacauccugugccugguguucgcccagaagauccccggcaacgacaacagcaccgccacccugugccugggccaccacgccgugcccaacggcaccaucgugaagaccaucaccaacgaccagaucgaggugaccaacgccaccgagcuggugcagagcagcagcaccggcgagaucugcgacagcccccaccagauccuggacggcgagaacugcacccugaucgacgcccugcugggcgacccccagugcgacggcuuccagaacaagaagugggaccuguucguggagagaagcaaggccuacagcaacugcuaccccuacgacgugcccgacuacgccagccugagaagccugguggccagcagcggcacccuggaguucaacaacgagagcuucaacuggaccggcgugacccagaacggcaccagcagcgccugcaucagaagaagcaacaacagcuucuucagcagacugaacuggcugacccaccugaacuucaaguaccccgcccugaacgugaccaugcccaacaacgagcaguucgacaagcuguacaucuggggcgugcaccaccccggcaccgacaaggaccagaucuuccuguacgcccaggccagcggcagaaucaccgugagcaccaagagaagccagcaggccgugauccccaacaucggcagcagacccagagugagaaacauccccagcagaaucagcaucuacuggaccaucgugaagcccggcgacauccugcugaucaacagcaccggcaaccugaucgcccccagaggcuacuucaagaucagaagcggcaagagcagcaucaugagaagcgacgcccccaucggcaagugcaacagcgagugcaucacccccaacggcagcauccccaacgacaagcccuuccagaacgugaacagaaucaccuacggcgccugccccagauacgugaagcagaacacccugaagcuggccaccggcaugagaaacgugcccgagaagcagaccagaggcaucuucggcgccaucgccggcuucaucgagaacggcugggagggcaugguggacggcugguacggcuucagacaccagaacagcgagggcagaggccaggccgccgaccugaagagcacccaggccgccaucgaccagaucaacggcaagcugaacagacugaucggcaagaccaacgagaaguuccaccagaucgagaaggaguucagcgagguggagggcagaauccaggaccuggagaaguacguggaggacaccaagaucgaccuguggagcuacaacgccgagcugcugguggcccuggagaaccagcacaccaucgaccugaccgacagcgagaugaacaagcuguucgagaagaccaagaagcagcugagagagaacgccgaggacaugggcaacggcugcuucaagaucuaccacaagugcgacaacgccugcaucggcagcaucagaaacggcaccuacgaccacgacguguacagagacgaggcccugaacaacagauuccagaucaagggcguggagcugaagagcggcuacaaggacuggauccuguggaucagcuucgccaucagcugcuuccugcugugcguggcccugcugggcuucaucaugugggccugccagaagggcaacaucagaugcaacaucugcaucuga

SEQ ID NO: 164744 - RNA, 1701 nt, Artificial Sequence
  derived and/or modified CDS sequence (opt4) from hemagglutinin__InfluenzaA__ADG21017
augaagaccaucaucgcccugagcuacauccuguaccugguguucgcccagaagcugcccggcaacgacaacagcaccgccacccugugccugggccaccacgccgugcccaacggcaccaucgugaagaccaucaccaacgaccagaucgaggugaccaacgccaccgagcuggugcagagcagcagcaccggcgagaucugcgacagcccccaccagauccuggacggcgagaacugcacccugaucgacgcccugcugggcgacccccagugcgacggcuuccagaacaagaagugggaccuguucaucgagagaagcaaggccuacagcaacugcuaccccuacgacgugcccgacuacgccagccugagaagccugguggccagcagcggcacccuggaguucaacaacgagagcuucaacuggaccggcgugacccagaacggcaccagcagcgccugcaucagaagaagcaacaacagcuucuucagcagacugaacuggcugacccaccugaacuucaaguaccccgcccugaacgugaccaugcccaacaacgagcaguucgacaagcuguacaucuggggcgugcaccaccccggcaccgacaaggaccagaucuuccuguacgcccaggccagcggcagaaucaccgugagcaccaagagaagccagcaggccgugauccccaacaucggcagcagacccagagugagaaacauccccagcagaaucagcaucuacuggaccaucgugaagcccggcgacauccugcugaucaacagcaccggcaaccugaucgcccccagaggcuacuucaagaucagaagcggcaagagcagcaucaugagaagcgacgcccccaucggcaagugcaacagcgagugcaucacccccaacggcagcauccccaacgacaagcccuuccagaacgugaacagaaucaccuacggcgccugccccagauacgugaagcagaacacccugaagcuggccaccggcaugagaaacgugcccgagaagcagaccagaggcaucuucggcgccaucgccggcuucaucgagaacggcugggagggcaugguggacggcugguacggcuucagacaccagaacagcgagggcagaggccaggccgccgaccugaagagcacccaggccgccaucgaccagaucaacggcaagcugaacagacugaucggcaagaccaacgagaaguuccaccagaucgagaaggaguucagcgagguggagggcagaauccaggaccuggagaaguacguggaggacaccaagaucgaccuguggagcuacaacgccgagcugcugguggcccuggagaaccagcacaccaucgaccugaccgacagcgagaugaacaagcuguucgagaagaccaagaagcagcugagagagaacgccgaggacaugggcaacggcugcuucaagaucuaccacaagugcgacaacgccugcaucggcagcaucagaaacggcaccuacgaccacgacguguacagagacgaggcccugaacaacagauuccagaucaagggcguggagcugaagagcggcuacaaggacuggauccuguggaucagcuucgccaucagcugcuuccugcugugcguggcccugcugggcuucaucaugugggccugccagaagggcaacaucagaugcaacaucugcaucuga

SEQ ID NO: 164745 - RNA, 1701 nt, Artificial Sequence
  derived and/or modified CDS sequence (opt4) from hemagglutinin__InfluenzaA__ADG21018
augaagaccaucaucgcccugagcuacauccugugccugguguucgcccagaagcugcccggcaacgacaacagcaccgccacccugugccugggccaccacgccgugcccaacggcaccaucgugaagaccaucaccaacgaccagaucgaggugaccaacgccaccgagcuggugcagagcagcagcaccggcgagaucugcgacagcccccaccagauccuggacggcgagaacugcacccugaucgacgcccugcugggcgacccccagugcgacggcuuccagaacaagaagugggaccuguucguggagagaagcaaggccuacagcaacugcuaccccuacgacgugcccgacuacgccagccugagaagccugguggccagcagcggcacccuggaguucaacaacgagagcuucaacuggaccggcgugacccagaacggcaccagcagcgccugcaucagaagaagcaacaacagcuucuucagcagacugaacuggcugacccacagcaacuucaaguaccccgcccugaacgugaccaugcccaacaacgagcaguucgacaagcuguacaucuggggcgugcaccaccccggcaccgacaaggaccagaucuuccuguacgcccaggccagcggcagaaucaccgugagcaccaagagaagccagcaggccgugauccccaacaucggcagcagacacagagugagaaacauccccagcagaaucagcaucuacuggaccaucgugaagcccggcgacauccugcugaucaacagcaccggcaaccugaucgcccccagaggcuacuucaagaucagaagcggcaagagcagcaucaugagaagcgacgcccccaucggcaagugcaacagcgagugcaucacccccaacggcagcauccccaacgacaagcccuuccagaacgugaacagaaucaccuacggcgccugccccagauacgugaagcagaacacccugaagcuggccaccggcaugagaaacgugcccgagaagcagaccagaggcaucuucggcgccaucgccggcuucaucgagaacggcugggagggcaugguggacggcugguacggcuucagacaccagaacagcgagggcagaggccaggccgccgaccugaagagcacccaggccgccaucgaccagaucaacggcaagcugaacagacugaucggcaagaccaacgagaaguuccaccagaucgagaaggaguucagcgagguggagggcagaauccaggaccuggagaaguacguggaggacaccaagaucgaccuguggagcuacaacgccgagcugcugguggcccuggagaaccagcacaccaucgaccugaccgacagcgagaugaacaagcuguucgagaagaccaagaagcagcugagagagaacgccgaggacaugggcaacggcugcuucaagaucuaccacaagugcgacaacgccugcaucggcagcaucagaaacggcaccuacgaccacgacguguacagagacgaggcccugaacaacagauuccagaucaagggcguggagcugaagagcggcuacaaggacuggauccuguggaucagcuucgccaucagcugcuuccugcugugcguggcccugcugggcuucaucaugugggccugccagaagggcaacaucagaugcaacaucugcaucuga

SEQ ID NO: 164746 - RNA, 1701 nt, Artificial Sequence
  derived and/or modified CDS sequence (opt4) from hemagglutinin__InfluenzaA__ADG21019
augaagaccaucaucgcccugagcuacauccugugccugguguucgcccagaagcugcccggcaacgacaacagcaccgccacccugugccugggccaccacgccgugcccaacggcaccaucgugaagaccaucaccaacgaccagaucgaggugaccaacgccaccgagcuggugcagagcagcagcaccggcgagaucugcgacagcccccaccagauccuggacggcaagaacugcacccugaucgacacccugcugggcgacccccagugcgacggcuuccagaacaagaagugggaccuguucguggagagaagcaaggccuacagcaacugcuaccccuacgacgugcccgacuacgccagccugagaagccugguggccagcagcggcacccuggaguucaacaacgagagcuucaacuggaccggcgugacccagaacggcaccagcagcgccugcaucagaagaagcaagaacagcuucuucagcagacugaacuggcugacccaccugaacuucaaguaccccgcccugaacgugaccaugcccaacaacgagcaguucgacaagcuguacaucuggggcgugcaccaccccggcaccgacaaggaccagaucuuccuguacgcccaggccagcggcaagaucaucgugagcaccaagagaagccagcagaccgugauccccaacaucggcagcagacccagagugagaaacauccccagcaucaucagcaucuacuggaccaucgugaagcccggcgacauccugcugaucaacagcaccggcaaccugaucgcccccagaggcuacuucaagaucagaagcggcaagagcagcaucaugagaagcgacgcccccaucggcaagugcaacagcgagugcaucacccccaacggcagcauccccaacgacaagcccuuccagaacgugaacagaaucaccuacggcgccugccccagauacgugaagcagaacacccugaagcuggccaccggcaugagaaacgugcccgagaagcagaccagaggcaucuucggcgccaucgccggcuucaucgagaacggcugggagggcaugguggacggcugguacggcuucagacaccagaacagcgagggcagaggccaggccgccgaccugaagagcacccaggccgccaucgaccagaucaacggcaagcugaacagacugaucggcaagaccaacgagaaguuccaccagaucgagaaggaguucagcgagguggagggcagaauccaggaccuggagaaguacguggaggacaccaagaucgaccuguggagcuacaacgccgagcugcugguggcccuggagaaccagcacaccaucgaccugaccgacagcgagaugaacaagcuguucgagaagaccaagaagcagcugagagagaacgccgaggacaucggcaacggcugcuucaagaucuaccacaagugcgacaacgccugcaucggcagcaucagaaacggcaccuacgaccacgacguguacagagacgaggcccugaacaacagauuccagaucaagggcguggagcugaagagcggcuacaaggacuggauccuguggaucagcuucgccaucagcugcuuccugcugugcguggcccugcugggcuucaucaugugggccugccagaagggcaacaucagaugcaacaucugcaucuga

SEQ ID NO: 164747 - RNA, 1701 nt, Artificial Sequence
  derived and/or modified CDS sequence (opt4) from hemagglutinin__InfluenzaA__ADG21020
augaagaccaucaucgcccugagcuacauccugugccugguguucgcccagaagcugcccggcaacgacaacagcaccgccacccugugccugggccaccacgccgugcccaacggcaccaucgugaagaccaucaccaacgaccagaucgaggugaccaacgccaccgagcuggugcagagcagcagcaccggcgagaucugcgacagcccccaccagauccuggacggcaagaacugcacccugaucgacgcccugcugggcgacccccagugcgacggcuuccagaacaagaagugggaccuguucguggagagaagcaaggccuacagcaacugcuaccccuacgacgugcccgacuacgccagccugagaagccugguggccagcagcggcacccuggaguucaacaacgagagcuucaacuggaccggcgugacccagagcggcaccagcagcgccugcaucagaagaagcaagaacagcuucuucagcagacugaacuggcugacccaccugaacuucaaguaccccgcccugaacgugaccaugcccaacaacgagcaguucgacaagcuguacaucuggggcgugcaccaccccggcaccgacaaggaccagaucuuccuguacgcccaggccagcggcagaaucaucgugagcaccaagagaagccagcagaccgugacccccaacaucggcagcagacccagagugagaaacauccccagcagaaucagcaucuacuggaccaucgugaagcccggcgacauccugcugaucaacagcaccggcaaccugaucgcccccagaggcuacuucaagaucagaagcggcaagagcagcaucaugagaagcgacgcccccaucggcaagugcaacagcgagugcaucacccccaacggcagcauccccaacgacaagcccuuccagaacgugaacagaaucaccuacggcgccugccccagauacgugaagcagaacacccugaagcuggccaccggcaugagaaacgugcccgagaagcagaccagaggcaucuucggcgccaucgccggcuucaucgagaacggcugggagggcaugguggacggcugguacggcuucagacaccagaacagcgagggcagaggccaggccgccgaccugaagagcacccaggccgccaucgaccagaucaacggcaagcugaacagacugaucggcaagaccaacgagaaguuccaccagaucgagaaggaguucagcgagguggagggcagaauccaggaccuggagaaguacguggaggacaccaagaucgaccuguggagcuacaacgccgagcugcugguggcccuggagaaccagcacaccaucgaccugaccgacagcgagaugaacaagcuguucgagaagaccaagaagcagcugagagagaacgccgaggacaugggcaacggcugcuucaagaucuaccacaagugcgacaacgccugcaucggcagcaucagaaacggcaccuacgaccacgacguguacagagacgaggcccugaacaacagauuccagaucaagggcguggagcugaagagcggcuacaaggacuggauccuguggaucagcuucgccaucagcugcuuccugcugugcguggcccugcugggcuucaucaugugggccugccagaagggcaacaucagaugcaacaucugcaucuga

SEQ ID NO: 164748 - RNA, 1701 nt, Artificial Sequence; identical to SEQ ID NO: 162494
  derived and/or modified CDS sequence (opt4) from hemagglutinin__InfluenzaA__ADG21022

SEQ ID NO: 164749 - RNA, 1701 nt, Artificial Sequence; identical to SEQ ID NO: 162494
  derived and/or modified CDS sequence (opt4) from hemagglutinin__InfluenzaA__ADG21023

SEQ ID NO: 164750 - RNA, 1701 nt, Artificial Sequence
  derived and/or modified CDS sequence (opt4) from hemagglutinin__InfluenzaA__ADG21024
augaagaccaucaucgcccugagcuacauccugugccugguguucacccagaagcugcccggcaacgacaacagcaccgccacccugugccugggccaccacgccgugcccaacggcaccaucgugaagaccaucaccaacgaccagaucgaggugaccaacgccaccgagcuggugcagagcagcagcaccggcgagaucugcgacagcccccaccagauccuggacggcgagaacugcacccugaucgacgcccugcugggcgacccccagugcgacggcuuccagaacaagaagugggaccuguucguggagagaagcaaggccuacagcaacugcuaccccuacgacgugcccgacuacgccagccugagaagccugguggccagcagcggcgcccuggaguucaacaacgagagcuucaacuggaccggcgugacccagaacggcaccagcagcgccugcaucagaagaagcaacaacagcuucuucagcagacugaacuggcugacccaccugaacuucaaguaccccgcccugaacgugaccaugcccaacaacgagcaguucgacaagcuguacaucuggggcgugcaccaccccggcaccgacaaggaccagaucuuccuguacgcccaggccagcggcagaaucaccgugagcaccaagagaagccagcaggccgugauccccaacaucggcagcagacccagagugagaaacauccccagcagaaucagcaucuacuggaccaucgugaagcccggcgacauccugcugaucaacagcaccggcaaccugaucgcccccagaggcuacuucaagauccagagcggcaagagcagcaucaugagaagcgacgcccccaucggcaagugcaacagcgagugcaucacccccaacggcagcauccccaacgacaagcccuuccagaacgugaacagaaucaccuacggcgccugccccagauacgugaagcagagcacccugaagcuggccaccggcaugagaaacgugcccgagaagcagaccagaggcaucuucggcgccaucgccggcuucaucgagaacggcugggagggcaugguggacggcugguacggcuucagacaccagaacagcgagggcagaggccaggccgccgaccugaagagcacccaggccgccaucgaccagaucaacggcaagcugaacagacugaucggcaagaccaacgagaaguuccaccagaucgagaaggaguucagcgagguggagggcagaauccaggaccuggagaaguacguggaggacaccaagaucgaccuguggagcuacaacgccgagcugcugguggcccuggagaaccagcacaccaucgaccugaccgacagcgagaugaacaagcuguucgagaagaccaagaagcagcugagagagaacgccgaggacaugggcaacggcugcuucaagaucuaccacaagugcgacaacgccugcaucggcagcaucagaaacggcaccuacgaccacgacguguacagagacgaggcccugaacaacagauuccagaucaagggcguggagcugaagagcggcuacaaggacuggauccuguggaucagcuucgccaucagcugcuuccugcugugcguggcccugcugggcuucaucaugugggccugccagaagggcaacaucagaugcaacaucugcaucuga

SEQ ID NO: 164751 - RNA, 1701 nt, Artificial Sequence
  derived and/or modified CDS sequence (opt4) from hemagglutinin__InfluenzaA__ADG21026
augaagaccaucaucgcccugagcuacauccugugccugguguucgcccagaagcugcccggcaacgacaacagcaccgccacccugugccugggccaccacgccgugcccaacggcaccaucgugaagaccaucaccaacgaccagaucgaggugaccaacgccaccgagcuggugcagagcagcagcaccggcgagaucugcgacagcccccaccagauccuggacggcgagaacugcacccugaucgacgcccugcugggcgacccccagugcgacggcuuccagaacaagaagugggaccuguucguggagagaagcaaggccuacagcaacugcuaccccuacgacgugcccgacuacgccagccugagaagccugguggccagcagcggcacccuggaguucaacaacgagagcuucaacuggaccggcgugacccagaacggcaccagcagcgccugcaucagaagaagcaacaacagcuucuucagcagacugaacuggcugacccaccugaacuucaaguaccccgcccugaacgugaccaugcccaacaacgagcaguucgacaagcuguacaucuggggcgugcaccaccccggcaccgacaaggaccagaucuuccuguacgcccaggccagcggcagaaucaccgugagcaccaagagaagccagcaggccgugauccccaacaucggcagcagacugagagugagaaacauccccagcagaaucagcaucuacuggaccaucgugaagcccggcgacauccugcugaucaacagcaccggcaaccugaucgcccccagaggcuacuucaagaucagaagcggcaagagcagcaucaugagaagcgacgcccccaucggcaagugcaacagcgagugcaucacccccaacggcagcauccccaacgacaagcccuuccagaacgugaacagaaucaccuacggcgccugccccagauacgugaagcagagcacccugaagcuggccaccggcaugagaaacgugcccgagaagcagaccagaggcaucuucggcgccaucgccggcuucaucgagaacggcugggagggcaugguggacggcugguacggcuucagacaccagaacagcgagggcagaggccaggccgccgaccugaagagcacccaggccgccaucgaccagaucaacggcaagcugaacagacugaucggcaagaccaacgagaaguuccaccagaucgagaaggaguucagcgagguggagggcagaauccaggaccuggagaaguacguggaggacaccaagaucgaccuguggagcuacaacgccgagcugcugguggcccuggagaaccagcacaccaucgaccugaccgacagcgagaugaacaagcuguucgagaagaccaagaagcagcugagagagaacgccgaggacaugggcaacggcugcuucaccaucuaccacaagugcgacaacgccugcaucggcagcaucagaaacggcaccuacgaccacaacguguacagagacgaggcccugaacaacagauuccagaucaagggcguggagcugaagagcggcuacaaggacuggauccuguggaucagcuucgccaucagcugcuuccugcugugcguggcccugcugggcuucaucaugugggccugccagaagggcaacaucagaugcaacaucugcaucuga

SEQ ID NO: 164752 - RNA, 1701 nt, Artificial Sequence; identical to SEQ ID NO: 162729
  derived and/or modified CDS sequence (opt4) from hemagglutinin__InfluenzaA__ADG21037

SEQ ID NO: 164753 - RNA, 1701 nt, Artificial Sequence
  derived and/or modified CDS sequence (opt4) from hemagglutinin__InfluenzaA__ADG21038
augaaggccauccugguggugcugcuguacaccuucgccaccgccgacgccgacacccugugcaucggcuaccacgccaacaacagcaccgacaccguggacaccgugcuggagaagaacgugaccgugacccacagcgugaaccugcuggaggacaagcacaacggcaagcugugcaagcugagaggcguggccccccugcaccugggcaagugcaacaucgccggcuggauccugggcaaccccgagugcgagagccugagcaccgccagcagcuggagcuacaucguggagaccagcagcagcgacaacggcaccugcuaccccggcgacuucaucgacuacgaggagcugagagagcagcugagcagcgugagcagcuucgagagauucgagaucuuccccaagaccagcagcuggcccaaccacgacagcaacaagggcgugaccgccgccugcccccacgccggcgccaagagcuucuacaagaaccugaucuggcuggugaagaagggcaacagcuaccccaagcugagcaagagcuacaucaacgacaagggcaaggaggugcuggugcuguggggcauccaccaccccagcaccagcgccgaccagcagagccuguaccagaacgccgacgccuacguguucgugggcaccagcagauacagcaagaaguucaagcccgagaucgccaucagacccaaggugagagaccaggagggcagaaugaacuacuacuggacccugguggagcccggcgacaagaucaccuucgaggccaccggcaaccugguggugcccagauacgccuucgccauggagagaaacgccggcagcggcaucaucaucagcgacacccccgugcacgacugcaacaccaccugccagacccccaagggcgccaucaacaccagccugcccuuccagaacauccaccccaucaccaucggcaagugccccaaguacgugaagagcaccaagcugagacuggccaccggccugagaaacgugcccagcauccagagcagaggccuguucggcgccaucgccggcuucaucgagggcggcuggaccggcaugguggacggcugguacggcuaccaccaccagaacgagcagggcagcggcuacgccgccgaccugaagagcacccagaacgccaucgacgagaucaccaacaaggugaacagcgugaucgagaagaugaacacccaguucaccgccgugggcaaggaguucaaccaccuggagaagagaaucgagaaccugaacaagaagguggacgacggcuuccuggacaucuggaccuacaacgccgagcugcuggugcugcuggagaacgagagaacccuggacuaccacgacagcaacgugaagaaccuguacgagaaggugagaagccagcugaagaacaacgccaaggagaucggcaacggcugcuucgaguucuaccacaagugcgacaacaccugcauggagagcgugaagaacggcaccuacgacuaccccaaguacagcgaggaggccaagcugaacagagaggagaucgacggcgugaagcuggagagcaccagaaucuaccagauccuggccaucuacagcaccguggccagcagccuggugcugguggugagccugggcgccaucagcuucuggaugugcagcaacggcagccugcagugcagaaucugcaucuga

SEQ ID NO: 164754 - RNA, 1701 nt, Artificial Sequence
  derived and/or modified CDS sequence (opt4) from hemagglutinin__InfluenzaA__ADG21040
augaaggccauccugguggugcugcuguacaccuucgccaccgccaacgccgacacccugugcaucggcuaccacgccaacaacagcaccgacaccguggacaccgugcuggagaagaacgugaccgugacccacagcgugaaccugcuggaggacaagcacaacggcaagcugugcaagcugagaggcguggccccccugcaccugggcaagugcaacaucgccggcuggauccugggcaaccccgagugcgagagccugagcaccgccagcagcuggagcuacaucguggagaccagcagcagcgacaacggcaccugcuaccccggcgacuucaucgacuacgaggagcugagagagcagcugagcagcgugagcagcuucgagagauucgagaucuuccccaagaccagcagcuggcccaaccacgacagcaacaagggcgugaccgccgccugcccccacgccggcgccaagagcuucuacaagaaccugaucuggcuggugaagaagggcaacagcuaccccaagcugagcaagagcuacaucaacgacaagggcaaggaggugcuggugcuguggggcauccaccaccccagcaccagcgccgaccagcagagccuguaccagaacgccgacgccuacguguucgugggcaccagcagauacagcaagaaguucaagcccgagaucgccaucagacccaaggugagagaccaggagggcagaaugaacuacuacuggacccugguggagcccggcgacaagaucaccuucgaggccaccggcaaccugguggugcccagauacgccuucgccauggagagaaacgccggcagcggcaucaucaucagcgacacccccgugcacgacugcaacaccaccugccagacccccaagggcgccaucaacaccagccugcccuuccagaacgugcaccccaucaccaucggcaagugccccaaguacgugaagagcaccaagcugagacuggccaccggccugagaaacgugcccagcauccagagcagaggccuguucggcgccaucgccggcuucaucgagggcggcuggaccggcaugguggacggcugguacggcuaccaccaccagaacgagcagggcagcggcuacgccgccgaccugaagagcacccagaacgccaucgacgagaucaccaacaaggugaacagcgugaucgagaagaugaacacccaguucaccgccgugggcaaggaguucaaccaccuggagaagagaaucgagaaccugaacaagaagguggacgacggcuuccuggacaucuggaccuacaacgccgagcugcuggugcugcuggagaacgagagaacccuggacuaccacgacagcaacgugaagaaccuguacgagaaggugagaagccagcugaagaacaacgccaaggagaucggcaacggcugcuucgaguucuaccacaagugcgacaacaccugcauggagagcgugaagaacggcaccuacgacuaccccaaguacagcgaggaggccaagcugaacagagaggagaucgacggcgugaagcuggagagcaccagaguguaccagauccuggccaucuacagcaccguggccagcagccuggugcugguggugagccugggcgccaucagcuucuggaugugcagcaacggcagccugcagugcagaaucugcaucuga

SEQ ID NO: 164755 - RNA, 1701 nt, Artificial Sequence
  derived and/or modified CDS sequence (opt4) from hemagglutinin__InfluenzaA__ADG21041
augaaggccauccugguggugcugcuguacaccuucaccaccgccaacgccgacacccugugcaucggcuaccacgccaacaacagcaccgacaccguggacaccgugcuggagaagaacgugaccgugacccacagcgugaaccugcuggaggacaagcacaacggcaagcugugcaagcugagaggcguggccccccugcaccugggcaagugcaacaucgccggcuggauccugggcaaccccgagugcgagagccugagcaccgccagcagcuggagcuacaucguggagaccagcagcagcgacaacggcaccugcuaccccggcgacuucaucgacuacgaggagcugagagagcagcugagcagcgugagcagcuucgagagauucgagaucuuccccaagaccagcagcuggcccaaccacgacagcaacaagggcgugaccgccgccugcccccacgccggcgccaagagcuucuacaagaaccugaucuggcuggugaagaagggcaacagcuaccccaagcugagcaagagcuacaucaacgacaagggcaaggaggugcuggugcuguggggcauccaccaccccagcaccagcgccgaccagcagagccuguaccagaacgccgacgccuacguguucgugggcaccagcagauacagcaagaaguucaagcccgagaucgccaucagacccaaggugagagagcaggagggcagaaugaacuacuacuggacccugguggagcccggcgacaagaucaccuucgaggccaccggcaaccugguggugcccagauacgccuucgccauggagagaaacgccggcagcggcaucaucaucagcgacacccccgugcacgacugcaacaccaccugccagacccccaagggcgccaucaacaccagccugcccuuccagaacauccacagcaucaccaucggcaagugccccaaguacgugaagagcaccaagcugagacuggccaccggccugagaaacgugcccagcauccagagcagaggccuguucggcgccaucgccggcuucaucgagggcggcuggaccggcaugguggacggcugguacggcuaccaccaccagaacgagcagggcagcggcuacgccgccgaccugaagagcacccagaacgccaucgacgagaucaccaacaaggugaacagcgugaucgagaagaugaacacccaguucaccgccgugggcaaggaguucaaccaccuggagaagagaaucgagaaccugaacaagaagguggacgacggcuuccuggacaucuggaccuacaacgccgagcugcuggugcugcuggagaacgagagaacccuggacuaccacgacagcaacgugaagaaccuguacgagaaggugagaagccagcugaagaacaacgccaaggagaucggcaacggcugcuucgaguucuaccacaagugcgacaacaccugcauggagagcgugaagaacggcaccuacgacuaccccaaguacagcgaggaggccaagcugaacagagaggagaucgacggcgugaagcuggagagcaccagaaucuaccagauccuggccaucuacagcaccguggccagcagccuggugcugguggugagccugggcgccgugagcuucuggaugugcagcaacggcagccugcagugcagaaucugcaucuga

SEQ ID NO: 164756 - RNA, 1701 nt, Artificial Sequence; identical to SEQ ID NO: 163830
  derived and/or modified CDS sequence (opt4) from hemagglutinin__InfluenzaA__ADG21042

SEQ ID NO: 164757 - RNA, 1701 nt, Artificial Sequence
  derived and/or modified CDS sequence (opt4) from hemagglutinin__InfluenzaA__ADG21043
augaaggccauccugguggugcugcuguacaccuucaccaccgccaacgccgacacccugugcgugggcuaccacgccaacaacagcaccgacaccguggacaccgugcuggagaagaacgugaccgugacccacagcgugaaccugcuggaggacaagcacaacggcaagcugugcaagcugagaggcguggccccccugcaccugggcaagugcaacaucgccggcuggauccugggcaaccccgagugcgagagccugagcaccgccagcagcuggagcuacaucguggagaccagcagcagcgacaacggcaccugcuaccccggcgacuucaucgacuacgaggagcugagagagcagcugagcagcgugagcagcuucgagagauucgagaucuuccccaagaccagcagcuggcccaaccacgacagcaacaagggcgugaccgccgccugcccccacgccggcgccaagagcuucuacaagaaccugaucuggcuggugaagaagggcaacagcuaccccaagcugagcaagagcuacaucaacgacaagggcaaggaggugcuggugcuguggggcauccaccaccccagcaccagcgccgaccagcagagccuguaccagaacgccgacgccuacguguucgugggcaccagcagauacagcaagaaguucaagcccgagaucgccaucagacccaaggugagagagcaggagggcagaaugaacuacuacuggacccugguggagcccggcgacaagaucaccuucgaggccaccggcaaccugguggugcccagauacgccuucgccauggagagaaacgccggcagcggcaucaucaucagcgacacccccgugcacgacugcaacaccaccugccagacccccaagggcgccaucaacaccagccugcccuuccagaacauccacagcaucaccaucggcaagugccccaaguacgugaagagcaccaagcugagacuggccaccggccugagaaacgugcccagcauccagagcagaggccuguucggcgccaucgccggcuucaucgagggcggcuggaccggcaugguggacggcugguacggcuaccaccaccagaacgagcagggcagcggcuacgccgccgaccugaagagcacccagaacgccaucgacgagaucaccaacaaggugaacagcgugaucgagaagaugaacacccaguucaccgccgugggcaaggaguucaaccaccuggagaagagaaucgagaaccugaacaagaagguggacgacggcuuccuggacaucuggaccuacaacgccgagcugcuggugcugcuggagaacgagagaacccuggacuaccacgacagcaacgugaagaaccuguacgagaaggugagaagccagcugaagaacaacgccaaggagaucggcaacggcugcuucgaguucuaccacaagugcgacaacaccugcauggagagcgugaagaacggcaccuacgacuaccccaaguacagcgaggaggccaagcugaacagagaggagaucgacggcgugaagcuggagagcaccagaaucuaccagauccuggccaucuacagcaccguggccagcagccuggugcugguggugagccugggcgccaucagcuucuggaugugcagcaacggcagccugcagugcagaaucugcaucuga

SEQ ID NO: 164758 - RNA, 1701 nt, Artificial Sequence
  derived and/or modified CDS sequence (opt4) from hemagglutinin__InfluenzaA__ADG21045
augaaggccauccugguggugcugcuguacaccuucaccaccgccaacgccgacacccugugcaucggcuaccacgccaacaacagcaccgacaccguggacaccgugcuggagaagaacgugaccgugacccacagcgugaaccugcuggaggacaagcacaacggcaagcugugcaagcugagaggcguggccccccugcaccugggcaagugcaacaucgccggcuggauccugggcaaccccgagugcgagagccugagcaccgccagcagcuggagcuacaucguggagaccagcagcagcgacaacggcaccugcuaccccggcgacuucaucgacuacgaggagcugagagagcagcugagcagcgugagcagcuucgagagauucgagaucuuccccaagaccagcagcuggcccaaccacgacagcaacaagggcgugaccgccgccugcccccacgccggcgccaagagcuucuacaagaaccugaucuggcuggugaagaagggcaacagcuaccccaagcugagcaagagcuacaucaacgacaagggcaaggaggugcuggugcuguggggcauccaccaccccagcaccagcgccgaccagcagagccuguaccagaacgccgacgccuacguguucgugggcaccagcagauacagcaagaaguucaagcccgagaucgccaucagacccaaggugagagagcaggagggcagaaugaacuacuacuggacccugguggagcccggcgacaagaucaccuucgaggccaccggcaaccugguggugcccagauacgccuucgccauggagagaaacgccggcagcggcaucaucaucagcgacacccccgugcacgacugcaacaccaccugccagacccccaagggcgccaucaacaccagccugcccuuccagaacauccacagcaucaccaucggcaagugccccaaguacgugaagagcaccaagcugagacuggccaccggccugagaaacgugcccagcauccagagcagaggccuguucggcgccaucgccggcuucaucgagggcggcuggaccggcaugguggacggcugguacggcuaccaccaccagaacgagcagggcagcggcuacgccgccgaccugaagagcacccagaacgccaucgacgagaucaccaacaaggugaacagcgugaucgagaagaugaacacccaguucaccgccgugggcaaggaguucaaccaccuggagaagagaaucgagaaccugaacaagaagguggacgacggcuuccuggacaucuggaccuacaacgccgagcugcuggugcugcuggagaacgagagaacccuggacuaccacgacagcaacgugaagaaccuguacgagaaggugagaagccagcugaagaacaacgccaaggagaucggcaacggcugcuucgaguucuaccacaagugcgacaacaccugcauggagagcgugaagaacggcaccuacgacuaccccaaguacagcgaggaggccaagcugaacagagaggagaucgacggcgugaagcuggagagcaccagaaucuaccagauccuggccaucuacagcaccguggccagcagccuggugcugguggugagccugggcgccaucagcuucuggaugugcagcaacggcagccugcagugcagaaucugcaucuga

SEQ ID NO: 164759 - RNA, 1701 nt, Artificial Sequence; identical to SEQ ID NO: 164758
  derived and/or modified CDS sequence (opt4) from hemagglutinin__InfluenzaA__ADG21046

SEQ ID NO: 164760 - RNA, 1701 nt, Artificial Sequence; identical to SEQ ID NO: 163893
  derived and/or modified CDS sequence (opt4) from hemagglutinin__InfluenzaA__ADG21048

SEQ ID NO: 164761 - RNA, 1701 nt, Artificial Sequence
  derived and/or modified CDS sequence (opt4) from hemagglutinin__InfluenzaA__ADG21049
augaaggccauccugguggugcugcuguacaccuucgccaccgccaacgccgacacccugugcaucggcuaccacgccaacaacagcaccgacaccguggacaccgugcuggagaagaacgugaccgugacccacagcgugaaccugcuggaggacaagcacaacggcaagcugugcaagcugagaggcguggccccccugcaccugggcaagugcaacaucgccggcuggauccugggcaaccccgagugcgagagccugagcaccgccagcagcuggagcuacaucguggagaccagcagcagcgacaacggcaccugcuaccccggcgacuucaucgacuacgaggagcugagagagcagcugagcagcgugagcagcuucgagagauucgagaucuuccccaagaccagcagcuggcccaaccacgacagcaacaagggcgugaccgccgccugcccccacgccggcgccaagagcuucuacaagaaccugaucuggcuggugaagaagggcaacagcuaccccaagcugagcaagagcuacaucaacgacaagggcaaggaggugcuggugcuguggggcauccaccaccccagcaccagcgccgaccagcagagccuguaccagaacgccgacgccuacguguucgugggcaccagcagauacagcaagaaguucaagcccgagaucgccaucagacccaaggugagaaaccaggagggcagaaugaacuacuacuggacccugguggagcccggcgacaagaucaccuucgaggccaccggcaaccugguggugcccagauacgccuucgccauggagagaaacgccggcagcggcaucaucaucagcgacacccccgugcacgacugcaacaccaccugccagaccagcaagggcgccaucaacaccagccugcccuuccagaacauccaccccaucaccaucggcaagugccccaaguacgugaagagcaccaagcugagacuggccaccggccugagaaacauccccagcauccagagcagaggccuguucggcgccaucgccggcuucaucgagggcggcuggaccggcaugguggacggcugguacggcuaccaccaccagaacgagcagggcagcggcuacgccgccgaccugaagagcacccagaacgccaucgacgagaucaccaacaaggugaacagcgugaucgagaagaugaacacccaguucaccgccgugggcaaggaguucaaccaccuggagaagagaaucgagaaccugaacaagaagguggacgacggcuuccuggacaucuggaccuacaacgccgagcugcuggugcugcuggagaacgagagaacccuggacuaccacgacagcaacgugaagaaccuguacgagaaggugagaagccagcugaagaacaacgccaaggagaucggcaacggcugcuucgaguucuaccacaagugcgacaacaccugcauggagagcgugaagaacggcaccuacgacuaccccaaguacagcgaggaggccaagcugaacagagaggagaucgacggcgugaagcuggagagcaccagaaucuaccagauccuggccaucuacagcaccguggccagcagccuggugcugguggugagccugggcgccaucagcuucuggaugugcagcaacggcagccugcagugcagaaucugcaucuga

SEQ ID NO: 164762 - RNA, 1701 nt, Artificial Sequence; identical to SEQ ID NO: 163082
  derived and/or modified CDS sequence (opt4) from hemagglutinin__InfluenzaA__ADG21122

SEQ ID NO: 164763 - RNA, 1701 nt, Artificial Sequence; identical to SEQ ID NO: 163893
  derived and/or modified CDS sequence (opt4) from hemagglutinin__InfluenzaA__ADG21123

SEQ ID NO: 164764 - RNA, 1701 nt, Artificial Sequence; identical to SEQ ID NO: 162729
  derived and/or modified CDS sequence (opt4) from hemagglutinin__InfluenzaA__ADG21124

SEQ ID NO: 164765 - RNA, 1701 nt, Artificial Sequence
  derived and/or modified CDS sequence (opt4) from hemagglutinin__InfluenzaA__ADG21125
augaaggccauccugguggugcugcuguacaccuucgccaccgccaacgccgacacccugugcaucggcuaccacgccaacaacagcaccgacaccguggacaccgugcuggagaagaacgugaccgugacccacagcgugaaccugcuggaggacaagcacaacggcaagcugugcaagcugagaggcguggccccccugcaccugggcaagugcaacaucgccggcuggauccugggcaaccccgagugcgagagccugagcaccgccagcagcuggagcuacaucguggagaccagcagcagcgacaacggcaccugcuaccccggcgacuucaucgacuacgaggagcugagagagcagcugagcagcgugagcagcuucaagagauucgagaucuuccccaagaccagcagcuggcccaaccacgacagcaacaagggcgugaccgccgccugcccccacgccggcgccaagagcuucuacaagaaccugaucuggcuggugaagaagggcaacagcuaccccaagcugagcaagagcuacaucaacgacaagggcaaggaggugcuggugcuguggggcauccaccaccccagcaccagcgccgaccagcagagccuguaccagaacgccgacgccuacguguucgugggcaccagcagauacagcaagaaguucaagcccgagaucgccaucagacccaaggugagagaccaggagggcagaaugaacuacuacuggacccugguggagcccggcgacaagaucaccuucgaggccaccggcaaccugguggugcccagauacgccuucgccauggagagaaacgccggcagcggcaucaucaucagcgacacccccgugcacgacugcaacaccaccugccagacccccaagggcgccaucaacaccagccugcccuuccagaacauccaccccaucaccaucggcaagugccccaaguacgugaagagcaccaagcugagacuggccaccggccugagaaacgugcccagcauccagagcagaggccuguucggcgccaucgccggcuucaucgagggcggcuggaccggcaugguggacggcugguacggcuaccaccaccagaacgagcagggcagcggcuacgccgccgaccugaagagcacccagaacgccaucgacgagaucaccaacaaggugaacagcgugaucgagaagaugaacacccaguucaccgccgugggcaaggaguucaaccaccuggagaagagaaucgagaaccugaacaagaagguggacgacggcuuccuggacaucuggaccuacaacgccgagcugcuggugcugcuggagaacgagagaacccuggacuaccacgacagcaacgugaagaaccuguacgagaaggugagaagccagcugaagaacaacgccaaggagaucggcaacggcugcuucgaguucuaccacaagugcgacaacaccugcauggagagcgugaagaacggcaccuacgacuaccccaaguacagcgaggaggccaagcugaacagagaggagaucgacggcgugaagcuggagagcaccagaaucuaccagauccuggccaucuacagcaccguggccagcagccuggugcugguggugagccugggcgccaucagcuucuggaugugcagcaacggcagccugcagugcagaaucugcaucuga

SEQ ID NO: 164766 - RNA, 1701 nt, Artificial Sequence; identical to SEQ ID NO: 162716
  derived and/or modified CDS sequence (opt4) from hemagglutinin__InfluenzaA__ADG21126

SEQ ID NO: 164767 - RNA, 1701 nt, Artificial Sequence; identical to SEQ ID NO: 162716
  derived and/or modified CDS sequence (opt4) from hemagglutinin__InfluenzaA__ADG21127

SEQ ID NO: 164768 - RNA, 1701 nt, Artificial Sequence; identical to SEQ ID NO: 162716
  derived and/or modified CDS sequence (opt4) from hemagglutinin__InfluenzaA__ADG21128

SEQ ID NO: 164769 - RNA, 1701 nt, Artificial Sequence; identical to SEQ ID NO: 162716
  derived and/or modified CDS sequence (opt4) from hemagglutinin__InfluenzaA__ADG21129

SEQ ID NO: 164770 - RNA, 1701 nt, Artificial Sequence; identical to SEQ ID NO: 162729
  derived and/or modified CDS sequence (opt4) from hemagglutinin__InfluenzaA__ADG21130

SEQ ID NO: 164771 - RNA, 1701 nt, Artificial Sequence; identical to SEQ ID NO: 162716
  derived and/or modified CDS sequence (opt4) from hemagglutinin__InfluenzaA__ADG21131

SEQ ID NO: 164772 - RNA, 1701 nt, Artificial Sequence; identical to SEQ ID NO: 162716
  derived and/or modified CDS sequence (opt4) from hemagglutinin__InfluenzaA__ADG21132

SEQ ID NO: 164773 - RNA, 1701 nt, Artificial Sequence; identical to SEQ ID NO: 162716
  derived and/or modified CDS sequence (opt4) from hemagglutinin__InfluenzaA__ADG21133

SEQ ID NO: 164774 - RNA, 1701 nt, Artificial Sequence; identical to SEQ ID NO: 162716
  derived and/or modified CDS sequence (opt4) from hemagglutinin__InfluenzaA__ADG21134

SEQ ID NO: 164775 - RNA, 1701 nt, Artificial Sequence; identical to SEQ ID NO: 162716
  derived and/or modified CDS sequence (opt4) from hemagglutinin__InfluenzaA__ADG21135

SEQ ID NO: 164776 - RNA, 1701 nt, Artificial Sequence; identical to SEQ ID NO: 162716
  derived and/or modified CDS sequence (opt4) from hemagglutinin__InfluenzaA__ADG21136

SEQ ID NO: 164777 - RNA, 1701 nt, Artificial Sequence; identical to SEQ ID NO: 162716
  derived and/or modified CDS sequence (opt4) from hemagglutinin__InfluenzaA__ADG21137

SEQ ID NO: 164778 - RNA, 1701 nt, Artificial Sequence; identical to SEQ ID NO: 162716
  derived and/or modified CDS sequence (opt4) from hemagglutinin__InfluenzaA__ADG21138

SEQ ID NO: 164779 - RNA, 1701 nt, Artificial Sequence; identical to SEQ ID NO: 162716
  derived and/or modified CDS sequence (opt4) from hemagglutinin__InfluenzaA__ADG21139

SEQ ID NO: 164780 - RNA, 1701 nt, Artificial Sequence
  derived and/or modified CDS sequence (opt4) from hemagglutinin__InfluenzaA__ADG21140
augaaggccauccugguggugcugcuguacaccuucgccaccgccaacgccgacacccugugcaucggcuaccacgccaacaacagcaccgacaccguggacaccgugcuggagaagaacgugaccgugacccacagcgugaaccugcuggaggacaagcacaacggcaagcugugcaagcugagaggcguggccccccugcaccugggcaagugcaacaucgccggcuggauccugggcaaccccgagugcgagagccugagcaccgccagcagcuggagcuacaucguggagaccagcagcagcgacaacggcaccugcuaccccggcgacuucaucgacuacgaggagcugagagagcagcugagcagcgugagcagcuucgagagauucgagaucuuccccaagaccagcagcuggcccaaccacgacagcaacaagggcgugaccgccgccugcccccacgccggcgccaagagcuucuacaagaaccugaucuggcuggugaagaagggcaacagcuaccccaagcugagcaagagcuacaucaacgacaagggcaaggaggugcugaugcuguggggcauccaccaccccagcaccagcgccgaccagcagagccuguaccagaacgccgacgccuacguguucgugggcagcagcagauacagcaagaaguucaagcccgagaucgccaucagacccaaggugagagaccaggagggcagaaugaacuacuacuggacccugguggagcccggcgacaagaucaccuucgaggccaccggcaaccugguggugcccagauacgccuucgccauggagagaaacgccggcagcggcaucaucaucagcgacacccccgugcacgacugcaacaccaccugccagacccccaagggcgccaucaacaccagccugcccuuccagaacauccaccccaucaccaucggcaagugccccaaguacgugaagagcaccaagcugagacuggccaccggccugagaaacgugcccagcauccagagcagaggccuguucggcgccaucgccggcuucaucgagggcggcuggaccggcaugguggacggcugguacggcuaccaccaccagaacgagcagggcagcggcuacgccgccgaccugaagagcacccagaacgccaucgacgagaucaccaacaaggugaacagcgugaucgagaagaugaacacccaguucaccgccgugggcaaggaguucaaccaccuggagaagagaaucgagaaccugaacaagaagguggacgacggcuuccuggacaucuggaccuacaacgccgagcugcuggugcugcuggagaacgagagaacccuggacuaccacgacagcaacgugaagaaccuguacgagaaggugagaagccagcugaagaacaacgccaaggagaucggcaacggcugcuucgaguucuaccacaagugcgacaacaccugcauggagagcgugaagaacggcaccuacgacuaccccaaguacagcgaggaggccaagcugaacagagaggagaucgacggcgugaagcuggagagcaccagaaucuaccagauccuggccaucuacagcaccguggccagcagccuggugcugguggugagccugggcgccaucagcuucuggaugugcagcaacggcagccugcagugcagaaucugcaucuga

SEQ ID NO: 164781 - RNA, 1701 nt, Artificial Sequence; identical to SEQ ID NO: 162716
  derived and/or modified CDS sequence (opt4) from hemagglutinin__InfluenzaA__ADG21141

SEQ ID NO: 164782 - RNA, 1701 nt, Artificial Sequence
  derived and/or modified CDS sequence (opt4) from hemagglutinin__InfluenzaA__ADG21142
augaaggccauccugguggugcugcuguacaccuucgccaccgccaacgccgacacccugugcaucggcuaccacgccaacaacagcaccgacaccguggacaccgugcuggagaagaacgugaccgugacccacagcgugaaccugcuggaggacaagcacaacggcaagcugugcaagcugagaggcguggccccccugcaccugggcaagugcaacaucgccggcuggauccugggcaaccccgagugcgagagccugagcaccgccagcagcuggagcuacaucguggagaccagcagcagcgacaacggcaccugcuaccccggcgacuucaucgacuacgaggagcugagagagcagcugagcagcgugagcagcuucgagagauucgagaucuuccccaagaccagcagcuggcccaaccacgacagcaacaagggcgugaccgccgccugcccccacgccggcgagaagagcuucuacaagaaccugaucuggcuggugaagaagggcaacagcuaccccaagcugagcaagagcuacaucaacgacaagggcaaggaggugcuggugcuguggggcauccaccaccccagcaccagcgccgaccagcagagccuguaccagaacgccgacgccuacguguucgugggcagcagcagauacagcaagaaguucaagcccgagaucgccaucagacccaaggugagagaccaggagggcagaaugaacuacuacuggacccugguggagcccggcgacaagaucaccuucgaggccaccggcaaccugguggugcccagauacgccuucgccauggagagaaacgccggcagcggcaucaucaucagcgacacccccgugcacgacugcaacaccaccugccagacccccaagggcgccaucaacaccagccugcccuuccagaacauccaccccaucaccaucggcaagugccccaaguacgugaagagcaccaagcugagacuggccaccggccugagaaacgugcccagcauccagagcagaggccuguucggcgccaucgccggcuucaucgagggcggcuggaccggcaugguggacggcugguacggcuaccaccaccagaacgagcagggcagcggcuacgccgccgaccugaagagcacccagaacgccaucgacgagaucaccaacaaggugaacagcgugaucgagaagaugaacacccaguucaccgccgugggcaaggaguucaaccaccuggagaagagaaucgagaaccugaacaagaagguggacgacggcuuccuggacaucuggaccuacaacgccgagcugcuggugcugcuggagaacgagagaacccuggacuaccacgacagcaacgugaagaaccuguacgagaaggugagaagccagcugaagaacaacgccaaggagaucggcaacggcugcuucgaguucuaccacaagugcgacaacaccugcauggagagcgugaagaacggcaccuacgacuaccccaaguacagcgaggaggccaagcugaacagagaggagaucgacggcgugaagcuggagagcaccagaaucuaccagauccuggccaucuacagcaccguggccagcagccuggugcugguggugagccugggcgccaucagcuucuggaugugcagcaacggcagccugcagugcagaaucugcaucuga

SEQ ID NO: 164783 - RNA, 1701 nt, Artificial Sequence; identical to SEQ ID NO: 162716
  derived and/or modified CDS sequence (opt4) from hemagglutinin__InfluenzaA__ADG21143

SEQ ID NO: 164784 - RNA, 1701 nt, Artificial Sequence; identical to SEQ ID NO: 162716
  derived and/or modified CDS sequence (opt4) from hemagglutinin__InfluenzaA__ADG21144

SEQ ID NO: 164785 - RNA, 1701 nt, Artificial Sequence
  derived and/or modified CDS sequence (opt4) from hemagglutinin__InfluenzaA__ADG21145
augaaggccauccugguggugcugcuguacaccuucgccaccgccaacgccgacacccugugcaucggcuaccacgccaacaacagcaccgacaccguggacaccgugcuggagaagaacgugaccgugacccacagcgugaaccugcuggaggacaagcacaacggcaagcugugcaagcugagaggcguggccccccugcaccugggcaagugcaacaucgccggcuggauccugggcaaccccgagugcgagagccugagcaccgccagcagcuggagcuacaucguggagaccagcagcagcgacaacggcaccugcuaccccggcgacuucaucgacuacgaggagcugagagagcagcugagcagcgugagcagcuucgagagauucgagaucuuccccaagaccagcagcuggcccaaccacgacagcaacaagggcgugaccgccgccugcccccacgccggcgccaagagcuucuacaagaaccugaucuggcuggugaagaagggcaacagcuaccccaagcugagcaucagcuacaucaacgacaagggcaaggaggugcuggugcuguggggcauccaccaccccagcaccagcgccgaccagcagagccuguaccagaacgccgacgccuacguguucgugggcagcagcagauacagcaagaaguucaagcccgagaucgccaucagacccaaggugagagaccaggagggcagaaugaacuacuacuggacccugguggagcccggcgacaagaucaccuucgaggccaccggcaaccugguggugcccagauacgccuucgccauggagagaaacgccggcagcggcaucaucaucagcgacacccccgugcacgacugcaacaccaccugccagacccccaagggcgccaucaacaccagccugcccuuccagaacauccaccccaucaccaucggcaagugccccaaguacgugaagagcaccaagcugagacuggccaccggccugagaaacgugcccagcauccagagcagaggccuguucggcgccaucgccggcuucaucgagggcggcuggaccggcaugguggacggcugguacggcuaccaccaccagaacgagcagggcagcggcuacgccgccgaccugaagagcacccagaacgccaucgacgagaucaccaacaaggugaacagcgugaucgagaagaugaacacccaguucaccgccgugggcaaggaguucaaccaccuggagaagagaaucgagaaccugaacaagaagguggacgacggcuuccuggacaucuggaccuacaacgccgagcugcuggugcugcuggagaacgagagaacccuggacuaccacgacagcaacgugaagaaccuguacgagaaggugagaagccagcugaagaacaacgccaaggagaucggcaacggcugcuucgaguucuaccacaagugcgacaacaccugcauggagagcgugaagaacggcaccuacgacuaccccaaguacagcgaggaggccaagcugaacagagaggagaucgacggcgugaagcuggagagcaccagaaucuaccagauccuggccaucuacagcaccguggccagcagccuggugcugguggugagccugggcgccaucagcuucuggaugugcagcaacggcagccugcagugcagaaucugcaucuga

SEQ ID NO: 164786 - RNA, 1701 nt, Artificial Sequence; identical to SEQ ID NO: 162716
  derived and/or modified CDS sequence (opt4) from hemagglutinin__InfluenzaA__ADG21146

SEQ ID NO: 164787 - RNA, 1701 nt, Artificial Sequence; identical to SEQ ID NO: 162716
  derived and/or modified CDS sequence (opt4) from hemagglutinin__InfluenzaA__ADG21147

SEQ ID NO: 164788 - RNA, 1701 nt, Artificial Sequence; identical to SEQ ID NO: 162729
  derived and/or modified CDS sequence (opt4) from hemagglutinin__InfluenzaA__ADG21148

SEQ ID NO: 164789 - RNA, 1701 nt, Artificial Sequence; identical to SEQ ID NO: 163830
  derived and/or modified CDS sequence (opt4) from hemagglutinin__InfluenzaA__ADG21149

SEQ ID NO: 164790 - RNA, 1701 nt, Artificial Sequence; identical to SEQ ID NO: 163893
  derived and/or modified CDS sequence (opt4) from hemagglutinin__InfluenzaA__ADG21150

SEQ ID NO: 164791 - RNA, 1701 nt, Artificial Sequence; identical to SEQ ID NO: 162716
  derived and/or modified CDS sequence (opt4) from hemagglutinin__InfluenzaA__ADG21151

SEQ ID NO: 164792 - RNA, 1701 nt, Artificial Sequence; identical to SEQ ID NO: 162716
  derived and/or modified CDS sequence (opt4) from hemagglutinin__InfluenzaA__ADG21152

SEQ ID NO: 164793 - RNA, 1701 nt, Artificial Sequence; identical to SEQ ID NO: 162729
  derived and/or modified CDS sequence (opt4) from hemagglutinin__InfluenzaA__ADG21153

SEQ ID NO: 164794 - RNA, 1701 nt, Artificial Sequence; identical to SEQ ID NO: 162716
  derived and/or modified CDS sequence (opt4) from hemagglutinin__InfluenzaA__ADG21154

SEQ ID NO: 164795 - RNA, 1701 nt, Artificial Sequence; identical to SEQ ID NO: 162716
  derived and/or modified CDS sequence (opt4) from hemagglutinin__InfluenzaA__ADG21155

SEQ ID NO: 164796 - RNA, 1701 nt, Artificial Sequence; identical to SEQ ID NO: 163893
  derived and/or modified CDS sequence (opt4) from hemagglutinin__InfluenzaA__ADG21156

SEQ ID NO: 164797 - RNA, 1701 nt, Artificial Sequence; identical to SEQ ID NO: 163901
  derived and/or modified CDS sequence (opt4) from hemagglutinin__InfluenzaA__ADG21158

SEQ ID NO: 164798 - RNA, 1701 nt, Artificial Sequence
  derived and/or modified CDS sequence (opt4) from hemagglutinin__InfluenzaA__ADG21159
augaaggccauccugguggugcugcuguacaccuucgccaccgccaacgccgacacccugugcaucggcuaccacgccaacaacagcaccgacaccguggacaccgugcuggagaagaacgugaccgugacccacagcgugaaccugcuggaggacaagcacaacggcaagcugugcaagcugagaggcguggccccccugcaccugggcaagugcaacaucgccggcuggauccugggcaaccccgagugcgagagccugagcaccgccagcagcuggagcuacaucguggagaccagcagcagcgacaacggcaccugcuaccccggcgacuucaucgacuacgaggagcugagagagcagcugagcagcgugagcagcuucgagagauucgagaucuuccccaagaccagcagcuggcccaaccacgacagcaacaagggcgugaccgccgccugcccccacgccggcgccaagagcuucuacaagaaccugaucuggcuggugaagaagggcaacagcuaccccaagcugagcaagagcuacaucaacgacaagggcaaggaggugcuggugcuguggggcauccaccaccccagcaccagcgccgaccagcagagccuguaccagaacgccgacgccuacguguucgugggcaccagcagauacagcaagaaguucaagcccgagaucgccaucagacccaaggugagagaccaggagggcagaaugaacuacuacuggacccugguggagcccggcgacaagaucaccuucgaggccaccggcaaccugguggugcccagauacgccuucgccauggagagaaacgccggcagcggcaucaucaucagcgacacccccgugcacgacugcaacaccaccugccagacccccaagggcgccaucaacaccagccugcccuuccagaacauccaccccaucaccaucggcaagugccccaaguacgugaagagcaccaagcugagacuggccaccggccugagaaacgugcccagcauccagagcagaggccuguucggcgccaucgccggcuucaucgagggcggcuggaccggcaugguggacggcugguacggcuaccaccaccagaacgagcagggcagcggcuacgccgccgaccugaagagcacccagaacgccaucgacgagaucaccaacaaggugaacagcgugaucgagaagaugaacacccaguucaccgccgugggcaaggaguucaaccaccuggagaagagaaucgagaaccugaacaagaagguggacgacggcuuccuggacaucuggaccuacaacgccgagcugcuggugcugcuggagaacgagagaacccuggacuaccacgacagcaacgugaagaaccuguacgagaaggugagaagccagcugaagaacaacgccaaggagaucggcaacggcugcuucgaguucuaccacaagugcgacaacaccugcauggagagcgugaagaacggcaccuacgacuaccccaaguacagcgaggaggccaagcugaacagagaggagaucgacggcgugaagcuggagagcaccagaaucuaccagauccuggccaucuacagcaccguggccagcagccuggugcugcuggugagccugggcgccaucagcuucuggaugugcagcaacggcagccugcagugcagaaucugcaucuga

SEQ ID NO: 164799 - RNA, 1701 nt, Artificial Sequence; identical to SEQ ID NO: 163901
  derived and/or modified CDS sequence (opt4) from hemagglutinin__InfluenzaA__ADG21160

SEQ ID NO: 164800 - RNA, 1701 nt, Artificial Sequence
  derived and/or modified CDS sequence (opt4) from hemagglutinin__InfluenzaA__ADG21161
augaaggccauccugguggugcugcuguacaccuucgccaccgccaacgccgacacccugugcaucggcuaccacgccaacaacagcaccgacaccguggacaccgugcuggagaagaacgugaccgugacccacagcgugaaccugcuggaggacaagcacaacggcaagcugugcaagcugagaggcguggccccccugcaccugggcaagugcaacaucgccggcuggauccugggcaaccccgagugcgagagccugagcaccgccagcagcuggagcuacaucguggagaccagcagcagcgacaacggcaccugcuaccccggcgacuucaucgacuacgaggagcugagagagcagcugagcagcgugagcagcuucgagagauucgagaucuuccccaagaccagcagcuggcccaaccacgacagcaacaagggcgugaccgccgccugcccccacgccggcgccaagagcuucuacaagaaccugaucuggcuggugaagaaggagaacagcuaccccaagcugagcaagagcuacaucaacgacaagggcaaggaggugcuggugcuguggggcauccaccaccccagcaccagcgccgaccagcagagccuguaccagaacgccgacgccuacguguucgugggcaccagcagauacagcaagaaguucaagcccgagaucgccaucagacccaaggugagagaccaggagggcagaaugaacuacuacuggacccugguggagcccggcgacaagaucaccuucgaggccaccggcaaccugguggugcccagauacgccuucgccauggagagaaacgccggcagcggcaucaucaucagcgacacccccgugcacgacugcaacaccaccugccagacccccaagggcgccaucaacaccagccugcccuuccagaacauccaccccaucaccaucggcaagugccccaaguacgugaagagcaccaagcugagacuggccaccggccugagaaacgugcccagcauccagagcagaggccuguucggcgccaucgccggcuucaucgagggcggcuggaccggcaugguggacggcugguacggcuaccaccaccagaacgagcagggcagcggcuacgccgccgaccugaagagcacccagaacgccaucgacgagaucaccaacaaggugaacagcgugaucgagaagaugaacacccaguucaccgccgugggcaaggaguucaaccaccuggagaagagaaucgagaaccugaacaagaagguggacgacggcuuccuggacaucuggaccuacaacgccgagcugcuggugcugcuggagaacgagagaacccuggacuaccacaacagcaacgugaagaaccuguacgagaaggugagaagccagcugaagaacaacgccaaggagaucggcaacggcugcuucgaguucuaccacaagugcgacaacaccugcauggagagcgugaagaacggcaccuacgacuaccccaaguacagcgaggaggccaagcugaacagagaggagaucgacggcgugaagcuggagagcaccagaaucuaccagauccuggccaucuacagcaccguggccagcagccuggugcugguggugagccugggcgccaucagcuucuggaugugcagcaacggcagccugcagugcagaaucugcaucuga

SEQ ID NO: 164801 - RNA, 1701 nt, Artificial Sequence
  derived and/or modified CDS sequence (opt4) from hemagglutinin__InfluenzaA__ADG21163
augaaggccauccugguggugcugcuguacaccuucgccaccgccaacgccgacacccugugcaucggcuaccacgccaacaacagcaccgacaccguggacaccgugcuggagaagaacgugaccgugacccacagcgugaaccugcuggaggacaagcacaacggcaagcugugcaagcugagaggcguggccccccugcaccugggcaagugcaacaucgccggcuggauccugggcaaccccgagugcgagagccugagcaccgccagcagcuggagcuacaucguggagaccagcagcagcgacaacggcaccugcuaccccggcgacuucaucgacuacgaggagcugagagagcagcugagcagcgugagcagcuucgagagauucgagaucuuccccaagaccagcagcuggcccaaccacgacagcaacaagggcgugaccgccgccugcccccacgccggcgccaagagcuucuacaagaaccugaucuggcuggugaagaagggcaacagcuaccccaagcugagcaagagcuacaucaacgacaagggcaaggaggugcuggugcuguggggcauccaccaccccagcaccagcgccgaccagcagagccuguaccagaacgccgacgccuacguguucgugggcaccagcagauacagcaagaaguucaagcccgagaucgccaucagacccaaggugagagaccaggagggcagaaugaacuacuacuggacccugguggagcccggcgacaagaucaccuucgaggccaccggcaaccugguggugcccagauacgccuucgccauggagagaaacgccggcagcggcaucaucaucagcgacacccccgugcacgacugcaacaccaccugccagacccccaagggcgccaucaacaccagccugcccuuccagaacgugcaccccaucaccaucggcaagugccccaaguacgugaagagcaccaagcugagacuggccaccggccugagaaacgugcccagcauccagagcagaggccuguucggcgccaucgccggcuucaucgagggcggcuggaccggcaugguggacggcugguacggcuaccaccaccagaacgagcagggcagcggcuacgccgccgaccugaagagcacccagaacgccaucgacgagaucaccaacaaggugaacagcgugaucgagaagaugaacacccaguucaccgccgugggcaaggaguucaaccaccuggagaagagaaucgagaaccugaacaagaagguggacgacggcuuccuggacguguggaccuacaacgccgagcugcuggugcugcuggagaacgagagaacccuggacuaccacgacagcaacgugaagaaccuguacgagaaggugagaagccagcugaagaacaacgccaaggagaucggcaacggcugcuucgaguucuaccacaagugcgacaacaccugcauggagagcgugaagaacggcaccuacgacuaccccaaguacagcgaggaggccaagcugaacagagaggagaucgacggcgugaagcuggagagcaccagaaucuaccagauccuggccaucuacagcaccguggccagcagccuggugcugguggugagccugggcgccaucagcuucuggaugugcagcaacggcagccugcagugcagaaucugcaucuga

SEQ ID NO: 164802 - RNA, 1701 nt, Artificial Sequence
  derived and/or modified CDS sequence (opt4) from hemagglutinin__InfluenzaA__ADG21165
augaaggccauccugguggugcugcuguacaccuucgccaccgccaacgccgacacccugugcaucggcuaccacgccaacaacagcaccgacaccguggacaccgugcuggagaagaacgugaccgugacccacagcgugaaccugcuggaggacaagcacaacggcaagcugugcaagcugagaggcaucgccccccugcaccugggcaagugcaacaucgccggcuggauccugggcaaccccgagugcgagagccugagcaccgccagcagcuggagcuacaucguggagaccagcagcagcgacaacggcaccugcuaccccggcgacuucaucgacuacgaggagcugagagagcagcugagcagcgugagcagcuucaagagauucgagaucuuccccaagaccaacagcuggcccaaccacgacagcaacaagggcgugaccgccgccugcccccacgccggcgccaagagcuucuacaagaaccugaucuggcuggugaagaagggcaacagcuaccccaagcugagcaagagcuacaucaacgacaagggcaaggaggugcuggugcuguggggcauccaccaccccagcaccagcgccgaccagcagagccuguaccagaacgccgacgccuacguguucgugggcaccagcaaguacagcaagaaguucaagcccgagaucgccaucagacccaaggugagagaccaggagggcagaaugaacuacuacuggacccugguggagcccggcgacaagaucaccuucgaggccaccggcaaccugguggugcccagauacgccuucgccauggagagaaacgccggcagcggcaucaucaucagcgacacccccgugcacgacugcaacaccaccugccagacccccaagggcgccaucaacaccagccugcccuuccagaacauccaccccaucaccaucggcaagugccccaaguacgugaagagcaccaagcugagacuggccaccggccugagaaacgugcccagcauccagagcagaggccuguucggcgccaucgccggcuucaucgagggcggcuggaccggcaugguggacggcugguacggcuaccaccaccagaacgagcagggcagcggcuacgccgccgaccugaagagcacccagaacgccaucgacggcaucaccaacaaggugaacagcgugaucgagaagaugaacacccaguucaccgccgugggcaaggaguucaaccaccuggagaagagaaucgagaaccugaacaagaagguggacgacggcuuccuggacaucuggaccuacaacgccgagcugcuggugcugcuggagaacgagagaacccuggacuaccacgacagcaacgugaagaaccuguacgagaaggugagaagccagcugaagaacaacgccaaggagaucggcaacggcugcuucgaguucuaccacaagugcgacaacaccugcauggagagcgugaagaacggcaccuacgacuaccccaaguacagcgaggaggccaagcugaacagagaggagaucgacggcgugaagcuggagagcaccagaaucuaccagauccuggccaucuacagcaccguggccagcagccuggugcugguggugagccugggcgccaucagcuucuggaugugcagcaacggcagccugcagugcagaaucugcaucuga

SEQ ID NO: 164803 - RNA, 1701 nt, Artificial Sequence; identical to SEQ ID NO: 162716
  derived and/or modified CDS sequence (opt4) from hemagglutinin__InfluenzaA__ADG21166

SEQ ID NO: 164804 - RNA, 1701 nt, Artificial Sequence
  derived and/or modified CDS sequence (opt4) from hemagglutinin__InfluenzaA__ADG21168
augaaggccauccugguggugcugcuguacaccuucgccaccgccaacgccgacacccugugcaucggcuaccacgccaacaacagcaccgacaccguggacaccgugcuggagaagaacgugaccgugacccacagcgugaaccugcuggaggacaagcacaacggcaagcugugcaagcugagaggcguggccccccugcaccugggcaagugcaacaucgccggcuggauccugggcaaccccgagugcgagagccugagcaccgccagcagcuggagcuacaucguggagaccagcagcagcgacaacggcaccugcuaccccggcgacuucaucgacuacgaggagcugagagagcagcugagcagcgugagcagcuucgagagauucgagaucuuccccaagaccagcagcuggcccaaccacgacagcaacaagggcgugaccgccgccugcccccacgccggcgccaagagcuucuacaagaaccugaucuggcuggugaagaagggcaacagcuaccccaagcugagcaaguucuacaucaacgacaagggcaaggaggugcuggugcuguggggcauccaccaccccagcaccagcgccgaccagcagagccuguaccagaacgccgacgccuacguguucgugggcagcagcagauacagcaagaaguucaagcccgagaucgccaucagacccaaggugagagaccaggagggcagaaugaacuacuacuggacccugguggagcccggcgacaagaucaccuucgaggccaccggcaaccugguggugcccagauacgccuucgccauggagagaaacgccggcagcggcaucaucaucagcgacacccccgugcacgacugcaacaccaccugccagacccccaagggcgccaucaacaccagccugcccuuccagaacauccaccccaucaccaucggcaagugccccaaguacgugaagagcaccaagcugagacuggccaccggccugagaaacgugcccagcauccagagcagaggccuguucggcgccaucgccggcuucaucgagggcggcuggaccggcaugguggacggcugguacggcuaccaccaccagaacgagcagggcagcggcuacgccgccgaccugaagagcacccagaacgccaucgacgagaucaccaacaaggugaacagcgugaucgagaagaugaacacccaguucaccgccgugggcaaggaguucaaccaccuggagaagagaaucgagaaccugaacaagaagguggacgacggcuuccuggacaucuggaccuacaacgccgagcugcuggugcugcuggagaacgagagaacccuggacuaccacgacagcaacgugaagaaccuguacgagaaggugagaagccagcugaagaacaacgccaaggagaucggcaacggcugcuucgaguucuaccacaagugcgacaacaccugcauggagagcgugaagaacggcaccuacgacuaccccaaguacagcgaggaggccaagcugaacagagaggagaucgacggcgugaagcuggagagcaccagaaucuaccagauccuggccaucuacagcaccguggccagcagccuggugcugguggugagccugggcgccaucagcuucuggaugugcagcaacggcagccugcagugcagaaucugcaucuga

SEQ ID NO: 164805 - RNA, 1701 nt, Artificial Sequence; identical to SEQ ID NO: 164758
  derived and/or modified CDS sequence (opt4) from hemagglutinin__InfluenzaA__ADG21169

SEQ ID NO: 164806 - RNA, 1701 nt, Artificial Sequence; identical to SEQ ID NO: 162716
  derived and/or modified CDS sequence (opt4) from hemagglutinin__InfluenzaA__ADG21170

SEQ ID NO: 164807 - RNA, 1701 nt, Artificial Sequence; identical to SEQ ID NO: 162716
  derived and/or modified CDS sequence (opt4) from hemagglutinin__InfluenzaA__ADG21173

SEQ ID NO: 164808 - RNA, 1701 nt, Artificial Sequence; identical to SEQ ID NO: 162729
  derived and/or modified CDS sequence (opt4) from hemagglutinin__InfluenzaA__ADG21174

SEQ ID NO: 164809 - RNA, 1701 nt, Artificial Sequence; identical to SEQ ID NO: 162729
  derived and/or modified CDS sequence (opt4) from hemagglutinin__InfluenzaA__ADG21175

SEQ ID NO: 164810 - RNA, 1701 nt, Artificial Sequence; identical to SEQ ID NO: 162716
  derived and/or modified CDS sequence (opt4) from hemagglutinin__InfluenzaA__ADG21176

SEQ ID NO: 164811 - RNA, 1701 nt, Artificial Sequence; identical to SEQ ID NO: 162716
  derived and/or modified CDS sequence (opt4) from hemagglutinin__InfluenzaA__ADG21177

SEQ ID NO: 164812 - RNA, 1701 nt, Artificial Sequence; identical to SEQ ID NO: 162716
  derived and/or modified CDS sequence (opt4) from hemagglutinin__InfluenzaA__ADG21178

SEQ ID NO: 164813 - RNA, 1701 nt, Artificial Sequence; identical to SEQ ID NO: 163082
  derived and/or modified CDS sequence (opt4) from hemagglutinin__InfluenzaA__ADG21179

SEQ ID NO: 164814 - RNA, 1701 nt, Artificial Sequence; identical to SEQ ID NO: 162716
  derived and/or modified CDS sequence (opt4) from hemagglutinin__InfluenzaA__ADG21180

SEQ ID NO: 164815 - RNA, 1701 nt, Artificial Sequence; identical to SEQ ID NO: 162716
  derived and/or modified CDS sequence (opt4) from hemagglutinin__InfluenzaA__ADG21181

SEQ ID NO: 164816 - RNA, 1701 nt, Artificial Sequence; identical to SEQ ID NO: 162716
  derived and/or modified CDS sequence (opt4) from hemagglutinin__InfluenzaA__ADG21182

SEQ ID NO: 164817 - RNA, 1701 nt, Artificial Sequence; identical to SEQ ID NO: 162716
  derived and/or modified CDS sequence (opt4) from hemagglutinin__InfluenzaA__ADG21183

SEQ ID NO: 164818 - RNA, 1701 nt, Artificial Sequence; identical to SEQ ID NO: 163893
  derived and/or modified CDS sequence (opt4) from hemagglutinin__InfluenzaA__ADG21184

SEQ ID NO: 164819 - RNA, 1701 nt, Artificial Sequence
  derived and/or modified CDS sequence (opt4) from hemagglutinin__InfluenzaA__ADG21185
augaaggccauccugguggugcugcuguacaccuucgccaccgccaacgccgacacccugugcaucggcuaccacgccaacaacagcaccgacaccguggacaccgugcuggagaagaacgugaccgugacccacagcgugaaccugcuggaggacaagcacaacggcaagcugugcaagcugagaggcguggccccccugcaccugggcaagugcaacaucgccggcuggauccugggcaaccccgagugcgagagccugagcaccgccagcagcuggagcuacaucguggagaccagcagcagcgacaacggcaccugcuaccccggcgacuucaucgacuacgaggagcugagagagcagcugagcagcgugagcagcuucgagagauucgagaucuuccccaagaccagcagcuggcccaaccacgacagcaacaagggcgugaccgccgccugcccccacgccggcgccaagagcuucuacaagaaccugaucuggcuggugaagaagggcaacagcuaccccaagcugagcaagagcuacaucaacgacaagggcaaggaggugcuggugcuguggggcauccaccaccccagcaccagcgccgaccagcagagccuguaccagaacgccgacgccuacguguucgugggcaccagcagauacagcaagaaguucaagcccgagaucgccaucagacccaaggugagagaccaggagggcagaaugaacuacuacuggacccuggugaagcccggcgacaagaucaccuucgaggccaccggcaaccugguggugcccagauacgccuucgccauggagagaaacgccggcagcggcaucaucaucagcgacacccccgugcacgacugcaacaccaccugccagacccccaagggcgccaucaacaccagccugcccuuccagaacauccaccccaucaccaucggcagaugccccaaguacgugaagagcaccaagcugagacuggccaccggccugagaaacgugcccagcauccagagcagaggccuguucggcgccaucgccggcuucaucgagggcggcuggaccggcaugguggacggcugguacggcuaccaccaccagaacgagcagggcagcggcuacgccgccgaccugaagagcacccagaacgccaucgacgagaucaccaacaaggugaacagcgugaucgagaagaugaacacccaguucaccgccgugggcaaggaguucaaccaccuggagaagagaaucgagaaccugaacaagaagguggacgacggcuuccuggacaucuggaccuacaacgccgagcugcuggugcugcuggagaacgagagaacccuggacuaccacgacagcaacgugaagaaccuguacgagaaggugagaagccagcugaagaacaacgccaaggagaucggcaacggcugcuucgaguucuaccacaagugcgacaacaccugcauggagagcgugaagaacggcaccuacgacuaccccaaguacagcgaggaggccaagcugaacagagaggagaucgacggcgugaagcuggagagcaccagaaucuaccagauccuggccaucuacagcaccguggccagcagccuggugcugguggugagccugggcgccaucagcuucuggaugugcagcaacggcagccugcagugcagaaucugcaucuga

SEQ ID NO: 164820 - RNA, 1701 nt, Artificial Sequence; identical to SEQ ID NO: 164075
  derived and/or modified CDS sequence (opt4) from hemagglutinin__InfluenzaA__ADG21188

SEQ ID NO: 164821 - RNA, 1707 nt, Artificial Sequence
  derived and/or modified CDS sequence (opt4) from hemagglutinin__InfluenzaA__ADG21402
auggagaagaucgugcugcugcuggccaucgugagccuggugaagagcgaccagaucugcaucggcuaccacgccaacaacagcaccgagcagguggacaccaucauggagaagaacgugaccgugacccacgcccaggacauccuggagaagacccacaacggcaagcugugcgaccuggacggcgugaagccccugauccugagagacugcagcguggccggcuggcugcugggcaaccccaugugcgacgaguuccugaacgugcccgaguggagcuacaucguggagaagaucaaccccgccaacgaccugugcuaccccggcaacuucaacgacuacgaggagcugaagcaccugcugagcagaaucaaccacuucgagaagauccagaucauccccaagagcagcuggagcgaccacgaggccagcagcggcgugagcagcgccugccccuaccagggcagaagcagcuucuucagaaacgugguguggcugaucaagaaggacaacgccuaccccaccaucaagagaagcuacaacaacaccaaccaggaggaccugcuggugcuguggggcauccaccaccccaacgacgccgccgagcagaccagacuguaccagaaccccaccaccuacaucagcgugggcaccagcacccugaaccagagacuggugcccaagaucgccaccagaagcaaggugaacggccagagcggcagaauggaguucuucuggaccauccugaagagcaacgacgccaucaacuucgagagcaacggcaacuucaucgcccccgagaacgccuacaagaucgugaagaagggcgacagcaccaucaugaagagcgagcuggaguacggcaacugcaacaccaagugccagacccccaucggcgccaucaacagcagcaugcccuuccacaacauccacccccugaccaucggcgagugccccaaguacgugaagagcaacagacugauccuggccaccggccugagaaacagcccccagggcgagagaagaagaaagaagagaggccuguucggcgccaucgccggcuucaucgagggcggcuggcagggcaugguggacggcugguacggcuaccaccacagcaacgagcagggcagcggcuacgccgccgacaaggagagcacccagaaggccaucgacggcgugaccaacaaggugaacagcaucaucgacaagaugaacacccaguucgaggccgugggcagagaguucaacaaccuggagagaagaaucgagaaccugaacaagaagauggaggacggcuuccuggacguguggaccuacaacgccgagcugcuggugcugauggagaacgagagaacccuggacuuccacgacagcaacgugaagaaccuguacgacaaggugagacugcagcugagagacaacgccaaggagcugggcaacggcugcuucgaguucuaccacagaugcgacaacgagugcauggagagcgugagaaacggcaccuacgacuacccccaguacagcgaggaggccagacugaagagagaggagaucagcggcgugaagcuggagagcaucggcaccuaccagauccugagcaucuacagcaccguggccagcagccuggcccuggccaucaugguggccggccuguuccuguggaugugcagcaacggcagccugcagugcagaaucugcaucuga

SEQ ID NO: 164822 - RNA, 1704 nt, Artificial Sequence
  derived and/or modified CDS sequence (opt4) from hemagglutinin__InfluenzaA__ADG21414
auggagaagaucgugcugcugcuggccaucgugagcaucgugaagagcgaccagaucugcaucggcuaccacgccaacaacagcaccgagcacguggacaccaucauggagaagaacgugaccgugacccacgcccaggacauccuggagaagacccacaacggcaagcugugcaaccuggacggcgugaagccccugauccugagagacugcagcguggccggcuggcugcugggcaaccccaugugcgacgaguuccugaacgugcccgaguggagcuacaucguggagaagaucaaccccgccaacgaccugugcuaccccggcaacuucaacgacuacgaggagcugaagcaccugcugagcagaaucaaccacuucgagaagauccagaucauccccaagaacagcuggagcgaccacgaggccagcggcgugagcagcgccugccccuaccagggcagaagcagcuucuucagaaacgugguguggcugaccaagaagaacaacgccuaccccaccaucaagaagagcuacaacaacaccaaccaggaggaccugcuggugcuguggggcauccaccaccccaacgacggcgccgagcagaccagacuguaccagaaccccaccaccuacaucagcgugggcaccagcacccugaaccagagacuggugcccaagaucgccaccagaagcaaggugaacggccagagcggcagaauggaguucuucuggaccauccugaagagcaacgacgccaucaacuucgagagcaacggcaacuucaucgcccccgagaacgccuacaagaucgugaagaagggcgacagcaccaucaugaagagcgagcuggaguacggcaacugcaacaccaagugccagacccccaucggcgccaucaacagcagcaugcccuuccacaacauccacccccugaccaucggcgagugccccaaguacgugaagagcaacagacuggugcuggccaccggccugagaaacagcccccagggcgagagaagaagaaagaagagaggccuguucggcgccaucgccggcuucaucgagggcggcuggcagggcaugguggacggcugguacggcuaccaccacagcaacgagcagggcagcggcuacgccgccgacaaggagagcacccagaaggccaucgacggcgugaccaacaaggugaacagcaucaucgacaagaugaacacccaguucgaggccgugggcagagaguucaacaaccuggagagaagaaucgagaaccugaacaagaagauggaggacggcuuccuggacguguggaccuacaacgccgagcugcuggugcugauggagaacgagagaacccuggacuuccacgacagcaacgugaagaaccuguacgacaaggugagacugcagcugagagacaacgccaaggagcugggcaacggcugcuucgaguucuaccacagaugcgacaacgagugcauggagagcgugagaaacggcaccuacgacuacccccaguacagcgaggaggccagacugaagagagaggagaucagcggcgugaagcuggagagcaucggcaccuaccagauccugagcaucuacagcaccguggccagcagccuggcccuggccaucaugguggccggccuguuccuguggaugugcagcaacggcagccugcagugcagaaucugcaucuga

SEQ ID NO: 164823 - RNA, 1704 nt, Artificial Sequence
  derived and/or modified CDS sequence (opt4) from hemagglutinin__InfluenzaA__ADG21416
auggagaagaucgugcugcugcuggccaucgugagcaucgugaagagcgaccagaucugcaucggcuaccacgccaacaacagcaccgagcagguggacaccaucauggagaagaacgugaccgugacccacgcccaggacauccuggagaagacccacaacggcaagcugugcaaccuggacggcgugaagccccugauccugagagacugcagcguggccggcuggcugcugggcaaccccaugugcgacgaguuccugaacgugcccgaguggagcuacaucguggagaagaucaaccccgccaacgaccugugcuaccccggcaacuucaacgacuacgaggagcugaagcaccugcugagcagaaucaaccacuucgagaagauccagaucauccccaagaacagcuggagcgaccacgaggccagcggcgugagcagcgccugccccuaccagggcagaagcagcuucuucagaaacgugguguggcugaccaagaagaacaacgccuaccccaccaucaagaagagcuacaacaacaccaaccaggaggaccugcuggugcuguggggcauccaccaccccaacgacgccgccgagcagaccggccuguaccagaaccccaccaccuacaucagcgugggcaccagcacccugaaccagagacuggugcccaagaucgccaccagaagcaaggugaacggccagagcggcagaauggaguucuucuggaccauccugaagagcaacgacgugaucaacuucgagagcaacggcaacuucaucgcccccgagaacgccuacaagaucgugaagaagggcgacagcaccaucaugaagagcgagcuggaguacggcaacugcaacaccaagugccagacccccaucggcgccaucaacagcagcaugcccuuccacaacauccacccccugaccaucggcgagugccccaaguacgugaagagcaacagacuggugcuggccaccggccugagaaacagcccccagggcgagagaagaagaaagaagagaggccuguucggcgccaucgccggcuucaucgagggcggcuggcagggcaugguggacggcugguacggcuaccaccacagcaacgagcagggcagcggcuacgccgccgacaaggagagcacccagaaggccaucgacggcgugaccaacaaggugaacagcaucaucgacaagaugaacacccaguucgaggccgugggcagagaguucaacaaccuggagagaagaaucgagaaccugaacaagaagauggaggacggcuuccuggacguguggaccuacaacgccgagcugcuggugcugauggagaacgagagaacccuggacuuccacgacagcaacgugaagaaccuguacgacaaggugagacugcagcugagagacaacgccaaggagcugggcaacggcugcuucgaguucuaccacagaugcgacaacgagugcauggagagcgugagaaacggcaccuacgacuacccccaguacagcgaggaggccagacugaagagagaggagaucagcggcgugaagcuggagagcaucggcaccuaccagauccugagcaucuacagcaccguggccagcagccuggcccuggccaucaugguggccggccuguuccuguggaugugcagcaacggcagccugcagugcagaaucugcaucuga

SEQ ID NO: 164824 - RNA, 1704 nt, Artificial Sequence
  derived and/or modified CDS sequence (opt4) from hemagglutinin__InfluenzaA__ADG21420
auggagaagaucgugcugcugcuggccaucgugagcaucgugaagagcgaccagaucugcaucggcuaccacgccaacaacagcaccgagcagguggacaccaucauggagaagaacgugaccgugacccacgcccaggacauccuggagaagacccacaacggcaagcugugcaaccuggacggcgugaagccccugauccugagagacugcagcguggccggcuggcugcugggcaaccccaugugcgacgaguuccugaacgugcccgaguggagcuacaucguggagaagaucaaccccgccaacgaccugugcuaccccggcaacuucaacgacuacgaggagcugaagcaccugcugagcagaaucaaccacuucgagaagauccagaucauccccaagaacagcuggagcgaccacgaggccagcggcgugagcagcgccugccccuaccagggcagaagcagcuucuucagaaacgugguguggcugaccaagaagaacaacgccuaccccaccaucaagaagagcuacaacaacaccaaccaggaggaccugcuggugcuguggggcauccaccaccccaacgacgccgccgagcagaccagacuguaccagaaccccaccaccuacaucagcgugggcaccagcacccugaaccagagacuggugcccaagaucgccaccagaagcaaggugaacggccagagcggcagaauggaguucuucuggaccauccugaagagcaacgacgccaucaacuucgagagcaacggcaacuucaucgcccccgagaacgccuacaagaucgugaagaagggcgacagcaccaucaugaagagcgagcuggaguacggcaacugcaacaccaagugccagacccccaucggcgccaucaacagcagcaugcccuuccacaacauccacccccugaccaucggcgagugccccaaguacgugaagagcaacagacuggugcuggccaccggccugagaaacagcccccagggcgagagaagaagaaagaagagaggccuguucggcgccaucgccggcuucaucgagggcggcuggcagggcaugguggacggcugguacggcuaccaccacagcaacgagcagggcagcggcuacgccgccgacaaggagagcacccagaaggccaucgacggcgugaccaacaaggugaacagcaucaucgacaagaugaacacccaguucgaggccgugggcagagaguucaacaaccuggagagaagaaucgagaaccugaacaagaagauggaggacggcuuccuggacguguggaccuacaacgccgagcugcuggugcugauggagaacgagagaacccuggacuuccacgacagcaacgugaagaaccuguacgacaaggugagacugcagcugagagacaacgccaaggagcugggcaacggcugcuucgaguucuaccacagaugcgacaacgagugcauggagagcgugagaaacggcaccuacgacuacccccaguacagcgaggaggccagacugaagagagaggagaucagcggcgugaagcuggagagcaucggcaccuaccagauccugagcaucuacagcaccguggccagcagccuggcccuggccaucaugguggccggccuguuccuguggaugugcagcaacggcagccugcagugcagaaucugcaucuga

SEQ ID NO: 164825 - RNA, 1704 nt, Artificial Sequence
  derived and/or modified CDS sequence (opt4) from hemagglutinin__InfluenzaA__ADG21422
auggagaagaucgugcugcugcuggccaucgugagccuggugaagagcgaccagaucugcaucggcuaccacgccaacaacagcaccgagcagguggacaccaucauggagaagaacgugaccgugacccacgcccaggacauccuggagaagacccacaacggcaagcugugcaaccuggacggcgugaagccccugauccugagagacugcagcguggccggcuggcugcugggcaaccccaugugcgacgaguuccugaacgugcccgaguggagcuacaucguggagaagaucaaccccaccaacgaccugugcuaccccggcaacuucaacgacuacgaggagcugaagcaccugcugagcagaaucaaccacuucgagaagauccagaucauccccaagaacagcuggagcgaccacgaggccagcggcgugagcagcgccugccccuaccagggcagaagcagcuucuucagaaacgugguguggcugaccaagaagaacaacgccuaccccaccaucaagagaagcuacaacaacaccaaccaggaggaccugcuggugcuguggggcauccaccaccccaacgacgccgccgagcagaccagacuguaccagaaccccaccaccuacaucagcgugggcaccagcacccugaaccagagacuggugcccaagaucgccaccagaagcaaggugaacggccagagcggcagaauggaguucuucuggaccauccugaagagcaacgacgccaucaacuucgagagcaacggcaacuucaucgcccccgagaacgccuacaagaucgugaagaagggcgacagcaccaucaugaagagcgagcuggaguacggcaacugcaacaccaagugccagacccccaucggcgccaucaacagcagcaugcccuuccacaacauccacccccugaccaucggcgagugccccaaguacgugaagagcaacagacuggugcuggccaccggccugagaaacagcccccagggcgagagaagaagaaagaagagaggccuguucggcgccaucgccggcuucaucgagggcggcuggcagggcaugguggacggcugguacggcuaccaccacagcaacgagcagggcagcggcuacgccgccgacaaggagagcacccagaaggccaucgacggcgugaccaacaaggugaacagcaucaucgacaagaugaacacccaguucgaggccgugggcagagaguucaacaaccuggagagaagaaucgagaaccugaacaagaagauggaggacggcuuccuggacguguggaccuacaacgccgagcugcuggugcugauggagaacgagagaacccuggacuuccacgacagcaacgugaagaaccuguacgacaaggugagacugcagcugagagacaacgccaaggagcugggcaacggcugcuucgaguucuaccacagaugcgacaacgagugcauggagagcgugagaaacggcaccuacgacuacccccaguacagcgaggaggccagaagcaagagagaggagaucagcggcgugaagcuggagagcaucggcaccuaccagauccugagcaucuacagcaccguggccagcagccuggcccuggccaucaugguggccggccuguuccuguggaugugcagcaacggcagccugcagugcagaaucugcaucuga

SEQ ID NO: 164826 - RNA, 1704 nt, Artificial Sequence
  derived and/or modified CDS sequence (opt4) from hemagglutinin__InfluenzaA__ADG21425
auggagaagaucgugcugcugcuggccaucgugagccuggugaagagcgaccagaucugcaucggcuaccacgccaacaacagcaccgagcagguggacaccaucauggagaagaacgugaccgugacccacgcccaggacauccuggagaagacccacaacggcaagcugugcaaccuggacggcgugaagccccugauccugagagacugcagcguggccggcuggcugcugggcaaccccaugugcgacgaguuccugaacgugcccgaguggagcuacaucguggagaagaucaaccccgccaacgaccugugcuaccccggcaacuucaacgacuacgaggagcugaagcaccugcugagcagaaucaaccacuucgagaagauccagaucauccccaagaacagcuggagcgaccacggcgccagcggcgugagcagcgccugccccuaccagggcagaagcagcuucuucagaaacgugguguggcugaccaagaagaacaacgccuaccccaccaucaagaagagcuacaacaacaccaaccaggaggaccugcuggugcuguggggcauccaccaccccaacgacgccgaggagcagaccagacuguaccagaaccccaccaccuacaucagcgugggcaccagcacccugaaccagagacuggugcccaagaucgccaccagaagcaaggugaacggccagagcggcagaauggaguucuucuggaccauccugaagagcaacgacgccaucaacuucgagagcaacggcaacuucaucgcccccgagaacgccuacaagaucgugaagaagggcgacagcaccaucaugaagagcgagcuggaguacgacaacugcaacaccaagugccagacccccaucggcgccaucaacagcagcaugcccuuccacaacauccacccccugaccaucggcgagugccccaaguacgugaagagcaacaagcuggugcuggccaccggccugagaaacagcccccagggcgagaagagaagaaagaagagaggccuguucggcgccaucgccggcuucaucgagggcggcuggcagggcaugguggacggcugguacggcuaccaccacagcaacgagcagggcagcggcuacgccgccgacaaggagagcacccagaaggccaucgacggcgugaccaacaaggugaacagcaucaucgacaagaugaacacccaguucgaggccgugggcagagaguucaacgcccuggagagaagaaucgagaaccugaacaagaagauggaggacggcuuccuggacguguggaccuacaacgccgagcugcuggugcugauggagaacgagagaacccuggacuuccacgacagcaacgugaagaaccuguacgacaaggugagacugcagcugagagacaacgccaaggagcugggcaacggcugcuucgaguucuaccacagaugcgacaacgagugcauggagagcgugagaaacggcaccuacgacuacccccaguacagcgaggaggccagacugaagagagaggagaucagcggcgugaagcuggagagcaucggcaccuaccagauccugagcaucuacagcaccguggccagcagccuggcccuggccaucaugguggccggccugagccuguggaugugcagcaacggcagccugcagugcagaaucugcaucuga

SEQ ID NO: 164827 - RNA, 1704 nt, Artificial Sequence
  derived and/or modified CDS sequence (opt4) from hemagglutinin__InfluenzaA__ADG21429
auggagaagaucgugcugcugcuggccaucgugagcaucgugaagagcgaccagaucugcaucggcuaccacgccaacaacagcaccgagcagguggacaccaucauggagaagaacgugaccgugacccacgcccaggacauccuggagaagacccacaacggcaagcugugcaaccuggacggcguggagccccugauccugagagacugcagcguggccggcuggcugcugggcaaccccaugugcgacgaguuccugaacgugcccgaguggagcuacaucguggagaagaucaaccccgccaacgaccugugcuaccccggcaacuucaacgacuacgaggagcugaagcaccugcugagcagaaucaaccacuucgagaagauccagaucauccccaagaacagcuggagcgaccacgaggccagcggcgugagcagcgccugccccuaccagggcagaagcagcuucuucagaaacgugguguggcugaccaagaagaacaacgccuaccccaccaucaagaagagcuacaacaacaccaaccaggaggaccugcuggugcuguggggcauccaccaccccaacgacgccgccgagcagaccagacuguaccagaaccccaccaccuacaucagcgugggcaccagcacccugaaccagagacuggugcccaagaucgccaccagaagcaaggugaacggccagagcggcagaauggaguucuucuggaccauccugaagagcaacgacgugaucaacuucgagagcaacggcaacuucaucgcccccgagaacgccuacaagaucgugaagaagggcgacagcaccaucaugaagagcgagcuggaguacggcaacugcaacaccaagugccagacccccaucggcgccaucaacagcagcaugcccuuccacaacauccacccccugaccaucggcgagugccccaaguacgugaagagcgacagacuggugcuggccaccggccugagaaacagcccccagggcgagagaagaagaaagaagagaggccuguucggcgccaucgccggcuucaucgagggcggcuggcagggcaugguggacggcugguacggcuaccaccacagcaacgagcagggcagcggcuacgccgccgacaaggagagcacccagaaggccaucgacggcgugaccaacaaggugaacagcaucaucgacaagaugaacacccaguucgaggccgugggcagagaguucaacaaccuggagagaagaaucgagaaccugaacaagaagauggaggacggcuuccuggacguguggaccuacaacgccgagcugcuggugcugauggagaacgagagaacccuggacuuccacgacagcaacgugaagaaccuguacgacaaggugagacugcagcugagagacaacgccaaggagcugggcaacggcugcuucgaguucuaccacagaugcgacaacgagugcauggagagcgugagaaacggcaccuacgacuacccccaguacagcgaggaggccagacugaagagagaggagaucagcggcgugaagcuggagagcaucggcaccuaccagauccugagcaucuacagcaccguggccagcagccuggcccuggccaucaugguggccggccugcugcuguggaugugcagcaacggcagccugcagugcagaaucugcaucuga

SEQ ID NO: 164828 - RNA, 1704 nt, Artificial Sequence
  derived and/or modified CDS sequence (opt4) from hemagglutinin__InfluenzaA__ADG21437
auggagaagaucgugcugcugcuggccaucgugagcaucgugaagagcgaccagaucugcaucggcuaccacgccaacaacagcaccgagcagguggacaccaucauggagaagaacgugaccgugacccacgcccaggacauccuggagaagacccacaacggcaagcugugcaaccuggacggcgugaagccccugauccugagagacugcagcguggccggcuggcugcugggcaaccccaugugcgacgaguuccugaacgugcccgaguggagcuacaucguggagaagaucaaccccgccaacgaccugugcuaccccggcaacuucaacgacuacgaggagcugaagcaccugcugagcagaaucaaccacuucgagaagauccagaucauccccaagaacagcuggagcgaccacgaggccagcggcgugagcagcgccugccccuaccagggcagaagcagcuucuucagaaacgugguguggcugacccagaagaacaacgccuaccccaccaucaagaagagcuacaacaacaccaaccaggaggaccugcuggugcuguggggcauccaccaccccaacgacgccgccgagcagaccagacuguaccagaaccccaccaccuacaucagcgugggcaccagcacccugaaccagagacuggugcccaagaucgccaccagaagcaaggugaacggccagagcggcagaauggaguucuucuggaccauccugaagagcaacgacgugaucaacuucgagagcaacggcaacuucaucgcccccgagaacgccuacaagaucgugaagaagggcgacagcaccaucaugaagagcgagcuggaguacggcaacugcaacaccaagugccagacccccaucggcgccaucaacagcagcaugcccuuccacaacauccacccccugaccaucggcgagugccccaaguacgugaagagcaacagacuggugcuggccaccggccugagaaacagcccccagggcgagagaagaagaaagaagagaggccuguucggcgccaucgccggcuucaucgagggcggcuggcagggcaugguggacggcugguacggcuaccaccacagcaacgagcagggcagcggcuacgccgccgacaaggagagcacccagaaggccaucgacggcgugaccaacaaggugaacagcaucaucgacaagaugaacacccaguucgaggccgugggcagagaguucaacaaccuggagagaagaaucgagaaccugaacaagaagauggaggacggcuuccuggacguguggaccuacaacgccgagcugcuggugcugauggagaacgagagaacccuggacuuccacgacagcaacgugaagaaccuguacgacaaggugagacugcagcugagagacaacgccaaggagcugggcaacggcugcuucgaguucuaccacagaugcgacaacgagugcauggagagcgugagaaacggcaccuacgacuacccccaguacagcgaggaggccagacugaagagagaggagaucagcggcgugaagcuggagagcaucggcaccuaccagauccugagcaucuacagcaccguggccagcagccuggcccuggccaucaugguggccggccuguuccuguggaugugcagcaacggcagccugcagugcagaaucugcaucuga

SEQ ID NO: 164829 - RNA, 1704 nt, Artificial Sequence
  derived and/or modified CDS sequence (opt4) from hemagglutinin__InfluenzaA__ADG21439
auggagaagaucgugcugcugcuggccaucgugagcaucgugaagagcgaccagaucugcaucggcuaccacgccaacaacagcaccgagcagguggacaccaucauggagaagaacgugaccgugacccacgcccaggacauccuggagaagacccacaacggcaagcugugcaaccuggacggcgugaagccccugauccugagagacugcagcguggccggcuggcugcugggcaaccccaugugcgacgaguuccugaacgugcccgaguggagcuacaucguggagaagaucaaccccgccaacgaccugugcuaccccggcaacuucaacgacuacgaggagcugaagcaccugcugagcagaaucaaccacuucgagaagauccagaucauccccaagggcagcuggagcgaccacgaggccagcggcgugagcagcgccugccccuaccagggcagaagcagcuucuucagaaacgugguguggcugaccaagaagaacaacgccuaccccaccaucaagaagagcuacaacaacaccaaccaggaggaccugcuggugcuguggggcauccaccaccccaacgacgccgccgagcagaccagacuguaccagaaccccaccaccuacaucagcgugggcaccagcacccugaaccagagacuggugccccagaucgccaccagaagcaaggugaacggccagagcggcagaauggaguucuucuggaccauccugaagagcaacgacgccaucaacuucgagagcaacggcaacuucaucgcccccgagaacgccuacaagaucgugaagaagggcgacagcaccaucaugaagagcgagcuggaguacggcaacugcaacaccaagugccagacccccaucggcgccaucaacagcagcaugcccuuccacaacauccacccccugaccaucggcgagugccccaaguacgugaagagcaacagacuggugcuggccaccggccugagaaacagcccccagggcgagagaagaagaaagaagagaggccuguucggcgccaucgccggcuucaucgagggcggcuggcagggcaugguggacggcugguacggcuaccaccacagcaacgagcagggcagcggcuacgccgccgacaaggagagcacccagaaggccaucgacggcgugaccaacaaggugaacagcaucaucgacaagaugaacacccaguucgaggccgugggcagagaguucaacaaccuggagagaagaaucgagaaccugaacaagaagauggaggacggcuuccuggacguguggaccuacaacgccgagcugcuggugcugauggagaacgagagaacccuggacuuccacgacagcaacgugaagaaccuguacgacaaggugagacugcagcugagagacaacgccaaggagcugggcaacggcugcuucgaguucuaccacagaugcgacaacgagugcauggagagcgugagaaacggcaccuacgacuacccccaguacagcgaggaggccagacugaagagagaggagaucagcggcgugaagcuggagagcaucggcaccuaccagauccugagcaucuacagcaccguggccagcagccuggcccuggccaucaugguggccggccuguuccuguggaugugcagcaacggcagccugcagugcagaaucugcaucuga

SEQ ID NO: 164830 - RNA, 1704 nt, Artificial Sequence
  derived and/or modified CDS sequence (opt4) from hemagglutinin__InfluenzaA__ADG21441
auggagaagaucgugcugcugcuggccaucgugagcaucgugaagagcgaccagaucugcaucggcuaccacgccaacaacagcaccgagcagguggacaccaucauggagaagaacgugaccgugacccacgcccaggacauccuggagaagacccacaacggcaagcugugcaaccuggacggcgugaagccccugauccugagagacugcagcguggccggcuggcugcugggcaaccccaugugcgacgaguuccugaacgugcccgaguggagcuacaucguggagaagaucaaccccagcaacgaccugugcuaccccggcaacuucaacgacuacgaggagcugaagcaccugcugagcagaaucaaccacuucgagaagauccagaucauccccaagaacagcuggagcgaccacgaggccagcggcgugagcagcgccugccccuaccagggcagaagcagcuucuucagaaacgugguguggcugaccaagaagaacaacgccuaccccaccaucaagaagagcuacaacaacaccaaccaggaggaccugcuggugcuguggggcauccaccaccccaacgacgaggccgagcagaccagccuguaccagaaccccaccaccuacaucagcgugggcaccagcacccugaaccagagacuggugcccaagaucgccaccagaagcaaggugaacggccagagcggcagaauggaguucuucuggaccauccugaagagcaacgacgccaucaacuucgagagcaacggcaacuucaucgcccccgagaacgccuacaagaucgugaagaagggcgacagcaccaucaugaagagcgagcuggaguacggcaacugcaacaccaagugccagacccccaucggcgccaucaacagcagcaugcccuuccacaacauccacccccugaccaucggcgagugccccaaguacgugaagagcaacagacuggugcuggccaccggccugagaaacagcccccagggcgagagaagaagaaagaagagaggccuguucggcgccaucgccggcuucaucgagggcggcuggcagggcaugguggacggcugguacggcuaccaccacagcaacgagcagggcagcggcuacgccgccgacaaggagagcacccagaaggccaucgacggcgugaccaacaaggugaacagcaucaucgacaagaugaacacccaguucgaggccgugggcagagaguucaacaaccuggagagaagaaucgagaaccugaacaagaagauggaggacggcuuccuggacguguggaccuacaacgccgagcugcuggugcugauggagaacgagagaacccuggacuuccacgacagcaacgugaagaaccuguacgacaaggugagacugcagcugagagacaacgccaaggagcugggcaacggcugcuucgaguucuaccacagaugcgacaacgagugcauggagagcgugagaaacggcaccuacgacuacccccaguacagcgaggaggccagacugaagagagaggagaucagcggcgugaagcuggagagcaucggcaccuaccagauccugagcaucuacagcaccguggccagcagccuggcccuggccaucaugguggccggccuguuccuguggaugugcagcaacggcagccugcagugcagaaucugcaucuga

SEQ ID NO: 164831 - RNA, 1704 nt, Artificial Sequence
  derived and/or modified CDS sequence (opt4) from hemagglutinin__InfluenzaA__ADG21443
auggagaagaucgugcugcugcuggccaucgugagcaucgugaagagcgaccagaucugcaucggcuaccacgccaacaacagcaccgagcagguggacaccaucauggagaagaacgugaccgugacccacgcccaggacauccuggagaagacccacaacggcaagcugugcaaccuggacggcgugaagccccugauccugagagacugcagcguggccggcuggcugcugggcaaccccaugugcgacgaguuccugaacgugcccgaguggagcuacaucguggagaagaucaaccccaccaacgaccugugcuaccccggcaacuucaacgacuacgaggagcugaagcaccugcugagcagaaucaaccacuucgagaagauccagaucauccccaagaacagcuggagcgaccacgaggccagcggcgugagcagcgccugccccuaccagggcagaagcagcuucuucagaaacgugguguggcugaccaagaagaacaacgccuaccccaccaucaagaagagcuacaacaacaccaaccaggaggaccugcuggugcuguggggcauccaccaccccaacgacgccgccgagcagaccagacuguaccagaaccccaccaccuacaucagcgugggcaccagcacccugaaccagagacuggugcccaagaucgccaccagaagcaaggugaacggccagagcggcagaauggaguucuucuggaccauccugaagagcaacgacgccaucaacuucgagagcaacggcaacuucaucgcccccgagaacgccuacaagaucgugaagaagggcgacagcaccaucaugaagagcgagcuggaguacggcaacugcaacaccaagugccagacccccaucggcgccaucaacagcagcaugcccuuccacaacauccacccccugaccaucggcgagugccccaaguacgugaagagcaacagacuggugcuggccaccggccugagaaacagcccccagggcgagagaagaagaaagaagagaggccuguucggcgccaucgccggcuucaucgagggcggcuggcagggcaugguggacggcugguacggcuaccaccacagcaacgagcagggcagcggcuacgccgccgacaaggagagcacccagaaggccaucgacggcgugaccaacaaggugaacagcaucaucgacaagaugaacacccaguucgaggccgugggcagagaguucaacaaccuggagagaagaaucgagaaccugaacaagaagauggaggacggcuuccuggacguguggaccuacaacgccgagcugcuggugcugauggagaacgagagaacccuggacuuccacgacagcaacgugaagaaccuguacgacaaggugagacugcagcugagagacaacgccaaggagcugggcaacggcugcuucgaguucuaccacagaugcgacaacgagugcauggagagcgugagaaacggcaccuacgacuacccccaguacagcgaggaggccagacugaagagagaggagaucagcggcgugaagcuggagagcaucggcaccuaccagauccugagcaucuacagcaccguggccagcagccuggcccuggccaucaugguggccggccuguuccuguggaugugcagcaacggcagccugcagugcagaaucugcaucuga

SEQ ID NO: 164832 - RNA, 1704 nt, Artificial Sequence
  derived and/or modified CDS sequence (opt4) from hemagglutinin__InfluenzaA__ADG21445
auggagaagaucgugcugcugcuggccaucgugagcaucgugaagagcgaccagaucugcaucggcuaccacgccaacaacagcaccgagcagguggacaccaucauggagaagaacgugaccgugacccacgcccaggacauccuggagaagacccacaacggcaagcugugcaaccuggacggcgugaagccccugauccugagagacugcagcguggccggcuggcugcugggcaaccccaugugcgacgaguuccugaacgugcccgaguggagcuacaucguggagaagaucaaccccagcaacgaccugugcuaccccggcaacuucaacgacuacgaggagcugaagcaccugcugagcagaaucaaccacuucgagaagauccagaucauccccaagaacagcuggagcgaccacgaggccagcggcgugagcagcgccugccccuaccagggcagaagcagcuucuucagaaacgugguguggcugaccaagaagaacaacgccuaccccaccaucaagaagagcuacaacaacaccaaccaggaggaccugcuggugcuguggggcauccaccaccccaacgacgaggccgagcagaccagacuguaccagaaccccaccaccuacaucagcgugggcaccagcacccugaaccagagacuggugcccaagaucgccaccagaagcaaggugaacggccagagcggcagaauggaguucuucuggaccauccugaagagcaacgacgccaucaacuucgagagcaacggcaacuucaucgcccccgagaacgccuacaagaucgugaagaagggcgacagcaccaucaugaagagcgagcuggaguacggcaacugcaacaccaagugccagacccccaucggcgccaucaacagcagcaugcccuuccacaacauccacccccugaccaucggcgagugccccaaguacgugaagagcaacagacuggugcuggccaccggccugagaaacagcccccagggcgagagaagaagaaagaagagaggccuguucggcgccaucgccggcuucaucgagggcggcuggcagggcaugguggacggcugguacggcuaccaccacagcaacgagcagggcagcggcuacgccgccgacaaggagagcacccagaaggccaucgacggcgugaccaacaaggugaacagcaucaucgacaagaugaacacccaguucgaggccgugggcagagaguucaacaaccuggagagaagaaucgagaaccugaacaagaagauggaggacggcuuccuggacguguggaccuacaacgccgagcugcuggugcugauggagaacgagagaacccuggacuuccacgacagcaacgugaagaaccuguacgacaaggugagacugcagcugagagacaacgccaaggagcugggcaacggcugcuucgaguucuaccacagaugcgacaacgagugcauggagagcgugagaaacggcaccuacgacuacccccaguacagcgaggaggccagacugaagagagaggagaucagcggcgugaagcuggagagcaucggcaccuaccagauccugagcaucuacagcaccguggccagcagccuggcccuggccaucaugguggccggccuguuccuguggaugugcagcaacggcagccugcagugcagaaucugcaucuga

SEQ ID NO: 164833 - RNA, 1701 nt, Artificial Sequence; identical to SEQ ID NO: 162971
  derived and/or modified CDS sequence (opt4) from hemagglutinin__InfluenzaA__ADG21912

SEQ ID NO: 164834 - RNA, 1701 nt, Artificial Sequence; identical to SEQ ID NO: 162729
  derived and/or modified CDS sequence (opt4) from hemagglutinin__InfluenzaA__ADG21913

SEQ ID NO: 164835 - RNA, 1701 nt, Artificial Sequence
  derived and/or modified CDS sequence (opt4) from hemagglutinin__InfluenzaA__ADG21914
augaaggccaucaucguggugcugcuguacaccuucgccaccgccaacgccgacacccugugcaucggcuaccacgccaacaacagcaccgacaccguggacaccgugcuggagaagaacgugaccgugacccacagcgugaaccugcuggaggacaagcacaacggcaagcugugcaagcugagaggcguggccccccugcaccugggcaagugcaacaucgccggcuggauccugggcaaccccgagugcgagagccugagcaccgccagcagcuggagcuacaucguggagaccagcagcagcgacaacggcaccugcuaccccggcgacuucaucgacuacgaggagcugagagagcagcugagcagcgugagcagcuucgagagauucgagaucuuccccaagaccagcagcuggcccaaccacgacagcaacaagggcgugaccgccgccugcccccacgccggcgccaagagcuucuacaagaaccugaucuggcuggugaagaagggcaacagcuaccccaagcugagcaagagcuacaucaacgacaagggcaaggaggugcuggugcuguggggcauccaccaccccagcaccagcgccgaccagcagagccuguaccagaacgccgacgccuacguguucgugggcaccagcagauacagcaagaaguucaagcccgagaucgccaucagacccaaggugagagaccaggagggcagaaugaacuacuacuggacccugguggagcccggcgacaagaucaccuucgaggccaccggcaaccugguggugcccagauacgccuucgccauggagagaaacgccggcagcggcaucaucaucagcgacacccccgugcacgacugcaacaccaccugccagacccccaagggcgccaucaacaccagccugcccuuccagaacauccaccccaucaccaucggcaagugccccaaguacgugaagagcaccaagcugagacuggccaccggccugagaaacgugcccagcauccagagcagaggccuguucggcgccaucgccggcuucaucgagggcggcuggaccggcaugguggacggcugguacggcuaccaccaccagaacgagcagggcagcggcuacgccgccgaccugaagagcacccagaacgccaucgacgagaucaccaacaaggugaacagcgugaucgagaagaugaacacccaguucaccgccgugggcaaggaguucaaccaccuggagaagagaaucgagaaccugaacaagaagguggacgacggcuuccuggacaucuggaccuacaacgccgagcugcuggugcugcuggagaacgagagaacccuggacuaccacgacagcaacgugaagaaccuguacgagaaggugagaagccagcugaagaacaacgccaaggagaucggcaacggcugcuucgaguucuaccacaagugcgacaacaccugcauggagagcgugaagaacggcaccuacgacuaccccaaguacagcgaggaggccaagcugaacagagaggagaucgacggcgugaagcuggagagcaccagaaucuaccagauccuggccaucuacagcaccguggccagcagccuggugcugguggugagccugggcgccaucagcuucuggaugugcagcaacggcagccugcagugcagaaucugcaucuga

SEQ ID NO: 164836 - RNA, 1701 nt, Artificial Sequence
  derived and/or modified CDS sequence (opt4) from hemagglutinin__InfluenzaA__ADG21915
auggaggccauccugguggugcugcuguacaccuucgccaccgccaacgccgacacccugugcaucggcuaccacgccaacaacagcaccgacaccguggacaccgugcuggagaagaacgugaccgugacccacagcgugaacauccuggaggacaagcacaacggcaagcugugcaagcugagaggcguggccccccugcaccugggcaagugcaacaucgccggcuggauccugggcaaccccgagugcgagagccugagcaccgccagcagcuggagcuacaucguggagaccagcagcagcgacaacggcaccugcuaccccggcgacuucaucgacuacgaggagcugagagagcagcugagcagcgugagcagcuucgagagauucgagaucuuccccaagaccagcagcuggcccaaccacgacagcaacaagggcgugaccgccgccugcccccacgccggcgccaagagcuucuacaagaaccugaucuggcuggugaagaagggcaacagcuaccccaagcugagcaagagcuacaucaacgacaagggcaaggaggugcuggugcuguggggcauccaccaccccagcaccagcgccgaccagcagagccuguaccagaacgccgacgccuacguguucgugggcagcagcagauacagcaagaaguucaagcccgagaucgccaucagacccaaggugagagaccaggagggcagaaugaacuacuacuggacccugguggagcccggcgacaagaucaccuucgaggccaccggcaaccugguggugcccagauacgccuucgccaucgagagaaacgccggcagcggcaucaucaucagcgacacccccgugcacgacugcaacaccaccugccagacccccaagggcgccaucaacaccagccugcccuuccacaacauccaccccaucaccaucggcaagugccccaaguacgugaagagcaccaagcugagacuggccaccggccugagaaacgugcccagcauccagagcagaggccuguucggcgccaucgccggcuucaucgagggcggcuggaccggcaugguggacggcugguacggcuaccaccaccagaacgagcagggcagcggcuacgccgccgaccugaagagcacccagaacgccaucgacgagaucaccaacaaggugaacagcgugaucgagaagaugaacacccaguucaccgccgugggcaaggaguucaaccaccuggagaagagaaucgagaaccugaacaagaagguggacgacggcuuccuggacaucuggaccuacaacgccgagcugcuggugcugcuggagaacgagagaacccuggacuaccacgacagcaacgugaagaaccuguacgagaaggugagaagccagcugaagaacaacgccaaggagaucggcaacggcugcuucgaguucuaccacaagugcgacaacaccugcauggagagcgugaagaacggcaccuacgacuaccccaaguacagcgaggaggccaagcugaacagagaggagaucgacggcgugaagcuggagagcaccagaaucuaccagauccuggccaucuacagcaccguggccagcagccuggugcugguggugagccugggcgccaucagcuucuggaugugcagcaacggcagccugcagugcagaaucugcaucuga

SEQ ID NO: 164837 - RNA, 1701 nt, Artificial Sequence; identical to SEQ ID NO: 162971
  derived and/or modified CDS sequence (opt4) from hemagglutinin__InfluenzaA__ADG21916

SEQ ID NO: 164838 - RNA, 1701 nt, Artificial Sequence; identical to SEQ ID NO: 162729
  derived and/or modified CDS sequence (opt4) from hemagglutinin__InfluenzaA__ADG21917

SEQ ID NO: 164839 - RNA, 1701 nt, Artificial Sequence; identical to SEQ ID NO: 164229
  derived and/or modified CDS sequence (opt4) from hemagglutinin__InfluenzaA__ADG21918

SEQ ID NO: 164840 - RNA, 1701 nt, Artificial Sequence
  derived and/or modified CDS sequence (opt4) from hemagglutinin__InfluenzaA__ADG21919
augaaggccauccugguggugcugcuguacaccuucgccaccgccaacgccgacacccugugcaucggcuaccacgccaacaacagcaccgacaccguggacaccgugcuggagaagaacgugaccgugacccacagcgugaaccugcuggaggacaagcacaacggcaagcugugcaagcugagaggcgugaccccccugcaccugggcaagugcaacaucgccggcuggauccugggcaaccccgagugcgagagccugagcaccgccagcagcuggagcuacaucguggagaccagcagcagcgacaacggcaccugcuaccccggcgacuucaucgacuacgaggagcugagagagcagcugagcagcgugagcagcuucgagagauucgagaucuuccccaagaccagcagcuggcccaaccacgacagcaacaagggcgugaccgccgccugcccccacgccggcgccaagagcuucuacaagaaccugaucuggcuggugaagaagggcaacagcuaccccaagcugagcaagagcuacaucaacgacaagggcaaggaggugcuggugcuguggggcauccaccaccccagcaccagcgccgaccagcagagccuguaccagaacgccgacgccuacguguucgugggcaccagcagauacagcaagaaguucaagcccgagaucgccaucagacccaaggugagagaccaggagggcagaaugaacuacuacuggacccugguggagcccggcgacaagaucaccuucgaggccaccggcaaccugguggugcccagauacgccuucgccauggagagaaacgccggcagcggcaucaucaucagcgacacccccgugcacgacugcaacaccaccugccagacccccaagggcgccaucaacaccagccugcccuuccagaacauccaccccaucaccaucggcaagugccccaaguacgugaagagcaccaagcugagacuggccaccggccugagaaacgugcccagcauccagagcagaggccuguucggcgccaucgccggcuucaucgagggcggcuggaccggcaugguggacggcugguacggcuaccaccaccagaacgagcagggcagcggcuacgccgccgaccugaagagcacccagaacgccaucgacgagaucaccaacaaggugaacagcgugaucgagaagaugaacacccaguucaccgccgugggcaaggaguucaaccaccuggagaagagaaucgagaaccugaacaagaagaucgacgacggcuuccuggacaucuggaccuacaacgccgagcugcuggugcugcuggagaacgagagaacccuggacuaccacgacagcaacgugaagaaccuguacgagaaggugagaagccagcugaagaacaacgccaaggagaucggcaacggcugcuucgaguucuaccacaagugcgacaacaccugcauggagagcgugaagaacggcaccuacgacuaccccaaguacagcgaggaggccaagcugaacagagaggagaucgacggcgugaagcuggagagcaccagaaucuaccagauccuggccaucuacagcaccguggccagcagccuggugcugguggugagccugggcgccaucagcuucuggaugugcagcaacggcagccugcagugcagaaucugcaucuga

SEQ ID NO: 164841 - RNA, 1701 nt, Artificial Sequence; identical to SEQ ID NO: 162971
  derived and/or modified CDS sequence (opt4) from hemagglutinin__InfluenzaA__ADG21921

SEQ ID NO: 164842 - RNA, 1701 nt, Artificial Sequence; identical to SEQ ID NO: 162729
  derived and/or modified CDS sequence (opt4) from hemagglutinin__InfluenzaA__ADG21922

SEQ ID NO: 164843 - RNA, 1701 nt, Artificial Sequence
  derived and/or modified CDS sequence (opt4) from hemagglutinin__InfluenzaA__ADG21923
augaaggccauccugguggugcugcuguacaccuucgccaccgccaacgccgacacccugugcaucggcuaccacgccaacaacagcaccgacaccguggacaccgugcuggagaagaacgugaccgugacccacagcgccaaccugcuggaggacaagcacaacggcaagcugugcaagcugagaggcguggccccccugcaccugggcaagugcaacaucgccggcuggauccugggcaaccccgagugcgagagccugagcaccgccagcagcuggagcuacaucguggagaccagcagcagcgacaacggcaccugcuaccccggcgacuucaucgacuacgaggagcugagagagcagcugagcagcgugagcagcuucgagagauucgagaucuuccccaagaccagcagcuggcccaaccacgacagcaacaagggcgugaccgccgccugcccccacgccggcgccaagagcuucuacaagaaccugaucuggcuggugaagaagggcaacagcuaccccaagcugagcaagagcuacaucaacgacaagggcaaggaggugcuggugcuguggggcauccaccaccccagcaccagcgccgaccagcagagccuguaccagaacgccgacgccuacguguucgugggcagcagcaaguacagcaagaaguucaagcccgagaucgccaucagacccaaggugagagaccaggagggcagaaugaacuacuacuggacccugguggagcccggcgacaagaucaccuucgaggccaccggcaaccugguggugcccagauacgccuucgccauggagagaaacgccggcagcggcaucaucaucagcgacacccccgugcacgacugcaacaccaccugccagacccccaagggcgccaucaacaccagccugcccuuccacaacauccaccccaucaccaucggcaagugccccaaguacgugaagagcaccaagcugagacuggccaccggccugagaaacgugcccagcauccagagcagaggccuguucggcgccaucgccggcuucaucgagggcggcuggaccggcaugguggacggcugguacggcuaccaccaccagaacgagcagggcagcggcuacgccgccgaccugaagagcacccagaacgccaucgacgagaucaccaacaaggugaacagcgugaucgagaagaugaacacccaguucaccgccgugggcaaggaguucaaccaccuggagaagagaaucgagaaccugaacaagaagguggacgacggcuuccuggacaucuggaccuacaacgccgagcugcuggugcugcuggagaacgagagaacccuggacuaccacgacagcaacgugaagaaccuguacgagaaggugagaagccagcugaagaacaacgccaaggagaucggcaacggcugcuucgaguucuaccacaagugcgacaacaccugcauggagagcgugaagaacggcaccuacgacuaccccaaguacagcgaggaggccaagcugaacagagaggagaucgacggcgugaagcuggagagcaccagaaucuaccagauccuggccaucuacagcaccguggccagcagccuggugcugguggugagccugggcgccaucagcuucuggaugugcagcaacggcagccugcagugcagaaucugcaucuga

SEQ ID NO: 164844 - RNA, 1701 nt, Artificial Sequence
  derived and/or modified CDS sequence (opt4) from hemagglutinin__InfluenzaA__ADG21924
auggaggccauccugguggugcugcuguacaccuucgccaccgccaacgccgacacccugugcaucggcuaccacgccaacaacagcaccgacaccguggacaccgugcuggagaagaacgugaccgugacccacagcgugaaccugcuggagaacaagcacaacggcaagcugugcaagcugagaggcguggccccccugcaccugggcaagugcaacaucgccggcuggauccugggcaaccccgagugcgagagccugagcaccgccagcagcuggagcuacaucguggagaccagcagcagcgacaacggcaccugcuaccccggcgacuucaucgacuacgaggagcugagagagcagcugagcagcgugagcagcuucgagagauucgagaucuuccccaagaccagcagcuggcccaaccacgacagcaacaagggcgugaccgccgccugcccccacgccggcgccaagagcuucuacaagaaccugaucuggcuggugaagaagggcaacagcuaccccaagcugagcaagagcuacaucaacgacaagggcaaggaggugcuggugcuguggggcauccaccaccccagcaccagcgccgaccagcagagccuguaccagaacgccgacgccuacguguucgugggcagcagcagauacagcaagaaguucaagcccgagaucgccaucagacccaaggugagagaccaggagggcagaaugaacuacuacuggacccugguggagcccggcgacaagaucaccuucgaggccaccggcaaccugguggugcccagauacgccuucgccauggagagaaacgccggcagcggcaucaucaucagcgacacccccgugcacgacugcaacaccaccugccagacccccaagggcgccaucaacaccagccugcccuuccacaacauccaccccaucaccaucggcaagugccccaaguacgugaagagcaccaagcugagacuggccaccggccugagaaacgugcccagcauccagagcagaggccuguucggcgccaucgccggcuucaucgagggcggcuggaccggcaugguggacggcugguacggcuaccaccaccagaacgagcagggcagcggcuacgccgccgaccugaagagcacccagaacgccaucgacgagaucaccaacaaggugaacagcgugaucgagaagaugaacacccaguucaccgccgugggcaaggaguucaaccaccuggagaagagaaucgagaaccugaacaagaagguggacgacggcuuccuggacaucuggaccuacaacgccgagcugcuggugcugcuggagaacgagagaacccuggacuaccacgacagcaacgugaagaaccuguacgagaaggugagaagccagcugaagaacaacgccaaggagaucggcaacggcugcuucgaguucuaccacaagugcgacaacaccugcauggagagcgugaagaacggcaccuacgacuaccccaaguacagcgaggaggccaagcugaacagagaggagaucgacggcgugaagcuggagagcaccagaaucuaccagauccuggccaucuacagcaccguggccagcagccuggugcugguggugagccugggcgccaucagcuucuggaugugcagcaacggcagccugcagugcagaaucugcaucuga

SEQ ID NO: 164845 - RNA, 1701 nt, Artificial Sequence
  derived and/or modified CDS sequence (opt4) from hemagglutinin__InfluenzaA__ADG21925
augaaggccauccugguggugcugcuguacaccuucgccaccgccaacgccgacacccugugcaucggcuaccacgccaacaacagcaccgacaccguggacaccgugcuggagaagaacgugaccgugacccacagcgugaaccugcuggaggacaagcacaacggcaagcugugcaagcugagaggcguggccccccugcaccugggcaagugcaacaucgccggcuggauccugggcaaccccgagugcgagagccugagcaccgccagcagcuggagcuacaucguggagaccagcagcagcgacaacggcaccugcuaccccggcgacuucaucgacuacgaggagcugagagagcagcugagcagcgugagcagcuucgagagauucgagaucuuccccaagaccagcagcuggcccaaccacgacagcaacaagggcgugaccgccgccugcccccacgccggcgccaagagcuucuacaagaaccugaucuggcuggugaagaagggcaacagcuaccccaagcugagcaagagcuacaucaacgacaagggcaaggaggugcuggugcuguggggcauccaccaccccagcaccagcgccgaccagcagagccuguaccagaacgccgacgccuacguguucgugggcaccagcagauacagcaagaaguucaagcccgagaucgccaucagacccaaggugagagaccaggagggcagaaugaacuacuacuggacccugguggagcccggcgacaagaucaccuucgaggccaccggcaaccugguggugcccagauacgccuucgccauggagagagacgccggcagcggcaucaucaucagcgacacccccgugcacgacugcaacaccaccugccagacccccaagggcgccaucaacaccagccugcccuuccagaacauccaccccaucaccaucggcaagugccccaaguacgugaagagcaccaagcugagacuggccaccggccugagaaacgugcccagcauccagagcagaggccuguucggcgccaucgccggcuucaucgagggcggcuggaccggcaugguggacggcugguacggcuaccaccaccagaacgagcagggcagcggcuacgccgccgaccugaagagcacccagaacgccaucgacgagaucaccaacaaggugaacagcgugaucgagaagaugaacacccaguucaccgccgugggcaaggaguucaaccaccuggagaagagaaucgagaaccugaacaagaagaucgacgacggcuuccuggacaucuggaccuacaacgccgagcugcuggugcugcuggagaacgagagaacccuggacuaccacgacagcaacgugaagaaccuguacgagaaggugagaagccagcugaagaacaacgccaaggagaucggcaacggcugcuucgaguucuaccacaagugcgacaacaccugcauggagagcgugaagaacggcaccuacgacuaccccaaguacagcgaggaggccaagcugaacagagaggagaucgacggcgugaagcuggagagcaccagaaucuaccagauccuggccaucuacagcaccguggccagcagccuggugcugguggugagccugggcgccaucagcuucuggaugugcagcaacggcagccugcagugcagaaucugcaucuga

SEQ ID NO: 164846 - RNA, 1701 nt, Artificial Sequence
  derived and/or modified CDS sequence (opt4) from hemagglutinin__InfluenzaA__ADG21926
augaaggccauccugguggugcugcuguacaccuucgccaccgccaacgccgacacccugugcaucggcuaccacgccaacaacagcaccgacaccguggacaccauccuggagaagaacgugaccgugacccacagcgugaaccugcuggaggacaagcacaacggcaagcugugcaagcugagaggcguggccccccugcaccugggcaagugcaacaucgccggcuggauccugggcaaccccgagugcgagagccugagcaccgccagcagcuggagcuacaucguggagaccagcagcagcgacaacggcaccugcuaccccggcgacuucaucgacuacgaggagcugagagagcagcugagcagcgugagcagcuucgagagauucgagaucuuccccaagaccagcagcuggcccaaccacgacagcaacaagggcgugaccgccgccugcccccacgccggcgccaagagcuucuacaagaaccugaucuggcuggugaagaagggcaacagcuaccccaagcugagcaagagcuacaucaacgacaagggcaaggaggugcuggugcuguggggcauccaccaccccagcaccagcgccgaccagcagagccuguaccagaacgccgacgccuacguguucgugggcaccagcagauacagcaagaaguucaagcccgagaucgccaucagacccaaggugagagaccaggagggcagaaugaacuacuacuggacccugguggagcccggcgacaagaucaccuucgaggccaccggcaaccugguggugcccagauacgccuucgccauggagagaaacgccggcagcggcaucaucaucagcgacacccccgugcacgacugcaacaccaccugccagacccccaagggcgccaucaacaccagccugcccuuccagaacauccaccccaucaccaucggcaagugccccaaguacgugaagagcaccaagcugagacuggccaccggccugagaaacgugcccagcauccagagcagaggccuguucggcgccaucgccggcuucaucgagggcggcuggaccggcaugguggacggcugguacggcuaccaccaccagaacgagcagggcagcggcuacgccgccgaccugaagagcacccagaacgccaucgacgagaucaccaacaaggugaacagcgugaucgagaagaugaacacccaguucaccgccgugggcaaggaguucaaccaccuggagaagagaaucgagaaccugaacaagaagguggacgacggcuuccuggacaucuggaccuacaacgccgagcugcuggugcugcuggagaacgagagaaaccuggacuaccacgacagcaacgugaagaaccuguacgagaaggugagaagccagcugaagaacaacgccaaggagaucggcaacggcugcuucgaguucuaccacaagugcgacaacaccugcauggagagcgugaagaacggcaccuacgacuaccccaaguacagcgaggaggccaagcugaacagagaggagaucgacggcgugaagcuggagagcaccagaaucuaccagauccuggccaucuacagcaccguggccagcagccuggugcugguggugagccugggcgccaucagcuucuggaugugcagcaacggcagccugcagugcagaaucugcaucuga

SEQ ID NO: 164847 - RNA, 1701 nt, Artificial Sequence; identical to SEQ ID NO: 162971
  derived and/or modified CDS sequence (opt4) from hemagglutinin__InfluenzaA__ADG21927

SEQ ID NO: 164848 - RNA, 1701 nt, Artificial Sequence
  derived and/or modified CDS sequence (opt4) from hemagglutinin__InfluenzaA__ADG21928
augaaggccacccugguggugcugcuguacaccuucgccaccgccaacgccgacacccugugcaucggcuaccacgccaacaacagcaccgacaccguggacaccgugcuggagaagaacgugaccgugacccacagcgugaaccugcuggaggacaagcacaacggcaagcugugcaagcugagaggcguggccccccugcaccugggcaagugcaacaucgccggcuggauccugggcaaccccgagugcgagagccugagcaccgccagcagcuggagcuacaucguggagaccagcagcagcgacaacggcaccugcuaccccggcgacuucaucgacuacgaggagcugagagagcagcugagcagcgugagcagcuucgagagauucgagaucuuccccaagaccagcagcuggcccaaccacgacagcaacaagggcgugaccgccgccugcccccacgccggcgccaagagcuucuacaagaaccugaucuggcuggugaagaagggcaacagcuaccccaagcugagcaagagcuacaucaacgacaagggcaaggaggugcuggugcuguggggcauccaccaccccagcaccagcgccgaccagcagagccuguaccagaacgccgacgccuacguguucgugggcaccagcagauacagcaagaaguucaagcccgagaucgccaucagacccagagugagagaccaggagggcagaaugaacuacuacuggacccugguggagcccggcgacaagaucaccuucgaggccaccggcaaccugguggugcccagauacgccuucgccauggagagagacgccggcagcggcaucaucaucagcgacacccccgugcacgacugcaacaccaccugccagacccccaagggcgccaucaacaccagccugcccuuccagaacauccaccccaucaccaucggcaagugccccaaguacgugaagagcaccaagcugagacuggccaccggccugagaaacgugcccagcauccagagcagaggccuguucggcgccaucgccggcuucaucgagggcggcuggaccggcaugguggacggcugguacggcuaccaccaccagaacgagcagggcagcggcuacgccgccgaccugaagagcacccagaacgccaucgacgagaucaccaacaaggugaacagcgugaucgagaagaugaacacccaguucaccgccgugggcaaggaguucaaccaccuggagaagagaaucgagaaccugaacaagaagaucgacgacggcuuccuggacaucuggaccuacaacgccgagcugcuggugcugcuggagaacgagagaacccuggacuaccacgacagcaacgugaagaaccuguacgagaaggugagaagccagcugaagaacaacgccaaggagaucggcaacggcugcuucgaguucuaccacaagugcgacaacaccugcauggagagcgugaagaacggcaccuacgacuaccccaaguacagcgaggaggccaagcugaacagagaggagaucgacggcgugaagcuggagagcaccagaaucuaccagauccuggccaucuacagcaccguggccagcagccuggugcugguggugagccugggcgccaucagcuucuggaugugcagcaacggcagccugcagugcagaaucugcaucuga

SEQ ID NO: 164849 - RNA, 1701 nt, Artificial Sequence; identical to SEQ ID NO: 164845
  derived and/or modified CDS sequence (opt4) from hemagglutinin__InfluenzaA__ADG21930

SEQ ID NO: 164850 - RNA, 1701 nt, Artificial Sequence; identical to SEQ ID NO: 162971
  derived and/or modified CDS sequence (opt4) from hemagglutinin__InfluenzaA__ADG21931

SEQ ID NO: 164851 - RNA, 1701 nt, Artificial Sequence; identical to SEQ ID NO: 162971
  derived and/or modified CDS sequence (opt4) from hemagglutinin__InfluenzaA__ADG21932

SEQ ID NO: 164852 - RNA, 1701 nt, Artificial Sequence; identical to SEQ ID NO: 162971
  derived and/or modified CDS sequence (opt4) from hemagglutinin__InfluenzaA__ADG21933

SEQ ID NO: 164853 - RNA, 1701 nt, Artificial Sequence; identical to SEQ ID NO: 164845
  derived and/or modified CDS sequence (opt4) from hemagglutinin__InfluenzaA__ADG21934

SEQ ID NO: 164854 - RNA, 1701 nt, Artificial Sequence
  derived and/or modified CDS sequence (opt4) from hemagglutinin__InfluenzaA__ADG21935
auggaggccauccugguggugcugcuguacaccuucgccaccgccaacgccgacacccugugcaucggcuaccacgccaacaacagcaccgacaccguggacaccgugcuggagaagaacgugaccgugacccacagcgugaaccugcuggaggacaagcacaacggcaagcugugcaagcugagaggcguggccccccugcaccugggcaagugcaacaucgccggcuggauccugggcaaccccgagugcgagagccugagcaccgccagcagcuggagcuacaucguggagaccagcagcagcgacaacggcaccugcuaccccggcgacuucaucgacuacgaggagcugagagagcagcugagcagcgugagcagcuucgagagauucgagaucuuccccaagaccagcagcuggcccaaccacgacagcaacaagggcgugaccgccgccugcccccacgccggcgccaagagcuucuacaagaaccugaucuggcuggugaagaagggcaacagcuaccccaagcugagcaagagcuacaucaacgacaagggcaaggaggugcuggugcuguggggcauccaccaccccagcaccagcgccgaccagcagagccuguaccagaacgccgacgccuacguguucgugggcagcagcagauacagcaagaaguucaagcccgagaucgccaucagacccaaggugagagaccaggagggcagaaugaacuacuacuggacccugguggagcccggcgacaagaucaccuucgaggccaccggcaaccugguggugcccagauacgccuucgccauggagagaaacgccggcagcggcaucaucaucagcgacacccccgugcacgacugcaacaccaacugccagacccccaacggcgccaucaacaccagccugcccuuccacaacauccaccccaucaccaucggcaagugccccaaguacgugaagagcaccaagcugagacuggccaccggccugagaaacgugcccagcauccagagcagaggccuguucggcgccaucgccggcuucaucgagggcggcuggaccggcaugguggacggcugguacggcuaccaccaccagaacgagcagggcagcggcuacgccgccgaccugaagagcacccagaacgccaucgacgagaucaccaacaaggugaacagcgugaucgagaagaugaacacccaguucaccgccgugggcaaggaguucaaccaccuggagaagagaaucgagaaccugaacaagaagguggacgacggcuuccuggacaucuggaccuacaacgccgagcugcuggugcugcuggagaacgagagaacccuggacuaccacgacagcaacgugaagaaccuguacgagaaggugagaagccagcugaagaacaacgccaaggagaucggcaacggcugcuucgaguucuaccacaagugcgacaacaccugcauggagagcgugaagaacggcaccuacgacuaccccaaguacagcgaggaggccaagcugaacagagaggagaucgacggcgugaagcuggagagcaccagaaucuaccagauccuggccaucuacagcaccguggccagcagccuggugcugguggugagccugggcgccaucagcuucuggaugugcagcaacggcagccugcagugcagaaucugcaucuga

SEQ ID NO: 164855 - RNA, 1701 nt, Artificial Sequence; identical to SEQ ID NO: 162971
  derived and/or modified CDS sequence (opt4) from hemagglutinin__InfluenzaA__ADG21936

SEQ ID NO: 164856 - RNA, 1701 nt, Artificial Sequence; identical to SEQ ID NO: 162971
  derived and/or modified CDS sequence (opt4) from hemagglutinin__InfluenzaA__ADG21937

SEQ ID NO: 164857 - RNA, 1701 nt, Artificial Sequence
  derived and/or modified CDS sequence (opt4) from hemagglutinin__InfluenzaA__ADG21938
auggaggccauccugguggugcugcuguacaccuucgccaccgccaacgccgacacccugugcaucggcuaccacgccaacaacagcaccgacaccguggacaccgugcuggagaagaacgugaccgugacccacagcgugaaccugcuggaggacaagcacaacggcaagcugugcaagcugagaggcguggccccccugcaccugggcaagugcaacaucgccggcuggauccugggcaaccccgagugcgagagccugagcaccgccagcagcuggagcuacaucguggagaccagcagcagcgacaacggcaccugcuaccccggcgacuucaucgacuacgaggagcugagagagcagcugagcagcgugagcagcuucgagagauucgagaucuuccccaagaccagcagcuggcccaaccacgacagcaacaagggcgugaccgccgccugcccccacgccggcgccaagagcuucuacaagaaccugaucuggcuggugaagaagggcaacagcuaccccaagcugagcaagagcuacaucaacgacaagggcaaggaggugcuggugcuguggggcauccaccaccccagcaccagcgccgaccagcagagccuguaccagaacgccgacgccuacguguucgugggcagcagcagauacagcaagaaguucaagcccgagaucgccaucagacccaaggugagagaccaggagggcagaaugaacuacuacuggacccugguggagcccggcgacaagaucaccuucgaggccaccggcaaccugguggugcccagauacgccuucgccauggagagaaacgccggcagcggcaucaucaucagcgacacccccgugcacgacugcaacaccaccugccagacccccaagggcgccaucaacaccagccugcccuuccacaacauccaccccaucaccaucggcaagugccccaaguacgugaagagcaccaagcugagacuggccaccggccugagaaacgugcccagcauccagagcagaggccuguucggcgccaucgccggcuucaucgagggcggcuggaccggcaugguggacggcugguacggcuaccaccaccagaacgagcagggcagcggcuacgccgccgaccugaagagcacccagaacgccaucgacgagaucaccaacaaggugaacagcgugaucgagaagaugaacacccaguucaccgccgugggcaaggaguucaaccaccuggagaagagaaucgagaaccugaacaagaagguggacgacggcuuccuggacaucuggaccuacaacgccgagcugcuggugcugcuggagaacgagagaaaccuggacuaccacgacagcaacgugaagaaccuguacgagaaggugagaagccagcugaagaacaacgccaaggagaucggcaacggcugcuucgaguucuaccacaagugcgacaacaccugcauggagagcgugaagaacggcaccuacgacuaccccaaguacagcgaggaggccaagcugaacagagaggagaucgacggcgugaagcuggagagcaccagaaucuaccagauccuggccaucuacagcaccguggccagcagccuggugcugguggugagccugggcgccaucagcuucuggaugugcagcaacggcagccugcagugcagaaucugcaucuga

SEQ ID NO: 164858 - RNA, 1701 nt, Artificial Sequence; identical to SEQ ID NO: 162971
  derived and/or modified CDS sequence (opt4) from hemagglutinin__InfluenzaA__ADG21939

SEQ ID NO: 164859 - RNA, 1701 nt, Artificial Sequence; identical to SEQ ID NO: 162971
  derived and/or modified CDS sequence (opt4) from hemagglutinin__InfluenzaA__ADG21940

SEQ ID NO: 164860 - RNA, 1701 nt, Artificial Sequence
  derived and/or modified CDS sequence (opt4) from hemagglutinin__InfluenzaA__ADG21941
auggaggccauccugguggugcugcuguacaccuucgccaccgccaacgccgacacccugugcaucggcuaccacgccaacaacagcaccgacaccguggacaccgugcuggagaagaacgugaccgugacccacagcgugaaccugcuggaggacaagcacaacggcaagcugugcaagcugagaggcguggccccccugcaccugggcaagugcaacaucgccggcuggauccugggcaaccccgagugcgagagccugagcaccgccagcagcuggagcuacaucguggagaccagcagcagcgacaacggcaccugcuaccccggcgacuucaucgacuacgaggagcugagagagcagcugagcagcgugagcagcuucgagagauucgagaucuuccccaagaccagcagcuggcccaaccacgacagcaacaagggcgugaccgccgccugcccccacgccggcgccaagagcuucuacaagaaccugaucuggcuggugaagaagggcaacagcuaccccaagcugagcaagagcuacaucaacgacaagggcaaggaggugcuggugcuguggggcauccaccaccccagcaccagcgccgaccagcagagccuguaccagaacgccgacgccuacguguucgugggcagcagcagauacagcaagaaguucaagcccgagaucgccaucagacccaaggugagagaccaggagggcagaaugaacuacuacuggacccugguggagcccggcgacaagaucaccuucgaggccaccggcaaccugguggugcccagauacgccuucgccauggagagaaacgccggcagcggcaucaucaucagcgacacccccgugcacgacugcaacaccaccugccagacccccaagggcgccaucaacaccagccugcccuuccacaacauccaccccaucaccaucggcaagugccccaaguacgugaagagcaccaagcugagacuggccaccggccugagaaacgugcccagcauccagagcagaggccuguucggcgccaucgccggcuucaucgagggcggcuggaccggcaugguggacggcugguacggcuaccaccaccagaacgagcagggcagcggcuacgccgccgaccugaagagcacccagaacgccaucgacgagaucaccaacaaggugaacagcgugaucgagaagaugaacacccaguucaccgccgugggcaaggaguucaaccaccuggagaagagaaucgagaaccugaacaagaagaucgacgacggcuuccuggacaucuggaccuacaacgccgagcugcuggugcugcuggagaacgagagaacccuggacuaccacgacagcaacgugaagaaccuguacgagaaggugagaagccagcugaagaacaacgccaaggagaucggcaacggcugcuucgaguucuaccacaagugcgacaacaccugcauggagagcgugaagaacggcaccuacgacuaccccaaguacagcgaggaggccaagcugaacagagaggagaucgacggcgugaagcuggagagcaccagaaucuaccagauccuggccaucuacagcaccguggccagcagccuggugcugguggugagccugggcgccaucagcuucuggaugugcagcaacggcagccugcagugcagaaucugcaucuga

SEQ ID NO: 164861 - RNA, 1701 nt, Artificial Sequence
  derived and/or modified CDS sequence (opt4) from hemagglutinin__InfluenzaA__ADG21943
augaaggccauccugguggugcugcuguacaccuucgccaccgccaacgccgacacccugugcaucggcuaccacgccaacaacagcaccgacaccguggacaccgugcuggagaagaacgugaccgugacccacagcgugaaccugcuggaggacaagcacaacggcaagcugugcaagcugagaggcguggccccccugcaccugggcaagugcaacaucgccggcuggauccugggcaaccccgagugcgagagccugagcaccgccaacagcuggagcuacaucguggagaccagcagcagcgacaacggcaccugcuaccccggcgacuucaucgacuacgaggagcugagagagcagcugagcagcgugagcagcuucgagagauucgagaucuuccccaagaccagcagcuggcccaaccacgacagcaacaagggcgugaccgccgccugcccccacgccggcgccaagagcuucuacaagaaccugaucuggcuggugaagaagggcaacagcuaccccaagcugagcaagagcuacaucaacgacaagggcaaggaggugcuggugcuguggggcauccaccaccccagcaccagcgccgaccagcagagccuguaccagaacgccgacgccuacguguucgugggcaccagcagauacagcaagaaguucaagcccgagaucgccaucagacccaaggugagagaccaggagggcagaaugaacuacuacuggacccugguggagcccggcgacaagaucaccuucgaggccaccggcaaccugguggugcccagauacgccuucgccauggagagagacgccggcagcggcaucaucaucagcgacacccccgugcacgacugcaacaccaccugccagacccccaagggcgccaucaacaccagccugcccuuccagaacauccaccccaucaccaucggcaagugccccaaguacgugaagagcaccaagcugagacuggccaccggccugagaaacgugcccagcauccagagcagaggccuguucggcgccaucgccggcuucaucgagggcggcuggaccggcaugguggacggcugguacggcuaccaccaccagaacgagcagggcagcggcuacgccgccgaccugaagagcacccagaacgccaucgacgagaucaccaacaaggugaacagcgugaucgagaagaugaacacccaguucaccgccgugggcaaggaguucaaccaccuggagaagagaaucgagaaccugaacaagaagaucgacgacggcuuccuggacaucuggaccuacaacgccgagcugcuggugcugcuggagaacgagagaacccuggacuaccacgacagcaacgugaagaaccuguacgagaaggugagaagccagcugaagaacaacgccaaggagaucggcaacggcugcuucgaguucuaccacaagugcgacaacaccugcauggagagcgugaagaacggcaccuacgacuaccccaaguacagcgaggaggccaagcugaacagagaggagaucgacggcgugaagcuggagagcaccagaaucuaccagauccuggccaucuacagcaccguggccagcagccuggugcugguggugagccugggcgccaucagcuucuggaugugcagcaacggcagccugcagugcagaaucugcaucuga

SEQ ID NO: 164862 - RNA, 1701 nt, Artificial Sequence
  derived and/or modified CDS sequence (opt4) from hemagglutinin__InfluenzaA__ADG21944
auggaggccauccugaucgugcugcuguacaccuucgccaccgccaacgccgacacccugugcaucggcuaccacgccaacaacagcaccgacaccguggacaccgugcuggagaagaacgugaccgugacccacagcgugaaccugcuggaggacaagcacaacggcaagcugugcaagcugagaggcguggccccccugcaccugggcaagugcaacaucgccggcuggauccugggcaaccccgagugcgagagccugagcaccgccagcagcuggagcuacaucguggagaccagcagcagcgacaacggcaccugcuaccccggcgacuucaucgacuacgaggagcugagagagcagcugagcagcgugagcagcuucgagagauucgagaucuuccccaagaccagcagcuggcccaaccacgacagcaacaagggcgugaccgccgccugcccccacgccggcgccaagagcuucuacaagaaccugaucuggcuggugaagaagggcaacagcuaccccaagcugagcaagagcuacaucaacgacaagggcaaggaggugcuggugcuguggggcauccaccaccccagcaccagcgccgaccagcagagccuguaccagaacgccgacgccuacguguucgugggcagcagcagauacagcaagaaguucaagcccgagaucgccaucagacccaaggugagagaccaggagggcagaaugaacuacuacuggacccugguggagcccggcgacaagaucaccuucgaggccaccggcaaccugguggugcccagauacgccuucgccauggagagaaacgccggcagcggcaucaucaucagcgacacccccgugcacgacugcaacaccaccugccagacccccaagggcgccaucaacaccagccugcccuuccacaacauccaccccaucaccaucggcaagugccccaaguacgugaagagcaccaagcugagacuggccaccggccugagaaacgugcccagcauccagagcagaggccuguucggcgccaucgccggcuucaucgagggcggcuggaccggcaugguggacggcugguacggcuaccaccaccagaacgagcagggcagcggcuacgccgccgaccugaagagcacccagaacgccaucgacgagaucaccaacaaggugaacagcgugaucgagaagaugaacacccaguucaccgccgugggcaaggaguucaaccaccuggagaagagaaucgagaaccugaacaagaagguggacgacggcuuccuggacaucuggaccuacaacgccgagcugcuggugcugcuggagaacgagagaacccuggacuaccacgacagcaacgugaagaaccuguacgagaaggugagaagccagcugaagaacaacgccaaggagaucggcaacggcugcuucgaguucuaccacaagugcgacaacaccugcauggagagcgugaagaacggcaccuacgacuaccccaaguacagcgaggaggccaagcugaacagagaggagaucgacggcgugaagcuggagagcaccagaaucuaccagauccuggccaucuacagcaccguggccagcagccuggugcugguggugagccugggcgccaucagcuucuggaugugcagcaacggcagccugcagugcagaaucugcaucuga

SEQ ID NO: 164863 - RNA, 1701 nt, Artificial Sequence; identical to SEQ ID NO: 162971
  derived and/or modified CDS sequence (opt4) from hemagglutinin__InfluenzaA__ADG21945

SEQ ID NO: 164864 - RNA, 1701 nt, Artificial Sequence; identical to SEQ ID NO: 162971
  derived and/or modified CDS sequence (opt4) from hemagglutinin__InfluenzaA__ADG21946

SEQ ID NO: 164865 - RNA, 1701 nt, Artificial Sequence; identical to SEQ ID NO: 162971
  derived and/or modified CDS sequence (opt4) from hemagglutinin__InfluenzaA__ADG21947

SEQ ID NO: 164866 - RNA, 1701 nt, Artificial Sequence
  derived and/or modified CDS sequence (opt4) from hemagglutinin__InfluenzaA__ADG21948
auggaggccauccugguggugcugcuguacaccuucgccaccgccaacgccgacacccugugcaucggcuaccacgccaacaacagcaccgacaccguggacaccgugcuggagaagaacgugaccgugacccacagcgugaaccugcuggaggacaagcacaacggcaagcugugcaagcugagaggcguggccccccugcaccugggcaagugcaacaucgccggcuggauccugggcaaccccgagugcgagagccugagcaccgccagcagcuggagcuacaucguggagaccagcagcagcgacaacggcaccugcuaccccggcgacuucaucgacuacgaggagcugagagagcagcugagcagcgugagcagcuucgagagauucgagaucuuccccaagaccagcagcuggcccaaccacgacagcaacaagggcgugaccgccgccugcccccacgccggcgccaagagcuucuacaagaaccugaucuggcuggugaagaagggcaacagcuaccccaagcugagcaagagcuacaucaacgacaagggcaaggaggugcuggugcuguggggcauccaccaccccagcaccagcgccgaccagcagagccuguaccagaacgccgacgccuacguguucgugggcagcagcagauacagcaagaaguucaagcccgagaucgccaucagacccaaggugagagaccaggagggcagaaugaacuacuacuggacccugguggagcccggcgacaagaucaccuucgaggccaccggcaaccugguggugcccagauacgccuucgccauggagagaaacgccggcagcggcaucaucaucagcgacacccccgugcacgacugcaacaccaccugccagacccccaagggcgccaucaacaccagccugcccuuccacaacauccaccccaucaccaucggcaagugccccaaguacgugaagagcaccaagcugagacuggccaccggccugagaaacgugcccagcauccagagcagaggccuguucggcgccaucgccggcuucaucgagggcggcuggaccggcaugguggacggcugguacggcuaccaccaccagaacgagcagggcagcggcuacgccgccgaccugaagagcacccagaacgccaucgacgagaucaccaacaaggugaacagcgugaucgagaagaugaacacccaguucaccgccgugggcaaggaguucaaccaccuggagaagagaaucgagaaccugaacaagaagguggacgacggcuuccuggacaucuggaccuacaacgccgagcugcuggugcugcuggagaacgagagaacccuggaccaccacgacagcaacgugaagaaccuguacgagaaggugagaagccagcugaagaacaacgccaaggagaucggcaacggcugcuucgaguucuaccacaagugcgacaacaccugcauggagagcgugaagaacggcaccuacgacuaccccaaguacagcgaggaggccaagcugaacagagaggagaucgacggcgugaagcuggagagcaccagaaucuaccagauccuggccaucuacagcaccguggccagcagccuggugcugguggugagccugggcgccaucagcuucuggaugugcagcaacggcagccugcagugcagaaucugcaucuga

SEQ ID NO: 164867 - RNA, 1701 nt, Artificial Sequence
  derived and/or modified CDS sequence (opt4) from hemagglutinin__InfluenzaA__ADG27794
augaaggccauccugguggugcugcuguacaccuucgccaccgccaacgccgacacccugugcaucggcuaccacgccaacaacagcaccgacaccguggacaccgugcuggagaagaacgugaccgugacccacagcgugaaccugcuggaggacaagcacaacggcaagcugugcaagcugagaggcguggccccccugcaccugggcaagugcaacaucgccggcuggauccugggcaaccccgagugcgagagccugagcaccgccagcagcuggagcuacaucguggagaccagcagcagcgacaacggcaccugcuaccccggcgacuucaucgacuacgaggagcugagagagcagcugagcagcgugagcagcuucgagagauucgagaucuuccccaagaccagcagcuggcccaaccacgacagcaacaagggcgugaccgccgccugcccccacgccggcgccaagagcuucuacaagaaccugaucuggcuggugaagaagggcaacagcuaccccaagcugagcaagagcuacaucaacgacaagggcaaggaggugcuggugcuguggggcauccaccaccccagcaccagcgccgaccagcagagccuguaccagaacgccgacgccuacguguucgugggcaccagcagauacagcaagaaguucaagcccgagaucgccaucagacccaaggugagagaccaggagggcagaaugaacuacuacuggacccugguggagcccggcgacaagaucaccuucgaggccaccggcaaccugguggugcccagauacgccuucgccauggagagaaacgccggcagcggcaucaucaucagcgacacccccgugcacgacugcaacaccaccugccagacccccaagggcgccaucaacaccagccugcccuuccagaacauccaccccaucaccaucggcaagugccccaaguacgugaagagcaccaagcugagacuggccaccggccugagaaacgugcccagcauccagagcagaggccuguucggcgccaucgccggcuucaucgagggcggcuggaccggcaugguggacggcugguacggcuaccaccaccagaacgagcagggcagcggcuacgccgccgaccugaagagcacccagaacgccaucgacgagaucaccaacaaggugaacagcgugaucgagaagaugaacacccaguucaccgccgugggcaaggaguucaaccaccuggagaagagaaucgagaaccugaacaagaagguggacgacggcuuccuggacaucuggaccuacaacgccgagcugcuggugcugcuggagaacgagagaacccuggacuaccacgacagcaacgugaagaaccuguacgagaaggugagaagccagcugaagaacaacgccaaggagaucggcaacggcugcuucgaguucuaccacaagugcgacaacaccugcauggagagcgugaagaacggcaccuacgacuaccccaaguacagcgaggaggccaagcugaacagagaggagaucgacggcgugaagcuggagagcaccagaaccuaccagauccuggccaucuacagcaccguggccagcagccuggugcugguggugagccugggcgccaucagcuucuggaugugcagcaacggcagccugcagugcagaaucugcaucuga

SEQ ID NO: 164868 - RNA, 1701 nt, Artificial Sequence; identical to SEQ ID NO: 162716
  derived and/or modified CDS sequence (opt4) from hemagglutinin__InfluenzaA__ADG27948

SEQ ID NO: 164869 - RNA, 1701 nt, Artificial Sequence; identical to SEQ ID NO: 162716
  derived and/or modified CDS sequence (opt4) from hemagglutinin__InfluenzaA__ADG27966

SEQ ID NO: 164870 - RNA, 1701 nt, Artificial Sequence
  derived and/or modified CDS sequence (opt4) from hemagglutinin__InfluenzaA__ADG27974
augaaggccauccugguggugcugcuguacaccuucgccaccgccaacgccgacacccugugcaucggcuaccacgccaacaacagcaccgacaccguggacaccgugcuggagaagaacgugaccgugacccacagcgugaaccugcuggaggacaagcacaacggcaagcugugcaagcugagaggcguggccccccugcaccugggcaagugcaacaucgccggcuggauccugggcaaccccgagugcgagagccugagcaccgccagcagcuggagcuacaucguggagaccagcagcagcgacaacggcaccugcuaccccggcgacuucaucgacuacgaggagcugagagagcagcugagcagcgugagcagcuucgagagauucgagaucuuccccaagaccagcagcuggcccaaccacgacagcaacaagggcgugaccgccgccugcccccacgccggcgccaagagcuucuacaagaaccugaucuggcuggugaagaagggcaacagcuaccccaagcugagcaagagcuacaucaacgacaagggcaaggaggugcuggugcuguggggcauccaccaccccagcaccagcgccgaccagcagagccuguaccagaacgccgacgccuacguguucgugggcagcagcagauacagcaagaaguucaagcccgagaucgccaucagacccaaggugagagaccaggagggcagaaugaacuacuacuggacccugguggagcccggcgacaagaucaccuucgaggccaccggcaaccugguggugcccagauacgccuucgccauggagagaaacgccggcagcggcaucaucaucagcgacacccccgugcacgacugcaacaccaccugccagacccccaagggcgccaucaacaccagccugcccuuccagaacauccaccccaucaccaucggcaagugccccaaguacgugaagagcaccaagcugagacuggccaccggccugagaaacgugcccagcauccagagcagaggccuguucggcgccaucgccggcuucaucgagggcggcuggaccggcaugguggacggcugguacggcuaccaccaccagaacgagcagggcagcggcuacgccgccgaccugaagagcacccagaacgccaucgacgagaucaccaacaaggugaacagcgugaucgagaagaugaacacccaguucaccgccgugggcaaggaguucaaccaccuggagaagagaaucgagaaccugaacaagaagguggacgacggcuuccuggacaucuggaccuacaacgccgagcugcuggugcugcuggagaacgagagaacccuggacuaccacgacagcaacgugaagaaccuguacgagaaggugagaagccagcugaagaacaacgccaaggagaucggcaacggcugcuucgaguucuaccacaagugcgacaacaccugcauggagagcgugaagaacggcaccuacgacuaccccaaguacagcgaggaggccaagcugaacagagaggagaucgacggcgugaagcuggagagcaccagaaucuaccagauccuggccaucuacagcaccguggccagcagccugauccugguggugagccugggcgccaucagcuucuggaugugcagcaacggcagccugcagugcagaaucugcaucuga

SEQ ID NO: 164871 - RNA, 1701 nt, Artificial Sequence
  derived and/or modified CDS sequence (opt4) from hemagglutinin__InfluenzaA__ADG27982
augaaggccauccugguggugcugcuguacaccuucgccaccgccaacgccgacacccugugcaucggcuaccacgccaacaacagcaccgacaccguggacaccgugcuggagaagaacgugaccgugacccacagcgugaaccugcuggaggacaagcacaacggcaagcugugcaagcugagaggcguggccccccugcaccugggcaagugcaacaucgccggcuggauccugggcaaccccgagugcgagagccugagcaccgccagcagcuggagcuacaucguggagaccagcagcagcgacaacggcaccugcuaccccggcgacuucaucgacuacgaggagcugagagagcagcugagcagcgugagcagcuucgagagauucgagaucuuccccaagaccagcagcuggcccaaccacgacagcaacaagggcgugaccgccgccugcccccacgccggcgccaagagcuucuacaagaaccugaucuggcuggugaagaagggcaacagcuaccccaagcugagcaagagcuacaucaacgacaagggcaaggaggugcuggugcuguggggcauccaccaccccagcaccagcgccgaccagcagagccuguaccagaacgccgacgccuacguguucgugggcagcagcagauacagcaagaaguucaagcccgagaucgccaucagacccaaggugagagaccaggagggcagaaugaacuacuacuggacccugguggagcccggcgacaagaucaccuucgaggccaccggcaaccugguggugcccagauacgccuucgccauggagagaaacgccggcagcggcaucaucaucagcgacacccccgugcacgacugcaacaccaccugccagacccccaagggcgccaucaacaccagccugcccuuccagaacauccaccccaucaccaucggcaagugccccaaguacgugaagagcaccaagcugagacuggccaccggccugagaaacgugcccagcauccagagcagaggccuguucggcgccaucgccggcuucaucgagggcggcuggaccggcaugguggacggcugguacggcuaccaccaccagaacgagcagggcagcggcuacgccgccgaccugaagagcacccagaacgccaucgacgagaucaccaacaaggugaacagcgugaucgagaagaugaacacccaguucaccgccgugggcaaggaguucaaccaccuggagaagagaaucgagaaccugaacaagaagguggacgacggcuuccuggacaucuggaccuacaacgccgagcugcuggugcugcuggagaacgagagaacccuggacuaccacgacagcaacgugaagaagcuguacgagaaggugagaagccagcugaagaacaacgccaaggagaucggcaacggcugcuucgaguucuaccacaagugcgacaacaccugcauggagagcgugaagaacggcaccuacgacuaccccaaguacagcgaggaggccaagcugaacagagaggagaucgacggcgugaagcuggagagcaccagaaucuaccagauccuggccaucuacagcaccguggccagcagccuggugcugguggugagccugggcgccaucagcuucuggaugugcagcaacggcagccugcagugcagaaucugcaucuga

SEQ ID NO: 164872 - RNA, 1701 nt, Artificial Sequence; identical to SEQ ID NO: 162716
  derived and/or modified CDS sequence (opt4) from hemagglutinin__InfluenzaA__ADG27988

SEQ ID NO: 164873 - RNA, 1701 nt, Artificial Sequence; identical to SEQ ID NO: 162716
  derived and/or modified CDS sequence (opt4) from hemagglutinin__InfluenzaA__ADG27997

SEQ ID NO: 164874 - RNA, 1701 nt, Artificial Sequence; identical to SEQ ID NO: 162716
  derived and/or modified CDS sequence (opt4) from hemagglutinin__InfluenzaA__ADG28011

SEQ ID NO: 164875 - RNA, 1701 nt, Artificial Sequence; identical to SEQ ID NO: 164281
  derived and/or modified CDS sequence (opt4) from hemagglutinin__InfluenzaA__ADG42093

SEQ ID NO: 164876 - RNA, 1701 nt, Artificial Sequence; identical to SEQ ID NO: 163893
  derived and/or modified CDS sequence (opt4) from hemagglutinin__InfluenzaA__ADG42103

SEQ ID NO: 164877 - RNA, 1701 nt, Artificial Sequence; identical to SEQ ID NO: 163082
  derived and/or modified CDS sequence (opt4) from hemagglutinin__InfluenzaA__ADG42113

SEQ ID NO: 164878 - RNA, 1701 nt, Artificial Sequence; identical to SEQ ID NO: 164281
  derived and/or modified CDS sequence (opt4) from hemagglutinin__InfluenzaA__ADG42123

SEQ ID NO: 164879 - RNA, 1701 nt, Artificial Sequence
  derived and/or modified CDS sequence (opt4) from hemagglutinin__InfluenzaA__ADG42133
augaaggccauccugguggugcugcuguacaccuucgccaccgccaacgccgacacccugugcaucggcuaccacgccaacaacagcaccgacaccguggacaccgugcuggagaagaacgugaccgugacccacagcgugaaccugcuggaggacaagcacaacggcaagcugugcaagcugagaggcguggccccccugcaccugggcaagugcaacaucgccggcuggauccugggcaaccccgagugcgagagccugagcaccgccagcagcuggagcuacaucguggagaccagcagcagcgacaacggcaccugcuaccccggcgacuucaucgacuacgaggagcugagagagcagcugagcagcgugagcagcuucgagagauucgagaucuuccccaagaccagcagcuggcccaaccacgacagcaacaagggcgugaccgccgccugccccuacgccggcgccaagagcuucuacaagaaccugaucuggcuggugaagaagggcaacagcuaccccaagcugagcaagagcuacaucaacgacaagggcaaggaggugcuggugcuguggggcauccaccaccccagcaccagcgccgaccagcagagccuguaccagaacgccgacgccuacguguucgugggcaccagcagauacagcaagaaguucaagcccgagaucgccaucagacccaaggugagagaccaggagggcagaaugaacuacuacuggacccugguggagcccggcgacaagaucaccuucgaggccaccggcaaccugguggugcccagauacgccuucgccauggagagaaacgccggcagcggcaucaucaucagcgacacccccgugcacgacugcaacaccaccugccagacccccaagggcgccaucaacaccagccugcccuuccagaacauccaccccaucaccaucggcaagugccccaaguacgugaagagcaccaagcugagacuggugaccggccugagaaacgugcccagcauccagagcagaggccuguucggcgccaucgccggcuucaucgagggcggcuggaccggcaugguggacggcugguacggcuaccaccaccagaacgagcagggcagcggcuacgccgccgaccugaagagcacccagcacgccaucgacgagaucaccaacaaggugaacagcgugaucgagaagaugaacacccaguucaccgccgugggcaaggaguucaaccaccuggagaagagaaucgagaaccugaacaagaagguggacgacggcuuccuggacaucuggaccuacaacgccgagcugcuggugcugcuggagaacgagagaacccuggacuaccacgacagcaacgugaagaaccuguacgagaaggugagaagccagcugaagaacaacgccaaggagaucggcaacggcugcuucgaguucuaccacaagugcgacaacaccugcauggagagcgugaagaacggcaccuacgacuaccccaaguacagcgaggaggccaagcugaacagagaggagaucgacggcgugaagcuggagagcaccagaaucuaccagauccuggccaucuacagcaccguggccagcagccuggugcugguggugagccugggcgccaucagcuucuggaugugcagcaacggcagccugcagugcagaaucugcaucuga

SEQ ID NO: 164880 - RNA, 1701 nt, Artificial Sequence
  derived and/or modified CDS sequence (opt4) from hemagglutinin__InfluenzaA__ADG42143
augaaggccauccugguggugcugcuguacaccuucgccaccgccaacgccgacacccugugcaucggcuaccacgccaacaacagcaccgacaccguggacaccgugcuggagaagaacgugaccgugacccacagcgugaacauccuggaggacaagcacaacggcaagcugugcaagcugagaggcguggccccccugcaccugggcaagugcaacaucgccggcuggauccugggcaaccccgagugcgagagccugagcaccgccagcagcuggagcuacaucguggagaccagcagcagcgacaacggcaccugcuaccccggcgacuucaucgacuacgaggagcugagagagcagcugagcagcgugagcagcuucgagagauucgagaucuuccccaagaccagcagcuggcccaaccacgacagcaacaagggcgugaccgccgccugcccccacgccggcgccaagagcuucuacaagaaccugaucuggcuggugaagaagggcaacagcuaccccaagcugagcaagagcuacaucaacgacaagggcaaggaggugcuggugcuguggggcauccaccaccccagcaccagcgccgaccagcagagccuguaccagaacgccgacgccuacguguucgugggcagcagcagauacagcaagaaguucaagcccgagaucgccaucagacccaaggugagagaccaggagggcagaaugaacuacuacuggacccugguggagcccggcgacaagaucaccuucgaggccaccggcaaccugguggugcccagauacgccuucgccauggagaagaacgccggcagcggcaucaucaucagcgacacccccgugcacgacugcaacaccaccugccagacccccaagggcgccaucaacaccagccugcccuuccagaacauccaccccaucaccaucggcaagugccccaaguacgugaagagcaccaagcugagacuggccaccggccugagaaacgugcccagcauccagagcagaggccuguucggcgccaucgccggcuucaucgagggcggcuggaccggcaugguggacggcugguacggcuaccaccaccagaacgagcagggcagcggcuacgccgccgaccugaagagcacccagaacgccaucgacgagaucaccaacaaggugaacagcgugaucgagaagaugaacacccaguucaccgccgugggcaaggaguucaaccaccuggagaagagaaucgagaaccugaacaagaagguggacgacggcuuccuggacaucuggaccuacaacgccgagcugcuggugcugcuggagaacgagagaacccuggacuaccacgacagcaacgugaagaaccuguacgagaaggugagaagccagcugaagaacaacgccaaggaggugggcaacggcugcuucgaguucuaccacaagugcgacaacaccugcauggagagcgugaagaacggcaccuacgacuaccccaaguacagcgaggaggccaagcugaacagagaggagaucgacggcgugaagcuggagagcaccagaaucuaccagauccuggccaucuacagcaccgccgccagcagccuggugcugguggugagccugggcgccaucagcuucuggaugugcagcaacggcagccugcagugcagaaucugcaucuga

SEQ ID NO: 164881 - RNA, 1701 nt, Artificial Sequence
  derived and/or modified CDS sequence (opt4) from hemagglutinin__InfluenzaA__ADG42153
augaaggccauccugguggugcugcuguacaccuucgccaccgccaacgccgacacccugugcaucggcuaccacgccaacaacagcaccgacaccguggacaccgugcuggagaagaacgugaccgugacccacagcgugaaccugcuggaggacaagcacaacggcaagcugugcaagcugagaggcguggccccccugcaccugggcaagugcaacaucgccggcuggauccugggcaaccccgagugcgagagccugagcaccgccagcagcuggagcuacaucguggagaccagcagcagcgacaacggcaccugcuaccccggcgacuucaucgacuacgaggagcugagagagcagcugagcagcgugagcagcuucgagagauucgagaucuuccccaagaccagcagcuggcccaaccacgacagcaacaagggcaucaccgccgccugcccccacgccggcgccaagagcuucuacaagaaccugaucuggcuggugaagaagggcaacagcuaccccaagcugagcaagagcuacaucaacgacaagggcaaggaggugcuggugcuguggggcauccaccaccccagcaccagcgccgaccagcagagccuguaccagaacgccgacgccuacguguucgugggcaccagcagauacagcaagaaguucaagcccgagaucgccaucagacccaaggugagagaccaggagggcagaaugaacuacuacuggacccugguggagcccggcgacaagaucaccuucgaggccaccggcaaccugguggugcccagauacgccuucgccauggagagaaacgccggcagcggcaucaucaucagcgacacccccgugcuggacugcaacaccaccugccagacccccaagggcgccaucaacaccagccugcccuuccagaacauccaccccaucaccaucggcaagugccccaaguacgugaagagcaccaagcugagacuggccaccggccugagaaacgugcccagcauccagagcagaggccuguucggcgccaucgccggcuucaucgagggcggcuggaccggcaugguggacggcugguacggcuaccaccaccagaacgagcagggcagcggcuacgccgccgaccugaagagcacccagaacgccaucgacgagaucaccaacaaggugaacagcgugaucgagaagaugaacacccaguucaccgccgugggcaaggaguucaaccaccuggagaagagaaucgagaaccugaacaagaagguggacgacggcuuccuggacaucuggaccuacaacgccgagcugcuggugcugcuggagaacgagagaacccuggacuaccacgacagcaacgugaagaaccuguacgagaaggugagaagccagcugaagaacaacgccaaggagaucggcaacggcugcuucgaguucuaccacaagugcgacaacaccugcauggagagcgugaagaacggcaccuacgacuaccccaaguacagcgaggaggccaagcugaacagagaggagaucgacggcgugaagcuggagagcaccagaaucuaccagauccuggccaucuacagcaccguggccagcagccuggugcugguggugagccugggcgccaucagcuucuggaugugcagcaacggcagccugcagugcagaaucugcaucuga

SEQ ID NO: 164882 - RNA, 1701 nt, Artificial Sequence; identical to SEQ ID NO: 162729
  derived and/or modified CDS sequence (opt4) from hemagglutinin__InfluenzaA__ADG42193

SEQ ID NO: 164883 - RNA, 1701 nt, Artificial Sequence; identical to SEQ ID NO: 162729
  derived and/or modified CDS sequence (opt4) from hemagglutinin__InfluenzaA__ADG42213

SEQ ID NO: 164884 - RNA, 1701 nt, Artificial Sequence; identical to SEQ ID NO: 162729
  derived and/or modified CDS sequence (opt4) from hemagglutinin__InfluenzaA__ADG42233

SEQ ID NO: 164885 - RNA, 1701 nt, Artificial Sequence
  derived and/or modified CDS sequence (opt4) from hemagglutinin__InfluenzaA__ADG42243
augaaggccauccugguggugcugcuguacaccuucgccaccgccaacgccgacacccugugcaucggcuaccacgccaacaacagcaccgacaccguggacaccgugcuggagaagaacgugaccgugacccacagcgugaaccugcuggaggacaagcacaacggcaagcugugcaagcugagaggcguggccccccugcaccugggcaagugcaacaucgccggcuggauccugggcaaccccgagugcgagagccugagcaccgccagcagcuggagcuacaucguggagaccagcagcagcgacaacggcaccugcuaccccggcgacuucaucgacuacgaggagcugagagagcagcugagcagcgugagcagcuucgagagauucgagaucuuccccaagaccagcagcuggcccaaccacgacagcaacaagggcgugaccgccgccugcccccacgccggcgccaagagcuucuacaagaaccugaucuggcuggugaagaagggcaacagcuaccccaagcugagcaagagcuacaucaacgacaagggcaaggaggugcuggugcuguggggcauccaccaccccagcaccagcgccgaccagcagagccuguaccagaacgccgacgccuacguguucgugggcaccagcagauacagcaagaaguucaagcccgagaucgccaucagacccaaggugagagaccaggagggcagaaugaacuacuacuggacccugguggagcccggcgacaagaucaccuucgaggccaccggcaaccugguggugcccagauacgccuucgccauggagagaaacgccggcagcggcaucaucaucagcgacacccccgugcuggacugcaacaccaccugccagacccccaagggcgccaucaacaccagccugcccuuccagaacauccaccccaucaccaucggcaagugccccaaguacgugaagagcaccaagcugagacuggccaccggccugagaaacgugcccagcauccagagcagaggccuguucggcgccaucgccggcuucaucgagggcggcuggaccggcaugguggacggcugguacggcuaccaccaccagaacgagcagggcagcggcuacgccgccgaccugaagagcacccagcacgccaucgacgagaucaccaacaaggugaacagcgugaucgagaagaugaacacccaguucaccgccgugggcaaggaguucaaccaccuggagaagagaaucgagaaccugaacaagaagguggacgacggcuuccuggacaucuggaccuacaacgccgagcugcuggugcugcuggagaacgagagaacccuggacuaccacgacagcaacgugaagaaccuguacgagaaggugagaagccagcugaagaacaacgccaaggagaucggcaacggcugcuucgaguucuaccacaagugcgacaacaccugcauggagagcgugaagaacggcaccuacgacuaccccaaguacagcgaggaggccaagcugaacagagaggagaucgacggcgugaagcuggagagcaccagaaucuaccagauccuggccaucuacagcaccguggccagcagccuggugcugguggugagccugggcgccaucagcuucuggaugugcagcaacggcagccugcagugcagaaucugcaucuga

SEQ ID NO: 164886 - RNA, 1701 nt, Artificial Sequence; identical to SEQ ID NO: 164149
  derived and/or modified CDS sequence (opt4) from hemagglutinin__InfluenzaA__ADG42253

SEQ ID NO: 164887 - RNA, 1701 nt, Artificial Sequence; identical to SEQ ID NO: 162729
  derived and/or modified CDS sequence (opt4) from hemagglutinin__InfluenzaA__ADG42263

SEQ ID NO: 164888 - RNA, 1701 nt, Artificial Sequence; identical to SEQ ID NO: 163830
  derived and/or modified CDS sequence (opt4) from hemagglutinin__InfluenzaA__ADG42273

SEQ ID NO: 164889 - RNA, 1701 nt, Artificial Sequence; identical to SEQ ID NO: 163830
  derived and/or modified CDS sequence (opt4) from hemagglutinin__InfluenzaA__ADG42283

SEQ ID NO: 164890 - RNA, 1701 nt, Artificial Sequence; identical to SEQ ID NO: 164412
  derived and/or modified CDS sequence (opt4) from hemagglutinin__InfluenzaA__ADG42293

SEQ ID NO: 164891 - RNA, 1701 nt, Artificial Sequence
  derived and/or modified CDS sequence (opt4) from hemagglutinin__InfluenzaA__ADG42303
augaaggccauccugguggugcugcuguacaccuucgccaccgccaacgccgacacccugugcaucggcuaccacgccaacaacagcaccgacaccguggacaccgugcuggagaagaacgugaccgugacccacagcgugaaccugcuggaggacaagcacaacggcaagcugugcaagcugaagggcguggccccccugcaccugggcaagugcaacaucgccggcuggauccugggcaaccccgagugcgagagccugagcaccgccagcagcuggagcuacaucguggagaccagcagcagcgacaacggcaccugcuaccccggcgacuucaucgacuacgaggagcugagagagcagcugagcagcgugagcagcuucgagagauucgagaucuuccccaagaccagcagcuggcccaaccacgacagcaacaagggcgugaccgccgccugcccccacgccggcgccaagagcuucuacaagaaccugaucuggcuggugaagaagggcaacagcuaccccaagcugagcaagagcuacaucaacgacaagggcaaggaggugcuggugcuguggggcauccaccaccccagcaccagcgccgaccagcagagccuguaccagaacgccgacgccuacguguucgugggcaccagcagauacagcaagaaguucaagcccgagaucgccaucagacccaaggugagagaccaggagggcagaaugaacuacuacuggacccugguggagcccggcgacaagaucaccuucgaggccaccggcaaccugguggugcccagauacgccuucgccauggagagaaacgccggcagcggcaucgugaucagcgacacccccgugcacgacugcaacaccaccugccagacccccaagggcgccaucaacaccagccugcccuuccagaacauccaccccaucaccaucggcaagugccccaaguacgugaagagcaccaagcugagacuggccaccggccugagaaacgugcccagcauccagagcagaggccuguucggcgccaucgccggcuucaucgagggcggcuggaccggcaugguggacggcugguacggcuaccaccaccagaacgagcagggcagcggcuacgccgccgaccugaagagcacccagaacgccaucgacgagaucaccaacaaggugaacagcgugaucgagaagaugaacacccaguucaccgccgugggcaaggaguucaaccaccuggagaagagaaucgagaaccugaacaagaagguggacgacggcuuccuggacaucuggaccuacaacgccgagcugcuggugcugcuggagaacgagagaacccuggacuaccacgacagcaacgugaagaaccuguacgagaaggugagaagccagcugaagaacaacgccaaggagaucggcaacggcugcuucgaguucuaccacaagugcgacaacaccugcauggagagcgugaagaacggcaccuacgacuaccccaaguacagcgaggaggccaagcugaacagagaggagaucgacggcgugaagcuggagagcaccagaaucuaccagauccuggccaucuacagcaccguggccagcagccuggugcugguggugagccugggcgccaucagcuucuggaugugcagcaacggcagccugcagugcagaaucugcaucuga

SEQ ID NO: 164892 - RNA, 1701 nt, Artificial Sequence; identical to SEQ ID NO: 164439
  derived and/or modified CDS sequence (opt4) from hemagglutinin__InfluenzaA__ADG42313

SEQ ID NO: 164893 - RNA, 1701 nt, Artificial Sequence
  derived and/or modified CDS sequence (opt4) from hemagglutinin__InfluenzaA__ADG42323
augaaggccauccugguggugcugcuguacaccuucgccaccgccaacgccgacacccugugcaucggcuaccacgccaacaacagcaccgacaccguggacaccgugcuggagaagaacgugaccgugacccacagcgugaaccugcuggaggacaagcacaacggcaagcugugcaagcugagaggcguggccccccugcaccugggcaagugcaacaucgccggcuggauccugggcaaccccgagugcgagagccugagcaccgccagcagcuggagcuacaucguggagaccagcagcagcgacaacggcaccugcuaccccggcgacuucaucgacuacgaggagcugagagagcagcugagcagcgugagcagcuucgagagauucgagauguuccccaagaccagcagcuggcccaaccacgacagcaacaagggcgugaccgccgccugcccccacgccggcgccaagagcuucuacaagaaccugaucuggcuggugaagaagggcaacagcuaccccaagcugagcaagagcuacaucaacgacaagggcaaggaggugcuggugcuguggggcauccaccaccccagcaccagcgccgaccagcagagccuguaccagaacgccgacgccuacguguucgugggcaccagcagauacagcaagaaguucaagcccgagaucgccaucagacccaaggugagagaccaggagggcagaaugaacuacuacuggacccugguggagcccggcgacaagaucaccuucgaggccaccggcaaccugguggugcccagauacgccuucgccauggagagaaacgccggcagcggcaucaucaucagcgacacccccgugcacgacugcaacaccaccugccagacccccaagggcgccaucaacaccagccugcccuuccagaacauccaccccaucaccaucggcaagugccccaaguacgugaagagcaccaagcugagacuggccaccggccugagaaacgugcccagcauccagagcagaggccuguucggcgccaucgccggcuucaucgagggcggcuggaccggcaugguggacggcugguacggcuaccaccaccagaacgagcagggcagcggcuacgccgccgaccugaagagcacccagaacgccaucgacgagaucaccaacaaggugaacagcgugaucgagaagaugaacacccaguucaccgccgugggcaaggaguucaaccaccuggagaagagaaucgagaaccugaacaagaagguggacgacggcuuccuggacaucuggaccuacaacgccgagcugcuggugcugcuggagaacgagagaacccuggacuaccacgacagcaacgugaagaaccuguacgagaaggugagaagccagcugaagaacaacgccaaggaggugggcaacggcugcuucgaguucuaccacaagugcgacaacaccugcauggagagcgugaagaacggcaccuacgacuaccccaaguacagcgaggaggccaagcugaacagagaggagaucgacggcgugaagcuggagagcaccagaaucuaccagauccuggccaucuacagcaccguggccagcagccuggugcugguggugagccugggcgccaucagcuucuggaugugcagcaacggcagccugcagugcagaaucugcaucuga

SEQ ID NO: 164894 - RNA, 1701 nt, Artificial Sequence
  derived and/or modified CDS sequence (opt4) from hemagglutinin__InfluenzaA__ADG42333
augaaggccauccugguggugcugcuguacacccuggccaccgccaacgccgacacccugugcaucggcuaccacgccaacaacagcaccgacaccguggacaccgugcuggagaagaacgugaccgugacccacagcgugaaccugcuggaggacaagcacaacggcaagcugugcaagcugagaggcaucgccccccugcaccugggcaagugcaacaucgccggcuggauccugggcaaccccgagugcgagagccugagcaccgccagcagcuggagcuacaucguggagaccagcagcagcgacaacggcaccugcuaccccggcgacuucaucgacuacgaggagcugagagagcagcugagcagcgugagcagcuucgagagauucgagaucuuccccaagaccagcagcuggcccaaccacgacagcaacaagggcgugaccgccgccugcccccacgccggcgccaagagcuucuacaagaaccugaucuggcuggugaagaagggcaacagcuaccccaagcugagcaagagcuacaucaacgacaagggcaaggaggugcuggugcuguggggcauccaccaccccagcaccagcgccgaccagcagagccuguaccagaacgccgacgccuacguguucgugggcaccagcagauacagcaagaaguucaagcccgagaucgccaucagacccaaggugagagaccaggagggcagaaugaacuacuacuggacccugguggagcccggcgacaagaucaccuucgaggccaccggcaaccugguggugcccagauacgccuucgccauggagagaaacgccggcagcggcaucaucaucagcgacgcccccgugcacgacugcaacaccaccugccagacccccaagggcgccaucaacaccagccugcccuuccagaacauccaccccaucaccaucggcaagugccccaaguacgugaagagcaccaagcugagacuggccaccggccugagaaacgugcccagcauccagagcagaggccuguucggcgccaucgccggcuucaucgagggcggcuggaccggcaugguggacggcugguacggcuaccaccaccagaacgagcagggcagcggcuacgccgccgaccugaagagcacccagaacgccaucgacgagaucaccaacaaggugaacagcgugaucgagaagaugaacacccaguucaccgccgugggcaaggaguucaaccaccuggagaagagaaucgagaaccugaacaagaagguggacgacggcuuccuggacaucuggaccuacaacgccgagcugcuggugcugcuggagaacgagagaacccuggacuaccacgacagcaacgugaagaaccuguacgagaaggugagaagccagcugaagaacaacgccaaggagaucggcaacggcugcuucgaguucuaccacaagugcgacaacaccugcauggagagcgugaagaacggcaccuacgacuaccccaaguacagcgaggaggccaagcugaacagagaggagaucgacggcgugaagcuggagagcaccagaaucuaccagauccuggccaucuacagcaccguggccagcagccuggugcugguggugagccugggcgccaucagcuucuggaugugcagcaacggcagccugcagugcagaaucugcaucuga

SEQ ID NO: 164895 - RNA, 1701 nt, Artificial Sequence
  derived and/or modified CDS sequence (opt4) from hemagglutinin__InfluenzaA__ADG42343
augaaggccauccugguggugcugcuguacaccuucgccaccgccaacgccgacacccugugcaucggcuaccacgccaacaacagcaccgacaccguggacaccgugcuggagaagaacgugaccgugacccacagcgugaaccugcuggaggacaagcacaacggcaagcugugcaagcugagaggcguggccccccugcaccugggcaagugcaacaucgccggcuggauccugggcaaccccgagugcgagagccugagcaccgccagcagcuggagcuacaucguggagaccagcagcagcgacaacggcaccugcuaccccggcgacuucaucgacuacgaggagcugagagagcagcugagcagcgugagcagcuucgagagauucgagaucuuccccaagaccagcagcuggcccaaccacgacagcaacaagggcgugaccgccgccugcccccacgccggcgccaagagcuucuacaagaaccugaucuggcuggugaagaagggcaacagcuaccccaagcugagcaagagcuacaucaacgacaagggcaaggaggugcuggugcuguggggcauccaccaccccagcaccagcgccgaccagcagagccuguaccagaacgccgacgccuacguguucgugggcaccagcagauacagcaagaaguucaagcccgagaucgccaucagacccaaggugagagaccaggagggcagaaugaacuacuacuggacccugguggagcccggcgacaagaucaccuucgaggccaccggcaaccugguggugcccagauacgccuucgccauggagagcaacgccggcagcggcaucaucaucagcgacacccccgugcacgacugcaacaccaccugccagacccccaagggcgccaucaacaccagccugcccuuccagaacauccaccccaucaccaucggcaagugccccaaguacgugaagagcaccaagcugagacuggccaccggccugagaaacgugcccagcauccagagcagaggccuguucggcgccaucgccggcuucaucgagggcggcuggaccggcaugguggacggcugguacggcuaccaccaccagaacgagcagggcagcggcuacgccgccgaccugaagagcacccagcacgccaucgacgagaucaccaacaaggugaacagcgugaucgagaagaugaacacccaguucaccgccgugggcaaggaguucaaccaccuggagaagagaaucgagaaccugaacaagaagguggacgacggcuuccuggacaucuggaccuacaacgccgagcugcuggugcugcuggagaacgagagaacccuggacuaccacgacagcaacgugaagaaccuguacgagaaggugagaagccagcugaagaacaacgccaaggagaucggcaacggcugcuucgaguucuaccacaagugcgacaacaccugcauggagagcgugaagaacggcaccuacgacuaccccaaguacagcgaggaggccaagcugaacagagaggagaucgacggcgugaagcuggagagcaccagaaucuaccagauccuggccaucuacagcaccguggccagcagccuggugcugguggugagccugggcgccaucagcuucuggaugugcagcaacggcagccugcagugcagaaucugcaucuga

SEQ ID NO: 164896 - RNA, 1701 nt, Artificial Sequence
  derived and/or modified CDS sequence (opt4) from hemagglutinin__InfluenzaA__ADG42363
augaaggccauccugguggugcugcuguacaccuucgccaccgccaacgccgacacccugugcaucggcuaccacgccaacaacagcaccgacaccguggacaccgugcuggagaagaacgugaccgugacccacagcgugaaccugcuggaggacaagcacaacggcaagcugugcaagcugagaggcaucgccccccugcaccugggcaagugcaacaucgccggcuggauccugggcaaccccgagugcgagagccugagcaccgccagcagcuggagcuacaucguggagaccagcagcagcgacaacggcaccugcuaccccggcgacuucaucgacuacgaggagcugagagagcagcugagcagcgugagcagcuucgagagauucgagaucuuccccaagaccagcagcuggcccaaccacgacagcaacaagggcgugaccgccgccugcccccacgccggcgccaagagcuucuacaagaaccugaucuggcuggugaagaagggcaacagcuaccccaagcugagcaagagcuacaucaacgacaagggcaaggaggugcuggugcuguggggcauccaccaccccagcaccagcgccgaccagcagagccuguaccagaacgccgacgccuacguguucgugggcaccagcagauacagcaagaaguucaagcccgagaucgccaucagacccaaggugagagaccaggagggcagaaugaacuacuacuggacccugguggagcccggcgacaagaucaccuucgaggccaccggcaaccugguggugcccagauacgccuucgccauggagagaaacgccggcagcggcaucaucaucagcgacacccccgugcacgacugcaacaccaccugccagacccccaagggcgccaucaacaccagccugcccuuccagaacauccaccccaucaccaucggcaagugccccaaguacgugaagagcaccaagcugagacuggccaccggccugagaaacgugcccagcauccagagcagaggccuguucggcgccaucgccggcuucaucgagggcggcuggaccggcaugguggacggcugguacggcuaccaccaccagaacgagcagggcagcggcuacgccgccgaccugaagagcacccagaacgccaucgacgagaucaccaacaaggugaacagcgugaucgagaagaugaacacccaguucaccgccgugggcaaggaguucaaccaccuggagaagagaaucgagaaccugaacaagaagguggacgacggcuuccuggacaucuggaccuacaacgccgagcugcuggugcugcuggagaacgagagaacccuggacuaccacgacagcaacgugaagaaccuguacgagaaggugagaagccagcugaagaacaacgccaaggagaucggcaacggcugcuucgaguucuaccacaagugcgacaacaccugcauggagagcgugaagaacggcaccuacgacuaccccaaguacagcgaggaggccaagcugaacagagaggagaucgacggcgugaagcuggagagcaccagaaucuaccagauccuggccaucuacagcaccguggccagcagccuggugcugguggugagccugggcgccaucagcuucuggaugugcagcaacggcagccugcagugcagaaucugcaucuga

SEQ ID NO: 164897 - RNA, 1701 nt, Artificial Sequence
  derived and/or modified CDS sequence (opt4) from hemagglutinin__InfluenzaA__ADG42373
augaaggccauccugguggugcugcuguacaccuucgccaccgccaacgccgacacccugugcaucggcuaccacgccaacaacagcaccgacaccguggacaccgugcuggagaagaacgugaccgugacccacagcgugaaccugcuggaggacaagcacaacggcaagcugugcaagcugagaggcguggccccccugcaccugggcaagugcaacaucgccggcuggauccugggcaaccccgagugcgagagccugagcaccgccagcagcuggagcuacaucguggagaccagcagcagcgacaacggcaccugcuaccccggcgacuucaucgacuacgaggagcugagagagcagcugagcagcgugagcagcuucgagagauucgagaucuuccccaagaccagcagcuggcccaaccacgacagcaacaagggcgugaccgccgccugcccccacgccggcgccaagagcuucuacaagaaccugaucuggcuggugaagaagggcaacagcuaccccaagcugagcaagagcuacaucaacgacaagggcaaggaggugcuggugcuguggggcauccaccaccccagcaccagcgccgaccagcagagccuguaccagaacgccgacgccuacguguucgugggcaccagcagauacagcaagaaguucaagcccgagaucgccaucagacccaaggugagagaccaggagggcagaaugaacuacuacuggacccugguggagcccggcgacaagaucaccuucgaggccaccggcaaccugguggugcccagauacgccuucgccauggagagaaacgccggcagcggcaucaucaucagcgacacccccgugcacgacugcaacaccaccugccagacccccaagggcgccaucaacaccagccugcccuuccagaacauccaccccaucaccaucggcaagugccccaaguacgugaagagcaccaagcugagacuggccaccggccugagaaacgugcccagcauccagagcagaggccuguucggcgccaucgccggcuucaucgagggcggcuggaccggcaugguggacggcugguacggcuaccaccaccagaacgagcagggcagcggcuacgccgccgaccugaagagcacccagaacgccaucgacgagaucaccaacaaggugaacagcgugaucgagaagaugaacacccaguucaccgccgugggcaaggaguucaaccaccuggagaagagaaucgagaaccugaacaagaagguggacgacggcuuccuggacaucuggaccuacaacgccgagcugcuggugcugcuggagaacgagagaacccuggacuaccacgacagcaacgugaagaaccuguacgagaaggugagaaaccagcugaagaacaacgccaaggagaucggcaacggcugcuucgaguucuaccacaagugcgacaacaccugcauggagagcgugaagaacggcaccuacgacuaccccaaguacagcgaggaggccaagcugaacagagaggagaucgacggcgugaagcuggagagcaccagaaucuaccagauccuggccaucuacagcaccguggccagcagccuggugcugguggugagccugggcgccaucagcuucuggaugugcagcaacggcagccugcagugcagaaucugcaucuga

SEQ ID NO: 164898 - RNA, 1701 nt, Artificial Sequence
  derived and/or modified CDS sequence (opt4) from hemagglutinin__InfluenzaA__ADG42393
augaaggccauccugguggugcugcuguacaccuucgccaccgccaacgccgacacccugugcaucggcuaccacgccaacaacagcaccgacaccguggacaccgugcuggagaagaacgugaccgugacccacagcgugaaccugcuggaggacaagcacaacgagaagcugugcaagcugagaggcguggccccccugcaccugggcaagugcaacaucgccggcuggauccugggcaaccccgagugcgagagccugagcaccgccagcagcuggagcuacaucguggagaccagcagcagcgacaacggcaccugcuaccccggcgacuucaucgacuacgaggagcugagagagcagcugagcagcgugagcagcuucgagagauucgagaucuuccccaagaccagcagcuggcccaaccacgacagcaacaagggcgugaccgccgccugcccccacgccggcgccaagagcuucuacaagaaccugaucuggcuggugaagaagggcaacagcuaccccaagcugagcaagagcuacaucaacgacaagggcaaggaggugcuggugcuguggggcauccaccaccccagcaccagcgccgaccagcagagccuguaccagaacgccgacgccuacguguucgugggcaccagcagauacagcaagaaguucaagcccgagaucgccaucagacccaaggugagagagcaggagggcagaaugaacuacuacuggacccugguggagcccggcgacaagaucaccuucgaggccaccggcaaccugguggugcccagauacgccuucgccauggagagaaacgccggcagcggcaucaucaucagcgacacccccgugcacgacugcaacaccaccugccagacccccaagggcgccaucaacaccagccugcccuuccagaacauccaccccaucaccaucggcaagugccccaaguacgugaagagcaccaagcugagacuggccaccggccugagaaacgugcccagcauccagagcagaggccuguucggcgccaucgccggcuucaucgagggcggcuggaccggcaugguggacggcugguacggcuaccaccaccagaacgagcagggcagcggcuacgccgccgaccugaagagcacccagaacgccaucgacgagaucaccaacaaggugaacagcgugaucgagaagaugaacacccaguucaccgccgugggcaaggaguucaaccaccuggagaagagaaucgagaaccugaacaagaagguggacgacggcuuccuggacaucuggaccuacaacgccgagcugcuggugcugcuggagaacgagagaacccuggacuaccacgacagcaacgugaagaaccuguacgagaaggugagaagccagcugaagaacaacgccaaggagaucggcaacggcugcuucgaguucuaccacaagugcgacaacaccugcauggagagcgugaagaacggcaccuacgacuaccccaaguacagcgaggaggccaagcugaacagagaggagaucgacggcgugaagcuggagagcaccagaaucuaccagauccuggccaucuacagcaccguggccagcagccuggugcugcuggugagccugggcgccaucagcuucuggaugugcagcaacggcagccugcagugcagaaucugcaucuga

SEQ ID NO: 164899 - RNA, 1701 nt, Artificial Sequence; identical to SEQ ID NO: 163893
  derived and/or modified CDS sequence (opt4) from hemagglutinin__InfluenzaA__ADG42403

SEQ ID NO: 164900 - RNA, 1701 nt, Artificial Sequence; identical to SEQ ID NO: 164149
  derived and/or modified CDS sequence (opt4) from hemagglutinin__InfluenzaA__ADG42413

SEQ ID NO: 164901 - RNA, 1701 nt, Artificial Sequence; identical to SEQ ID NO: 164896
  derived and/or modified CDS sequence (opt4) from hemagglutinin__InfluenzaA__ADG42423

SEQ ID NO: 164902 - RNA, 1701 nt, Artificial Sequence; identical to SEQ ID NO: 164149
  derived and/or modified CDS sequence (opt4) from hemagglutinin__InfluenzaA__ADG42443

SEQ ID NO: 164903 - RNA, 1701 nt, Artificial Sequence
  derived and/or modified CDS sequence (opt4) from hemagglutinin__InfluenzaA__ADG42453
augaaggccauccugguggugcugcuguacaccuucgccaccgccaacgccgacacccugugcaucggcuaccacgccaacaacagcaccgacaccguggacaccgugcuggagaagaacgugaccgugacccacagcgugaacauccuggaggacaagcacaacggcaagcugugcaagcugagaggcguggccccccugcaccugggcaagugcaacaucgccggcuggauccugggcaaccccgagugcgagagccugagcaccgccagcagcuggagcuacaucguggagaccagcagcagcgacaacggcaccugcuaccccggcgacuucaucgacuacgaggagcugagagagcagcugagcagcgugagcagcuucgagagauucgagaucuuccccaagaccagcagcuggcccaaccacgacagcaacaagggcgugaccgccgccugcccccacgccggcgccaagagcuucuacaagaaccugaucuggcuggugaagaagggcaacagcuaccccaagcugagcaagagcuacaucaacgacaagggcaaggaggugcuggugcuguggggcauccaccaccccagcaccagcgccgaccagcagagccuguaccagaacgccgacgccuacguguucgugggcaccagcagauacagcaagaaguucaagcccgagaucgccaucagacccaaggugagagaccaggagggcagaaugaacuacuacuggacccugguggagcccggcgacaagaucaccuucgaggccaccggcaaccugguggugcccagauacgccuucgccauggagagaaacgccggcagcggcaucaucaucagcgacacccccgugcacgacugcaacaccaccugccagacccccaagggcgccaucaacaccagccugcccuuccagaacauccaccccaucaccaucggcaagugccccaaguacgugaagagcaccaagcugagacuggccaccggccugagaaacgugcccagcauccagagcagaggccuguucggcgccaucgccggcuucaucgagggcggcuggaccggcaugguggacggcugguacggcuaccaccaccagaacgagcagggcagcggcuacgccgccgaccugaagagcacccagaacgccaucgacgagaucaccaacaaggugaacagcgugaucgagaagaugaacacccaguucaccgccgugggcaaggaguucaaccaccuggagaagagaguggagaaccugaacaagaagguggacgacggcuuccuggacaucuggaccuacaacgccgagcugcuggugcugcuggagaacgagagaacccuggacuaccacgacagcaacgugaagaaccuguacgagaaggugagaagccagcugaagaacaacgccaaggagaucggcaacggcugcuucgaguucuaccacaagugcgacaacaccugcauggagagcgugaagaacggcaccuacgacuaccccaaguacagcgaggaggccaagcugaacagagaggagaucgacggcgugaagcuggagagcaccagaaucuaccagauccuggccaucuacagcaccguggccagcagccuggugcugguggugagccugggcgccaucagcuucuggaugugcagcaacggcagccugcagugcagaaucugcaucuga

SEQ ID NO: 164904 - RNA, 1701 nt, Artificial Sequence; identical to SEQ ID NO: 163082
  derived and/or modified CDS sequence (opt4) from hemagglutinin__InfluenzaA__ADG42463

SEQ ID NO: 164905 - RNA, 1701 nt, Artificial Sequence; identical to SEQ ID NO: 162729
  derived and/or modified CDS sequence (opt4) from hemagglutinin__InfluenzaA__ADG42473

SEQ ID NO: 164906 - RNA, 1701 nt, Artificial Sequence; identical to SEQ ID NO: 164149
  derived and/or modified CDS sequence (opt4) from hemagglutinin__InfluenzaA__ADG42483

SEQ ID NO: 164907 - RNA, 1701 nt, Artificial Sequence; identical to SEQ ID NO: 164281
  derived and/or modified CDS sequence (opt4) from hemagglutinin__InfluenzaA__ADG42493

SEQ ID NO: 164908 - RNA, 1701 nt, Artificial Sequence; identical to SEQ ID NO: 164342
  derived and/or modified CDS sequence (opt4) from hemagglutinin__InfluenzaA__ADG42503

SEQ ID NO: 164909 - RNA, 1701 nt, Artificial Sequence; identical to SEQ ID NO: 163830
  derived and/or modified CDS sequence (opt4) from hemagglutinin__InfluenzaA__ADG42513

SEQ ID NO: 164910 - RNA, 1701 nt, Artificial Sequence
  derived and/or modified CDS sequence (opt4) from hemagglutinin__InfluenzaA__ADG42533
augaaggccauccugguggugcugcuguacaccuucgccaccgccaaggccgacacccugugcaucggcuaccacgccaacaacagcaccgacaccguggacaccgugcuggagaagaacgugaccgugacccacagcgugaaccugcuggaggacaagcacaacggcaagcugugcaagcugagaggcguggccccccugcaccugggcaagugcaacaucgccggcuggauccugggcaaccccgagugcgagagccugagcaccgccagcagcuggagcuacaucguggagaccagcagcagcgacaacggcaccugcuaccccggcgacuucaucgacuacgaggagcugagagagcagcugagcagcgugagcagcuucgagagauucgagaucuuccccaagaccagcagcuggcccaaccacgacagcaacaagggcgugaccgccgccugcccccacgccggcgccaagagcuucuacaagaaccugaucuggcuggugaagaagggcaacagcuaccccaagcugagcaagagcuacaucaacgacaagggcaaggaggugcuggugcuguggggcauccaccaccccagcaccagcgccgaccagcagagccuguaccagaacgccgacgccuacguguucgugggcaccagcagauacagcaagaaguucaagcccgagaucgccaucagacccaaggugagagaccaggagggcagaaugaacuacuacuggacccugguggagcccggcgacaagaucaccuucgaggccaccggcaaccugguggugcccagauacgccuucgccauggagagaaacgccggcagcggcaucaucaucagcgacacccccgugcacgacugcaacaccaccugccagacccccaagggcgccaucaacaccagccugcccuuccagaacauccaccccaucaccaucggcaagugccccaaguacgugaagagcaccaagcugagacuggccaccggccugagaaacauccccagcauccagagcagaggccuguucggcgccaucgccggcuucaucgagggcggcuggaccggcaugguggacggcugguacggcuaccaccaccagaacgagcagggcagcggcuacgccgccgaccugaagagcacccagaacgccaucgacgagaucaccaacaaggugaacagcgugaucgagaagaugaacacccaguucaccgccgugggcaaggaguucaaccaccuggagaagagaaucgagaaccugaacaagaagguggacgacggcuuccuggacaucuggaccuacaacgccgagcugcuggugcugcuggagaacgagagaacccuggacuaccacgacagcaacgugaagaaccuguacgagaaggugagaagccagcugaagaacaacgccaaggagaucggcaacggcugcuucgaguucuaccacaagugcgacaacaccugcauggagagcgugaagaacggcaccuacgacuaccccaaguacagcgaggaggccaagcugaacagagaggagaucgacggcgugaagcuggagagcaccagaaucuaccagauccuggccaucuacagcaccguggccagcagccuggugcugguggugagccugggcgccaucagcuucuggaugugcagcaacggcagccugcagugcagaaucugcaucuga

SEQ ID NO: 164911 - RNA, 1701 nt, Artificial Sequence
  derived and/or modified CDS sequence (opt4) from hemagglutinin__InfluenzaA__ADG42553
augaaggccauccugguggugcugcuguacaccuucgccaccgccaacgccgacacccugugcaucggcuaccacgccaacaacagcaccgacaccguggacaccgugcuggagaagaacgugaccgugacccacagcgugaaccugcuggaggacaagcacaacggcaagcugugcaagcugagaggcguggccccccugcaccugggcaagugcaacaucgccggcuggauccugggcaaccccgagugcgagagccugagcaccgccagcagcuggagcuacaucguggagaccagcagcagcgacaacggcaccugcuaccccggcgacuucaucgacuacgaggagcugagagagcagcugagcagcgugagcagcuucgagagauucgagaucuuccccaagaccagcagcuggcccaaccacgacagcaacaagggcgugaccgccgccugcagccacgccggcgccaagagcuucuacaagaaccugaucuggcuggugaagaagggcaacagcuaccccaagcugaacaagagcuacaucaacgacaagggcaaggaggugcuggugcuguggggcauccaccaccccagcaccagcgccgaccagcagagccuguaccagaacgccgacgccuacguguucgugggcaccagcagauacagcaagaaguucaagcccgagaucgccaucagacccaaggugagagagcaggagggcagaaugaacuacuacuggacccugguggagcccggcgacaagaucaccuucgaggccaccggcaaccugguggugcccagauacgccuucgccauggagagaaacgccggcagcggcaucaucaucagcgacacccccgugcacgacugcaacaccaccugccagacccccaagggcgccaucaacaccagccugcccuuccagaacauccaccccaucaccaucggcaagugccccaaguacgugaagagcaccaagcugagacuggccaccggccugagaaacgugcccagcauccagagcagaggccuguucggcgccaucgccggcuucaucgagggcggcuggaccggcaugguggacggcugguacggcuaccaccaccagaacgagcagggcagcggcuacgccgccgaccugaagagcacccagaacgccaucgacgagaucaccaacaaggugaacagcgugaucgagaagaugaacacccaguucaccgccgugggcaaggaguucaaccaccuggagaagagaaucgagaaccugaacaagaagguggacgacggcuuccuggacaucuggaccuacaacgccgagcugcuggugcugcuggagaacgagagaacccuggacuaccacgacagcaacgugaagaaccuguacgagaaggugagaagccagcugaagaacaacgccaaggagaucggcaacggcugcuucgaguucuaccacaagugcgacaacaccugcauggagagcgugaagaacggcaccuacgacuaccccaaguacagcgaggaggccaagcugaacagagaggagaucgacggcgugaagcuggagagcaccagaaucuaccagauccuggccaucuacagcaccguggccagcagccuggugcugguggugagccugggcgccaucagcuucuggaugugcagcaacggcagccugcagugcagaaucugcaucuga

SEQ ID NO: 164912 - RNA, 1701 nt, Artificial Sequence
  derived and/or modified CDS sequence (opt4) from hemagglutinin__InfluenzaA__ADG42573
augaaggccauccugguggugcugcuguacaccuucgccaccgccaacgccgacacccugugcaucggcuaccacgccaacaacagcaccgacaccguggacaccgugcuggagaagaacgugaccgugacccacagcgugaaccugcuggaggacaagcacaacggcaagcugugcaagcugagaggcguggccccccugcaccugggcaagugcaacaucgccggcuggauccugggcaaccccgagugcgagagccugagcaccgccagcagcuggagcuacaucguggagaccagcagcagcgacaacggcaccugcuaccccggcgacuucaucgacuacgaggagcugagagagcagcugagcagcgugagcagcuucgagagauucgagaucuuccccaagaccagcagcuggcccaaccacgacagcaacaagggcgugaccgccgccugcccccacgccggcgccaagagcuucuacaagaaccugaucuggcuggugaagaagggcaacagcuaccccaagcugagcaagagcuacaucaacgacaagggcaaggaggugcuggugcuguggggcauccaccaccccagcaccagcgccgaccagcagagccuguaccagaacgccgacgccuacguguucgugggcaccagcagauacagcaagaaguucaagcccgagaucgccaucagacccaaggugagagaccaggagggcagaaugaacuacuacuggacccugaucgagcccggcgacaagaucaccuucgaggccaccggcaaccugguggugcccagauacgccuucgccauggagagaaacgccggcagcggcaucaucaucagcgacacccccgugcacgacugcaacaccaccugccagacccccaagggcgccaucaacaccagccugcccuuccagaacauccaccccaucaccaucggcaagugccccaaguacgugaagagcaccaagcugagacuggccaccggccugagaaacgugcccagcauccagagcagaggccuguucggcgccaucgccggcuucaucgagggcggcuggaccggcaugguggacggcugguacggcuaccaccaccagaacgagcagggcagcggcuacgccgccgaccugaagagcacccagaacgccaucgacgagaucaccaacaaggugaacagcgugaucgagaagaugaacacccaguucaccgccgugggcaaggaguucaaccaccuggagaagagaaucgagaaccugaacaagaagguggacgacggcuuccuggacaucuggaccuacaacgccgagcugcuggugcugcuggagaacgagagaacccuggacuaccacgacagcaacgugaagaagcuguacgagaaggugagaagccagcugaagaacaacgccaaggagaucggcaacggcugcuucgaguucuaccacaagugcgacaacaccugcauggagagcgugaagaacggcaccuacgacuaccccaaguacagcgaggaggccaagcugaacagagaggagaucgacggcgugaagcuggagagcaccagaaucuaccagauccuggccaucuacagcaccguggccagcagccuggugcugguggugagccugggcgccaucagcuucuggaugugcagcaacggcagccugcagugcagaaucugcaucuga

SEQ ID NO: 164913 - RNA, 1701 nt, Artificial Sequence
  derived and/or modified CDS sequence (opt4) from hemagglutinin__InfluenzaA__ADG42583
augaaggccauccugguggugcugcuguacaccuucgccaccgccaacgccgacacccugugcaucggcuaccacgccaacaacagcaccgacaccguggacaccgugcuggagaagaacgugaccgugacccacagcgugaaccugcuggaggacaagcacaacggcaagcugugcaagcugagaggcguggccccccugcaccugggcaagugcaacaucgccggcuggauccugggcaaccccgagugcgagagccugagcaccgccagcagcuggagcuacaucguggagaccagcagcagcgacaacggcaccugcuaccccggcgacuucaucgacuacgaggagcugagagagcagcugagcagcgugagcagcuucgagagauucgagaucuuccccaagaccagcagcuggcccaaccacgacagcaacaagggcgugaccgccgccugcccccacgccggcgccaagagcuucuacaagaaccugaucuggcuggugaagaagggcaacagcuaccccaagcugagcaagagcuacaucaacgacaagggcaaggaggugcuggugcuguggggcauccaccaccccagcaccagcgccgaccagcagagccuguaccagaacgccgacagcuacguguucgugggcaccagcagauacagcaagaaguucaagcccgagaucgccaucagacccaaggugagagaccaggagggcagaaugaacuacuacuggacccugguggagcccggcgacaagaucaccuucgaggccaccggcaaccugguggugcccagauacgccuucgccauggagagaaacgccggcagcggcaucaucaucagcgacacccccgugcacgacugcaacaccaccugccagacccccaagggcgccaucaacaccagccugcccuuccagaacauccaccccaucaccaucggcaagugccccaaguacgugaagagcaccaagcugagacuggccaccggccugagaaacgugcccagcauccagagcagaggccuguucggcgccaucgccggcuucaucgagggcggcuggaccggcaugguggacggcugguacggcuaccaccaccagaacgagcagggcagcggcuacgccgccgaccugaagagcacccagcacgccaucgacgagaucaccaacaaggugaacagcgugaucgagaagaugaacacccaguucaccgccgugggcaaggaguucaaccaccuggagaagagaaucgagaaccugaacaagaagguggacgacggcuuccuggacaucuggaccuacaacgccgagcugcuggugcugcuggagaacgagagaacccuggacuaccacgacagcaacgugaagaaccuguacgagaaggugagaagccagcugaagaacaacgccaaggagaucggcaacggcugcuucgaguucuaccacaagugcgacaacaccugcauggagagcgugaagaacggcaccuacgacuaccccaaguacagcgaggaggccaagcugaacagagaggagaucgacggcgugaagcuggagagcaccagaaucuaccagauccuggccaucuacagcaccguggccagcagccuggugcugguggugagccugggcgccaucagcuucuggaugugcagcaacggcagccugcagugcagaaucugcaucuga

SEQ ID NO: 164914 - RNA, 1701 nt, Artificial Sequence; identical to SEQ ID NO: 164326
  derived and/or modified CDS sequence (opt4) from hemagglutinin__InfluenzaA__ADG42593

SEQ ID NO: 164915 - RNA, 1701 nt, Artificial Sequence
  derived and/or modified CDS sequence (opt4) from hemagglutinin__InfluenzaA__ADG42603
augaaggccauccugguggugcugcuguacaccuucgccaccgccaacgccgacacccugugcaucggcuaccacgccaacaacagcaccgacaccguggacaccgugcuggagaagaacgugaccgugacccacagcgugaaccugcuggaggacaagcacaacggcaagcugugcaagcugagaggcguggccccccugcaccugggcaagugcaacaucgccggcuggauccugggcaaccccgagugcgagagccugagcaccgccagcagcuggagcuacaucguggagaccagcagcagcgacaacggcaccugcuaccccggcgacuucaucgacuacgaggagcugagagagcagcugagcagcgugagcagcuucgagagauucgagaucuuccccaagaccagcagcuggcccaaccacgacagcaacaagggcgugaccgccgccugcccccacgccggcgccaagagcuucuacaagaaccugaucuggcuggugaagaagggcaacagcuaccccaagcugagaaagagcuacaucaacgacaagggcaaggaggugcuggugcuguggggcauccaccaccccagcaccagcgccgaccagcagagccuguaccagaacgccgacgccuacguguucgugggcaccagcagauacagcaagaaguucaagcccgagaucgccaccagacccaaggugagagaccaggagggcagaaugaacuacuacuggacccugguggagcccggcgacaagaucaccuucgaggccaccggcaaccugguggugcccagauacgccuucgccauggagagaaacgccggcagcggcaucaucaucagcgacacccccgugcacgacugcaacaccaccugccagacccccaagggcagcaucaacaccagccugcccuuccagaacauccaccccaucaccaucggcaagugccccaaguacgugaagagcaccaagcugagacuggccaccggccugagaaacgugcccagcauccagagcagaggccuguucggcgccaucgccggcuucaucgagggcggcuggaccggcaugguggacggcugguacggcuaccaccaccagaacgagcagggcagcggcuacgccgccgaccugaagagcacccagcacgccaucgacgagaucaccaacaaggugaacagcgugaucgagaagaugaacacccaguucaccgccgugggcaaggaguucaaccaccuggagaagagaaucgagaaccugaacaagaagguggacgacggcuuccuggacaucuggaccuacaacgccgagcugcuggugcugcuggagaacgagagaacccuggacuaccacgacagcaacgugaagaaccuguacgagaaggugagaagccagcugaagaacaacgccaaggagaucggcaacggcugcuucgaguucuaccacaagugcgacaacaccugcauggagagcgugaagaacggcaccuacgacuaccccaaguacagcgaggaggccaagcugaacagagaggagaucgacggcgugaagcuggagagcaccagaaucuaccagauccuggccaucuacagcaccguggccagcagccuggugcugguggugagccugggcgccaucagcuucuggaugugcagcaacggcagccugcagugcagaaucugcaucuga

SEQ ID NO: 164916 - RNA, 1701 nt, Artificial Sequence
  derived and/or modified CDS sequence (opt4) from hemagglutinin__InfluenzaA__ADG42613
augaaggccauccugguggugcugcuguacaccuucgccaccgccaacgccgacacccugugcaucggcuaccacgccaacaacagcaccgacaccguggacaccgugcuggagaagaacgugaccgugacccacagcgugaacauccuggaggacaagcacaacggcaagcugugcaagcugagaggcguggccccccugcaccugggcaagugcaacaucgccggcuggauccugggcaaccccgagugcgagagccugagcaccgccagcagcuggagcuacaucguggagaccagcagcagcgacaacggcaccugcuaccccggcgacuucaucgacuacgaggagcugagagagcagcugagcagcgugagcagcuucgagagauucgagaucuuccccaagaccagcagcuggcccaaccacgacagcaacaagggcgugaccgccgccugcccccacgccggcgccaagagcuucuacaagaaccugaucuggcuggugaagaagggcaacagcuaccccaagcugagcaagagcuacaucaacgacaagggcaaggaggugcuggugcuguggggcauccaccaccccagcaccagcgccgaccagcagagccuguaccagaacgccgacgccuacguguucgugggcaccagcagauacagcaagaaguucaagcccgagaucgccaucagacccaaggugagagaccaggagggcagaaugaacuacuacuggacccugguggagcccggcgacaagaucaccuucgaggccaccggcaaccugguggugcccagauacgccuucgccauggagagaaacgccggcagcggcaucaucaucagcgacacccccgugcacgacugcaacaccaccugccagacccccaagggcgccaucaacaccagccugcccuuccagaacauccaccccaucaccaucggcaagugccccaaguacgugaagagcaccaagcugagacuggccaccggccugagaaacgugcccagcauccagagcagaggccuguucggcgccaucgccggcuucaucgagggcggcuggaccggcaugguggacggcugguacggcuaccaccaccagaacgagcagggcagcggcuacgccgccgaccugaagagcacccagaacgccaucgacgagaucaccaacaaggugaacagcgugaucgagaagaugaacacccaguucaccgccgugggcaaggaguucaaccaccuggagaagagaaucgagaaccugaacaagaagguggacgacggcuuccuggacaucuggaccuacaacgccgagcugcuggugcugcuggagaacgagagaacccuggacuaccacgacagcaacgugaagaaccuguacgagaaggugagaagccagcugaagaacaacgccaaggagaucggcaacggcugcuucgaguucuaccacaagugcgacaacaccugcauggagagcgugaagaacggcaccuacgacuaccccaaguacagcgaggaggccaagcugaacagagagaagaucgacggcgugaagcuggagagcaccagaaucuaccagauccuggccaucuacagcaccguggccagcagccuggugcugguggugagccugggcgccaucagcuucuggaugugcagcaacggcagccugcagugcagaaucugcaucuga

SEQ ID NO: 164917 - RNA, 1701 nt, Artificial Sequence; identical to SEQ ID NO: 164356
  derived and/or modified CDS sequence (opt4) from hemagglutinin__InfluenzaA__ADG42623

SEQ ID NO: 164918 - RNA, 1701 nt, Artificial Sequence; identical to SEQ ID NO: 162729
  derived and/or modified CDS sequence (opt4) from hemagglutinin__InfluenzaA__ADG42633

SEQ ID NO: 164919 - RNA, 1701 nt, Artificial Sequence
  derived and/or modified CDS sequence (opt4) from hemagglutinin__InfluenzaA__ADG42643
augaaggccauccugguggugcugcuguacaccuucgccaccgccaacgccgacacccugugcaucggcuaccacgccaacaacagcaccgacaccguggacaccgugcuggagaagaacgugaccgugacccacagcgccaaccugcuggaggacaagcacaacggcaagcugugcaagcugagaggcgccgccccccugcaccugggcaagugcaacaucgccggcuggauccugggcaaccccgagugcgagagccugagcaccgccagcagcuggagcuacaucguggagaccagcagcagcgacaacggcaccugcuaccccggcgacuucaucgacuacgaggagcugagagagcagcugagcagcgugagcagcuucgagagauucgagauguuccccaagaccagcagcuggcccaaccacgacagcaacaagggcgugaccgccgccugcccccacgccggcgccaagagcuucuacaagaaccugaucuggcuggugaagaagggcaacagcuaccccaagcugagcaagagcuacgugaacgacaagggcaaggaggugcuggugcuguggggcauccaccaccccagcaccagcgccgaccagcagagccuguaccagaacgccgacgccuacguguucgugggcaccagcagauacagcaagaaguucaagcccgagaucgccaucagacccaaggugagagaccaggagggcagaaugaacuacuacuggacccugguggagcccggcgacaagaucaccuucgaggccaccggcaaccugguggugcccagauacgccuucgccauggagagaaacgccggcagcggcaucaucaucagcgacacccccgugcacgacugcaacaccaccugccagacccccaagggcgccaucaacaccagccugcccuuccagaacauccaccccaucaccaucggcaagugccccaaguacgugaagagcaccaagcugagacuggccaccggccugagaaacgugcccagcauccagagcagaggccuguucggcgccaucgccggcuucaucgagggcggcuggaccggcaugguggacggcugguacggcuaccaccaccagaacgagcagggcagcggcuacgccgccgaccugaagagcacccagaacgccaucgacgagaucaccaacaaggugaacagcgugaucgagaagaugaacacccaguucaccgccgugggcaaggaguucaaccaccuggagaagagaaucgagaaccugaacaagaagguggacgacggcuuccuggacaucuggaccuacaacgccgagcugcuggugcugcuggagaacgagagaacccuggacuaccacgacagcaacgugaagaaccuguacgagaaggugagaagccagcugaagaacaacgccaaggagaucggcaacggcugcuucgaguucuaccacaagugcgacaacaccugcauggagagcgugaagaacggcaccuacgacuaccccaaguacagcgaggaggccaagcugaacagagaggagaucgacggcgugaagcuggagagcaccagaaucuaccagauccuggccaucuacagcaccguggccagcagccuggugcugguggugagccugggcgccaucagcuucuggaugugcagcaacggcagccugcagugcagaaucugcaucuga

SEQ ID NO: 164920 - RNA, 1701 nt, Artificial Sequence
  derived and/or modified CDS sequence (opt4) from hemagglutinin__InfluenzaA__ADG42653
augaaggccauccugguggugcugcuguacaccagcgccaccgccaacgccgacacccugugcaucggcuaccacgccaacaacagcaccgacaccguggacaccgugcuggagaagaacgugaccgugacccacagcgugaaccugcuggaggacaagcacaacggcaagcugugcaagcugagaggcguggccccccugcaccugggcaagugcaacaucgccggcuggauccugggcaaccccgagugcgagagccugagcaccgccagcagcuggagcuacaucguggagaccagcagcagcgacaacggcaccugcuaccccggcgacuucaucgacuacgaggagcugagagagcagcugagcagcgugagcagcuucgagagauucgagauguuccccaagaccagcagcuggcccaaccacgacagcaacaagggcgugaccgccgccugcccccacgccggcgccaagagcuucuacaagaaccugaucuggcuggugaagaagggcaacagcuaccccaagcugagcaagagcuacaucaacgacaagggcaaggaggugcuggugcuguggggcauccaccaccccagcaccagcgccgaccagcagagccuguaccagaacgccgacgccuacguguucgugggcaccagcagauacagcaagaaguucaagcccgagaucgccaucagacccaaggugagagaccaggagggcagaaugaacuacuacuggacccugguggagcccggcgacaagaucaccuucgaggccaccggcaaccugguggugcccagauacgccuucgccauggagagaaacgccggcagcggcaucaucaucagcgacacccccgugcacgacugcaacaccaccugccagacccccaagggcgccaucaacaccagccugcccuuccagaacauccaccccaucaccaucggcaagugccccaaguacgugaagagcaccaagcugagacuggccaccggccugagaaacgugcccagcauccagagcagaggccuguucggcgccaucgccggcuucaucgagggcggcuggaccggcaugguggacggcugguacggcuaccaccaccagaacgagcagggcagcggcuacgccgccgaccugaagagcacccagaacgccaucgacgagaucaccaacaaggugaacagcgugaucgagaagaugaacacccaguucaccgccgugggcaaggaguucaaccaccuggagaagagaaucgagaaccugaacaagaagguggacgacggcuuccuggacaucuggaccuacaacgccgagcugcuggugcugcuggagaacgagagaacccuggacuaccacgacagcaacgugaagaaccuguacgagaaggugagaagccagcugaagaacaacgccaaggagaucggcaacggcugcuucgaguucuaccacaagugcgacaacaccugcauggagagcgugaagaacggcaccuacgacuaccccaaguacagcgaggaggccaagcugaacagagaggagaucgacggcgugaagcuggagagcaccagaaucuaccagauccuggccaucuacagcaccguggccagcagccuggugcugguggugagccugggcgccaucagcuucuggaugugcagcaacggcagccugcagugcagaaucugcaucuga

SEQ ID NO: 164921 - RNA, 1701 nt, Artificial Sequence; identical to SEQ ID NO: 163893
  derived and/or modified CDS sequence (opt4) from hemagglutinin__InfluenzaA__ADG42663

SEQ ID NO: 164922 - RNA, 1701 nt, Artificial Sequence
  derived and/or modified CDS sequence (opt4) from hemagglutinin__InfluenzaA__ADG42673
augaaggccauccugguggugcugcuguacaccuucgccaccgccaacgccgacacccugugcaucggcuaccacgccaacaacagcaccgacaccguggacaccgugcuggagaagaacgugaccgugacccacagcgugaaccugcuggaggacaagcacaacggcaagcugugcaagcugaagggcguggccccccugcaccugggcaagugcaacaucgccggcuggauccugggcaaccccgagugcgagagccugagcaccgccggcagcuggagcuacaucguggagaccagcagcagcgacaacggcaccugcuaccccggcgacuucaucgacuacgaggagcugagagagcagcugagcagcgugagcagcuucgagagauucgagaucuuccccaagaccagcagcuggcccaaccacgacagcaacaagggcgugaccgccgccugcccccacgccggcgccaagagcuucuacaagaaccugaucuggcuggugaagaagggcaacagcuaccccaagcugagcaagagcuacaucaacgacaagggcaaggaggugcuggugcuguggggcauccaccaccccagcaccagcgccgaccagcagagccuguaccagaacgccgacgccuacguguucgugggcaccagcagauacagcaagaaguucaagcccgagaucgccaucagacccaaggugagagaccaggagggcagaaugaacuacuacuggacccugguggagcccggcgacaagaucaccuucgaggccaccggcaaccugguggugcccagauacgccuucgccauggagagaaacgccggcagcggcaucaucaucagcgacacccccgugcacgacugcaacaccaccugccagacccccaagggcgccaucaacaccagccugcccuuccagaacauccaccccaucaccaucggcaagugccccaaguacgugaagagcaccaagcugagacuggccaccggccugagaaacgugcccagcauccagagcagaggccuguucggcgccaucgccggcuucaucgagggcggcuggaccggcaugguggacggcugguacggcuaccaccaccagaacgagcagggcagcggcuacgccgccgaccugaagagcacccagaacgccaucgacggcaucaccaacaaggugaacagcgugaucgagaagaugaacacccaguucaccgccgugggcaaggaguucaaccaccuggagaagagaaucgagaaccugaacaagaagguggacgacggcuuccuggacaucuggaccuacaacgccgagcugcuggugcugcuggagaacgagagaacccuggacuaccacgacagcaacgugaagaaccuguacgagaaggugagaagccagcugaagaacaacgccaaggagaucggcaacggcugcuucgaguucuaccacaagugcgacaacaccugcauggagagcgugaagaacggcaccuacgacuaccccaaguacagcgaggaggccaagcugaacagagaggagaucgacggcgugaagcuggagagcaccagaaucuaccagauccuggccaucuacagcaccguggccagcagccuggugcugguggugagccugggcgccaucagcuucuggaugugcagcaacggcagccugcagugcagaaucugcaucuga

SEQ ID NO: 164923 - RNA, 1701 nt, Artificial Sequence
  derived and/or modified CDS sequence (opt4) from hemagglutinin__InfluenzaA__ADG42683
augaaggccauccugguggugcugcuguacaccuucgccaccgccaacgccgacacccugugcaucggcuaccacgccaacaacagcaccgacaccguggacaccgugcuggagaagaacgugaccgugacccacagcgugaacauccuggaggacaagcacaacggcaagcugugcaagcugagaggcguggccccccugcaccugggcaagugcaacaucgccggcuggauccugggcaaccccgagugcgagagccugagcaccgccagcagcuggagcuacaucguggagaccagcagcagcgacaacggcaccugcuaccccggcaacuucaucgacuacgaggagcugagagagcagcugagcagcgugagcagcuucgagagauucgagaucuuccccaagaccagcagcuggcccaaccacgacagcaacaagggcgugaccgccgccugcccccacgccggcgccaagagcuucuacaagaaccugaucuggcuggugaagaagggcaacagcuaccccaagcugagcaagagcuacaucaacgacaagggcaaggaggugcuggugcuguggggcauccaccaccccagcaccagcgccgaccagcagagccuguaccagaacgccgacgccuacguguucgugggcaccagcagauacagcaagaaguucaagcccgagaucgccaucagacccaaggugagagaccaggagggcagaaugaacuacuacuggacccugguggagcccggcgacaagaucaccuucgaggccaccggcaaccugguggugcccagauacgccuucgccauggagagaaacgccggcagcggcaucaucaucagcgacacccccgugcacgacugcaacaccaccugccagacccccaagggcgccaucaacaccagccugcccuuccagaacauccaccccaucaccaucggcaagugccccaaguacgugaagagcaccaagcugagacuggccaccggccugagaaacgugcccagcauccagagcagaggccuguucggcgccaucgccggcuucaucgagggcggcuggaccggcaugguggacggcugguacggcuaccaccaccagaacgagcagggcagcggcuacgccgccgaccugaagagcacccagaacgccaucgacgagaucaccaacaaggugaacagcgugaucgagaagaugaacacccaguucaccgccgugggcaaggaguucaaccaccuggagaagagaaucgagaaccugaacaagaagguggacgacggcuuccuggacaucuggaccuacaacgccgagcugcuggugcugcuggagaacgagagaacccuggacuaccacgacagcaacgugaagaaccuguacgagaaggugagaagccagcugaagaacaacgccaaggagaucggcaacggcugcuucgaguucuaccacaagugcgacaacaccugcauggagagcgugaagaacggcaccuacgacuaccccaaguacagcgaggaggccaagcugaacagagaggagaucgacggcgugaagcuggagagcaccagaaucuaccagauccuggccaucuacagcaccguggccagcagccuggugcugguggugagccugggcgccaucagcuucuggaugugcagcaacggcagccugcagugcagaaucugcaucuga

SEQ ID NO: 164924 - RNA, 1701 nt, Artificial Sequence; identical to SEQ ID NO: 163893
  derived and/or modified CDS sequence (opt4) from hemagglutinin__InfluenzaA__ADG42693

SEQ ID NO: 164925 - RNA, 1701 nt, Artificial Sequence; identical to SEQ ID NO: 164601
  derived and/or modified CDS sequence (opt4) from hemagglutinin__InfluenzaA__ADG42703

SEQ ID NO: 164926 - RNA, 1701 nt, Artificial Sequence
  derived and/or modified CDS sequence (opt4) from hemagglutinin__InfluenzaA__ADG42723
augaaggccauccugguggugcugcuguacaccuucgccaccgccaacgccgacacccugugcaucggcuaccacgccaacaacagcaccgacaccguggacaccgugcuggagaagaacgugaccgugacccacagcgugaaccugcuggaggacaagcacaacggcaagcugugcaagcugagaggcguggccccccugcaccugggcaagugcaacaucgccggcuggauccugggcaaccccgagugcgagagccugagcaccgccagcagcuggagcuacaucguggagaccagcagcagcgacaacggcaccugcuaccccggcgacuucaucgacuacgaggagcugagagagcagcugagcagcgugagcagcuucgagagauucgagaucuuccccaagaccagcagcuggcccaaccacgacagcaacaagggcgugaccgccgccugcccccacgccggcgccaagagcuucuacaagaaccugaucuggcuggugaagaagggcaacagcuaccccaagcugagcaagagcuacaucaacgacaagggcaaggaggugcuggugcuguggggcauccaccaccccagcaccagcgccgaccagcagagccuguaccagaacgccgacgccuacguguucgugggcaccagcagauacagcaagaaguucaagcccgagauggccaucagacccaaggugagagaccaggagggcagaaugaacuacuacuggacccugguggagcccggcgacaagaucaccuucgaggccaccggcaaccugguggugcccagauacgccuucgccauggagagaaacgccggcagcggcaucaucaucagcgacacccccgugcacgacugcaacaccaccugccagacccccaagggcgccaucaacaccagccugcccuuccagaacauccaccccaucaccaucggcaagugccccaaguacgugaagagcaccaagcugagacuggccaccggccugagaaacgugcccagcauccagagcagaggccuguucggcgccaucgccggcuucaucgagggcggcuggaccggcaugguggacggcugguacggcuaccaccaccagaacgagcagggcagcggcuacgccgccgaccugaagagcacccagaacgccaucgacaagaucaccaacaaggugaacagcgugaucgagaagaugaacacccaguucaccgccgugggcaaggaguucaaccaccuggagaagagaaucgagaaccugaacaagaagguggacgacggcuuccuggacaucuggaccuacaacgccgagcugcuggugcugcuggagaacgagagaacccuggacuaccacgacagcaacgugaagaaccuguacgagaaggugagaagccagcugaagaacaacgccaaggagaucggcaacggcugcuucgaguucuaccacaagugcgacaacaccugcauggagagcgugaagaacggcaccuacgacuaccccaaguacagcgaggaggccaagcugaacagagaggagaucgacggcgugaagcuggagagcaccagaaucuaccagauccuggccaucuacagcaccguggccagcagccuggugcugguggugagccugggcgccaucagcuucuggaugugcagcaacggcagccugcagugcagaaucugcaucuga

SEQ ID NO: 164927 - RNA, 1701 nt, Artificial Sequence; identical to SEQ ID NO: 164356
  derived and/or modified CDS sequence (opt4) from hemagglutinin__InfluenzaA__ADG42743

SEQ ID NO: 164928 - RNA, 1701 nt, Artificial Sequence
  derived and/or modified CDS sequence (opt4) from hemagglutinin__InfluenzaA__ADG42753
augaaggccauccugguggugcugcuguacaccuucgccaccgccaacgccgacacccugugcaucggcuaccacgccaacaacagcaccgacaccguggacaccgugcuggagaagaacgugaccgugacccacagcgugaaccugcuggaggacaagcacaacggcaagcugugcaagcugagaggcguggccccccugcaccugggcaagugcaacaucgccggcuggauccugggcaaccccgagugcgagagccugagcaccgccagcagcuggagcuacaucguggagaccagcagcagcgacaacggcaccugcuaccccggcgacuucaucgacuacgaggagcugagagagcagcugagcagcgugagcagcuucgagagauucgagaucuuccccaagaccagcagcuggcccaaccacgacagcaacaagggcgugaccgccgccugcccccacgccggcgccaagagcuucuacaagaaccugaucuggcuggugaagaagggcaacagcuaccccaagcugagcaagagcuacaucaacgacaagggcaaggaggugcuggugcuguggggcauccaccaccccagcaccagcaccgaccagcagagccuguaccagaacgccgacgccuacguguucgugggcaccagcagauacagcaagaaguucaagcccgagaucgccaucagacccaaggugagagaccaggagggcagaaugaacuacuacuggacccugguggagcccggcgacaagaucaccuucgaggccaccggcaaccugguggugcccagauacgccuucgccauggagagaaacagcggcagcggcaucaucaucagcgacacccccgugcacgacugcaacaccaccugccagacccccaagggcgccaucaacaccagccugcccuuccagaacauccaccccaucaccaucggcaagugccccaaguacgugaagagcaccaagcugagacuggccaccggccugagaaacgugcccagcauccagagcagaggccuguucggcgccaucgccggcuucaucgagggcggcuggaccggcaugguggacggcugguacggcuaccaccaccagaacgagcagggcagcggcuacgccgccgaccugaagagcacccagaacgccaucgacgagaucaccaacaaggugaacagcgugaucgagaagaugaacacccaguucaccgccgugggcaaggaguucaaccaccuggagaagagaaucgagaaccugaacaagaagguggacgacggcuuccuggacaucuggaccuacaacgccgagcugcuggugcugcuggagaacgagagaacccuggacuaccacgacagcaacgugaagaaccuguacgagaaggugagaagccagcugaagaacaacgccaaggagaucggcaacggcugcuucgaguucuaccacaagugcgacaacaccugcauggagagcgugaagaacggcaccuacgacuaccccaaguacagcgaggaggccaagcugaacagagaggagaucgacggcgugaagcuggagagcaccagaaucuaccagauccuggccaucuacagcaccguggccagcagccuggugcugguggugagccugggcgccaucagcuucuggaugugcagcaacggcagccugcagugcagaaucugcaucuga

SEQ ID NO: 164929 - RNA, 1701 nt, Artificial Sequence; identical to SEQ ID NO: 163893
  derived and/or modified CDS sequence (opt4) from hemagglutinin__InfluenzaA__ADG42763

SEQ ID NO: 164930 - RNA, 1701 nt, Artificial Sequence; identical to SEQ ID NO: 163893
  derived and/or modified CDS sequence (opt4) from hemagglutinin__InfluenzaA__ADG42773

SEQ ID NO: 164931 - RNA, 1701 nt, Artificial Sequence
  derived and/or modified CDS sequence (opt4) from hemagglutinin__InfluenzaA__ADG42783
augaaggccauccugguggugcugcuguacaccuucgccaccgccaacgccgacacccugugcaucggcuaccacgccaacaacagcaccgacaccguggacaccgugcuggagaagaacgugaccgugacccacagcgugaaccugcuggaggacaagcacaacggcaagcugugcaagcugagaggcguggccccccugcaccugggcaagugcaacaucgccggcuggauccugggcaaccccgagugcgagagccugagcaccgccagcagcuggagcuacaucguggagaccagcagcagcgacaacggcaccugcuaccccggcgacuucaucgacuacgaggagcugagagagcagcugagcagcgugagcagcuucgagagauucgagauguuccccaagaccagcagcuggcccaaccacgacagcaacaagggcgugaccgccgccugcccccacgccggcgccaagagcuucuacaagaaccugaucuggcuggugaagaagggcaacagcuaccccaagcugagcaagagcuacaucaacgacaagggcaaggaggugcuggugcuguggggcauccaccaccccagcaccagcaccgaccagcagagccuguaccagaacgccgacgccuacguguucgugggcaccagcagauacagcaagaaguucaagcccgagaucgccaucagacccaaggugagagaccaggagggcagaaugaacuacuacuggacccugguggagcccggcgacaagaucaccuucgaggccaccggcaaccugguggugcccagauacgccuucgccauggagagaaacgccggcagcggcaucaucaucagcgacacccccgugcacgacugcaacaccaccugccagacccccaagggcgccaucaacaccagccugcccuuccagaacauccaccccaucaccaucggcaagugccccaaguacgugaagagcaccaagcugagacuggccaccggccugagaaacgugcccagcauccagagcagaggccuguucggcgccaucgccggcuucaucgagggcggcuggaccggcaugguggacggcugguacggcuaccaccaccagaacgagcagggcagcggcuacgccgccgaccugaagagcacccagaacgccaucgacaagaucaccaacaaggugaacagcgugaucgagaagaugaacacccaguucaccgccgugggcaaggaguucaaccaccuggagaagagaaucgagaaccugaacaagaagguggacgacggcuuccuggacaucuggaccuacaacgccgagcugcuggugcugcuggagaacgagagaacccuggacuaccacgacagcaacgugaagaaccuguacgagaaggugagaagccagcugaagaacaacgccaaggagaucggcaacggcugcuucgaguucuaccacaagugcgacaacaccugcauggagagcgugaagaacggcaccuacgacuaccccaaguacagcgaggaggccaagcugaacagagaggagaucgacggcgugaagcuggagagcaccagaaucuaccagauccuggccaucuacagcaccguggccagcagccuggugcugguggugagccugggcgccaucagcuucuggaugugcagcaacggcagccugcagugcagaaucugcaucuga

SEQ ID NO: 164932 - RNA, 1701 nt, Artificial Sequence; identical to SEQ ID NO: 163893
  derived and/or modified CDS sequence (opt4) from hemagglutinin__InfluenzaA__ADG42793

SEQ ID NO: 164933 - RNA, 1701 nt, Artificial Sequence; identical to SEQ ID NO: 164931
  derived and/or modified CDS sequence (opt4) from hemagglutinin__InfluenzaA__ADG42803

SEQ ID NO: 164934 - RNA, 1701 nt, Artificial Sequence; identical to SEQ ID NO: 164281
  derived and/or modified CDS sequence (opt4) from hemagglutinin__InfluenzaA__ADG42813

SEQ ID NO: 164935 - RNA, 1701 nt, Artificial Sequence; identical to SEQ ID NO: 164424
  derived and/or modified CDS sequence (opt4) from hemagglutinin__InfluenzaA__ADG42823

SEQ ID NO: 164936 - RNA, 1701 nt, Artificial Sequence; identical to SEQ ID NO: 164326
  derived and/or modified CDS sequence (opt4) from hemagglutinin__InfluenzaA__ADG42833

SEQ ID NO: 164937 - RNA, 1701 nt, Artificial Sequence; identical to SEQ ID NO: 163893
  derived and/or modified CDS sequence (opt4) from hemagglutinin__InfluenzaA__ADG42843

SEQ ID NO: 164938 - RNA, 1701 nt, Artificial Sequence; identical to SEQ ID NO: 163893
  derived and/or modified CDS sequence (opt4) from hemagglutinin__InfluenzaA__ADG42853

SEQ ID NO: 164939 - RNA, 1701 nt, Artificial Sequence; identical to SEQ ID NO: 164447
  derived and/or modified CDS sequence (opt4) from hemagglutinin__InfluenzaA__ADG42863

SEQ ID NO: 164940 - RNA, 1701 nt, Artificial Sequence; identical to SEQ ID NO: 164467
  derived and/or modified CDS sequence (opt4) from hemagglutinin__InfluenzaA__ADG42883

SEQ ID NO: 164941 - RNA, 1701 nt, Artificial Sequence
  derived and/or modified CDS sequence (opt4) from hemagglutinin__InfluenzaA__ADG42893
augaaggccauccugguggugcugcuguacaccuucgccaccgccaacgccgacacccugugcaucggcuaccacgccaacaacagcaccgacaccguggacaccgugcuggagaagaacgugaccgugacccacagcgugaaccugcuggaggacaagcacaacggcaagcugugcaagcugagaggcguggccccccugcaccugggcaagugcaacaucgccggcuggauccugggcaaccccgagugcgagagccugagcaccgccagcagcuggagcuacaucguggagaccagcagcagcgacaacggcaccugcuaccccggcgacuucaucgacuacgaggagcugagagagcagcugagcagcgugagcagcuucgagagauucgagaucuuccccaagaccagcagcuggcccaaccacgacagcaacaagggcgugaccgccgccugcccccacgccggcgccaagagcuucuacaagaaccugaucuggcuggugaagaagggcaacagcuaccccaagcugagcaagagcuacaucaacgacaagggcaaggaggugcuggugcuguggggcauccaccaccccagcaccagcgccgaccagcagagccuguaccagaacgccgacgccuacguguucgugggcaccagcagauacagcaagaaguucaagcccgagaucgccaucagacccaaggugagagaccaggagggcagaaugaacuacuacuggacccugguggagcccggcgacaagaucaccuucgaggccaccggcaaccugguggugcccagauacgccuucgccauggagagaaacgccggcagcggcaucaucaucagcgacacccccgugcacgacugcaacaccaccugccagacccccaagggcgccaucaacaccagccugcccuuccagaacauccaccccaucaccaucggcaagugccccaaguacgugaagagcaccaaccugagacuggccaccggccugagaaacgugcccagcauccagagcagaggccuguucggcgccaucgccggcuucaucgagggcggcuggaccggcaugguggacggcugguacggcuaccaccaccagaacgagcagggcagcggcuacgccgccgaccugaagagcacccagaacgccaucgacgagaucaccaacaaggugaacagcgugaucgagaagaugaacacccaguucaccgccgugggcaaggaguucaaccaccuggagaagagaaucgagaaccugaacaagaagguggacgacggcuuccuggacaucuggaccuacaacgccgagcugcuggugcugcuggagaacgagagaacccuggacuaccacgacagcaacgugaagaaccuguacgagaaggugagaagccagcugaagaacaacgccaaggagaucggcaacggcugcuucgaguucuaccacaagugcgacaacaccugcauggagagcgugaagaacggcaccuacgacuaccccaaguacagcgaggaggccaagcugaacagagaggagaucgacggcgugaagcuggagagcaccagaaucuaccagauccuggccaucuacagcaccguggccagcagccuggugcugguggugagccugggcgccaucagcuucuggaugugcagcaacggcagccugcagugcagaaucugcaucuga

SEQ ID NO: 164942 - RNA, 1701 nt, Artificial Sequence; identical to SEQ ID NO: 162729
  derived and/or modified CDS sequence (opt4) from hemagglutinin__InfluenzaA__ADG42903

SEQ ID NO: 164943 - RNA, 1701 nt, Artificial Sequence; identical to SEQ ID NO: 163893
  derived and/or modified CDS sequence (opt4) from hemagglutinin__InfluenzaA__ADG42913

SEQ ID NO: 164944 - RNA, 1701 nt, Artificial Sequence; identical to SEQ ID NO: 164457
  derived and/or modified CDS sequence (opt4) from hemagglutinin__InfluenzaA__ADG42923

SEQ ID NO: 164945 - RNA, 1701 nt, Artificial Sequence
  derived and/or modified CDS sequence (opt4) from hemagglutinin__InfluenzaA__ADG57087
augaaggccauccugguggugcugcuguacaccuucgccaccgccaacgccgacacccugugcaucggcuaccacgccaacaacagcaccgacaccguggacaccgugcuggagaagaacgugaccgugacccacagcgugaaccugcuggaggacaagcacaacggcaagcugugcaagcugagaggcguggccccccugcaccugggcaagugcaacaucgccggcuggauccugggcaaccccgagugcgagagccugagcaccgccagcagcuggagcuacaucguggagaccagcagcagcgacaacggcaccugcuaccccggcgacuucaucgacuacgaggagcugagagagcagcugagcagcgugagcagcuucgagagauucgagaucuuccccaagaccagcagcuggcccaaccacgacagcaacaagggcgugaccgccgccugcccccacgccggcgccaagagcuucuacaagaaccugaucuggcuggugaagaagggcaacagcuaccccaagcugagcaagagcuacaucaacgacaagggcaaggaggugcuggugcuguggggcauccaccaccccagcaccagcgccgaccagcagagccuguaccagaacgccgacgccuacguguucgugggcaccagcagauacagcaagaaguucaagcccgagaucgccaucagacccaaggugagagaccaggagggcagaaugaacuacuacuggacccugguggagcccggcgacaagaucaccuucgaggccaccggcaaccugguggugcccagauacgccuucgccauggagagaaacgccggcagcggcaucaucaucagcgacacccccgugcacgacugcaacaccaccugccagacccccaagggcgccaucaacaccagccugcccuuccagaacauccaccccaucaccaucggcaagugccccaaguacgugaagagcaccaagcugagacuggccaccggccugagaaacgugcccagcauccagagcagaggccuguucggcgccaucgccggcuucaucgagggcggcuggaccggcaugguggacggcugguacggcuaccaccaccagaacgagcagggcagcggcuacgccgccgaccugaagagcacccagaacgccaucgacgagaucaccaacaaggugaacagcgugaucgagaagaugaacacccaguucaccgccgugggcaaggaguucaaccaccuggagaagagaaucgagaaccugaacaagaagguggacgacggcuuccuggacaucuggaccuacaacgccgagcugcuggugcugcuggagaacgagagaacccuggacuaccacgacagcaacgugaagaaccuguacgagaaggugagaagccagcugaagaacaacgccaaggagaucggcaacggcugcuucgaguucuaccacaagugcgacaacaccugcauggagagcgugaagaacggcaccuacgacuaccccaaguacagcgaggaggccaagcugaacagagaggagaucgacggcgugaagcuggagagcaccagaaucuaccagauccuggccaucuacagcaccguggccaucagccuggugcugguggugagccugggcgccaucagcuucuggaugugcagcaacggcagccugagaugcagaaucugcaucuga

SEQ ID NO: 164946 - RNA, 1701 nt, Artificial Sequence; identical to SEQ ID NO: 162729
  derived and/or modified CDS sequence (opt4) from hemagglutinin__InfluenzaA__ADG57088

SEQ ID NO: 164947 - RNA, 1701 nt, Artificial Sequence
  derived and/or modified CDS sequence (opt4) from hemagglutinin__InfluenzaA__ADG57089
auggaggccauccugguggugcugcuguacaccuucgccaccgccaacgccgacacccugugcaucggcuaccacgccaacaacagcaccgacaccguggacaccgugcuggagaagaacgugaccgugacccacagcgugaaccugcuggaggacaagcacaacggcaagcugugcaagcugagaggcguggccccccugcaccugggcaagugcaacaucgccggcuggauccugggcaaccccgagugcgagagccugagcaccgccagcagcuggagcuacaucguggagaccagcagcagcgacaacggcaccugcuaccccggcgacuucauccaguacgaggagcugagagagcagcugagcagcgugagcagcuucgagagauucgagaucuuccccaagaccagcagcuggcccaaccacgacagcaacaagggcgugaccgccgccugcccccacgccggcgccaagagcuucuacaagaaccugaucuggcuggugaagaagggcaacagcuaccccaagcugagcaagagcuacaucaacgacaagggcaaggaggugcuggugcuguggggcauccaccaccccagcaccagcgccgaccagcagagccuguaccagaacgccgacgccuacguguucgugggcagcagcagauacagcaagaaguucaagcccgagaucgccaucagacccaaggugagagaccaggagggcagaaugaacuacuacuggacccugguggagcccggcgacaagaucaccuucgaggccaccggcaaccugguggugcccagauacgccuucgccauggagagaaacgccggcagcggcaucaucaucagcgacacccccgugcacgacugcaacaccaccugccagacccccaagggcgccaucaacaccagccugcccuuccacaacauccaccccaucaccaucggcaagugccccaaguacgugaagagcaccaagcugagacuggccaccggccugagaaacgugcccagcauccagagcagaggccuguucggcgccaucgccggcuucaucgagggcggcuggaccggcaugguggacggcugguacggcuaccaccaccagaacgagcagggcagcggcuacgccgccgaccugaagagcacccagaacgccaucgacgagaucaccaacaaggugaacagcgugaucgagaagaugaacacccaguucaccgccgugggcaaggaguucaaccaccuggagaagagaaucgagaaccugaacaagaagguggacgacggcuuccuggacaucuggaccuacaacgccgagcugcuggugcugcuggagaacgagagaacccuggacuaccacgacagcaacgugaagaaccuguacgagaaggugagaagccagcugaagaacaacgccgaggagaucggcaacggcugcuucgaguucuaccacaagugcgacaacaccugcauggagagcgugaagaacggcaccuacgacuaccccaaguacagcgaggaggccaagcugaacagagaggagaucgacggcgugaagcuggagagcaccagaaucuaccagauccuggccaucuacagcaccguggccagcagccuggugcugguggugagccugggcgccaucagcuucuggaugugcagcaacggcagccugcagugcagaaucugcaucuga

SEQ ID NO: 164948 - RNA, 1701 nt, Artificial Sequence
  derived and/or modified CDS sequence (opt4) from hemagglutinin__InfluenzaA__ADG57090
augaaggccauccugguggugcugcuguacaccuucgccaccgccaacgccgacacccugugcaucggcuaccacgccaacaacagcaccgacaccguggacaccgugcuggagaagaacgugaccgugacccacagcgugaaccugcuggaggacaagcacaacggcaagcugugcaagcugagaggcguggccccccugcaccugggcaagugcaacaucgccggcuggauccugggcaaccccgagugcgagagccugagcaccgccagcagcuggagcuacaucguggagaccagcagcagcgacaacggcaccugcuaccccggcgacuucaucgacuacgaggagcugagagagcagcugagcagcgugagcagcuucgagagauucgagaucuuccccaagaccagcagcuggcccaaccacgacagcaacaagggcgugaccgccgccugcccccacgccggcgccaagagcuucuacaagaaccugaucuggcuggugaagaagggcaacagcuaccccaagcugagcaagagcuacaucaacgacaagggcaaggaggugcuggugcuguggggcauccaccaccccagcaccagcgccgaccagcagagcaucuaccagaacgccgacgccuacguguucgugggcaccagcagauacagcaagaaguucaagcccgagaucgccaucagacccaaggugagagaccaggagggcagaaugaacuacuacuggacccugguggagcccggcgacaagaucaccuucgaggccaccggcaaccugguggugcccagauacgccuucgccauggagagaaacgccggcagcggcaucaucaucagcgacacccccgugcacgacugcaacaccaccugccagacccccaagggcgccaucaacaccagccugcccuuccagaacauccaccccaucaccaucggcaagugccccaaguacgugaagagcaccaagcugagacuggccaccggccugagaaacgugcccagcauccagagcagaggccuguucggcgccaucgccggcuucaucgagggcggcuggaccggcaugguggacggcugguacggcuaccaccaccagaacgagcagggcagcggcuacgccgccgaccugaagagcacccagaacgccaucgacgagaucaccaacaaggugaacagcgugaucgagaagaugaacacccaguucaccgccgugggcaaggaguucaaccaccuggagaagagaaucgagaaccugaacaagaagguggacgacggcuuccuggacaucuggaccuacaacgcccagcugcuggugcugcuggagaacgagagaacccuggacuaccacgacagcaacgugaagaaccuguacgagaaggugagaagccagcugaagaacaacgccaaggagaucggcaacggcugcuucgaguucuaccacaagugcgacaacaccugcauggagagcgugaagaacggcaccuacgacuaccccaaguacagcgaggaggccaagcugaacagagaggagaucgacggcgugaagcuggagagcaccagaaucuaccagauccuggccaucuacagcaccguggccagcagccuggugcugguggugagccugggcgccaucagcuucuggaugugcagcaacggcagccugcagugcagaaucugcaucuga

SEQ ID NO: 164949 - RNA, 1701 nt, Artificial Sequence
  derived and/or modified CDS sequence (opt4) from hemagglutinin__InfluenzaA__ADG57091
auggaggccauccugguggugcugcuguacaccuucgccaccgccaacgccgacacccugugcaucggcuaccacgccaacaacagcaccgacaccguggacaccgugcuggagaagaacgugaccgugacccacagcgugaaccugcuggaggacaagcacaacggcaagcugugcaagcugagaggcguggccccccugcaccugggcaagugcaacaucgccggcuggauccugggcaaccccgagugcgagagccugagcaccgccagcagcuggagcuacaucguggagaccagcagcagcgacaacggcaccugcuaccccggcgacuucaucgacuacgaggagcugagagagcagcugagcagcgugagcagcuucgagagauucgagaucuuccccaagaccagcagcuggcccaaccacgacagcaacaagggcgugaccgccgccugcccccacgccggcgccaagagcuucuacaagaaccugaucuggcuggugaagaagggcaacagcuaccccaagcugagcaagagcuacaucaacgacaagggcaaggaggugcuggugcuguggggcauccaccaccccagcaccagcgccgaccagcagagccuguaccagaacgccgacgccuacguguucgugggcagcagcagauacagcaagaaguucaagcccgagaucgccaucagacccaaggugagagaccaggagggcagaaugaacuacuacuggacccugguggagcccggcgacaagaucaccuucgaggccaccggcaaccugguggugcccagauacgccuucgccauggagagaaacgccggcagcggcaucaucaucagcgacacccccgugcacgacugcaacaccaccugccagacccccaagggcgccaucaacaccagccugcccuuccacaacauccaccccaucaccaucggcaagugccccaaguacgugaagagcaccaagcugagacuggccaccggccugagaaacgugcccagcauccagagcagaggccuguucggcgccaucgccggcuucaucgagagaggcuggaccggcaugguggacggcugguacggcuaccaccaccagaacgagcagggcagcggcuacgccgccgaccugaagagcacccagaacgccaucgacgagaucaccaacaaggugaacagcgugaucgagaagaugaacacccaguucaccgccgugggcaaggaguucaaccaccuggagaagagaaucgagaaccugaacaagaagguggacgacggcuuccuggacaucuggaccuacaacgccgagcugcuggugcugcuggagaacgagagaacccuggacuaccacgacagcaacgugaagaaccuguacgagaaggugagaagccagcugaagaacaacgccaaggagaucggcaacggcugcuucgaguucuaccacaagugcgacaacaccugcauggagagcgugaagaacggcaccuacgacuaccccaaguacagcgaggaggccaagcugaacagagaggagaucgacggcgugaagcuggagagcaccagaaucuaccagauccuggccaucuacagcaccguggccagcagccuggugcugguggugagccugggcgccaucagcuucuggaugugcagcaacggcagccugcagugcagaaucugcaucuga

SEQ ID NO: 164950 - RNA, 1701 nt, Artificial Sequence
  derived and/or modified CDS sequence (opt4) from hemagglutinin__InfluenzaA__ADG57092
augaaggccauccugguggugcugcuguacaccuucgccaccgccaacgccgacacccugugcaucggcuaccacgccaacaacagcaccgacaccguggacaccgugcuggagaagaacgugaccgugacccacagcgugaaccugcuggaggacaagcacaacggcaagcugugcaagcugagaggcguggccccccugcaccugggcaagugcaacaucgccggcuggauccugggcaaccccgagugcgagagccugagcaccgccagcagcuggagcuacaucguggagaccagcagcagcgacaacggcaccugcuaccccggcgacuucaucgacuacgaggagcugagagagcagcugagcagcgugagcagcuucgagagauucgagaucuuccccaagaccagcagcuggcccaaccacgacagcaacaagggcgugaccgccgccugcccccacgccggcgccaagagcuucuacaagaaccugaucuggcuggugaagaagggcaacagcuaccccaagcugaucaagagcuacaucaacgacaagggcaaggaggugcuggugcuguggggcauccaccaccccagcaccagcgccgaccagcagagccuguaccagaacgccgacgccuacguguucgugggcaccagcagauacagcaagaaguucaagcccgagaucgccaucagacccaaggugagagaccaggagggcagaaugaacuacuacuggacccugguggagcccggcgacaagaucaccuucgaggccaccggcaaccugguggugcccagauacgccuucgccauggagagaaacgccggcagcggcaucaucaucagcgacacccccgugcacgacugcaacaccaccugccagacccccaagggcgccaucaacaccagccugcccuuccagaacauccaccccaucaccaucggcaagugccccaaguacgugaagagcaccaagcugagacuggccaccggccugagaaacgugcccagcauccagagcagaggccuguucggcgccaucgccggcuucaucgagggcggcuggaccggcaugguggacggcugguacggcuaccaccaccagaacgagcagggcagcggcuacgccgccgaccugaagagcacccagaacgccaucgacgagaucaccaacaaggugaacagcgugaucgagaagaugaacacccaguucaccgccgugggcaaggaguucaaccaccuggagaagagaaucgagaaccugaacaagaagguggacgacggcuuccuggacaucuggaccuacaacgccgagcugcuggugcugcuggagaacgagagaacccuggacuaccacgacagcaacgugaagaaccuguacgagaaggugagaagccagcugaagaacaacgccaaggagaucggcaacggcugcuucgaguucuaccacaagugcgacaacaccugcauggagagcgugaagaacggcaccuacgacuaccccaaguacagcgaggaggccaagcugaacagagaggagaucgacggcgugaagcuggagagcaccagaaucuaccagauccuggccaucuacagcaccguggccagcagccuggugcugguggugagccugggcgccaucagcuucuggaugugcagcaacggcagccugcagugcagaaucugcaucuga

SEQ ID NO: 164951 - RNA, 1701 nt, Artificial Sequence
  derived and/or modified CDS sequence (opt4) from hemagglutinin__InfluenzaA__ADG57093
auggaggccauccugguggugcugcuguacaccuucgccaccgccaacgccgacacccugugcaucggcuaccacgccaacaacagcaccgacaccguggacaccgugcuggagaagaacgugaccgugacccacagcgugaaccugcuggaggacaagcacaacggcaagcugugcaagcugagaggcguggccccccugcaccugggcaagugcaacaucgccggcuggauccugggcaaccccgagugcgagagccugagcaccgccagcagcuggagcuacaucguggagaccagcagcagcgacaacggcaccugcuaccccggcgacuucaucgacuacgaggagcugagagagcagcugagcagcgugagcagcuucgagagauucgagaucuuccccaagaccagcagcuggcccaaccacgacagcaacaagggcgugaccgccgccugcccccacgccggcgccaagagcuucuacaagaaccugaucuggcuggugaagaagggcaacagcuaccccaagcugagcaagagcuacaucaacgacaagggcaaggagauccuggugcuguggggcauccaccaccccagcaccagcgccgaccagcagagccuguaccagaacgccgacgccuacguguucguguggagcagcagauacagcaagaaguucaagcccgagaucgccaucagacccaaggugagagaccaggagggcagaaugaacuacuacuggacccugguggagcccggcgacaagaucaccuucgaggccaccggcaaccugcuggugcccagauacgccuucgccauggagagaaacgccggcagcggcaucaucaucagcgacacccccgugcacgacugcaacaccaccugccagacccccaagggcgccaucaacaccagccugcccuuccacaacauccaccccaucaccaucggcaagugccccaaguacgugaagagcaccaagcugagacuggccaccggccugagaaacgugcccagcauccagagcagaggccuguucggcgccaucgccggcuucaucgagggcggcuggaccggcaugguggacggcugguacggcuaccaccaccagaacgagcagggcagcggcuacgccgccgaccugaagagcacccagaacgccaucgacgagaucaccaacaaggugaacagcgugaucgagaagaugaacacccaguucaccgccgugggcaaggaguucaaccaccuggagaagagaaucgagaaccugaacaagaagguggacgacggcuuccuggacaucuggaccuacaacgccgagcugcuggugcugcuggagaacgagagaacccuggacuaccacgacagcaacgugaagaaccuguacgagaaggugagaagccagcugaagaacaacgccaaggagaucggcaacggcugcuucgaguucuaccacaagugcgacaacaccugcauggagagcgugaagaacggcaccuacgacuaccccaaguacagcgaggaggccaagcugaacagagaggagaucgacggcgugaagcuggagagcaccagaaucuaccagauccuggccaucuacagcaccguggccagcagccuggugcugguggugagccugggcgccaucagcuucuggaugugcagcaacggcagccugcagugcagaaucugcaucuga

SEQ ID NO: 164952 - RNA, 1701 nt, Artificial Sequence
  derived and/or modified CDS sequence (opt4) from hemagglutinin__InfluenzaA__ADG57094
augaaggccauccugguggugcugcuguacaccuucgccaccgccaacgccgacacccugugcgugggcuaccacgccaacaacagcaccgacaccguggacaccgugcuggagaagaacgugaccgugacccacagcgugaaccugcuggaggacaagcacaacggcaagcugugcaagcugagaggcguggccccccugcaccugggcaagugcaacaucgccggcuggauccugggcaaccccgagugcgagagccugagcaccgccagcagcuggagcuacaucguggagaccagcagcagcgacaacggcaccugcuaccccggcgacuucaucgacuacgaggagcugagagagcagcugagcagcgugagcagcuucgagagauucgagaucuuccccaagaccagcagcuggcccaaccacgacagcaacaagggcgugaccgccgccugcccccacgccggcgccaagagcuucuacaagaaccugaucuggcuggugaagaagggcaacagcuaccccaagcugagcaagagcuacaucaacgacaagggcaaggaggugcuggugcuguggggcauccaccaccccagcaccagcgccgaccagcagagccuguaccagaacgccgacgccuacguguucgugggcaccagcagauacagcaagaaguucaagcccgagaucgccaucagacccaaggugagagacagagagggcagaaugaacuacuacuggacccugguggagcccggcgacaagaucaccuucgaggccaccggcaaccugguggugcccagauacgccuucgccauggagagaaacgccggcagcggcaucaucaucagcgacacccccgugcacgacugcaacaccaccugccagacccccaagggcgccaucaacaccagccugcccuuccagaacauccaccccaucaccaucggcaagugccccaaguacgugaagagcaccaagcugagacuggccaccggccugagaaacgugcccagcauccagagcagaggccuguucggcgccaucgccggcuucaucgagggcggcuggaccggcaugguggacggcugguacggcuaccaccaccagaacgagcagggcagcggcuacgccgccgaccugaagagcacccagaacgccaucgacgagaucaccaacaaggugaacagcgugaucgagaagaugaacacccaguucaccgccgugggcaaggaguucaaccaccuggagaagagaaucgagaaccugaacaagaagguggacgacggcuuccuggacaucuggaccuacaacgccgagcugcuggugcugcuggagaacgagagaacccuggacuaccacgacagcaacgugaagaaccuguacgagaaggugagaagccagcugaagaacaacgccaaggagaucggcaacggcugcuucgaguucuaccacaagugcgacaacaccugcauggagagcgugaagaacggcaccuacgacuaccccaaguacagcgaggaggccaagcugaacagagaggagaucgacggcgugaagcuggagagcaccagaaucuaccagauccuggccaucuacagcaccguggccagcagccuggugcugguggugagccugggcgccaucagcuucuggaugugcagcaacggcagccugcagugcagaaucugcaucuga

SEQ ID NO: 164953 - RNA, 1701 nt, Artificial Sequence; identical to SEQ ID NO: 162729
  derived and/or modified CDS sequence (opt4) from hemagglutinin__InfluenzaA__ADG57095

SEQ ID NO: 164954 - RNA, 1701 nt, Artificial Sequence
  derived and/or modified CDS sequence (opt4) from hemagglutinin__InfluenzaA__ADG57097
auggaggccauccugguggugcugcuguacaccuucgccaccgccaacgccgacacccugugcaucggcuaccacgccaacaacagcaccgacaccguggacaccgugcuggagaagaacgugaccgugacccacagcgugaaccugcuggaggacaagcacaacggcaagcugugcaagcugagaggcguggccccccugcaccugggcaagugcaacaucgccggcuggauccugggcaaccccgagugcgagagccugagcaccgccagcagcuggagcuacaucguggagaccagcagcagcgacaacggcaccugcuaccccggcgacuucaucgacuacgaggagcugagagagcagcugagcagcgugagcagcuucgagagauucgagaucuuccccaagaccagcagcuggcccaaccacgacagcaacaagggcgugaccgccgccugcccccacgccggcgccaagagcuucuacaagaaccugaucuggcuggugaagaagggcaacagcuaccccaagcugagcaagagcuacaucaacgacaagggcaaggaggugcuggugcuguggggcauccaccaccccagcaccagcgccgaccagcagagccuguaccagaacgccgacgccuacguguucgugggcagcagcagauacagcaagaaguucaagcccgagaucgccaucagacccaaggugagaggccaggagggcagaaugaacuacuacuggacccugguggagcccggcgacaagaucaccuucgaggccaccggcaaccugguggugcccagauacgccuucgccauggagagaaacgccggcagcggcaucaucaucagcgacacccccgugcacgacugcaacaccaccugccagacccccaagggcgccaucaacaccagccugcccuuccacaacauccaccccaucaccaucggcaagugccccaaguacgugaagagcaccaagcugagacuggccaccggccugagaaacgugcccagcauccagagcagaggccuguucggcgccaucgccggcuucaucgagggcggcuggaccggcaugguggacggcugguacggcuaccaccaccagaacgagcagggcagcggcuacgccgccgaccugaagagcacccagaacgccaucgacgagaucaccaacaaggugaacagcgugaucgagaagaugaacacccaguucaccgccgugggcaaggaguucaaccaccuggagaagagaaucgagaaccugaacaagaagguggacgacggcuuccuggacaucuggaccuacaacgccgagcugcuggugcugcuggagaacgagagaacccuggacuaccacgacagcaacgugaagaaccuguacgagaaggugagaagccagcugaagaacaacgccaaggagaucggcaacggcugcuucgaguucuaccacaagugcgacaacaccugcauggagagcgugaagaacggcaccuacgacuaccccaaguacagcgaggaggccaagcugaacagagaggagaucgacggcgugaagcuggagagcaccagaaucuaccagauccuggccaucuacagcaccguggccagcagccuggugcugguggugagccugggcgccaucagcuucuggaugugcagcaacggcagccugcagugcagaaucugcaucuga

SEQ ID NO: 164955 - RNA, 1701 nt, Artificial Sequence; identical to SEQ ID NO: 163893
  derived and/or modified CDS sequence (opt4) from hemagglutinin__InfluenzaA__ADG57098

SEQ ID NO: 164956 - RNA, 1701 nt, Artificial Sequence
  derived and/or modified CDS sequence (opt4) from hemagglutinin__InfluenzaA__ADG57099
augaaggccauccugguggugcugcuguacaccuucgccaccgccaacgccgacacccugugcaucggcuaccacgccaacaacagcaccgacaccguggacaccgugcuggagaagaacgugaccgugacccacagcgugaaccugcuggaggacaagcacaacggcaagcugugcaagcugagaggcguggccccccugcaccugggcaagugcaacaucgccggcuggauccugggcaaccccgagugcgagagccugagcaccgccagcagcuggagcuacaucguggagaccagcagcagcgacaacggcaccugcuaccccggcgacuucaucgacuacgaggagcugagagagcagcugagcagcgugagcagcuucgagagauucgagaucuuccccaagaccagcagcuggcccaaccacgacagcaacaagggcgugaccgccgccugcccccacgccggcgccaagagcuucuacaagaaccugaucuggcuggugaagaagggcaacagcuaccccaagcugagcaagagcuacaucaacgacaagggcaaggaggugcuggugcuguggggcauccaccaccccagcaccagcgccgaccagcagagccuguaccagaacgccgacgccuacguguucgugggcaccagcagauacagcaagaaguucaagcccgagaucgccaucagacccaaggugagagaccaggagggcagaaugaacuaccacuggacccugguggagcccggcgacaagaucaccuucgaggccaccggcaaccugguggugcccagauacgccuucgccauggagagaaacgccggcagcggcaucaucaucaccgacacccccgugcacgacugcaacaccaccugccagacccccaagggcgccgugaacaccagccugcccuuccagaacauccaccccaucaccaucggcaagugccccaaguacgugaagagcaccaagcugagacuggccaccggccugagaaacgugcccagcauccagagcagaggccuguucggcgccaucgccggcuucaucgagggcggcuggaccggcaugguggacggcugguacggcuaccaccaccagaacgagcagggcagcggcuacgccgccgaccugaagagcacccagaacgccaucgacaagaucaccaacaaggugaacagcgugaucgagaagaugaacacccaguucaccgccgugggcaaggaguucaaccaccuggagaagagaaucgagaaccugaacaagaagguggacgacggcuuccuggacaucuggaccuacaacgccgagcugcuggugcugcuggagaacgagagaacccuggacuaccacgacagcaacgugaagaaccuguacgagaaggugagaagccagcugaagaacaacgccaaggagaucggcaacggcugcuucgaguucuaccacaagugcgacaacaccugcauggagagcgugaagaacggcaccuacgacuaccccaaguacagcgaggaggccaagcugaacagagaggagaucgacggcgugaagcuggagagcaccagaaucuaccagauccuggccaucuacagcaccguggccagcagccuggugcugguggugagccugggcgccaucagcuucuggaugugcagcaacggcagccugcagugcagaaucugcaucuga

SEQ ID NO: 164957 - RNA, 1701 nt, Artificial Sequence
  derived and/or modified CDS sequence (opt4) from hemagglutinin__InfluenzaA__ADG57100
augaaggccauccugguggugcugcuguacaccuucgccaccgccaacgccgacacccugugcaucggcuaccacgccaacaacagcaccgacaccguggacaccgugcuggagaagaacgugaccgugacccacagcgugaaccugcuggaggacaagcacaacggcaagcugugcaagcugagaggcguggccccccugcaccugggcaagugcaacaucgccggcuggauccugggcaaccccgagugcgagagccugagcaccgccagcagcuggagcuacaucguggagaccagcagcagcgacaacggcaccugcuaccccggcgacuucaucgacuacgaggagcugagagagcagcugagcagcgugagcagcuucgagagauucgagaucuuccccaagaccagcagcuggcccaaccacgacagcaacaagggcgugaccgccgccugcccccacgccggcgccaagagcuucuacaagaaccugaucuggcuggugaagaagggcaacagcuaccccaagcugagcaagagcuacaucaacgacaagggcaaggaggugcuggugcuguggggcauccaccaccccagcaccagcgccgaccagcagagccuguaccagaacgccgacgccuacguguucgugggcaccagcagauacagcaagaaguucaagcccgagaucgccaucagacccaaggugagagaccaggagggcagaaugaacuacuacuggacccugguggagcccggcgacaagaucaccuucgaggccaccggcaaccugguggugcccagauacgccuucgccauggagagaaacgccggcagcggcaucaucaucagcgacacccccgugcacgacugcaacaccaccugccagacccccaagggcgccaucaacaccagccugcccuuccagaacauccaccccaucaccaucggcaagugccccaaguacgugaagagcaccaagcugagacuggccaccggccugagaaacgugcccagcauccagagcagaggccuguucggcgccaucgccggcuucaucgagggcggcuggaccggcaugguggacggcugguacggcuaccaccaccagaacgagcagggcagcggcuacgccgccgaccugaagagcacccagaacgccaucgacaagaucaccaacaaggugaacagcgugaucgagaagaugaacacccaguucaccgccggcggcaaggaguucaaccaccuggagaagagaaucgagaaccugaacaagaagguggacgacggcuuccuggacaucuggaccuacaacgccgagcugcuggugcugcuggagaacgagagaacccuggacuaccacgacagcaacgugaagaaccuguacgagaaggugagaagccagcugaagaacaacgccaaggagaucggcaacggcugcuucgaguucuaccacaagugcgacaacaccugcauggagagcgugaagaacggcaccuacgacuaccccaaguacagcgaggaggccaagcugaacagagaggagaucgacggcgugaagcuggagagcaccagaaucuaccagauccuggccaucuacagcaccguggccagcagccuggugcugguggugagccugggcgccaucagcuucuggaugugcagcaacggcagccugcagugcagaaucugcaucuga

SEQ ID NO: 164958 - RNA, 1701 nt, Artificial Sequence; identical to SEQ ID NO: 162729
  derived and/or modified CDS sequence (opt4) from hemagglutinin__InfluenzaA__ADG58939

SEQ ID NO: 164959 - RNA, 1701 nt, Artificial Sequence; identical to SEQ ID NO: 162729
  derived and/or modified CDS sequence (opt4) from hemagglutinin__InfluenzaA__ADG58940

SEQ ID NO: 164960 - RNA, 1701 nt, Artificial Sequence
  derived and/or modified CDS sequence (opt4) from hemagglutinin__InfluenzaA__ADG58941
augaaggccauccugguggugcugcuguacaccuucgccaccgccaacgccgacacccugugcaucggcuaccacgccaacaacagcaccgacaccguggacaccgugcuggagaagaacgugaccgugacccacagcgugaaccugcuggaggacaagcacaacggcaagcugugcaagcugagaggcguggccccccugcaccugggcaagugcaacaucgccggcuggauccugggcaaccccgagugcgagagccugagcaccgccagcagcuggagcuacaucguggagaccagcagcagcgacaacggcaccugcuaccccggcgacuucaucgacuacgaggagcugagagagcagcugagcagcgugagcagcuucgagagauucgagaucuuccccaagaccagcagcuggcccaaccacgacagcaacaagggcgugaccgccgccugcccccacgccggcgccaagagcuucuacaagaaccugaucuggcuggugaagaagggcaacagcuaccccaagcugagcaagagcuacaucaacgacaagggcaaggaggugcuggugcuguggggcauccaccaccccagcaccagcgccgaccagcagagccuguaccagaacgccgacaccuacguguucgugggcaccagcagauacagcaagaaguucaagcccgagaucgccaucagacccaaggugagagaccaggagggcagaaugaacuacuacuggacccugguggagcccggcgacaagaucaccuucgaggccaccggcaaccugguggugcccagauacgccuucgccauggagagaaacgccggcagcggcaucaucaucagcgacacccccgugcacgacugcaacaccaccugccagacccccaagggcgccaucaacaccagccugcccuuccagaacauccaccccaucaccaucggcaagugccccaaguacgugaagagcaccaagcugagacuggccaccggccugagaaacgugcccagcauccagagcagaggccuguucggcgccaucgccggcuucaucgagggcggcuggaccggcaugguggacggcugguacggcuaccaccacgagaacgagcagggcagcggcuacgccgccgaccugaagagcacccagaacgccaucgacgagaucaccaacaaggugaacagcgugaucgagaagaugaacacccaguucaccgccgugggcaaggaguucaaccaccuggagaagagaaucgagaaccugaacaagaagaucgacgacggcuuccuggacaucuggaccuacaacgccgagcugcuggugcugcuggagaacgagagaacccuggacuaccacgacagcaacgugaagaaccuguacgagaaggugagaagccagcugaagaacaacgccaaggagaucggcaacggcugcuucgaguucuaccacaagugcgacaacaccugcauggagagcgugaagaacggcaccuacgacuaccccaaguacagcgaggaggccaagcugaacagagaggagaucgacggcgugaagcuggagagcaccagaaucuaccagauccuggccaucuacagcaccguggccagcagccuggugcugguggugagccugggcgccaucagcuucuggaugugcagcaacggcagccugcagugcagaaucugcaucuga

SEQ ID NO: 164961 - RNA, 1701 nt, Artificial Sequence
  derived and/or modified CDS sequence (opt4) from hemagglutinin__InfluenzaA__ADG58942
augaaggccauccugguggugcugcuguacaccuucgccaccgccaacgccgacacccugugcaucggcuaccacgccaacaacagcaccgacaccguggacaccgugcuggagaagaacgugaccgugacccacagcgugaaccugcuggaggacaagcacaacggcaagcugugcaagcugagaggcguggccccccugcaccugggcaagugcaacaucgccggcuggauccugggcaaccccgagugcgagagccugagcaccgccagcagcuggagcuacaucguggagaccagcagcagcgacaacggcaccugcuaccccggcgacuucaucgacuacgaggagcugagagagcagcugagcagcgugagcagcuucgagagauucgagaucuuccccaagaccagcagcuggcccaaccacgacagcaacaagggcgugaccgccgccugcccccacgccggcgccaagagcuucuacaagaaccugaucuggcuggugaagaagggcaacagcuaccccaagcugagcaagagcuacaucaacgacaagggcaaggaggugcuggugcuguggggcauccaccaccccagcaccagcgccgaccagcagagccuguaccagaacgccgacaccuacguguucgugggcaccagcagauacagcaagaaguucaagcccgagaucgccaucagacccaaggugagagaccaggagggcagaaugaacuacuacuggacccugguggagcccggcgacaagaucaccuucgaggccaccggcaaccugguggugcccagauacgccuucgccauggagagaaacgccggcagcggcaucaucaucagcgacacccccgugcacgacugcaacaccaccugccagacccccaagggcgccaucaacaccagccugcccuuccagaacauccaccccaucaccaucggcaagugccccaaguacgugaagagcaccaagcugagacuggccaccggccugagaaacgugcccagcauccagagcagaggccuguucggcgccaucgccggcuucaucgagggcggcuggaccggcaugguggacggcugguacggcuaccugcaccagaacgagcagggcagcggcuacgccgccgaccugaagagcacccagaacgccaucgacgagaucaccaacaaggugaacagcgugaucgagaagaugaacacccaguucaccgccgugggcaaggaguucaaccaccuggagaagagaaucgagaaccugaacaagaagaucgacgacggcuuccuggacaucuggaccuacaacgccgagcugcuggugcugcuggagaacgagagaacccuggacuaccacgacagcaacgugaagaaccuguacgagaaggugagaagccagcugaagaacaacgccaaggagaucggcaacggcugcuucgaguucuaccacaagugcgacaacaccugcauggagagcgugaagaacggcaccuacgacuaccccaaguacagcgaggaggccaagcugaacagagaggagaucgacggcgugaagcuggagagcaccagaaucuaccagauccuggccaucuacagcaccguggccagcagccuggugcugguggugagccugggcgccaucagcuucuggaugugcagcaacggcagccugcagugcagaaucugcaucuga

SEQ ID NO: 164962 - RNA, 1701 nt, Artificial Sequence; identical to SEQ ID NO: 162729
  derived and/or modified CDS sequence (opt4) from hemagglutinin__InfluenzaA__ADG58943

SEQ ID NO: 164963 - RNA, 1701 nt, Artificial Sequence
  derived and/or modified CDS sequence (opt4) from hemagglutinin__InfluenzaA__ADG58944
augaaggccauccugguggugcugcuguacaccuucgccaccgccaacgccgacacccugugcaucggcuaccacgccaacaacagcaccgacaccguggacaccgugcuggagaagaacgugaccgugacccacagcgugaaccugcuggaggacaagcacaacggcaagcugugcaagcugagaggcguggccccccugcaccugggcaagugcaacaucgccggcuggauccugggcaaccccgagugcgagagccugagcaccgccagcagcuggagcuacaucguggagaccagcagcagcgacaacggcaccugcuaccccggcgacuucaucgacuacgaggagcugagagagcagcugagcagcgugagcagcuucgagagauucgagaucuuccccaagaccagcagcuggcccaaccacgacagcaacaagggcgugaccgccgccugcccccacgccggcgccaagagcuucuacaagaaccugaucuggcuggugaagaagggcaacagcuaccccaagcugagcaagagcuacaucaacgacaagggcaaggaggugcuggugcuguggggcauccaccaccccagcaccagcgccgaccagcagagccuguaccagaacgccgacgccuacguguucgugggcaccagcagauacagcaagaaguucaagcccgagaucgccaucagacccaaggugagagaccaggagggcagaaugaacuacuacuggacccugguggagcccggcgacaagaucaccuucgaggccaccggcaaccugcuggugcccagauacgccuucgccauggagagaaacgccggcagcggcaucaucaucagcgacacccccgugcacgacugcaacaccaccugccagacccccaagggcgccaucaacaccagccugcccuuccagaacauccaccccaucaccaucggcaagugccccaaguacgugaagagcaccaagcugagacuggccaccggccugagaaacgugcccagcauccagagcagaggccuguucggcgccaucgccggcuucaucgagggcggcuggaccggcaugguggacggcugguacggcuaccaccaccagaacgagcagggcagcggcuacgccgccgaccugaagagcacccagaacgccaucgacgagaucaccaacaaggugaacagcgugaucgagaagaugaacacccaguucaccgccgugggcaaggaguucaaccaccuggagaagagaaucgagaaccugaacaagaagguggacgacggcuuccuggacaucuggaccuacaacgccgagcugcuggugcugcuggagaacgagagaacccuggacuaccacgacagcaacgugaagaaccuguacgagaaggugagaagccagcugaagaacaacgccaaggagaucggcaacggcugcuucgaguucuaccacaagugcgacaacaccugcauggagagcgugaagaacggcaccuacgacuaccccaaguacagcgaggaggccaagcugaacagagaggagaucgacggcgugaagcuggagagcaccagaaucuaccagauccuggccaucuacagcaccguggccagcagccuggugcugguggugagccugggcgccaucagcuucuggaugugcagcaacggcagccugcagugcagaaucugcaucuga

SEQ ID NO: 164964 - RNA, 1701 nt, Artificial Sequence; identical to SEQ ID NO: 163527
  derived and/or modified CDS sequence (opt4) from hemagglutinin__InfluenzaA__ADG58946

SEQ ID NO: 164965 - RNA, 1701 nt, Artificial Sequence; identical to SEQ ID NO: 162729
  derived and/or modified CDS sequence (opt4) from hemagglutinin__InfluenzaA__ADG58947

SEQ ID NO: 164966 - RNA, 1701 nt, Artificial Sequence
  derived and/or modified CDS sequence (opt4) from hemagglutinin__InfluenzaA__ADG58948
augaaggccauccugaucgugcugcuguacaccuucgccaccgccaacgccgacacccugugcaucggcuaccacgccaacaacagcaccgacaccguggacaccgugcuggagaagaacgugaccgugacccacagcgugaaccugcuggaggacaagcacaacggcaagcugugcaagcugagaggcguggccccccugcaccugggcaagugcaacaucgccggcuggauccugggcaaccccgagugcgagagccugagcaccgccagcagcuggagcuacaucguggagaccagcagcagcgacaacggcaccugcuaccccggcgacuucaucgacuacgaggagcugagagagcagcugagcagcgugagcagcuucgagagauucgagaucuuccccaagaccagcagcuggcccaaccacgacagcaacaagggcgugaccgccgccugcccccacgccggcgccaagagcuucuacaagaaccugaucuggcuggugaagaagggcaacagcuaccccaagcugagcaagagcuacaucaacgacaagggcaaggaggugcuggugcuguggggcauccaccaccccagcaccagcgccgaccagcagagccuguaccagaacgccgacaccuacguguucgugggcaccagcagauacagcaagaaguucaagcccgagaucgccaucagacccaaggugagagaccaggagggcagaaugaacuacuacuggacccugguggagcccggcgacaagaucaccuucgaggccaccggcaaccugguggugcccagauacgccuucgccauggagagaaacgccggcagcggcaucaucaucagcgacacccccgugcacgacugcaacaccaccugccagacccccaagggcgccaucaacaccagccugcccuuccagaacauccaccccaucaccaucggcaagugccccaaguacgugaagagcaccaagcugagacuggccaccggccugagaaacgugcccagcauccagagcagaggccuguucggcgccaucgccggcuucaucgagggcggcuggaccggcaugguggacggcugguacggcuaccaccaccagaacgagcagggcagcggcuacgccgccgaccugaagagcacccagaacgccaucgacgagaucaccaacaaggugaacagcgugaucgagaagaugaacacccaguucaccgccgugggcaaggaguucaaccaccuggagaagagaaucgagaaccugaacaagaagaucgacgacggcuuccuggacaucuggaccuacaacgccgagcugcuggugcugcuggagaacgagagaacccuggacuaccacgacagcaacgugaagaaccuguacgagaaggugagaagccagcugaagaacaacgccaaggagaucggcaacggcugcuucgaguucuaccacaagugcgacaacaccugcauggagagcgugaagaacggcaccuacgacuaccccaaguacagcgaggaggccaagcugaacagagaggagaucgacggcgugaagcuggagagcaccagaaucuaccagauccuggccaucuacagcaccguggccagcagccuggugcugguggugagccugggcgccaucagcuucuggaugugcagcaacggcagccugcagugcagaaucugcaucuga

SEQ ID NO: 164967 - RNA, 1701 nt, Artificial Sequence
  derived and/or modified CDS sequence (opt4) from hemagglutinin__InfluenzaA__ADG58949
augaaggccauccugguggugcugcuguacaccuucgccaccgccaacgccgacacccugugcaucggcuaccacgccaacaacagcaccgacaccguggacaccgugcuggagaagaacgugaccgugacccacagcgugaaccugcuggaggacaagcacaacggcaagcugugcaagcugagaggcguggccccccugcaccugggcaagugcaacaucgccggcuggauccugggcaaccccgagugcgagagccugagcaccgccagcagcuggagcuacaucguggagaccagcagcagcgacaacggcaccugcuaccccggcgacuucaucgacuacgaggagcugagagagcagcugagcagcgugagcagcuucgagagauucgagaucuuccccaagaccagcagcuggcccaaccacgacagcaacaagggcgugaccgccgccugcccccacgccggcgccaagagcuucuacaagaaccugaucuggcuggugaagaagggcaacagcuaccccaagcugagcaagagcuacaucaacgacaagggcaaggaggugcuggugcuguggggcauccaccaccccagcaccagcgccgaccagcagagccuguaccagaacgccgacaccuacguguucgugggcaccagcagauacagcaagaaguucaagcccgagaucgccaucagacccaaggugagagaccaggagggcagaaugaacuacuacuggacccugguggagcccggcgacaagaucaccuucgaggccaccggcaaccugguggugcccagauacgccuucgccauggagagaaacgccggcagcggcaucaucaucagcgacaccagcgugcacgacugcaacaccaccugccagacccccaagggcgccaucaacaccagccugcccuuccagaacauccaccccaucaccaucggcaagugccccaaguacgugaagagcaccaagcugagacuggccaccggccugagaaacgugcccagcauccagagcagaggccuguucggcgccaucgccggcuucaucgagggcggcuggaccggcaugguggacggcugguacggcuaccaccaccagaacgagcagggcagcggcuacgccgccgaccugaagagcacccagaacgccaucgacgagaucaccaacaaggugaacagcgugaucgagaagaugaacacccaguucaccgccgugggcaaggaguucaaccaccuggagaagagaaucgagaaccugaacaagaagaucgacgacggcuuccuggacaucuggaccuacaacgccgagcugcuggugcugcuggagaacgagagaacccuggacuaccacgacagcaacgugaagaaccuguacgagaaggugagaagccagcugaagaacaacgccaaggagaucggcaacggcugcuucgaguucuaccacaagugcgacaacaccugcauggagagcgugaagaacggcaccuacgacuaccccaaguacagcgaggaggccaagcugaacagagaggagaucgacggcgugaagcuggagagcaccagaaucuaccagauccuggccaucuacagcaccguggccagcagccuggugcugguggugagccugggcgccaucagcuucuggaugugcagcaacggcagccugcagugcagaaucugcaucuga

SEQ ID NO: 164968 - RNA, 1701 nt, Artificial Sequence
  derived and/or modified CDS sequence (opt4) from hemagglutinin__InfluenzaA__ADG58951
augaaggccauccugguggugcugcugcacaccuucgccaccgccaacgccgacacccugugcaucggcuaccacgccaacaacagcaccgacaccguggacaccgugcuggagaagaacgugaccgugacccacagcgugaaccugcuggaggacaagcacaacggcaagcugugcaagcugagaggcguggccccccugcaccugggcaagugcaacaucgccggcuggauccugggcaaccccgagugcgagagccugagcaccgccagcagcuggagcuacaucguggagaccagcaacagcggcaacggcaccugcuaccccggcgaguucaucgacuacgaggagcugagagagcagcugagcagcgugagcagcuucgagagauucgagaucuuccccaagaccagcagcuggcccaaccacgacagcaacaagggcgugaccgccgccugcccccacgccggcgccaagagcuucuacaagaaccugaucuggcuggugaagaagggcaacagcuaccccaagcugagcaagagcuacaucaacgacaagggcaaggaggugcuggugcuguggggcauccaccaccccagcaccagcgccgaccagcagagccuguaccagaacgccgacgccuacguguucgugggcaccagcagauacagcaagaaguucaagcccgagaucgccaucagacccaaggugagagaccaggagggcagaaugaacuacuacuggacccugguggagcccggcgacaagaucaccuucgaggccaccggcaaccugguggugcccagauacgccuucgccauggagagaaacgccggcagcggcaucaucaucagcgacacccccgugcacgacugcaacaccaccugccagacccccaagggcgccaucaacaccagccugcccuuccagaacauccaccccaucaccaucggcaagugccccaaguacgugaagagcaccaagcugagacuggccaccggccugagaaacgugcccagcauccagagcagaggccuguucggcgccaucgccggcuucaucgagggcggcuggaccggcaugguggacggcugguacggcuaccaccaccagaacgagcagggcagcggcuacgccgccgaccugaagagcacccagaacgccaucgacgagaucaccaacaaggugaacagcgugaucgagaagaugaacacccaguucaccgccgugggcaaggaguucaaccaccuggagaagagaaucgagaaccugaacaagaagguggacgacggcuuccuggacaucuggaccuacaacgccgagcugcuggugcugcuggagaacgagagaacccuggacuaccacgacagcaacgugaagaaccuguacgagaaggugagaagccagcugaagaacaacgccaaggagaucggcaacggcugcuucgaguucuaccacaagugcgacaacaccugcaucgagagcgugaagaacggcaccuacgacuaccccaaguacagcgaggaggccaagcugaacagagaggagaucgacggcgugaagcuggagagcaccagaaucuaccagauccuggccaucuacagcaccguggccagcagccuggugcugguggugagccugggcgccaucagcuucuggaugugcagcaacggcagccugcagugcagaaucugcaucuga

SEQ ID NO: 164969 - RNA, 1701 nt, Artificial Sequence; identical to SEQ ID NO: 164968
  derived and/or modified CDS sequence (opt4) from hemagglutinin__InfluenzaA__ADG58952

SEQ ID NO: 164970 - RNA, 1701 nt, Artificial Sequence; identical to SEQ ID NO: 164968
  derived and/or modified CDS sequence (opt4) from hemagglutinin__InfluenzaA__ADG58953

SEQ ID NO: 164971 - RNA, 1701 nt, Artificial Sequence; identical to SEQ ID NO: 164968
  derived and/or modified CDS sequence (opt4) from hemagglutinin__InfluenzaA__ADG58954

SEQ ID NO: 164972 - RNA, 1701 nt, Artificial Sequence; identical to SEQ ID NO: 164968
  derived and/or modified CDS sequence (opt4) from hemagglutinin__InfluenzaA__ADG58955

SEQ ID NO: 164973 - RNA, 1701 nt, Artificial Sequence; identical to SEQ ID NO: 164968
  derived and/or modified CDS sequence (opt4) from hemagglutinin__InfluenzaA__ADG58956

SEQ ID NO: 164974 - RNA, 1701 nt, Artificial Sequence
  derived and/or modified CDS sequence (opt4) from hemagglutinin__InfluenzaA__ADG58957
augaaggccauccugguggugcugcugcacaccuucgccaccgccaacgccgacacccugugcaucggcuaccacgccaacaacagcaccgacaccguggacaccgugcuggagaagaacgugaccgugacccacagcgugaaccugcuggaggacaagcacaacggcaagcugugcaagcugagaggcguggccccccugcaccugggcaagugcaacaucgccggcuggauccugggcaaccccgagugcgagagccugagcaccgccagcagcuggagcuacaucguggagaccagcaacagcggcaacggcaccugcuaccccggcgaguucaucgacuacgaggagcugagagagcagcugagcagcgugagcagcuucgagagauucgagaucuuccccaagaccagcagcuggcccaaccacgacagcaacaagggcgugaccgccgccugcccccacgccggcgccaagagcuucuacaagaaccugaucuggcuggugaagaagggcaacagcuaccccaagcugagcaagagcuacaucaacgacaagggcaaggaggugcuggugcuguggggcauccaccaccccagcaccagcgccgaccagcagagccuguaccagaacgccgacgccuacguguucgugggcaccagcagauacagcaagaaguucaagcccgagaucgccaucagacccaaggugagagaccaggagggcagaaugaacuacuacuggacccugguggagcccggcgacaagaucaccuucgaggccaccggcaaccugguggugcccagauacgccuucgccauggagagaaacgccggcagcggcaucaucaucagcgacacccccgugcacgacugcaacaccaccugccagacccccaagggcgccaucaacaccagccugcccuuccagaacauccaccccaucaccaucggcaagugccccaaguacgugaagagcaccaagcugagacuggccaccggccugagaaacgugcccagcauccagagcagaggccuguucggcgccaucgccggcuucaucgagggcggcuggaccggcaugguggacggcugguacggcuaccaccaccagaacgagcagggcagcggcuacgccgccgaccugaagagcacccagaacgccaucgacgagaucaccaacaaggugaacagcgugaucgagaagaugaacacccaguucaccgccgugggcaaggaguucaaccaccuggagaagagaaucgagaaccugaacaagaagguggacgacggcuuccuggacaucuggaccuacaacgccgagcugcuggugcugcuggagaacgagagaacccuggacuaccacgacagcaacgugaagaaccuguacgagaaggugagaagccagcugaagaacaacgccaaggagaucggcaacggcugcuucgaguucuaccacaagugcgacaacaccugcauggagagcgugaagaacggcaccuacgacuaccccaaguacagcgaggaggccaagcugaacagagaggagaucgacggcgugaagcuggagagcaccagaaucuaccagauccuggccaucuacagcaccguggccagcagccuggugcugguggugagccugggcgccaucagcuucuggaugugcagcaacggcagccugcagugcagaaucugcaucuga

SEQ ID NO: 164975 - RNA, 1701 nt, Artificial Sequence
  derived and/or modified CDS sequence (opt4) from hemagglutinin__InfluenzaA__ADG58959
augaaggccauccugguggugcugcuguacaccuucgccaccgccaacgccgacacccugugcaucggcuaccacgccaacaacagcaccgacaccguggacaccgugcuggagaagaacgugaccgugacccacagcgugaaccugcuggaggacaagcacaacggcaagcugugcaagcugagaggcguggccccccugcaccugggcaagugcaacaucgccggcuggauccugggcaaccccgagugcgagagccugagcaccgccaacagcuggagcuacaucguggagaccagcagcagcgacaacggcaccugcuaccccggcgacuucaucgacuacgaggagcugagagagcagcugagcagcgugagcagcuucgagagauucgagaucuuccccaagaccagcagcuggcccaaccacgacagcaacaagggcgugaccgccgccugcccccacgccggcgccaagagcuucuacaagaaccugaucuggcuggugaagaagggcaacagcuaccccaagcugagcaagagcuacaucaacgacaagggcaaggaggugcuggugcuguggggcauccaccaccccagcaccagcgccgaccagcagagccuguaccagaacgccgacgccuacguguucgugggcaccagcagauacagcaagaaguucaagcccgagaucgccaucagacccaaggugagagaccaggagggcagaaugaacuacuacuggacccugguggagcccggcgacaagaucaccuucgaggccaccggcaaccugguggugcccagauacgccuucgccauggagagaaacgccggcagcggcaucaucaucagcgacacccccgugcacgacugcaacaccaccugccagacccccaagggcgccaucaacaccagccugcccuuccagaacauccaccccaucaccaucggcaagugccccaaguacgugaagagcaccaagcugagacuggccaccggccugagaaacgugcccagcauccagagcagaggccuguucggcgccaucgccggcuucaucgagggcggcuggaccggcaugguggacggcugguacggcuaccaccaccagaacgagcagggcagcggcuacgccgccgaccugaagagcacccagaacgccaucgacgagaucaccaacaaggugaacagcgugaucgagaagaugaacacccaguucaccgccgugggcaaggaguucaaccaccuggagaagagaaucgagaaccugaacaagaagguggacgacggcuuccuggacaucuggaccuacaacgccgagcugcuggugcugcuggagaacgagagaacccuggacuaccacgacagcaacgugaagaaccuguacgagaaggugagaagccagcugaagaacaacgccaaggagaucggcaacggcugcuucgaguucuaccacaagugcgacaacaccugcauggagagcgugaagaacggcaccuacgacuaccccaaguacagcgaggaggccaagcugaacagagaggagaucgacggcgugaagcuggagagcaccagaaucuaccagauccuggccaucuacagcaccguggccagcagccuggugcugguggugagccugggcgccaucagcuucuggaugugcagcaacggcagccugcagugcagaaucugcaucuga

SEQ ID NO: 164976 - RNA, 1701 nt, Artificial Sequence; identical to SEQ ID NO: 164893
  derived and/or modified CDS sequence (opt4) from hemagglutinin__InfluenzaA__ADG58960

SEQ ID NO: 164977 - RNA, 1701 nt, Artificial Sequence; identical to SEQ ID NO: 164893
  derived and/or modified CDS sequence (opt4) from hemagglutinin__InfluenzaA__ADG58961

SEQ ID NO: 164978 - RNA, 1701 nt, Artificial Sequence; identical to SEQ ID NO: 164893
  derived and/or modified CDS sequence (opt4) from hemagglutinin__InfluenzaA__ADG58962

SEQ ID NO: 164979 - RNA, 1701 nt, Artificial Sequence; identical to SEQ ID NO: 164893
  derived and/or modified CDS sequence (opt4) from hemagglutinin__InfluenzaA__ADG58963

SEQ ID NO: 164980 - RNA, 1701 nt, Artificial Sequence; identical to SEQ ID NO: 164893
  derived and/or modified CDS sequence (opt4) from hemagglutinin__InfluenzaA__ADG58964

SEQ ID NO: 164981 - RNA, 1701 nt, Artificial Sequence; identical to SEQ ID NO: 164893
  derived and/or modified CDS sequence (opt4) from hemagglutinin__InfluenzaA__ADG58965

SEQ ID NO: 164982 - RNA, 1701 nt, Artificial Sequence; identical to SEQ ID NO: 164893
  derived and/or modified CDS sequence (opt4) from hemagglutinin__InfluenzaA__ADG58966

SEQ ID NO: 164983 - RNA, 1701 nt, Artificial Sequence; identical to SEQ ID NO: 164893
  derived and/or modified CDS sequence (opt4) from hemagglutinin__InfluenzaA__ADG58967

SEQ ID NO: 164984 - RNA, 1701 nt, Artificial Sequence; identical to SEQ ID NO: 164893
  derived and/or modified CDS sequence (opt4) from hemagglutinin__InfluenzaA__ADG58968

SEQ ID NO: 164985 - RNA, 1701 nt, Artificial Sequence; identical to SEQ ID NO: 162729
  derived and/or modified CDS sequence (opt4) from hemagglutinin__InfluenzaA__ADG59628

SEQ ID NO: 164986 - RNA, 1701 nt, Artificial Sequence; identical to SEQ ID NO: 162729
  derived and/or modified CDS sequence (opt4) from hemagglutinin__InfluenzaA__ADG59629

SEQ ID NO: 164987 - RNA, 1701 nt, Artificial Sequence; identical to SEQ ID NO: 162729
  derived and/or modified CDS sequence (opt4) from hemagglutinin__InfluenzaA__ADG59630

SEQ ID NO: 164988 - RNA, 1701 nt, Artificial Sequence; identical to SEQ ID NO: 162729
  derived and/or modified CDS sequence (opt4) from hemagglutinin__InfluenzaA__ADG59631

SEQ ID NO: 164989 - RNA, 1701 nt, Artificial Sequence; identical to SEQ ID NO: 162729
  derived and/or modified CDS sequence (opt4) from hemagglutinin__InfluenzaA__ADG59632

SEQ ID NO: 164990 - RNA, 1701 nt, Artificial Sequence; identical to SEQ ID NO: 163830
  derived and/or modified CDS sequence (opt4) from hemagglutinin__InfluenzaA__ADG59633

SEQ ID NO: 164991 - RNA, 1701 nt, Artificial Sequence; identical to SEQ ID NO: 163830
  derived and/or modified CDS sequence (opt4) from hemagglutinin__InfluenzaA__ADG59634

SEQ ID NO: 164992 - RNA, 1701 nt, Artificial Sequence; identical to SEQ ID NO: 162729
  derived and/or modified CDS sequence (opt4) from hemagglutinin__InfluenzaA__ADG59635

SEQ ID NO: 164993 - RNA, 1701 nt, Artificial Sequence
  derived and/or modified CDS sequence (opt4) from hemagglutinin__InfluenzaA__ADG59636
augaaggccauccugguggugcugcuguacaccuucgccaccgccaacgccgacacccugugcaucggcuaccacgccaacaacagcaccgacaccguggacaccgugcuggagaagaacgugaccgugacccacagcgugaaccugcuggaggacaagcacaacggcaagcugugcaagcugagaggcguggccccccugcaccugggcaagugcaacaucgccggcuggauccugggcaaccccgagugcgagagccugagcaccgccagcagcuggagcuacaucguggagaccagcagcagcgacaacggcaccugcuaccccggcgacuucaucgacuacgaggagcugagagagcagcugagcagcgugagcagcuucgagagauucgagaucuuccccaagaccagcagcuggcccaaccacgacagcaacaagggcgugaccgccgccugcccccacgccggcgccaagagcuucuacaagaaccugaucuggcuggugaagaagggcaacagcuaccccaagcugagcaagagcuacaucaacgacaagggcaaggaggugcuggugcuguggggcauccaccaccccagcaccagcgccgaccagcagagccuguaccagaacgccgacgccuacguguucgugggcaccagcagauacagcaagaaguucaagcccgagaucgccaucagacccaaggugagaggccaggagggcagaaugaacuacuacuggacccugguggagcccggcgacaagaucaccuucgaggccaccggcaaccugguggugcccagauacgccuucgccauggagagaaacgccggcagcggcaucaucaucagcgacacccccgugcacgacugcaacaccaccugccagacccccaagggcgccaucaacaccagccugcccuuccagaacauccaccccaucaccaucggcaagugccccaaguacgugaagagcaccaagcugagacuggccaccggccugagaaacauccccagcauccagagcagaggccuguucggcgccaucgccggcuucaucgagggcggcuggaccggcaugguggacggcugguacggcuaccaccaccagaacgagcagggcagcggcuacgccgccgaccugaagagcacccagaacgccaucgacgagaucaccaacaaggugaacagcgugaucgagaagaugaacacccaguucaccgccgugggcaaggaguucaaccaccuggagaagagaaucgagaaccugaacaagaagguggacgacggcuuccuggacaucuggaccuacaacgccgagcugcuggugcugcuggagaacgagagaacccuggacuaccacgacagcaacgugaagaaccuguacgagaaggugagaagccagcugaagaacaacgccaaggagaucggcaacggcugcuucgaguucuaccacaagugcgacaacaccugcauggagagcgugaagaacggcaccuacgacuaccccaaguacagcgaggaggccaagcugaacagagaggagaucgacggcgugaagcuggagagcaccagaaucuaccagauccuggccaucuacagcaccguggccagcagccuggugcugguggugagccugggcgccaucagcuucuggaugugcagcaacggcagccugcagugcagaaucugcaucuga

SEQ ID NO: 164994 - RNA, 1701 nt, Artificial Sequence; identical to SEQ ID NO: 163477
  derived and/or modified CDS sequence (opt4) from hemagglutinin__InfluenzaA__ADG59638

SEQ ID NO: 164995 - RNA, 1701 nt, Artificial Sequence; identical to SEQ ID NO: 163830
  derived and/or modified CDS sequence (opt4) from hemagglutinin__InfluenzaA__ADG59639

SEQ ID NO: 164996 - RNA, 1701 nt, Artificial Sequence; identical to SEQ ID NO: 163082
  derived and/or modified CDS sequence (opt4) from hemagglutinin__InfluenzaA__ADG59641

SEQ ID NO: 164997 - RNA, 1701 nt, Artificial Sequence; identical to SEQ ID NO: 163572
  derived and/or modified CDS sequence (opt4) from hemagglutinin__InfluenzaA__ADG59643

SEQ ID NO: 164998 - RNA, 1701 nt, Artificial Sequence; identical to SEQ ID NO: 162716
  derived and/or modified CDS sequence (opt4) from hemagglutinin__InfluenzaA__ADG59644

SEQ ID NO: 164999 - RNA, 1701 nt, Artificial Sequence; identical to SEQ ID NO: 162729
  derived and/or modified CDS sequence (opt4) from hemagglutinin__InfluenzaA__ADG59646

SEQ ID NO: 165000 - RNA, 1701 nt, Artificial Sequence; identical to SEQ ID NO: 163830
  derived and/or modified CDS sequence (opt4) from hemagglutinin__InfluenzaA__ADG59647

SEQ ID NO: 165001 - RNA, 1701 nt, Artificial Sequence; identical to SEQ ID NO: 163893
  derived and/or modified CDS sequence (opt4) from hemagglutinin__InfluenzaA__ADG59648

SEQ ID NO: 165002 - RNA, 1701 nt, Artificial Sequence; identical to SEQ ID NO: 163893
  derived and/or modified CDS sequence (opt4) from hemagglutinin__InfluenzaA__ADG59649

SEQ ID NO: 165003 - RNA, 1701 nt, Artificial Sequence; identical to SEQ ID NO: 163893
  derived and/or modified CDS sequence (opt4) from hemagglutinin__InfluenzaA__ADG59650

SEQ ID NO: 165004 - RNA, 1701 nt, Artificial Sequence; identical to SEQ ID NO: 163893
  derived and/or modified CDS sequence (opt4) from hemagglutinin__InfluenzaA__ADG59651

SEQ ID NO: 165005 - RNA, 1701 nt, Artificial Sequence; identical to SEQ ID NO: 162729
  derived and/or modified CDS sequence (opt4) from hemagglutinin__InfluenzaA__ADG59652

SEQ ID NO: 165006 - RNA, 1701 nt, Artificial Sequence; identical to SEQ ID NO: 162729
  derived and/or modified CDS sequence (opt4) from hemagglutinin__InfluenzaA__ADG59653

SEQ ID NO: 165007 - RNA, 1701 nt, Artificial Sequence; identical to SEQ ID NO: 164993
  derived and/or modified CDS sequence (opt4) from hemagglutinin__InfluenzaA__ADG59655

SEQ ID NO: 165008 - RNA, 1701 nt, Artificial Sequence; identical to SEQ ID NO: 163830
  derived and/or modified CDS sequence (opt4) from hemagglutinin__InfluenzaA__ADG59656

SEQ ID NO: 165009 - RNA, 1701 nt, Artificial Sequence
  derived and/or modified CDS sequence (opt4) from hemagglutinin__InfluenzaA__ADG59657
augaaggccauccugguggugcugcuguacaccuucgccaccgccaacgccgacacccugugcaucggcuaccacgccaacaacagcaccgacaccguggacaccgugcuggagaagaacgugaccgugacccacagcgugaaccugcuggaggacaagcacaacggcaagcugugcaagcugagaggcguggccccccugcaccugggcaagugcaacaucgccggcuggauccugggcaaccccgagugcgagagccugagcaccgccagcagcuggagcuacaucguggagaccagcagcagcgacaacggcaccugcuaccccggcgacuucaucgacuacgaggagcugagagagcagcugagcagcgugagcagcuucgagagauucgagaucuuccccaagaccagcagcuggcccaaccacgacagcaacaagggcgugaccgccgccugcccccacgccggcgccaagagcuucuacaagaaccugaucuggcuggugaagaagggcaacagcuaccccaagcugagcaagagcuacaucaacgacaagggcaaggaggugcuggugcuguggggcauccaccaccccagcaccagcgccgaccagcagagccuguaccagaacgccgacgccuacguguucgugggcagcagcaaguacagcaagaaguucaagcccgagaucgccaucagacccaaggugagagaccaggagggcagaaugaacuacuacuggacccugguggagcccggcgacaagaucaccuucgaggccaccggcaaccugguggugcccagauacgccuucgccauggagagaaacgccggcagcggcaucaucaucagcgacacccccgugcacgacugcaacaccaccugccagacccccaagggcgccaucaacaccagccugcccuuccagaacauccaccccaucaccaucggcaagugccccaaguacgugaagagcaccaagcugagacuggccaccggccugagaaacgugcccagcacccagagcagaggccuguucggcgccaucgccggcuucaucgagggcggcuggaccggcaugguggacggcugguacggcuaccaccaccagaacgagcagggcagcggcuacgccgccgaccugaagagcacccagaacgccaucgacgagaucaccaacaaggugaacagcgugaucgagaagaugaacacccaguucaccgccgugggcaaggaguucaaccaccuggagaagagaaucgagaaccugaacaagaagguggacgacggcuuccuggacaucuggaccuacaacgccgagcugcuggugcugcuggagaacgagagaacccuggacuaccacgacagcaacgugaagaaccuguacgagaaggugagaagccagcugaagaacaacgccaaggagaucggcaacggcugcuucgaguucuaccacaagugcgacaacaccugcauggagagcgugaagaacggcaccuacgacuaccccaaguacagcgaggaggccaagcugaacagagaggagaucgacggcgugaagcuggagagcaccagaaucuaccagauccuggccaucuacagcaccguggccagcagccuggugcugguggugagccugggcgccaucagcuucuggaugugcagcaacggcagccugcagugcagaaucugcaucuga

SEQ ID NO: 165010 - RNA, 1701 nt, Artificial Sequence
  derived and/or modified CDS sequence (opt4) from hemagglutinin__InfluenzaA__ADG59658
augaaggccauccugguggugcugcuguacaccuucgccaccgccaacgccgacacccugugcaucggcuaccacgccaacaacagcaccgacaccaucgacaccgugcuggagaagaacgugaccgugacccacagcgugaaccugcuggaggacaagcacaacggcaagcugugcaagcugagaggcguggccccccugcaccugggcaagugcaacaucgccggcuggauccugggcaaccccgagugcgagagccugagcaccgccagcagcuggagcuacaucguggagaccagcagcagcgacaacggcaccugcuaccccggcgacuucaucgacuacgaggagcugagagagcagcugagcagcgugagcagcuucgagagauucgagaucuuccccaagaccagcagcuggcccaaccacgacagcaacaagggcgugaccgccgccugcccccacgccggcgccaagagcuucuacaagaaccugaucuggcuggugaagaagggcaacagcuaccccaagcugagcaagagcuacaucaacgacaagggcaaggaggugcuggugcuguggggcauccaccaccccagcaccagcgccgaccagcagagccuguaccagaacgccgacgccuacguguucgugggcaccagcagauacagcaagaaguucaagcccgagaucgccaucagacccaaggugagaaaccaggagggcagaaugaacuacuacuggacccugguggagcccggcgacaagaucaccuucgaggccaccggcaaccugguggugcccagauacgccuucgccauggagagaaacgccggcagcggcaucaucaucagcgacacccccgugcacgacugcaacaccaccugccagacccccaagggcgccaucaacaccagccugcccuuccagaacauccaccccaucaccaucggcaagugccccaaguacgugaagagcaccaagcugagacuggccaccggccugagaaacauccccagcauccagagcagaggccuguucggcgccaucgccggcuucaucgagggcggcuggaccggcaugguggacggcugguacggcuaccaccaccagaacgagcagggcagcggcuacgccgccgaccugaagagcacccagaacgccaucgacgagaucaccaacaaggugaacagcgugaucgagaagaugaacacccaguucaccgccgugggcaaggaguucaaccaccuggagaagagaaucgagaaccugaacaagaagguggacgacggcuuccuggacaucuggaccuacaacgccgagcugcuggugcugcuggagaacgagagaacccuggacuaccacgacagcaacgugaagaaccuguacgagaaggugagaagccagcugaagaacaacgccaaggagaucggcaacggcugcuucgaguucuaccacaagugcgacaacaccugcauggagagcgugaagaacggcaccuacgacuaccccaaguacagcgaggaggccaagcugaacagagaggagaucgacggcgugaagcuggagagcaccagaaucuaccagauccuggccaucuacagcaccguggccagcagccuggugcugguggugagccugggcgccaucagcuucuggaugugcagcaacggcagccugcagugcagaaucugcaucuga

SEQ ID NO: 165011 - RNA, 1701 nt, Artificial Sequence; identical to SEQ ID NO: 163176
  derived and/or modified CDS sequence (opt4) from hemagglutinin__InfluenzaA__ADG59659

SEQ ID NO: 165012 - RNA, 1701 nt, Artificial Sequence; identical to SEQ ID NO: 163176
  derived and/or modified CDS sequence (opt4) from hemagglutinin__InfluenzaA__ADG59660

SEQ ID NO: 165013 - RNA, 1701 nt, Artificial Sequence; identical to SEQ ID NO: 163082
  derived and/or modified CDS sequence (opt4) from hemagglutinin__InfluenzaA__ADG59662

SEQ ID NO: 165014 - RNA, 1701 nt, Artificial Sequence
  derived and/or modified CDS sequence (opt4) from hemagglutinin__InfluenzaA__ADG59663
augaaggccauccugguggugcugcuguacaccuucgccaccgccaacgccgacacccugugcaucggcuaccacgccaacaacagcaccgacaccguggacaccgugcuggagaagaacgugaccgugacccacagcgugaaccugcuggaggacaagcacaacggcaagcugugcaagcugagaggcguggccccccugcaccugggcaagugcaacaucgccggcuggauccugggcaaccccgagugcgagagccugagcaccgccagcagcuggagcuacaucguggagaccagcagcagcgacaacggcaccugcuaccccggcgacuucaucgacuacgaggagcugagagagcagcugagcagcgugagcagcuucgagagauucgagaucuuccccaagaccagcagcuggcccaaccacgacagcaacaagggcgugaccgccgccugcccccacgccggcgccaagagcuucuacaagaaccugaucuggcuggugaagaagggcaacagcuaccccaagcugagcaagagcuacaucaacgacaagggcaaggaggugcuggugcuguggggcauccaccaccccagcaccagcgccgaccagcagagccuguaccagaacgccgacgccuacguguucgugggcaccagcagauacagcaagaaguucaagcccgagaucgccaucagacccaaggugagagaccaggagggcagaaugaacuacuacuggacccugguggagcccggcgacaagaucaccuucgaggccaccggcaaccugguggugcccagauacgccuucgccauggagagaaacgccggcagcggcaucaucaucagcgacacccccuuccacgacugcaacaccaccugccagacccccaagggcgccaucaacaccagccugcccuuccagaacauccaccccaucaccaucggcaagugccccaaguacgugaagagcaccaagcugagacuggccaccggccugagaaacauccccagcauccagagcagaggccuguucggcgccaucgccggcuucaucgagggcggcuggaccggcaugguggacggcugguacggcuaccaccaccagaacgagcagggcagcggcuacgccgccgaccugaagagcacccagaacgccaucgacgagaucaccaacaaggugaacagcgugaucgagaagaugaacacccaguucaccgccgugggcaaggaguucaaccaccuggagaagagaaucgagaaccugaacaagaagguggacgacggcuuccuggacaucuggaccuacaacgccgagcugcuggugcugcuggagaacgagagaacccuggacuaccacgacagcaacgugaagaaccuguacgagaaggugagaagccagcugaagaacaacgccaaggagaucggcaacggcugcuucgaguucuaccacaagugcgacaacaccugcauggagagcgugaagaacggcaccuacgacuaccccaaguacagcgaggaggccaagcugaacagagaggagaucgacggcgugaagcuggagagcaccagaaucuaccagauccuggccaucuacagcaccguggccagcagccuggugcugguggugagccugggcgccaucagcuucuggaugugcagcaacggcagccugcagugcagaaucugcaucuga

SEQ ID NO: 165015 - RNA, 1701 nt, Artificial Sequence; identical to SEQ ID NO: 163082
  derived and/or modified CDS sequence (opt4) from hemagglutinin__InfluenzaA__ADG59664

SEQ ID NO: 165016 - RNA, 1701 nt, Artificial Sequence
  derived and/or modified CDS sequence (opt4) from hemagglutinin__InfluenzaA__ADG59666
augaaggccauccugguggugcugcuguacaccuucgccaccgccaacgccgacacccugugcaucggcuaccacgccaacaacagcaccgacaccguggacaccgugcuggagaagaacgugaccgugacccacagcgugaaccugcuggaggacaagcacaacggcaagcugugcaagcugagaggcguggccccccugcaccugggcaagugcaacaucgccggcuggauccugggcaaccccgagugcgagagccugagcaccgccagcagcuggagcuacaucguggagaccagcagcagcgacaacggcaccugcuaccccggcgacuucaucgacuacgaggagcugagagagcagcugagcagcgugagcagcuucgagagauucgagaucuuccccaagaccagcagcuggcccaaccacgacagcaacaagggcgugaccgccgccugcccccacgccggcgccaagagcuucuacaagaaccugaucuggcuggugaagaagggcaacagcuaccccaagcugagcaagagcuacaucaacgacaagggcaaggaggugcuggugcuguggggcauccaccaccccagcaccagcgccgaccagcagagccuguaccagaacgccgacgccuacguguucgugggcaccagcagauacagcaagaaguucaagcccgagaucgccaucagacccaaggugagagaccaggagggcagaaugaacuacuacuggacccugguggagcccggcgacaagaucaccuucgaggccaccggcaaccugguggugcccagauacgccuucgccauggagagagacgccggcagcggcaucaucaucagcgacacccccgugcacgacugcaacaccaccugccagacccccaagggcgccaucaacaccagccugcccuuccagaacauccaccccaucaccaucggcaagugccccaaguacgugaagagcaccaagcugagacuggccaccggccugagaaacgugcccagcauccagagcagaggccuguucggcgccaucgccggcuucaucgagggcggcuggaccggcaugguggacggcugguacggcuaccaccaccagaacgagcagggcagcggcuacgccgccgaccugaagagcacccagaacgccaucgacgagaucaccaacaaggugaacagcgugaucgagaagaugaacacccaguucaccgccgugggcaaggaguucaaccaccuggagaagagaaucgagaaccugaacaagaagaucgacgacggcuuccuggacaucuggaccuacaacgccgagcugcuggugcugcuggagaacgagagaacccuggacuaccacgacagcaacgugaagaaccuguacgagaaggugagaagccagcugaagaacaacgccaaggagaucggcaacggcugcuucgaguucuaccacaagugcgacaacaccugcauggagagcgugaagaacggcaccuacgacuaccccaaguacagcgaggaggccaagcugaacagagaggagaucgacggcgugaagcuggagagcaccagaaucuaccagauccuggccaucuacagcgccguggccagcagccuggugcugguggugagccugggcgccaucagcuucuggaugugcagcaacggcagccugcagugcagaaucugcaucuga

SEQ ID NO: 165017 - RNA, 1701 nt, Artificial Sequence; identical to SEQ ID NO: 163831
  derived and/or modified CDS sequence (opt4) from hemagglutinin__InfluenzaA__ADG59667

SEQ ID NO: 165018 - RNA, 1701 nt, Artificial Sequence
  derived and/or modified CDS sequence (opt4) from hemagglutinin__InfluenzaA__ADG59669
augaaggccauccugguggugcugcuguacaccuucgccaccgccaacgccgacacccugugcaucggcuaccacgccaacaacagcaccgacaccguggacaccgugcuggagaagaacgugaccgugacccacagcgugaaccugcuggaggacaagcacaacggcaagcugugcaagcugagaggcguggccccccugcaccugggcaagugcaacaucgccggcuggauccugggcaaccccgagugcgagagccugagcaccgccagcagcuggagcuacaucguggagaccagcagcagcgacaacggcaccugcuaccccggcgacuucaucgacuacgaggagcugagagagcagcugagcagcgugagcagcuucgagagauucgagaucuuccccaagaccagcagcuggcccaaccacgacagcaacaagggcgugaccgccgccugcccccacgccggcgccaagagcuucuacaagaaccugaucuggcuggugaagaagggcaacagcuaccccaagcugagcaagagcuacaucaacgacaagggcaaggaggugcuggugcuguggggcauccaccaccccagcaccagcgccgaccagcagagccuguaccagaacgccgacgccuacguguucgugggcaccagcagauacagcaagaaguucaagcccgagaucgccaucagacccaaggugagagagcaggagggcagaaugaacuacuacuggacccugguggaccccggcgacaagaucaccuucgaggccaccggcaaccugguggugcccagauacgccuucgccauggagagaaacgccggcagcggcaucaucaucagcgacacccccgugcacgacugcaacaccaccugccagacccccaagggcgccaucaacaccagccugcccuuccagaacauccacagcaucaccaucggcaagugccccaaguacgugaagagcaccaagcugagacuggccaccggccugagaaacgugcccagcauccagagcagaggccuguucggcgccaucgccggcuucaucgagggcggcuggaccggcaugguggacggcugguacggcuaccaccaccagaacgagcagggcagcggcuacgccgccgaccugaagagcacccagaacgccaucgacgagaucaccaacaaggugaacagcgugaucgagaagaugaacacccaguucaccgccgugggcaaggaguucaaccaccuggagaagagaaucgagaaccugaacaagaagguggacgacggcuuccuggacaucuggaccuacaacgccgagcugcuggugcugcuggagaacgagagaacccuggacuaccacgacagcaacgugaagaaccuguacgagaaggugagaagccagcugaagaacaacgccaaggagaucggcaacggcugcuucgaguucuaccacaagugcgacaacaccugcauggagagcgugaagaacggcaccuacgacuaccccaaguacagcgaggaggccaagcugaacagagaggagaucgacggcgugaagcuggagagcaccagaaucuaccagauccuggccaucuacagcaccguggccagcagccuggugcugguggugagccugggcgccaucagcuucuggaugugcagcaacggcagccugcagugcagaaucugcaucuga

SEQ ID NO: 165019 - RNA, 1701 nt, Artificial Sequence; identical to SEQ ID NO: 165018
  derived and/or modified CDS sequence (opt4) from hemagglutinin__InfluenzaA__ADG59670

SEQ ID NO: 165020 - RNA, 1701 nt, Artificial Sequence; identical to SEQ ID NO: 165018
  derived and/or modified CDS sequence (opt4) from hemagglutinin__InfluenzaA__ADG59671

SEQ ID NO: 165021 - RNA, 1701 nt, Artificial Sequence; identical to SEQ ID NO: 165018
  derived and/or modified CDS sequence (opt4) from hemagglutinin__InfluenzaA__ADG59672

SEQ ID NO: 165022 - RNA, 1701 nt, Artificial Sequence
  derived and/or modified CDS sequence (opt4) from hemagglutinin__InfluenzaA__ADG59673
augaaggccauccugguggugcugcuguacaccuucgccaccgccaacgccgacacccugugcaucggcuaccacgccaacaacagcaccgacaccguggacaccgugcuggagaagaacgugaccgugacccacagcguggaccugcuggaggacaagcacaacggcaagcugugcaagcugagaggcguggccccccugcaccugggcgagugcaacaucgccggcuggauccugggcaaccccgagugcgagagccugagcaccgccagcagcuggagcuacaucguggagaccagcagcagcgacaacggcaccugcuaccccggcgacuucaucgacuacgaggagcugagagagcagcugagcagcgugagcagcuucgagagauucgagaucuuccccaagaccagcagcuggcccaaccacgacagcaacaagggcgugaccgccgccugcccccacgccggcgccaagagcuucuacaagaaccugaucuggcuggugaagaagggcaacagcuaccccaagcugagcaagagcuacaucaacgacaagggcaaggaggugcuggugcuguggggcauccaccaccccagcaccagcgccgaccagcagagccuguaccagaacgccgacgccuacguguucgugggcaccagcagauacagcaagaaguucaagcccgagaucgccaucagacccaaggugagagaccaggagggcagaaugaacuacuacuggacccugguggagcccggcgacaagaucaccuucgaggccaccggcaaccugguggugcccagauacgccuucgccauggagagaaacgccggcagcggcaucaucaucagcgacacccccgugcacgacugcaacaccaccugccagacccccaagggcgccaucaacaccagccugcccuuccagaacauccaccccaucaccaucggcaagugccccaaguacgugaagagcaccaagcugagacuggccaccggccugagaaacgugcccagcauccagagcagaggccuguucggcgccaucgccggcuucaucgagggcggcuggaccggcaugguggacggcugguacggcuaccaccaccagaacgagcagggcagcggcuacgccgccgaccugaagagcacccagaacgccaucgacgagaucaccaacaaggugaacagcgugaucgagaagaugaacacccaguucaccgccgugggcaaggaguucaaccaccuggagaagagaaucgagaaccugaacaagaagguggacgacggcuuccuggacaucuggaccuacaacgccgagcugcuggugcugcuggagaacgagagaacccuggacuaccacgacagcaacgugaagaaccuguacgagaaggugagaagccagcugaagaacaacgccaaggagaucggcaacggcugcuucgaguucuaccacaagugcgacaacaccugcauggagagcgugaagaacggcaccuacgacuaccccaaguacagcgaggaggccaagcugaacagagaggagaucgacggcgugaagcuggagagcaccagaaucuaccagauccuggccaucuacagcaccguggccagcagccuggugcugguggugagccugggcgccaucagcuucuggaugugcagcaacggcagccugcagugcagaaucugcaucuga

SEQ ID NO: 165023 - RNA, 1701 nt, Artificial Sequence
  derived and/or modified CDS sequence (opt4) from hemagglutinin__InfluenzaA__ADG59674
augaaggccauccugguggugcugcuguacaccuucgccaccgccaacgccgacacccugugcgugggcuaccacgccaacaacagcaccgacaccguggacaccgugcuggagaagaacgugaccgugacccacagcgugaaccugcuggaggacaagcacaacggcaagcugugcaagcugagaggcguggccccccugcaccugggcaagugcaacaucgccggcuggauccugggcaaccccgagugcgagagccugagcaccgccagcagcuggagcuacaucguggagaccagcagcagcgacaacggcaccugcuaccccggcgacuucaucgacuacgaggagcugagagagcagcugagcagcgugagcagcuucgagagauucgagaucuuccccaagaccagcagcuggcccaaccacgacagcaacaagggcgugaccgccgccugcccccacgccggcgccaagagcuucuacaagaaccugaucuggcuggugaagaagggcaacagcuaccccaagcugagcaagagcuacaucaacgacaagggcaaggaggugcuggugcuguggggcauccaccaccccagcaccagcgccgaccagcagagccuguaccagaacgccgacgccuacguguucgugggcaccagcagauacagcaagaaguucaagcccgagaucgccaucagacccaaggugagagagcaggagggcagaaugaacuacuacuggacccugguggagcccggcgacaagaucaccuucgaggccaccggcaaccugguggugcccagauacgccuucgccauggagagaaacgccggcagcggcaucaucaucagcgacacccccgugcacgacugcaacaccaccugccagacccccaagggcgccaucaacaccagccugcccuuccagaacgugcaccccaucaccaucggcaagugccccaaguacgugaagagcaccaagcugagacuggccaccggccugagaaacgugcccagcauccagagcagaggccuguucggcgccaucgccggcuucaucgagggcggcuggaccggcaugguggacggcugguacggcuaccaccaccagaacgagcagggcagcggcuacgccgccgaccugaagagcacccagaacgccaucgacgagaucaccaacaaggugaacagcgugaucgagaagaugaacacccaguucaccgccgugggcaaggaguucaaccaccuggagaagagaaucgagaaccugaacaagaagguggacgacggcuuccuggacaucuggaccuacaacgccgagcugcuggugcugcuggagaacgagagaacccuggacuaccacgacagcaacgugaagaaccuguacgagaaggugagaagccagcugaagaacaacgccaaggagaucggcaacggcugcuucgaguucuaccacaagugcgacaacaccugcauggagagcgugaagaacggcaccuacgacuaccccaaguacagcgaggaggccaagcugaacagagaggagaucgacggcgugaagcuggagagcaccaagaucuaccagauccuggccaucuacagcaccguggccagcagccuggugcugguggugagccugggcgccaucagcuucuggaugugcagcaacggcagccugcagugcagaaucugcaucuga

SEQ ID NO: 165024 - RNA, 1701 nt, Artificial Sequence
  derived and/or modified CDS sequence (opt4) from hemagglutinin__InfluenzaA__ADG59675
augaaggccauccugguggugcugcuguacaccuucgccaccgccaacgccgacacccugugcaucggcuaccacgccaacaacagcaccgacaccguggacaccgugcuggagaagaacgugaccgugacccacagcgugaaccugcuggaggacaagcacaacggcaagcugugcaagcugagaggcguggccccccugcaccugggcaagugcaacaucgccggcuggauccugggcaaccccgagugcgagagccugagcaccgccagcagcuggagcuacaucguggagaccagcagcagcgacaacggcaccugcuaccccggcgacuucaucgacuacgaggagcugagagagcagcugagcagcgugagcagcuucgagagauucgagaucuuccccaagaccagcagcuggcccaaccacgacagcaacaagggcgugaccgccgccugcccccacgccggcgccaagagcuucuacaagaaccugaucuggcuggugaagaagggcaacagcuaccccaagcugagcaagagcuacaucaacgacaagggcaaggaggugcuggugcuguggggcauccaccaccccagcaccagcgccgaccagcagagccuguaccagaacgccgacgccuacguguucgugggcagcagcagauacagcaagaaguucaagcccgagaucgccaucagacccaaggugagagaccaggagggcagaaugaacuacuacuggacccugguggagcccggcgacaagaucaccuucgaggccaccggcaaccugguggugcccagauacgccuucgccauggagagaaacgccggcagcggcaucaucaucagcgacacccccgugcacgacugcaacaccaccugccagacccccaacggcgccaucaacaccagccugcccuuccacaacauccaccccaucaccaucggcaagugccccaaguacgugaagagcaccaagcugagacuggccaccggccugagaaacgugcccagcauccagagcagaggccuguucggcgccaucgccggcuucaucgagggcggcuggaccggcaugguggacggcugguacggcuaccaccaccagaacgagcagggcagcggcuacgccgccgaccugaagagcacccagaacgccaucgacgagaucaccaacaaggugaacagcgugaucgagaagaugaacacccaguucaccgccgugggcaaggaguucaaccaccuggagaagagaaucgagaaccugaacaagaagguggacgacggcuuccuggacaucuggaccuacaacgccgagcugcuggugcugcuggagaacgagagaacccuggacuaccacgacagcaacgugaagaaccuguacgagaaggugagaagccagcugaagaacaacgccaaggagaucggcaacggcugcuucgaguucuaccacaagugcgacaacaccugcauggagagcgugaagaacggcaccuacgacuaccccaaguacagcgaggaggccaagcugaacagagaggagaucgacggcgugaagcuggagagcaccagaaucuaccagauccuggccaucuacagcaccguggccagcagccuggugcugguggugagccugggcgccaucagcuucuggaugugcagcaacggcagccugcagugcagaaucugcaucuga

SEQ ID NO: 165025 - RNA, 1701 nt, Artificial Sequence
  derived and/or modified CDS sequence (opt4) from hemagglutinin__InfluenzaA__ADG59676
augaaggccauccugguggugcugcuguacaccuucgccaccgccaacgccgacacccugugcaucggcuaccacgccaacaacagcaccgacaccguggacaccgugcuggagaagaacgugaccgugacccacagcgugaaccugcuggaggacaagcacaacggcaagcugugcaagcugagaggcguggccccccugcaccugggcaagugcaacaucgccggcuggauccugggcaaccccgagugcgagagccugagcaccgccagcagcuggagcuacaucguggagaccagcagcagcgacaacggcaccugcuaccccggcgacuucaucgacuacgaggagcugagagagcagcugagcagcgugagcagcuucgagagauucgagaucuuccccaagaccagcagcuggcccaaccacgacagcaacaagggcgugaccgccgccugcccccacgccggcgccaagagcuucuacaagaaccugaucuggcuggugaagaagggcaacagcuaccccaagcugagcaagagcuacaucaacgacaagggcaaggaggugcuggugcuguggggcauccaccaccccagcaccagcgccgaccagcagagccuguaccagaacgccgacgccuacguguucgugggcaccagcagauacagcaagaaguucaagcccgagaucgccaucagacccaaggugagagaccaggagggcagaaugaacuacuacuggacccugguggagcccggcgacaagaucaccuucgaggccaccggcaaccugguggugcccagauacgccuucgccauggagagaaacgccggcagcggcaucaucaucagcgacacccccgugcacgacugcaacgccaccugccagacccccaagggcgccaucaacaccagccugcccuuccagaacauccaccccaucaccaucggcaagugccccaaguacgugaagagcaccaagcugagacuggccaccggccugagaaacauccccagcauccagagcagaggccuguucggcgccaucgccggcuucaucgagggcggcuggaccggcaugguggacggcugguacggcuaccaccaccagaacgagcagggcagcggcuacgccgccgaccugaagagcacccagaacgccaucgacgagaucaccaacaaggugaacagcgugaucgagaagaugaacacccaguucaccgccgugggcaaggaguucaaccaccuggagaagagaaucgagaaccugaacaagaagguggacgacggcuuccuggacaucuggaccuacaacgccgagcugcuggugcugcuggagaacgagagaacccuggacuaccacgacagcaacgugaagaaccuguacgagaaggugagaagccagcugaagaacaacgccaaggagaucggcaacggcugcuucgaguucuaccacaagugcgacaacaccugcauggagagcgugaagaacggcaccuacgacuaccccaaguacagcgaggaggccaagcugaacagagaggagaucgacggcgugaagcuggagagcaccagaaucuaccagauccuggccaucuacagcaccguggccagcagccuggugcugguggugagccugggcgccaucagcuucuggaugugcagcaacggcagccugcagugcagaaucugcaucuga

SEQ ID NO: 165026 - RNA, 1701 nt, Artificial Sequence; identical to SEQ ID NO: 163830
  derived and/or modified CDS sequence (opt4) from hemagglutinin__InfluenzaA__ADG59678

SEQ ID NO: 165027 - RNA, 1701 nt, Artificial Sequence; identical to SEQ ID NO: 164993
  derived and/or modified CDS sequence (opt4) from hemagglutinin__InfluenzaA__ADG59680

SEQ ID NO: 165028 - RNA, 1701 nt, Artificial Sequence; identical to SEQ ID NO: 164993
  derived and/or modified CDS sequence (opt4) from hemagglutinin__InfluenzaA__ADG59681

SEQ ID NO: 165029 - RNA, 1701 nt, Artificial Sequence
  derived and/or modified CDS sequence (opt4) from hemagglutinin__InfluenzaA__ADG59683
augaaggccauccugguggugcugcuguacaccuucgccaucgccaacgccgacacccugugcaucggcuaccacgccaacaacagcaccgacaccguggacaccgugcugaagaagaacgugaccgugacccacagcgugaaccugcuggaggacaagcacaacggcaagcugugcaagcugagaggcguggccccccugcaccugggcaagugcaacaucgccggcuggauccugggcaaccccgagugcgagagccugagcaccgccagcagcuggagcuacaucguggagaccagcagcagcgacaacggcaccugcuaccccggcgacuucaucgacuacgaggagcugagagagcagcugagcagcgugagcagcuucgagagauucgagaucuuccccaagaccagcagcuggcccaaccacgacagcaacaagggcgugaccgccgccugcccccacgccggcgccaagagcuucuacaagaaccugaucuggcuggugaagaagggcaacagcuaccccaagcugagcaagagcuacaucaacgacaagggcaaggaggugcuggugcuguggggcauccaccaccccagcaccagcgccgaccagcagagccuguaccagaacgccgacgccuacguguucgugggcaccagcagauacagcaagaaguucaagcccgagaucgccaucagacccaaggugagagaccaggagggcagaaugaacuacuacuggacccugguggagcccggcgacaagaucaccuucgaggccaccggcaaccugguggugcccagauacgccuucgccauggagagaaacgccggcagcggcaucgugaucagcgacacccccgugcacgacugcaacaccaccugccagacccccaagggcgccaucaacaccagccugcccuuccagaacauccaccccaucaccaucggcaagugccccaaguacgugaagagcaccaagcugagacuggccaccggccugagaaacgugcccagcauccagagcagaggccuguucggcgccaucgccggcuucaucgagggcggcuggaccggcaugguggacggcugguacggcuaccaccaccagaacgagcagggcagcggcuacgccgccgaccugaagagcacccagaacgccaucgacgagaucaccaacaaggugaacagcgugaucgagaagaugaacacccaguucaccgccgugggcaaggaguucaaccaccuggagaagagaaucgagaaccugaacaagaagguggacgacggcuuccuggacaucuggaccuacaacgccgagcugcuggugcugcuggagaacgagagaacccuggacuaccacgacagcaacgugaagaaccuguacgagaaggugagaagccagcugaagaacaacgccaaggagaucggcaacggcugcuucgaguucuaccacaagugcgacaacaccugcauggagagcgugaagaacggcaccuacgacuaccccaaguacagcgaggaggccaagcugaacagagaggagaucgacggcgugaagcuggagagcaccagaaucuaccagauccuggccaucuacagcaccguggccagcagccuggugcugguggugagccugggcgccaucagcuucuggaugugcagcaacggcagccugcagugcagaaucugcaucuga

SEQ ID NO: 165030 - RNA, 1701 nt, Artificial Sequence; identical to SEQ ID NO: 163830
  derived and/or modified CDS sequence (opt4) from hemagglutinin__InfluenzaA__ADG59684

SEQ ID NO: 165031 - RNA, 1701 nt, Artificial Sequence
  derived and/or modified CDS sequence (opt4) from hemagglutinin__InfluenzaA__ADG59685
augaaggccauccugguggugcugcuguacaccuucgccaccgccaacgccgacacccugugcaucggcuaccacgccaacaacagcaccgacaccaucgacaccgugcuggagaagaacgugaccgugacccacagcgugaaccugcuggaggacaagcacaacggcaagcugugcaagcugagaggcguggccccccugcaccugggcaagugcaacaucgccggcuggauccugggcaaccccgagugcgagagccugagcaccgccagcagcuggagcuacaucguggagaccagcagcagcgacaacggcaccugcuaccccggcgacuucaucgacuacgaggagcugagagagcagcugagcagcgugagcagcuucgagagauucgagaucuuccccaagaccagcagcuggcccaaccacgacagcaacaagggcgugaccgccgccugcccccacgccggcgccaagagcuucuacaagaaccugaucuggcuggugaagaagggcaacagcuaccccaagcugagcaagagcuacaucaacgacaagggcaaggaggugcuggugcuguggggcauccaccaccccagcaccagcgccgaccagcagagccuguaccagaacgccgacgccuacguguucgugggcaccagcagauacagcaagaaguucaagcccgagaucgccaucagacccaaggugagagaccaggagggcagaaugaacuacuacuggacccugguggagcccggcgacaagaucaccuucgaggccaccggcaaccugguggugcccagauacgccuucgccauggagagaaacgccggcagcggcaucaucaucagcgacacccccgugcacgacugcaacaccaccugccagacccccaagggcgccaucaacaccagccugcccuuccagaacauccaccccaucaccaucggcaagugccccaaguacgugaagagcaccaagcugagacuggccaccggccugagaaacauccccagcauccagagcagaggccuguucggcgccaucgccggcuucaucgagggcggcuggaccggcaugguggacggcugguacggcuaccaccaccagaacgagcagggcagcggcuacgccgccgaccugaagagcacccagaacgccaucgacgagaucaccaacaaggugaacagcgugaucgagaagaugaacacccaguucaccgccgugggcaaggaguucaaccaccuggagaagagaaucgagaaccugaacaagaagguggacgacggcuuccuggacaucuggaccuacaacgccgagcugcuggugcugcuggagaacgagagaacccuggacuaccacgacagcaacgugaagaaccuguacgagaaggugagaagccagcugaagaacaacgccaaggagaucggcaacggcugcuucgaguucuaccacaagugcgacaacaccugcauggagagcgugaagaacggcaccuacgacuaccccaaguacagcgaggaggccaagcugaacagagaggagaucgacggcgugaagcuggagagcaccagaaucuaccagauccuggccaucuacagcaccguggccagcagccuggugcugguggugagccugggcgccaucagcuucuggaugugcagcaacggcagccugcagugcagaaucugcaucuga

SEQ ID NO: 165032 - RNA, 1701 nt, Artificial Sequence; identical to SEQ ID NO: 163830
  derived and/or modified CDS sequence (opt4) from hemagglutinin__InfluenzaA__ADG59686

SEQ ID NO: 165033 - RNA, 1701 nt, Artificial Sequence; identical to SEQ ID NO: 164993
  derived and/or modified CDS sequence (opt4) from hemagglutinin__InfluenzaA__ADG59687

SEQ ID NO: 165034 - RNA, 1701 nt, Artificial Sequence
  derived and/or modified CDS sequence (opt4) from hemagglutinin__InfluenzaA__ADG59688
augaaggccauccugguggugcugcuguacaccaucgccaccgccaacgccgacacccugugcaucggcuaccacgccaacaacagcaccgacaccaucgacaccgugcuggagaagaacgugaccgugacccacagcgugaaccugcuggaggacaagcacaacggcaagcugugcaagcugagaggcguggccccccugcaccugggcaagugcaacaucgccggcuggauccugggcaaccccgagugcgagagccugagcaccgccagcagcuggagcuacaucguggagaccagcagcagcgacaacggcaccugcuaccccggcgacuucaucgacuacgaggagcugagagagcagcugagcagcgugagcagcuucgagagauucgagaucuuccccaagaccagcagcuggcccaaccacgacagcaacaagggcgugaccgccgccugcccccacgccggcgccaagagcuucuacaagaaccugaucuggcuggugaagaagggcaacagcuaccccaagcugagcaagagcuacaucaacgacaagggcaaggaggugcuggugcuguggggcauccaccaccccagcaccagcgccgaccagcagagccuguaccagaacgccgacgccuacguguucgugggcaccagcagauacagcaagaaguucaagcccgagaucgccaucagacccaaggugagaggccaggagggcagaaugaacuacuacuggacccugguggagcccggcgacaagaucaccuucgaggccaccggcaaccugguggugcccagauacgccuucgccauggagagaaacgccggcagcggcaucaucaucagcgacacccccgugcacgacugcaacaccaccugccagacccccaagggcgccaucaacaccagccugcccuuccagaacauccaccccaucaccaucggcaagugccccaaguacgugaagagcaccaagcugagacuggccaccggccugagaaacauccccagcauccagagcagaggccuguucggcgccaucgccggcuucaucgagggcggcuggaccggcaugguggacggcugguacggcuaccaccaccagaacgagcagggcagcggcuacgccgccgaccugaagagcacccagaacgccaucgacgagaucaccaacaaggugaacagcgugaucgagaagaugaacacccaguucaccgccgugggcaaggaguucaaccaccuggagaagagaaucgagaaccugaacaagaagguggacgacggcuuccuggacaucuggaccuacaacgccgagcugcuggugcugcuggagaacgagagaacccuggacuaccacgacagcaacgugaagaaccuguacgagaaggugagaagccagcugaagaacaacgccaaggagaucggcaacggcugcuucgaguucuaccacaagugcgacaacaccugcauggagagcgugaagaacggcaccuacgacuaccccaaguacagcgaggaggccaagcugaacagagaggagaucgacggcgugaagcuggagagcaccagaaucuaccagauccuggccaucuacagcaccguggccagcagccuggugcugguggugagccugggcgccaucagcuucuggaugugcagcaacggcagccugcagugcagaaucugcaucuga

SEQ ID NO: 165035 - RNA, 1701 nt, Artificial Sequence; identical to SEQ ID NO: 162729
  derived and/or modified CDS sequence (opt4) from hemagglutinin__InfluenzaA__ADG59689

SEQ ID NO: 165036 - RNA, 1701 nt, Artificial Sequence; identical to SEQ ID NO: 162729
  derived and/or modified CDS sequence (opt4) from hemagglutinin__InfluenzaA__ADG59691

SEQ ID NO: 165037 - RNA, 1701 nt, Artificial Sequence
  derived and/or modified CDS sequence (opt4) from hemagglutinin__InfluenzaA__ADG59693
augaaggccauccugguggugcugcuguacaccuucgccaccgccaacgccgacacccugugcaucggcuaccacgccaacaacagcaccgacaccguggacaccgugcuggagaagaacgugaccgugacccacagcgugaaccugcuggaggacaagcacaacggcaagcugugcaagcugagaggcguggccccccugcaccugggcaagugcaacaucgccggcuggauccugggcaaccccgagugcgagagccugagcaccgccagcagcuggagcuacaucguggagaccagcagcagcgacaacggcaccugcuaccccggcgacuucaucgacuacgaggagcugagagagcagcugagcagcgugagcagcuucgagagauucgagaucuuccccaagaccagcagcuggcccaaccacgacagcaacaagggcgugaccgccgccugcccccacgccggcgccaagagcuucuacaagaaccugaucuggcuggugaagaagggcaacagcuaccccaagcugagcaagagcuacaucaacgacaagggcaaggaggugcuggugcuguggggcauccaccaccccagcaccagcgccgaccagcagagccuguaccagaacgccgacgccuacguguucgugggcaccagcagauacagcaagaaguucaagcccgagaucgccaucagacccaaggugagaaaccaggagggcagaaugaacuacuacuggacccugguggagcccggcgacaagaucaccuucgaggccaccggcaaccugguggugcccagauacgccuucgccauggagagaaacgccggcagcggcaucaucaucagcgacacccccgugcacgacugcaacaccaccugccagacccccaagggcgccaucaacaccagccugcccuuccagaacauccaccccaucaccaucggcaagugccccaaguacgugaagagcaccaagcugagacuggccaccggccugagaaacauccccagcauccagagcagaggccuguucggcgccaucgccggcuucaucgagggcggcuggaccggcaugguggacggcugguacggcuaccaccaccagaacgagcagggcagcggcuacgccgccgaccugaagagcacccagaacgccaucgacgagaucaccaacaaggugaacagcgugaucgagaagaugaacacccaguucaccgccgugggcaaggaguucaaccaccuggagaagagaaucgagaaccugaacaagaagguggacgacggcuuccuggacaucuggaccuacaacgccgagcugcuggugcugcuggagaacgagagaacccuggacuaccacgacagcaacgugaagaaccuguacgagaaggugagaagccagcugaagaacaacgccaaggagaucggcaacggcugcuucgaguucuaccacaagugcgacaacaccugcauggagagcgugaagaacggcaccuacgacuaccccaaguacagcgaggaggccaagcugaacagagaggagaucgacggcgugaagcuggagagcaccagaaucuaccagauccuggccaucuacagcaccguggccagcagccuggugcugguggugagccugggcgccaucagcuucuggaugugcagcaacggcagccugcagugcagaaucugcaucuga

SEQ ID NO: 165038 - RNA, 1701 nt, Artificial Sequence
  derived and/or modified CDS sequence (opt4) from hemagglutinin__InfluenzaA__ADG59696
augaaggccauccugguggugcugcuguacaccuucgccaccgccaacgccgacacccugugcaucggcuaccacgccaacaacagcaccgacaccguggacaccgugcuggagaagaacgugaccgugacccacagcgugaaccugcuggaggacaagcacaacggcaagcugugcaagcugagaggcguggccccccugcaccugggcaagugcaacaucgccggcuggauccugggcaaccccgagugcgagagccugagcaccgccagcagcuggagcuacaucguggagaccagcagcagcgacaacggcaccugcuaccccggcgacuucaucgacuacgaggagcugagagagcagcugagcagcgugagcagcuucgagagauucgagaucuuccccaagaccagcagcuggcccaaccacgacagcaacaagggcgugaccgccgccugcccccacgccggcgccaagagcuucuacaagaaccugaucuggcuggugaagaagggcaacagcuaccccaagcugagcaagagcuacaucaacgacaagggcaaggaggugcuggugcuguggggcauccaccaccccagcaccagcgccgaccagcagagccuguaccagaacgccgacgccuacguguucgugggcaccagcagauacagcaagaaguucaagcccgagaucgccaucagacccaaggugagagagcaggagggcagaaugaacuacuacuggacccugguggagcccggcgacaagaucaccuucgaggccaccggcaaccugguggugcccagauacgccuucgccauggagagagacgccggcagcggcaucaucaucagcgacacccccgugcacgacugcaacaccaccugccagacccccaagggcgccaucaacaccagccugcccuuccagaacauccaccccaucaccaucggcaagugccccaaguacgugaagagcaccaagcugagacuggccaccggccugagaaacgugcccagcauccagagcagaggccuguucggcgccaucgccggcuucaucgagggcggcuggaccggcaugguggacggcugguacggcuaccaccaccagaacgagcagggcagcggcuacgccgccgaccugaagagcacccagaacgccaucgacgagaucaccaacaaggugaacagcgugaucgagaagaugaacacccaguucaccgccgugggcaaggaguucaaccaccuggagaagagaaucgagaaccugaacaagaagguggacgacggcuuccuggacaucuggaccuacaacgccgagcugcuggugcugcuggagaacgagagaacccuggacuaccacgacagcaacgugaagaaccuguacgagaaggugagaagccagcugaagaacaacgccaaggagaucggcaacggcugcuucgaguucuaccacaagugcgacaacaccugcauggagagcgugaagaacggcaccuacgacuaccccaaguacagcgaggaggccaagcugaacagagaggagaucgacggcgugaagcuggagagcaccagaaucuaccagauccuggccaucuacagcaccguggccagcagccuggugcugguggugagccugggcgccaucagcuucuggaugugcagcaacggcagccugcagugcagaaucugcaucuga

SEQ ID NO: 165039 - RNA, 1701 nt, Artificial Sequence
  derived and/or modified CDS sequence (opt4) from hemagglutinin__InfluenzaA__ADG59697
augaaggccauccugguggugcugcuguacaccuucgccaccgccaacgccgacacccugugcaucggcuaccacgccaacaacagcaccgacaccguggacaccgugcuggagaagaacgugaccgugacccacagcgugaaccugcuggaggacaagcacaacggcaagcugugcaagcugagaggcguggccccccugcaccugggcaagugcaacaucgccggcuggauccugggcaaccccgagugcgagagccugagcaccgccagcagcuggagcuacaucguggagaccagcagcagcgacaacggcaccugcuaccccggcgacuucaucgacuacgaggagcugagagagcagcugagcagcgugagcagcuucgagagauucgagaucuuccccaagaccagcagcuggcccaaccacgacagcaacaagggcgugaccgccgccugcccccacgccggcgccaagaacuucuacaagaaccugaucuggcuggugaagaagggcaacagcuaccccaagcugagcaagagcuacaucaacgacaagggcaaggaggugcuggugcuguggggcauccaccaccccagcaccagcgccgaccagcagagccuguaccagaacgccgacgccuacguguucgugggcaccagcagauacagcaagaaguucaagcccgagaucgccaucagacccaaggugagaggccaggagggcagaaugaacuacuacuggacccugguggagcccggcgacaagaucaccuucgaggccaccggcaaccugguggugcccagauacgccuucgccauggagagaaacgccggcagcggcaucaucaucagcgacacccccgugcacgacugcaacaccaccugccagacccccaagggcgccaucaacaccagccugcccuuccagaacauccaccccaucaccaucggcaagugccccaaguacgugaagagcaccaagcugagacuggccaccggccugagaaacgugcccagcauccagagcagaggccuguucggcgccaucgccggcuucaucgagggcggcuggaccggcaugguggacggcugguacggcuaccaccaccagaacgagcagggcagcggcuacgccgccgaccugaagagcacccagaacgccaucgacgagaucaccaacaaggugaacagcgugaucgagaagaugaacacccaguucaccgccgugggcaaggaguucaaccaccuggagaagagaaucgagaaccugaacaagaagguggacgacggcuuccuggacaucuggaccuacaacgccgagcugcuggugcugcuggagaacgagagaacccuggacuaccacgacagcaacgugaagaaccuguacgagaaggugagaagccagcugaagaacaacgccaaggagaucggcaacggcugcuucgaguucuaccacaagugcgacaacaccugcauggagagcgugaagaacggcaccuacgacuaccccaaguacagcgaggaggccaagcugaacagagaggagaucgacggcgugaagcuggagagcaccagaaucuaccagauccuggccaucuacagcaccguggccagcagccuggugcugguggugagccugggcgccaucagcuucuggaugugcagcaacggcagccugcagugcagaaucugcaucuga

SEQ ID NO: 165040 - RNA, 1701 nt, Artificial Sequence
  derived and/or modified CDS sequence (opt4) from hemagglutinin__InfluenzaA__ADG59700
augaaggccauccugguggugcugcuguacaccuucgccaccgccaacgccgacacccugugcaucggcuaccacgccaacaacagcaccgacaccguggacaccgugcuggagaagaacgugaccgugacccacagcgugaaccugcuggaggacaagcacaacggcaagcugugcaagcugagaggcguggccccccugcaccugggcaagugcaacaucgccggcuggauccugggcaaccccgagugcgagagccugagcaccgccagcagcuggagcuacaucguggagaccagcagcagcgacaacggcaccugcuaccccggcgacuucaucgacuacgaggagcugagagagcagcugagcagcgugagcagcuucgagagauucgagaucuuccccaagaccagcagcuggcccaaccacgacagcaacaagggcgugaccgccgccugcccccacgccggcgccaagagcuucuacaagaaccugaucuggcuggugaagaagggcaacagcuaccccaagcugagcaagagcuacaucaacgacaagggcaaggaggugcuggugcuguggggcauccaccaccccagcaccagcgccgaccagcagagccuguaccagaacgccgacgccuacguguucgugggcaccagcagauacagcaagaaguucaagcccgagaucgccaucagacccaaggugagagaccaggagggcagaaugaacuacuacuggacccugguggagcccggcgacaagaucaccuucgaggccaccggcaaccugguggugcccagauacgccuucgccauggagagaaacgccggcagcggcaucaucaucagcgacacccccgugcacgacugcaacaccaccugccagacccugaagggcgccaucaacaccagccugcccuuccagaacauccaccccaucaccaucggcaagugccccaaguacgugaagagcaccaagcugagacuggccaccggccugagaaacauccccagcauccagagcagaggccuguucggcgccaucgccggcuucaucgagggcggcuggaccggcaugguggacggcugguacggcuaccaccaccagaacgagcagggcagcggcuacgccgccgaccugaagagcacccagaacgccaucgacgagaucaccaacaaggugaacagcgugaucgagaagaugaacacccaguucaccgccgugggcaaggaguucaaccaccuggagaagagaaucgagaaccugaacaagaagguggacgacggcuuccuggacaucuggaccuacaacgccgagcugcuggugcugcuggagaacgagagaacccuggacuaccacgacagcaacgugaagaaccuguacgagaaggugagaagccagcugaagaacaacgccaaggagaucggcaacggcugcuucgaguucuaccacaagugcgacaacaccugcauggagagcgugaagaacggcaccuacgacuaccccaaguacagcgaggaggccaagcugaacagagaggagaucgacggcgugaagcuggagagcaccagaaucuaccagauccuggccaucuacagcaccguggccagcagccuggugcugguggugagccugggcgccaucagcuucuggaugugcagcaacggcagccugcagugcagaaucugcaucuga

SEQ ID NO: 165041 - RNA, 1701 nt, Artificial Sequence
  derived and/or modified CDS sequence (opt4) from hemagglutinin__InfluenzaA__ADG59701
augaaggccauccugguggugcugcuguacaccuucgccgccgccaacgccgacacccugugcaucggcuaccacgccaacaacagcaccgacaccguggacaccgugcuggagaagaacgugaccgugacccacagcgugaaccugcuggaggacaagcacaacggcaagcugugcaagcugagaggcguggccccccugcaccugggcaagugcaacaucgccggcuggauccugggcaaccccgagugcgagagccugagcaccgccagcagcuggagcuacaucguggagaccagcagcagcgacaacggcaccugcuaccccggcgacuucaucgacuacgaggagcugagagagcagcugagcagcgugagcagcuucgagagauucgagaucuuccccaagaccagcagcuggcccaaccacgacagcaacaagggcgugaccgccgccugcccccacgccggcgccaagagcuucuacaagaaccugaucuggcuggugaagaagggcaacagcuaccccaagcugagcaagagcuacaucaacgacaagggcaaggaggugcuggugcuguggggcauccaccaccccagcaccagcgccgaccagcagagccuguaccagaacgccgacgccuacguguucgugggcaccagcagauacagcaagaaguucaagcccgagaucgccaucagacccaaggugagagaccaggagggcagaaugaacuacuacuggacccugguggagcccggcgacaagaucaccuucgaggccaccggcaaccugguggugcccagauacgccuucgccauggagagaaacgccggcagcggcaucaucaucagcgacacccccgugcacgacugcaacaccaccugccagacccccaagggcgccaucaacaccagccugcccuuccagaacauccaccccaucaccaucggcaagugccccaaguacgugaagagcaccaagcugagacuggccaccggccugagaaacgugcccagcauccagagcagaggccuguucggcgccaucgccggcuucaucgagggcggcuggaccggcaugguggacggcugguacggcuaccaccaccagaacgagcagggcagcggcuacgccgccgaccugaagagcacccagaacgccaucgacaagaucaccaacaaggugaacagcgugaucgagaagaugaacacccaguucaccgccgugggcaaggaguucaaccaccuggagaagagaaucgagaaccugaacaagaagguggacgacggcuuccuggacaucuggaccuacaacgccgagcugcuggugcugcuggagaacgagagaacccuggacuaccacgacagcaacgugaagaaccuguacgagaaggugagaagccagcugaagaacaacgccaaggagaucggcaacggcugcuucgaguucuaccacaagugcgacaacaccugcauggagagcgugaagaacggcaccuacgacuaccccaaguacagcgaggaggccaagcugaacagagaggagaucgacggcgugaagcuggagagcaccagaaucuaccagauccuggccaucuacagcaccguggccagcagccuggugcugguggugagccugggcgccaucagcuucuggaugugcagcaacggcagccugcagugcagaaucugcaucuga

SEQ ID NO: 165042 - RNA, 1701 nt, Artificial Sequence
  derived and/or modified CDS sequence (opt4) from hemagglutinin__InfluenzaA__ADG59702
augaaggccauccugguggugcugcuguacaccuucgccaccgccaacgccgacacccugugcaucggcuaccacgccaacaacagcaccgacaccguggacaccgugcuggagaagaacgugaccgugacccacagcgugaaccugcuggaggacaagcacaacggcaagcugugcaagcugagaggcguggccccccugcaccugggcaagugcaacaucgccggcuggauccugggcaaccccgagugcgagagccugagcaccgccagcagcuggagcuacaucguggagaccagcagcagcgacaacggcaccugcuaccccggcgacuucaucgacuacgaggagcugagagagcagcugagcagcgugagcagcuucgagagauucgagaucuuccccaagaccagcagcuggcccaaccacgacagcaacaagggcgugaccgccgccugcccccacgccggcgccaagagcuucuacaagaaccugaucuggcuggugaagaagggcaacagcuaccccaagcugagcaagagcuacaucaacgacaagggcaaggaggugcuggugcuguggggcauccaccaccccagcaccagcgccgaccagcagagccuguaccagaacgccgacgccuacguguucgugggcaccagcagauacagcaagaaguucaagcccgagaucgccaucagacccaaggugagagaccaggagggcagaaugaacuacuacuggacccugguggagcccggcgacaagaucaccuucgaggccaccggcaaccugguggugcccagauacgccuucgccauggagagaaacgccggcagcggcaucaucaucagcgacacccccgugcacgacugcaacaccaccugccagacccccaagggcgccaucaacaccagccugcccuuccagaacauccaccccaucaccaucggcaagugccccaaguacgugaagagcaccaagcugagacuggccaccggccugagaaacauccccagcauccagagcagaggccuguucggcgccaucgccggcuucaucgagggcggcuggaccggcaugguggacggcugguacggcuaccaccaccagaacgagcagggcagcggcuacgccgccgaccugaagagcacccagaacgccaucgacgagaucaccaacaaggugaacagcgugaucgagaagaugaacacccaguucaccgccgugggcaaggaguucaaccaccuggagaagagaaucgagaaccugaacaagaagguggacgacggcuuccuggacaucuggaccuacaacgccgagcugcuggugcugcuggagaacgagagaaaccuggacuaccacgacagcaacgugaagaaccuguacgagaaggugagaagccagcugaagaacaacgccaaggagaucggcaacggcugcuucgaguucuaccacaagugcgacaacaccugcauggagagcgugaagaacggcaccuacgacuaccccaaguacagcgaggaggccaagcugaacagagaggagaucgacggcgugaagcuggagagcaccagaaucuaccagauccuggccaucuacagcaccguggccagcagccuggugcugguggugagccugggcgccaucagcuucuggaugugcagcaacggcagccugcagugcagaaucugcaucuga

SEQ ID NO: 165043 - RNA, 1701 nt, Artificial Sequence
  derived and/or modified CDS sequence (opt4) from hemagglutinin__InfluenzaA__ADG59703
augaaggccauccugguggugcugcuguacaccuucgccaccgccaacgccgacacccugugcaucggcuaccacgccaacaacagcaccgacaccguggacaccgugcuggagaagaacgugaccgugacccacagcgugaaccugcuggaggacaagcacaacggcaagcugugcaagcugagaggcguggccccccugcaccugggcaagugcaacaucgccggcuggauccugggcaaccccgagugcgagagccugagcaccgccagcagcuggagcuacaucguggagaccagcagcagcgacaacggcaccugcuaccccggcgacuucaucgacuacgaggagcugagagagcagcugagcagcgugagcagcuucgagagauucgagaucuuccccaagaccagcagcuggcccaaccacgaccccaacaagggcgugaccgccgccugcccccacgccggcgccaagagcuucuacaagaaccugaucuggcuggugaagaagggcaacagcuaccccaagcugagcaagagcuacaucaacgacaagggcaaggaggugcuggugcuguggggcauccaccaccccagcaccagcgccgaccagcagagccuguaccagaacgccgacgccuacguguucgugggcaccagcagauacagcaagaaguucaagcccgagaucgccaucagacccaaggugagagaccaggagggcagaaugaacuacuacuggacccugguggagcccggcgacaagaucaccuucgaggccaccggcaaccugguggugcccagauacgccuucgccauggagagaaacgccggcagcggcaucgugaucagcgacacccccgugcacgacugcaacaccaccugccagacccccaagggcgccaucaacaccagccugcccuuccagaacauccaccccaucaccaucggcaagugccccaaguacgugaagagcaccaagcugagacuggccaccggccugagaaacgugcccagcauccagagcagaggccuguucggcgccaucgccggcuucaucgagggcggcuggaccggcaugguggacggcugguacggcuaccaccaccagaacgagcagggcagcggcuacgccgccgaccugaagagcacccagaacgccaucgacgagaucaccaacaaggugaacagcgugaucgagaagaugaacacccaguucaccgccgugggcaaggaguucaaccaccuggagaagagaaucgagaaccugaacaagaagguggacgacggcuuccuggacaucuggaccuacaacgccgagcugcuggugcugcuggagaacgagagaacccuggacuaccacgacagcaacgugaagaaccuguacgagaaggugagaagccagcugaagaacaacgccaaggagaucggcaacggcugcuucgaguucuaccacaagugcgacaacaccugcauggagagcgugaagaacggcaccuacgacuaccccaaguacagcgaggaggccaagcugaacagagaggagaucgacggcgugaagcuggagagcaccagaaucuaccagauccuggccaucuacagcaccguggccagcagccuggugcugguggugagccugggcgccaucagcuucuggaugugcagcaacggcagccugcagugcagaaucugcaucuga

SEQ ID NO: 165044 - RNA, 1701 nt, Artificial Sequence; identical to SEQ ID NO: 162744
  derived and/or modified CDS sequence (opt4) from hemagglutinin__InfluenzaA__ADG76646

SEQ ID NO: 165045 - RNA, 1701 nt, Artificial Sequence
  derived and/or modified CDS sequence (opt4) from hemagglutinin__InfluenzaA__ADG76652
augaaggccauccugguggugcugcuguacaccuucgccaccgccaacgccgacacccugugcaucggcuaccacgccaacaacagcaccgacaccguggacaccgugcuggagaagaacgugaccgugacccacagcgugaaccugcuggaggacaagcacaacggcaagcugugcaagcugagaggcguggccccccugcaccugggcaagugcaacaucgccggcuggauccugggcaaccccgagugcgagagcuucagcaccagcagcagcuggagcuacaucguggagacccccagcagcgacaacggcaccugcuaccccggcgacuucaucgacuacgaggagcugagagagcagcugagcagcgugagcagcuucgagagauucgagaucuuccccaagaccagcagcuggcccaaccacgacagcaacaagggcgugaccgccgccugcccccacgccggcgccaagagcuucuacaagaaccugaucuggcuggugaagaagggcaacagcuaccccaagcugagcaagagcuacaucaacgacaagggcaaggaggugcuggugcuguggggcauccaccaccccagcaccagcgccgaccagcagagccuguaccagaacgccgacaccuacguguucgugggcagcagcagauacagcaagaaguucaagcccgagaucgccaucagacccaaggugagagaccaggagggcagaaugaacuacuacuggacccugguggagcccggcgacaagaucaccuucgaggccaccggcaaccugguggugcccagauacgccuucgccauggagagaaacgccggcagcggcaucaucaucagcgacacccccgugcacgacugcaacaccaccugccagacccccaagggcgccaucaacaccagccugcccuuccagaacauccaccccaucaccaucggcaagugccccaaguacgugaagagcaccaagcugagacuggccaccggccugagaaacauccccagcauccagagcagaggccuguucggcgccaucgccggcuucaucgagggcggcuggaccggcaugguggacggcugguacggcuaccaccaccagaacgagcagggcagcggcuacgccgccgaccugaagagcacccagaacgccaucgacgagaucaccaacaaggugaacagcgugaucgagaagaugaacacccaguucaccgccgugggcaaggaguucaaccaccuggagaagagaaucgagaaccugaacaagaagguggacgacggcuuccuggacaucuggaccuacaacgccgagcugcuggugcugcuggagaacgagagaacccuggacuaccacgacagcaacgugaagaaccuguacgagaaggugagaagccagcugaagaacaacgccaaggagaucggcaacggcugcuucgaguucuaccacaagugcgacaacaccugcauggagagcgugaagaacggcaccuacgacuaccccaaguacagcgaggaggccaagcugaacagagaggagaucgacggcgugaagcuggagagcaccagaaucuaccagauccuggccaucuacagcaccguggccagcagccuggugcugguggugagccugggcgccaucagcuucuggaugugcagcaacggcagccugcagugcagaaucugcaucuga

SEQ ID NO: 165046 - RNA, 1701 nt, Artificial Sequence; identical to SEQ ID NO: 162971
  derived and/or modified CDS sequence (opt4) from hemagglutinin__InfluenzaA__ADH01808

SEQ ID NO: 165047 - RNA, 1701 nt, Artificial Sequence
  derived and/or modified CDS sequence (opt4) from hemagglutinin__InfluenzaA__ADH01818
augaaggccauccugguggugcugcuguacaccuucgccaccgccaacgccgacacccugugcaucggcuaccacgccaacaacagcaccgacaccguggacaccgugcuggagaagaacgugaccgugacccacagcgugaaccugcuggaggacaagcacaacggcaagcugugcaagcugagaggcguggccccccugcaccugggcaagugcaacaucgccggcuggauccugggcaaccccgagugcgagagccugagcaccgccagcagcuggagcuacaucguggagaccagcagcagcgacaacggcaccugcuaccccggcgacuucaucgacuacgaggagcugagagagcagcugagcagcgugagcagcuucgagagauucgagaucuuccccaagaccagcagcuggcccaaccacgacagcaacaagggcgugaccgccgccugcccccacgccggcgccaagagcuucuacaagaaccugaucuggcuggugaagaagggcaacagcuaccccaagcugagcaagagcuacaucaacgacaagggcaaggaggugcuggugcuguggggcauccaccaccccagcaccagcgccgaccagcagagccuguaccagaacgccgacgccuacguguucgugggcaccagcagauacagcaagaaguucaagcccgagaucgccaucagacccaaggugagagaccaggagggcagaaugaacuacuacuggacccugguggagcccggcgacaagaucaccuucgaggccaccggcaaccugguggugcccagauacgccuucgccauggagagaaacgccggcagcggcaucaucaucagcgacacccccgugcacgacugcaacaccaccugccagacccccaagggcgccaucaacaccagccugcccuuccagaacauccaccccaucaccaucggcaagugccccaaguacgugaagagcaccaagcugagacuggccaccggccugagaaacgugcccagcauccagagcagaggccuguucggcgccaucgccggcuucaucgagggcggcuggaccggcaugguggacggcugguacggcuaccaccaccagaacgagcagggcagcggcuacgccgccgaccugaagagcacccagaacgccaucgacgagaucaccaacaaggugaacagcgugaucgagaagaugaacacccaguucaccgccgugggcaaggaguucaaccaccuggagaagagaaucgagaaccugaacaagaagguggacgacggcuuccuggacaucuggaccuacaacgccgagcugcuggugcugcuggagaacgagagaacccuggacuaccacgacagcaacgugaagaaccuguacgagaaggugagaagccagcugaagaacaacgccaaggagaucggcaacggcugcuucgaguucuaccacaagugcgacaacaccugcauggagagcgugaagaacggcaccuacgacuaccccaaguacagcgaggaggccaagcugaacagagaggagaucgacggcgugaagcuggagagcaccagaaucuaccagauccuggccaucuacagcaccguggccagcagccuggugcugaucgugagccugggcgccaucagcuucuggaugugcagcaacggcagccugcagugcagaaucugcaucuga

SEQ ID NO: 165048 - RNA, 1701 nt, Artificial Sequence; identical to SEQ ID NO: 162971
  derived and/or modified CDS sequence (opt4) from hemagglutinin__InfluenzaA__ADH01828

SEQ ID NO: 165049 - RNA, 1701 nt, Artificial Sequence; identical to SEQ ID NO: 162729
  derived and/or modified CDS sequence (opt4) from hemagglutinin__InfluenzaA__ADH01838

SEQ ID NO: 165050 - RNA, 1701 nt, Artificial Sequence; identical to SEQ ID NO: 162971
  derived and/or modified CDS sequence (opt4) from hemagglutinin__InfluenzaA__ADH01848

SEQ ID NO: 165051 - RNA, 1701 nt, Artificial Sequence; identical to SEQ ID NO: 162971
  derived and/or modified CDS sequence (opt4) from hemagglutinin__InfluenzaA__ADH01858

SEQ ID NO: 165052 - RNA, 1701 nt, Artificial Sequence; identical to SEQ ID NO: 162729
  derived and/or modified CDS sequence (opt4) from hemagglutinin__InfluenzaA__ADH01868

SEQ ID NO: 165053 - RNA, 1701 nt, Artificial Sequence; identical to SEQ ID NO: 162729
  derived and/or modified CDS sequence (opt4) from hemagglutinin__InfluenzaA__ADH01878

SEQ ID NO: 165054 - RNA, 1701 nt, Artificial Sequence; identical to SEQ ID NO: 162971
  derived and/or modified CDS sequence (opt4) from hemagglutinin__InfluenzaA__ADH01888

SEQ ID NO: 165055 - RNA, 1701 nt, Artificial Sequence; identical to SEQ ID NO: 162729
  derived and/or modified CDS sequence (opt4) from hemagglutinin__InfluenzaA__ADH01898

SEQ ID NO: 165056 - RNA, 1701 nt, Artificial Sequence; identical to SEQ ID NO: 162820
  derived and/or modified CDS sequence (opt4) from hemagglutinin__InfluenzaA__ADH01908

SEQ ID NO: 165057 - RNA, 1701 nt, Artificial Sequence
  derived and/or modified CDS sequence (opt4) from hemagglutinin__InfluenzaA__ADH01918
augaaggccauccugguggugcugcuguacaccuucgccaccgccaacgccgacacccugugcaucggcuaccacgccaacaacagcaccgacaccguggacaccgugcuggagaagaacgugaccgugacccacagcgugaaccugcuggaggacaagcacaacggcaagcugugcaagcugagaggcguggccccccugcaccugggcaagugcaacaucgccggcuggauccugggcaaccccgagugcgagagccugagcaccgagagcagcuggagcuacaucguggagaccagcagcagcgacaacggcaccugcuaccccggcgacuucaucgacuacgaggagcugagagagcagcugagcagcgugagcagcuucgagagauucgagaucuuccccaagaccagcagcuggcccaaccacgacagcaacaagggcgugaccgccgccugcccccacgccggcgccaagagcuucuacaagaaccugaucuggcuggugaagaagggcaacagcuaccccaagcugagcaagagcuacaucaacgacaaggagaaggaggugcuggugcuguggggcauccaccaccccagcaccagcgccgaccagcagagccuguaccagaacgccgacgccuacguguucgugggcaccagcagauacagcaagaaguucaagcccgagaucgccaucagacccaaggugagagaccaggagggcagaaugaacuacuacuggacccugguggagcccggcgacaagaucaccuucgaggccaccggcaaccugguggugcccagauacgccuucgccauggagagaaacgccggcagcggcaucaucaucagcgacacccccgugcacgacugcaacaccaccugccagacccccaagggcgccaucaacaccagccugcccuuccagaacauccaccccaucaccaucggcaagugccccaaguacgugaagagcaccaagcugagacuggccaccggccugagaaacgugcccagcauccagagcagaggccuguucggcgccaucgccggcuucaucgagggcggcuggaccggcaugguggacggcugguacggcuaccaccaccagaacgagcagggcagcggcuacgccgccgaccugaagagcacccagaacgccaucgacaagaucaccaacaaggugaacagcgugaucgagaagaugaacacccaguucaccgccgugggcaaggaguucaaccaccuggagaagagaaucgagaaccugaacaagaagguggacgacggcuuccuggacaucuggaccuacaacgccgagcugcuggugcugcuggagaacgagagaacccuggacuaccacgacagcaacgugaagaaccuguacgagaaggugagaagccagcugaagaacaacgccaaggagaucggcaacggcugcuucgaguucuaccacaagugcgacaacaccugcauggagagcgugaagaacggcaccuacgacuaccccaaguacagcgaggaggccaagcugaacagagaggagaucgacggcgugaagcuggagagcaccagaaucuaccagauccuggccaucuacagcaccguggccagcagccuggugcugguggugagccugggcgccaucagcuucuggaugugcagcaacggcagccugcagugcagaaucugcaucuga

SEQ ID NO: 165058 - RNA, 1701 nt, Artificial Sequence
  derived and/or modified CDS sequence (opt4) from hemagglutinin__InfluenzaA__ADH01928
augaaggccauccugguggugcugcuguacaccuucgccaccgccaacgccgacacccugugcaucggcuaccacgccaacaacagcaccgacaccguggacaccgugcuggagaagaacgugaccgugacccacagcgugaaccugcuggaggacaagcacaacggcaagcugugcaagcugagaggcguggccccccugcaccugggcaagugcaacaucgccggcuggauccugggcaaccccgagugcgagagccugagcaccgccagcagcuggagcuacaucguggagaccagcagcagcgacaacggcaccugcuaccccggcgacuucaucgacuacgaggagcugagagagcagcugagcagcgccagcagcuucgagagauucgagaucuuccccaagaccagcagcuggcccaaccacgacagcaacaagggcgugaccgccgccugcccccacgccggcgccaagagcuucuacaagaaccugaucuggcuggugaagaagggcaacagcuaccccaagcugagcaagagcuacaucaacgacaagggcaaggaggugcuggugcuguggggcauccaccaccccagcaccagcgccgaccagcagagccuguaccagaacgccgacgccuacguguucgugggcaccagcagauacagcaagaaguucaagcccgagaucgccaucagacccaaggugagagaccaggagggcagaaugaacuacuacuggacccugguggagcccggcgacaagaucaccuucgaggccaccggcaaccugguggugcccagauacgccuucgccauggagagaaacgccggcagcggcaucaucaucagcgacacccccgugcacgacugcaacaccaccugccagacccccaagggcgccaucaacaccagccugcccuuccagaacauccaccccaucaccaucggcaagugccccaaguacgugaagagcaccaagcugagacuggccaccggccugagaaacauccccagcauccagagcagaggccuguucggcgccaucgccggcuucaucgagggcggcuggaccggcaugguggacggcugguacggcuaccaccaccagaacgagcagggcagcggcuacgccgccgaccugaagagcacccagaacgccaucgacgagaucaccaacaaggugaacagcgugaucgagaagaugaacacccaguucaccgccgugggcaaggaguucaaccaccuggagaagagaaucgagaaccugaacaagaagguggacgacggcuuccuggacaucuggaccuacaacgccgagcugcuggugcugcuggagaacgagagaacccuggacuaccacgacagcaacgugaagaaccuguacgagaaggugagaagccagcugaagaacaacgccaaggagaucggcaacggcugcuucgaguucuaccacaagugcgacaacaccugcauggagagcgugaagaacggcaccuacgacuaccccaaguacagcgaggaggccaagcugaacagagaggagaucgacggcgugaagcuggagagcaccagaaucuaccagauccuggccaucuacagcaccguggccagcagccuggugcugguggugagccugggcgccaucagcuucuggaugugcagcaacggcagccugcagugcagaaucugcaucuga

SEQ ID NO: 165059 - RNA, 1701 nt, Artificial Sequence
  derived and/or modified CDS sequence (opt4) from hemagglutinin__InfluenzaA__ADH01938
augaaggccauccugguggugcugcuguacaccuucgccaccgccaacgccgacacccugugcaucggcuaccacgccaacaacagcaccgacaccguggacaccgugcuggagaagaacgugaccgugacccacagcgugaaccugcuggaggacaagcacaacggcaagcugugcaagcugagaggcguggccccccugcaccugggcaagugcaacaucgccggcuggauccugggcaaccccgagugcgagagccugagcaccgccagcagcuggagcuacaucguggagaccagcagcagcgacaacggcaccugcuaccccggcgacuucaucgacuacgaggagcugagagagcagcugagcagcgugagcagcuucgagagauucgagaucuuccccaagaccagcagcuggcccaaccacgacagcaacaagggcgugaccgccgccugcccccacgccggcgccaagagcuucuacaagaaccugaucuggcuggugaagaagggcaacagcuaccccaagcugagcaagagcuacaucaacgacaagggcaaggaggugcuggugcuguggggcauccaccaccccagcaccagcgccgaccagcagagccuguaccagaacgccgacgccuacguguucgugggcaccagcagauacagcaagaaguucaagcccgagaucgccaucagacccaaggugagagaccaggagggcagaaugaacuacuacuggacccugguggagcccggcgacaagaucaccuucgaggccaccggcaaccugguggugcccagauacgccuucgccauggagagaaacgccggcagcggcaucaucaucagcgacacccccgugcacgacugcaacaccaccugccagacccccaagggcgccaucaacaccagccugcccuuccagaacauccaccccaucaccaucggcaagugccccaaguacgugaagagcaccaagcugagacuggccaccggccugagaaacgugcccagcauccagagcagaggccuguucggcgccaucgccggcuucaucgagggcggcuggaccggcaugguggacggcugguacggcuaccaccaccagaacgagcagggcagcggcuacgccgccgaccugaagagcacccagaacgccaucgacgagaucaccaacaaggugaacagcgugaucgagaagaugaacacccaguucaccgccgugggcaaggaguucaaccaccuggagaagagaaucgagaaccugaacaagaagguggacgacggcuuccuggacaucuggaccuacaacgccgagcugcuggugcugcuggagaacgagagaacccuggacuaccacgacagcaacgugaagaaccuguacaagaaggugagaagccagcugaagaacaacgccaaggagaucggcaacggcugcuucgaguucuaccacaagugcgacaacaccugcauggagagcgugaagaacggcaccuacgacuaccccaaguacagcgaggaggccaagcugaacagagaggagaucgacggcgugaagcuggagagcaccagaaucuaccagauccuggccaucuacagcaccguggccagcagccuggugcugguggugagccugggcgccaucagcuucuggaugugcagcaacggcagccugcagugcagaaucugcaucuga

SEQ ID NO: 165060 - RNA, 1701 nt, Artificial Sequence; identical to SEQ ID NO: 163893
  derived and/or modified CDS sequence (opt4) from hemagglutinin__InfluenzaA__ADH01948

SEQ ID NO: 165061 - RNA, 1701 nt, Artificial Sequence
  derived and/or modified CDS sequence (opt4) from hemagglutinin__InfluenzaA__ADH01958
augaaggccauccugguggugcugcuguacaccuucgccaccgccaacgccgacacccugugcaucggcuaccacgccaacaacagcaccgacaccguggacaccgugcuggagaagaacgugaccgugacccacagcgugaaccugcuggaggacaagcacaacggcaagcugugcaagcugagaggcguggccccccugcaccugggcaagugcaacaucgccggcuggauccugggcaaccccgagugcgagagccugagcaccgccagcagcuggagcuacaucguggagaccagcagcagcgacaacggcaccugcuaccccggcgacuucaucgacuacgaggagcugagagagcagcugagcagcgugagcagcuucgagagauucgagaucuuccccaagaccagcagcuggcccaaccacgacagcaacaagggcgugaccgccgccugcccccacgccggcgccaagagcuucuacaagaaccugaucuggcuggugaagaagggcaacagcuaccccaagcugagcaagagcuacaucaacgacaagggcaaggaggugcuggugcuguggggcauccaccaccccagcaccagcgccgaccagcagagccuguaccagaacgccgacgccuacguguucgugggcaccagcagauacagcaagaaguucaagcccgagaucgccaucagacccaaggugagagaccaggagggcagaaugaacuacuacuggacccugguggagcccggcgacaagaucaccuucgaggccaccggcaaccugguggugcccagauacgccuucgccauggagagaaacgccggcagcggcaucaucaucagcgacacccccgugcacgacugcaacaccaccugccagacccccaagggcgccaucaacaccagccugcccuuccagaacauccaccccaucaccaucggcaacugccccaaguacgugaagagcaccaagcugagacuggccaccggccugagaaacgugcccagcauccagagcagaggccuguucggcgccaucgccggcuucaucgagggcggcuggaccggcaugguggacggcugguacggcuaccaccaccagaacgagcagggcagcggcuacgccgccgaccugaagagcacccagaacgccaucgacaagaucaccaacaaggugaacagcgugaucgagaagaugaacacccaguucaccgccgugggcaaggaguucaaccaccuggagaagagaaucgagaaccugaacaagaagguggacgacggcuuccuggacaucuggaccuacaacgccgagcugcuggugcugcuggagaacgagagaacccuggacuaccacgacagcaacgugaagaaccuguacgagaaggugagaagccagcugaagaacaacgccaaggagaucggcaacggcugcuucgaguucuaccacaagugcgacaacaccugcauggagagcgugaagaacggcaccuacgacuaccccaaguacagcgaggaggccaagcugaacagagaggagaucgacggcgugaagcuggagagcaccagaaucuaccagauccuggccaucuacagcaccguggccagcagccuggugcugaucgugagccugggcgccaucagcuucuggaugugcagcaacggcagccugcagugcagaaucugcaucuga

SEQ ID NO: 165062 - RNA, 1701 nt, Artificial Sequence
  derived and/or modified CDS sequence (opt4) from hemagglutinin__InfluenzaA__ADH01968
augaaggccauccugguggugcugcuguacaccuucgccaccgccaacgccgacacccugugcaucggcuaccacgccaacaacagcaccgacaccguggacaccgugcuggagaagaacgugaccgugacccacagcgugaaccugcuggaggacaagcacaacggcaagcugugcaagcugagaggcguggccccccugcaccugggcaagugcaacaucgccggcuggauccugggcaaccccgagugcgagagccugagcaccgccagcagcuggagcuacaucguggagaccagcagcagcgacaacggcaccugcuaccccggcgacuucaucgacuacgaggagcugagagagcagcugagcagcgugagcagcuucgagagauucgagaucuuccccaagaccagcagcuggcccaaccacgacagcaacaagggcgugaccgccgccugcccccacgccggcgccaagagcuucuacaagaaccugaucuggcuggugaagaagggcaacagcuaccccaagcugagcaagagcuacaucaacgacaagggcaaggaggugcuggugcuguggggcauccaccaccccagcaccagcgccgaccagcagagccuguaccagaacgccgacgccuacguguucgugggcaccagcagauacagcaagaaguucaagcccgagaucgccaucagacccaaggugagagagcaggagggcagaaugaacuacuacuggacccugguggagcccggcgacaagaucaccuucgaggccaccggcaaccugguggugcccagauacgccuucgccauggagagaaacgccggcagcggcaucaucaucagcgacacccccgugcacgacugcaacaccaccugccagacccccaagggcgccaucaacaccagccugcccuuccagaacauccaccccaucaccaucggcaagugccccaaguacgugaagagcaccaagcugagacuggccaccggccugagaaacgugcccagcauccagagcagaggccuguucggcgccaucgccggcuucaucgagggcggcuggaccggcaugguggacggcugguacggcuaccaccaccagaacgagcagggcagcggcuacgccgccgaccugaagagcacccagaacgccaucgacaagaucaccaacaaggugaacagcgugaucgagaagaugaacacccaguucaccgccgugggcaaggaguucaaccaccuggagaagagaaucgagaaccugaacaagaagguggacgacggcuuccuggacaucuggaccuacaacgccgagcugcuggugcugcuggagaacgagagaacccuggacuaccacgacagcaacgugaagaaccuguacgagaaggugagaaaccagcugaagaacaacgccaaggagaucggcaacggcugcuucgaguucuaccacaagugcgacaacaccugcauggagagcgugaagaacggcaccuacgacuaccccaaguacagcgaggaggccaagcugaacagagaggagaucgacggcgugaagcuggagagcaccagaaucuaccagauccuggccaucuacagcaccguggccagcagccuggugcugguggugagccugggcgccaucagcuucuggaugugcagcaacggcagccugcagugcagaaucugcaucuga

SEQ ID NO: 165063 - RNA, 1701 nt, Artificial Sequence; identical to SEQ ID NO: 163893
  derived and/or modified CDS sequence (opt4) from hemagglutinin__InfluenzaA__ADH01978

SEQ ID NO: 165064 - RNA, 1701 nt, Artificial Sequence; identical to SEQ ID NO: 163893
  derived and/or modified CDS sequence (opt4) from hemagglutinin__InfluenzaA__ADH01988

SEQ ID NO: 165065 - RNA, 1701 nt, Artificial Sequence; identical to SEQ ID NO: 164896
  derived and/or modified CDS sequence (opt4) from hemagglutinin__InfluenzaA__ADH01998

SEQ ID NO: 165066 - RNA, 1701 nt, Artificial Sequence
  derived and/or modified CDS sequence (opt4) from hemagglutinin__InfluenzaA__ADH02008
augaaggccauccugguggugcugcuguacaccuucgccaccgccaacgccgacacccugugcaucggcuaccacgccaacaacagcaccgacaccguggacaccgugcuggagaagaacgugaccgugacccacagcgugaaccugcuggagggcaagcacaacggcaagcugugcaagcugagaggcguggccccccugcaccugggcaagugcaacaucgccggcuggauccugggcaaccccgagugcgagagccugagcaccgccagcagcuggagcuacaucguggagaccagcagcagcgacaacggcaccugcuaccccggcgacuucaucgacuacgaggagcugagagagcagcugagcagcgugagcagcuucgagagauucgagaucuuccccaagaccagcagcuggcccaaccacgacagcaacaagggcgugaccgccgccugcccccacgccggcgccaagagcuucuacaagaaccugaucuggcugaucaagaagggcaacagcuaccccaagcugagcaagagcuacaucaacgacaaggagaaggaggugcuggugcuguggggcauccaccaccccagcaccagcgccgaccagcagagccuguaccagaacgccgacgccuacguguucgugggcaccagcagauacagcaagaaguucaagcccgagaucgccaucagacccaaggugagagaccaggagggcagaaugaacuacuacuggacccugguggagcccggcgacaagaucaccuucgaggccaccggcaaccugguggugcccagauacgccuucgccauggagagaaacgccggcagcggcaucaucaucagcgacacccccgugcacgacugcaacaccaccugccagacccccaagggcgccaucaacaccagccugcccuuccagaacauccaccccaucaccaucggcaagugccccaaguacgugaagagcaccaagcugagacuggccaccggccugagaaacauccccagcauccagagcagaggccuguucggcgccaucgccggcuucaucgagggcggcuggaccggcaugguggacggcugguacggcuaccaccaccagaacgagcagggcagcggcuacgccgccgaccugaagagcacccagaacgccaucgacgagaucaccaacaaggugaacagcgugaucgagaagaugaacacccaguucaccgccgugggcaaggaguucaaccaccuggagaagagaaucgagaaccugaacaagaagguggacgacggcuuccuggacaucuggaccuacaacgccgagcugcuggugcugcuggagaacgagagaacccuggacuaccacgacagcaacgugaagaaccuguacgagaaggugagaagccagcugaagaacaacgccaaggagaucggcaacggcugcuucgaguucuaccacaagugcgacaacaccugcauggagagcgugaagaacggcaccuacgacuaccccaaguacagcgaggaggccaagcugaacagagaggagaucgacggcgugaagcuggagagcaccagaaucuaccagauccuggccaucuacagcaccguggccagcagccuggugcugguggugagccugggcgccaucagcuucuggaugugcagcaacggcagccugcagugcagaaucugcaucuga

SEQ ID NO: 165067 - RNA, 1701 nt, Artificial Sequence; identical to SEQ ID NO: 163893
  derived and/or modified CDS sequence (opt4) from hemagglutinin__InfluenzaA__ADI24508

SEQ ID NO: 165068 - RNA, 1701 nt, Artificial Sequence
  derived and/or modified CDS sequence (opt4) from hemagglutinin__InfluenzaA__ADI24515
augaaggccauccugguggugcugcuguacaccuucgccaccgccaacgccgacacccugugcgugggcuaccacgccaacaacagcaccgacaccguggacaccgugcuggagaagaacgugaccgugacccacagcgugaaccugcuggaggacaagcacaacggcaagcugugcaagcugagaggcguggccccccugcaccugggcaagugcaacaucgccggcuggauccugggcaaccccgagugcgagagccugcccaccgccagcagcuggagcuacaucguggagaccagcagcagcgacaacggcaccugcuaccccggcgacuucaucgacuacgaggagcugagagagcagcugagcagcgugagcagcuucgagagauucgagaucuuccccaagaccagcagcuggcccaaccacgacagcaacaagggcgugaccgccgccugcccccacgccggcgccaagagcuucuacaagaaccugaucuggcuggugaagaagggcaacagcuaccccaagcugagcaagagcuacaucaacgacaagggcaaggaggugcuggugcuguggggcauccaccaccccagcaccagcgccgaccagcagagccuguaccagaacgccgacgccuacguguucgugggcaccagcagauacagcaagaaguucaagcccgagaucgccaucagacccaaggugagagaccaggagggcagaaugaacuacuacuggacccugguggagcccggcgacaagaucaccuucgaggccaccggcaaccugguggugcccagauacgccuucgccauggagagaaacgccggcagcggcaucaucaucagcgacacccccgugcacgacugcaacaccaccugccagacccccaagggcgccaucaacaccagccugcccuuccagaacauccaccccaucaccaucggcaagugccccaaguacgugaagagcaccaagcugagacuggccaccggccugagaaacgugcccagcauccagagcagaggccuguucggcgccaucgccggcuucaucgagggcggcuggaccggcaugguggacggcugguacggcuaccaccaccagaacgagcagggcagcggcuacgccgccgaccugaagagcacccagaacgccaucgacaagagcaccaacaaggugaacagcgugaucgagaagaugaacacccaguucaccgccgugggcaaggaguucaaccaccuggagaagagaaucgagaaccugaacaagaagguggacgacggcuuccuggacaucuggaccuacaacgccgagcugcuggugcugcuggagaacgagagaacccuggacuaccacgacagcaacgugaagaaccuguacgagaaggugagaagccagcugaagaacaacgccaaggagaucggcaacggcugcuucgaguucuaccacaagugcgacaacaccugcauggagagcgugaagaacggcaccuacgacuaccccaaguacagcgaggaggccaagcugaacagagaggagaucgacggcgugaagcuggagagcaccagaaucuaccagauccuggccaucuacagcaccguggccagcagccuggugcugguggugagccugggcgccaucagcuucuggaugugcagcaacggcagccugcagugcagaaucugcaucuga

SEQ ID NO: 165069 - RNA, 1701 nt, Artificial Sequence; identical to SEQ ID NO: 163893
  derived and/or modified CDS sequence (opt4) from hemagglutinin__InfluenzaA__ADI24517

SEQ ID NO: 165070 - RNA, 1701 nt, Artificial Sequence; identical to SEQ ID NO: 163893
  derived and/or modified CDS sequence (opt4) from hemagglutinin__InfluenzaA__ADI24519

SEQ ID NO: 165071 - RNA, 1701 nt, Artificial Sequence; identical to SEQ ID NO: 163893
  derived and/or modified CDS sequence (opt4) from hemagglutinin__InfluenzaA__ADI24521

SEQ ID NO: 165072 - RNA, 1701 nt, Artificial Sequence; identical to SEQ ID NO: 164281
  derived and/or modified CDS sequence (opt4) from hemagglutinin__InfluenzaA__ADI24523

SEQ ID NO: 165073 - RNA, 1701 nt, Artificial Sequence
  derived and/or modified CDS sequence (opt4) from hemagglutinin__InfluenzaA__ADI24525
augaaggccauccugguggugcugcuguacaccuucgccaccgccaacgccgacacccugugcaucggcuaccacgccaacaacagcaccgacaccguggacaccgugcuggagaagaacgugaccgugacccacagcgugaaccugcuggaggacaagcacaacggcaagcugugcgagcugagaggcguggccccccugcaccugggcaagugcaacaucgccggcuggauccugggcaaccccgagugcgagagccugagcaccgccagaagcuggagcuacaucguggagaccagcagcagcgacaacggcaccugcuaccccggcgacuucaucgacuacgaggagcugagagagcagcugagcagcgugagcagcuucgagagauucgagaucuuccccaagaccagcagcuggcccaaccacgacagcaacaagggcgugaccgccgccugcccccacgccggcgccaagagcuucuacaagaaccugaucuggcuggugaagaagggcaacagcuaccccaagcugagcaagagcuacaucaacgacaagggcaaggaggugcuggugcuguggggcauccaccaccccagcaccagcgccgaccagcagagccuguaccagaacgccgacgccuacguguucgugggcaccagcagauacagcaagaaguucaagcccgagaucgccaucagacccaaggugagagaccaggagggcagaaugaacuacuacuggacccugguggagcccggcgacaagaucaccuucgaggccaccggcaaccugguggugcccagauacgccuucgccauggagagaaacgccggcagcggcaucaucaucagcgacacccccgugcacgacugcaacaccaccugccagacccccaagggcgccaucaacaccagccugcccuuccagaacauccaccccaucaccaucggcaagugccccaaguacgugaagagcaccaagcugagacuggccaccggccugagaaacgugcccagcauccagagcagaggccuguucggcgccaucgccggcuucaucgagggcggcuggaccggcaugguggacggcugguacggcuaccaccaccagaacgagcagggcagcggcuacgccgccgaccugaagagcacccagaacgccaucgacaagaucaccaacaaggugaacagcgugaucgagaagaugaacacccaguucaccgccgugggcaaggaguucaaccaccuggagaagagaaucgagaaccugaacaagaagguggacgacggcuuccuggacaucuggaccuacaacgccgagcugcuggugcugcuggagaacgagagaacccuggacuaccacgacagcaacgugaagaaccuguacgagaaggugaagagccagcugaagaacaacgccaaggagaucggcaacggcugcuucgaguucuaccacaagugcgacaacaccugcauggagagcgugaagaacggcaccuacgacuaccccaaguacagcgaggaggccaagcugaacagagaggagaucgacggcgugaagcuggagagcaccagaaucuaccagauccuggccaucuacagcaccguggccagcagccuggugcugguggugagccugggcgccaucagcuucuggaugugcagcaacggcagccugcagugcagaaucugcaucuga

SEQ ID NO: 165074 - RNA, 1701 nt, Artificial Sequence; identical to SEQ ID NO: 163893
  derived and/or modified CDS sequence (opt4) from hemagglutinin__InfluenzaA__ADI24527

SEQ ID NO: 165075 - RNA, 1701 nt, Artificial Sequence; identical to SEQ ID NO: 164281
  derived and/or modified CDS sequence (opt4) from hemagglutinin__InfluenzaA__ADI24529

SEQ ID NO: 165076 - RNA, 1701 nt, Artificial Sequence
  derived and/or modified CDS sequence (opt4) from hemagglutinin__InfluenzaA__ADI24531
augaaggccauccugguggugcugcuguacaccuucgccaccgccaacgccgacacccugugcaucggcuaccacgccaacaacagcaccgacaccguggacaccgugcuggagaagaacgugaccgugacccacagcgugaaccugcuggaggacaagcacaacggcaagcugugcaagcugagaggcguggccccccugcaccugggcaagugcaacaucgccggcuggauccugggcaaccccgagugcgagagccugagcaccgccagcagcuggagcuacaucguggagaccagcagcagcgacaacggcaccugcuaccccggcgacuucaucaacuacgaggagcugagagagcagcugagcagcgugagcagcuucgagagauucgagaucuuccccaagaccagcagcuggcccaaccacgacagcaacaagggcgugaccgccgccugcccccacgccggcgccaagagcuucuacaagaaccugaucuggcuggugaagaagggcaacagcuaccccaagcugagcaagagcuacaucaacgacaagggcaaggaggugcuggugcuguggggcauccaccaccccagcaccagcgccgaccagcagagccuguaccagaacgccgacgccuacguguucgugggcaccagcagauacagcaagaaguucaagcccgagaucgccaucagacccaaggugagagaccaggagggcagaaugaacuacuacuggacccugguggagcccggcgacaagaucaccuucgaggccaccggcaaccugguggugcccagauacgccuucgccauggagagaaacgccggcagcggcaucaucaucagcgacacccccgugcacgacugcaacaccaccugccagacccccaagggcgccaucaacaccagccugcccuuccagaacauccaccccaucaccaucggcaagugccccaaguacgugaagagcaccaagcugagacuggccaccggccugagaaacgugcccagcauccagagcagaggccugcugggcgccaucgccggcuucaucgagggcggcuggaccggcaugguggacggcugguacggcuaccaccaccagaacgagcagggcagcggcuacgccgccgaccugaagagcacccagaacgccaucgacaagaucaccaacaaggugaacagcgugaucgagaagaugaacacccaguucaccgccgugggcaaggaguucaaccaccuggagaagagaaucgagaaccugaacaagaagguggacgacggcuuccuggacaucuggaccuacaacgccgagcugcuggugcugcuggagaacgagagaacccuggacuaccacgacagcaacgugaagaaccuguacgagaaggugagaagccagcugaagaacaacgccaaggagaucggcaacggcugcuucgaguucuaccacaagugcgacaacaccugcauggagagcgugaagaacggcaccuacgacuaccccaaguacagcgaggaggccaagcugaacagagaggagaucgacggcgugaagcuggagagcaccagaaucuaccagauccuggccaucuacagcaccguggccagcagccuggugcugguggugagccugggcgccaucagcuucuggaugugcagcaacggcagccugcagugcaagaucugcaucuga

SEQ ID NO: 165077 - RNA, 1701 nt, Artificial Sequence
  derived and/or modified CDS sequence (opt4) from hemagglutinin__InfluenzaA__ADI24536
augaaggccauccugguggugcugcuguacaccuucgccaccgccaacgccgacacccugugcaucggcuaccacgccaacaacagcaccgacaccguggacaccgugcuggagaagaacgugaccgugacccacagcgugaaccugcuggaggacaagcacaacggcaagcugugcaagcugagaggcguggccccccugcaccugggcaagugcaacaucgccggcuggauccugggcaaccccgagugcgagagccugagcaccgccagcagcuggagcuacaucguggagaccagcagcagcgacaacggcaccugcuaccccggcgacuucaucgacuacgaggagcugagagagcagcugagcagcgugagcagcuucgagagauucgagaucuuccccaagaccagcagcuggcccaaccacgacagcaacaagggcgugaccgccgccugcccccacgccggcgccaagagcuucuacaagaaccugaucuggcuggugaagaagggcaacagcuaccccaagcugagcaagagcuacaucaacgacaagggcaaggaggugcuggugcuguggggcauccaccaccccagcaccagcgccgaccagcagagccuguaccagaacgccgacgccuacguguucgugggcaccagcagauacagcaagaaguucaagcccgagaucgccaucagacccaaggugagagaccaggagggcagaaugaacuacuacuggacccugguggagcccggcgacaagaucaccuucgaggccaccggcaaccugguggugcccagauacgccuucgccauggagagagacgccggcagcggcaucaucaucagcgacacccccgugcacgacugcaacaccaccugccagacccccaagggcgccaucaacaccagccugcccuuccagaacauccaccccaucaccaucggcaagugccccaaguacgugaagagcaccaagcugagacuggccaccggccugagaaacgugcccagcauccagagcagaggccuguucggcgccaucgccggcuucaucgagggcggcuggaccggcaugguggacggcugguacggcuaccaccaccagaacgagcagggcagcggcuacgccgccgaccugaagagcacccagaacgccaucgacaagaucaccaacaaggugaacagcgugaucgagaagaugaacacccaguucaccgccgugggcaaggaguucaaccaccuggagaagagaaucgagaaccugaacaagaagaucgacgacggcuuccuggacaucuggaccuacaacgccgagcugcuggugcugcuggagaacgagagaacccuggacuaccacgacagcaacgugaagaaccuguacgagaaggugagaagccagcugaagaacaacgccaaggagaucggcaacggcugcuucgaguucuaccacaagugcgacaacaccugcauggagagcgugaagaacggcaccuacgacuaccccaaguacagcgaggaggccaagcugaacagagaggagaucgacggcgugaagcuggagagcaccagaaucuaccagauccuggccaucuacagcaccguggccagcagccuggugcugguggugagccugggcgccaucagcuucuggaugugcagcaacggcagccugcagugcagaaucugcaucuga

SEQ ID NO: 165078 - RNA, 1701 nt, Artificial Sequence; identical to SEQ ID NO: 163893
  derived and/or modified CDS sequence (opt4) from hemagglutinin__InfluenzaA__ADI24546

SEQ ID NO: 165079 - RNA, 1701 nt, Artificial Sequence; identical to SEQ ID NO: 163893
  derived and/or modified CDS sequence (opt4) from hemagglutinin__InfluenzaA__ADI24553

SEQ ID NO: 165080 - RNA, 1701 nt, Artificial Sequence; identical to SEQ ID NO: 163893
  derived and/or modified CDS sequence (opt4) from hemagglutinin__InfluenzaA__ADI24555

SEQ ID NO: 165081 - RNA, 1701 nt, Artificial Sequence
  derived and/or modified CDS sequence (opt4) from hemagglutinin__InfluenzaA__ADI24557
augaaggccauccugguggugcugcuguacaccuucgccaccgccaacgccgacacccugugcaucggcuaccacgccaacaacagcaccgacaccguggacaccgugcuggagaagaacgugaccgugacccacagcgugaaccugcuggaggacaagcacaacggcaagcugugcaagcugagaggcguggccccccugcaccugggcaagugcaacaucgccggcuggauccugggcaaccccgagugcgagagccugagcaccgccagcagcuggagcuacaucguggagaccagcagcagcgacaacggcaccugcuaccccggcgacuucaucgacuacgaggagcugagagagcagcugagcagcgugagcagcuucgagagauucgagaucuuccccaagaccagcagcuggcccaaccacgacagcaacaagggcgugaccgccgccugcccccacgccggcgccaagagcuucuacaagaaccugaucuggcuggugaagaagggcaacagcuaccccaagcugagcaagagcuacaucaacgacaagggcaaggagauccuggugcuguggggcauccaccaccccagcaccagcgccgaccagcagagccuguaccagaacgccgacgccuacguguucgugggcaccagcagauacagcaagaaguucaagcccgagaucgccaucagacccaaggugagagaccaggagggcagaaugaacuacuacuggacccugguggagcccggcgacaagaucaccuucgaggccaccggcaaccugguggugcccagauacgccuucgccauggagagaaacgccggcagcggcaucaucaucagcgacacccccgugcacgacugcaacaccaccugccagacccccaagggcgccaucaacaccagccugcccuuccagaacauccaccccaucaccaucggcaagugccccaaguacgugaagagcaccaagcugagacuggccaccggccugagaaacgugcccagcauccagagcagaggccuguucggcgccaucgccggcuucaucgagggcggcuggaccggcaugguggacggcugguacggcuaccaccaccagaacgagcagggcagcggcuacgccgccgaccugaagagcacccagaacgccaucgacaagaucaccaacaaggugaacagcgugaucgagaagaugaacacccaguucaccgccgugggcaaggaguucaaccaccuggagaagagaaucgagaaccugaacaagaagguggacgacggcuuccuggacaucuggaccuacaacgccgagcugcuggugcugcuggagaacgagagaacccuggacuaccacgacagcaacgugaagaaccuguacgagaaggugagaagccagcugaagaacaacgccaaggagaucggcaacggcugcuucgaguucuaccacaagugcgacaacaccugcauggagagcgugaagaacggcaccuacgacuaccccaaguacagcgaggaggccaagcugaacagagaggagaucgacggcgugaagcuggagagcaccagaaucuaccagauccuggccaucuacagcaccguggccagcagccuggugcugguggugagccugggcgccaucagcuucuggaugugcagcaacggcagccugcagugcagaaucugcaucuga

SEQ ID NO: 165082 - RNA, 1701 nt, Artificial Sequence; identical to SEQ ID NO: 163893
  derived and/or modified CDS sequence (opt4) from hemagglutinin__InfluenzaA__ADI24559

SEQ ID NO: 165083 - RNA, 1701 nt, Artificial Sequence
  derived and/or modified CDS sequence (opt4) from hemagglutinin__InfluenzaA__ADI24561
augaaggccauccuggugauccugcuguacaccuucgccaccgccaacgccgacacccugugcaucggcuaccacgccaacaacagcaccgacaccguggacaccgugcuggagaagaacgugaccgugacccacagcgugaaccugcuggaggacaagcacgacggcaagcugugcaagcugagaggcguggccccccugcaccugggcaagugcaacaucgccggcuggauccugggcaaccccgagugcgagagccugagcaccgccagcagcuggagcuacaucguggagaccagcagcagcgacaacggcaccugcuaccccggcgacuucaucgacuacgaggagcugagagagcagcugagcagcgugagcagcuucgagagauucgagaucuuccccaagaccagcagcuggcccaaccacgacagcaacaagggcgugaccgccgccugcccccacgccggcgccaagagcuucuacaagaaccugaucuggcuggugaagaagggcaacagcuaccccaagcugagcaagagcuacaucaacgacaagggcaaggaggugcuggugcuguggggcauccaccaccccagcaccagcgccgaccagcagagccuguaccagaacgccgacgccuacguguucgugggcaccagcagauacagcaagaaguucaagcccgagaucgccaucagacccaaggugagagaccaggagggcagaaugaacuacuacuggacccugguggagcccggcgacaagaucaccuucgaggccaccggcaaccugguggugcccagauacgccuucgccauggagagaaacgccggcagcggcaucaucaucagcgacacccccgugcacgacugcaacaccaccugccagacccccaagggcgccaucaacaccagccugcccuuccagaacauccaccccaucaccaucggcaagugccccaaguacgugaagagcaccaagcugagacuggccaccggccugagaaacgugcccagcauccagagcagaggccuguucggcgccaucgccggcuucaucgagggcggcuggaccggcaugguggacggcugguacggcuaccaccaccagaacgagcagggcagcggcuacgccgccgaccugaagagcacccagaacgccaucgacaagaucaccaacaaggugaacagcgugaucgagaagaugaacacccaguucaccgccgugggcaaggaguucaaccaccuggagaagagaaucgagaaccugaacaagaagguggacgacggcuuccuggacaucuggaccuacaacgccgagcugcuggugcugcuggagaacgagagaacccuggacuaccacgacagcaacgugaagaaccuguacgagaaggugagaagccagcugaagaacaacgccaaggagaucggcaacggcugcuucgaguucuaccacaagugcgacaacaccugcauggagagcgugaagaacggcaccuacgacuaccccaaguacagcgaggaggccaagcugaacagagaggagaucgacggcgugaagcuggagagcaccagaaucuaccagauccuggccaucuacagcaccguggccagcagccuggugcugguggugagccugggcgccaucagcuucuggaugugcagcaacggcagccugcagugcagaaucugcaucuga

SEQ ID NO: 165084 - RNA, 1701 nt, Artificial Sequence; identical to SEQ ID NO: 163893
  derived and/or modified CDS sequence (opt4) from hemagglutinin__InfluenzaA__ADI24563

SEQ ID NO: 165085 - RNA, 1701 nt, Artificial Sequence
  derived and/or modified CDS sequence (opt4) from hemagglutinin__InfluenzaA__ADI24565
augaaggccauccugguggugcugcuguacaccuucgccaccgccaacgccgacacccugugcaucggcuaccacgccaacaacagcaccgacaccguggacaccgugcuggagaagaacgugaccgugacccacagcgugaaccugcuggaggacaagcacgacggcaagcugugcaagcugagaggcguggccccccugcaccugggcaagugcaacaucgccggcuggauccugggcaaccccgagugcgagagccugagcaccgccagcagcuggagcuacaucguggagaccagcagcagcgacaacggcaccugcuaccccggcgacuucaucgacuacgaggagcugagagagcagcugagcagcgugagcagcuucgagagauucgagaucuuccccaagaccagcagcuggcccaaccacgacagcaacaagggcgugaccgccgccugcccccacgccggcgccaagagcuucuacaagaaccugaucuggcuggugaagaagggcaacagcuaccccaagcugagcaagagcuacaucaacgacaagggcaagaaggugcuggugcuguggggcauccaccaccccagcaccagcgccgaccagcagagccuguaccagaacgccgacgccuacguguucgugggcaccagcagauacagcaagaaguucaagcccgagaucgccaucagacccaaggugagagaccaggagggcagaaugaacuacuacuggacccugguggagcccggcgacaagaucaccuucgaggccaccggcaaccugguggugcccagauacgccuucgccauggagagaaacgccggcagcggcaucaucaucagcgacacccccgugcacgacugcaacaccaccugccagacccccaagggcgccaucaacaccagccugcccuuccagaacauccaccccaucaccaucggcaagugccccaaguacgugaagagcaccaagcugagacuggccaccggccugagaaacgugcccagcauccagagcagaggccuguucggcgccaucgccggcuucaucgagggcggcuggaccggcaugguggacggcugguacggcuaccaccaccagaacgagcagggcagcggcuacgccgccgaccugaagagcacccagaacgccaucgacaagaucaccaacaaggugaacagcgugaucgagaagaugaacacccaguucaccgccgugggcaaggaguucaaccaccuggagaagagaaucgagaaccugaacaagaagguggacgacggcuuccuggacaucuggaccuacaacgccgagcugcuggugcugcuggagaacgagagaacccuggacuaccacgacagcaacgugaagaaccuguacgagaaggugagaagccagcugaagaacaacgccaaggagaucggcaacggcugcuucgaguucuaccacaagugcgacaacaccugcauggagagcgugaagaacggcaccuacgacuaccccaaguacagcgaggaggccaagcugaacagagaggagaucgacggcgugaagcuggagagcaccagaaucuaccagauccuggccaucuacagcaccguggccagcagccuggugcugguggugagccugggcgccaucagcuucuggaugugcagcaacggcagccugcagugcagaaucugcaucuga

SEQ ID NO: 165086 - RNA, 1701 nt, Artificial Sequence; identical to SEQ ID NO: 163893
  derived and/or modified CDS sequence (opt4) from hemagglutinin__InfluenzaA__ADI24567

SEQ ID NO: 165087 - RNA, 1701 nt, Artificial Sequence
  derived and/or modified CDS sequence (opt4) from hemagglutinin__InfluenzaA__ADI24569
augaaggccauccugguggugcugcuguacaccuucgccaccgccaacgccgacacccugugcaucggcuaccacgccaacaacagcaccgacaccguggacaccgugcuggagaagaacgugaccgugacccacagcgugaaccugcuggaggacaagcacaacggcaagcugugcaagcugagaggcguggccccccugcaccugggcaagugcaacaucgccggcuggauccugggcaaccccgagugcgagagccugagcaccgccagcagcuggagcuacaucguggagaccagcagcagcgacaacggcaccugcuaccccggcgacuucaucgacuacgaggagcugagagagcagcugagcagcgugagcagcuucgagagauucgagaucuuccccaagaccagcagcuggcccaaccacgacagcaacaagggcgugaccgccgccugcccccacgccggcgccaagagcuucuacaagaaccugaucuggcuggugaagaagggcaacagcuaccccaagcugagcaagagcuacaucaacgacaagggcaaggaggugcuggugcuguggggcauccaccaccccagcaccagcgccgaccagcagagccuguaccagaacgccgacgccuacguguucgugggcaccagcagauacagcaagaaguucaagcccgagaucgccaucagacccaaggugagagaccaggagggcagaaugaacuacuacuggacccugguggagcccggcgacaagaucaccuucgaggccaccggcaaccugguggugcccagauacgccuucgccaucgagagaaacgccggcagcggcaucaucaucagcgacacccccgugcacgacugcaacaccaccugccagacccccaagggcgccaucaacaccagccugcccuuccagaacauccaccccaucaccaucggcaagugccccaaguacgugaagagcaccaagcugagacuggccaccggccugagaaacgugcccagcauccagagcagaggccuguucggcgccaucgccggcuucaucgagggcggcuggaccggcaugguggacggcugguacggcuaccaccaccagaacgagcagggcagcggcuacgccgccgaccugaagagcacccagaacgccaucgacaagaucaccaacaaggugaacagcgugaucgagaagaugaacacccaguucaccgccgugggcaaggaguucaaccaccuggagaagagaaucgagaaccugaacaagaagguggacgacggcuuccuggacaucuggaccuacaacgccgagcugcuggugcugcuggagaacgagagaacccuggacuaccacgacagcaacgugaagaaccuguacgagaaggugagaagccagcugaagaacaacgccaaggagaucggcaacggcugcuucgaguucuaccacaagugcgacaacaccugcauggagagcgugaagaacggcaccuacgacuaccccaaguacagcgaggaggccaagcugaacagagaggagaucgacggcgugaagcuggagagcaccagaaucuaccagauccuggccaucuacagcaccguggccagcagccuggugcugguggugagccugggcgccaucagcuucuggaugugcagcaacggcagccugcagugcagaaucugcaucuga

SEQ ID NO: 165088 - RNA, 1701 nt, Artificial Sequence; identical to SEQ ID NO: 163893
  derived and/or modified CDS sequence (opt4) from hemagglutinin__InfluenzaA__ADI24571

SEQ ID NO: 165089 - RNA, 1701 nt, Artificial Sequence; identical to SEQ ID NO: 164281
  derived and/or modified CDS sequence (opt4) from hemagglutinin__InfluenzaA__ADI24573

SEQ ID NO: 165090 - RNA, 1701 nt, Artificial Sequence
  derived and/or modified CDS sequence (opt4) from hemagglutinin__InfluenzaA__ADI24575
augaaggccauccugguggugcugcuguacaccuucgccaccgccaacgccgacacccugugcaucggcuaccacgccaacaacagcaccgacaccguggacaccgugcuggagaagaacgugaccgugacccacagcgugaaccugcuggaggacaagcacaacggcaagcugugcaagcugagaggcguggccccccugcaccugggcaagugcaacaucgccggcuggauccugggcaaccccgagugcgagagccugagcaccgccagcagcuggagcuacaucguggagaccagcagcagcgacaacggcaccugcuaccccggcgacuucaucaacuacgaggagcugagagagcagcugagcagcgugagcagcuucgagagauucgagaucuuccccaagaccagcagcuggcccaaccacgacagcaacaagggcgugaccgccgccugcccccacgccggcgccaagagcuucuacaagaaccugaucuggcuggugaagaagggcaacagcuaccccaagcugagcaagagcuacaucaacgacaagggcaaggaggugcuggugcuguggggcauccaccaccccagcaccagcgccgaccagcagagccuguaccagaacgccgacgccuacguguucgugggcaccagcagauacagcaagaaguucaagcccgagaucgccaucagacccaaggugagagaccaggagggcagaaugaacuacuacuggacccugguggagcccggcgacaagaucaccuucgaggccaccggcaaccugguggugcccagauacgccuucgccauggagagaaacgccggcagcggcaucaucaucagcgacacccccgugcacgacugcaacaccaccugccagacccccaagggcgccaucaacaccagccugcccuuccagaacauccaccccaucaccaucggcaagugccccaaguacgugaagagcaccaagcugagacuggccaccggccugagaaacgugcccagcauccagagcagaggccuguucggcgccaucgccggcuucaucgagggcggcuggaccggcaugguggacggcugguacggcuaccaccaccagaacgagcagggcagcggcuacgccgccgaccugaagagcacccagaacgccaucgacaagaucaccaacaaggugaacagcgugaucgagaagaugaacacccaguucaccgccgugggcaaggaguucaaccaccuggagaagagaaucgagaaccugaacaagaagguggacgacggcuuccuggacaucuggaccuacaacgccgagcugcuggugcugcuggagaacgagagaacccuggacuaccacgacagcaacguggagaaccuguacgagaaggugagaagccagcugaagaacaacgccaaggagaucggcaacggcugcuucgaguucuaccacaagugcgacaacaccugcauggagagcgugaagaacggcaccuacgacuaccccaaguacagcgaggaggccaagcugaacagagaggagaucgacggcgugaagcuggagagcaccagaaucuaccagauccuggccaucuacagcaccguggccagcagccuggugcugguggugagccugggcgccaucagcuucuggaugugcagcaacggcagccugcagugcagaaucugcaucuga

SEQ ID NO: 165091 - RNA, 1701 nt, Artificial Sequence; identical to SEQ ID NO: 163893
  derived and/or modified CDS sequence (opt4) from hemagglutinin__InfluenzaA__ADI24577

SEQ ID NO: 165092 - RNA, 1701 nt, Artificial Sequence
  derived and/or modified CDS sequence (opt4) from hemagglutinin__InfluenzaA__ADI24581
augaaggccauccugguggugcugcuguacaccuucgccaccgccaacgccgacacccugugcaucggcuaccacgccaacaacagcaccgacaccguggacaccgugcuggagaagaacgugaccgugacccacagcgugaaccugcuggaggacaagcacaacggcaagcugugcaagcugagaggcguggccccccugcaccugggcaagugcaacaucgccggcugggugcugggcaaccccgagugcgagagccugagcaccgccagcagcuggagcuacaucguggagaccagcagcagcgacaacggcaccugcuaccccggcgacuucaucgacuacgaggagcugagagagcagcugagcagcgugagcagcuucgagagauucgagaucuuccccaagaccagcagcuggcccaaccacgacagcaacaagggcgugaccgccgccugcccccacgccggcgccaagagcuucuacaagaaccugaucuggcuggugaagaagggcaacagcuaccccaagcugagcaagagcuacaucaacgacaagggcaaggaggugcuggugcuguggggcauccaccaccccagcaccagcgccgaccagcagagccuguaccagaacgccgacgccuacguguucgugggcaccagcagauacagcaagaaguucaagcccgagaucgccaucagacccaaggugagagaccaggagggcagaaugaacuacuacuggacccugguggagcccggcgacaagaucaccuucgaggccaccggcaaccugguggugcccagauacgccuucgccauggagagaaacgccggcagcggcaucaucaucagcgacacccccgugcacgacugcaacaccaccugccagacccccaagggcgccaucaacaccagccugcccuuccagaacauccaccccaucaccaucggcaagugccccaaguacgugaagagcaccaagcugagacuggccaccggccugagaaacgugcccagcauccagagcagaggccuguucggcgccaucgccggcuucaucgagggcggcuggaccggcaugguggacggcugguacggcuaccaccaccagaacgagcagggcagcggcuacgccgccgaccugaagagcacccagaacgccaucgacaagaucaccaacaaggugaacagcgugaucgagaagaugaacacccaguucaccgccgugggcaaggaguucaaccaccuggagaagagaaucgagaaccugaacaagaagguggacgacggcuuccuggacaucuggaccuacaacgccgagcugcuggugcugcuggagaacgagagaacccuggacuaccacgacagcaacgugaagaaccuguacgagaaggugagaagccagcugaagaacaacgccaaggagaucggcaacggcugcuucgaguucuaccacaagugcgacaacaccugcauggagagcgugaagaacggcaccuacgacuaccccaaguacagcgaggaggccaagcugaacagagaggagaucgacggcgugaagcuggagagcaccagaaucuaccagauccuggccaucuacagcaccguggccagcagccuggugcugguggugagccugggcgccaucagcuucuggaugugcagcaacggcagccugcagugcagaaucugcaucuga

SEQ ID NO: 165093 - RNA, 1701 nt, Artificial Sequence
  derived and/or modified CDS sequence (opt4) from hemagglutinin__InfluenzaA__ADI24583
augaaggccauccugguggugcugcuguacaccuucgccaccgccaacgccgacacccugugcaucggcuaccacgccaacaacagcaccgacaccguggacaccauccuggagaagaacgugaccgugacccacagcgugaaccugcuggaggacaagcacaacggcaagcugugcaagcugagaggcguggccccccugcaccugggcaagugcaacaucgccggcuggauccugggcaaccccgagugcgagagccugagcaccgccagcagcuggagcuacaucguggagaccagcagcagcgacaacggcaccugcuaccccggcgacuucaucgacuacgaggagcugagagagcagcugagcagcgugagcagcuucgagagauucgagaucuuccccaagaccagcagcuggcccaaccacgacagcaacaagggcgugaccgccgccugcccccacgccggcgccaagagcuucuacaagaaccugaucuggcuggugaagaagggcaacagcuaccccaagcugagcaagagcuacaucaacgacaagggcaaggaggugcuggugcuguggggcauccaccaccccagcaccagcgccgaccagcagagccuguaccagaacgccgacgccuacguguucgugggcaccagcagauacagcaagaaguucaagcccgagaucgccaucagacccaaggugagagaccaggagggcagaaugaacuacuacuggacccugguggagcccggcgacaagaucaccuucgaggccaccggcaaccugguggugcccagauacgccuucgccauggagagaaacgccggcagcggcaucaucaucagcgacacccccgugcacgacugcaacaccaccugccagacccccaagggcgccaucaacaccagccugcccuuccagaacauccaccccaucaccaucggcaagugccccaaguacgugaagagcaccaagcugagacuggccaccggccugagaaacgugcccagcauccagagcagaggccuguucggcgccaucgccggcuucaucgagggcggcuggaccggcaugguggacggcugguacggcuaccaccaccagaacgagcagggcagcggcuacgccgccgaccugaagagcacccagaacgccaucgacaagaucaccaacaaggugaacagcgugaucgagaagaugaacacccaguucaccgccgugggcaaggaguucaaccaccuggagaagagaaucgagaaccugaacaagaagguggacgacggcuuccuggacaucuggaccuacaacgccgagcugcuggugcugcuggagaacgagagaacccuggacuaccacgacagcaacgugaagaaccuguacgagaaggugagaagccagcugaagaacaacgccaaggagaucggcaacggcugcuucgaguucuaccacaagugcgacaacaccugcauggagagcgugaagaacggcaccuacgacuaccccaaguacagcgaggaggccaagcugaacagagaggagaucgacggcgugaagcuggagagcaccagaaucuaccagauccuggccaucuacagcaccguggccagcagccuggugcugguggugagccugggcgccaucagcuucuggaugugcagcaacggcagccugcagugcagaaucugcaucuga

SEQ ID NO: 165094 - RNA, 1701 nt, Artificial Sequence
  derived and/or modified CDS sequence (opt4) from hemagglutinin__InfluenzaA__ADI24590
augaaggccauccugguggugcugcuguacaccuucgccaccgccaacgccgacacccugugcaucggcuaccacgccaacaacagcaccgacaccguggacaccgugcuggagaagaacgugaccgugacccacagcgccaaccugcuggaggacaagcacaacggcaagcugugcaagcugagaggcguggccccccugcaccugggcaagugcaacaucgccggcuggauccugggcaaccccgagugcgagagccugagcaccgccagcagcuggagcuacaucguggagaccagcagcagcgacaacggcaccugcuaccccggcgacuucaucgacuacgaggagcugagagagcagcugagcagcgugagcagcuucgagagauucgagaucuuccccaagaccagcagcuggcccaaccacgacagcaacaagggcgugaccgccgccugcccccacgccggcgccaagagcuucuacaagaaccugaucuggcuggugaagaagggcaacagcuaccccaagcugagcaagagcuacaucaacgacaagggcaaggaggugcuggugcuguggggcauccaccaccccagcaccagcgccgaccagcagagccuguaccagaacgccgacgccuacguguucgugggcaccagcagauacagcaagaaguucaagcccgagaucgccaucagacccaaggugagagaccaggagggcagaaugaacuacuacuggacccugguggagcccggcgacaagaucaccuucgaggccaccggcaaccugguggugcccagauacgccuucgccauggagagaaacgccggcagcggcaucaucaucagcgacacccccgugcacgacugcaacaccaccugccagacccccaagggcgccaucaacaccagccugcccuuccagaacauccaccccaucaccaucggcaagugccccaaguacgugaagagcaccaagcugagacuggccaccggccugagaaacgugcccagcauccagagcagaggccuguucggcgccaucgccggcuucaucgagggcggcuggaccggcaugguggacggcugguacggcuaccaccaccagaacgagcagggcagcggcuacgccgccgaccugaagagcacccagaacgccaucgacaagaucaccaacaaggugaacagcgugaucgagaagaugaacacccaguucaccgccgugggcaaggaguucaaccaccuggagaagagaaucgagaaccugaacaagaagguggacgacggcuuccuggacaucuggaccuacaacgccgagcugcuggugcugcuggagaacgagagaacccuggacuaccacgacagcaacgugaagaaccuguacgagaaggugagaagccagcugaagaacaacgccaaggagaucggcaacggcugcuucgaguucuaccacaagugcgacaacaccugcauggagagcgugaagaacggcaccuacgacuaccccaaguacagcgaggaggccaagcugaacagagaggagaucgacggcgugaagcuggagagcaccagaaucuaccagauccuggccaucuacagcaccguggccagcagccuggugcugguggugagccugggcgccaucagcuucuggaugugcagcaacggcagccugcagugcagaaucugcaucuga

SEQ ID NO: 165095 - RNA, 1701 nt, Artificial Sequence
  derived and/or modified CDS sequence (opt4) from hemagglutinin__InfluenzaA__ADI24597
augaaggccauccugguggugcugcuguacaccuucgccaccgccaacgccgacacccugugcaucggcuaccacgccaacaacagcaccgacaccguggacaccgugcuggagaagaacgugaccgugacccacagcgccaaccugcuggaggacaagcacaacggcaagcugugcaagcugagaggcguggccccccugcaccugggcaacugcaacaucgccggcuggauccugggcaaccccgagugcgagagccugagcaccgccagcagcuggagcuacaucguggagaccagcagcagcgacaacggcaccugcuaccccggcgacuucaucgacuacgaggagcugagagagcagcugagcagcgugagcagcuucgagagauucgagaucuuccccaagaccagcagcuggcccaaccacgacagcaacaagggcgugaccgccgccugcccccacgccggcgccaagagcuucuacaagaaccugaucuggcuggugaagaagggcaacagcuaccccaagcugagcaagagcuacaucaacgacaagggcaaggaggugcuggugcuguggggcauccaccaccccagcaccagcgccgaccagcagagccuguaccagaacgccgacgccuacguguucgugggcaccagcagauacagcaagaaguucaagcccgagaucgccaucagacccaaggugagagaccaggagggcagaaugaacuacuacuggacccugguggagcccggcgacaagaucaccuucgaggccaccggcaaccugguggugcccagauacgccuucgccauggagagaaacgccggcagcggcaucaucaucagcgacacccccgugcacgacugcaacaccaccugccagacccccaagggcgccaucaacaccagccugcccuuccagaacauccaccccaucaccaucggcaagugccccaaguacgugaagagcaccaagcugagacuggccaccggccugagaaacgugcccagcauccagagcagaggccuguucggcgccaucgccggcuucaucgagggcggcuggaccggcaugguggacggcugguacggcuaccaccaccagaacgagcagggcagcggcuacgccgccgaccugaagagcacccagaacgccaucgacaagaucaccaacaaggugaacagcgugaucgagaagaugaacacccaguucaccgccgugggcaaggaguucaaccaccuggagaagagaaucgagaaccugaacaagaagguggacgacggcuuccuggacaucuggaccuacaacgccgagcugcuggugcugcuggagaacgagagaacccuggacuaccacgacagcaacgugaagaaccuguacgagaaggugagaagccagcugaagaacaacgccaaggagaucggcaacggcugcuucgaguucuaccacaagugcgacaacaccugcauggagagcgugaagaacggcaccuacgacuaccccaaguacagcgaggaggccaagcugaacagagaggagaucgacggcgugaagcuggagagcaccagaaucuaccagauccuggccaucuacagcaccguggccagcagccuggugcugguggugagccugggcgccaucagcuucuggaugugcagcaacggcagccugcagugcagaaucugcaucuga

SEQ ID NO: 165096 - RNA, 1701 nt, Artificial Sequence; identical to SEQ ID NO: 165094
  derived and/or modified CDS sequence (opt4) from hemagglutinin__InfluenzaA__ADI24612

SEQ ID NO: 165097 - RNA, 1701 nt, Artificial Sequence
  derived and/or modified CDS sequence (opt4) from hemagglutinin__InfluenzaA__ADI24619
augaaggccauccugguggugcugcuguacaccuucgccaccgccaacgccgacacccugugcaucggcuaccacgccaacaacagcaccgacaccguggacaccgugcuggagaagaacgugaccgugacccacagcgccaaccugcuggaggacaagcacaacggcaagcugugcaagcugagaggcguggccccccugcaccugggcaagugcaacaucgccggcuggauccugggcaaccccgagugcgagagccugagcaccgccagcagcuggagcuacaucguggagaccagcagcagcgacaacggcaccugcuaccccggcgacuucaucgacuacgaggagcugagagagcagcugagcagcgugagcagcuucgagagauucgagaucuuccccaagaccagcagcuggcccaaccacgacagcaacaagggcgugaccgccgccugcccccacgccggcgccaagagcuucuacaagaaccugaucuggcuggugaagaagggcaacagcuaccccaagcugagcaagagcuacaucaacgacaagggcaaggaggugcuggugcuguggggcauccaccaccccagcaccagcguggaccagcagagccuguaccagaacgccgacgccuacguguucgugggcaccagcagauacagcaagaaguucaagcccgagaucgccaucagacccaaggugagagaccaggagggcagaaugaacuacuacuggacccugguggagcccggcgacaagaucaccuucgaggccaccggcaaccugguggugcccagauacgccuucgccauggagagaaacgccggcagcggcaucaucaucagcgacacccccgugcacgacugcaacaccaccugccagacccccaagggcgccaucaacaccagccugcccuuccagaacauccaccccaucaccaucggcaagugccccaaguacgugaagagcaccaagcugagacuggccaccggccugagaaacgugcccagcauccagagcagaggccuguucggcgccaucgccggcuucaucgagggcggcuggaccggcaugguggacggcugguacggcuaccaccaccagaacgagcagggcagcggcuacgccgccgaccugaagagcacccagaacgccaucgacaagaucaccaacaaggugaacagcgugaucgagaagaugaacacccaguucaccgccgugggcaaggaguucaaccaccuggagaagagaaucgagaaccugaacaagaagguggacgacggcuuccuggacaucuggaccuacaacgccgagcugcuggugcugcuggagaacgagagaacccuggacuaccacgacagcaacgugaagaaccuguacgagaaggugagaagccagcugaagaacaacgccaaggagaucggcaacggcugcuucgaguucuaccacaagugcgacaacaccugcauggagagcgugaagaacggcaccuacgacuaccccaaguacagcgaggaggccaagcugaacagagaggagaucgacggcgugaagcuggagagcaccagaaucuaccagauccuggccaucuacagcaccguggccagcagccuggugcugguggugagccugggcgccaucagcuucuggaugugcagcaacggcagccugcagugcagaaucugcaucuga

SEQ ID NO: 165098 - RNA, 1701 nt, Artificial Sequence
  derived and/or modified CDS sequence (opt4) from hemagglutinin__InfluenzaA__ADI24621
augaaggccauccugguggugcugcuguacaccuucgccaccgccaacgccgacacccugugcaucggcuaccacgccaacaacagcaccgacaccguggacaccgugcuggagaagaacgugaccgugacccacagcgugaaccugcuggaggacaagcacaacggcaagcugugcaagcugagaggcguggccccccugcaccugggcaagugcaacaucgccggcuggauccugggcaaccccgagugcgagagccugagcaccgccagcagcuggagcuacaucguggagaccagcagcagcgacaacggcaccugcuaccccggcgacuucaucgacuacgaggagcugagagagcagcugagcagcgugagcagcuucgagagauucgagaucuuccccaagaccagcagcuggcccaaccacgacagcaacaagggcgugaccgccgccugcccccacgccggcgccaagagcuucuacaagaaccugaucuggcuggugaagaagggcaacagcuaccccaagcugagcaagagcuacaucaacgacaagggcaaggaggugcuggugcuguggggcauccaccaccccagcaccagcgccgaccagcagagccuguaccagaacgccgacgccuacguguucgugggcaccagcagauacagcaagaaguucaagcccgagaucgccaucagacccaaggugagagaccaggagggcagaaugaacuacuacuggacccugguggagcccggcgacaagaucaccuucgaggccaccggcaaccugguggugcccagauacgccuucgccauggagagaaacgccggcagcggcaucaucaucagcgacacccccgugcacgacugcaacaccaccugccagacccccaagggcaccaucaacaccagccugcccuuccagaacauccaccccaucaccaucggcaagugccccaaguacgugaagagcaccaagcugagacuggccaccggccugagaaacgugcccagcauccagagcagaggccuguucggcgccaucgccggcuucaucgagggcggcuggaccggcaugguggacggcugguacggcuaccaccaccagaacgagcagggcagcggcuacgccgccgaccugaagagcacccagaacgccaucgacaagaucaccaacaaggugaacagcgugaucgagaagaugaacacccaguucaccgccgugggcaaggaguucaaccaccuggagaagagaaucgagaaccugaacaagaagguggacgacggcuuccuggacaucuggaccuacaacgccgagcugcuggugcugcuggagaacgagagaacccuggacuaccacgacagcaacgugaagaaccuguacgagaaggugagaagccagcugaagaacaacgccaaggagaucggcaacggcugcuucgaguucuaccacaagugcgacaacaccugcauggagagcgugaagaacggcaccuacgacuaccccaaguacagcgaggaggccaagcugaacagagaggagaucgacggcgugaagcuggagagcaccagaaucuaccagauccuggccaucuacagcaccguggccagcagccuggugcugaucgugagccugggcgccaucagcuucuggaugugcagcaacggcagccugcagugcagaaucugcaucuga

SEQ ID NO: 165099 - RNA, 1701 nt, Artificial Sequence
  derived and/or modified CDS sequence (opt4) from hemagglutinin__InfluenzaA__ADI48184
augaaggccauccugguggugcugcuguacaccuucgccaccgccaacgccgacacccugugcaucggcuaccacgccaacaacagcaccgacaccguggacaccgugcuggagaagaacgugaccgugacccacagcgugaaccugcuggaggacaagcacaacggcaagcugugcaagcugagaggcguggccccccugcaccugggcaagugcaacaucgccggcuggauccugggcaaccccgagugcgagagccugagcaccgccagcagcuggagcuacaucguggagaccagcagcagcgacaacggcaccugcuaccccggcgacuucaucgacuacgaggagcugagagagcagcugagcagcgugagcagcuucgagagauucgagaucuuccccaagaccagcagcuggcccaaccacgacagcaacaagggcgugaccgccgccugcccccacgccggcgccaagagcuucuacaagaaccugaucuggcuggugaagaagggcaacagcuaccccaagcugagcaagagcuacaucaacgacaagggcaaggaggugcuggugcuguggggcauccaccaccccagcaccagcgccgaccagcagagccuguaccagaacgccgacgccuacguguucgugggcaccagcagauacagcaagaaguucaagcccgagaucgccaucagacccaaggugagagaccaggagggcagaaugaacuacuacuggacccugguggagcccggcgacaagaucaccuucgaggccaccggcaaccugguggugcccagauacgccuucgccaugggcagaaacgccggcagcggcaucaucaucagcgacacccccgugcacgacugcaacaccaccugccagacccccaagggcgccaucaacaccagccugcccuuccagaacauccaccccaucaccaucggcaagugccccaaguacgugaagagcaccaagcugagacuggccaccggccugagaaacgugcccagcauccagagcagaggccuguucggcgccaucgccggcuucaucgagggcggcuggaccggcaugguggacggcugguacggcuaccaccaccagaacgagcagggcagcggcuacgccgccgaccugaagagcacccagaacgccaucgacaagaucaccaacaaggugaacagcgugaucgagaagaugaacacccaguucaccgccgugggcaaggaguucaaccaccuggagaagagaaucgagaaccugaacaagaagguggacgacggcuuccuggacaucuggaccuacaacgccgagcugcuggugcugcuggagaacgagagaacccuggacuaccacgacagcaacgugaagaaccuguacgagagagugagaagccagcugaagaacaacgccaaggagaucggcaacggcugcuucgaguucuaccacaagugcgacaacaccugcauggagagcgugaagaacggcaccuacgacuaccccaaguacagcgaggaggccaagcugaacagagaggagaucgacggcgugaagcuggagagcaccagaaucuaccagauccuggccaucuacagcaccguggccagcagccuggugcugguggugagccugggcgccaucagcuucuggaugugcagcaacggcagccugcagugcagaaucugcaucuga

SEQ ID NO: 165100 - RNA, 1701 nt, Artificial Sequence; identical to SEQ ID NO: 163893
  derived and/or modified CDS sequence (opt4) from hemagglutinin__InfluenzaA__ADI48186

SEQ ID NO: 165101 - RNA, 1701 nt, Artificial Sequence
  derived and/or modified CDS sequence (opt4) from hemagglutinin__InfluenzaA__ADI48188
augaaggccauccugguggugcugcuguacaccuucgccaccgccaacgccgacacccugugcaucggcuaccacgccaacaacagcaccgacaccguggacaccgugcuggagaagaacgugaccgugacccacagcgugaaccugcuggaggacaagcacaacggcaagcugugcaagcugagaggcguggccccccugcaccugggcaagugcaacaucgccggcuggauccugggcaaccccgagugcgagagccugagcaccgccagcagcuggagcuacaucguggagaccagcagcagcgacaacggcaccugcuaccccggcgacuucaucgacuacgaggagcugagagagcagcugagcagcgugagcagcuucgagagauucgagaucuuccccaagaccagcagcuggcccaaccacgacagcaacaagggcgugaccgccgccugcccccacgccggcgccaagagcuucuacaagaaccugaucuggcuggugaagaagggcaacagcuaccccaagcugagcaagagcuacaucaacgacaagggcaaggaggugcuggugcuguggggcauccaccaccccagcaccagcgccgaccagcagagccuguaccagaacgccgacgccuacguguucgugggcaccagcagauacagcaagaaguucaagcccgagaucgccaucagacccaaggugagagaccaggagggcagaaugaacuacuacuggacccugguggagcccggcgacaagaucaccuucgaggccaccggcaaccugguggugcccagauacgccuucgccauggagagaaacgccggcagcgacaucaucaucagcgacacccccgugcacgacugcaacaccaccugccagacccccaagggcgccaucaacaccagccugcccuuccagaacauccaccccaucaccaucggcaagugccccaaguacgugaagagcaccaagcugagacuggccaccggccugagaaacgugcccagcauccagagcagaggccuguucggcgccaucgccggcuucaucgagggcggcuggaccggcaugguggacggcugguacggcuaccaccaccagaacgagcagggcagcggcuacgccgccgaccugaagagcacccagaacgccaucgacaagaucaccaacaaggugaacagcgugaucgagaagaugaacacccaguucaccgccgugggcaaggaguucaaccaccuggagaagagaaucgagaaccugaacaagaagguggacgacggcuuccuggacaucuggaccuacaacgccgagcugcuggugcugcuggagaacgagagaacccuggacuaccacgacagcaacgugaagaaccuguacgagaaggugagaagccagcugaagaacaacgccaaggagaucggcaacggcugcuucgaguucuaccacaagugcgacaacaccugcauggagagcgugaagaacggcaccuacgacuaccccaaguacagcgaggaggccaagcugaacagagaggagaucgacggcgugaagcuggagagcaccagaaucuaccagauccuggccaucuacagcaccguggccagcagccuggugcugguggugagccugggcgccaucagcuucuggaugugcagcaacggcagccugcagugcagaaucugcaucuga

SEQ ID NO: 165102 - RNA, 1701 nt, Artificial Sequence
  derived and/or modified CDS sequence (opt4) from hemagglutinin__InfluenzaA__ADI48190
augaaggccauccugguggugcugcuguacaccuucgccaccgccaacgccgacacccugugcaucggcuaccacgccaacaacagcaccgacaccguggacaccgugcuggagaagaacgugaccgugacccacagcgugaaccugcuggaggacaagcacaacggcaagcugugcaagcugagaggcguggccccccugcaccugggcaagugcaacaucgccggcuggauccugggcaaccccgagugcgagagccugagcaccgccagcagcuggagcuacaucguggagaccagcagcagcgacaacggcaccugcuaccccggcgacuucaucgacuacgaggagcugagagagcagcugagcagcgugagcagcuucgagagauucgagaucuuccccaagaccagcagcuggcccaaccacgacagcaacaagggcgugaccgccgccugcccccacgccggcgccaagagcuucuacaagaaccugaucuggcuggugaagaagggcaacagcuaccccaagcugagcaagagcuacaucaacgacaagggcaaggaggugcuggugcuguggggcauccaccaccccagcaccagcgccgaccagcagagccuguaccagaacgccgacgccuacguguucgugggcaccagcagauacagcaagaaguucaagcccgagaucgccaucagacccaaggugagagaccaggagggcagaaugaacuacuacuggacccugguggagcccggcgacaagaucaccuucgaggccaccggcaaccugguggugcccagauacgccuucgccauggagagaaacgccggcagcggcaucaucaucagcgacacccccgugcacgacugcaacaccaccugccagacccccaagggcgccaucaacaccagccugcccuuccagaacauccaccccaucaccaucggcaagugccccaaguacgugaagagcaccaagcugagacuggccaccggccugagaaacgugcccagcauccagagcagaggccuguucggcgccaucgccggcuucaucgagggcggcuggaccggcaugguggacggcugguacggcuaccaccaccagaacgagcagggcagcggcuacgccgccgaccugaagagcacccagaacgccaucgacaagaucaccaacaaggugaacagcgugaucgagaagaugaacacccaguucaccgccgugggcaaggaguucaaccaccuggagaagagaaucgagaaccugaacaagaagguggacgacggcuuccuggacaucuggaccuacaacgccgagcugcuggugcugcuggagaacgagagaacccuggacuaccacgacagcaacgugaagaaccuguacgagaaggugagaagccagcugaagaacaacgccaaggagaucggcaacggcugcuucgaguucuaccacaagugcgacaacaccugcauggagagcgugaagaacggcaccuacgacuaccccaaguacagcgaggaggccaagcugaacagagaggagaucgacggcgugaagcuggagagcaccaagaucuaccagauccuggccaucuacagcaccguggccagcagccuggugcugguggugagccugggcgccaucagcuucuggaugugcagcaacggcagccugcagugcagaaucugcaucuga

SEQ ID NO: 165103 - RNA, 1701 nt, Artificial Sequence
  derived and/or modified CDS sequence (opt4) from hemagglutinin__InfluenzaA__ADI48192
augaaggccauccugguggugcugcuguacaccuucgccaccgccaacgccgacacccugugcaucggcuaccacgccaacaacagcaccgacaccguggacaccgugcuggagaagaacgugaccgugacccacagcgugaaccugcuggaggacaagcacaacggcaagcugugcaagcugagaggcguggccccccugcaccugggcaagugcaacaucgccggcuggauccugggcaaccccgagugcgagagccugagcaccgccagcagcuggagcuacaucguggagaccagcagcagcgacaacggcaccugcuaccccggcgacuucaucgacuacgaggagcugagagagcagcugagcagcgugagcagcuucgagagauucgagaucuuccccaagaccagcagcuggcccaaccacgacagcaacaagggcgugaccgccgccugcccccacgccggcgccaagagcuucuacaagaaccugaucuggcuggugaagaagggcaacagcuaccccaagcugagcaagagcuacaucaacgacaagggcaaggaggugcuggugcuguggggcauccaccaccccagcaccagcgccgaccagcagagccuguaccagaacgccgacgccuacguguucgugggcaccagcagauacagcaagaaguucaagcccgagaucgccaucagacccaaggugagagaccaggagggcagaaugaacuacuacuggacccugguggagcccggcgacaagaucaccuucgaggccaccggcaaccugguggugcccagauacgccuucgccauggagagaaacgccggcagcggcaucaucaucagcgacacccccgugcacgacugcaacaccaccugccagacccccaagggcgccaucaacaccagccugcccuuccagaacauccaccccaucaccaucggcaagugccccaaguacgugaagagcaccaagcugagacuggccaccggccugagaaacgugcccagcauccagagcagaggccuguucggcgccaucgccggcuucaucgagggcggcuggaccggcaugguggacggcugguacggcuaccaccaccagaacgagcagggcagcggcuacgccgccgaccugaagagcacccagaacgccaucgacaagaucaccaacaaggugaacagcgugaucgagaagaugaacacccaguucaccgccgugggcaaggaguucaaccaccuggagaagagaaucgagaaccugaacaagaagguggacgacggcuuccuggacaucuggaccuacaacgccgagcugcuggugcugcuggagaacgagagaacccuggacuaccacgacagcaacgugaagaaccuguacgagaaggugagaagccagcugaagaacaacgccaaggagaucggcaacggcugcuucgaguucuaccacaagugcgacaacaccugcauggagagcgugaagaacggcaccuacgacuaccccaaguacagcgaggaggccaagcugaacagagaggagaucgacggcgugaagcuggagagcaccagaaucuaccagauccugaccaucuacagcaccguggccagcagccuggugcugguggugagccugggcgccaucagcuucuggaugugcagcaacggcagccugcagugcagaaucugcaucuga

SEQ ID NO: 165104 - RNA, 1701 nt, Artificial Sequence
  derived and/or modified CDS sequence (opt4) from hemagglutinin__InfluenzaA__ADI48194
augaaggccauccugguggugcugcuguacaccuucgccaccgccaacgccgacacccugugcaucggcuaccacgccaacaacagcaccgacaccguggacaccgugcuggagaagaacgugaccgugacccacagcgugaaccugcuggaggacaagcacaacggcaagcugugcaagcugagaggcguggccccccugcaccugggcaagugcaacaucgccggcuggauccugggcaaccccgagugcgagagccugagcaccgccagcagcuggagcuacaucguggagaccagcagcagcgacaacggcaccugcuaccccggcgacuucaucgacuacgaggagcugagagagcagcugagccuggugagcagcuucgagagauucgagaucuuccccaagaccaacagcuggcccaaccacgacagcaacaagggcgugaccgccgccugcccccacgccggcgccaagagcuucuacaagaaccugaucuggcuggugaagaagggcaacagcuaccccaagcugagcaagagcuacaucaacgacaagggcaaggaggugcuggugcuguggggcauccaccaccccagcaccagcgccgaccagcagagccuguaccagaacgccgacgccuacguguucgugggcaccagcagauacagcaagaaguucaagcccgagaucgccaucagacccaaggugagagaccaggagggcagaaugaacuacuacuggacccugguggagcccggcgacaagaucaccuucgaggccaccggcaaccugguggugcccagauacgccuucgccauggagagaaacgccggcagcggcaucaucaucagcgacacccccgugcacgacugcaacaccaccugccagacccccaagggcgccaucaacaccagccugcccuuccagaacauccaccccaucaccaucggcaagugccccaaguacgugaagagcaccaagcugagacuggccaccggccugagaaacgugcccagcauccagagcagaggccuguucggcgccaucgccggcuucaucgagggcggcuggaccggcaugguggacggcugguacggcuaccaccaccagaacgagcagggcagcggcuacgccgccgaccugaagagcacccagaacgccaucgacaagaucaccaacaaggugaacagcgugaucgagaagaugaacacccaguucaccgccgugggcaaggaguucaaccaccuggagaagagaaucgagaaccugaacaagaagguggacgacggcuuccuggacaucuggaccuacaacgccgagcugcuggugcugcuggagaacgagagaacccuggacuaccacgacagcaacgugaagaaccuguacgagaaggugagaagccagcugaagaacaacgccaaggagaucggcaacggcugcuucgaguucuaccacaagugcgacaacaccugcauggagagcgugaagaacggcaccuacgacuaccccaaguacagcgaggaggccaagcugaacagagaggagaucgacggcgugaagcuggagagcaccagaaucuaccagauccuggccaucuacagcaccguggccagcagccuggugcugguggugagccugggcgccaucagcuucuggaugugcagcaacggcagccugcagugcagaaucugcaucuga

SEQ ID NO: 165105 - RNA, 1701 nt, Artificial Sequence
  derived and/or modified CDS sequence (opt4) from hemagglutinin__InfluenzaA__ADI48196
augaaggccauccugguggugcugcuguacaccuucgccaccgccaacgccgacacccugugcaucggcuaccacgccaacaacagcaccgacaccguggacaccgugcuggagaagaacgugaccgugacccacagcgugaaccugcuggaggacaagcacaacggcaagcugugcaagcugagaggcguggccccccugcaccugggcaagugcaacaucgccggcuggauccugggcaaccccgagugcgagagccugagcaccgccagcagcuggagcuacaucguggagaccagcagcagcgacaacggcaccugcuaccccggcgacuucaucgacuacgaggagcugagagagcagcugagcagcgugagcagcuucgagagauucgagaucuuccccaagaccagcagcuggcccaaccacgacagcaacaagggcgugaccgccgccugcccccacgccggcgccaagagcuucuacaagaaccugaucuggcuggugaagaagggcaacagcuaccccaagcugagcaagagcuacaucaacgacaagggcaaggaggugcuggugcuguggggcauccaccaccccagcaccagcgccgaccagcagagccuguaccagaacgccgacgccuacguguucgugggcaccagcagauacagcaagaaguucaagcccgagaucgccaucagacccaaggugagagaccaggagggcagaaugaacuacuacuggacccugguggagcccggcgacaagaucaccuucgaggccaccggcaaccugguggugcccagauacgccuucgccauggagagaaacgccggcagcggcaucaucaucagcgacacccccgugcacgacugcaacaccaccugccagacccccaagggcgccaucaacaccagccugcccuuccagaacauccaccccaucaccaucggcaagugccccaaguacgugaagagcaccaagcugagacuggccaccggccugagaaacgugcccagcauccagagcagaggccuguucggcgccaucgccggcuucaucgagggcggcuggaccggcaugguggacggcugguacggcuaccaccaccagaacgagcagggcagcggcuacgccgccgaccugaagagcacccagaacgccaucgacaagaucaccaacaaggugaacagcgugaucgagaagaugaacacccaguucaccgccgugggcaaggaguucaaccaccuggagaagagaaucgagaaccugaacaagaagguggacgacggcuuccuggacaucuggaccuacaacgccgagcugcuggugcugcuggagaacgagagaacccuggacuaccacgacagcaacgugaagaaccuguacgagaaggugagaagccagcugaagaacaacgccaaggagaucggcaacggcugcuucgaguucuaccacaagugcgacaacaccugcauggagagcgugaagaacggcaccuacgacuaccccaaguacagcgaggaggccaagcugaacagagaggagaucgacggcgugaagcuggacagcaccagaaucuaccagauccuggccaucuacagcaccguggccagcagccuggugcugguggugagccugggcgccaucagcuucuggaugugcagcaacggcagccugcagugcagaaucugcaucuga

SEQ ID NO: 165106 - RNA, 1701 nt, Artificial Sequence; identical to SEQ ID NO: 163893
  derived and/or modified CDS sequence (opt4) from hemagglutinin__InfluenzaA__ADI48198

SEQ ID NO: 165107 - RNA, 1701 nt, Artificial Sequence; identical to SEQ ID NO: 163893
  derived and/or modified CDS sequence (opt4) from hemagglutinin__InfluenzaA__ADI48200

SEQ ID NO: 165108 - RNA, 1701 nt, Artificial Sequence
  derived and/or modified CDS sequence (opt4) from hemagglutinin__InfluenzaA__ADI48202
augaaggccauccugguggugcugcuguacaccuucgccaccgccaacgccgacacccugugcaucggcuaccacgccaacaacagcaccgacaccguggacaccgugcuggagaagaacgugaccgugacccacagcgugaaccugcuggaggacaagcacaacggcaagcugugcaagcugagaggcguggccccccugcaccugggcaagugcaacaucgccggcuggauccugggcaaccccgagugcgagagccugagcaccgccagcagcuggagcuacaucguggagaccagcagcagcgacaacggcaccugcuaccccggcgacuucaucgacuacgaggagcugagagagcagcugagcagcgugagcagcuucgagagauucgagaucuuccccaagaucagcagcuggcccaaccacgacagcaacaagggcgugaccgccgccugcccccacgccggcgccaagagcuucuacaagaaccugaucuggcuggugaagaagggcaacagcuaccccaagcugagcaagagcuacaucaacgacaagggcaaggaggugcuggugcuguggggcauccaccaccccagcaccagcgccgaccagcagagccuguaccagaacgccgacgccuacguguucgugggcaccagcagauacagcaagaaguucaagcccgagaucgccaucagacccaaggugagagaccaggagggcagaaugaacuacuacuggacccugguggagcccggcgacaagaucaccuucgaggccaccggcaaccugguggugcccagauacgccuucgccauggagagaaacgccggcagcggcaucaucaucagcgacacccccgugcacgacugcaacaccaccugccagacccccaagggcgccaucaacaccagccugcccuuccagaacauccaccccaucaccaucggcaagugccccaaguacgugaagagcaccaagcugagacuggccaccggccugagaaacgugcccagcauccagagcagaggccuguucggcgccaucgccggcuucaucgagggcggcuggaccggcaugguggacggcugguacggcuaccaccaccagaacgagcagggcagcggcuacgccgccgaccugaagagcacccagaacgccaucgacaagaucaccaacaaggugaacagcgugaucgagaagaugaacacccaguucaccgccgugggcaaggaguucaaccaccuggagaagagaaucgagaaccugaacaagaagguggacgacggcuuccuggacaucuggaccuacaacgccgagcugcuggugcugcuggagaacgagagaacccuggacuaccacgacagcaacgugaagaaccuguacgagaaggugagaagccagcugaagaacaacgccaaggagaucggcaacggcugcuucgaguucuaccacaagugcgacaacaccugcauggagagcgugaagaacggcaccuacgacuaccccaaguacagcgaggaggccaagcugaacagagaggagaucgacggcgugaagcuggagagcaccagaaucuaccagauccuggccaucuacagcaccguggccagcagccuggugcugguggugagccugggcgccaucagcuucuggaugugcagcaacggcagccugcagugcagaaucugcaucuga

SEQ ID NO: 165109 - RNA, 1701 nt, Artificial Sequence
  derived and/or modified CDS sequence (opt4) from hemagglutinin__InfluenzaA__ADI48204
augaaggccauccugguggugcugcuguacaccuucgccaccgccaacgccgacacccugugcaucggcuaccacgccaacaacagcaccgacaccguggacaccgugcuggagaagaacgugaccgugacccacagcgugaaccugcuggaggacaagcacaacggcaagcugugcaagcugagaggcguggccccccugcaccugggcaagugcaacaucgccggcuggauccugggcaaccccgagugcgagagccugagcaccgccagcagcuggagcuacaucguggagaccagcagcagcgacaacggcaccugcuaccccggcgacuucaucgacuacgaggagcugagagagcagcugagcagcgugagcagcuucgagagauucgagaucuuccccaagaccagcagcuggcccaaccacgacagcaacaagggcgugaccgccgccugcccccacgccggcgccaagagcuucuacaagaaccugaucuggcuggugaagaagggcaacagcuaccccaagcugagcaagagcuacaucaacgacaagggcaaggaggugcuggugcuguggggcauccaccaccccagcaccagcgccgaccagcagagccuguaccagaacguggacgccuacguguucgugggcaccagcagauacagcaagaaguucaagcccgagaucgccaucagacccaaggugagagaccaggagggcagaaugaacuacuacuggacccugguggagcccggcgacaagaucaccuucgaggccaccggcaaccugguggugcccagauacgccuucgccauggagagaaacgccggcagcggcaucaucaucagcgacacccccgugcacgacugcaacaccaccugccagacccccaagggcgccaucaacaccagccugcccuuccagaacauccaccccaucaccaucggcaagugccccaaguacgugaagagcaccaagcugagacuggccaccggccugagaaacgugcccagcauccagagcagaggccuguucggcgccaucgccggcuucaucgagggcggcuggaccggcaugguggacggcugguacggcuaccaccaccagaacgagcagggcagcggcuacgccgccgaccugaagagcacccagaacgccaucgacaagaucaccaagaaggugaacagcgugaucgagaagaugaacacccaguucaccgccgugggcaaggaguucaaccaccuggagaagagaaucgagaaccugaacaagaagguggacgacggcuuccuggacaucuggaccuacaacgccgagcugcuggugcugcuggagaacgagagaacccuggacuaccacgacagcaacgugaagaaccuguacgagaaggugagaagccagcugaagaacaacgccaaggagaucggcaacggcugcuucgaguucuaccacaagugcgacaacaccugcauggagagcgugaagaacggcaccuacgacuaccccaaguacagcgaggaggccaagcugaacagagaggagaucgacggcgugaagcuggagagcaccagaaucuaccagauccuggccaucuacagcaccguggccagcagccuggugcugguggugagccugggcgccaucagcuucuggaugugcagcaacggcagccugcagugcagaaucugcaucuga

SEQ ID NO: 165110 - RNA, 1701 nt, Artificial Sequence; identical to SEQ ID NO: 163893
  derived and/or modified CDS sequence (opt4) from hemagglutinin__InfluenzaA__ADI48208

SEQ ID NO: 165111 - RNA, 1701 nt, Artificial Sequence; identical to SEQ ID NO: 163893
  derived and/or modified CDS sequence (opt4) from hemagglutinin__InfluenzaA__ADI48210

SEQ ID NO: 165112 - RNA, 1701 nt, Artificial Sequence
  derived and/or modified CDS sequence (opt4) from hemagglutinin__InfluenzaA__ADI48212
augaaggccauccugguggugcugcuguacaccuucgccaccgccaacgccgacacccugugcaucggcuaccacgccaacaacagcaccgacaccguggacaccgugcuggagaagaacgugaccgugacccacagcgugaaccugcuggaggacaagcacaacggcaagcugugcaagcugagaggcguggccccccugcaccugggcaagugcaacaucgccggcuggauccugggcaaccccgagugcgagagccugagcaccgccagcagcuggagcuacaucguggagaccagcagcagcgacaacggcaccugcuaccccggcgacuucaucgacuacgaggagcugagagagcagcugagcagcgugagcagcuucgagagauucgagaucuuccccaagaccagcagcuggcccaaccacgacagcaacaagggcgugaccgccgccugcccccacgccggcgccaagagcuucuacaagaaccugaucuggcuggugaagaagggcaacagcuaccccaagcugagcaagagcuacaucaacgacaagggcaaggaggugcuggugcuguggggcauccaccaccccagcaccagcgccgaccagcagagccuguaccagaacgccgacgccuacguguucgugggcaccagcagauacagcaagaaguucaagcccgagaucgccaucagacccaaggugagagaccaggagggcagaaugaacuacuacuggacccugguggagcccggcgacaagaucaccuucgaggccaccggcaaccugguggugcccagauacgccuucgccauggagagaaacgccggcagcggcaucaucaucagcgacacccccgugcacgacugcaacaccaccugccagacccccaagggcgccaucaacaccagccugcccuuccagaacauccaccccaucaccaucggcaagugccccaaguacgugaagagcaccaagcugagacuggccaccggccugagaaacgugcccagcauccagagcagaggccuguucggcgccaucgccggcuucaucgagggcggcuggaccggcaugguggacggcugguacggcuaccaccaccagaacgagcagggcagcggcuacgccgccgaccugaagagcacccagaacgccaucgacaagaucaccaacaaggugaacagcgugaucgagaagaugaacacccaguucaccgccgugggcaaggaguucaaccaccuggagaagagaaucgagaaccugaacaagaagguggacgacggcuuccuggacguguggaccuacaacgccgagcugcuggugcugcuggagaacgagagaacccuggacuaccacgacagcaacgugaagaaccuguacgagaaggugagaagccagcugaagaacaacgccaaggagaucggcaacggcugcuucgaguucuaccacaagugcgacaacaccugcauggagagcgugaagaacggcaccuacgacuaccccaaguacagcgaggaggccaagcugaacagagaggagaucgacggcgugaagcuggagagcaccagaaucuaccagauccuggccaucuacagcaccguggccagcagccuggugcugguggugagccugggcgccaucagcuucuggaugugcagcaacggcagccugcagugcagaaucugcaucuga

SEQ ID NO: 165113 - RNA, 1701 nt, Artificial Sequence
  derived and/or modified CDS sequence (opt4) from hemagglutinin__InfluenzaA__ADI48214
augaaggccauccugguggugcugcuguacaccuucgccaucgccaacgccgacacccugugcaucggcuaccacgccaacaacagcaccgacaccguggacaccgugcuggagaagaacgugaccgugacccacagcgugaaccugcuggaggacaagcacaacggcaagcugugcaagcugagaggcguggccccccugcaccugggcaagugcaacaucgccggcuggauccugggcaaccccgagugcgagagccugagcaccgccagcagcuggagcuacaucguggagaccagcagcagcgacaacggcaccugcuaccccggcgacuucaucgacuacgaggagcugagagagcagcugagcagcgugagcagcuucgagagauucgagaucuuccccaagaccagcagcuggcccaaccacgacagcaacaagggcgugaccgccgccugcccccacgccggcgccaagagcuucuacaagaaccugaucuggcuggugaagaagggcaacagcuaccccaagcugagcaagagcuacaucaacgacaagggcaaggaggugcuggugcuguggggcauccaccaccccagcaccagcgccgaccagcagagccuguaccagaacgccgacgccuacguguucgugggcaccagcagauacagcaagaaguucaagcccgagaucgccaucagacccaaggugagagaccaggagggcagaaugaacuacuacuggacccugguggagcccggcgacaagaucaccuucgaggccaccggcaaccugguggugcccagauacgccuucgccauggagagaaacgccggcagcggcaucaucaucagcgacacccccgugcacgacugcaacaccaccugccagacccccaagggcgccaucaacaccagccugcccuuccagaacauccaccccaucaccaucggcaagugccccaaguacgugaagagcaccaagcugagacuggccaccggccugagaaacgugcccagcauccagagcagaggccuguucggcgccaucgccggcuucaucgagggcggcuggaccggcaugguggacggcugguacggcuaccaccaccagaacgagcagggcagcggcuacgccgccgaccugaagagcacccagaacgccaucgacaagaucaccaacaaggugaacagcgugaucgagaagaugaacacccaguucaccgccgugggcaaggaguucaaccaccuggagaagagaaucgagaaccugaacaagaagguggacgacggcuuccuggacaucuggaccuacaacgccgagcugcuggugcugcuggagaacgagagaacccuggacuaccacgacagcaacgugaagaaccuguacgagaaggugagaagccagcugaagaacaacgccaaggagaucggcaacggcugcuucgaguucuaccacaagugcgacaacaccugcauggagagcgugaagaacggcaccuacgacuaccccaaguacagcgaggaggccaagcugaacagagaggagaucgacggcgugaagcuggagagcaccagaaucuaccagauccuggccaucuacagcaccguggccagcagccuggugcuggccgugagccugggcgccaucagcuucuggaugugcagcaacggcagccugcagugcagaaucugcaucuga

SEQ ID NO: 165114 - RNA, 1701 nt, Artificial Sequence; identical to SEQ ID NO: 165112
  derived and/or modified CDS sequence (opt4) from hemagglutinin__InfluenzaA__ADI48216

SEQ ID NO: 165115 - RNA, 1701 nt, Artificial Sequence
  derived and/or modified CDS sequence (opt4) from hemagglutinin__InfluenzaA__ADI48218
augaaggccauccugguggugcugcuguacaccuucgccaccgccaacgccgacacccugugcaucggcuaccacgccaacaacagcaccgacaccguggacaccgugcuggagaagaacgugaccgugacccacagcgugaaccugcuggaggacaagcacaacggcaagcugugcaagcugagaggcguggccccccugcaccugggcaagugcaacaucgccggcuggauccugggcaaccccgagugcgagagccugagcaccgccagcagcuggagcuacaucguggagaccagcagcagcgacaacggcaccugcuaccccggcgacuucaucgacuacgaggagcugagagagcagcugagcagcgugagcagcuucgagagauucgagaucuuccccaagaccagcagcuggcccaaccacgacagcaacaagggcgugaccgccgccugcccccacgccggcgccaagagcuucuacaagaaccugaucuggcuggugaagaagggcaacagcuaccccaagcugagcaagagcuacaucaacgacaagggcaaggaggugcuggugcuguggggcauccaccaccccagcaccagcgccgaccagcagagccuguaccagaacgccgacgccuacguguucgugggcaccagcagauacagcaagaaguucaagcccgagaucgccaucagacccaaggugagagaccaggagggcagaaugaacuacuacuggacccugguggagcccggcgacaagaucaccuucgaggccaccggcaaccugguggugcccagauacgccuucgccauggagagaaacgccggcagcggcaucaucaucagcgacacccccgugcacgacugcaacaccaccugccagacccccaagggcgccaucaacaccagccugcccuuccagaacauccaccccaucaccaucggcaagugccccaaguacgugaagagcaccaagcugagacuggccaccggccugagaaacgugcccagcauccagagcagaggccuguucggcgccaucgccggcuucaucgagggcggcuggaccggcaugguggacggcugguacggcuaccaccaccagaacgagcagggcagcggcuacgccgccgaccugaagagcacccagaacgccaucgacaagaucaccaacaaggugaacagcgugaucgagaagaugaacacccaguucaccgccgugggcaaggaguucaaccaccuggagaagagaaucgagaaccugaacaagaagguggacgacggcuuccuggacaucuggaccuacaacgccgagcugcuggugcugcuggagaacgagagaacccuggacuaccaggacagcaacgugaagaaccuguacgagaaggugagaagccagcugaagaacaacgccaaggagaucggcaacggcugcuucgaguucuaccacaagugcgacaacaccugcauggagagcgugaagaacggcaccuacgacuaccccaaguacagcgaggaggccaagcugaacagagaggagaucgacggcgugaagcuggagagcaccagaaucuaccagauccuggccaucuacagcaccguggccagcagccuggugcugguggugagccugggcgccaucagcuucuggaugugcagcaacggcagccugcagugcagaaucugcaucuga

SEQ ID NO: 165116 - RNA, 1701 nt, Artificial Sequence
  derived and/or modified CDS sequence (opt4) from hemagglutinin__InfluenzaA__ADI48220
augaaggccauccugguggugcugcuguacaccuucgccaccgccaacgccgacacccugugcaucggcuaccacgccaacaacagcaccgacaccguggacaccgugcuggagaagaacgugaccgugacccacagcgugaaccugcuggaggacaagcacaacggcaagcugugcaagcugagaggcguggccccccugcaccugggcaagugcaacaucgccggcuggauccugggcaaccccgagugcgagagccugagcaccgccagcagcuggagcuacaucguggagaccagcagcagcgacaacggcaccugcuaccccggcgacuucaucgacuacgaggagcugagagagcagcugagcagcgugagcagcuucgagagauucgagaucuuccccaagaccagcagcuggcccaaccacgacagcaacaagggcgugaccgccgccugcccccacgccggcgccaagagcuucuacaagaaccugaucuggcuggugaagaagggcaacagcuaccccaagcugagcaagagcuacaucaacgacaagggcaaggaggugcuggugcuguggggcauccaccaccccagcaccagcgccgaccagcagagccuguaccagaacgccgacgccuacguguucgugggcaccagcagauacagcaagaaguucaagcccgagaucgccaucagacccaaggugagagaccaggagggcagaaugaacuacuacuggacccugguggagcccggcgacaagaucaccuucgagaccaccggcaaccugguggugcccagauacgccuucgccauggagagaaacgccggcagcggcaucaucaucagcgacacccccgugcacgacugcaacaccaccugccagacccccaagggcgccaucaacaccagccugcccuuccagaacauccaccccaucaccaucggcaagugccccaaguacgugaagagcaccaagcugagacuggccaccggccugagaaacgugcccagcauccagagcagaggccuguucggcgccaucgccggcuucaucgagggcggcuggaccggcaugguggacggcugguacggcuaccaccaccagaacgagcagggcagcggcuacgccgccgaccugaagagcacccagaacgccaucgacaagaucaccaacaaggugaacagcgugaucgagaagaugaacacccaguucaccgccgugggcaaggaguucaaccaccuggagaagagaaucgagaaccugaacaagaagguggacgacggcuuccuggacaucuggaccuacaacgccgagcugcuggugcugcuggagaacgagagaacccugggcuaccacgacagcaacgugaagaaccuguacgagaaggugagaagccagcugaagaacaacgccaaggagaucggcaacggcugcuucgaguucuaccacaagugcgacaacaccugcauggagagcgugaagaacggcaccuacgacuaccccaaguacagcgaggaggccaagcugaacagagaggagaucgacggcgugaagcuggagagcaccagaaucuaccagauccuggccaucuacagcaccguggccagcagccuggugcugguggugagccugggcgccaucagcuucuggaugugcagcaacggcagccugcagugcagaaucugcaucuga

SEQ ID NO: 165117 - RNA, 1701 nt, Artificial Sequence
  derived and/or modified CDS sequence (opt4) from hemagglutinin__InfluenzaA__ADI48622
augaaggccauccugguguuccugcuguacaccuucgccaccgccaacgccgacacccugugcaucggcuaccacgccaacaacagcaccgacaccguggacaccgugcuggagaagaacgugaccgugacccacagcgugaaccugcuggaggacaagcacaacggcaagcugugcaagcugagaggcguggccccccugcaccugggcaagugcaacaucgccggcuggauccugggcaaccccgagugcgagagccugagcaccgccagcagcuggagcuacaucguggagaccagcagcagcgacaacggcaccugcuaccccggcgacuucaucgacuacgaggagcugagagagcagcugagcagcgugagcagcuucgagagauucgagaucuuccccaagaccagcagcuggcccaaccacgacagcaacaagggcgugaccgccgccugcccccacgccggcgccaagagcuucuacaagaaccugaucuggcuggugaagaagggcaacagcuaccccaagcugagcaagagcuacaucaacgacaagggcaaggaggugcuggugcuguggggcauccaccaccccagcaccagcgccgaccagcagagccuguaccagaacgccgacgccuacguguucgugggcaccagcagauacagcaagaaguucaagcccgagaucgccaucagacccaaggugagagaccaggagggcagaaugaacuacuacuggacccugguggagcccggcgacaagaucaccuucgaggccaccggcaaccugguggugcccagauacgccuucgccauggagagaaacgccggcagcggcaucaucaucagcgacacccccgugcacgacugcaacaccaccugccagacccccaagggcgccaucaacaccagccugcccuuccagaacauccaccccaucaccaucggcaagugccccaaguacgugaagagcaccaagcugagacuggccaccggccugagaaacgugcccagcauccagagcagaggccuguucggcgccaucgccggcuucaucgagggcggcuggaccggcaugguggacggcugguacggcuaccaccaccagaacgagcagggcagcggcuacgccgccgaccugaagagcacccagaacgccaucgacgagaucaccaacaaggugaacagcgugaucgagaagaugaacacccaguucaccgccgugggcaaggaguucaaccaccuggagaagagaaucgagaaccugaacaagaagguggacgacggcuuccuggacaucuggaccuacaacgccgagcugcuggugcugcuggagaacgagagaacccuggacuaccacgacagcaacgugaagaaccuguacgagaaggugagaagccagcugaagaacaacgccaaggagaucggcaacggcugcuucgaguucuaccacaagugcgacaacaccugcauggagagcgugaagaacggcaccuacgacuaccccaaguacagcgaggaggccaagcugaacagagaggagaucgacggcgugaagcuggagagcaccagaaucuaccagauccuggccaucuacagcaccguggccagcagccuggugcugguggugagccugggcgccaucagcuucuggaugugcagcaacggcagccugcagugcagaaucugcaucuga

SEQ ID NO: 165118 - RNA, 1701 nt, Artificial Sequence
  derived and/or modified CDS sequence (opt4) from hemagglutinin__InfluenzaA__ADI48632
auggaggccauccugguggugcugcuguacaccuucgccaccgccaacgccgacacccugugcaucggcuaccacgccaacaacagcaccgacaccguggacaccgugcuggagaagaacgugaccgugacccacagcgugaaccugcuggaggacaagcacaacggcaagcugugcaagcugagaggcguggccccccugcaccugggcaagugcaacaucgccggcuggauccugggcaaccccgagugcgagagccugagcaccgccagcagcuggagcuacaucguggagaccagcagcagcgacaacggcaccugcuaccccggcgacuucaucgacuacgaggagcugagagagcagcugagcagcgugagcagcuucgagagauucgagaucuuccccaagaccagcagcuggcccaaccacgacagcaacaagggcgugaccgccgccugcccccacgccggcgccaagagcuucuacaagaaccugaucuggcuggugaagaagggcaacagcuaccccaagcugagcaagagcuacaucaacgacaagggcaaggaggugcuggugcuguggggcgugcaccaccccagcaccagcgccgaccagcagagccuguaccagaacgccgacgccuacguguucgugggcagcagcagauacagcaagaaguucaagcccgagaucgccaucagacccaaggugagagaccaggagggcagaaugaacuacuacuggacccugguggagcccggcgacaagaucaccuucgaggccaccggcaaccugguggugcccagauacgccuucgccauggagagaaacgccggcagcggcaucaucaucagcgacacccccgugcacgacugcaacaccaccugccagacccccaagggcgccaucaacaccagccugcccuuccacaacauccaccccaucaccaucggcaagugccccaaguacgugaagagcaccaagcugagacuggccaccggccugagaaacgugcccagcauccagagcagaggccuguucggcgccaucgccggcuucaucgagggcggcuggaccggcaugguggacggcugguacggcuaccaccaccagaacgagcagggcagcggcuacgccgccgaccugaagagcacccagaacgccaucgacgagaucaccaacaaggugaacagcgugaucgagaagaugaacacccaguucaccgccgugggcaaggaguucaaccaccuggagaagagaaucgagaaccugaacaagaagguggacgacggcuuccuggacaucuggaccuacaacgccgagcugcuggugcugcuggagaacgagagaacccuggacuaccacgacagcaacgugaagaaccuguacgagaaggugagaagccagcugaagaacaacgccaaggagaucggcaacggcugcuucgaguucuaccacaagugcgacaacaccugcauggagagcgugaagaacggcaccuacgacuaccccaaguacagcgaggaggccaagcugaacagagaggagaucgacggcgugaagcuggagagcaccagaaucuaccagauccuggccaucuacagcaccguggccagcagccuggugcugguggugagccugggcgccaucagcuucuggaugugcagcaacggcagccugcagugcagaaucugcaucuga

SEQ ID NO: 165119 - RNA, 1701 nt, Artificial Sequence; identical to SEQ ID NO: 162971
  derived and/or modified CDS sequence (opt4) from hemagglutinin__InfluenzaA__ADI48642

SEQ ID NO: 165120 - RNA, 1701 nt, Artificial Sequence; identical to SEQ ID NO: 162971
  derived and/or modified CDS sequence (opt4) from hemagglutinin__InfluenzaA__ADI48652

SEQ ID NO: 165121 - RNA, 1701 nt, Artificial Sequence
  derived and/or modified CDS sequence (opt4) from hemagglutinin__InfluenzaA__ADI48672
auggaggccauccugguggugcugcuguacaccuucgccaccgccaacgccgacacccugugcaucggcuaccacgccaacaacagcaccgacaccguggacaccgugcuggagaagaacgugaccgugacccacagcgugaaccugcuggaggacaagcacaacggcaagcugugcaagcugagaggcguggccccccugcaccugggcaagugcaacaucgccggcuggauccugggcaaccccgagugcgagagccugagcaccgccagcagcuggagcuacaucguggagaccagcagcagcgacaacggcaccugcuaccccggcgacuucaucgacuacgaggagcugagagagcagcugagcagcgugagcagcuucgagagauucgagaucuuccccaagaccagcagcuggcccaaccacgacagcaacaagggcgugaccgccgccugcccccacgccggcgccaagagcuucuacaacaaccugaucuggcuggugaagaagggcaacagcuaccccaagcugagcaagagcuacaucaacgacaagggcaaggaggugcuggugcuguggggcauccaccaccccagcaccagcgccgaccagcagagccuguaccagaacgccgacgccuacguguucgugggcagcagcagauacagcaagaaguucaagcccgagaucgccaucagacccaaggugagagaccaggagggcagaaugaacuacuacuggacccugguggagcccggcgacaagaucaccuucgaggccaccggcaaccugguggugcccagauacgccuucgccauggagagaaacgccggcagcggcaucaucaucagcgacacccccgugcacgacugcaacaccaccugccagacccccaagggcgccaucaacaccagccugcccuuccacaacauccaccccaucaccaucggcaagugccccaaguacgugaagagcaccaagcugagacuggccaccggccugagaaacgugcccagcauccagagcagaggccuguucggcgccaucgccggcuucaucgagggcggcuggaccggcaugguggacggcugguacggcuaccaccaccagaacgagcagggcagcggcuacgccgccgaccugaagagcacccagaacgccaucgacgagaucaccaacaaggugaacagcgugaucgagaagaugaacacccaguucaccgccgugggcaaggaguucaaccaccuggagaagagaaucgagaaccugaacaagaagguggacgacggcuuccuggacaucuggaccuacaacgccgagcugcuggugcugcuggagaacgagagaacccuggacuaccacgacagcaacgugaagaaccuguacgagaaggugagaagccagcugaagaacaacgccaaggagaucggcaacggcugcuucgaguucuaccacaagugcgacaacaccugcauggagagcgugaagaacggcaccuacgacuaccccaaguacagcgaggaggccaagcugaacagagaggagaucgacggcgugaagcuggagagcaccagaaucuaccagauccuggccaucuacagcaccguggccagcagccuggugcugguggugagccugggcgccaucagcuucuggaugugcagcaacggcagccugcagugcagaaucugcaucuga

SEQ ID NO: 165122 - RNA, 1701 nt, Artificial Sequence; identical to SEQ ID NO: 162729
  derived and/or modified CDS sequence (opt4) from hemagglutinin__InfluenzaA__ADI48682

SEQ ID NO: 165123 - RNA, 1701 nt, Artificial Sequence; identical to SEQ ID NO: 162971
  derived and/or modified CDS sequence (opt4) from hemagglutinin__InfluenzaA__ADI48692

SEQ ID NO: 165124 - RNA, 1701 nt, Artificial Sequence; identical to SEQ ID NO: 162909
  derived and/or modified CDS sequence (opt4) from hemagglutinin__InfluenzaA__ADI48702

SEQ ID NO: 165125 - RNA, 1701 nt, Artificial Sequence; identical to SEQ ID NO: 162971
  derived and/or modified CDS sequence (opt4) from hemagglutinin__InfluenzaA__ADI48712

SEQ ID NO: 165126 - RNA, 1701 nt, Artificial Sequence; identical to SEQ ID NO: 162971
  derived and/or modified CDS sequence (opt4) from hemagglutinin__InfluenzaA__ADI48722

SEQ ID NO: 165127 - RNA, 1701 nt, Artificial Sequence; identical to SEQ ID NO: 162729
  derived and/or modified CDS sequence (opt4) from hemagglutinin__InfluenzaA__ADI48732

SEQ ID NO: 165128 - RNA, 1701 nt, Artificial Sequence; identical to SEQ ID NO: 162729
  derived and/or modified CDS sequence (opt4) from hemagglutinin__InfluenzaA__ADI48742

SEQ ID NO: 165129 - RNA, 1701 nt, Artificial Sequence
  derived and/or modified CDS sequence (opt4) from hemagglutinin__InfluenzaA__ADI48752
auggaggccauccugguguuccugcuguacaccuucgccaccgccaacgccgacacccugugcaucggcuaccacgccaacaacagcaccgacaccguggacaccgugcuggagaagaacgugaccgugacccacagcgugaaccugcuggaggacaagcacaacggcaagcugugcaagcugagaggcguggccccccugcaccugggcaagugcaacaucgccggcuggauccugggcaaccccgagugcgagagccugagcaccgccagcagcuggagcuacaucguggagaccagcagcagcgacaacggcaccugcuaccccggcgacuucaucgacuacgaggagcugagagagcagcugagcagcgugagcagcuucgagagauucgagaucuuccccaagaccagcagcuggcccaaccacgacagcaacaagggcaucaccgccgccugcccccacgccggcgccaagagcuucuacaagaaccugaucuggcuggugaagaagggcaacagcuaccccaagcugagcaagagcuacaucaacgacaagggcaaggaggugcuggugcuguggggcauccaccaccccagcaccagcgccgaccagcagagccuguaccagaacgccgacgccuacguguucgugggcagcagcagauacagcaagaaguucaagcccgagaucgccaucagacccaaggugagagaccaggagggcagaaugaacuacuacuggacccugguggagcccggcgacaagaucaccuucgaggccaccggcaaccugguggugcccagauacgccuucgccauggagagaaacgccggcagcggcaucaucaucagcgacacccccgugcacgacugcaacaccaccugccagacccccaagggcgccaucaacaccagccugcccuuccacaacauccaccccaucaccaucggcaagugccccaaguacgugaagagcaccaagcugagacuggccaccggccugagaaacgugcccagcauccagagcagaggccuguucggcgccaucgccggcuucaucgagggcggcuggaccggcaugguggacggcugguacggcuaccaccaccagaacgagcagggcagcggcuacgccgccgaccugaagagcacccagaacgccaucgacgagaucaccaacaaggugaacagcgugaucgagaagaugaacacccaguucaccgccgugggcaaggaguucaaccaccuggagaagagaaucgagaaccugaacaagaagguggacgacggcuuccuggacaucuggaccuacaacgccgagcugcuggugcugcuggagaacgagagaacccuggacuaccacgacagcaacgugaagaaccuguacgagaaggugagaagccagcugaagaacaacgccaaggagaucggcaacggcugcuucgaguucuaccacaagugcgacaacaccugcauggagagcgugaagaacggcaccuacgacuaccccaaguacagcgaggaggccaagcugaacagagaggagaucgacggcgugaagcuggagagcaccagaaucuaccagauccuggccaucuacagcaccguggccagcagccuggugcugguggugagccugggcgccaucagcuucuggaugugcagcaacggcagccugcagugcagaaucugcaucuga

SEQ ID NO: 165130 - RNA, 1701 nt, Artificial Sequence; identical to SEQ ID NO: 162971
  derived and/or modified CDS sequence (opt4) from hemagglutinin__InfluenzaA__ADI48762

SEQ ID NO: 165131 - RNA, 1701 nt, Artificial Sequence
  derived and/or modified CDS sequence (opt4) from hemagglutinin__InfluenzaA__ADI48772
auggaggccauccugguggugcugcuguacaccuucgccaccgccaacgccgacacccugugcaucggcuaccaggccaacaacagcaccgacaccguggacaccgugcuggagaagaacgugaccgugacccacagcgugaaccugcuggaggacaagcacaacggcaagcugugcaagcugagaggcguggccccccugcaccugggcaagugcaacaucgccggcuggauccugggcaaccccgagugcgagagccugagcaccgccagcagcuggagcuacaucguggagaccagcagcagcgacaacggcaccugcuaccccggcgacuucaucgacuacgaggagcugagagagcagcugagcagcgugagcagcuucgagagauucgagaucuuccccaagaccagcagcuggcccaaccacgacagcaacaagggcgugaccgccgccugcccccacgccggcgccaagagcuucuacaagaaccugaucuggcuggugaagaagggcaacagcuaccccaagcugagcaagagcuacaucaacgacaagggcaaggaggugcuggugcuguggggcauccaccaccccagcaccagcgccgaccagcagagccuguaccagaacgccgacgccuacguguucgugggcagcagcagauacagcaagaaguucaagcccgagaucgccaucagacccaaggugagagaccaggagggcagaaugaacuacuacuggacccugguggagcccggcgacaagaucaccuucgaggccaccggcaaccugguggugcccagauacgccuucgccauggagagaaacgccggcagcggcaucaucaucagcgacacccccgugcacgacugcaacaccaccugccagacccccaagggcgccaucaacaccagccugcccuuccacaacauccaccccaucaccaucggcaagugccccaaguacgugaagagcaccaagcugagacuggccaccggccugagaaacgugcccagcauccagagcagaggccuguucggcgccaucgccggcuucaucgagggcggcuggaccggcaugguggacggcugguacggcuaccaccaccagaacgagcagggcagcggcuacgccgccgaccugaagagcacccagaacgccaucgacgagaucaccaacaaggugaacagcgugaucgagaagaugaacacccaguucaccgccgugggcaaggaguucaaccaccuggagaagagaaucgagaaccugaacaagaagguggacgacggcuuccuggacaucuggaccuacaacgccgagcugcuggugcugcuggagaacgagagaacccuggacuaccacgacagcaacgugaagaaccuguacgagaaggugagaagccagcugaagaacaacgccaaggagaucggcaacggcugcuucgaguucuaccacaagugcgacaacaccugcauggagagcgugaagaacggcaccuacgacuaccccaaguacagcgaggaggccaagcugaacagagaggagaucgacggcgugaagcuggagagcaccagaaucuaccagauccuggccaucuacagcaccguggccagcagccuggugcugguggugagccugggcgccaucagcuucuggaugugcagcaacggcagccugcagugcagaaucugcaucuga
